United States Patent Application Publication US 2026/0209739 A1 - sequence listing, part 3

SEQ ID NO: 37243 - RNA, 30 nt, synthetic construct
  misc_feature 1..30: note = SH3KBP1-binding protein 1 (437-446)
  source 1..30: mol_type = other RNA
atgctgagcgagaagcacctcatctccgtg

SEQ ID NO: 37244 - RNA, 27 nt, synthetic construct
  misc_feature 1..27: note = BRCA1-A complex subunit BRE (13-21)
  source 1..27: mol_type = other RNA
atgctgagccccttcatctccagcgtg

SEQ ID NO: 37245 - RNA, 27 nt, synthetic construct
  misc_feature 1..27: note = Nesprin-2 (4298-4306)
  source 1..27: mol_type = other RNA
atgctgaccgagatcgagcacaaggtg

SEQ ID NO: 37246 - RNA, 27 nt, synthetic construct
  misc_feature 1..27: note = T-complex protein 1 subunit eta (97-105)
  source 1..27: mol_type = other RNA
atgatgctggacgacctcctgcagctg

SEQ ID NO: 37247 - RNA, 27 nt, synthetic construct
  misc_feature 1..27: note = ATP-dependent RNA helicase DDX18 (187-195)
  source 1..27: mol_type = other RNA
atgccccgcaacggcaccggggtgctg

SEQ ID NO: 37248 - RNA, 33 nt, synthetic construct
  misc_feature 1..33: note = Abhydrolase domain-containing protein 2 (301-311)
  source 1..33: mol_type = other RNA
atgcagatcgacgacaacgtgatgcgcaagttc

SEQ ID NO: 37249 - RNA, 27 nt, synthetic construct
  misc_feature 1..27: note = Bifunctional glutamate/proline-tRNA ligase (589-597)
  source 1..27: mol_type = other RNA
aacgccgacggcaagatcatcagcctg

SEQ ID NO: 37250 - RNA, 27 nt, synthetic construct
  misc_feature 1..27: note = HEAT repeat-containing protein 1 (1568-1576)
  source 1..27: mol_type = other RNA
aacgccgacaagctgaccgtgaagttc

SEQ ID NO: 37251 - RNA, 24 nt, synthetic construct
  misc_feature 1..24: note = Eukaryotic translation initiation factor 3 subunit C-like protein (434-441)
  source 1..24: mol_type = other RNA
aacgccgaccagcccctgcgcgtg

SEQ ID NO: 37252 - RNA, 27 nt, synthetic construct
  misc_feature 1..27: note = Inner centromere protein (178-186)
  source 1..27: mol_type = other RNA
aacgccgagcagcacgtgacccagctg

SEQ ID NO: 37253 - RNA, 27 nt, synthetic construct
  misc_feature 1..27: note = Serine/threonine-protein phosphatase 4 regulatory subunit 3B (168-176)
  source 1..27: mol_type = other RNA
aacgagggctacatcaagaagctgctc

SEQ ID NO: 37254 - RNA, 24 nt, synthetic construct
  misc_feature 1..24: note = tRNA (cytosine(34)-C(5))-methyltransferase (262-269)
  source 1..24: mol_type = other RNA
aacgagctgcccggcctcaagtgg

SEQ ID NO: 37255 - RNA, 27 nt, synthetic construct
  misc_feature 1..27: note = Nuclear factor erythroid 2-related factor 2 (459-467)
  source 1..27: mol_type = other RNA
aacgagatgatgagcaaggagcagttc

SEQ ID NO: 37256 - RNA, 30 nt, synthetic construct
  misc_feature 1..30: note = DDB1- and CUL4-associated factor 8 (367-376)
  source 1..30: mol_type = other RNA
aacgagaacaacggcgtgctgaagaagttc

SEQ ID NO: 37257 - RNA, 27 nt, synthetic construct
  misc_feature 1..27: note = Syntaxin-binding protein 3 (434-442)
  source 1..27: mol_type = other RNA
aacgagagcgacatgatccgcaactgg

SEQ ID NO: 37258 - RNA, 27 nt, synthetic construct
  misc_feature 1..27: note = Unconventional myosin-XVIIIa (417-425)
  source 1..27: mol_type = other RNA
aacgagagctccgtgctgcacaccctc

SEQ ID NO: 37259 - RNA, 33 nt, synthetic construct
  misc_feature 1..33: note = FACT complex subunit SPT16 (585-595)
  source 1..33: mol_type = other RNA
aacatcttccccaacccggaggccaccttcgtg

SEQ ID NO: 37260 - RNA, 27 nt, synthetic construct
  misc_feature 1..27: note = Ras GTPase-activating-like protein IQGAP3 (896-904)
  source 1..27: mol_type = other RNA
aacatcatggacatcaagatcggcctg

SEQ ID NO: 37261 - RNA, 27 nt, synthetic construct
  misc_feature 1..27: note = Protein TRIM6-TRIM34 (430-438)
  source 1..27: mol_type = other RNA
aacatcgtggagcgcctgaaggaggtc

SEQ ID NO: 37262 - RNA, 24 nt, synthetic construct
  misc_feature 1..24: note = Calponin-2 (7-14)
  source 1..24: mol_type = other RNA
aacaagggccccagctacgggctg

SEQ ID NO: 37263 - RNA, 27 nt, synthetic construct
  misc_feature 1..27: note = Developmentally-regulated GTP-binding protein 1 (83-91)
  source 1..27: mol_type = other RNA
aacctggccggcgtgtacagcgaggtc

SEQ ID NO: 37264 - RNA, 27 nt, synthetic construct
  misc_feature 1..27: note = Nodal modulator 3 (667-675)
  source 1..27: mol_type = other RNA
aacctggacaaccccatccagaccgtg

SEQ ID NO: 37265 - RNA, 27 nt, synthetic construct
  misc_feature 1..27: note = Ubiquitin-conjugating enzyme E2 J1 (44-52)
  source 1..27: mol_type = other RNA
aacctgttcgagtggcacttcaccgtg

SEQ ID NO: 37266 - RNA, 27 nt, synthetic construct
  misc_feature 1..27: note = Transcription initiation factor TFIID subunit 1 (767-775)
  source 1..27: mol_type = other RNA
aacctgttccgcgcccccatctacctc

SEQ ID NO: 37267 - RNA, 27 nt, synthetic construct
  misc_feature 1..27: note = Vacuolar fusion protein CCZ1 homolog (460-468)
  source 1..27: mol_type = other RNA
aacctgatcgaggtgaacgaggaggtc

SEQ ID NO: 37268 - RNA, 27 nt, synthetic construct
  misc_feature 1..27: note = GCN1 general control of amino-acid synthesis 1-like 1 (846-854)
  source 1..27: mol_type = other RNA
aacctgctccgccggctgtgggtggtc

SEQ ID NO: 37269 - RNA, 27 nt, synthetic construct
  misc_feature 1..27: note = Ras GTPase-activating-like protein IQGAP2 (826-834)
  source 1..27: mol_type = other RNA
aacctgatggacatcaagatcggcctc

SEQ ID NO: 37270 - RNA, 27 nt, synthetic construct
  misc_feature 1..27: note = Iron-responsive element-binding protein 2 (380-388)
  source 1..27: mol_type = other RNA
aacctgaacagcatcgtgccctccgtc

SEQ ID NO: 37271 - RNA, 27 nt, synthetic construct
  misc_feature 1..27: note = Phosphoserine aminotransferase (58-66)
  source 1..27: mol_type = other RNA
aacctggtgcgcgagctcctggccgtc

SEQ ID NO: 37272 - RNA, 27 nt, synthetic construct
  misc_feature 1..27: note = Zinc finger BED domain-containing protein 4 (1063-1071)
  source 1..27: mol_type = other RNA
aacctgtggagcctcgtggccaaggtc

SEQ ID NO: 37273 - RNA, 27 nt, synthetic construct
  misc_feature 1..27: note = Ubiquitin-like modifier-activating enzyme 7 (733-741)
  source 1..27: mol_type = other RNA
aacctgtacgcccagatgcacggcctc

SEQ ID NO: 37274 - RNA, 27 nt, synthetic construct
  misc_feature 1..27: note = Rho guanine nucleotide exchange factor 2 (717-725)
  source 1..27: mol_type = other RNA
aacctgtacggcctcctgcacgggctg

SEQ ID NO: 37275 - RNA, 27 nt, synthetic construct
  misc_feature 1..27: note = RRP12-like protein (634-642)
  source 1..27: mol_type = other RNA
aacctgtacggccagcccgtggccgcc

SEQ ID NO: 37276 - RNA, 33 nt, synthetic construct
  misc_feature 1..33: note = Splicing factor 3A subunit 1 (774-784)
  source 1..33: mol_type = other RNA
aacatggccaacggcgccgtgatccacctggcg

SEQ ID NO: 37277 - RNA, 27 nt, synthetic construct
  misc_feature 1..27: note = Protein C12orf4 (534-542)
  source 1..27: mol_type = other RNA
aacatgctgccccagatcttccgcgtg

SEQ ID NO: 37278 - RNA, 27 nt, synthetic construct
  misc_feature 1..27: note = Casein kinase II subunit alpha (350-358)
  source 1..27: mol_type = other RNA
aacatgatgagcggcatctccagcgtg

SEQ ID NO: 37279 - RNA, 33 nt, synthetic construct
  misc_feature 1..33: note = Prefoldin subunit 1 (59-69)
  source 1..33: mol_type = other RNA
aacatgtacgagggcgtggggcgcatgttcatc

SEQ ID NO: 37280 - RNA, 27 nt, synthetic construct
  misc_feature 1..27: note = Putative pre-mRNA-splicing factor ATP-dependent RNA helicase DHX16 (701-709)
  source 1..27: mol_type = other RNA
aacccccgcaccggcatggagagcctg

SEQ ID NO: 37281 - RNA, 27 nt, synthetic construct
  misc_feature 1..27: note = Histone acetyltransferase p300 (478-486)
  source 1..27: mol_type = other RNA
aaccagatgcccacccagccgcaggtg

SEQ ID NO: 37282 - RNA, 27 nt, synthetic construct
  misc_feature 1..27: note = Phosphatidate phosphatase LPIN1 (800-808)
  source 1..27: mol_type = other RNA
aaccgccccgccgacgtgtacagctac

SEQ ID NO: 37283 - RNA, 33 nt, synthetic construct
  misc_feature 1..33: note = Nuclear valosin-containing protein-like isoform 4 (634-644)
  source 1..33: mol_type = other RNA
aaccgccccgacatcatcgacccggccatcctg

SEQ ID NO: 37284 - RNA, 27 nt, synthetic construct
  misc_feature 1..27: note = Glyceraldehyde-3-phosphate dehydrogenase (287-295)
  source 1..27: mol_type = other RNA
aacagcgacacccactccagcaccttc

SEQ ID NO: 37285 - RNA, 27 nt, synthetic construct
  misc_feature 1..27: note = Myosin regulatory light chain 12B (155-163)
  source 1..27: mol_type = other RNA
aactacatcgagttcacccgcatcctg

SEQ ID NO: 37286 - RNA, 27 nt, synthetic construct
  misc_feature 1..27: note = N-acetyllactosaminide beta-1,3-N-acetylglucosaminyltransferase 2 (208-216)
  source 1..27: mol_type = other RNA
aactaccgcgacaccttcttcaacctg

SEQ ID NO: 37287 - RNA, 24 nt, synthetic construct
  misc_feature 1..24: note = Vigilin (628-635)
  source 1..24: mol_type = other RNA
cccgccaagctgcacaacagcctc

SEQ ID NO: 37288 - RNA, 27 nt, synthetic construct
  misc_feature 1..27: note = Leucine-rich repeat-containing protein 47 (93-101)
  source 1..27: mol_type = other RNA
cccgagctgggcccgctccccgccctg

SEQ ID NO: 37289 - RNA, 27 nt, synthetic construct
  misc_feature 1..27: note = Mitochondrial fission regulator 1 (152-160)
  source 1..27: mol_type = other RNA
ccccacccgcccccccccccgcccccc

SEQ ID NO: 37290 - RNA, 27 nt, synthetic construct
  misc_feature 1..27: note = SCAN domain-containing protein 1 (113-121)
  source 1..27: mol_type = other RNA
cccctgggcccggcccccgtgagcgtc

SEQ ID NO: 37291 - RNA, 24 nt, synthetic construct
  misc_feature 1..24: note = Long-chain-fatty-acid-CoA ligase 4 (577-584)
  source 1..24: mol_type = other RNA
cccaaccagaagcgcctgaccctc

SEQ ID NO: 37292 - RNA, 27 nt, synthetic construct
  misc_feature 1..27: note = Long-chain-fatty-acid-CoA ligase 4 (577-585)
  source 1..27: mol_type = other RNA
cccaaccagaagcgcctgaccctcctg

SEQ ID NO: 37293 - RNA, 30 nt, synthetic construct
  misc_feature 1..30: note = Proline-rich nuclear receptor coactivator 2 (6-15)
  source 1..30: mol_type = other RNA
ccccgcctgaacagcgccgaccggccgatg

SEQ ID NO: 37294 - RNA, 24 nt, synthetic construct
  misc_feature 1..24: note = Protein flightless-1 homolog (882-889)
  source 1..24: mol_type = other RNA
ccccgccagccgcccatgagcctg

SEQ ID NO: 37295 - RNA, 24 nt, synthetic construct
  misc_feature 1..24: note = RHO/RAC effector protein (1130-1137)
  source 1..24: mol_type = other RNA
ccccgctacctgggcccggccatc

SEQ ID NO: 37296 - RNA, 27 nt, synthetic construct
  misc_feature 1..27: note = Palladin (86-94)
  source 1..27: mol_type = other RNA
cccagcccgcccccccccccgcccccc

SEQ ID NO: 37297 - RNA, 27 nt, synthetic construct
  misc_feature 1..27: note = Forkhead box protein J3 (438-446)
  source 1..27: mol_type = other RNA
caggcccccccgcccccccagcaggtg

SEQ ID NO: 37298 - RNA, 30 nt, synthetic construct
  misc_feature 1..30: note = AT-rich interactive domain-containing protein 1A (1477-1486)
  source 1..30: mol_type = other RNA
caggagttcgacagcggcctgctccactgg

SEQ ID NO: 37299 - RNA, 30 nt, synthetic construct
  misc_feature 1..30: note = Rho GTPase-activating protein 35 (914-923)
  source 1..30: mol_type = other RNA
caggagatcgacggccgcttcaccagcatc

SEQ ID NO: 37300 - RNA, 33 nt, synthetic construct
  misc_feature 1..33: note = Translin-associated protein X (106-116)
  source 1..33: mol_type = other RNA
caggagctgagcggcgaggacatgcaccagttc

SEQ ID NO: 37301 - RNA, 27 nt, synthetic construct
  misc_feature 1..27: note = Acetyl-CoA carboxylase 1 (270-278)
  source 1..27: mol_type = other RNA
caggagaacgacttcagcaagcgcatc

SEQ ID NO: 37302 - RNA, 30 nt, synthetic construct
  misc_feature 1..30: note = Lamin-B receptor (157-166)
  source 1..30: mol_type = other RNA
caggagagctcctacatcgccacccagtac

SEQ ID NO: 37303 - RNA, 27 nt, synthetic construct
  misc_feature 1..27: note = Death-associated protein kinase 3 (122-130)
  source 1..27: mol_type = other RNA
cagatcctggacggcgtgcactacctc

SEQ ID NO: 37304 - RNA, 27 nt, synthetic construct
  misc_feature 1..27: note = Dynamin-like 120 kDa protein, mitochondrial (953-961)
  source 1..27: mol_type = other RNA
cagctggccgaggacctcaagaaggtg

SEQ ID NO: 37305 - RNA, 27 nt, synthetic construct
  misc_feature 1..27: note = Epidermal growth factor receptor kinase substrate 8 (455-463)
  source 1..27: mol_type = other RNA
cagctggccgagagcgtggccaacgtc

SEQ ID NO: 37306 - RNA, 30 nt, synthetic construct
  misc_feature 1..30: note = Transforming acidic coiled-coil-containing protein 3 (776-785)
  source 1..30: mol_type = other RNA
cagctggccaacgaggagatcgcccaggtg

SEQ ID NO: 37307 - RNA, 30 nt, synthetic construct
  misc_feature 1..30: note = E3 ubiquitin-protein ligase BRE1B (68-77)
  source 1..30: mol_type = other RNA
cagctggacgaggcccgcggcctcctgctg

SEQ ID NO: 37308 - RNA, 27 nt, synthetic construct
  misc_feature 1..27: note = Tyrosine-protein phosphatase non-receptor type 12 (162-170)
  source 1..27: mol_type = other RNA
cagctgttcgagaagcagctccagctg

SEQ ID NO: 37309 - RNA, 30 nt, synthetic construct
  misc_feature 1..30: note = Phospholipase A1 member A (177-186)
  source 1..30: mol_type = other RNA
cagctgttcggcgggcagctcggccagatc

SEQ ID NO: 37310 - RNA, 27 nt, synthetic construct
  misc_feature 1..27: note = CDK5 regulatory subunit-associated protein 2 (1222-1230)
  source 1..27: mol_type = other RNA
cagctgttcagcgagatccacaacctc

SEQ ID NO: 37311 - RNA, 27 nt, synthetic construct
  misc_feature 1..27: note = Trinucleotide repeat-containing gene 18 protein (900-908)
  source 1..27: mol_type = other RNA
cagctgttcagccagcagcacttcctc

SEQ ID NO: 37312 - RNA, 27 nt, synthetic construct
  misc_feature 1..27: note = Dual specificity protein phosphatase 14 (157-165)
  source 1..27: mol_type = other RNA
cagctgatcgactacgagcgccagctc

SEQ ID NO: 37313 - RNA, 27 nt, synthetic construct
  misc_feature 1..27: note = Eyes absent homolog 2 (420-428)
  source 1..27: mol_type = other RNA
cagctgatccccgccctcgccaaggtg

SEQ ID NO: 37314 - RNA, 27 nt, synthetic construct
  misc_feature 1..27: note = Dual specificity protein phosphatase 6 (193-201)
  source 1..27: mol_type = other RNA
cagctgctcgacttcgagcgcaccctg

SEQ ID NO: 37315 - RNA, 30 nt, synthetic construct
  misc_feature 1..30: note = Circadian clock protein PASD1 (39-48)
  source 1..30: mol_type = other RNA
cagctgctcgacggcttcatgatcaccctg

SEQ ID NO: 37316 - RNA, 27 nt, synthetic construct
  misc_feature 1..27: note = Transport and Golgi organization protein 6 homolog (720-728)
  source 1..27: mol_type = other RNA
cagctgctccccctgctggagaaggtg

SEQ ID NO: 37317 - RNA, 27 nt, synthetic construct
  misc_feature 1..27: note = AP-1 complex subunit beta-1 (483-491)
  source 1..27: mol_type = other RNA
cagctgctcaccgccatcgtgaagctg

SEQ ID NO: 37318 - RNA, 27 nt, synthetic construct
  misc_feature 1..27: note = tRNA (guanine(26)-N(2))-dimethyltransferase (198-206)
  source 1..27: mol_type = other RNA
cagctgaacgacgtggcccacctcgtc

SEQ ID NO: 37319 - RNA, 27 nt, synthetic construct
  misc_feature 1..27: note = WD repeat-containing protein 36 (690-698)
  source 1..27: mol_type = other RNA
cagctgaacgagcagctcgtgaccctg

SEQ ID NO: 37320 - RNA, 27 nt, synthetic construct
  misc_feature 1..27: note = COMM domain-containing protein 8 (116-124)
  source 1..27: mol_type = other RNA
cagctgcaggacttcgactggcaggtg

SEQ ID NO: 37321 - RNA, 27 nt, synthetic construct
  misc_feature 1..27: note = Thyroid receptor-interacting protein 11 (1241-1249)
  source 1..27: mol_type = other RNA
cagctgcaggaggagctccaccagctg

SEQ ID NO: 37322 - RNA, 27 nt, synthetic construct
  misc_feature 1..27: note = Golgin subfamily A member 4 (1397-1405)
  source 1..27: mol_type = other RNA
cagctgaccgacctcaacgtgcagctg

SEQ ID NO: 37323 - RNA, 27 nt, synthetic construct
  misc_feature 1..27: note = Eyes absent homolog 3 (439-447)
  source 1..27: mol_type = other RNA
cagctggtgcccgccctcgccaaggtc

SEQ ID NO: 37324 - RNA, 27 nt, synthetic construct
  misc_feature 1..27: note = Nuclear factor NF-kappa-B p105 subunit (558-566)
  source 1..27: mol_type = other RNA
cagctggtgcgcgacctcctggaggtc

SEQ ID NO: 37325 - RNA, 27 nt, synthetic construct
  misc_feature 1..27: note = Ketosamine-3-kinase (140-148)
  source 1..27: mol_type = other RNA
cagctgtaccagctcttccactacctg

SEQ ID NO: 37326 - RNA, 27 nt, synthetic construct
  misc_feature 1..27: note = T-complex protein 1 subunit epsilon (184-192)
  source 1..27: mol_type = other RNA
cagatggccgagatcgccgtgaacgcg

SEQ ID NO: 37327 - RNA, 27 nt, synthetic construct
  misc_feature 1..27: note = Spectrin beta chain, non-erythrocytic 1 (1423-1431)
  source 1..27: mol_type = other RNA
cagatgctggagaaccagatggaggtg

SEQ ID NO: 37328 - RNA, 33 nt, synthetic construct
  misc_feature 1..33: note = Signal transducer and activator of transcription 1-alpha/beta (8-18)
  source 1..33: mol_type = other RNA
cagcagctggacagcaagttcctcgagcaggtg

SEQ ID NO: 37329 - RNA, 33 nt, synthetic construct
  misc_feature 1..33: note = E1A-binding protein p400 (1051-1061)
  source 1..33: mol_type = other RNA
cagcagacccccgtggccagcatccagcaggtc

SEQ ID NO: 37330 - RNA, 24 nt, synthetic construct
  misc_feature 1..24: note = E3 ubiquitin-protein ligase RLIM (173-180)
  source 1..24: mol_type = other RNA
cagcgccccccgaccatcgtgctg

SEQ ID NO: 37331 - RNA, 27 nt, synthetic construct
  misc_feature 1..27: note = Cell division cycle protein 27 homolog (580-588)
  source 1..27: mol_type = other RNA
cgcgagcacgacatcgccatcaagttc

SEQ ID NO: 37332 - RNA, 27 nt, synthetic construct
  misc_feature 1..27: note = Small nuclear ribonucleoprotein Sm D2 (102-110)
  source 1..27: mol_type = other RNA
cgcggcgacagcgtgatcgtcgtgctg

SEQ ID NO: 37333 - RNA, 33 nt, synthetic construct
  misc_feature 1..33: note = DNA topoisomerase 1 (376-386)
  source 1..33: mol_type = other RNA
cgcatcatgcccgaggacatcatcatcaactgc

SEQ ID NO: 37334 - RNA, 27 nt, synthetic construct
  misc_feature 1..27: note = Cyclin-L2 (140-148)
  source 1..27: mol_type = other RNA
cgcatccgggacgtgatcaacgtcttc

SEQ ID NO: 37335 - RNA, 27 nt, synthetic construct
  misc_feature 1..27: note = Prelamin-A/C (91-99)
  source 1..27: mol_type = other RNA
cgcctggccgacgccctccaggagctg

SEQ ID NO: 37336 - RNA, 27 nt, synthetic construct
  misc_feature 1..27: note = Clathrin heavy chain 1 (1182-1190)
  source 1..27: mol_type = other RNA
cgcctggccgagctcgaggagttcatc

SEQ ID NO: 37337 - RNA, 30 nt, synthetic construct
  misc_feature 1..30: note = tRNA (cytosine(34)-C(5))-methyltransferase (514-523)
  source 1..30: mol_type = other RNA
cgcctggcccaggagggcatctacaccctc

SEQ ID NO: 37338 - RNA, 30 nt, synthetic construct
  misc_feature 1..30: note = RUS1 family protein C16orf58 (165-174)
  source 1..30: mol_type = other RNA
cgcctgttcgccgacatcctcaacgacgtg

SEQ ID NO: 37339 - RNA, 27 nt, synthetic construct
  misc_feature 1..27: note = HEAT repeat-containing protein 2 (253-261)
  source 1..27: mol_type = other RNA
cgcctgttcgacgacgtgccccaggtc

SEQ ID NO: 37340 - RNA, 27 nt, synthetic construct
  misc_feature 1..27: note = BTB/POZ domain-containing protein 2 (2-10)
  source 1..27: mol_type = other RNA
cgcctgttcgacgagccccagctcgcc

SEQ ID NO: 37341 - RNA, 33 nt, synthetic construct
  misc_feature 1..33: note = WD repeat domain phosphoinositide-interacting protein 4 (219-229)
  source 1..33: mol_type = other RNA
cgcctgttcgacacccagagcaaggagaagctc

SEQ ID NO: 37342 - RNA, 33 nt, synthetic construct
  misc_feature 1..33: note = DDB1- and CUL4-associated factor 4-like protein 1 (246-256)
  source 1..33: mol_type = other RNA
cgcctgttccacgacagcgccgtgacctccgtc

SEQ ID NO: 37343 - RNA, 33 nt, synthetic construct
  misc_feature 1..33: note = Histone-lysine N-methyltransferase setd3 (468-478)
  source 1..33: mol_type = other RNA
cgcctgggcgagaaggagatcctcgagaaggcc

SEQ ID NO: 37344 - RNA, 27 nt, synthetic construct
  misc_feature 1..27: note = Plectin (462-470)
  source 1..27: mol_type = other RNA
cgcctgcacgagcggctcgtggccatc

SEQ ID NO: 37345 - RNA, 27 nt, synthetic construct
  misc_feature 1..27: note = Probable ATP-dependent RNA helicase DDX47 (147-155)
  source 1..27: mol_type = other RNA
cgcctgatcgaccacctcgagaacacc

SEQ ID NO: 37346 - RNA, 27 nt, synthetic construct
  misc_feature 1..27: note = Nuclear pore complex protein Nup160 (575-583)
  source 1..27: mol_type = other RNA
cgcctgatcgaggagagcgtgaccgtc

SEQ ID NO: 37347 - RNA, 30 nt, synthetic construct
  misc_feature 1..30: note = Partitioning defective 3 homolog (510-519)
  source 1..30: mol_type = other RNA
cgcctgatcgaggtgaacggcgtcgacctc

SEQ ID NO: 37348 - RNA, 27 nt, synthetic construct
  misc_feature 1..27: note = 3-ketodihydrosphingosine reductase (236-244)
  source 1..27: mol_type = other RNA
cgcctgatcagcgagaccacctccgtg

SEQ ID NO: 37349 - RNA, 27 nt, synthetic construct
  misc_feature 1..27: note = Eukaryotic translation initiation factor 4 gamma 1 (840-848)
  source 1..27: mol_type = other RNA
cgcctgaaggaggagctcgaggaggcc

SEQ ID NO: 37350 - RNA, 33 nt, synthetic construct
  misc_feature 1..33: note = Upstream-binding protein 1 (145-155)
  source 1..33: mol_type = other RNA
cgcctgctcgacctggacatccccatgagcgtg

SEQ ID NO: 37351 - RNA, 33 nt, synthetic construct
  misc_feature 1..33: note = Cytochrome c oxidase subunit 2 (134-144)
  source 1..33: mol_type = other RNA
cgcctgctcgacgtggacaaccgggtcgtgctg

SEQ ID NO: 37352 - RNA, 27 nt, synthetic construct
  misc_feature 1..27: note = Pyridoxal-dependent decarboxylase domain-containing protein 1 (603-611)
  source 1..27: mol_type = other RNA
cgcctgctcgagaacatgaccgaggtg

SEQ ID NO: 37353 - RNA, 33 nt, synthetic construct
  misc_feature 1..33: note = Xyloside xylosyltransferase 1 (295-305)
  source 1..33: mol_type = other RNA
cgcctgctcgagcccgcccaggtgcagcagctg

SEQ ID NO: 37354 - RNA, 30 nt, synthetic construct
  misc_feature 1..30: note = Telomere length regulation protein TEL2 homolog (186-195)
  source 1..30: mol_type = other RNA
cgcctgctcggcgaggaggtggtccgggtg

SEQ ID NO: 37355 - RNA, 27 nt, synthetic construct
  misc_feature 1..27: note = Suppressor APC domain-containing protein 2 (290-298)
  source 1..27: mol_type = other RNA
cgcctgctccccaaggtgcaggaggtc

SEQ ID NO: 37356 - RNA, 27 nt, synthetic construct
  misc_feature 1..27: note = Translocon-associated protein subunit beta (2-10)
  source 1..27: mol_type = other RNA
cgcctgctcagcttcgtggtcctggcc

SEQ ID NO: 37357 - RNA, 27 nt, synthetic construct
  misc_feature 1..27: note = Vacuolar protein sorting-associated protein 33B (607-615)
  source 1..27: mol_type = other RNA
cgcctgatggaggccatgagcgaggtg

SEQ ID NO: 37358 - RNA, 33 nt, synthetic construct
  misc_feature 1..33: note = Probable inactiveosyltransferase 25 family member 3 (351-361)
  source 1..33: mol_type = other RNA
cgcctgatggaggacgtggaggccgagaagctc

SEQ ID NO: 37359 - RNA, 33 nt, synthetic construct
  misc_feature 1..33: note = Vacuolar protein sorting-associated protein 13D (1845-1855)
  source 1..33: mol_type = other RNA
cgcctgcccccggagggcatcctccacaacgtg

SEQ ID NO: 37360 - RNA, 27 nt, synthetic construct
  misc_feature 1..27: note = Ribosome-binding protein 1 (569-577)
  source 1..27: mol_type = other RNA
cgcctgcaggaggagctcgagaagctg

SEQ ID NO: 37361 - RNA, 33 nt, synthetic construct
  misc_feature 1..33: note = HMG domain-containing protein 4 (432-442)
  source 1..33: mol_type = other RNA
cgcctgcaggagaccgagggcatggtggccgtc

SEQ ID NO: 37362 - RNA, 27 nt, synthetic construct
  misc_feature 1..27: note = Protein orai-3 (287-295)
  source 1..27: mol_type = other RNA
cgcctgcagggcgagctccaggccgtg

SEQ ID NO: 37363 - RNA, 27 nt, synthetic construct
  misc_feature 1..27: note = C-1-tetrahydrofolate synthase, cytoplasmic (478-486)
  source 1..27: mol_type = other RNA
cgcctggtgcccagcgtcaacggcgtg

SEQ ID NO: 37364 - RNA, 33 nt, synthetic construct
  misc_feature 1..33: note = Guanine nucleotide-binding protein subunit beta-2-like 1 (88-98)
  source 1..33: mol_type = other RNA
cgcctgtgggacctcaccaccggcacgaccacc

SEQ ID NO: 37365 - RNA, 24 nt, synthetic construct
  misc_feature 1..24: note = Circadian clock protein PASD1 (691-698)
  source 1..24: mol_type = other RNA
cgcctgtggcaggagctcagcgac

SEQ ID NO: 37366 - RNA, 27 nt, synthetic construct
  misc_feature 1..27: note = Ubiquitin carboxyl-terminal hydrolase 11 (210-218)
  source 1..27: mol_type = other RNA
cgcctgtacgacacccacatcaccgtg

SEQ ID NO: 37367 - RNA, 33 nt, synthetic construct
  misc_feature 1..33: note = TIP41-like protein (200-210)
  source 1..33: mol_type = other RNA
cgcctgtaccacgaggccgacaagacctacatg

SEQ ID NO: 37368 - RNA, 27 nt, synthetic construct
  misc_feature 1..27: note = N-acetyllactosaminide beta-1,3-N-acetylglucosaminyltransferase 2 (314-322)
  source 1..27: mol_type = other RNA
cgcctgtaccacatcaccgaccaggtg

SEQ ID NO: 37369 - RNA, 33 nt, synthetic construct
  misc_feature 1..33: note = Heterogeneous nuclear ribonucleoprotein M (511-521)
  source 1..33: mol_type = other RNA
cgcatggccaccggcctggagcggatgggggcc

SEQ ID NO: 37370 - RNA, 33 nt, synthetic construct
  misc_feature 1..33: note = Eukaryotic translation initiation factor 3 subunit A (752-762)
  source 1..33: mol_type = other RNA
cgcatgctggaggaccgggacctcttcgtgatg

SEQ ID NO: 37371 - RNA, 33 nt, synthetic construct
  misc_feature 1..33: note = N-alpha-acetyltransferase 38, NatC auxiliary subunit (104-114)
  source 1..33: mol_type = other RNA
cgcatgaccgacggccggaccctggtggggtgc

SEQ ID NO: 37372 - RNA, 33 nt, synthetic construct
  misc_feature 1..33: note = Nucleophosmin (277-287)
  source 1..33: mol_type = other RNA
cgcatgaccgaccaggaggccatccaggacctg

SEQ ID NO: 37373 - RNA, 30 nt, synthetic construct
  misc_feature 1..30: note = Copine-3 (121-130)
  source 1..30: mol_type = other RNA
cgccccgccggcaaggggagcatcaccatc

SEQ ID NO: 37374 - RNA, 27 nt, synthetic construct
  misc_feature 1..27: note = Myeloid-derived growth factor (146-154)
  source 1..27: mol_type = other RNA
cgccccggcgccttcaaggccgagctg

SEQ ID NO: 37375 - RNA, 27 nt, synthetic construct
  misc_feature 1..27: note = BTB/POZ domain-containing adapter for CUL3-mediated RhoA degradation protein 1 (319-327)
  source 1..27: mol_type = other RNA
cgcccccacggccagcagatcgtgttc

SEQ ID NO: 37376 - RNA, 27 nt, synthetic construct
  misc_feature 1..27: note = Histone-lysine N-methyltransferase 2C (1906-1914)
  source 1..27: mol_type = other RNA
cgccccccgcccgtgggccacagcttc

SEQ ID NO: 37377 - RNA, 27 nt, synthetic construct
  misc_feature 1..27: note = Calcium-independent phospholipase A2-gamma (321-329)
  source 1..27: mol_type = other RNA
cgccccaccgagggcgtgcaggccctg

SEQ ID NO: 37378 - RNA, 27 nt, synthetic construct
  misc_feature 1..27: note = Sperm-specific antigen 2 (241-249)
  source 1..27: mol_type = other RNA
cgccagatcgaggtgctgaccaccgtc

SEQ ID NO: 37379 - RNA, 30 nt, synthetic construct
  misc_feature 1..30: note Dolichyl-diphosphooligosaccharide-proteinosyltransferase subunit 1 (268-277)
  source 1..30: mol_type = other RNA
cgccagcccgacagcggcatctccagcatc

SEQ ID NO: 37380 - RNA, 27 nt, synthetic construct
  misc_feature 1..27: note = DNA ligase 1 (294-302)
  source 1..27: mol_type = other RNA
cgcaccttcgagaagatcgaggaggtg

SEQ ID NO: 37381 - RNA, 27 nt, synthetic construct
  misc_feature 1..27: note = Trifunctional enzyme subunit alpha, mitochondrial (235-243)
  source 1..27: mol_type = other RNA
cgcaccatcgagtacctggaggaggtg

SEQ ID NO: 37382 - RNA, 27 nt, synthetic construct
  misc_feature 1..27: note = Sorting nexin-4 (243-251)
  source 1..27: mol_type = other RNA
cgcgtggccgaccggctgtacggcgtc

SEQ ID NO: 37383 - RNA, 30 nt, synthetic construct
  misc_feature 1..30: note = THO complex subunit 2 (904-913)
  source 1..30: mol_type = other RNA
cgcgtgttcagcgacatcatctacaccgtc

SEQ ID NO: 37384 - RNA, 27 nt, synthetic construct
  misc_feature 1..27: note = Glycerol-3-phosphate acyltransferase 1, mitochondrial (138-146)
  source 1..27: mol_type = other RNA
cgcgtgcaggaggccatcgccgaggtc

SEQ ID NO: 37385 - RNA, 27 nt, synthetic construct
  misc_feature 1..27: note = Putative eukaryotic translation initiation factor 2 subunit 3-like protein (416-424)
  source 1..27: mol_type = other RNA
cgcgtgagcgccgtcaaggccgacctg

SEQ ID NO: 37386 - RNA, 27 nt, synthetic construct
  misc_feature 1..27: note = Regulation of nuclear pre-mRNA domain-containing protein 1A (271-279)
  source 1..27: mol_type = other RNA
cgcgtgagcctggtccggaaggagctc

SEQ ID NO: 37387 - RNA, 30 nt, synthetic construct
  misc_feature 1..30: note = Nuclear receptor corepressor 2 (2392-2401)
  source 1..30: mol_type = other RNA
cgcgtgtgggaggaccggcccagctccgcc

SEQ ID NO: 37388 - RNA, 27 nt, synthetic construct
  misc_feature 1..27: note = Replication initiator 1 (328-336)
  source 1..27: mol_type = other RNA
agcgccgccgagcccaccccggcggtg

SEQ ID NO: 37389 - RNA, 27 nt, synthetic construct
  misc_feature 1..27: note = DAZ-associated protein 2 (62-70)
  source 1..27: mol_type = other RNA
agcgccgccttccccggcgcgtccctg

SEQ ID NO: 37390 - RNA, 27 nt, synthetic construct
  misc_feature 1..27: note = Serine-threonine kinase receptor-associated protein (160-168)
  source 1..27: mol_type = other RNA
agcgccgacgacaagaccgtgcgcctg

SEQ ID NO: 37391 - RNA, 27 nt, synthetic construct
  misc_feature 1..27: note = Poly (ADP-ribose) polymerase 1 (385-393)
  source 1..27: mol_type = other RNA
agcgccgacaagcccctgtccaacatg

SEQ ID NO: 37392 - RNA, 27 nt, synthetic construct
  misc_feature 1..27: note = Uncharacterized protein C15orf39 (994-1002)
  source 1..27: mol_type = other RNA
agcgcctcccccccgggccccaccctg

SEQ ID NO: 37393 - RNA, 33 nt, synthetic construct
  misc_feature 1..33: note = Replication protein A 32 kDa subunit (93-103)
  source 1..33: mol_type = other RNA
agcgaggccggcaacttcgggggcaactccttc

SEQ ID NO: 37394 - RNA, 27 nt, synthetic construct
  misc_feature 1..27: note = Kelch repeat and BTB domain-containing protein 6 (137-145)
  source 1..27: mol_type = other RNA
agcgaggccaacgtggagcgcctgtac

SEQ ID NO: 37395 - RNA, 27 nt, synthetic construct
  misc_feature 1..27: note = Protein PRRC2C (867-875)
  source 1..27: mol_type = other RNA
agcgaggcccaggtgcagaagttcctg

SEQ ID NO: 37396 - RNA, 30 nt, synthetic construct
  misc_feature 1..30: note = Non-POU domain-containing octamer-binding protein (120-129)
  source 1..30: mol_type = other RNA
agcgagggctccttcctgctcaccaccttc

SEQ ID NO: 37397 - RNA, 30 nt, synthetic construct
  misc_feature 1..30: note = Cyclin-dependent kinase 11B (629-638)
  source 1..30: mol_type = other RNA
agcgagatcgaccagatcaacaaggtgttc

SEQ ID NO: 37398 - RNA, 27 nt, synthetic construct
  misc_feature 1..27: note = Uncharacterized protein C5orf34 (564-572)
  source 1..27: mol_type = other RNA
agcgagctggagaagatccagaagttc

SEQ ID NO: 37399 - RNA, 30 nt, synthetic construct
  misc_feature 1..30: note = V-type proton ATPase subunit H (357-366)
  source 1..30: mol_type = other RNA
agcgagctgaagtccggccgcctcgagtgg

SEQ ID NO: 37400 - RNA, 27 nt, synthetic construct
  misc_feature 1..27: note = Myomegalin (838-846)
  source 1..27: mol_type = other RNA
agcgagctgcaggccctccgccagtac

SEQ ID NO: 37401 - RNA, 30 nt, synthetic construct
  misc_feature 1..30: note = Small subunit processome component 20 homolog (777-786)
  source 1..30: mol_type = other RNA
agcgagcaggaccccctgctcaagaacctg

SEQ ID NO: 37402 - RNA, 30 nt, synthetic construct
  misc_feature 1..30: note = ATP-citrate synthase (7-16)
  source 1..30: mol_type = other RNA
agcgagcagaccggcaaggagctgctctac

SEQ ID NO: 37403 - RNA, 27 nt, synthetic construct
  misc_feature 1..27: note = PERQ amino acid-rich with GYF domain-containing protein 2 (199-207)
  source 1..27: mol_type = other RNA
agcgagtccgagaactggcgcatcttc

SEQ ID NO: 37404 - RNA, 27 nt, synthetic construct
  misc_feature 1..27: note = FACT complex subunit SSRP1 (657-665)
  source 1..27: mol_type = other RNA
agcgagtccttcaagagcaaggagttc

SEQ ID NO: 37405 - RNA, 27 nt, synthetic construct
  misc_feature 1..27: note = FAD synthase (193-201)
  source 1..27: mol_type = other RNA
agcatcgcccccatcctggccgaggcg

SEQ ID NO: 37406 - RNA, 33 nt, synthetic construct
  misc_feature 1..33: note = Coatomer subunit beta (249-259)
  source 1..33: mol_type = other RNA
agcatcttcggcgaggacgccctggccaacgtg

SEQ ID NO: 37407 - RNA, 27 nt, synthetic construct
  misc_feature 1..27: note = Inhibitor of Bruton tyrosine kinase (562-570)
  source 1..27: mol_type = other RNA
agcatccacgacgtgaccttccaggtc

SEQ ID NO: 37408 - RNA, 27 nt, synthetic construct
  misc_feature 1..27: note = Cell growth-regulating nucleolar protein (128-136)
  source 1..27: mol_type = other RNA
agcatcctggaccaggtgtggaacatc

SEQ ID NO: 37409 - RNA, 27 nt, synthetic construct
  misc_feature 1..27: note = Poly (ADP-ribose) polymerase 1 (711-719)
  source 1..27: mol_type = other RNA
agcatcctgtccgaggtgcagcaggcc

SEQ ID NO: 37410 - RNA, 24 nt, synthetic construct
  misc_feature 1..24: note = EF-hand domain-containing protein 1 (48-55)
  source 1..24: mol_type = other RNA
agcaaggcccccgtgctgacctac

SEQ ID NO: 37411 - RNA, 27 nt, synthetic construct
  misc_feature 1..27: note = CCR4-NOT transcription complex subunit 1 (254-262)
  source 1..27: mol_type = other RNA
agcctggccgacttcatgcaggaggtg

SEQ ID NO: 37412 - RNA, 27 nt, synthetic construct
  misc_feature 1..27: note = DNA replication licensing factor MCM7 (208-216)
  source 1..27: mol_type = other RNA
agcctggccgactacatcaccgccgcg

SEQ ID NO: 37413 - RNA, 27 nt, synthetic construct
  misc_feature 1..27: note = Ubiquitin carboxyl-terminal hydrolase 7 (543-551)
  source 1..27: mol_type = other RNA
agcctggccgagttcgtgcagtccctc

SEQ ID NO: 37414 - RNA, 30 nt, synthetic construct
  misc_feature 1..30: note = X-ray repair cross-complementing protein 5 (580-589)
  source 1..30: mol_type = other RNA
agcctggccgagggctccgtgaccagcgtc

SEQ ID NO: 37415 - RNA, 27 nt, synthetic construct
  misc_feature 1..27: note = Exosome complex exonuclease RRP44 (720-728)
  source 1..27: mol_type = other RNA
agcctggccgagtccctcgaccaggcc

SEQ ID NO: 37416 - RNA, 30 nt, synthetic construct
  misc_feature 1..30: note = Phosphatidylinositol 3,4,5-trisphosphate-dependent Rac exchanger 1 protein (655-664)
  source 1..30: mol_type = other RNA
agcctggccgaggtggccggcctccaggtc

SEQ ID NO: 37417 - RNA, 27 nt, synthetic construct
  misc_feature 1..27: note = Centrosome-associated protein CEP250 (112-120)
  source 1..27: mol_type = other RNA
agcctggccgaggtgaacacccagctc

SEQ ID NO: 37418 - RNA, 27 nt, synthetic construct
  misc_feature 1..27: note = Apolipoprotein L1 (249-257)
  source 1..27: mol_type = other RNA
agcctggccggcaacacctaccagctc

SEQ ID NO: 37419 - RNA, 27 nt, synthetic construct
  misc_feature 1..27: note = SH3 domain and tetratricopeptide repeat-containing protein 1 (740-748)
  source 1..27: mol_type = other RNA
agcctggccggctccctccgcagcgtg

SEQ ID NO: 37420 - RNA, 33 nt, synthetic construct
  misc_feature 1..33: note = Kelch-like protein 21 (506-516)
  source 1..33: mol_type = other RNA
agcctggccgtgctcggcgggaagctgtacgtc

SEQ ID NO: 37421 - RNA, 30 nt, synthetic construct
  misc_feature 1..30: note = Insulin-degrading enzyme (224-233)
  source 1..30: mol_type = other RNA
agcctggacgacctcaccaacctggtggtc

SEQ ID NO: 37422 - RNA, 27 nt, synthetic construct
  misc_feature 1..27: note = Bone morphogenetic protein receptor type-2 (221-229)
  source 1..27: mol_type = other RNA
agcctggacgagcgccccgtggccgtc

SEQ ID NO: 37423 - RNA, 30 nt, synthetic construct
  misc_feature 1..30: note = Glycogen debranching enzyme (835-844)
  source 1..30: mol_type = other RNA
agcctggacccccacgcccaggtggccgtc

SEQ ID NO: 37424 - RNA, 27 nt, synthetic construct
  misc_feature 1..27: note = Cullin-9 (676-684)
  source 1..27: mol_type = other RNA
agcctggaccagcacgtggccgccgtc

SEQ ID NO: 37425 - RNA, 27 nt, synthetic construct
  misc_feature 1..27: note = Protein RMD5 homolog B (28-36)
  source 1..27: mol_type = other RNA
agcctggaggagctcctgcactacgtg

SEQ ID NO: 37426 - RNA, 27 nt, synthetic construct
  misc_feature 1..27: note = NAD(P)H dehydrogenase (quinone) 1 (155-163)
  source 1..27: mol_type = other RNA
agcctgttcgacctcaacttccaggcc

SEQ ID NO: 37427 - RNA, 27 nt, synthetic construct
  misc_feature 1..27: note = Signal recognition particle 54 kDa protein (200-208)
  source 1..27: mol_type = other RNA
agcctgttcgaggagatgctccaggtg

SEQ ID NO: 37428 - RNA, 30 nt, synthetic construct
  misc_feature 1..30: note = Zinc finger protein 451 (454-463)
  source 1..30: mol_type = other RNA
agcctgttcggccaggacgtgaaggccgtc

SEQ ID NO: 37429 - RNA, 27 nt, synthetic construct
  misc_feature 1..27: note = Importin-8 (243-251)
  source 1..27: mol_type = other RNA
agcctgttcaaggaccagatggagctc

SEQ ID NO: 37430 - RNA, 27 nt, synthetic construct
  misc_feature 1..27: note = Optineurin (302-310)
  source 1..27: mol_type = other RNA
agcctgttcaaggagctccaggaggcc

SEQ ID NO: 37431 - RNA, 24 nt, synthetic construct
  misc_feature 1..24: note = Kelch domain-containing protein 10 (353-360)
  source 1..24: mol_type = other RNA
agcctgttcaagatctggctcgtg

SEQ ID NO: 37432 - RNA, 27 nt, synthetic construct
  misc_feature 1..27: note = Telomere-associated protein RIF1 (802-810)
  source 1..27: mol_type = other RNA
agcctgttcaagctcatcgtgaaggtc

SEQ ID NO: 37433 - RNA, 27 nt, synthetic construct
  misc_feature 1..27: note = DNA polymerase alpha subunit B (295-303)
  source 1..27: mol_type = other RNA
agcctgttccccggccaggtggtcatc

SEQ ID NO: 37434 - RNA, 33 nt, synthetic construct
  misc_feature 1..33: note = Lamin-B receptor (312-322)
  source 1..33: mol_type = other RNA
agcctgttccagggcgtggagttccactacgtc

SEQ ID NO: 37435 - RNA, 33 nt, synthetic construct
  misc_feature 1..33: note = Renin receptor (103-113)
  source 1..33: mol_type = other RNA
agcctgttctccgaggagacccccgtggtcctc

SEQ ID NO: 37436 - RNA, 30 nt, synthetic construct
  misc_feature 1..30: note = Ubiquitin-protein ligase E3C (505-514)
  source 1..30: mol_type = other RNA
agcctgttctcccacagcctcatctccatc

SEQ ID NO: 37437 - RNA, 27 nt, synthetic construct
  misc_feature 1..27: note = Cytoplasmic dynein 1 heavy chain 1 (2457-2465)
  source 1..27: mol_type = other RNA
agcctgttctccatgctccaccaggcc

SEQ ID NO: 37438 - RNA, 27 nt, synthetic construct
  misc_feature 1..27: note = Kelch-like protein 12 (364-372)
  source 1..27: mol_type = other RNA
agcctgcacgaccgcatctacgtgatc

SEQ ID NO: 37439 - RNA, 27 nt, synthetic construct
  misc_feature 1..27: note = Cytochrome P450 20A1 (53-61)
  source 1..27: mol_type = other RNA
agcctgcacgagttcctcgtgaacctg

SEQ ID NO: 37440 - RNA, 27 nt, synthetic construct
  misc_feature 1..27: note = Ectopic P granules protein 5 homolog (837-845)
  source 1..27: mol_type = other RNA
agcctgcactccgtgatcatccagctc

SEQ ID NO: 37441 - RNA, 27 nt, synthetic construct
  misc_feature 1..27: note = DNA-directed RNA polymerase I subunit RPA1 (382-390)
  source 1..27: mol_type = other RNA
agcctgatcgacaagctctacaacatc

SEQ ID NO: 37442 - RNA, 33 nt, synthetic construct
  misc_feature 1..33: note = Structural maintenance of chromosomes protein 6 (601-611)
  source 1..33: mol_type = other RNA
agcctgatcgacatgcgcggcatcgagaccgtg

SEQ ID NO: 37443 - RNA, 27 nt, synthetic construct
  misc_feature 1..27: note = Transmembrane protein 209 (11-19)
  source 1..27: mol_type = other RNA
agcctgatcgaccgcaccatcaagatg

SEQ ID NO: 37444 - RNA, 27 nt, synthetic construct
  misc_feature 1..27: note = Cation channel sperm-associated protein 2 (33-41)
  source 1..27: mol_type = other RNA
agcctgatcgagcacctccagggcctg

SEQ ID NO: 37445 - RNA, 27 nt, synthetic construct
  misc_feature 1..27: note = Mediator of RNA polymerase II transcription subunit 19 (129-137)
  source 1..27: mol_type = other RNA
agcctgatcgagaagcccccgatcctc

SEQ ID NO: 37446 - RNA, 27 nt, synthetic construct
  misc_feature 1..27: note = Nucleolar pre-ribosomal-associated protein 1 (1761-1769)
  source 1..27: mol_type = other RNA
agcctgatcgagcgcgacctcaagctg

SEQ ID NO: 37447 - RNA, 27 nt, synthetic construct
  misc_feature 1..27: note = Solute carrier family 35 member C2 (14-22)
  source 1..27: mol_type = other RNA
agcctgatcttcaagctcgaggagctg

SEQ ID NO: 37448 - RNA, 27 nt, synthetic construct
  misc_feature 1..27: note = Solute carrier family 35 member E1 (24-32)
  source 1..27: mol_type = other RNA
agcctgatccccatcatctccggcgtg

SEQ ID NO: 37449 - RNA, 27 nt, synthetic construct
  misc_feature 1..27: note = Putative Polycomb group protein ASXL2 (835-843)
  source 1..27: mol_type = other RNA
agcctgatccgcatcgtgcccgtcgtg

SEQ ID NO: 37450 - RNA, 27 nt, synthetic construct
  misc_feature 1..27: note = Carboxypeptidase D (372-380)
  source 1..27: mol_type = other RNA
agcctgatcaccctcatcgagaaggtg

SEQ ID NO: 37451 - RNA, 27 nt, synthetic construct
  misc_feature 1..27: note = Peroxisomal biogenesis factor 3 (201-209)
  source 1..27: mol_type = other RNA
agcctgctcgacctggagcagaagctg

SEQ ID NO: 37452 - RNA, 27 nt, synthetic construct
  misc_feature 1..27: note = Zinc finger BED domain-containing protein 1 (280-288)
  source 1..27: mol_type = other RNA
agcctgctcgacgtggccgtccacatg

SEQ ID NO: 37453 - RNA, 27 nt, synthetic construct
  misc_feature 1..27: note = Kinesin-like protein KIF3A (470-478)
  source 1..27: mol_type = other RNA
agcctgctcgagaagctgtccgccctg

SEQ ID NO: 37454 - RNA, 27 nt, synthetic construct
  misc_feature 1..27: note = Kinesin-like protein (557-565)
  source 1..27: mol_type = other RNA
agcctgctcaaggacctggccgagatc

SEQ ID NO: 37455 - RNA, 27 nt, synthetic construct
  misc_feature 1..27: note = Phosphatidylinositol 4-phosphate 5-kinase type-1 alpha (312-320)
  source 1..27: mol_type = other RNA
agcctgctcatgtccatccacaacatc

SEQ ID NO: 37456 - RNA, 27 nt, synthetic construct
  misc_feature 1..27: note = Claspin (1254-1262)
  source 1..27: mol_type = other RNA
agcctgctcaaccagcccaaggccgtg

SEQ ID NO: 37457 - RNA, 33 nt, synthetic construct
  misc_feature 1..33: note = Sister chromatid cohesion protein PDS5 homolog A (36-46)
  source 1..33: mol_type = other RNA
agcctgctccccgagtacgtggtcccgtacatg

SEQ ID NO: 37458 - RNA, 33 nt, synthetic construct
  misc_feature 1..33: note = Inositol 1,4,5-trisphosphate receptor type 1 (1393-1403)
  source 1..33: mol_type = other RNA
agcctgctccccctggacgacatcgtgcgcgtc

SEQ ID NO: 37459 - RNA, 27 nt, synthetic construct
  misc_feature 1..27: note = Lysosomal-trafficking regulator (78-86)
  source 1..27: mol_type = other RNA
agcctgctccccctggtgtggaagatc

SEQ ID NO: 37460 - RNA, 33 nt, synthetic construct
  misc_feature 1..33: note = Signal transducer and activator of transcription 2 (25-35)
  source 1..33: mol_type = other RNA
agcctgctccccgtggacatccgccagtacctg

SEQ ID NO: 37461 - RNA, 27 nt, synthetic construct
  misc_feature 1..27: note = Cytoplasmic dynein 1 heavy chain 1 (3748-3756)
  source 1..27: mol_type = other RNA
agcctgctccaggccctgaacgaggtg

SEQ ID NO: 37462 - RNA, 27 nt, synthetic construct
  misc_feature 1..27: note = Melanoma antigen preferentially expressed in tumors (425-433)
  source 1..27: mol_type = other RNA
agcctgctccagcacctgatcggcctg

SEQ ID NO: 37463 - RNA, 30 nt, synthetic construct
  misc_feature 1..30: note = SH3KBP1-binding protein 1 (47-56)
  source 1..30: mol_type = other RNA
agcctgctctccggccgcatcagcaccctg

SEQ ID NO: 37464 - RNA, 27 nt, synthetic construct
  misc_feature 1..27: note = Uncharacterized aarF domain-containing protein kinase 2 (132-140)
  source 1..27: mol_type = other RNA
agcctgctctccagcgtgttcaagctg

SEQ ID NO: 37465 - RNA, 27 nt, synthetic construct
  misc_feature 1..27: note = Transportin-3 (89-97)
  source 1..27: mol_type = other RNA
agcctgctcacccacatccagaacctg

SEQ ID NO: 37466 - RNA, 27 nt, synthetic construct
  misc_feature 1..27: note = E3 ubiquitin-protein ligase TRIP12 (971-979)
  source 1..27: mol_type = other RNA
agcctgctcacctcccccccgaaggcc

SEQ ID NO: 37467 - RNA, 30 nt, synthetic construct
  misc_feature 1..30: note = Mediator of RNA polymerase II transcription subunit 24 (800-809)
  source 1..30: mol_type = other RNA
agcctgatggaccccccgggcaccgccctc

SEQ ID NO: 37468 - RNA, 27 nt, synthetic construct
  misc_feature 1..27: note = CAP-Gly domain-containing linker protein 2 (873-881)
  source 1..27: mol_type = other RNA
agcctgaacgagctccgcgtgctgctg

SEQ ID NO: 37469 - RNA, 27 nt, synthetic construct
  misc_feature 1..27: note = Solute carrier family 35 member E4 (65-73)
  source 1..27: mol_type = other RNA
agcctgaacaagtggatcttcaccgtg

SEQ ID NO: 37470 - RNA, 27 nt, synthetic construct
  misc_feature 1..27: note = Sestrin-3 (47-55)
  source 1..27: mol_type = other RNA
agcctgcccgagctcgtgcacgccgtc

SEQ ID NO: 37471 - RNA, 27 nt, synthetic construct
  misc_feature 1..27: note = Transmembrane protein 214 (435-443)
  source 1..27: mol_type = other RNA
agcctgcaggagaccatccagtccctc

SEQ ID NO: 37472 - RNA, 27 nt, synthetic construct
  misc_feature 1..27: note = Centrosome-associated protein CEP250 (2189-2197)
  source 1..27: mol_type = other RNA
agcctgcaggaggtggccatgttcctc

SEQ ID NO: 37473 - RNA, 27 nt, synthetic construct
  misc_feature 1..27: note = Heat shock protein HSP 90-beta (394-402)
  source 1..27: mol_type = other RNA
agcctgtccgagtacgtgagccgcatg

SEQ ID NO: 37474 - RNA, 27 nt, synthetic construct
  misc_feature 1..27: note = Cell division cycle and apoptosis regulator protein 1 (1078-1086)
  source 1..27: mol_type = other RNA
agcctgtccggcgagctccgcgaggtg

SEQ ID NO: 37475 - RNA, 27 nt, synthetic construct
  misc_feature 1..27: note = RNA-binding protein 12B (105-113)
  source 1..27: mol_type = other RNA
agcctgtccaacttcatcgagagcgtg

SEQ ID NO: 37476 - RNA, 27 nt, synthetic construct
  misc_feature 1..27: note = Bromodomain adjacent to zinc finger domain protein 1A (1093-1101)
  source 1..27: mol_type = other RNA
agcctgtcccaggtgttcctccacctg

SEQ ID NO: 37477 - RNA, 27 nt, synthetic construct
  misc_feature 1..27: note = Dehydrogenase/reductase SDR family member 1 (277-285)
  source 1..27: mol_type = other RNA
agcctgtccagcgtgctctcccacgtc

SEQ ID NO: 37478 - RNA, 27 nt, synthetic construct
  misc_feature 1..27: note = Spectrin beta chain, erythrocytic (333-341)
  source 1..27: mol_type = other RNA
agcctgaccggcgtgcagcagcagctc

SEQ ID NO: 37479 - RNA, 30 nt, synthetic construct
  misc_feature 1..30: note = Conserved oligomeric Golgi complex subunit 4 (458-467)
  source 1..30: mol_type = other RNA
agcctggtggccgtcgagctcgagaaggtg

SEQ ID NO: 37480 - RNA, 30 nt, synthetic construct
  misc_feature 1..30: note = Phospholipase A1 member A (341-350)
  source 1..30: mol_type = other RNA
agcctggtggagttccacctcaaggagctg

SEQ ID NO: 37481 - RNA, 27 nt, synthetic construct
  misc_feature 1..27: note = 26S proteasome non-ATPase regulatory subunit 13 (75-83)
  source 1..27: mol_type = other RNA
agcctggtggagatcatcctccacgtc

SEQ ID NO: 37482 - RNA, 27 nt, synthetic construct
  misc_feature 1..27: note = Cyclin-dependent-like kinase 5 (247-255)
  source 1..27: mol_type = other RNA
agcctggtgaacgtcgtgcccaagctc

SEQ ID NO: 37483 - RNA, 27 nt, synthetic construct
  misc_feature 1..27: note = Heat shock factor protein 2 (156-164)
  source 1..27: mol_type = other RNA
agcctgtggaaggaggtgtccgagctc

SEQ ID NO: 37484 - RNA, 27 nt, synthetic construct
  misc_feature 1..27: note = GRIP and coiled-coil domain-containing protein 2 (689-697)
  source 1..27: mol_type = other RNA
agcctgtacgaggagaacaacaagctc

SEQ ID NO: 37485 - RNA, 27 nt, synthetic construct
  misc_feature 1..27: note = Centrosome-associated protein CEP250 (1184-1192)
  source 1..27: mol_type = other RNA
agcctgtactccgccctccagcaggcc

SEQ ID NO: 37486 - RNA, 27 nt, synthetic construct
  misc_feature 1..27: note = Serine/threonine-protein kinase TBK1 (413-421)
  source 1..27: mol_type = other RNA
agcatggccaaggccatcaccggcgtg

SEQ ID NO: 37487 - RNA, 33 nt, synthetic construct
  misc_feature 1..33: note = Erlin-2 (158-168)
  source 1..33: mol_type = other RNA
agcatggcccccggcctggtgatccaggccgtc

SEQ ID NO: 37488 - RNA, 27 nt, synthetic construct
  misc_feature 1..27: note = SEC14-like protein 1 (203-211)
  source 1..27: mol_type = other RNA
agcatggccgtggtcatccccgaggcc

SEQ ID NO: 37489 - RNA, 27 nt, synthetic construct
  misc_feature 1..27: note = Cullin-1 (79-87)
  source 1..27: mol_type = other RNA
agcatgatctccaagctgaagcaggcc

SEQ ID NO: 37490 - RNA, 27 nt, synthetic construct
  misc_feature 1..27: note = Ubiquitin conjugation factor E4 B (1278-1286)
  source 1..27: mol_type = other RNA
agcatgctggagcccgtgccggagctc

SEQ ID NO: 37491 - RNA, 27 nt, synthetic construct
  misc_feature 1..27: note = Antizyme inhibitor 1 (152-160)
  source 1..27: mol_type = other RNA
agcatgatgaagaacttcttcttcgtg

SEQ ID NO: 37492 - RNA, 27 nt, synthetic construct
  misc_feature 1..27: note = Large proline-rich protein BAG6 (763-771)
  source 1..27: mol_type = other RNA
agcatggtggacgtcgtgatgctgctc

SEQ ID NO: 37493 - RNA, 30 nt, synthetic construct
  misc_feature 1..30: note = Band 4.1-like protein 3 (185-194)
  source 1..30: mol_type = other RNA
agcatgtacggcgtggacctgcaccacgcc

SEQ ID NO: 37494 - RNA, 30 nt, synthetic construct
  misc_feature 1..30: note = Protein 4.1 (185-194)
  source 1..30: mol_type = other RNA
agcatgtacggcgtggacctgcacaaggcc

SEQ ID NO: 37495 - RNA, 27 nt, synthetic construct
  misc_feature 1..27: note = A-kinase anchor protein 10, mitochondrial (278-286)
  source 1..27: mol_type = other RNA
agccccgcctccccgctgaaggagctc

SEQ ID NO: 37496 - RNA, 30 nt, synthetic construct
  misc_feature 1..30: note = Beta-1-syntrophin (175-184)
  source 1..30: mol_type = other RNA
agccccgacgccaagcacaccgtgatcctg

SEQ ID NO: 37497 - RNA, 30 nt, synthetic construct
  misc_feature 1..30: note = Cytoplasmic dynein 1 heavy chain 1 (577-586)
  source 1..30: mol_type = other RNA
agccccgacaagatcccgtggtccgccctg

SEQ ID NO: 37498 - RNA, 27 nt, synthetic construct
  misc_feature 1..27: note = Ubiquitin carboxyl-terminal hydrolase 22 (237-245)
  source 1..27: mol_type = other RNA
agcccccacatcccgtacaagctgctc

SEQ ID NO: 37499 - RNA, 30 nt, synthetic construct
  misc_feature 1..30: note = ADNP homeobox protein 2 (336-345)
  source 1..30: mol_type = other RNA
agccccctgccggtgggccagaactccctc

SEQ ID NO: 37500 - RNA, 33 nt, synthetic construct
  misc_feature 1..33: note = COUP transcription factor 2 (278-288)
  source 1..33: mol_type = other RNA
agccccatgtccgccgaccgcgtggtcgccttc

SEQ ID NO: 37501 - RNA, 27 nt, synthetic construct
  misc_feature 1..27: note = Ubiquitin carboxyl-terminal hydrolase 6 (1192-1200)
  source 1..27: mol_type = other RNA
agccccaactccagcccgcgcaccctg

SEQ ID NO: 37502 - RNA, 27 nt, synthetic construct
  misc_feature 1..27: note = Ubiquitin-associated protein 2-like (477-485)
  source 1..27: mol_type = other RNA
agcccccagccggcccagcagaagctg

SEQ ID NO: 37503 - RNA, 30 nt, synthetic construct
  misc_feature 1..30: note = Acyl-CoA desaturase (281-290)
  source 1..30: mol_type = other RNA
agcccccgcgagaacatcctggtgtccctc

SEQ ID NO: 37504 - RNA, 27 nt, synthetic construct
  misc_feature 1..27: note = U3 small nucleolar RNA-associated protein 18 homolog (367-375)
  source 1..27: mol_type = other RNA
agcccccgctccggctacttcgccctg

SEQ ID NO: 37505 - RNA, 30 nt, synthetic construct
  misc_feature 1..30: note = Integrator complex subunit 7 (289-298)
  source 1..30: mol_type = other RNA
agcccccgctccagcgacctggtgaagctc

SEQ ID NO: 37506 - RNA, 27 nt, synthetic construct
  misc_feature 1..27: note = Protein Wiz (5-13)
  source 1..27: mol_type = other RNA
agcccctccctgccgaagaagagcctc

SEQ ID NO: 37507 - RNA, 27 nt, synthetic construct
  misc_feature 1..27: note = Mediator of DNA damage checkpoint protein 1 (1786-1794)
  source 1..27: mol_type = other RNA
agccagatccagaaggtggagcccgcc

SEQ ID NO: 37508 - RNA, 30 nt, synthetic construct
  misc_feature 1..30: note = DNA-directed RNA polymerases I, II, and III subunit RPABC3 (47-56)
  source 1..30: mol_type = other RNA
agccgcgccgaccagttcgagtacgtgatg

SEQ ID NO: 37509 - RNA, 27 nt, synthetic construct
  misc_feature 1..27: note = Mitochondrial fission factor (5-13)
  source 1..27: mol_type = other RNA
agccgcatccagtacgagatggagtac

SEQ ID NO: 37510 - RNA, 27 nt, synthetic construct
  misc_feature 1..27: note = Histone H2B type 2-F (33-41)
  source 1..27: mol_type = other RNA
agccgcaaggagtcctacagcgtgtac

SEQ ID NO: 37511 - RNA, 33 nt, synthetic construct
  misc_feature 1..33: note = Solute carrier family 35 member E1 (251-261)
  source 1..33: mol_type = other RNA
agccgccagtcctaccccaacagctactccctg

SEQ ID NO: 37512 - RNA, 27 nt, synthetic construct
  misc_feature 1..27: note = Mucin-1 (950-958)
  source 1..27: mol_type = other RNA
agcaccgcccccccggtgcacaacgtc

SEQ ID NO: 37513 - RNA, 33 nt, synthetic construct
  misc_feature 1..33: note = T-complex protein 1 subunit beta (333-343)
  source 1..33: mol_type = other RNA
agcaccttcgaccaccccgagctggtgaagctc

SEQ ID NO: 37514 - RNA, 27 nt, synthetic construct
  misc_feature 1..27: note = Exosome complex component RRP4 (55-63)
  source 1..27: mol_type = other RNA
agcgtggccggctccgtcgagcgcgtg

SEQ ID NO: 37515 - RNA, 27 nt, synthetic construct
  misc_feature 1..27: note = Rho guanine nucleotide exchange factor 18 (538-546)
  source 1..27: mol_type = other RNA
agcgtggactccaagcccccggtcatc

SEQ ID NO: 37516 - RNA, 27 nt, synthetic construct
  misc_feature 1..27: note = PDZ domain-containing protein GIPC1 (87-95)
  source 1..27: mol_type = other RNA
agcgtgatcgaccacatccacctgatc

SEQ ID NO: 37517 - RNA, 33 nt, synthetic construct
  misc_feature 1..33: note = Programmed cell death 6-interacting protein (423-433)
  source 1..33: mol_type = other RNA
agcgtgatcgagcagggcgggatccagaccgtc

SEQ ID NO: 37518 - RNA, 27 nt, synthetic construct
  misc_feature 1..27: note = Nucleolar pre-ribosomal-associated protein 1 (1313-1321)
  source 1..27: mol_type = other RNA
agcgtgctggaccagaagatcctcctg

SEQ ID NO: 37519 - RNA, 27 nt, synthetic construct
  misc_feature 1..27: note = Serine incorporator 1 (244-252)
  source 1..27: mol_type = other RNA
agcgtgatgtccatcctgcccaagatc

SEQ ID NO: 37520 - RNA, 27 nt, synthetic construct
  misc_feature 1..27: note = Heterogeneous nuclear ribonucleoprotein K (372-380)
  source 1..27: mol_type = other RNA
agctacgccggcgggcgcggctcctac

SEQ ID NO: 37521 - RNA, 27 nt, synthetic construct
  misc_feature 1..27: note = Nectin-2 (494-502)
  source 1..27: mol_type = other RNA
agctaccagggcaaggggttcgtgatg

SEQ ID NO: 37522 - RNA, 27 nt, synthetic construct
  misc_feature 1..27: note = Transcription intermediary factor 1-beta (33-41)
  source 1..27: mol_type = other RNA
accgccgacagccagcccccggtgttc

SEQ ID NO: 37523 - RNA, 27 nt, synthetic construct
  misc_feature 1..27: note = Phosphatidylinositol 4-kinase alpha (299-307)
  source 1..27: mol_type = other RNA
accgagatcgagcgcctgatcacctgg

SEQ ID NO: 37524 - RNA, 30 nt, synthetic construct
  misc_feature 1..30: note = Phosphatidylinositol 4-kinase alpha (299-308)
  source 1..30: mol_type = other RNA
accgagatcgagcgcctgatcacctggtac

SEQ ID NO: 37525 - RNA, 33 nt, synthetic construct
  misc_feature 1..33: note = Putative oxidoreductase GLYR1 (385-395)
  source 1..33: mol_type = other RNA
accatcgccgagggcctgaccctcgcccaggtg

SEQ ID NO: 37526 - RNA, 27 nt, synthetic construct
  misc_feature 1..27: note = Phosphopantothenate-cysteine ligase (151-159)
  source 1..27: mol_type = other RNA
accctggccgactacctccacctgctg

SEQ ID NO: 37527 - RNA, 30 nt, synthetic construct
  misc_feature 1..30: note = Paraspeckle component 1 (128-137)
  source 1..30: mol_type = other RNA
accctggccgagatcgccaaggcggagctc

SEQ ID NO: 37528 - RNA, 27 nt, synthetic construct
  misc_feature 1..27: note = Tumor necrosis factor receptor superfamily member 6 (305-313)
  source 1..27: mol_type = other RNA
accctggccgagaagatccagaccatc

SEQ ID NO: 37529 - RNA, 27 nt, synthetic construct
  misc_feature 1..27: note = Vacuolar protein sorting-associated protein 29 (57-65)
  source 1..27: mol_type = other RNA
accctggccggcgacgtgcacatcgtc

SEQ ID NO: 37530 - RNA, 27 nt, synthetic construct
  misc_feature 1..27: note = Nuclear transcription factor Y subunit gamma (147-155)
  source 1..27: mol_type = other RNA
accctggcccagcagcccaccgccgtg

SEQ ID NO: 37531 - RNA, 30 nt, synthetic construct
  misc_feature 1..30: note = Pre-mRNA-splicing factor ATP-dependent RNA helicase DHX15 (266-275)
  source 1..30: mol_type = other RNA
accctggccaccgacatcctcatgggcgtg

SEQ ID NO: 37532 - RNA, 27 nt, synthetic construct
  misc_feature 1..27: note = Heat shock cognate 71 kDa protein (313-321)
  source 1..27: mol_type = other RNA
accctggaccccgtggagaaggccctc

SEQ ID NO: 37533 - RNA, 27 nt, synthetic construct
  misc_feature 1..27: note = EMILIN-2 (411-419)
  source 1..27: mol_type = other RNA
accctggaccagaagatcgagcgcgtg

SEQ ID NO: 37534 - RNA, 27 nt, synthetic construct
  misc_feature 1..27: note = Ubiquitin carboxyl-terminal hydrolase 33 (252-260)
  source 1..27: mol_type = other RNA
accctgttccagggcatcaagaccgtg

SEQ ID NO: 37535 - RNA, 27 nt, synthetic construct
  misc_feature 1..27: note = Cyclic AMP-responsive element-binding protein 1 (213-221)
  source 1..27: mol_type = other RNA
accctgatcgaggagctcaaggccctg

SEQ ID NO: 37536 - RNA, 30 nt, synthetic construct
  misc_feature 1..30: note = Mediator of RNA polymerase II transcription subunit 14 (53-62)
  source 1..30: mol_type = other RNA
accctgatcgagttcctcctgcaccgcgcc

SEQ ID NO: 37537 - RNA, 27 nt, synthetic construct
  misc_feature 1..27: note = Histone-lysine N-methyltransferase 2B (517-525)
  source 1..27: mol_type = other RNA
accctgatcgagaaggtgcaggaggcc

SEQ ID NO: 37538 - RNA, 30 nt, synthetic construct
  misc_feature 1..30: note = Protein arginine N-methyltransferase 3 (288-297)
  source 1..30: mol_type = other RNA
accctgatcaagggcaagatcgaggaggtg

SEQ ID NO: 37539 - RNA, 27 nt, synthetic construct
  misc_feature 1..27: note = UDP-N-acetylglucosamine-dolichyl-phosphate N-acetylglucosaminephosphotransferase (255-263)
  source 1..27: mol_type = other RNA
accctgatcaacctcctgctgaaggtg

SEQ ID NO: 37540 - RNA, 33 nt, synthetic construct
  misc_feature 1..33: note = Peroxisomal acyl-coenzyme A oxidase 1 (597-607)
  source 1..33: mol_type = other RNA
accctgatccgcagcgacgccgtggccctcgtc

SEQ ID NO: 37541 - RNA, 27 nt, synthetic construct
  misc_feature 1..27: note = Ubiquitin-like modifier-activating enzyme 6 (967-975)
  source 1..27: mol_type = other RNA
accctgctcgacttcatcaacgccgtg

SEQ ID NO: 37542 - RNA, 27 nt, synthetic construct
  misc_feature 1..27: note = Coronin (508-516)
  source 1..27: mol_type = other RNA
accctgctcgaggagatcaaggccctg

SEQ ID NO: 37543 - RNA, 27 nt, synthetic construct
  misc_feature 1..27: note = Signal-induced proliferation-associated protein 1 (365-373)
  source 1..27: mol_type = other RNA
accctgctcggcgacgtggtccgcctg

SEQ ID NO: 37544 - RNA, 27 nt, synthetic construct
  misc_feature 1..27: note = 2-hydroxyacyl-CoA lyase 1 (238-246)
  source 1..27: mol_type = other RNA
accctgctcggcaacatccacgccgtg

SEQ ID NO: 37545 - RNA, 30 nt, synthetic construct
  misc_feature 1..30: note = Pecanex-like protein 1 (955-964)
  source 1..30: mol_type = other RNA
accctgctcatcggcagccccctgtccctg

SEQ ID NO: 37546 - RNA, 27 nt, synthetic construct
  misc_feature 1..27: note = Kelch-like protein 22 (490-498)
  source 1..27: mol_type = other RNA
accctgctcaacaagctgtacgtgatc

SEQ ID NO: 37547 - RNA, 27 nt, synthetic construct
  misc_feature 1..27: note = AP-2 complex subunit beta (483-491)
  source 1..27: mol_type = other RNA
accctgctcaccgccatcgtgaagctg

SEQ ID NO: 37548 - RNA, 27 nt, synthetic construct
  misc_feature 1..27: note = Vacuolar protein sorting-associated protein 11 homolog (911-919)
  source 1..27: mol_type = other RNA
accctgctcaccgaccccccgacggcc

SEQ ID NO: 37549 - RNA, 27 nt, synthetic construct
  misc_feature 1..27: note = Fanconi anemia group I protein (1140-1148)
  source 1..27: mol_type = other RNA
accctgctcaccttcttccacgagctg

SEQ ID NO: 37550 - RNA, 27 nt, synthetic construct
  misc_feature 1..27: note = 1-phosphatidylinositol 4,5-bisphosphate phosphodiesterase gamma-1 (436-444)
  source 1..27: mol_type = other RNA
accctgctcaccaagcccgtggagatc

SEQ ID NO: 37551 - RNA, 30 nt, synthetic construct
  misc_feature 1..30: note = Pre-mRNA-processing factor 6 (249-258)
  source 1..30: mol_type = other RNA
accctgatggacatgcgcctcagccaggtg

SEQ ID NO: 37552 - RNA, 30 nt, synthetic construct
  misc_feature 1..30: note = Transgelin-2 (128-137)
  source 1..30: mol_type = other RNA
accctgatgaacctcggcgggctggccgtg

SEQ ID NO: 37553 - RNA, 27 nt, synthetic construct
  misc_feature 1..27: note = Cleft lip and palate transmembrane protein 1 (101-109)
  source 1..27: mol_type = other RNA
accctgatgaacctccacgtgtacatc

SEQ ID NO: 37554 - RNA, 27 nt, synthetic construct
  misc_feature 1..27: note = Nuclear receptor-binding protein (524-532)
  source 1..27: mol_type = other RNA
accctgaacagcgccgccgtgaccgtc

SEQ ID NO: 37555 - RNA, 27 nt, synthetic construct
  misc_feature 1..27: note = Acylglycerol kinase, mitochondrial (127-135)
  source 1..27: mol_type = other RNA
accctgcaggaggtggtcaccggcgtg

SEQ ID NO: 37556 - RNA, 27 nt, synthetic construct
  misc_feature 1..27: note = Baculoviral IAP repeat-containing protein 6 (1801-1809)
  source 1..27: mol_type = other RNA
accctgagcgacgtgctcgaccgcgtc

SEQ ID NO: 37557 - RNA, 27 nt, synthetic construct
  misc_feature 1..27: note = Lysine-specific demethylase 5C (849-857)
  source 1..27: mol_type = other RNA
accctgaccgagctccgcgccttcctg

SEQ ID NO: 37558 - RNA, 27 nt, synthetic construct
  misc_feature 1..27: note = Cytochrome b-c1 complex subunit 9 (5-13)
  source 1..27: mol_type = other RNA
accctgaccagcaagctctactccctg

SEQ ID NO: 37559 - RNA, 27 nt, synthetic construct
  misc_feature 1..27: note = Putative helicase MOV-10 (131-139)
  source 1..27: mol_type = other RNA
accctggtggaggccatcaagcaggtc

SEQ ID NO: 37560 - RNA, 27 nt, synthetic construct
  misc_feature 1..27: note = Transmembrane protein 9B (3-11)
  source 1..27: mol_type = other RNA
accctgtggggcgggctcctgcgcctg

SEQ ID NO: 37561 - RNA, 27 nt, synthetic construct
  misc_feature 1..27: note = Trafficking protein particle complex subunit 9 (207-215)
  source 1..27: mol_type = other RNA
accctgtacgacagccgcctcttcgtg

SEQ ID NO: 37562 - RNA, 30 nt, synthetic construct
  misc_feature 1..30: note = Transmembrane protein 214 (42-51)
  source 1..30: mol_type = other RNA
accctgtacgagcgcggcttcgagaacatc

SEQ ID NO: 37563 - RNA, 27 nt, synthetic construct
  misc_feature 1..27: note = Exportin-6 (594-602)
  source 1..27: mol_type = other RNA
accctgtacggcagccagatcaagctc

SEQ ID NO: 37564 - RNA, 33 nt, synthetic construct
  misc_feature 1..33: note = Insulin-like growth factor 2 mRNA-binding protein 1 (319-329)
  source 1..33: mol_type = other RNA
accctgtacaaccccgagcgcaccatcacggtg

SEQ ID NO: 37565 - RNA, 30 nt, synthetic construct
  misc_feature 1..30: note = AP-1 complex subunit beta-1 (827-836)
  source 1..30: mol_type = other RNA
accctgtaccccctccacatcctgttcgtg

SEQ ID NO: 37566 - RNA, 27 nt, synthetic construct
  misc_feature 1..27: note = Syntaxin-binding protein 3 (176-184)
  source 1..27: mol_type = other RNA
accatggccgaccagatcgtgaccgtc

SEQ ID NO: 37567 - RNA, 27 nt, synthetic construct
  misc_feature 1..27: note = Actin-like protein 6A (279-287)
  source 1..27: mol_type = other RNA
accatgctgggcgtgagccacgtcgtg

SEQ ID NO: 37568 - RNA, 27 nt, synthetic construct
  misc_feature 1..27: note = Tartrate-resistant acid phosphatase type 5 (23-31)
  source 1..27: mol_type = other RNA
acccccgccctgcgcttcgtggccgtc

SEQ ID NO: 37569 - RNA, 30 nt, synthetic construct
  misc_feature 1..30: note = Eukaryotic translation initiation factor 2A (542-551)
  source 1..30: mol_type = other RNA
accccccgcaacaccgtgagccagtccatc

SEQ ID NO: 37570 - RNA, 27 nt, synthetic construct
  misc_feature 1..27: note = Intron-binding protein aquarius (396-404)
  source 1..27: mol_type = other RNA
accaccttcgacaaggagttcctgctc

SEQ ID NO: 37571 - RNA, 33 nt, synthetic construct
  misc_feature 1..33: note = Elongation factor 2 (486-496)
  source 1..33: mol_type = other RNA
accaccttcgagcacgcccacaacatgcgcgtg

SEQ ID NO: 37572 - RNA, 27 nt, synthetic construct
  misc_feature 1..27: note = Nuclear factor of activated T-cells, cytoplasmic 1 (325-333)
  source 1..27: mol_type = other RNA
accaccctggagcagcccccgagcgtg

SEQ ID NO: 37573 - RNA, 27 nt, synthetic construct
  misc_feature 1..27: note = Chromatin complexes subunit BAP18 (72-80)
  source 1..27: mol_type = other RNA
accgtggcccagatcaaggccaccgtc

SEQ ID NO: 37574 - RNA, 27 nt, synthetic construct
  misc_feature 1..27: note = Kelch-like protein 18 (361-369)
  source 1..27: mol_type = other RNA
accgtgttcgagggccgcatctacgtc

SEQ ID NO: 37575 - RNA, 27 nt, synthetic construct
  misc_feature 1..27: note = Ubiquitin carboxyl-terminal hydrolase 10 (731-739)
  source 1..27: mol_type = other RNA
acctaccgcctgttcgccgtggtctac

SEQ ID NO: 37576 - RNA, 27 nt, synthetic construct
  misc_feature 1..27: note Dolichyl-diphosphooligosaccharide-proteinosyltransferase 48 kDa subunit (203-211)
  source 1..27: mol_type = other RNA
gtggccgaccccgacaacccgctggtc

SEQ ID NO: 37577 - RNA, 30 nt, synthetic construct
  misc_feature 1..30: note = Chromodomain-helicase-DNA-binding protein 4 (243-252)
  source 1..30: mol_type = other RNA
gtggcccccccgcccccccccgtcgaggtg

SEQ ID NO: 37578 - RNA, 30 nt, synthetic construct
  misc_feature 1..30: note = Glycogen phosphorylase, liver form (207-216)
  source 1..30: mol_type = other RNA
gtggagcacaccaacaccggcacgaagtgg

SEQ ID NO: 37579 - RNA, 33 nt, synthetic construct
  misc_feature 1..33: note = Prelamin-A/C (78-88)
  source 1..33: mol_type = other RNA
gtggagatcgacaacggcaagcagcgcgagttc

SEQ ID NO: 37580 - RNA, 27 nt, synthetic construct
  misc_feature 1..27: note = GPI transamidase component PIG-T (292-300)
  source 1..27: mol_type = other RNA
gtgcaccccccgcccaccaccacgtac

SEQ ID NO: 37581 - RNA, 27 nt, synthetic construct
  misc_feature 1..27: note = Probable ATP-dependent RNA helicase DDX60-like (866-874)
  source 1..27: mol_type = other RNA
gtgatcttcgacgaggtccactacctg

SEQ ID NO: 37582 - RNA, 27 nt, synthetic construct
  misc_feature 1..27: note = Platelet-activating factor acetylhydrolase IB subunit alpha (114-122)
  source 1..27: mol_type = other RNA
gtgatcttccaccccgtcttcagcgtg

SEQ ID NO: 37583 - RNA, 27 nt, synthetic construct
  misc_feature 1..27: note = ORM1-like protein 2 (54-62)
  source 1..27: mol_type = other RNA
gtgatccacaacctggccacctacgtc

SEQ ID NO: 37584 - RNA, 27 nt, synthetic construct
  misc_feature 1..27: note = Mediator of RNA polymerase II transcription subunit 23 (140-148)
  source 1..27: mol_type = other RNA
gtgatcctggagaagatcctcaccatc

SEQ ID NO: 37585 - RNA, 27 nt, synthetic construct
  misc_feature 1..27: note = Protein Mis18-beta (88-96)
  source 1..27: mol_type = other RNA
gtgctggccgacagcgtccacctcgcc

SEQ ID NO: 37586 - RNA, 33 nt, synthetic construct
  misc_feature 1..33: note = Guanine nucleotide-binding protein G(i) subunit alpha-1 (233-243)
  source 1..33: mol_type = other RNA
gtgctggccgaggacgaggagatgaaccgcatg

SEQ ID NO: 37587 - RNA, 27 nt, synthetic construct
  misc_feature 1..27: note = Bromodomain adjacent to zinc finger domain protein 2A (972-980)
  source 1..27: mol_type = other RNA
gtgctggccttcctcgtccacgagctg

SEQ ID NO: 37588 - RNA, 33 nt, synthetic construct
  misc_feature 1..33: note = Disheveled-associated activator of morphogenesis 2 (194-204)
  source 1..33: mol_type = other RNA
gtgctggcccagcccgaggccatcagcaccatc

SEQ ID NO: 37589 - RNA, 27 nt, synthetic construct
  misc_feature 1..27: note = DNA repair protein RAD50 (1068-1076)
  source 1..27: mol_type = other RNA
gtgctggccagcctcatcatccgcctg

SEQ ID NO: 37590 - RNA, 30 nt, synthetic construct
  misc_feature 1..30: note = Cytoplasmic dynein 1 heavy chain 1 (2318-2327)
  source 1..30: mol_type = other RNA
gtgctggacgacaacaagctcctgaccctg

SEQ ID NO: 37591 - RNA, 30 nt, synthetic construct
  misc_feature 1..30: note = Cytoplasmic FMR1-interacting protein 2 (170-179)
  source 1..30: mol_type = other RNA
gtgctggacgagctcaagaacatgaagtgc

SEQ ID NO: 37592 - RNA, 27 nt, synthetic construct
  misc_feature 1..27: note = Serrate RNA effector molecule homolog (161-169)
  source 1..27: mol_type = other RNA
gtgctggacaagctcctgctgtacctc

SEQ ID NO: 37593 - RNA, 27 nt, synthetic construct
  misc_feature 1..27: note = Protein transport protein Sec61 subunit alpha isoform 1 (354-362)
  source 1..27: mol_type = other RNA
gtgctggaggaccccgtccacgccgtg

SEQ ID NO: 37594 - RNA, 30 nt, synthetic construct
  misc_feature 1..30: note = HLA class I histocompatibility antigen, A-2 alpha chain (291-300)
  source 1..30: mol_type = other RNA
gtgctgttcggcgccgtcatcaccggggcc

SEQ ID NO: 37595 - RNA, 30 nt, synthetic construct
  misc_feature 1..30: note = Fatty acid synthase (743-752)
  source 1..30: mol_type = other RNA
gtgctgttccaggaggccctctggcacgtc

SEQ ID NO: 37596 - RNA, 27 nt, synthetic construct
  misc_feature 1..27: note = Protein VAC14 homolog (32-40)
  source 1..27: mol_type = other RNA
gtgctgggcgagttcctcaaggagatc

SEQ ID NO: 37597 - RNA, 27 nt, synthetic construct
  misc_feature 1..27: note = Mediator of RNA polymerase II transcription subunit 23 (1163-1171)
  source 1..27: mol_type = other RNA
gtgctgcacgaccgcatcgtcagcgtg

SEQ ID NO: 37598 - RNA, 33 nt, synthetic construct
  misc_feature 1..33: note = GPN-loop GTPase 1 (103-113)
  source 1..33: mol_type = other RNA
gtgctgatcgacacccccggccagatcgaggtc

SEQ ID NO: 37599 - RNA, 27 nt, synthetic construct
  misc_feature 1..27: note = Adenosylhomocysteinase (62-70)
  source 1..27: mol_type = other RNA
gtgctgatcgagaccctcgtcaccctg

SEQ ID NO: 37600 - RNA, 33 nt, synthetic construct
  misc_feature 1..33: note = Splicing factor 3B subunit 3 (959-969)
  source 1..33: mol_type = other RNA
gtgctgatcggcgtcgggaagctcctgcgcgtg

SEQ ID NO: 37601 - RNA, 30 nt, synthetic construct
  misc_feature 1..30: note = Membrane-bound transcription factor site-2 protease (164-173)
  source 1..30: mol_type = other RNA
gtgctgatcagcggcgtcgtgcacgagatc

SEQ ID NO: 37602 - RNA, 27 nt, synthetic construct
  misc_feature 1..27: note = Cytoplasmic FMR1-interacting protein 2 (505-513)
  source 1..27: mol_type = other RNA
gtgctgatcagcgtcctccaggccatc

SEQ ID NO: 37603 - RNA, 27 nt, synthetic construct
  misc_feature 1..27: note = Putative helicase MOV-10 (216-224)
  source 1..27: mol_type = other RNA
gtgctgatcaccaccctcatcacggcc

SEQ ID NO: 37604 - RNA, 33 nt, synthetic construct
  misc_feature 1..33: note = Ubiquitin-like protein 4A (77-87)
  source 1..33: mol_type = other RNA
gtgctgctcgaggagggcgaggcccagcgcctg

SEQ ID NO: 37605 - RNA, 33 nt, synthetic construct
  misc_feature 1..33: note = Cleavage stimulation factor subunit 1 (368-378)
  source 1..33: mol_type = other RNA
gtgctgctccccgacgagcgcaccatcagcctg

SEQ ID NO: 37606 - RNA, 27 nt, synthetic construct
  misc_feature 1..27: note = Glycerol-3-phosphate acyltransferase 3 (155-163)
  source 1..27: mol_type = other RNA
gtgctgctccccctgcgcgtcaccctg

SEQ ID NO: 37607 - RNA, 27 nt, synthetic construct
  misc_feature 1..27: note = Eukaryotic translation initiation factor 4 gamma 3 (1360-1368)
  source 1..27: mol_type = other RNA
gtgctgctcagcgagatcctgcacctg

SEQ ID NO: 37608 - RNA, 27 nt, synthetic construct
  misc_feature 1..27: note = Vesicle-trafficking protein SEC22b (2-10)
  source 1..27: mol_type = other RNA
gtgctgctcaccatgatcgcccgcgtc

SEQ ID NO: 37609 - RNA, 27 nt, synthetic construct
  misc_feature 1..27: note = Probable ATP-dependent RNA helicase DDX41 (543-551)
  source 1..27: mol_type = other RNA
gtgctgatggacctcaaggccctgctg

SEQ ID NO: 37610 - RNA, 30 nt, synthetic construct
  misc_feature 1..30: note = Probable ATP-dependent RNA helicase DDX41 (543-552)
  source 1..30: mol_type = other RNA
gtgctgatggacctcaaggccctgctgctc

SEQ ID NO: 37611 - RNA, 30 nt, synthetic construct
  misc_feature 1..30: note = Sterol regulatory element-binding protein 1 (412-421)
  source 1..30: mol_type = other RNA
gtgctgatggagggcgtcaagaccgaggtg

SEQ ID NO: 37612 - RNA, 27 nt, synthetic construct
  misc_feature 1..27: note = Cytoskeleton-associated protein 5 (1259-1267)
  source 1..27: mol_type = other RNA
gtgctgatgaaggccctcgagtacctg

SEQ ID NO: 37613 - RNA, 27 nt, synthetic construct
  misc_feature 1..27: note = Eukaryotic translation initiation factor 4 gamma 1 (187-195)
  source 1..27: mol_type = other RNA
gtgctgatgaaccagcccccgcagatc

SEQ ID NO: 37614 - RNA, 30 nt, synthetic construct
  misc_feature 1..30: note = Ubiquitin-like protein 7 (159-168)
  source 1..30: mol_type = other RNA
gtgctgcaggacaaggacctcttcagcgtc

SEQ ID NO: 37615 - RNA, 27 nt, synthetic construct
  misc_feature 1..27: note = Zinc finger CCCH-type antiviral protein 1 (112-120)
  source 1..27: mol_type = other RNA
gtgctgagcgaggagaacttcaaggtc

SEQ ID NO: 37616 - RNA, 27 nt, synthetic construct
  misc_feature 1..27: note = Probable ubiquitin carboxyl-terminal hydrolase FAF-X (2317-2325)
  source 1..27: mol_type = other RNA
gtgctgagcgagctcctgtggcaggtc

SEQ ID NO: 37617 - RNA, 27 nt, synthetic construct
  misc_feature 1..27: note = Phosphatidylinositol N-acetylglucosaminyltransferase subunit A (165-173)
  source 1..27: mol_type = other RNA
gtgctgaccaacaagctcctgaccgtc

SEQ ID NO: 37618 - RNA, 27 nt, synthetic construct
  misc_feature 1..27: note = UPF0505 protein C16orf62 (670-678)
  source 1..27: mol_type = other RNA
gtgctggtccagctcatccacagcgtg

SEQ ID NO: 37619 - RNA, 30 nt, synthetic construct
  misc_feature 1..30: note = Coiled-coil domain-containing protein 84 (84-93)
  source 1..30: mol_type = other RNA
gtgctgtacggcgggctcctggagcacctg

SEQ ID NO: 37620 - RNA, 30 nt, synthetic construct
  misc_feature 1..30: note = Signal recognition particle subunit SRP68 (231-240)
  source 1..30: mol_type = other RNA
gtgctgtacaaccagcgcgtcgaggagatc

SEQ ID NO: 37621 - RNA, 27 nt, synthetic construct
  misc_feature 1..27: note = BTB/POZ domain-containing protein 2 (212-220)
  source 1..27: mol_type = other RNA
gtgatgttcaaggagcccgtcgaggtg

SEQ ID NO: 37622 - RNA, 30 nt, synthetic construct
  misc_feature 1..30: note = Ligand-dependent nuclear receptor-interacting factor 1 (358-367)
  source 1..30: mol_type = other RNA
gtgatgttcaacggcaaggtctacctgctc

SEQ ID NO: 37623 - RNA, 30 nt, synthetic construct
  misc_feature 1..30: note = Poly(rC)-binding protein 2 (165-174)
  source 1..30: mol_type = other RNA
gtgatgctggagagccccccgaagggcgtc

SEQ ID NO: 37624 - RNA, 27 nt, synthetic construct
  misc_feature 1..27: note = Vesicle-associated membrane protein 4 (66-74)
  source 1..27: mol_type = other RNA
gtgatgcaggagaacatcaccaaggtc

SEQ ID NO: 37625 - RNA, 30 nt, synthetic construct
  misc_feature 1..30: note = Transient receptor potential cation channel subfamily V member 2 (730-739)
  source 1..30: mol_type = other RNA
gtgccccgcaccctggagaacccggtcctc

SEQ ID NO: 37626 - RNA, 27 nt, synthetic construct
  misc_feature 1..27: note = UPF0606 protein KIAA1549L (15-23)
  source 1..27: mol_type = other RNA
gtgcccagcctgcacatcaccaccctc

SEQ ID NO: 37627 - RNA, 27 nt, synthetic construct
  misc_feature 1..27: note = Cholinesterase (308-316)
  source 1..27: mol_type = other RNA
gtgccctacggcaccccgctgagcgtc

SEQ ID NO: 37628 - RNA, 27 nt, synthetic construct
  misc_feature 1..27: note = Phosphatidylglycerophosphatase and protein-tyrosine phosphatase 1 (6-14)
  source 1..27: mol_type = other RNA
gtgcaggacgagaacgtccgcggcgtg

SEQ ID NO: 37629 - RNA, 30 nt, synthetic construct
  misc_feature 1..30: note = Pre-mRNA-processing-splicing factor 8 (1168-1177)
  source 1..30: mol_type = other RNA
gtgcagtgggagaacagcttcgtctccgtg

SEQ ID NO: 37630 - RNA, 24 nt, synthetic construct
  misc_feature 1..24: note = Nucleoprotein TPR (1846-1853)
  source 1..24: mol_type = other RNA
gtgagcgacgacaccgtcgagatg

SEQ ID NO: 37631 - RNA, 24 nt, synthetic construct
  misc_feature 1..24: note = Proliferating cell nuclear antigen (111-118)
  source 1..24: mol_type = other RNA
gtgagcgactacgagatgaagctg

SEQ ID NO: 37632 - RNA, 27 nt, synthetic construct
  misc_feature 1..27: note = SHC-transforming protein 1 (77-85)
  source 1..27: mol_type = other RNA
gtgacccgcgaggccatcagcctggtc

SEQ ID NO: 37633 - RNA, 27 nt, synthetic construct
  misc_feature 1..27: note = Uncharacterized protein C11orf24 (396-404)
  source 1..27: mol_type = other RNA
gtggtcgacaagaccctgctcctggtg

SEQ ID NO: 37634 - RNA, 27 nt, synthetic construct
  misc_feature 1..27: note = Protein SZT2 (1295-1303)
  source 1..27: mol_type = other RNA
gtggtctggggcaccgtgatccgcgtg

SEQ ID NO: 37635 - RNA, 27 nt, synthetic construct
  misc_feature 1..27: note = N-alpha-acetyltransferase 20 (118-126)
  source 1..27: mol_type = other RNA
gtgtaccgcaccgtcatcgagtactac

SEQ ID NO: 37636 - RNA, 27 nt, synthetic construct
  misc_feature 1..27: note = E3 ubiquitin-protein ligase UBR5 (446-454)
  source 1..27: mol_type = other RNA
tgggtggacgagaccctgagctccgtc

SEQ ID NO: 37637 - RNA, 27 nt, synthetic construct
  misc_feature 1..27: note = 60S ribosomal protein L32 (95-103)
  source 1..27: mol_type = other RNA
tactgcgccgagatcgcccacaacgtg

SEQ ID NO: 37638 - RNA, 27 nt, synthetic construct
  misc_feature 1..27: note = EF-hand calcium-binding domain-containing protein 7 (548-556)
  source 1..27: mol_type = other RNA
tacgagaacatcatcgtgcacacctac

SEQ ID NO: 37639 - RNA, 27 nt, synthetic construct
  misc_feature 1..27: note = Catenin beta-1 (489-497)
  source 1..27: mol_type = other RNA
tacggcctgcccgtggtcgtgaagctc

SEQ ID NO: 37640 - RNA, 30 nt, synthetic construct
  misc_feature 1..30: note = Signal recognition particle subunit SRP68 (333-342)
  source 1..30: mol_type = other RNA
tacatcctggagggcgagcccgggaaggtg

SEQ ID NO: 37641 - RNA, 27 nt, synthetic construct
  misc_feature 1..27: note = Protein timeless homolog (772-780)
  source 1..27: mol_type = other RNA
tacatcctgggcaagttcttcgccctc

SEQ ID NO: 37642 - RNA, 27 nt, synthetic construct
  misc_feature 1..27: note = Glucose-fructose oxidoreductase domain-containing protein 2 (181-189)
  source 1..27: mol_type = other RNA
tacatcgtggacctgctcacccacctg

SEQ ID NO: 37643 - RNA, 27 nt, synthetic construct
  misc_feature 1..27: note = Kelch repeat and BTB domain-containing protein 4 (141-149)
  source 1..27: mol_type = other RNA
tacatctaccacggcaccgtgaagctg

SEQ ID NO: 37644 - RNA, 27 nt, synthetic construct
  misc_feature 1..27: note = FACT complex subunit SSRP1 (232-240)
  source 1..27: mol_type = other RNA
tacaagatcccctacaccaccgtgctg

SEQ ID NO: 37645 - RNA, 27 nt, synthetic construct
  misc_feature 1..27: note = Nucleolar protein 6 (206-214)
  source 1..27: mol_type = other RNA
tacctggcccacctcgcccaccacctg

SEQ ID NO: 37646 - RNA, 30 nt, synthetic construct
  misc_feature 1..30: note = NAD kinase (302-311)
  source 1..30: mol_type = other RNA
tacctggacggccacctcatcaccaccgtg

SEQ ID NO: 37647 - RNA, 30 nt, synthetic construct
  misc_feature 1..30: note = S-phase kinase-associated protein 1 (33-42)
  source 1..30: mol_type = other RNA
tacctggacatcaagggcctcctggacgtg

SEQ ID NO: 37648 - RNA, 27 nt, synthetic construct
  misc_feature 1..27: note = Transcription cofactor vestigial-like protein 4 (13-21)
  source 1..27: mol_type = other RNA
tacctggacaagatgaacaacaacatc

SEQ ID NO: 37649 - RNA, 27 nt, synthetic construct
  misc_feature 1..27: note = Zinc finger protein 655 (93-101)
  source 1..27: mol_type = other RNA
tacctggaccccgtgcagcgcgacctc

SEQ ID NO: 37650 - RNA, 30 nt, synthetic construct
  misc_feature 1..30: note = Methyltransferase-like protein 9 (41-50)
  source 1..30: mol_type = other RNA
tacctggaccagggcacccagatcttcctc

SEQ ID NO: 37651 - RNA, 27 nt, synthetic construct
  misc_feature 1..27: note = Ubiquitin-conjugating enzyme E2 variant 3 (132-140)
  source 1..27: mol_type = other RNA
tacctggacgtggtccagagcaacgtg

SEQ ID NO: 37652 - RNA, 27 nt, synthetic construct
  misc_feature 1..27: note = Nuclear factor erythroid 2-related factor 3 (299-307)
  source 1..27: mol_type = other RNA
tacctggaggacaccgaccgcaacctc

SEQ ID NO: 37653 - RNA, 27 nt, synthetic construct
  misc_feature 1..27: note = MKI67 FHA domain-interacting nucleolar phosphoprotein (43-51)
  source 1..27: mol_type = other RNA
tacctgttcggcgagcgcctcctggag

SEQ ID NO: 37654 - RNA, 33 nt, synthetic construct
  misc_feature 1..33: note = Pyridoxal-dependent decarboxylase domain-containing protein 1 (347-357)
  source 1..33: mol_type = other RNA
tacctgggcctcgacgggttcgtggagcgcatc

SEQ ID NO: 37655 - RNA, 30 nt, synthetic construct
  misc_feature 1..30: note = Unconventional myosin-Id (612-621)
  source 1..30: mol_type = other RNA
tacctgggcctcctggagaacgtgcgcgtc

SEQ ID NO: 37656 - RNA, 27 nt, synthetic construct
  misc_feature 1..27: note = 60S ribosomal protein L13a (137-145)
  source 1..27: mol_type = other RNA
tacctgggccgcctcgcccacgaggtg

SEQ ID NO: 37657 - RNA, 27 nt, synthetic construct
  misc_feature 1..27: note = Ubiquitin-like domain-containing CTD phosphatase 1 (165-173)
  source 1..27: mol_type = other RNA
tacctgcacgagttcctcaccagcgcc

SEQ ID NO: 37658 - RNA, 27 nt, synthetic construct
  misc_feature 1..27: note = Vam6/Vps39-like protein (368-376)
  source 1..27: mol_type = other RNA
tacctgcacaccaacgtggccctcgtc

SEQ ID NO: 37659 - RNA, 27 nt, synthetic construct
  misc_feature 1..27: note = GTP-binding protein 2 (227-235)
  source 1..27: mol_type = other RNA
tacctgcacaccaccatcttcggcctc

SEQ ID NO: 37660 - RNA, 30 nt, synthetic construct
  misc_feature 1..30: note = Isoleucine-tRNA ligase, cytoplasmic (626-635)
  source 1..30: mol_type = other RNA
tacctgatcaacagccccgtggtccgcgcc

SEQ ID NO: 37661 - RNA, 30 nt, synthetic construct
  misc_feature 1..30: note = Pre-mRNA-processing-splicing factor 8 (794-803)
  source 1..30: mol_type = other RNA
tacctgaaggacggcccctacatcaccgcc

SEQ ID NO: 37662 - RNA, 30 nt, synthetic construct
  misc_feature 1..30: note = E3 ubiquitin-protein ligase MARCH6 (514-523)
  source 1..30: mol_type = other RNA
tacctgctcgacctgcacagctacctgctc

SEQ ID NO: 37663 - RNA, 30 nt, synthetic construct
  misc_feature 1..30: note = Ninein (544-553)
  source 1..30: mol_type = other RNA
tacctgctcgaggagaagatcgccagcctg

SEQ ID NO: 37664 - RNA, 27 nt, synthetic construct
  misc_feature 1..27: note = Unconventional myosin-Va (242-250)
  source 1..27: mol_type = other RNA
tacctgctcgagaagagccgcgtggtc

SEQ ID NO: 37665 - RNA, 30 nt, synthetic construct
  misc_feature 1..30: note = EH domain-containing protein 4 (80-89)
  source 1..30: mol_type = other RNA
tacctgctcgagcaggacttccccggcatg

SEQ ID NO: 37666 - RNA, 27 nt, synthetic construct
  misc_feature 1..27: note = Protein fem-1 homolog A (168-176)
  source 1..27: mol_type = other RNA
tacctgctcgagcagggcgcccaggtg

SEQ ID NO: 37667 - RNA, 27 nt, synthetic construct
  misc_feature 1..27: note = PCI domain-containing protein 2 (252-260)
  source 1..27: mol_type = other RNA
tacctgctccccgtgaagatgctgctg

SEQ ID NO: 37668 - RNA, 27 nt, synthetic construct
  misc_feature 1..27: note = Pecanex-like protein 3 (1380-1388)
  source 1..27: mol_type = other RNA
tacctgaacgccctcgtgcacctgatc

SEQ ID NO: 37669 - RNA, 27 nt, synthetic construct
  misc_feature 1..27: note = Malignant T-cell-amplified sequence 1 (170-178)
  source 1..27: mol_type = other RNA
tacctgaacgacggcctctggcacatg

SEQ ID NO: 37670 - RNA, 27 nt, synthetic construct
  misc_feature 1..27: note = Elongation factor 2 (171-179)
  source 1..27: mol_type = other RNA
tacctgaacgagatcaaggacagcgtg

SEQ ID NO: 37671 - RNA, 33 nt, synthetic construct
  misc_feature 1..33: note = H/ACA ribonucleoprotein complex subunit 3 (6-16)
  source 1..33: mol_type = other RNA
tacctgaacgagcagggcgaccgcgtgtacacc

SEQ ID NO: 37672 - RNA, 27 nt, synthetic construct
  misc_feature 1..27: note = Ferritin heavy chain (11-19)
  source 1..27: mol_type = other RNA
tacctgaacgagcaggtgaaggccatc

SEQ ID NO: 37673 - RNA, 30 nt, synthetic construct
  misc_feature 1..30: note = T-complex protein 1 subunit theta (278-287)
  source 1..30: mol_type = other RNA
tacctgagcgaggtgggcgacacccaggtc

SEQ ID NO: 37674 - RNA, 27 nt, synthetic construct
  misc_feature 1..27: note = Probable C-mannosyltransferase DPY19L1 (356-364)
  source 1..27: mol_type = other RNA
tacctgaccagcaagatcttcggcatc

SEQ ID NO: 37675 - RNA, 27 nt, synthetic construct
  misc_feature 1..27: note = Circadian clock protein PASD1 (168-176)
  source 1..27: mol_type = other RNA
tacctggtgggcaacgtctgcatcctc

SEQ ID NO: 37676 - RNA, 27 nt, synthetic construct
  misc_feature 1..27: note = Protocadherin beta-6 (446-454)
  source 1..27: mol_type = other RNA
tacctggtgaccaaggtcgtggccgtg

SEQ ID NO: 37677 - RNA, 27 nt, synthetic construct
  misc_feature 1..27: note = Myotubularin-related protein 4 (250-258)
  source 1..27: mol_type = other RNA
tacctggtgaccagcatcgccaaggcc

SEQ ID NO: 37678 - RNA, 30 nt, synthetic construct
  misc_feature 1..30: note = F-actin-capping protein subunit beta (120-129)
  source 1..30: mol_type = other RNA
tacctgtgggacctcgaccacggcttcgcc

SEQ ID NO: 37679 - RNA, 27 nt, synthetic construct
  misc_feature 1..27: note = Growth arrest and DNA damage-inducible protein GADD45 alpha (118-126)
  source 1..27: mol_type = other RNA
tacatggaccagtgggtgcccgtcatc

SEQ ID NO: 37680 - RNA, 27 nt, synthetic construct
  misc_feature 1..27: note = Signal transducing adapter molecule 2 (404-412)
  source 1..27: mol_type = other RNA
tacatgggccagagcatccaccaggtg

SEQ ID NO: 37681 - RNA, 33 nt, synthetic construct
  misc_feature 1..33: note = SWI/SNF-related matrix-associated actin-dependent regulator of chromatin subfamily B member 1 (26-36)
  source 1..33: mol_type = other RNA
tacatgatcggcagcgaggtggggaactacctg

SEQ ID NO: 37682 - RNA, 30 nt, synthetic construct
  misc_feature 1..30: note = Serine palmitoyltransferase small subunit A (24-33)
  source 1..30: mol_type = other RNA
tacatgctggagccctgggagcgcaccgtg

SEQ ID NO: 37683 - RNA, 27 nt, synthetic construct
  misc_feature 1..27: note = Kinetochore protein Nuf2 (65-73)
  source 1..27: mol_type = other RNA
tacatgatgcccgtgaacagcgaggtc

SEQ ID NO: 37684 - RNA, 27 nt, synthetic construct
  misc_feature 1..27: note = G patch domain-containing protein 11 (33-41)
  source 1..27: mol_type = other RNA
tacatgagcgactccttcatcaacgtg

SEQ ID NO: 37685 - RNA, 27 nt, synthetic construct
  misc_feature 1..27: note = Transcription factor SOX-8 (6-14)
  source 1..27: mol_type = other RNA
tacccccacctgcacaacgccgagctc

SEQ ID NO: 37686 - RNA, 27 nt, synthetic construct
  misc_feature 1..27: note = Immunoglobulin-binding protein 1 (259-267)
  source 1..27: mol_type = other RNA
taccccagcctgccgaccatgaccgtg

SEQ ID NO: 37687 - RNA, 33 nt, synthetic construct
  misc_feature 1..33: note = RNA-binding motif protein 22 (253-263)
  source 1..33: mol_type = other RNA
taccagttcggcgagatccgcaccatcaccgtg

SEQ ID NO: 37688 - RNA, 27 nt, synthetic construct
  misc_feature 1..27: note = NADH dehydrogenase (ubiquinone) iron-sulfur protein 2, mitochondrial (245-253)
  source 1..27: mol_type = other RNA
taccagttcagcaagaacttctccctg

SEQ ID NO: 37689 - RNA, 27 nt, synthetic construct
  misc_feature 1..27: note = GRB2-associated-binding protein 2 (324-332)
  source 1..27: mol_type = other RNA
taccagatcccccgcaccttcaccctg

SEQ ID NO: 37690 - RNA, 27 nt, synthetic construct
  misc_feature 1..27: note = Copper-transporting ATPase 1 (1410-1418)
  source 1..27: mol_type = other RNA
taccgcaagcccacctacgagagctac

SEQ ID NO: 37691 - RNA, 33 nt, synthetic construct
  misc_feature 1..33: note = Tuberin (602-612)
  source 1..33: mol_type = other RNA
tacaccctgcccatcgccagctccatccgcctc

SEQ ID NO: 37692 - RNA, 27 nt, synthetic construct
  misc_feature 1..27: note = Heterogeneous nuclear ribonucleoprotein U-like protein 1 (797-805)
  source 1..27: mol_type = other RNA
tacacccccccgcccccccccaccgcc

SEQ ID NO: 37693 - RNA, 27 nt, synthetic construct
  misc_feature 1..27: note = PAS domain-containing serine/threonine-protein kinase (890-898)
  source 1..27: mol_type = other RNA
tacacctgggaggaggtgttccgcgtc

SEQ ID NO: 37694 - RNA, 48 nt, synthetic construct
  misc_feature 1..48: note = Selenoprotein H (51-66)
  source 1..48: mol_type = other RNA
gccgccgcgctgagccaggccctccgcctggaggcccccgagctgccg

SEQ ID NO: 37695 - RNA, 45 nt, synthetic construct
  misc_feature 1..45: note = 40S ribosomal protein S26 (47-61)
  source 1..45: mol_type = other RNA
gccgccgcggtgcgcgacatcagcgaggcctccgtcttcgacgcc

SEQ ID NO: 37696 - RNA, 51 nt, synthetic construct
  misc_feature 1..51: note = Profilin-1 (33-49)
  source 1..51: mol_type = other RNA
gccgccgtgcccggcaagaccttcgtcaacatcaccccggcggaggtgggg

SEQ ID NO: 37697 - RNA, 39 nt, synthetic construct
  misc_feature 1..39: note = Calmodulin (58-70)
  source 1..39: mol_type = other RNA
gccgacggcaacgggaccatcgacttccccgagttcctg

SEQ ID NO: 37698 - RNA, 39 nt, synthetic construct
  misc_feature 1..39: note = Coiled-coil and C2 domain-containing protein 2A (1275-1287)
  source 1..39: mol_type = other RNA
gccgagtgcgccctgaagttccccaaccgccagtgcctc

SEQ ID NO: 37699 - RNA, 30 nt, synthetic construct
  misc_feature 1..30: note = Helicase ARIP4 (881-890)
  source 1..30: mol_type = other RNA
gccgagaagaaggccgcgaagaagagctac

SEQ ID NO: 37700 - RNA, 36 nt, synthetic construct
  misc_feature 1..36: note = NHP2-like protein 1 (60-71)
  source 1..36: mol_type = other RNA
gccgagcccctggagatcatcctccacctgccgctg

SEQ ID NO: 37701 - RNA, 42 nt, synthetic construct
  misc_feature 1..42: note = Uncharacterized protein C20orf144 (70-83)
  source 1..42: mol_type = other RNA
gccggcctggggagccccgccgcgccgcgcctccggggcgcc

SEQ ID NO: 37702 - RNA, 39 nt, synthetic construct
  misc_feature 1..39: note = ATP synthase mitochondrial F1 complex assembly factor 1 (20-32)
  source 1..39: mol_type = other RNA
gccggcctgtaccgcgggctctgcgccgtgcggagccgc

SEQ ID NO: 37703 - RNA, 60 nt, synthetic construct
  misc_feature 1..60: note = Gamma-soluble NSF attachment protein (267-286)
  source 1..60: mol_type = other RNA
gccaagctgggcctcagcctggtggtccccgggggcgggatcaagaagaagtccccggcc

SEQ ID NO: 37704 - RNA, 54 nt, synthetic construct
  misc_feature 1..54: note = Deoxyuridine 5'-triphosphate nucleotidohydrolase, mitochondrial (124-141)
  source 1..54: mol_type = other RNA
gccctggacgacaccgagcgcggcagcgggggcttcgggtccaccggcaagaac

SEQ ID NO: 37705 - RNA, 30 nt, synthetic construct
  misc_feature 1..30: note = Lysine-specific demethylase 6A (1264-1273)
  source 1..30: mol_type = other RNA
gccctgatcgccgcgggcaaggagatcatc

SEQ ID NO: 37706 - RNA, 30 nt, synthetic construct
  misc_feature 1..30: note = Protein S100-A6 (81-90)
  source 1..30: mol_type = other RNA
gccctgatctacaacgaggccctcaagggc

SEQ ID NO: 37707 - RNA, 42 nt, synthetic construct
  misc_feature 1..42: note = Collagen alpha-2(VIII) chain (568-581)
  source 1..42: mol_type = other RNA
gccctgtacaagaacaacgtgcccgccacctacacctacgac

SEQ ID NO: 37708 - RNA, 39 nt, synthetic construct
  misc_feature 1..39: note = Peroxiredoxin-5, mitochondrial (54-66)
  source 1..39: mol_type = other RNA
gcccccatcaaggtgggcgacgccatcccggcggtcgag

SEQ ID NO: 37709 - RNA, 33 nt, synthetic construct
  misc_feature 1..33: note = Neuroblast differentiation-associated protein AHNAK (105-115)
  source 1..33: mol_type = other RNA
gcccccaagatcagcatgccggacatcgacctg

SEQ ID NO: 37710 - RNA, 33 nt, synthetic construct
  misc_feature 1..33: note = Ephrin type-B receptor 1 (422-432)
  source 1..33: mol_type = other RNA
gcccccagcaccgtgccgatcatgcaccaggtc

SEQ ID NO: 37711 - RNA, 51 nt, synthetic construct
  misc_feature 1..51: note = Fer-1-like protein 5 (176-192)
  source 1..51: mol_type = other RNA
gcccgccagctgatgggcaacaacatcaagcccgtggtcaaggtgagcatc

SEQ ID NO: 37712 - RNA, 39 nt, synthetic construct
  misc_feature 1..39: note = Molybdenum cofactor sulfurase (561-573)
  source 1..39: mol_type = other RNA
gcccgcacccagcccaccccgagcgagaaggccgcgggc

SEQ ID NO: 37713 - RNA, 48 nt, synthetic construct
  misc_feature 1..48: note = Protein LAP2 (1003-1018)
  source 1..48: mol_type = other RNA
gccagcttccccccgcagctgctcccccgctccgagagcaccgagaac

SEQ ID NO: 37714 - RNA, 45 nt, synthetic construct
  misc_feature 1..45: note = Cysteine-rich protein 2 (59-73)
  source 1..45: mol_type = other RNA
gccaccctgttcggccccaagggggtgaacatcggcggggccggc

SEQ ID NO: 37715 - RNA, 48 nt, synthetic construct
  misc_feature 1..48: note = Sodium channel and clathrin linker 1 (424-439)
  source 1..48: mol_type = other RNA
gccgtggaggaggagctggagaagatctaccgcgagggccgggggaac

SEQ ID NO: 37716 - RNA, 36 nt, synthetic construct
  misc_feature 1..36: note = Interferon-induced protein with tetratricopeptide repeats 2 (285-296)
  source 1..36: mol_type = other RNA
tgccagatcggctgctgctaccgcgccaaggtgttc

SEQ ID NO: 37717 - RNA, 75 nt, synthetic construct
  misc_feature 1..75: note = Fas-binding factor 1 (99-123)
  source 1..75: mol_type = other RNA
gacgccgacatcctgggcctcaagaagagcaactccgcccccagcaagaaggcggccaaggacccggggaagggc

SEQ ID NO: 37718 - RNA, 51 nt, synthetic construct
  misc_feature 1..51: note = IQ motif and SEC7 domain-containing protein 2 (977-993)
  source 1..51: mol_type = other RNA
gacttcatcaagaacctgcgcggcgtggacaacggggaggacatcccccgg

SEQ ID NO: 37719 - RNA, 39 nt, synthetic construct
  misc_feature 1..39: note = Peptidyl-prolyl cis-trans isomerase A (9-21)
  source 1..39: mol_type = other RNA
gacatcgccgtggacggcgagcccctggggcgcgtcagc

SEQ ID NO: 37720 - RNA, 48 nt, synthetic construct
  misc_feature 1..48: note = Peptidyl-prolyl cis-trans isomerase A (9-24)
  source 1..48: mol_type = other RNA
gacatcgccgtggacggcgagcccctggggcgcgtcagcttcgagctc

SEQ ID NO: 37721 - RNA, 45 nt, synthetic construct
  misc_feature 1..45: note = Beta-secretase 1 (93-107)
  source 1..45: mol_type = other RNA
gacaccggcagctccaacttcgccgtgggggccgcgccccacccg

SEQ ID NO: 37722 - RNA, 42 nt, synthetic construct
  misc_feature 1..42: note = Elongation factor 1-alpha 1 (252-265)
  source 1..42: mol_type = other RNA
gacgtgtacaagatcggcgggatcggcaccgtccccgtgggg

SEQ ID NO: 37723 - RNA, 42 nt, synthetic construct
  misc_feature 1..42: note = GDNF family receptor alpha-1 (117-130)
  source 1..42: mol_type = other RNA
gaggacagcccctacgagccggtgaactcccgcctgagcgac

SEQ ID NO: 37724 - RNA, 30 nt, synthetic construct
  misc_feature 1..30: note = H/ACA ribonucleoprotein complex subunit 2 (144-153)
  source 1..30: mol_type = other RNA
gaggaggtgcagagcctgcccctcccgctg

SEQ ID NO: 37725 - RNA, 42 nt, synthetic construct
  misc_feature 1..42: note = Rho guanine nucleotide exchange factor 17 (425-438)
  source 1..42: mol_type = other RNA
gagggcctgctccgcagccaggcccggacccgcgccaagggg

SEQ ID NO: 37726 - RNA, 42 nt, synthetic construct
  misc_feature 1..42: note = Uncharacterized protein C2orf15 (95-108)
  source 1..42: mol_type = other RNA
gagggcaccgggaccggcagcctgtccgggaaggccctcggc

SEQ ID NO: 37727 - RNA, 36 nt, synthetic construct
  misc_feature 1..36: note = Nesprin-3 (221-232)
  source 1..36: mol_type = other RNA
gagcacgaggagtaccaggccggcgtggacgagttc

SEQ ID NO: 37728 - RNA, 45 nt, synthetic construct
  misc_feature 1..45: note = Ankyrin repeat domain-containing protein 35 (351-365)
  source 1..45: mol_type = other RNA
gagccccgcgccagcggcaagcaggggtccagcctgcggccgggc

SEQ ID NO: 37729 - RNA, 36 nt, synthetic construct
  misc_feature 1..36: note = Probable ATP-dependent RNA helicase DDX53 (502-513)
  source 1..36: mol_type = other RNA
gagcagagcgaccaggagcgcgccgtggaggacttc

SEQ ID NO: 37730 - RNA, 54 nt, synthetic construct
  misc_feature 1..54: note = DNA-binding protein RFX6 (414-431)
  source 1..54: mol_type = other RNA
gagcgcgtggacctgaacagcatcggctcccaggccctcctgaccatcagcggg

SEQ ID NO: 37731 - RNA, 39 nt, synthetic construct
  misc_feature 1..39: note = Annexin A2 (242-254)
  source 1..39: mol_type = other RNA
gagagcatccgcaaggaggtgaagggcgacctggagaac

SEQ ID NO: 37732 - RNA, 42 nt, synthetic construct
  misc_feature 1..42: note = Annexin A2 (242-255)
  source 1..42: mol_type = other RNA
gagagcatccgcaaggaggtgaagggcgacctggagaacgcc

SEQ ID NO: 37733 - RNA, 33 nt, synthetic construct
  misc_feature 1..33: note = Elongation factor 1-alpha 1 (280-290)
  source 1..33: mol_type = other RNA
ttcgcccccgtgaacgtcaccaccgaggtgaag

SEQ ID NO: 37734 - RNA, 33 nt, synthetic construct
  misc_feature 1..33: note = Plasminogen activator inhibitor 1 RNA-binding protein (21-31)
  source 1..33: mol_type = other RNA
ttcgacgacgagagcgaccccttcgaggtgctg

SEQ ID NO: 37735 - RNA, 42 nt, synthetic construct
  misc_feature 1..42: note = Peptidyl-prolyl cis-trans isomerase A (8-21)
  source 1..42: mol_type = other RNA
ttcgacatcgccgtggacggcgagcccctggggcgcgtcagc

SEQ ID NO: 37736 - RNA, 48 nt, synthetic construct
  misc_feature 1..48: note = Peptidyl-prolyl cis-trans isomerase A (8-23)
  source 1..48: mol_type = other RNA
ttcgacatcgccgtggacggcgagcccctggggcgcgtcagcttcgag

SEQ ID NO: 37737 - RNA, 27 nt, synthetic construct
  misc_feature 1..27: note = Alpha-2-macroglobulin receptor-associated protein (252-260)
  source 1..27: mol_type = other RNA
ttcgaggagccccgcgtgatcgacctg

SEQ ID NO: 37738 - RNA, 45 nt, synthetic construct
  misc_feature 1..45: note = BTB/POZ domain-containing protein KCTD7 (96-110)
  source 1..45: mol_type = other RNA
ttcatcgaccgcgacggcacccacttcggggacgtgctgaacttc

SEQ ID NO: 37739 - RNA, 33 nt, synthetic construct
  misc_feature 1..33: note = Small nuclear ribonucleoprotein Sm D1 (74-84)
  source 1..33: mol_type = other RNA
ttcatcctgcccgacagcctcccgctggacacc

SEQ ID NO: 37740 - RNA, 27 nt, synthetic construct
  misc_feature 1..27: note = Proteasome activator complex subunit 2 (35-43)
  source 1..27: mol_type = other RNA
ttcctgccccagaagatcatctacctc

SEQ ID NO: 37741 - RNA, 36 nt, synthetic construct
  misc_feature 1..36: note = Triosephosphate isomerase (230-241)
  source 1..36: mol_type = other RNA
ttcctggtgggcggggccagcctcaagcccgagttc

SEQ ID NO: 37742 - RNA, 36 nt, synthetic construct
  misc_feature 1..36: note = Protein FAM208B (156-167)
  source 1..36: mol_type = other RNA
ttccgcagccccctgtccaccggcgtgaaggacctc

SEQ ID NO: 37743 - RNA, 72 nt, synthetic construct
  misc_feature 1..72: note = Elongation factor 1-alpha 1 (190-213)
  source 1..72: mol_type = other RNA
ttcgtgcccatcagcggctggaacggggacaacatgctggagccgtccgccaacatgccctggttcaagggc

SEQ ID NO: 37744 - RNA, 42 nt, synthetic construct
  misc_feature 1..42: note = Fanconi anemia group M protein (201-214)
  source 1..42: mol_type = other RNA
ggcgcctgccccgccgcggagatcaagtgcctggtgatcgac

SEQ ID NO: 37745 - RNA, 24 nt, synthetic construct
  misc_feature 1..24: note = Collagen alpha-4(IV) chain (170-177)
  source 1..24: mol_type = other RNA
ggcgagaaggggaacagcgtgttc

SEQ ID NO: 37746 - RNA, 63 nt, synthetic construct
  misc_feature 1..63: note = Heterogeneous nuclear ribonucleoproteins A2/B1 (333-353)
  source 1..63: mol_type = other RNA
ggcgggaactacggccccgggggcagcgggggctccggcgggtacggcgggcgcagccggtac

SEQ ID NO: 37747 - RNA, 39 nt, synthetic construct
  misc_feature 1..39: note = Structural maintenance of chromosomes protein 4 (528-540)
  source 1..39: mol_type = other RNA
ggcatctacgggcgcctgggcgacctcggggccatcgac

SEQ ID NO: 37748 - RNA, 54 nt, synthetic construct
  misc_feature 1..54: note = 60S ribosomal protein L5 (207-224)
  source 1..54: mol_type = other RNA
ggcaaggagaccagccccctgcagaccccggtggtccccgagaaccgcttcccc

SEQ ID NO: 37749 - RNA, 45 nt, synthetic construct
  misc_feature 1..45: note = Charged multivesicular body protein 7 (48-62)
  source 1..45: mol_type = other RNA
ggcctggccaccgtgctccaggacctgctgcgccggggggagctc

SEQ ID NO: 37750 - RNA, 39 nt, synthetic construct
  misc_feature 1..39: note = Complement C4-A (1353-1365)
  source 1..39: mol_type = other RNA
ggcctggaggaggagctccagttcagcctggggtccaag

SEQ ID NO: 37751 - RNA, 51 nt, synthetic construct
  misc_feature 1..51: note = Complement C4-A (1353-1369)
  source 1..51: mol_type = other RNA
ggcctggaggaggagctccagttcagcctggggtccaagatcaacgtgaag

SEQ ID NO: 37752 - RNA, 69 nt, synthetic construct
  misc_feature 1..69: note = Collagen alpha-1(XIX) chain (351-373)
  source 1..69: mol_type = other RNA
ggcctgaagggggacaagggcgagaccgggctccccggcttcccggggagcgtgggccccaagggccag

SEQ ID NO: 37753 - RNA, 60 nt, synthetic construct
  misc_feature 1..60: note = Neuronal tyrosine-phosphorylated phosphoinositide-3-kinase adapter 2 (33-52)
  source 1..60: mol_type = other RNA
ggcctggtgatccagaacgccagcgacatcgcccgcgagaacgaccggctccgcaacgag

SEQ ID NO: 37754 - RNA, 60 nt, synthetic construct
  misc_feature 1..60: note = Kinesin-like protein KIF27 (84-103)
  source 1..60: mol_type = other RNA
ggccagaccgggagcggcaagacctacacgatcgggggcgggcacatcgcctccgtggtc

SEQ ID NO: 37755 - RNA, 39 nt, synthetic construct
  misc_feature 1..39: note = Helicase SKI2W (705-717)
  source 1..39: mol_type = other RNA
ggccgccgggggctggaccccaccggcaccgtgatcctc

SEQ ID NO: 37756 - RNA, 30 nt, synthetic construct
  misc_feature 1..30: note = E3 ubiquitin-protein ligase HUWE1 (757-766)
  source 1..30: mol_type = other RNA
ggcaccgaggagcgcatccccatcccgctg

SEQ ID NO: 37757 - RNA, 39 nt, synthetic construct
  misc_feature 1..39: note = Ankyrin repeat domain-containing protein 11 (421-433)
  source 1..39: mol_type = other RNA
ggcaccggggagaagctgcgcctcagcgcccacaccatc

SEQ ID NO: 37758 - RNA, 39 nt, synthetic construct
  misc_feature 1..39: note = US7745391-778469 (29-41)
  source 1..39: mol_type = other RNA
ggcgtggccctggccccccgcccgctcgggaccagcttc

SEQ ID NO: 37759 - RNA, 51 nt, synthetic construct
  misc_feature 1..51: note = Meprin A subunit beta (617-633)
  source 1..51: mol_type = other RNA
ggcgtgtgcaccgtccgcgacgggaaggccgagtgccggtgccagagcggc

SEQ ID NO: 37760 - RNA, 87 nt, synthetic construct
  misc_feature 1..87: note = F-box/LRR-repeat protein 4 (227-255)
  source 1..87: mol_type = other RNA
ggcgtgaaggacaagcccgtcctgagcctcaagacctccctgatcgacatgaacgacatcgaggacgacgcctacgccgagaaggac

SEQ ID NO: 37761 - RNA, 42 nt, synthetic construct
  misc_feature 1..42: note = PHD finger protein 14 (609-622)
  source 1..42: mol_type = other RNA
cacttcggctgcctggaccccccgctcaagaagagccccaag

SEQ ID NO: 37762 - RNA, 45 nt, synthetic construct
  misc_feature 1..45: note = Arylsulfatase E (503-517)
  source 1..45: mol_type = other RNA
caccagcgcaccctgagccccgtgccgctccagctggaccggctg

SEQ ID NO: 37763 - RNA, 51 nt, synthetic construct
  misc_feature 1..51: note = NACHT, LRR and PYD domains-containing protein 9 (146-162)
  source 1..51: mol_type = other RNA
cacaccgtggtcctggagggccccgacgggatcggcaagaccacgctcctg

SEQ ID NO: 37764 - RNA, 33 nt, synthetic construct
  misc_feature 1..33: note = 60S ribosomal protein L8 (31-41)
  source 1..33: mol_type = other RNA
atcgccgccgagggcatccacaccgggcagttc

SEQ ID NO: 37765 - RNA, 48 nt, synthetic construct
  misc_feature 1..48: note = Kelch-like protein 2 (479-494)
  source 1..48: mol_type = other RNA
atcgccgagatgagcacccgccggtccggcgccggggtgggcgtcctg

SEQ ID NO: 37766 - RNA, 36 nt, synthetic construct
  misc_feature 1..36: note = Protein RER1 (80-91)
  source 1..36: mol_type = other RNA
atcgccttcctgagccccaaggtggacccgtccctc

SEQ ID NO: 37767 - RNA, 39 nt, synthetic construct
  misc_feature 1..39: note = Peptidyl-prolyl cis-trans isomerase A (10-22)
  source 1..39: mol_type = other RNA
atcgccgtggacggcgagcccctggggcgcgtcagcttc

SEQ ID NO: 37768 - RNA, 42 nt, synthetic construct
  misc_feature 1..42: note = Dedicator of cytokinesis protein 4 (1742-1755)
  source 1..42: mol_type = other RNA
atcggcgacggggccctgccccgcagcgacccgaacctctcc

SEQ ID NO: 37769 - RNA, 30 nt, synthetic construct
  misc_feature 1..30: note = L-lactate dehydrogenase A-like 6B (183-192)
  source 1..30: mol_type = other RNA
atcatcgtgagcaaccccgtcgacatcctg

SEQ ID NO: 37770 - RNA, 60 nt, synthetic construct
  misc_feature 1..60: note = Carboxy-terminal domain RNA polymerase II polypeptide A small phosphatase 2 (215-234)
  source 1..60: mol_type = other RNA
atcctggacaacagccccgcctcctacgtgttccacaccgagaacgccgtcccggtgcag

SEQ ID NO: 37771 - RNA, 39 nt, synthetic construct
  misc_feature 1..39: note = Heat shock cognate 71 kDa protein (379-391)
  source 1..39: mol_type = other RNA
atcctgagcggcgacaagtccgagaacgtgcaggacctc

SEQ ID NO: 37772 - RNA, 63 nt, synthetic construct
  misc_feature 1..63: note = Poly(rC)-binding protein 2 (38-58)
  source 1..63: mol_type = other RNA
atcaacatcagcgagggcaactgccccgagcgcatcatcaccctggccgggccgaccaacgcc

SEQ ID NO: 37773 - RNA, 36 nt, synthetic construct
  misc_feature 1..36: note = Diacylglycerol O-acyltransferase 2 (253-264)
  source 1..36: mol_type = other RNA
atccccaagctggagcacccgacccagcaggacatc

SEQ ID NO: 37774 - RNA, 45 nt, synthetic construct
  misc_feature 1..45: note = Elongation factor 1-alpha 1 (115-129)
  source 1..45: mol_type = other RNA
atcgtggccgccggcgtcggggagttcgaggcgggcatcagcaag

SEQ ID NO: 37775 - RNA, 51 nt, synthetic construct
  misc_feature 1..51: note = Macrophage migration inhibitory factor (3-19)
  source 1..51: mol_type = other RNA
atcgtgaacaccaacgtcccccgcgccagcgtgccggacggcttcctgtcc

SEQ ID NO: 37776 - RNA, 30 nt, synthetic construct
  misc_feature 1..30: note = L-lactate dehydrogenase A chain (135-144)
  source 1..30: mol_type = other RNA
atcgtgagcaaccccgtcgacatcctgacc

SEQ ID NO: 37777 - RNA, 48 nt, synthetic construct
  misc_feature 1..48: note = Fructose-bisphosphate aldolase A (153-168)
  source 1..48: mol_type = other RNA
aagatcggcgagcacacccccagcgccctggccatcatggagaacgcg

SEQ ID NO: 37778 - RNA, 33 nt, synthetic construct
  misc_feature 1..33: note = PWWP domain-containing protein 2B (191-201)
  source 1..33: mol_type = other RNA
aagatccccagccgcgtgcacggctccctggag

SEQ ID NO: 37779 - RNA, 51 nt, synthetic construct
  misc_feature 1..51: note = DNA mismatch repair protein Mlh3 (135-151)
  source 1..51: mol_type = other RNA
aagctgctcagctccaccctgatccccccgctggagatcaccgtgacggag

SEQ ID NO: 37780 - RNA, 36 nt, synthetic construct
  misc_feature 1..36: note = Cathepsin K (314-325)
  source 1..36: mol_type = other RNA
aagaacaacgcctgcggcatcgccaacctggcgagc

SEQ ID NO: 37781 - RNA, 51 nt, synthetic construct
  misc_feature 1..51: note = Integrator complex subunit 12 (329-345)
  source 1..51: mol_type = other RNA
aagcccgtgggcctgaccgggctcgccaccagctccaagggcgggatcggc

SEQ ID NO: 37782 - RNA, 39 nt, synthetic construct
  misc_feature 1..39: note = Synaptojanin-1 (1453-1465)
  source 1..39: mol_type = other RNA
aagagccgcgcctccagctccctggacggcttcaaggac

SEQ ID NO: 37783 - RNA, 39 nt, synthetic construct
  misc_feature 1..39: note = Thymidylate synthase (284-296)
  source 1..39: mol_type = other RNA
aaggtggagaagatcgacgacttcaaggccgaggacttc

SEQ ID NO: 37784 - RNA, 30 nt, synthetic construct
  misc_feature 1..30: note = Zinc finger MYND domain-containing protein 15 (138-147)
  source 1..30: mol_type = other RNA
aaggtggagcccgaggaggaccgcgagctg

SEQ ID NO: 37785 - RNA, 36 nt, synthetic construct
  misc_feature 1..36: note = Glyceraldehyde-3-phosphate dehydrogenase (219-230)
  source 1..36: mol_type = other RNA
aaggtgatccccgagctgaacggcaagctcaccggg

SEQ ID NO: 37786 - RNA, 39 nt, synthetic construct
  misc_feature 1..39: note = Alpha-enolase (343-355)
  source 1..39: mol_type = other RNA
aaggtgaaccagatcggcagcgtcaccgagtccctgcag

SEQ ID NO: 37787 - RNA, 45 nt, synthetic construct
  misc_feature 1..45: note = Histone H2A type 2-A (100-114)
  source 1..45: mol_type = other RNA
aaggtgaccatcgcccagggcggggtcctgcccaacatccaggcc

SEQ ID NO: 37788 - RNA, 27 nt, synthetic construct
  misc_feature 1..27: note = D-dopachrome decarboxylase (89-97)
  source 1..27: mol_type = other RNA
ctggccctcggccaggaccgcatcctg

SEQ ID NO: 37789 - RNA, 33 nt, synthetic construct
  misc_feature 1..33: note = Acidic fibroblast growth factor intracellular-binding protein (169-179)
  source 1..33: mol_type = other RNA
ctggcccgcgactacgccgcgatcgtgttcttc

SEQ ID NO: 37790 - RNA, 54 nt, synthetic construct
  misc_feature 1..54: note = FAST kinase domain-containing protein 1 (497-514)
  source 1..54: mol_type = other RNA
ctggacctcctgcgcaaggagctgaagagcctcaagggcaacaccttccccgag

SEQ ID NO: 37791 - RNA, 42 nt, synthetic construct
  misc_feature 1..42: note = F-box only protein 41 (284-297)
  source 1..42: mol_type = other RNA
ctggagagcctcctgaaggccgccggcgggaacctgctcatc

SEQ ID NO: 37792 - RNA, 30 nt, synthetic construct
  misc_feature 1..30: note = Eukaryotic initiation factor 4A-III (110-119)
  source 1..30: mol_type = other RNA
ctgatcctcgcccccacccgcgagctggcc

SEQ ID NO: 37793 - RNA, 39 nt, synthetic construct
  misc_feature 1..39: note = Alpha-enolase (342-354)
  source 1..39: mol_type = other RNA
ctgaaggtgaaccagatcggcagcgtcaccgagtccctc

SEQ ID NO: 37794 - RNA, 33 nt, synthetic construct
  misc_feature 1..33: note = Threonine synthase-like 1 (295-305)
  source 1..33: mol_type = other RNA
ctgctcgagcgctgcatccaccccgccgacatc

SEQ ID NO: 37795 - RNA, 30 nt, synthetic construct
  misc_feature 1..30: note = Beta-1,4-galactosyltransferase 7 (20-29)
  source 1..30: mol_type = other RNA
ctgctcagcggcgggctgccccgcaagtgc

SEQ ID NO: 37796 - RNA, 30 nt, synthetic construct
  misc_feature 1..30: note = Protein S100-A11 (40-49)
  source 1..30: mol_type = other RNA
ctgagcttcatgaacaccgagctcgccgcc

SEQ ID NO: 37797 - RNA, 45 nt, synthetic construct
  misc_feature 1..45: note = 4F2 cell-surface antigen heavy chain (496-510)
  source 1..45: mol_type = other RNA
ctgagcacccagcccggccgcgaggaggggtccccgctcgagctg

SEQ ID NO: 37798 - RNA, 36 nt, synthetic construct
  misc_feature 1..36: note = L-lactate dehydrogenase A chain (254-265)
  source 1..36: mol_type = other RNA
ctgagcgtggccgacctcgccgagtccatcatgaag

SEQ ID NO: 37799 - RNA, 27 nt, synthetic construct
  misc_feature 1..27: note = Complement C4-A (1202-1210)
  source 1..27: mol_type = other RNA
ctgaccaaggcccccgtggacctcctg

SEQ ID NO: 37800 - RNA, 36 nt, synthetic construct
  misc_feature 1..36: note = Usherin (3700-3711)
  source 1..36: mol_type = other RNA
ctgtactggagcctccccgagaagccgaacggcctg

SEQ ID NO: 37801 - RNA, 33 nt, synthetic construct
  misc_feature 1..33: note = Phosphopantothenoylcysteine decarboxylase (1-11)
  source 1..33: mol_type = other RNA
atggagcccaaggccagctgcccggccgcggcc

SEQ ID NO: 37802 - RNA, 42 nt, synthetic construct
  misc_feature 1..42: note = DEAD/H box polypeptide 11 like 12 (1-14)
  source 1..42: mol_type = other RNA
atgggcctgatctgccgcgaccccgccaccaaggtgaagccg

SEQ ID NO: 37803 - RNA, 39 nt, synthetic construct
  misc_feature 1..39: note = Elongation factor 1-alpha 1 (201-213)
  source 1..39: mol_type = other RNA
atgctggagcccagcgccaacatgccgtggttcaagggc

SEQ ID NO: 37804 - RNA, 42 nt, synthetic construct
  misc_feature 1..42: note = Transgelin-2 (130-143)
  source 1..42: mol_type = other RNA
atgaacctgggcgggctcgccgtggcccgcgacgacggcctg

SEQ ID NO: 37805 - RNA, 30 nt, synthetic construct
  misc_feature 1..30: note = Nucleoside diphosphate kinase B (76-85)
  source 1..30: mol_type = other RNA
atggtgtgggagggcctgaacgtcgtgaag

SEQ ID NO: 37806 - RNA, 33 nt, synthetic construct
  misc_feature 1..33: note = Endoplasmic reticulum aminopeptidase 2 (861-869)
  source 1..33: mol_type = other RNA
aacgccatcagccgcatccccaagggccaggtg

SEQ ID NO: 37807 - RNA, 60 nt, synthetic construct
  misc_feature 1..60: note = Wiskott-Aldrich syndrome protein (262-281)
  source 1..60: mol_type = other RNA
aacctggaccccgacctccgcagcctgttctcccgggccggcatcagcgaggcccagctg

SEQ ID NO: 37808 - RNA, 27 nt, synthetic construct
  misc_feature 1..27: note = Cartilage intermediate layer protein 1 (779-787)
  source 1..27: mol_type = other RNA
aacctggagccccgcaccggcttcctc

SEQ ID NO: 37809 - RNA, 27 nt, synthetic construct
  misc_feature 1..27: note = Probable phosphoglycerate mutase 4 (209-217)
  source 1..27: mol_type = other RNA
aacctgcccaccggcatcccgatcgtg

SEQ ID NO: 37810 - RNA, 42 nt, synthetic construct
  misc_feature 1..42: note = Nuclear receptor subfamily 1 group D member 1 (343-356)
  source 1..42: mol_type = other RNA
aacaacaccctggccgcccagcgccacaacgaggcgctcaac

SEQ ID NO: 37811 - RNA, 54 nt, synthetic construct
  misc_feature 1..54: note = Tumor protein D52 (212-229)
  source 1..54: mol_type = other RNA
aacagcgccgccaacgcgtccgccaccaccacggagcccctgccggagaagacc

SEQ ID NO: 37812 - RNA, 60 nt, synthetic construct
  misc_feature 1..60: note = Tumor protein D52 (212-231)
  source 1..60: mol_type = other RNA
aacagcgccgccaacgcgtccgccaccaccacggagcccctgccggagaagacccaggag

SEQ ID NO: 37813 - RNA, 69 nt, synthetic construct
  misc_feature 1..69: note = Replication initiator 1 (10-32)
  source 1..69: mol_type = other RNA
cccgccgccgaggtgcgcccgggccaggggcggggcgcgaccgccgggccccgcggcgccgcccccccc

SEQ ID NO: 37814 - RNA, 45 nt, synthetic construct
  misc_feature 1..45: note = Histidine protein methyltransferase 1 homolog (142-156)
  source 1..45: mol_type = other RNA
cccggcgagaacatcgtgagcaagtccttcagctcccacagcgac

SEQ ID NO: 37815 - RNA, 57 nt, synthetic construct
  misc_feature 1..57: note = Glutaredoxin-2, mitochondrial (32-50)
  source 1..57: mol_type = other RNA
cccggccgcacccggagcgccgcccgccggatggagtccaacaccagctccagcctg

SEQ ID NO: 37816 - RNA, 57 nt, synthetic construct
  misc_feature 1..57: note = Insulin receptor substrate 2 (989-1007)
  source 1..57: mol_type = other RNA
cccaagccgggcgcccccagcgggcaccccgtgggctccctggacgggctcctgagc

SEQ ID NO: 37817 - RNA, 33 nt, synthetic construct
  misc_feature 1..33: note = Polycystin-1 (4192-4202)
  source 1..33: mol_type = other RNA
cagctggacggcctcagcgtgtccctggggcgc

SEQ ID NO: 37818 - RNA, 33 nt, synthetic construct
  misc_feature 1..33: note = Keratin, type II cytoskeletal 8 (226-236)
  source 1..33: mol_type = other RNA
cagctgtacgaggaggagatccgcgagctccag

SEQ ID NO: 37819 - RNA, 93 nt, synthetic construct
  misc_feature 1..93: note = Cilia- and flagella-associated protein 52 (145-175)
  source 1..93: mol_type = other RNA
cgcgacgccatctgcggcagccccgccgcggggctgaacgtgggcaacgccaccaacgtcatcttctcccggtgccgcgacgagatgttcatg

SEQ ID NO: 37820 - RNA, 45 nt, synthetic construct
  misc_feature 1..45: note = Histone H3.3 (84-98)
  source 1..45: mol_type = other RNA
cgcttccagagcgccgccatcggcgcgctgcaggaggcctccgag

SEQ ID NO: 37821 - RNA, 78 nt, synthetic construct
  misc_feature 1..78: note = keratin 8, isoform CRA (125-150)
  source 1..78: mol_type = other RNA
cgcggcgggctgggcgggggctacgggggcgccagcggcatggggggcatcaccgccgtgatggtcaaccagaacctc

SEQ ID NO: 37822 - RNA, 33 nt, synthetic construct
  misc_feature 1..33: note = Oxysterol-binding protein 2 (60-70)
  source 1..33: mol_type = other RNA
cgcggcaccatcaacctgagcaccgcccacatc

SEQ ID NO: 37823 - RNA, 39 nt, synthetic construct
  misc_feature 1..39: note = F-actin-capping protein subunit alpha-2 (100-112)
  source 1..39: mol_type = other RNA
cgcaaggaggccaccgacccccggccgtgcgaggtggag

SEQ ID NO: 37824 - RNA, 57 nt, synthetic construct
  misc_feature 1..57: note = kelch repeat and BTB domain-containing protein 6 (1-18)
  source 1..57: mol_type = other RNA
cgcaaggtgctgcgggaggacgaccccagctccgtccgcctcgccagcccgtccagc

SEQ ID NO: 37825 - RNA, 42 nt, synthetic construct
  misc_feature 1..42: note = UV excision repair protein RAD23 homolog B (268-281)
  source 1..42: mol_type = other RNA
cgccagatcatccagcagaaccccagcctgctcccggccctg

SEQ ID NO: 37826 - RNA, 72 nt, synthetic construct
  misc_feature 1..72: note = Protein boule-like (35-58)
  source 1..72: mol_type = other RNA
agcgccccccgctacggcaccgtgatcccgaaccggatcttcgtcgggggcatcgacttcaagaccaacgag

SEQ ID NO: 37827 - RNA, 54 nt, synthetic construct
  misc_feature 1..54: note = Beta-1,3-galactosyltransferase 6 (23-40)
  source 1..54: mol_type = other RNA
agcgcccagcccctgcgcgacgcccggtgcgcgctcgccccgggcgacccccgc

SEQ ID NO: 37828 - RNA, 39 nt, synthetic construct
  misc_feature 1..39: note = Structure-specific endonuclease subunit SLX4 (603-615)
  source 1..39: mol_type = other RNA
agcgcctcccagcgcgagcaccaggccctgcaggacctc

SEQ ID NO: 37829 - RNA, 45 nt, synthetic construct
  misc_feature 1..45: note = Elongation factor 1-alpha 1 (396-410)
  source 1..45: mol_type = other RNA
agcggcgacgccgccatcgtggacatggtccccgggaagccgatg

SEQ ID NO: 37830 - RNA, 39 nt, synthetic construct
  misc_feature 1..39: note = Fructose-bisphosphate aldolase A (272-284)
  source 1..39: mol_type = other RNA
agcggcgggcagtccgaggaggaggccagcatcaacctg

SEQ ID NO: 37831 - RNA, 42 nt, synthetic construct
  misc_feature 1..42: note = Sodium-coupled monocarboxylate transporter 2 (343-356)
  source 1..42: mol_type = other RNA
agcggcaccctgtccaccgtggccagctccatcaacgccctc

SEQ ID NO: 37832 - RNA, 39 nt, synthetic construct
  misc_feature 1..39: note = Poly(rC)-binding protein 1 (223-235)
  source 1..39: mol_type = other RNA
agcatccagggccagcacaccatctcccccctggacctc

SEQ ID NO: 37833 - RNA, 51 nt, synthetic construct
  misc_feature 1..51: note = DNA ligase 3 (790-806)
  source 1..51: mol_type = other RNA
agcaagtccgaggcccacaccgccgacggcatcagcatccgcttcccccgg

SEQ ID NO: 37834 - RNA, 36 nt, synthetic construct
  misc_feature 1..36: note = Keratin, type II cytoskeletal 8 (253-264)
  source 1..36: mol_type = other RNA
agcctggacatggactccatcatcgccgaggtgaag

SEQ ID NO: 37835 - RNA, 36 nt, synthetic construct
  misc_feature 1..36: note = Rabenosyn-5 (541-552)
  source 1..36: mol_type = other RNA
agcctgcacacccgcacccggtccctcgacttccgc

SEQ ID NO: 37836 - RNA, 36 nt, synthetic construct
  misc_feature 1..36: note = Leucine-rich repeat-containing protein 28 (186-197)
  source 1..36: mol_type = other RNA
agcatggccggcaaccgcctggccttcctccccctg

SEQ ID NO: 37837 - RNA, 30 nt, synthetic construct
  misc_feature 1..30: note = NUAK family SNF1-like kinase 2 (446-455)
  source 1..30: mol_type = other RNA
agcaacctgaagctccccaagggcatcctg

SEQ ID NO: 37838 - RNA, 36 nt, synthetic construct
  misc_feature 1..36: note = Keratin, type I cytoskeletal 18 (272-283)
  source 1..36: mol_type = other RNA
agccagcagatcgaggagtccaccaccgtggtcacg

SEQ ID NO: 37839 - RNA, 66 nt, synthetic construct
  misc_feature 1..66: note = Striated muscle preferentially expressed protein kinase isoform X10 (928-946)
  source 1..66: mol_type = other RNA
agccaggtgctgcgcgagggctccaaggccgggggcgggaccctcctgtgcctgcccctcgccgag

SEQ ID NO: 37840 - RNA, 30 nt, synthetic construct
  misc_feature 1..30: note = Vimentin (72-81)
  source 1..30: mol_type = other RNA
agctccgtgcccggcgtccgcctgctccag

SEQ ID NO: 37841 - RNA, 42 nt, synthetic construct
  misc_feature 1..42: note = 4F2 cell-surface antigen heavy chain (497-510)
  source 1..42: mol_type = other RNA
agcacccagcccggccgcgaggaggggtccccgctggagctc

SEQ ID NO: 37842 - RNA, 51 nt, synthetic construct
  misc_feature 1..51: note = Laminin subunit alpha-4 (1023-1039)
  source 1..51: mol_type = other RNA
agcacctccgtgccctgcgcccgcgacaagctggccttcacccagagccgg

SEQ ID NO: 37843 - RNA, 39 nt, synthetic construct
  misc_feature 1..39: note = Otoferlin (965-977)
  source 1..39: mol_type = other RNA
accgagctgcgcgtgatcatcggcaagcccctcctgagc

SEQ ID NO: 37844 - RNA, 42 nt, synthetic construct
  misc_feature 1..42: note = Procollagen-lysine,2-oxoglutarate 5-dioxygenase 1 (388-401)
  source 1..42: mol_type = other RNA
accgagcccaacagcctgcgcctcctgatccagcagaacaag

SEQ ID NO: 37845 - RNA, 51 nt, synthetic construct
  misc_feature 1..51: note = Galectin-1 (71-87)
  source 1..51: mol_type = other RNA
accgagcagcgcgaggccgtgttccccttccagccgggcagcgtcgccgag

SEQ ID NO: 37846 - RNA, 57 nt, synthetic construct
  misc_feature 1..57: note = Ovochymase-1 (314-332)
  source 1..57: mol_type = other RNA
accaaggccctgagctccgtgcaggaggtcaacggcagccagcgcgggaagggcatc

SEQ ID NO: 37847 - RNA, 72 nt, synthetic construct
  misc_feature 1..72: note = Envoplakin (1400-1423)
  source 1..72: mol_type = other RNA
acccagaaggaccccaagctgcgcgaggagcacagccggctctccggcagcctggacgaggaggtggggcgc

SEQ ID NO: 37848 - RNA, 36 nt, synthetic construct
  misc_feature 1..36: note = Neuron navigator 2 (450-461)
  source 1..36: mol_type = other RNA
accaccgtgggccccgccagctccagcccgaagatc

SEQ ID NO: 37849 - RNA, 57 nt, synthetic construct
  misc_feature 1..57: note = Bifunctional heparan sulfate N-deacetylase/N-sulfotransferase 3 isoform X3 (310-335)
  source 1..57: mol_type = other RNA
gtggccatcctggtcagcaaggagggcgcccgcatggggctcgacacccacaccccc

SEQ ID NO: 37850 - RNA, 36 nt, synthetic construct
  misc_feature 1..36: note = VIP peptides (52-63)
  source 1..36: mol_type = other RNA
gtgttcaccgacaactacacccgcctgcggaagcag

SEQ ID NO: 37851 - RNA, 27 nt, synthetic construct
  misc_feature 1..27: note = 60S acidic ribosomal protein P2 (54-62)
  source 1..27: mol_type = other RNA
gtgatcgcccagggcatcgggaagctg

SEQ ID NO: 37852 - RNA, 54 nt, synthetic construct
  misc_feature 1..54: note = Elongation factor 1-alpha 1 (344-361)
  source 1..54: mol_type = other RNA
gtgatcatcctgaaccaccccggccagatcagcgccgggtacgccccggtcctc

SEQ ID NO: 37853 - RNA, 51 nt, synthetic construct
  misc_feature 1..51: note = Activin receptor type-2A (262-278)
  source 1..51: mol_type = other RNA
gtgctggagggcgccatcaacttccagcgcgacgccttcctccggatcgac

SEQ ID NO: 37854 - RNA, 57 nt, synthetic construct
  misc_feature 1..57: note = Serine/threonine-protein phosphatase with EF-hands 1 (308-326)
  source 1..57: mol_type = other RNA
gtgctgatccccccgaccgagaccaaccgcgaccacgacacggacagcaagcacaac

SEQ ID NO: 37855 - RNA, 33 nt, synthetic construct
  misc_feature 1..33: note = Galectin-1 (31-41)
  source 1..33: mol_type = other RNA
gtgctgaacctcggcaaggacagcaacaacctg

SEQ ID NO: 37856 - RNA, 39 nt, synthetic construct
  misc_feature 1..39: note = Profilin-1 (41-53)
  source 1..39: mol_type = other RNA
gtgaacatcacccccgccgaggtcggcgtgctggtgggg

SEQ ID NO: 37857 - RNA, 54 nt, synthetic construct
  misc_feature 1..54: note = Kin of IRRE-like protein 3 (402-419)
  source 1..54: mol_type = other RNA
gtgccccgcgtcggcgccggggagcgggaggtgaccctgaccgtgaacggcccg

SEQ ID NO: 37858 - RNA, 39 nt, synthetic construct
  misc_feature 1..39: note = Keratin, type II cytoskeletal 8 (66-78)
  source 1..39: mol_type = other RNA
gtgaccgtcaaccagagcctgctctcccccctggtgctg

SEQ ID NO: 37859 - RNA, 45 nt, synthetic construct
  misc_feature 1..45: note = Enhancer of rudimentary homolog (71-85)
  source 1..45: mol_type = other RNA
gtgtaccgcgccgacacccagacctaccagccctacaacaaggac

SEQ ID NO: 37860 - RNA, 48 nt, synthetic construct
  misc_feature 1..48: note = Ankyrin repeat domain-containing protein 26 (168-183)
  source 1..48: mol_type = other RNA
tacgacgccaacatcgaggccaagaacaaggacgacctgacccccctc

SEQ ID NO: 37861 - RNA, 51 nt, synthetic construct
  misc_feature 1..51: note = 78 kDa glucose-regulated protein (635-651)
  source 1..51: mol_type = other RNA
tacggcagcgccgggcccccgcccaccggcgaggaggacaccgccgagaag

SEQ ID NO: 37862 - RNA, 57 nt, synthetic construct
  misc_feature 1..57: note = 78 kDa glucose-regulated protein (635-653)
  source 1..57: mol_type = other RNA
tacggcagcgccgggcccccgcccaccggcgaggaggacaccgccgagaaggacgag

SEQ ID NO: 37863 - RNA, 36 nt, synthetic construct
  misc_feature 1..36: note = Alpha-enolase (270-281)
  source 1..36: mol_type = other RNA
tacatcagccccgaccagctggccgacctctacaag

SEQ ID NO: 37864 - RNA, 36 nt, synthetic construct
  misc_feature 1..36: note = Microsomal glutathione S-transferase 1 (121-132)
  source 1..36: mol_type = other RNA
tacctgacccccctcccgcagcccaaccgcgccctg

SEQ ID NO: 37865 - RNA, 42 nt, synthetic construct
  misc_feature 1..42: note = Beta-actin-like protein 2 (8-21)
  source 1..42: mol_type = other RNA
tacaacgagctgcgcgtggcccccgacgagcacccgatcctc

SEQ ID NO: 37866 - RNA, 63 nt, synthetic construct
  misc_feature 1..63: note = Gamma-enolase (25-45)
  source 1..63: mol_type = other RNA
tacaccgccaagggcctgttccgcgccgcggtgcccagcggggcctccaccggcatctacgag

SEQ ID NO: 37867 - RNA, 42 nt, synthetic construct
  misc_feature 1..42: note = Polypyrimidine tract-binding protein 1 (114-127)
  source 1..42: mol_type = other RNA
tacaccagcgtgacccccgtcctgcgcggccagccgatctac

SEQ ID NO: 37868 - RNA, 27 nt, synthetic construct
  misc_feature 1..27: note = HLA class I histocompatibility antigen, B-13 alpha chain (26-34)
  source 1..27: mol_type = other RNA
tacgtggacgacacccagttcgtccgc

SEQ ID NO: 37869 - RNA, 39 nt, synthetic construct
  misc_feature 1..39: note = Matrix-remodeling-associated protein 5 (34-46)
  source 1..39: mol_type = other RNA
tacgtgcccagcgaggtccactgcaccttccgctccctg

SEQ ID NO: 37870 - RNA, 27 nt, synthetic construct
  misc_feature 1..27: note = Flotillin-2 (156-164)
  source 1..27: mol_type = other RNA
gacgtgtacgacaaggtcgactacctg

SEQ ID NO: 37871 - RNA, 27 nt, synthetic construct
  misc_feature 1..27: note = Gamma-adducin (305-313)
  source 1..27: mol_type = other RNA
gaggccttccactacatcttcaacgtg

SEQ ID NO: 37872 - RNA, 27 nt, synthetic construct
  misc_feature 1..27: note = Nucleoporin GLE1 (443-451)
  source 1..27: mol_type = other RNA
gagatcttcgacaagatccacagcctg

SEQ ID NO: 37873 - RNA, 27 nt, synthetic construct
  misc_feature 1..27: note = GRIP1-associated protein 1 (707-715)
  source 1..27: mol_type = other RNA
gaggtggccgagctgttccagcgcctc

SEQ ID NO: 37874 - RNA, 27 nt, synthetic construct
  misc_feature 1..27: note = HMG domain-containing protein 3 (954-962)
  source 1..27: mol_type = other RNA
gaggtgttcgccctgatccacgagctc

SEQ ID NO: 37875 - RNA, 30 nt, synthetic construct
  misc_feature 1..30: note = Beta-hexosaminidase subunit beta (330-339)
  source 1..30: mol_type = other RNA
gaggtgttccccgaccagttcatccacctg

SEQ ID NO: 37876 - RNA, 27 nt, synthetic construct
  misc_feature 1..27: note = Selenide, water dikinase 2 (336-344)
  source 1..27: mol_type = other RNA
gaggtgagcttcgtcatccacaacctg

SEQ ID NO: 37877 - RNA, 27 nt, synthetic construct
  misc_feature 1..27: note = ATPase family AAA domain-containing protein 1 (15-23)
  source 1..27: mol_type = other RNA
gaggtggtcggcctgatcttccgcctc

SEQ ID NO: 37878 - RNA, 27 nt, synthetic construct
  misc_feature 1..27: note = MOB kinase activator 3A (64-72)
  source 1..27: mol_type = other RNA
cacgtggtcgacttcttcaaccgcgtg

SEQ ID NO: 37879 - RNA, 27 nt, synthetic construct
  misc_feature 1..27: note = Transmembraneoprotein NMB (539-547)
  source 1..27: mol_type = other RNA
aagggcctgagcgtgttcctcaaccgc

SEQ ID NO: 37880 - RNA, 33 nt, synthetic construct
  misc_feature 1..33: note = Cytochrome b-245 light chain (78-88)
  source 1..33: mol_type = other RNA
aagctgttcggccccttcacccgcaactactac

SEQ ID NO: 37881 - RNA, 27 nt, synthetic construct
  misc_feature 1..27: note = Syntenin-1 (270-278)
  source 1..27: mol_type = other RNA
atgcccgccttcatcttcgagcacatc

SEQ ID NO: 37882 - RNA, 30 nt, synthetic construct
  misc_feature 1..30: note = Transcription factor 7-like 2 (366-375)
  source 1..30: mol_type = other RNA
cgcgaggagcaggccaagtactacgagctg

SEQ ID NO: 37883 - RNA, 27 nt, synthetic construct
  misc_feature 1..27: note = Tumor protein p63-regulated gene 1-like protein (59-67)
  source 1..27: mol_type = other RNA
cgcgtgaaggagtacttcgtcttccgg

SEQ ID NO: 37884 - RNA, 27 nt, synthetic construct
  misc_feature 1..27: note = Clathrin heavy chain 1 (1342-1350)
  source 1..27: mol_type = other RNA
cgcgtgaacatccccaaggtcctgcgg

SEQ ID NO: 37885 - RNA, 30 nt, synthetic construct
  misc_feature 1..30: note = COP9 signalosome complex subunit 6 (311-320)
  source 1..30: mol_type = other RNA
gtgctgtacgaccgccagggcatcgggcgg

SEQ ID NO: 37886 - RNA, 54 nt, synthetic construct
  misc_feature 1..54: note = GTP-binding nuclear protein Ran (203-220)
  source 1..54: mol_type = other RNA
gcccccccggaggtggtcatggaccccgccctggcggcccagtacgagcacgac

SEQ ID NO: 37887 - RNA, 27 nt, synthetic construct
  misc_feature 1..27: note = Ubiquitin carboxyl-terminal hydrolase 48 (534-542)
  source 1..27: mol_type = other RNA
gccgccgacatcttctacagccgctac

SEQ ID NO: 37888 - RNA, 27 nt, synthetic construct
  misc_feature 1..27: note = Transmembrane protein 141 (30-38)
  source 1..27: mol_type = other RNA
gccttcatgaagggcgtgttcaccttc

SEQ ID NO: 37889 - RNA, 30 nt, synthetic construct
  misc_feature 1..30: note = DNA replication licensing factor MCM4 (846-855)
  source 1..30: mol_type = other RNA
gccctggccgacgacgacttcctcaccgtg

SEQ ID NO: 37890 - RNA, 27 nt, synthetic construct
  misc_feature 1..27: note = Protein FAM188B (498-506)
  source 1..27: mol_type = other RNA
gccctggccgacatcgtgtggcgcgcg

SEQ ID NO: 37891 - RNA, 27 nt, synthetic construct
  misc_feature 1..27: note = Protein TANC1 (1389-1397)
  source 1..27: mol_type = other RNA
gccctggccgacctccaggaggcggtg

SEQ ID NO: 37892 - RNA, 33 nt, synthetic construct
  misc_feature 1..33: note = Protein TANC1 (1389-1399)
  source 1..33: mol_type = other RNA
gccctggccgacctccaggaggcggtgaagctg

SEQ ID NO: 37893 - RNA, 27 nt, synthetic construct
  misc_feature 1..27: note = 5-oxoprolinase (523-531)
  source 1..27: mol_type = other RNA
gccctggccgacgtggtccacgaggcg

SEQ ID NO: 37894 - RNA, 27 nt, synthetic construct
  misc_feature 1..27: note = Nodal modulator 3 (459-467)
  source 1..27: mol_type = other RNA
gccctggccggcgtgagcttcgagatc

SEQ ID NO: 37895 - RNA, 30 nt, synthetic construct
  misc_feature 1..30: note = Midasin (1405-1414)
  source 1..30: mol_type = other RNA
gccctggccaaccagaagctctacagcgtg

SEQ ID NO: 37896 - RNA, 27 nt, synthetic construct
  misc_feature 1..27: note = WD repeat-containing protein 36 (542-550)
  source 1..27: mol_type = other RNA
gccctggacgacttcagcatctccgtg

SEQ ID NO: 37897 - RNA, 30 nt, synthetic construct
  misc_feature 1..30: note = EP300-interacting inhibitor of differentiation 1 (85-94)
  source 1..30: mol_type = other RNA
gccctggacggcgggttccagatgcactac

SEQ ID NO: 37898 - RNA, 27 nt, synthetic construct
  misc_feature 1..27: note = Elongation factor 2 (350-358)
  source 1..27: mol_type = other RNA
gccctggacaacttcctcgacaagctg

SEQ ID NO: 37899 - RNA, 27 nt, synthetic construct
  misc_feature 1..27: note = Inverted formin-2 (131-139)
  source 1..27: mol_type = other RNA
gccctggacaccagcaacgtgatggtc

SEQ ID NO: 37900 - RNA, 33 nt, synthetic construct
  misc_feature 1..33: note = Keratinocyte-associated protein 2 (108-118)
  source 1..33: mol_type = other RNA
gccctgttcgccagcggcctcatccaccgcgtg

SEQ ID NO: 37901 - RNA, 36 nt, synthetic construct
  misc_feature 1..36: note = Exportin-2 (684-695)
  source 1..36: mol_type = other RNA
gccctgttcccccacctcctgcagccggtgctgtgg

SEQ ID NO: 37902 - RNA, 24 nt, synthetic construct
  misc_feature 1..24: note = Activating signal cointegrator 1 complex subunit 3 (627-634)
  source 1..24: mol_type = other RNA
gccctgggcaccgtgaccaacgtc

SEQ ID NO: 37903 - RNA, 27 nt, synthetic construct
  misc_feature 1..27: note = Replication factor C subunit 5 (276-284)
  source 1..27: mol_type = other RNA
gccctgcacgacatcctcaccgagatc

SEQ ID NO: 37904 - RNA, 30 nt, synthetic construct
  misc_feature 1..30: note = Tryptophan-tRNA ligase, cytoplasmic (433-442)
  source 1..30: mol_type = other RNA
gccctgatcgaggtgctccagcccctgatc

SEQ ID NO: 37905 - RNA, 30 nt, synthetic construct
  misc_feature 1..30: note = Tight junction protein ZO-1 (692-701)
  source 1..30: mol_type = other RNA
gccctgctcgacgtgacccccaacgccgtc

SEQ ID NO: 37906 - RNA, 27 nt, synthetic construct
  misc_feature 1..27: note = Polypeptide N-acetylgalactosaminyltransferase 2 (185-193)
  source 1..27: mol_type = other RNA
gccctgctcggcaagatcgagaaggtg

SEQ ID NO: 37907 - RNA, 27 nt, synthetic construct
  misc_feature 1..27: note = Bifunctional glutamate/proline-tRNA ligase (218-226)
  source 1..27: mol_type = other RNA
gccctgctcaaccagcactaccaggtg

SEQ ID NO: 37908 - RNA, 27 nt, synthetic construct
  misc_feature 1..27: note = LEM domain-containing protein 2 (70-78)
  source 1..27: mol_type = other RNA
gccctgctcaccgccgtgaccaacgtc

SEQ ID NO: 37909 - RNA, 30 nt, synthetic construct
  misc_feature 1..30: note = Nuclear pore complex protein Nup205 (494-503)
  source 1..30: mol_type = other RNA
gccctgctcaccggcatcatcagcaaggcc

SEQ ID NO: 37910 - RNA, 30 nt, synthetic construct
  misc_feature 1..30: note = LYST-interacting protein LIP6 (84-93)
  source 1..30: mol_type = other RNA
gccctgatggacggcaaggtgtacgacatc

SEQ ID NO: 37911 - RNA, 33 nt, synthetic construct
  misc_feature 1..33: note = Leishmanolysin-like peptidase (353-363)
  source 1..33: mol_type = other RNA
gccctgatggaggacaccggccgccagatgctc

SEQ ID NO: 37912 - RNA, 27 nt, synthetic construct
  misc_feature 1..27: note = Kinesin-like protein KIF7 (91-99)
  source 1..27: mol_type = other RNA
gccctgaacgaggacatcgtgcgcgtc

SEQ ID NO: 37913 - RNA, 27 nt, synthetic construct
  misc_feature 1..27: note = 40S ribosomal protein S12 (17-25)
  source 1..27: mol_type = other RNA
gccctgcaggaggtgctcaagaccgcc

SEQ ID NO: 37914 - RNA, 27 nt, synthetic construct
  misc_feature 1..27: note = Anthrax toxin receptor 1 (207-215)
  source 1..27: mol_type = other RNA
gccctgcagggcatcatccacagcatc

SEQ ID NO: 37915 - RNA, 30 nt, synthetic construct
  misc_feature 1..30: note = Probable ATP-dependent RNA helicase DDX5 (128-137)
  source 1..30: mol_type = other RNA
gccctgagcggcctcgacatggtgggggtc

SEQ ID NO: 37916 - RNA, 27 nt, synthetic construct
  misc_feature 1..27: note = Actin-related protein 2/3 complex subunit 1A (24-32)
  source 1..27: mol_type = other RNA
gccctgagccccaacaaccacgaggtg

SEQ ID NO: 37917 - RNA, 27 nt, synthetic construct
  misc_feature 1..27: note = DNA-dependent protein kinase catalytic subunit (3134-3142)
  source 1..27: mol_type = other RNA
gccctgaccgagatccaggagttcatc

SEQ ID NO: 37918 - RNA, 27 nt, synthetic construct
  misc_feature 1..27: note = Annexin A1 (99-107)
  source 1..27: mol_type = other RNA
gccctgaccggccacctcgaggaggtg

SEQ ID NO: 37919 - RNA, 30 nt, synthetic construct
  misc_feature 1..30: note = Cyclin-dependent kinase 2 (95-104)
  source 1..30: mol_type = other RNA
gccctgaccggcatccccctcccgctgatc

SEQ ID NO: 37920 - RNA, 30 nt, synthetic construct
  misc_feature 1..30: note = Staphylococcal nuclease domain-containing protein 1 (428-437)
  source 1..30: mol_type = other RNA
gccctggtgagcaagggcctcgccaccgtc

SEQ ID NO: 37921 - RNA, 27 nt, synthetic construct
  misc_feature 1..27: note = Nicotinate-nucleotide pyrophosphorylase (carboxylating) (45-53)
  source 1..27: mol_type = other RNA
gccctgtgggccaagagccccggcgtg

SEQ ID NO: 37922 - RNA, 33 nt, synthetic construct
  misc_feature 1..33: note = Guanine nucleotide-binding protein G(I)/G(S)/G(T) subunit beta-1 (74-84)
  source 1..33: mol_type = other RNA
gccctgtgggacatcgagaccggccagcagacc

SEQ ID NO: 37923 - RNA, 27 nt, synthetic construct
  misc_feature 1..27: note = Centrosome-associated protein CEP250 (656-664)
  source 1..27: mol_type = other RNA
gccctgtgggagaagaacacccacctc

SEQ ID NO: 37924 - RNA, 36 nt, synthetic construct
  misc_feature 1..36: note = Nuclear pore complex protein Nup160 (372-383)
  source 1..36: mol_type = other RNA
gccctgtggcacgacgccgagaaccagaccgtggtc

SEQ ID NO: 37925 - RNA, 36 nt, synthetic construct
  misc_feature 1..36: note = Tyrosine-protein kinase JAK1 (79-90)
  source 1..36: mol_type = other RNA
gccctgtacgacgagaacaccaagctctggtacgcc

SEQ ID NO: 37926 - RNA, 33 nt, synthetic construct
  misc_feature 1..33: note = Caskin-2 (147-157)
  source 1..33: mol_type = other RNA
gccctgtacggcaagaccgaggtggtccgcctc

SEQ ID NO: 37927 - RNA, 27 nt, synthetic construct
  misc_feature 1..27: note = Probable dolichyl pyrophosphate Glc1Man9GlcNAc2 alpha-1,3-glucosyltransferase (287-295)
  source 1..27: mol_type = other RNA
gccctgtacaacgccctcgacaaggtg

SEQ ID NO: 37928 - RNA, 27 nt, synthetic construct
  misc_feature 1..27: note = Nuclear pore complex protein Nup155 (1038-1046)
  source 1..27: mol_type = other RNA
gccctgtacaactggctcatccaggtg

SEQ ID NO: 37929 - RNA, 39 nt, synthetic construct
  misc_feature 1..39: note = Lysine-tRNA ligase (583-595)
  source 1..39: mol_type = other RNA
gccatgttcctgaccgacagcaacaacatcaaggaggtg

SEQ ID NO: 37930 - RNA, 27 nt, synthetic construct
  misc_feature 1..27: note = Protein GPR107 (189-197)
  source 1..27: mol_type = other RNA
gccatgggcgagaagagcttctccgtg

SEQ ID NO: 37931 - RNA, 27 nt, synthetic construct
  misc_feature 1..27: note = Probable cation-transporting ATPase 13A3 (829-837)
  source 1..27: mol_type = other RNA
gccatgaacggcaagagcttctccgtg

SEQ ID NO: 37932 - RNA, 27 nt, synthetic construct
  misc_feature 1..27: note = Protein Wnt-5a (20-28)
  source 1..27: mol_type = other RNA
gccatgagctccaagttcttcctggtg

SEQ ID NO: 37933 - RNA, 24 nt, synthetic construct
  misc_feature 1..24: note = Syndecan-4 (2-9)
  source 1..24: mol_type = other RNA
gcccccgcccgcctgttcgcgctc

SEQ ID NO: 37934 - RNA, 27 nt, synthetic construct
  misc_feature 1..27: note = Dehydrogenase/reductase SDR family member 4 (110-118)
  source 1..27: mol_type = other RNA
gcccccggcctgatcaagaccagcttc

SEQ ID NO: 37935 - RNA, 27 nt, synthetic construct
  misc_feature 1..27: note = Filamin-A (1687-1695)
  source 1..27: mol_type = other RNA
gccccccagccgggcaagtacgtgatc

SEQ ID NO: 37936 - RNA, 27 nt, synthetic construct
  misc_feature 1..27: note = U1 small nuclear ribonucleoprotein 70 kDa (14-22)
  source 1..27: mol_type = other RNA
gccccccgcgacccgatcccctacctg

SEQ ID NO: 37937 - RNA, 27 nt, synthetic construct
  misc_feature 1..27: note = Vacuolar protein sorting-associated protein 16 homolog (41-49)
  source 1..27: mol_type = other RNA
gccccctacggcgggccgatcgccctg

SEQ ID NO: 37938 - RNA, 27 nt, synthetic construct
  misc_feature 1..27: note = Fatty acid desaturase 1 (12-20)
  source 1..27: mol_type = other RNA
gcccagggccccaccccgcgctacttc

SEQ ID NO: 37939 - RNA, 30 nt, synthetic construct
  misc_feature 1..30: note = Elongation factor 1-gamma (19-28)
  source 1..30: mol_type = other RNA
gcccagtacagcggcgcccaggtgcgcgtc

SEQ ID NO: 37940 - RNA, 30 nt, synthetic construct
  misc_feature 1..30: note = Serine/threonine-protein kinase SMG1 (35-44)
  source 1..30: mol_type = other RNA
gccagcgccgaccccgacaacctgaagtac

SEQ ID NO: 37941 - RNA, 30 nt, synthetic construct
  misc_feature 1..30: note = RalBP1-associated Eps domain-containing protein 1 (609-618)
  source 1..30: mol_type = other RNA
gccagcgaccccgcctccagcctgcgcgtg

SEQ ID NO: 37942 - RNA, 30 nt, synthetic construct
  misc_feature 1..30: note = Tryptophan-tRNA ligase, cytoplasmic (352-361)
  source 1..30: mol_type = other RNA
gccagcgaccccaactccagcatcttcctg

SEQ ID NO: 37943 - RNA, 39 nt, synthetic construct
  misc_feature 1..39: note = Extended synaptotagmin-2 (868-880)
  source 1..39: mol_type = other RNA
gccagcgaggagctggccaagggctggacccagtggtac

SEQ ID NO: 37944 - RNA, 30 nt, synthetic construct
  misc_feature 1..30: note = Alpha-enolase (78-87)
  source 1..30: mol_type = other RNA
gccagcgagttcttccgctccggcaagtac

SEQ ID NO: 37945 - RNA, 36 nt, synthetic construct
  misc_feature 1..36: note = Unconventional myosin-Ib (243-254)
  source 1..36: mol_type = other RNA
gccagcgagctgttcaaggacaagaaggccctctac

SEQ ID NO: 37946 - RNA, 36 nt, synthetic construct
  misc_feature 1..36: note = Protein-glutamate O-methyltransferase (421-432)
  source 1..36: mol_type = other RNA
gccagcgagccctcctggtggaccaccggcaagtac

SEQ ID NO: 37947 - RNA, 24 nt, synthetic construct
  misc_feature 1..24: note = Keratinocyte-associated protein 2 (111-118)
  source 1..24: mol_type = other RNA
gccagcggcctgatccaccgcgtg

SEQ ID NO: 37948 - RNA, 30 nt, synthetic construct
  misc_feature 1..30: note = Cadherin-5 (339-348)
  source 1..30: mol_type = other RNA
gccaccgaccccaccatcgacctgcgctac

SEQ ID NO: 37949 - RNA, 30 nt, synthetic construct
  misc_feature 1..30: note = Mitogen-activated protein kinase kinase kinase MLT (111-120)
  source 1..30: mol_type = other RNA
gccaccgacgtggccaagggcatgcactac

SEQ ID NO: 37950 - RNA, 33 nt, synthetic construct
  misc_feature 1..33: note = Mitogen-activated protein kinase kinase kinase MLT (111-121)
  source 1..33: mol_type = other RNA
gccaccgacgtggccaagggcatgcactacctg

SEQ ID NO: 37951 - RNA, 30 nt, synthetic construct
  misc_feature 1..30: note = Coatomer subunit beta' (480-489)
  source 1..30: mol_type = other RNA
gccaccgaggagagcttcttcatcctgaag

SEQ ID NO: 37952 - RNA, 36 nt, synthetic construct
  misc_feature 1..36: note = Rho GTPase-activating protein 5 (908-919)
  source 1..36: mol_type = other RNA
gccaccgagatcaccgccaagttcacggcgctgtac

SEQ ID NO: 37953 - RNA, 27 nt, synthetic construct
  misc_feature 1..27: note = Transcription initiation protein SPT3 homolog (109-117)
  source 1..27: mol_type = other RNA
gccaccgagctgcagagcatgatgtac

SEQ ID NO: 37954 - RNA, 27 nt, synthetic construct
  misc_feature 1..27: note = Clathrin heavy chain 1 (1626-1634)
  source 1..27: mol_type = other RNA
gccaccgagacccagcccatcgtgtac

SEQ ID NO: 37955 - RNA, 27 nt, synthetic construct
  misc_feature 1..27: note = HEAT repeat-containing protein 5A (1311-1319)
  source 1..27: mol_type = other RNA
gccgtgaagctgcccggcgggcagctc

SEQ ID NO: 37956 - RNA, 33 nt, synthetic construct
  misc_feature 1..33: note = L-lactate dehydrogenase B chain (200-210)
  source 1..33: mol_type = other RNA
gccgtgtggagcggcgtcaacgtggccggggtg

SEQ ID NO: 37957 - RNA, 30 nt, synthetic construct
  misc_feature 1..30: note = Myotrophin (75-84)
  source 1..30: mol_type = other RNA
gccgtgtacgagggccacgtcagctgcgtg

SEQ ID NO: 37958 - RNA, 30 nt, synthetic construct
  misc_feature 1..30: note = Ubiquitin carboxyl-terminal hydrolase 11 (318-327)
  source 1..30: mol_type = other RNA
gcctacgccgacctggtgaagcaggcgtgg

SEQ ID NO: 37959 - RNA, 27 nt, synthetic construct
  misc_feature 1..27: note = Phosphoinositide 3-kinase regulatory subunit 4 (481-489)
  source 1..27: mol_type = other RNA
gcctacgccgagaacatcgcgctgctc

SEQ ID NO: 37960 - RNA, 27 nt, synthetic construct
  misc_feature 1..27: note = Solute carrier family 26 member 6 (67-75)
  source 1..27: mol_type = other RNA
gcctacgccctgctcctgcagcacctg

SEQ ID NO: 37961 - RNA, 27 nt, synthetic construct
  misc_feature 1..27: note = CD109 antigen (1146-1154)
  source 1..27: mol_type = other RNA
gcctacgccctgctcagccacttcctg

SEQ ID NO: 37962 - RNA, 30 nt, synthetic construct
  misc_feature 1..30: note = Stress-induced-phosphoprotein 1 (349-358)
  source 1..30: mol_type = other RNA
gcctacgcccgcatcggcaacagctacttc

SEQ ID NO: 37963 - RNA, 27 nt, synthetic construct
  misc_feature 1..27: note = Nuclear receptor coactivator 7 (730-738)
  source 1..27: mol_type = other RNA
gcctacgccacccaccccttcaagttc

SEQ ID NO: 37964 - RNA, 27 nt, synthetic construct
  misc_feature 1..27: note = WD repeat-containing protein 36 (426-434)
  source 1..27: mol_type = other RNA
gcctacttcctgaagcccaaggagctc

SEQ ID NO: 37965 - RNA, 27 nt, synthetic construct
  misc_feature 1..27: note = Probable ATP-dependent RNA helicase DDX60 (93-101)
  source 1..27: mol_type = other RNA
gcctacttcaacttccccgagctgctc

SEQ ID NO: 37966 - RNA, 27 nt, synthetic construct
  misc_feature 1..27: note = Liprin-alpha-4 (952-960)
  source 1..27: mol_type = other RNA
gcctacggcgacatgaaccacgagtgg

SEQ ID NO: 37967 - RNA, 30 nt, synthetic construct
  misc_feature 1..30: note = S-adenosylmethionine synthase isoform type-2 (376-385)
  source 1..30: mol_type = other RNA
gcctacggccacttcgggcgcgacagcttc

SEQ ID NO: 37968 - RNA, 27 nt, synthetic construct
  misc_feature 1..27: note = Mesoderm induction early response protein 1 (319-327)
  source 1..27: mol_type = other RNA
gcctacggcaaggacttccacctgatc

SEQ ID NO: 37969 - RNA, 27 nt, synthetic construct
  misc_feature 1..27: note = WD repeat-containing protein 36 (84-92)
  source 1..27: mol_type = other RNA
gcctacggcaacgtgttcagcgccttc

SEQ ID NO: 37970 - RNA, 27 nt, synthetic construct
  misc_feature 1..27: note = Kynurenine-oxoglutarate transaminase 3 (134-142)
  source 1..27: mol_type = other RNA
gcctacggcagcctgttcaacaccatc

SEQ ID NO: 37971 - RNA, 27 nt, synthetic construct
  misc_feature 1..27: note = Cleavage stimulation factor subunit 3 (440-448)
  source 1..27: mol_type = other RNA
gcctacatcgactacctgagccacctc

SEQ ID NO: 37972 - RNA, 27 nt, synthetic construct
  misc_feature 1..27: note = Leucine-zipper-like transcriptional regulator 1 (75-83)
  source 1..27: mol_type = other RNA
gcctacaaggacgccatctacgtgttc

SEQ ID NO: 37973 - RNA, 27 nt, synthetic construct
  misc_feature 1..27: note = Small subunit processome component 20 homolog (1114-1122)
  source 1..27: mol_type = other RNA
gcctacctgcccaagatcctccagatc

SEQ ID NO: 37974 - RNA, 27 nt, synthetic construct
  misc_feature 1..27: note = Ubiquitin-like-conjugating enzyme ATG3 (65-73)
  source 1..27: mol_type = other RNA
gcctacctgcccaccggcaagcagttc

SEQ ID NO: 37975 - RNA, 33 nt, synthetic construct
  misc_feature 1..33: note = Elongation factor 2 (286-296)
  source 1..33: mol_type = other RNA
gcctacctgcccgtgaacgagagcttcggcttc

SEQ ID NO: 37976 - RNA, 30 nt, synthetic construct
  misc_feature 1..30: note = Protein shisa-5 (128-137)
  source 1..30: mol_type = other RNA
gcctacatggacgcccccaaggcggccctg

SEQ ID NO: 37977 - RNA, 30 nt, synthetic construct
  misc_feature 1..30: note = La-related protein 4B (250-259)
  source 1..30: mol_type = other RNA
gcctacaacgacaactggttcatcaccttc

SEQ ID NO: 37978 - RNA, 30 nt, synthetic construct
  misc_feature 1..30: note = Phosphatidylinositol-binding clathrin assembly protein (210-219)
  source 1..30: mol_type = other RNA
gcctacaacgagggcatcatcaacctgctc

SEQ ID NO: 37979 - RNA, 30 nt, synthetic construct
  misc_feature 1..30: note = Beta-hexosaminidase subunit alpha (194-203)
  source 1..30: mol_type = other RNA
gcctacaacaagctgaacgtgttccactgg

SEQ ID NO: 37980 - RNA, 27 nt, synthetic construct
  misc_feature 1..27: note = Cirhin (34-42)
  source 1..27: mol_type = other RNA
gcctacaacaaccagagcaaccgcctg

SEQ ID NO: 37981 - RNA, 27 nt, synthetic construct
  misc_feature 1..27: note = Cell adhesion molecule-related/down-regulated by oncogenes (193-201)
  source 1..27: mol_type = other RNA
gcctacaaccccgtgacccaccagctg

SEQ ID NO: 37982 - RNA, 30 nt, synthetic construct
  misc_feature 1..30: note = Ubiquitin-associated protein 2-like (267-276)
  source 1..30: mol_type = other RNA
gcctaccccccggcccccttcatgcacatc

SEQ ID NO: 37983 - RNA, 33 nt, synthetic construct
  misc_feature 1..33: note = Cathepsin D (202-212)
  source 1..33: mol_type = other RNA
gcctacccccgcatcagcgtgaacaacgtcctg

SEQ ID NO: 37984 - RNA, 27 nt, synthetic construct
  misc_feature 1..27: note = Ras GTPase-activating-like protein IQGAP1 (794-802)
  source 1..27: mol_type = other RNA
gcctaccaggaccgcctggcctacctc

SEQ ID NO: 37985 - RNA, 27 nt, synthetic construct
  misc_feature 1..27: note = Ras GTPase-activating-like protein IQGAP3 (955-963)
  source 1..27: mol_type = other RNA
gcctaccagcacctgttctacctcctg

SEQ ID NO: 37986 - RNA, 27 nt, synthetic construct
  misc_feature 1..27: note = 40S ribosomal protein S11 (9-17)
  source 1..27: mol_type = other RNA
gcctaccagaagcagcccaccatcttc

SEQ ID NO: 37987 - RNA, 27 nt, synthetic construct
  misc_feature 1..27: note = UDP-glucose:glycoprotein glucosyltransferase 2 (114-122)
  source 1..27: mol_type = other RNA
gcctacagccccgccatccagatgttc

SEQ ID NO: 37988 - RNA, 27 nt, synthetic construct
  misc_feature 1..27: note = Breast cancer anti-estrogen resistance protein 3 (211-219)
  source 1..27: mol_type = other RNA
gcctacagccgcgtgcagtaccagttc

SEQ ID NO: 37989 - RNA, 33 nt, synthetic construct
  misc_feature 1..33: note = Eukaryotic translation initiation factor 4 gamma 1 (168-178)
  source 1..33: mol_type = other RNA
gcctactaccccgcccagggcgtgcagcagttc

SEQ ID NO: 37990 - RNA, 27 nt, synthetic construct
  misc_feature 1..27: note = Heterogeneous nuclear ribonucleoprotein L (387-395)
  source 1..27: mol_type = other RNA
tgcctgtacggcaacgtggagaaggtc

SEQ ID NO: 37991 - RNA, 27 nt, synthetic construct
  misc_feature 1..27: note = Structural maintenance of chromosomes protein 4 (1136-1144)
  source 1..27: mol_type = other RNA
gacgccgccctggacttcaagaacgtg

SEQ ID NO: 37992 - RNA, 27 nt, synthetic construct
  misc_feature 1..27: note = Phosphoacetylglucosamine mutase (288-296)
  source 1..27: mol_type = other RNA
gacgccgacggccacttccacctgatc

SEQ ID NO: 37993 - RNA, 27 nt, synthetic construct
  misc_feature 1..27: note = Nuclear cap-binding protein subunit 2 (93-101)
  source 1..27: mol_type = other RNA
gacgccgagaacgccatgcgctacatc

SEQ ID NO: 37994 - RNA, 30 nt, synthetic construct
  misc_feature 1..30: note = Ras-related protein Rab-14 (163-172)
  source 1..30: mol_type = other RNA
gacgccttcctggaggccgcgaagaagatc

SEQ ID NO: 37995 - RNA, 27 nt, synthetic construct
  misc_feature 1..27: note = Rho-associated protein kinase 1 (187-195)
  source 1..27: mol_type = other RNA
gacgccatccacagcatgggcttcatc

SEQ ID NO: 37996 - RNA, 27 nt, synthetic construct
  misc_feature 1..27: note = Elongation factor 2 (348-356)
  source 1..27: mol_type = other RNA
gacgccctgctccagatgatcaccatc

SEQ ID NO: 37997 - RNA, 27 nt, synthetic construct
  misc_feature 1..27: note = SRR1-like protein (237-245)
  source 1..27: mol_type = other RNA
gacgccctgagcaagatggtgatcatc

SEQ ID NO: 37998 - RNA, 27 nt, synthetic construct
  misc_feature 1..27: note = Carnitine O-palmitoyltransferase 1, liver isoform (477-485)
  source 1..27: mol_type = other RNA
gacgcccccatcgtggcccacctgtgg

SEQ ID NO: 37999 - RNA, 24 nt, synthetic construct
  misc_feature 1..24: note = ATP-binding cassette sub-family E member 1 (326-333)
  source 1..24: mol_type = other RNA
gacgccagcctggtgttcaaggtc

SEQ ID NO: 38000 - RNA, 30 nt, synthetic construct
  misc_feature 1..30: note = Glutamate receptor ionotropic, kainate 2 (325-334)
  source 1..30: mol_type = other RNA
gacgccgtgcacgtcgtgagcgtggccgtc

SEQ ID NO: 38001 - RNA, 27 nt, synthetic construct
  misc_feature 1..27: note = General transcription factor II-I repeat domain-containing protein 2B (818-826)
  source 1..27: mol_type = other RNA
gacggcctgaactacatccccaagatc

SEQ ID NO: 38002 - RNA, 30 nt, synthetic construct
  misc_feature 1..30: note = HLA class I histocompatibility antigen, A-1 alpha chain (89-98)
  source 1..30: mol_type = other RNA
gacggcagccacaccatccagatcatgtac

SEQ ID NO: 38003 - RNA, 27 nt, synthetic construct
  misc_feature 1..27: note = Serine/threonine-protein kinase tousled-like 2 (313-321)
  source 1..27: mol_type = other RNA
gacggctacgccttccagaacctgatc

SEQ ID NO: 38004 - RNA, 27 nt, synthetic construct
  misc_feature 1..27: note = Heterogeneous nuclear ribonucleoprotein L (411-419)
  source 1..27: mol_type = other RNA
gacggctacgccgtggaccgcgccatc

SEQ ID NO: 38005 - RNA, 27 nt, synthetic construct
  misc_feature 1..27: note = T-complex protein 1 subunit epsilon (135-143)
  source 1..27: mol_type = other RNA
gacggctacgagcaggccgcccgcgtg

SEQ ID NO: 38006 - RNA, 27 nt, synthetic construct
  misc_feature 1..27: note = Ribosomal protein S6 kinase alpha-1 (416-424)
  source 1..27: mol_type = other RNA
gacggctacgtggtcaaggagaccatc

SEQ ID NO: 38007 - RNA, 24 nt, synthetic construct
  misc_feature 1..24: note = DNA-directed RNA polymerase III subunit RPC3 (186-193)
  source 1..24: mol_type = other RNA
gacatgtacctggtgcccaagctc

SEQ ID NO: 38008 - RNA, 27 nt, synthetic construct
  misc_feature 1..27: note = Cyclic AMP-responsive element-binding protein 3-like protein 2 (54-62)
  source 1..27: mol_type = other RNA
gaccccttcctgagcgagaagtccgtg

SEQ ID NO: 38009 - RNA, 33 nt, synthetic construct
  misc_feature 1..33: note = Tubulin beta chain (39-49)
  source 1..33: mol_type = other RNA
gacagcgacctgcagctcgaccgcatctccgtg

SEQ ID NO: 38010 - RNA, 33 nt, synthetic construct
  misc_feature 1..33: note = Zinc finger MYND domain-containing protein 11 (140-150)
  source 1..33: mol_type = other RNA
gacagcgagcaggccgacatcgcccgcatgctg

SEQ ID NO: 38011 - RNA, 24 nt, synthetic construct
  misc_feature 1..24: note = Negative elongation factor C/D (323-330)
  source 1..24: mol_type = other RNA
gacaccgacatcagcctgatccgc

SEQ ID NO: 38012 - RNA, 27 nt, synthetic construct
  misc_feature 1..27: note = Kinectin (454-462)
  source 1..27: mol_type = other RNA
gactacgcccgcctggtgaacgagctc

SEQ ID NO: 38013 - RNA, 27 nt, synthetic construct
  misc_feature 1..27: note = Enhancer of polycomb homolog 1 (423-431)
  source 1..27: mol_type = other RNA
gactacgacagcgtgttccaccacctg

SEQ ID NO: 38014 - RNA, 27 nt, synthetic construct
  misc_feature 1..27: note = Histone deacetylase 1 (71-79)
  source 1..27: mol_type = other RNA
gactacatcaagttcctgcgcagcatc

SEQ ID NO: 38015 - RNA, 27 nt, synthetic construct
  misc_feature 1..27: note = Protein KIAA0100 (885-893)
  source 1..27: mol_type = other RNA
gactacccccgctacctgttcgagatc

SEQ ID NO: 38016 - RNA, 27 nt, synthetic construct
  misc_feature 1..27: note = T-complex protein 1 subunit beta (509-517)
  source 1..27: mol_type = other RNA
gaggccgccgaggtgatcctgcgcgtc

SEQ ID NO: 38017 - RNA, 27 nt, synthetic construct
  misc_feature 1..27: note = DNA-dependent protein kinase catalytic subunit (1728-1736)
  source 1..27: mol_type = other RNA
gagttccccccgggcaccccccgcttc

SEQ ID NO: 38018 - RNA, 33 nt, synthetic construct
  misc_feature 1..33: note = Nuclear protein 1 (26-36)
  source 1..33: mol_type = other RNA
gagagcgacctgtactccctcgcccacagctac

SEQ ID NO: 38019 - RNA, 30 nt, synthetic construct
  misc_feature 1..30: note = General transcription factor II-I (242-251)
  source 1..30: mol_type = other RNA
gagagcgaggaccccgactactaccagtac

SEQ ID NO: 38020 - RNA, 39 nt, synthetic construct
  misc_feature 1..39: note = E3 ubiquitin-protein ligase HUWE1 (969-981)
  source 1..39: mol_type = other RNA
gagagcgaggactaccacttctaccagggcctggtgtac

SEQ ID NO: 38021 - RNA, 27 nt, synthetic construct
  misc_feature 1..27: note = ATP-dependent RNA helicase DDX24 (571-579)
  source 1..27: mol_type = other RNA
gagaccgacgagaaggacttctacctg

SEQ ID NO: 38022 - RNA, 33 nt, synthetic construct
  misc_feature 1..33: note = Serrate RNA effector molecule homolog (86-96)
  source 1..33: mol_type = other RNA
gagaccgaggccgtgaagcgctacaacgactac

SEQ ID NO: 38023 - RNA, 30 nt, synthetic construct
  misc_feature 1..30: note = Probable ATP-dependent RNA helicase DDX56 (239-248)
  source 1..30: mol_type = other RNA
gagaccgaggaggacaagttcctgctcctg

SEQ ID NO: 38024 - RNA, 30 nt, synthetic construct
  misc_feature 1..30: note = Complement C4-A (1516-1525)
  source 1..30: mol_type = other RNA
gagaccgagggcccccacgtgctgctctac

SEQ ID NO: 38025 - RNA, 27 nt, synthetic construct
  misc_feature 1..27: note = Copine-1 (269-277)
  source 1..27: mol_type = other RNA
gagaccgagtacagcttcctggactac

SEQ ID NO: 38026 - RNA, 27 nt, synthetic construct
  misc_feature 1..27: note = Melanoma-associated antigen 11 (252-260)
  source 1..27: mol_type = other RNA
gaggtggaccccaccagccactcctac

SEQ ID NO: 38027 - RNA, 27 nt, synthetic construct
  misc_feature 1..27: note = General transcription factor 3C polypeptide 2 (329-337)
  source 1..27: mol_type = other RNA
gagtggatccccctggcctggaagtgg

SEQ ID NO: 38028 - RNA, 33 nt, synthetic construct
  misc_feature 1..33: note = Influenza virus NS1A-binding protein (632-642)
  source 1..33: mol_type = other RNA
gagtggagcccctacaccaagatcttccagttc

SEQ ID NO: 38029 - RNA, 27 nt, synthetic construct
  misc_feature 1..27: note = Zinc finger protein 318 (408-416)
  source 1..27: mol_type = other RNA
gagtacgccaagatccacgacctgctc

SEQ ID NO: 38030 - RNA, 27 nt, synthetic construct
  misc_feature 1..27: note = CLIP-associating protein 1 (358-366)
  source 1..27: mol_type = other RNA
gagtacgacaacttcttccagcacctg

SEQ ID NO: 38031 - RNA, 27 nt, synthetic construct
  misc_feature 1..27: note = Pericentrin (3305-3313)
  source 1..27: mol_type = other RNA
gagtacatccaccacctggaggtgatc

SEQ ID NO: 38032 - RNA, 27 nt, synthetic construct
  misc_feature 1..27: note = Transcriptional regulator homolog RPD3 (72-80)
  source 1..27: mol_type = other RNA
gagtacatcaagttcctgcgcagcatc

SEQ ID NO: 38033 - RNA, 30 nt, synthetic construct
  misc_feature 1..30: note = Rab GTPase-activating protein 1 (632-641)
  source 1..30: mol_type = other RNA
gagtacatccccgacctgtacaaccacttc

SEQ ID NO: 38034 - RNA, 27 nt, synthetic construct
  misc_feature 1..27: note = Gem-associated protein 4 (892-900)
  source 1..27: mol_type = other RNA
gagtacatccagttcgtgcccctgctc

SEQ ID NO: 38035 - RNA, 27 nt, synthetic construct
  misc_feature 1..27: note = Inhibitor of growth protein 5 (48-56)
  source 1..27: mol_type = other RNA
gagtacatcagcaccgtgaagaccctg

SEQ ID NO: 38036 - RNA, 27 nt, synthetic construct
  misc_feature 1..27: note = Inositol polyphosphate multikinase (290-298)
  source 1..27: mol_type = other RNA
gagtacaacaacaacttccacgtgctg

SEQ ID NO: 38037 - RNA, 27 nt, synthetic construct
  misc_feature 1..27: note = Sorting nexin-18 (463-471)
  source 1..27: mol_type = other RNA
gagtaccagaaggtgggccagagcttc

SEQ ID NO: 38038 - RNA, 27 nt, synthetic construct
  misc_feature 1..27: note = Poly (ADP-ribose) polymerase 12 (509-517)
  source 1..27: mol_type = other RNA
gagtaccagaaggtgtggaacctgttc

SEQ ID NO: 38039 - RNA, 27 nt, synthetic construct
  misc_feature 1..27: note = Poly (ADP-ribose) polymerase 4 (584-592)
  source 1..27: mol_type = other RNA
gagtaccgccccgagttcagcaacttc

SEQ ID NO: 38040 - RNA, 27 nt, synthetic construct
  misc_feature 1..27: note = Ubiquitin-conjugating enzyme E2 K (161-169)
  source 1..27: mol_type = other RNA
gagtacaccaagaagatcgagaacctg

SEQ ID NO: 38041 - RNA, 27 nt, synthetic construct
  misc_feature 1..27: note = Leucine-rich repeats and immunoglobulin-like domains protein 2 (560-568)
  source 1..27: mol_type = other RNA
gagtacaccagcatcctgcacctcttc

SEQ ID NO: 38042 - RNA, 30 nt, synthetic construct
  misc_feature 1..30: note = HLA class I histocompatibility antigen, Cw-7 alpha chain (140-149)
  source 1..30: mol_type = other RNA
ttcgcctacgacggcaaggactacatcgcc

SEQ ID NO: 38043 - RNA, 24 nt, synthetic construct
  misc_feature 1..24: note = 60S ribosomal protein L3 (362-369)
  source 1..24: mol_type = other RNA
ttcatcgacaccaccagcaagttc

SEQ ID NO: 38044 - RNA, 24 nt, synthetic construct
  misc_feature 1..24: note = Cysteine-rich protein 2-binding protein (155-162)
  source 1..24: mol_type = other RNA
ttcatcgagaagcactggaccttc

SEQ ID NO: 38045 - RNA, 27 nt, synthetic construct
  misc_feature 1..27: note = DNA replication licensing factor MCM5 (427-435)
  source 1..27: mol_type = other RNA
ttcatcatggagggcggggccatggtg

SEQ ID NO: 38046 - RNA, 27 nt, synthetic construct
  misc_feature 1..27: note = 60S acidic ribosomal protein P0 (108-116)
  source 1..27: mol_type = other RNA
ttcctggccgaccccagcgccttcgtg

SEQ ID NO: 38047 - RNA, 27 nt, synthetic construct
  misc_feature 1..27: note = Trifunctional enzyme subunit beta, mitochondrial (184-192)
  source 1..27: mol_type = other RNA
ttcctggcccccgagctcccggccgtg

SEQ ID NO: 38048 - RNA, 27 nt, synthetic construct
  misc_feature 1..27: note = Membrane-bound transcription factor site-2 protease (251-259)
  source 1..27: mol_type = other RNA
ttcctggacgccaccctcaccagcgtg

SEQ ID NO: 38049 - RNA, 30 nt, synthetic construct
  misc_feature 1..30: note = Glucosylceramidase (172-181)
  source 1..30: mol_type = other RNA
ttcctggacgcctacgccgagcacaagctc

SEQ ID NO: 38050 - RNA, 27 nt, synthetic construct
  misc_feature 1..27: note = Neutral alpha-glucosidase AB (604-612)
  source 1..27: mol_type = other RNA
ttcctggacgacggccacaccttcaac

SEQ ID NO: 38051 - RNA, 30 nt, synthetic construct
  misc_feature 1..30: note = Cytoplasmic dynein 2 heavy chain 1 (42-51)
  source 1..30: mol_type = other RNA
ttcctggacgacggcaaccagatgctcctg

SEQ ID NO: 38052 - RNA, 27 nt, synthetic construct
  misc_feature 1..27: note = Thimet oligopeptidase (294-302)
  source 1..27: mol_type = other RNA
ttcctggacgagctcgcccagaagctg

SEQ ID NO: 38053 - RNA, 27 nt, synthetic construct
  misc_feature 1..27: note = Regulatory-associated protein of mTOR (240-248)
  source 1..27: mol_type = other RNA
ttcctggacctcggcccctgggccgtg

SEQ ID NO: 38054 - RNA, 27 nt, synthetic construct
  misc_feature 1..27: note = Protein FAM83H (343-351)
  source 1..27: mol_type = other RNA
ttcctggaccccgaccgccacttcctc

SEQ ID NO: 38055 - RNA, 30 nt, synthetic construct
  misc_feature 1..30: note = CAD protein (150-159)
  source 1..30: mol_type = other RNA
ttcctggaccccaacgcccgcccgctcgtg

SEQ ID NO: 38056 - RNA, 27 nt, synthetic construct
  misc_feature 1..27: note = DDB1- and CUL4-associated factor 12 (303-311)
  source 1..27: mol_type = other RNA
ttcctggacccccgccagccgagctac

SEQ ID NO: 38057 - RNA, 27 nt, synthetic construct
  misc_feature 1..27: note = Desmoplakin (1057-1065)
  source 1..27: mol_type = other RNA
ttcctggaccagaacctccagaagtac

SEQ ID NO: 38058 - RNA, 30 nt, synthetic construct
  misc_feature 1..30: note = Basic leucine zipper and W2 domain-containing protein 2 (51-60)
  source 1..30: mol_type = other RNA
ttcctggacagcaccggctcccgcctcgac

SEQ ID NO: 38059 - RNA, 27 nt, synthetic construct
  misc_feature 1..27: note = Exportin-1 (1034-1042)
  source 1..27: mol_type = other RNA
ttcctggaggagcgcgagatcgccctc

SEQ ID NO: 38060 - RNA, 30 nt, synthetic construct
  misc_feature 1..30: note = Creatine kinase M-type (192-201)
  source 1..30: mol_type = other RNA
ttcctgttcgacaagcccgtgagcccgctc

SEQ ID NO: 38061 - RNA, 27 nt, synthetic construct
  misc_feature 1..27: note = Ras-related GTP-binding protein C (226-234)
  source 1..27: mol_type = other RNA
ttcctgttcgacgtggtcagcaagatc

SEQ ID NO: 38062 - RNA, 33 nt, synthetic construct
  misc_feature 1..33: note = Nestin (43-53)
  source 1..33: mol_type = other RNA
ttcctgttccccggcaccgagaaccaggagctc

SEQ ID NO: 38063 - RNA, 33 nt, synthetic construct
  misc_feature 1..33: note = Unconventional myosin-Ib (362-372)
  source 1..33: mol_type = other RNA
ttcctgttcagctccgaccacctcatcgagatg

SEQ ID NO: 38064 - RNA, 33 nt, synthetic construct
  misc_feature 1..33: note = Glycogen phosphorylase, liver form (525-535)
  source 1..33: mol_type = other RNA
ttcctgggcgacgacgtgttcctccgcgagctg

SEQ ID NO: 38065 - RNA, 27 nt, synthetic construct
  misc_feature 1..27: note = Lysosomal alpha-glucosidase (139-147)
  source 1..27: mol_type = other RNA
ttcctgggccccgagccgaagagcgtg

SEQ ID NO: 38066 - RNA, 27 nt, synthetic construct
  misc_feature 1..27: note = Sterol regulatory element-binding protein 1 (1036-1044)
  source 1..27: mol_type = other RNA
ttcctgcacgaggccaccgcccgcctc

SEQ ID NO: 38067 - RNA, 27 nt, synthetic construct
  misc_feature 1..27: note = DNA-dependent protein kinase catalytic subunit (319-327)
  source 1..27: mol_type = other RNA
ttcctgaagcaggtgagcaacatggtc

SEQ ID NO: 38068 - RNA, 27 nt, synthetic construct
  misc_feature 1..27: note = ADP-ribosylation factor-binding protein GGA1 (90-98)
  source 1..27: mol_type = other RNA
ttcctgaacgagctcatcaaggtggtc

SEQ ID NO: 38069 - RNA, 27 nt, synthetic construct
  misc_feature 1..27: note = CDK5 regulatory subunit-associated protein 2 (1316-1324)
  source 1..27: mol_type = other RNA
ttcctgaacggcaagagcgtgggggtc

SEQ ID NO: 38070 - RNA, 27 nt, synthetic construct
  misc_feature 1..27: note = Nestin (377-385)
  source 1..27: mol_type = other RNA
ttcctgcaggcccgcacccccaccctc

SEQ ID NO: 38071 - RNA, 27 nt, synthetic construct
  misc_feature 1..27: note = Plectin (2481-2489)
  source 1..27: mol_type = other RNA
ttcctgagcgagaaggactccctcctg

SEQ ID NO: 38072 - RNA, 27 nt, synthetic construct
  misc_feature 1..27: note = Hemoglobin subunit alpha (5-13)
  source 1..27: mol_type = other RNA
ttcctgagcttccccaccaccaagacg

SEQ ID NO: 38073 - RNA, 27 nt, synthetic construct
  misc_feature 1..27: note = DDRGK domain-containing protein 1 (215-223)
  source 1..27: mol_type = other RNA
ttcctgaccgagttcatcaactacatc

SEQ ID NO: 38074 - RNA, 27 nt, synthetic construct
  misc_feature 1..27: note = Elongation factor 1-gamma (69-77)
  source 1..27: mol_type = other RNA
ttcctggtgggcgagcgcgtcaccctc

SEQ ID NO: 38075 - RNA, 36 nt, synthetic construct
  misc_feature 1..36: note = Laminin subunit alpha-1 (2178-2189)
  source 1..36: mol_type = other RNA
ttcctgtgggacctcggcagcgggtccacccgcctg

SEQ ID NO: 38076 - RNA, 27 nt, synthetic construct
  misc_feature 1..27: note = Upstream stimulatory factor 1 (42-50)
  source 1..27: mol_type = other RNA
ttccccgacccgaacgtgaagtacgtc

SEQ ID NO: 38077 - RNA, 27 nt, synthetic construct
  misc_feature 1..27: note = Deubiquitinating protein VCIP135 (505-513)
  source 1..27: mol_type = other RNA
ttcccccacctgccgggcaagaccttc

SEQ ID NO: 38078 - RNA, 27 nt, synthetic construct
  misc_feature 1..27: note = Putative helicase MOV-10 (232-240)
  source 1..27: mol_type = other RNA
ttccccatcgaccacttcacccacatc

SEQ ID NO: 38079 - RNA, 27 nt, synthetic construct
  misc_feature 1..27: note = NEDD4 family-interacting protein 1 (61-69)
  source 1..27: mol_type = other RNA
ttccccaagccgcccagctacaacgtg

SEQ ID NO: 38080 - RNA, 27 nt, synthetic construct
  misc_feature 1..27: note = Vacuolar fusion protein CCZ1 homolog (254-262)
  source 1..27: mol_type = other RNA
ttcccccgccacatcgagccggagctg

SEQ ID NO: 38081 - RNA, 24 nt, synthetic construct
  misc_feature 1..24: note = Retinoblastoma-binding protein 5 (81-88)
  source 1..24: mol_type = other RNA
ttccccagcccgatcctgaaggtg

SEQ ID NO: 38082 - RNA, 27 nt, synthetic construct
  misc_feature 1..27: note = DNA polymerase alpha catalytic subunit (594-602)
  source 1..27: mol_type = other RNA
ttcccctacgccttcaaggaggtgatc

SEQ ID NO: 38083 - RNA, 24 nt, synthetic construct
  misc_feature 1..24: note = HEAT repeat-containing protein 1 (243-250)
  source 1..24: mol_type = other RNA
ttcccctacatccagaagggcctg

SEQ ID NO: 38084 - RNA, 27 nt, synthetic construct
  misc_feature 1..27: note = Reticulocalbin-3 (52-60)
  source 1..27: mol_type = other RNA
ttccagtacgaccacgaggccttcctg

SEQ ID NO: 38085 - RNA, 30 nt, synthetic construct
  misc_feature 1..30: note = Short transient receptor potential channel 4-associated protein (457-466)
  source 1..30: mol_type = other RNA
ttcagcgaccaccacgagaacaagtacctg

SEQ ID NO: 38086 - RNA, 27 nt, synthetic construct
  misc_feature 1..27: note = Phosphoinositide 3-kinase regulatory subunit 4 (20-28)
  source 1..27: mol_type = other RNA
ttcagcgacatccacgacttcgagtac

SEQ ID NO: 38087 - RNA, 27 nt, synthetic construct
  misc_feature 1..27: note = Serine/threonine-protein kinase N2 (754-762)
  source 1..27: mol_type = other RNA
ttcagcgagccccgcgccgtgttctac

SEQ ID NO: 38088 - RNA, 33 nt, synthetic construct
  misc_feature 1..33: note = Low-density lipoprotein receptor-related protein 4 (36-46)
  source 1..33: mol_type = other RNA
ttcaccgaccccggcatggggaacctgacctac

SEQ ID NO: 38089 - RNA, 27 nt, synthetic construct
  misc_feature 1..27: note = PR domain zinc finger protein 10 (81-89)
  source 1..27: mol_type = other RNA
ttcaccgaccccggccaggtggcctac

SEQ ID NO: 38090 - RNA, 27 nt, synthetic construct
  misc_feature 1..27: note = Unconventional myosin-Ib (229-237)
  source 1..27: mol_type = other RNA
ttcaccgaccagcagaagctgatctac

SEQ ID NO: 38091 - RNA, 33 nt, synthetic construct
  misc_feature 1..33: note = Glutathione S-transferase Mu 3 (27-37)
  source 1..33: mol_type = other RNA
ttcaccgacaccagctacgaggagaagcgctac

SEQ ID NO: 38092 - RNA, 27 nt, synthetic construct
  misc_feature 1..27: note = Ribosomal protein S6 kinase alpha-5 (149-157)
  source 1..27: mol_type = other RNA
ttcaccgagcacgaggtgcagatctac

SEQ ID NO: 38093 - RNA, 30 nt, synthetic construct
  misc_feature 1..30: note = Unconventional myosin-Ib (526-535)
  source 1..30: mol_type = other RNA
ttcgtggacaagaacaacgacctgctctac

SEQ ID NO: 38094 - RNA, 27 nt, synthetic construct
  misc_feature 1..27: note = Heat shock 70 kDa protein 4 (200-208)
  source 1..27: mol_type = other RNA
ttcgtggacatgggccacagcgcctac

SEQ ID NO: 38095 - RNA, 27 nt, synthetic construct
  misc_feature 1..27: note = Talin-1 (1850-1858)
  source 1..27: mol_type = other RNA
ttcgtggactaccagaccaccatggtc

SEQ ID NO: 38096 - RNA, 33 nt, synthetic construct
  misc_feature 1..33: note = Trafficking protein particle complex subunit 3 (115-125)
  source 1..33: mol_type = other RNA
ttcgtggagctgcccgacaaccacagctccctc

SEQ ID NO: 38097 - RNA, 27 nt, synthetic construct
  misc_feature 1..27: note = Serine/threonine-protein kinase Nek6 (272-280)
  source 1..27: mol_type = other RNA
ttctacggcgacaagatgaacctgttc

SEQ ID NO: 38098 - RNA, 27 nt, synthetic construct
  misc_feature 1..27: note = Myotubularin-related protein 5 (454-462)
  source 1..27: mol_type = other RNA
ttctacggcgacgtgcagacccacatc

SEQ ID NO: 38099 - RNA, 27 nt, synthetic construct
  misc_feature 1..27: note = Protein CLEC16A (161-169)
  source 1..27: mol_type = other RNA
ttctacaacgagcacaccaacgacttc

SEQ ID NO: 38100 - RNA, 27 nt, synthetic construct
  misc_feature 1..27: note = Fanconi anemia group I protein (922-930)
  source 1..27: mol_type = other RNA
ttctaccagcccaagatccagcagttc

SEQ ID NO: 38101 - RNA, 30 nt, synthetic construct
  misc_feature 1..30: note = Heat shock 70 kDa protein 1-like (295-304)
  source 1..30: mol_type = other RNA
ttctacaccagcatcacccgcgcccggttc

SEQ ID NO: 38102 - RNA, 27 nt, synthetic construct
  misc_feature 1..27: note = Little elongation complex subunit 2 (213-221)
  source 1..27: mol_type = other RNA
ttctacgtgggccacatcgacgccttc

SEQ ID NO: 38103 - RNA, 27 nt, synthetic construct
  misc_feature 1..27: note = E3 ubiquitin-protein ligase MARCH6 (231-239)
  source 1..27: mol_type = other RNA
ggcctggacgggagcctcgtgttcctg

SEQ ID NO: 38104 - RNA, 27 nt, synthetic construct
  misc_feature 1..27: note = Malate dehydrogenase, mitochondrial (144-152)
  source 1..27: mol_type = other RNA
ggcctggaccccgcccgcgtgaacgtc

SEQ ID NO: 38105 - RNA, 27 nt, synthetic construct
  misc_feature 1..27: note = Asparagine synthetase (glutamine-hydrolyzing) (177-185)
  source 1..27: mol_type = other RNA
ggcctggacagctccctcgtggccgcc

SEQ ID NO: 38106 - RNA, 33 nt, synthetic construct
  misc_feature 1..33: note = DNA damage-binding protein 1 (996-1006)
  source 1..33: mol_type = other RNA
ggcctgttccacctcggggagttcgtgaacgtc

SEQ ID NO: 38107 - RNA, 30 nt, synthetic construct
  misc_feature 1..30: note = Importin-9 (119-128)
  source 1..30: mol_type = other RNA
ggcctgcacgagacccagcccccgagcgtg

SEQ ID NO: 38108 - RNA, 27 nt, synthetic construct
  misc_feature 1..27: note = HEAT repeat-containing protein 5A (449-457)
  source 1..27: mol_type = other RNA
ggcctgctcgacagcatcctgtccgtg

SEQ ID NO: 38109 - RNA, 27 nt, synthetic construct
  misc_feature 1..27: note = HEAT repeat-containing protein 5B (445-453)
  source 1..27: mol_type = other RNA
ggcctgctcgagatcgtgaccagcgtc

SEQ ID NO: 38110 - RNA, 30 nt, synthetic construct
  misc_feature 1..30: note = Zinc transporter SLC39A7 (454-463)
  source 1..30: mol_type = other RNA
ggcctgctcgggggcgtgatcatgatggtc

SEQ ID NO: 38111 - RNA, 33 nt, synthetic construct
  misc_feature 1..33: note = Protein SON (535-545)
  source 1..33: mol_type = other RNA
ggcctgctcgggcagcccgaggccaccatggtg

SEQ ID NO: 38112 - RNA, 27 nt, synthetic construct
  misc_feature 1..27: note = Nestin (273-281)
  source 1..27: mol_type = other RNA
ggcctgcagagccagatcgcccaggtg

SEQ ID NO: 38113 - RNA, 27 nt, synthetic construct
  misc_feature 1..27: note = Armadillo repeat containing 8, isoform CRA_g (325-333)
  source 1..27: mol_type = other RNA
ggcctgagcgagtccagcgtgaaggtc

SEQ ID NO: 38114 - RNA, 27 nt, synthetic construct
  misc_feature 1..27: note = Eukaryotic translation initiation factor 3 subunit F (252-260)
  source 1..27: mol_type = other RNA
ggcctgagctccgacctccagcaggtg

SEQ ID NO: 38115 - RNA, 27 nt, synthetic construct
  misc_feature 1..27: note = Bifunctional glutamate/proline-tRNA ligase (1274-1282)
  source 1..27: mol_type = other RNA
ggcctgaccacccgcacgatcggggtg

SEQ ID NO: 38116 - RNA, 27 nt, synthetic construct
  misc_feature 1..27: note = Glyceraldehyde-3-phosphate dehydrogenase (230-238)
  source 1..27: mol_type = other RNA
ggcatggccttccgcgtgcccaccgcc

SEQ ID NO: 38117 - RNA, 27 nt, synthetic construct
  misc_feature 1..27: note = WD repeat-containing protein 19 (311-319)
  source 1..27: mol_type = other RNA
ggccccgacgagctgcgcccgatgctc

SEQ ID NO: 38118 - RNA, 27 nt, synthetic construct
  misc_feature 1..27: note = Uncharacterized protein KIAA0355 (842-850)
  source 1..27: mol_type = other RNA
ggcagcgaccccgagttcgcccgctac

SEQ ID NO: 38119 - RNA, 27 nt, synthetic construct
  misc_feature 1..27: note = Extended synaptotagmin-2 (388-396)
  source 1..27: mol_type = other RNA
ggcagcgacccctacgtgcgcatgtac

SEQ ID NO: 38120 - RNA, 36 nt, synthetic construct
  misc_feature 1..36: note = YY1-associated protein 1 (203-214)
  source 1..36: mol_type = other RNA
ggcaccgagttcctgaaccccctcatcagcaagtac

SEQ ID NO: 38121 - RNA, 33 nt, synthetic construct
  misc_feature 1..33: note = Clustered mitochondria protein homolog (777-787)
  source 1..33: mol_type = other RNA
ggcaccgagcaccccaacaccatccaggagtac

SEQ ID NO: 38122 - RNA, 33 nt, synthetic construct
  misc_feature 1..33: note = Nucleolin (451-461)
  source 1..33: mol_type = other RNA
ggcaccgagatcgacgggcgcagcatctccctg

SEQ ID NO: 38123 - RNA, 27 nt, synthetic construct
  misc_feature 1..27: note = DNA-dependent protein kinase catalytic subunit (1480-1488)
  source 1..27: mol_type = other RNA
ggcaccgagctgctcagcctggtgtac

SEQ ID NO: 38124 - RNA, 27 nt, synthetic construct
  misc_feature 1..27: note = Pecanex-like protein 3 (789-797)
  source 1..27: mol_type = other RNA
ggcgtgctggagaacatcttcggggtc

SEQ ID NO: 38125 - RNA, 33 nt, synthetic construct
  misc_feature 1..33: note = Ubiquitin-like protein 7 (158-168)
  source 1..33: mol_type = other RNA
ggcgtgctgcaggacaaggacctcttcagcgtc

SEQ ID NO: 38126 - RNA, 27 nt, synthetic construct
  misc_feature 1..27: note = Polypyrimidine tract-binding protein 2 (308-316)
  source 1..27: mol_type = other RNA
ggcgtgtacggggacgtccagcgcgtg

SEQ ID NO: 38127 - RNA, 33 nt, synthetic construct
  misc_feature 1..33: note = Caseinolytic peptidase B protein homolog (337-347)
  source 1..33: mol_type = other RNA
ggctggtacgacgaggagcaccccctggtgttc

SEQ ID NO: 38128 - RNA, 27 nt, synthetic construct
  misc_feature 1..27: note = Signal recognition particle subunit SRP68 (586-594)
  source 1..27: mol_type = other RNA
ggctacatcaaggggatcttcggcttc

SEQ ID NO: 38129 - RNA, 27 nt, synthetic construct
  misc_feature 1..27: note = Hypoxanthine-guanine phosphoribosyltransferase (173-181)
  source 1..27: mol_type = other RNA
ggctacaagcccgacttcgtggggttc

SEQ ID NO: 38130 - RNA, 27 nt, synthetic construct
  misc_feature 1..27: note = GMP reductase 2 (151-159)
  source 1..27: mol_type = other RNA
ggctacagcgagcacttcgtggagttc

SEQ ID NO: 38131 - RNA, 27 nt, synthetic construct
  misc_feature 1..27: note = Lysine-specific histone demethylase 1B (77-85)
  source 1..27: mol_type = other RNA
ggctacaccagccgctggtaccacctg

SEQ ID NO: 38132 - RNA, 30 nt, synthetic construct
  misc_feature 1..30: note = ATP-binding cassette sub-family E member 1 (315-324)
  source 1..30: mol_type = other RNA
ggctacgtgcccaccgagaacctgcgcttc

SEQ ID NO: 38133 - RNA, 27 nt, synthetic construct
  misc_feature 1..27: note = Ankyrin repeat domain-containing protein 17 (2149-2157)
  source 1..27: mol_type = other RNA
cacgccttctggggcgggagcgtggtc

SEQ ID NO: 38134 - RNA, 27 nt, synthetic construct
  misc_feature 1..27: note = CCR4-NOT transcription complex subunit 1 (1619-1627)
  source 1..27: mol_type = other RNA
cacgccatccccccgaccctggccatg

SEQ ID NO: 38135 - RNA, 27 nt, synthetic construct
  misc_feature 1..27: note = Syntaxin-binding protein 1 (295-303)
  source 1..27: mol_type = other RNA
cacatcgccgaggtgagccaggaggtc

SEQ ID NO: 38136 - RNA, 27 nt, synthetic construct
  misc_feature 1..27: note Dolichyl-diphosphooligosaccharide-proteinosyltransferase subunit 1 (45-53)
  source 1..27: mol_type = other RNA
cacctggccaaggtgaccgccgaggtc

SEQ ID NO: 38137 - RNA, 27 nt, synthetic construct
  misc_feature 1..27: note = ATP-binding cassette sub-family F member 1 (520-528)
  source 1..27: mol_type = other RNA
cacctggacgcccagcgcctccactac

SEQ ID NO: 38138 - RNA, 27 nt, synthetic construct
  misc_feature 1..27: note = T-complex protein 1 subunit epsilon (147-155)
  source 1..27: mol_type = other RNA
cacctggacaagatcagcgactccgtg

SEQ ID NO: 38139 - RNA, 30 nt, synthetic construct
  misc_feature 1..30: note = Pre-mRNA-processing-splicing factor 8 (1875-1884)
  source 1..30: mol_type = other RNA
cacctgctcgacttccccaacatcgtgatc

SEQ ID NO: 38140 - RNA, 27 nt, synthetic construct
  misc_feature 1..27: note = Polypyrimidine tract-binding protein 3 (383-391)
  source 1..27: mol_type = other RNA
cacctgagcaacatccccccgtccgtg

SEQ ID NO: 38141 - RNA, 27 nt, synthetic construct
  misc_feature 1..27: note = Integrator complex subunit 4 (10-18)
  source 1..27: mol_type = other RNA
cacctgaccgacaccagccacggcgtg

SEQ ID NO: 38142 - RNA, 27 nt, synthetic construct
  misc_feature 1..27: note = Clathrin heavy chain 1 (1356-1364)
  source 1..27: mol_type = other RNA
cacctgtgggccgagctcgtgttcctg

SEQ ID NO: 38143 - RNA, 36 nt, synthetic construct
  misc_feature 1..36: note = LanC-like protein 1 (74-85)
  source 1..36: mol_type = other RNA
cacctgtacgacgtgttcggcgaccccgcctacctc

SEQ ID NO: 38144 - RNA, 27 nt, synthetic construct
  misc_feature 1..27: note = U3 small nucleolar RNA-associated protein 6 homolog (267-275)
  source 1..27: mol_type = other RNA
cacaccgacgaccccctgacctgggac

SEQ ID NO: 38145 - RNA, 27 nt, synthetic construct
  misc_feature 1..27: note = Ras GTPase-activating-like protein IQGAP3 (1072-1080)
  source 1..27: mol_type = other RNA
cacaccgaccccgtgcacctgtacaag

SEQ ID NO: 38146 - RNA, 30 nt, synthetic construct
  misc_feature 1..30: note = Receptor-type tyrosine-protein phosphatase F (1334-1343)
  source 1..30: mol_type = other RNA
cacaccgaggtgcccgcccgcaacctgtac

SEQ ID NO: 38147 - RNA, 27 nt, synthetic construct
  misc_feature 1..27: note = Non-specific lipid-transfer protein (143-151)
  source 1..27: mol_type = other RNA
cacgtggacctgctcatcaacaagtac

SEQ ID NO: 38148 - RNA, 27 nt, synthetic construct
  misc_feature 1..27: note = Rhophilin-2 (351-359)
  source 1..27: mol_type = other RNA
cactacgccgccctggcgcactacttc

SEQ ID NO: 38149 - RNA, 27 nt, synthetic construct
  misc_feature 1..27: note = Heat shock protein 105 kDa (739-747)
  source 1..27: mol_type = other RNA
cactacgccaagatcgccgcggacttc

SEQ ID NO: 38150 - RNA, 30 nt, synthetic construct
  misc_feature 1..30: note = Eukaryotic translation initiation factor 3 subunit I (312-321)
  source 1..30: mol_type = other RNA
cactacttcgacccccagtacttcgagttc

SEQ ID NO: 38151 - RNA, 30 nt, synthetic construct
  misc_feature 1..30: note = General transcription factor 3C polypeptide 2 (687-696)
  source 1..30: mol_type = other RNA
cactacatcgacgccggctacctggggttc

SEQ ID NO: 38152 - RNA, 27 nt, synthetic construct
  misc_feature 1..27: note = Centrosomal protein of 192 kDa (2495-2503)
  source 1..27: mol_type = other RNA
cactacatcaacatgcccgtgcagttc

SEQ ID NO: 38153 - RNA, 27 nt, synthetic construct
  misc_feature 1..27: note = Tubulin gamma-1 chain (59-67)
  source 1..27: mol_type = other RNA
cactacatcccccgcgccgtgctgctc

SEQ ID NO: 38154 - RNA, 27 nt, synthetic construct
  misc_feature 1..27: note = Structural maintenance of chromosomes protein 4 (1123-1131)
  source 1..27: mol_type = other RNA
cactacaagcccaccccgctgtacttc

SEQ ID NO: 38155 - RNA, 27 nt, synthetic construct
  misc_feature 1..27: note = Rho GTPase-activating protein 5 (207-215)
  source 1..27: mol_type = other RNA
cactacctgcgcgaggtgcaggccttc

SEQ ID NO: 38156 - RNA, 30 nt, synthetic construct
  misc_feature 1..30: note = E3 ubiquitin-protein ligase Arkadia (644-653)
  source 1..30: mol_type = other RNA
cactacatgcccccgccctacgccagcctg

SEQ ID NO: 38157 - RNA, 33 nt, synthetic construct
  misc_feature 1..33: note = Rho-related BTB domain-containing protein 3 (239-249)
  source 1..33: mol_type = other RNA
cactacaacagcgacctgaacaacctcctgttc

SEQ ID NO: 38158 - RNA, 27 nt, synthetic construct
  misc_feature 1..27: note = DNA mismatch repair protein Msh6 (458-466)
  source 1..27: mol_type = other RNA
cactaccccccggtgcaggtcctgttc

SEQ ID NO: 38159 - RNA, 27 nt, synthetic construct
  misc_feature 1..27: note = Dedicator of cytokinesis protein 5 (968-976)
  source 1..27: mol_type = other RNA
cactacagccactacatctccaccttc

SEQ ID NO: 38160 - RNA, 27 nt, synthetic construct
  misc_feature 1..27: note = Dynein heavy chain 14, axonemal (48-56)
  source 1..27: mol_type = other RNA
atcgccgagaaggagaccctggagtac

SEQ ID NO: 38161 - RNA, 27 nt, synthetic construct
  misc_feature 1..27: note = Inositol 1,4,5-trisphosphate receptor type 1 (2578-2586)
  source 1..27: mol_type = other RNA
atcttcggcgtgatcatcgacaccttc

SEQ ID NO: 38162 - RNA, 27 nt, synthetic construct
  misc_feature 1..27: note = U5 small nuclear ribonucleoprotein 40 kDa protein (217-225)
  source 1..27: mol_type = other RNA
atcttccagggcaacgtgcacaacttc

SEQ ID NO: 38163 - RNA, 27 nt, synthetic construct
  misc_feature 1..27: note = Progesterone-induced-blocking factor 1 (734-742)
  source 1..27: mol_type = other RNA
atcttcacccccaagccgaccctgttc

SEQ ID NO: 38164 - RNA, 27 nt, synthetic construct
  misc_feature 1..27: note = Phosphoserine aminotransferase (281-289)
  source 1..27: mol_type = other RNA
atcatcgacaacagccagggcttctac

SEQ ID NO: 38165 - RNA, 30 nt, synthetic construct
  misc_feature 1..30: note = Vesicle-associated membrane protein-associated protein A (60-69)
  source 1..30: mol_type = other RNA
atcatcgaccccggcagcaccgtgaccgtc

SEQ ID NO: 38166 - RNA, 27 nt, synthetic construct
  misc_feature 1..27: note = T-complex protein 1 subunit gamma (100-108)
  source 1..27: mol_type = other RNA
atcctggccggcgagatgctcagcgtg

SEQ ID NO: 38167 - RNA, 36 nt, synthetic construct
  misc_feature 1..36: note = Adenosylhomocysteinase 2 (196-207)
  source 1..36: mol_type = other RNA
atcctggacgacggcggggacctcacccactgggtg

SEQ ID NO: 38168 - RNA, 27 nt, synthetic construct
  misc_feature 1..27: note = Disabled homolog 2 (198-206)
  source 1..27: mol_type = other RNA
atcctggacgaccagaccaacaagctc

SEQ ID NO: 38169 - RNA, 27 nt, synthetic construct
  misc_feature 1..27: note = Switch-associated protein 70 (208-216)
  source 1..27: mol_type = other RNA
atcctggacgtgctcaagcagggctac

SEQ ID NO: 38170 - RNA, 27 nt, synthetic construct
  misc_feature 1..27: note = Protein SCAF8 (864-872)
  source 1..27: mol_type = other RNA
atcctgggcgggcagcccccgaacgtg

SEQ ID NO: 38171 - RNA, 27 nt, synthetic construct
  misc_feature 1..27: note = Prolow-density lipoprotein receptor-related protein 1 (596-604)
  source 1..27: mol_type = other RNA
atcctgaaggacggcatccacaacgtg

SEQ ID NO: 38172 - RNA, 27 nt, synthetic construct
  misc_feature 1..27: note = Nucleoprotein TPR (616-624)
  source 1..27: mol_type = other RNA
atcctgctcagccagaccaccggcgtg

SEQ ID NO: 38173 - RNA, 30 nt, synthetic construct
  misc_feature 1..30: note = Noelin (14-23)
  source 1..30: mol_type = other RNA
atcctgatgggcaccgagctcacccaggtg

SEQ ID NO: 38174 - RNA, 30 nt, synthetic construct
  misc_feature 1..30: note = ATP-citrate synthase (1022-1031)
  source 1..30: mol_type = other RNA
atcctgaacgtggacggcctcatcggggtc

SEQ ID NO: 38175 - RNA, 30 nt, synthetic construct
  misc_feature 1..30: note = D-3-phosphoglycerate dehydrogenase (22-31)
  source 1..30: mol_type = other RNA
atcctgcaggacggcgggctccaggtggtc

SEQ ID NO: 38176 - RNA, 27 nt, synthetic construct
  misc_feature 1..27: note = Poly (ADP-ribose) polymerase 1 (477-485)
  source 1..27: mol_type = other RNA
atcctgagcccctggggcgccgaggtg

SEQ ID NO: 38177 - RNA, 33 nt, synthetic construct
  misc_feature 1..33: note = Heat shock-related 70 kDa protein 2 (212-222)
  source 1..33: mol_type = other RNA
atcctgaccatcgaggacggcatcttcgaggtg

SEQ ID NO: 38178 - RNA, 33 nt, synthetic construct
  misc_feature 1..33: note = Proteasome subunit alpha type-2 (46-56)
  source 1..33: mol_type = other RNA
atcctgtacgacgagcgcagcgtgcacaaggtc

SEQ ID NO: 38179 - RNA, 30 nt, synthetic construct
  misc_feature 1..30: note = Elongation factor 2 (203-212)
  source 1..30: mol_type = other RNA
atcatgatcgaccccgtgctgggcaccgtc

SEQ ID NO: 38180 - RNA, 27 nt, synthetic construct
  misc_feature 1..27: note = Gem-associated protein 4 (471-479)
  source 1..27: mol_type = other RNA
atccccgagagccagatccgccaggtg

SEQ ID NO: 38181 - RNA, 27 nt, synthetic construct
  misc_feature 1..27: note = Serine/threonine-protein kinase 24 (212-220)
  source 1..27: mol_type = other RNA
atccccaagaacaacccgcccaccctg

SEQ ID NO: 38182 - RNA, 27 nt, synthetic construct
  misc_feature 1..27: note = Cathepsin D (24-32)
  source 1..27: mol_type = other RNA
atccccctgcacaagttcaccagcatc

SEQ ID NO: 38183 - RNA, 24 nt, synthetic construct
  misc_feature 1..24: note = ATP-binding cassette sub-family F member 2 (391-398)
  source 1..24: mol_type = other RNA
atccccccgcccgtgatcatggtc

SEQ ID NO: 38184 - RNA, 27 nt, synthetic construct
  misc_feature 1..27: note = Serine protease HTRA1 (3-11)
  source 1..27: mol_type = other RNA
atcccccgcgccgccctgctcccgctg

SEQ ID NO: 38185 - RNA, 30 nt, synthetic construct
  misc_feature 1..30: note = Serine protease HTRA1 (3-12)
  source 1..30: mol_type = other RNA
atcccccgcgccgccctgctcccgctgctg

SEQ ID NO: 38186 - RNA, 24 nt, synthetic construct
  misc_feature 1..24: note = Lysine-specific demethylase 5D (1030-1037)
  source 1..24: mol_type = other RNA
atccccgtgcacctgccgaacatc

SEQ ID NO: 38187 - RNA, 24 nt, synthetic construct
  misc_feature 1..24: note = Pre-mRNA-processing-splicing factor 8 (724-731)
  source 1..24: mol_type = other RNA
atcccctggaaggtgccgggcctg

SEQ ID NO: 38188 - RNA, 24 nt, synthetic construct
  misc_feature 1..24: note = Serine-tRNA ligase, cytoplasmic (357-364)
  source 1..24: mol_type = other RNA
atcccctaccacatcgtgaacatc

SEQ ID NO: 38189 - RNA, 24 nt, synthetic construct
  misc_feature 1..24: note = T-complex protein 1 subunit gamma (296-303)
  source 1..24: mol_type = other RNA
atcagcgacctggcccagcactac

SEQ ID NO: 38190 - RNA, 27 nt, synthetic construct
  misc_feature 1..27: note = 39S ribosomal protein L12, mitochondrial (79-87)
  source 1..27: mol_type = other RNA
atcagcgacctgaacgagctcctgaag

SEQ ID NO: 38191 - RNA, 27 nt, synthetic construct
  misc_feature 1..27: note = Junction plakoglobin (651-659)
  source 1..27: mol_type = other RNA
atcagcgaggacaagaaccccgactac

SEQ ID NO: 38192 - RNA, 30 nt, synthetic construct
  misc_feature 1..30: note = ATP-citrate synthase (6-15)
  source 1..30: mol_type = other RNA
atcagcgagcagaccggcaaggagctgctc

SEQ ID NO: 38193 - RNA, 30 nt, synthetic construct
  misc_feature 1..30: note = Peptidyl-prolyl cis-trans isomerase FKBP9 (274-283)
  source 1..30: mol_type = other RNA
atcagccagtccggcgacttcctgcgctac

SEQ ID NO: 38194 - RNA, 24 nt, synthetic construct
  misc_feature 1..24: note = Staphylococcal nuclease domain-containing protein 1 (665-672)
  source 1..24: mol_type = other RNA
atcaccgacgacctgcacttctac

SEQ ID NO: 38195 - RNA, 27 nt, synthetic construct
  misc_feature 1..27: note = E3 ubiquitin-protein ligase TRIM21 (423-431)
  source 1..27: mol_type = other RNA
atcaccgaccacggcagcctgatctac

SEQ ID NO: 38196 - RNA, 33 nt, synthetic construct
  misc_feature 1..33: note = 5-oxoprolinase (1145-1155)
  source 1..33: mol_type = other RNA
atcaccgaccccgagatcctggagagccgctac

SEQ ID NO: 38197 - RNA, 30 nt, synthetic construct
  misc_feature 1..30: note = Wee1-like protein kinase (72-81)
  source 1..30: mol_type = other RNA
atcaccgagagcaacatgaagtcccgctac

SEQ ID NO: 38198 - RNA, 27 nt, synthetic construct
  misc_feature 1..27: note = Interleukin enhancer-binding factor 2 (89-97)
  source 1..27: mol_type = other RNA
atcgtggcccccggcaccttcgaggtc

SEQ ID NO: 38199 - RNA, 27 nt, synthetic construct
  misc_feature 1..27: note = Pre-mRNA-processing-splicing factor 8 (1000-1008)
  source 1..27: mol_type = other RNA
atcgtggaccacaacatcgccgactac

SEQ ID NO: 38200 - RNA, 27 nt, synthetic construct
  misc_feature 1..27: note = EKC/KEOPS complex subunit TPRKB (48-56)
  source 1..27: mol_type = other RNA
atcgtggaccccttccagatcctggtc

SEQ ID NO: 38201 - RNA, 30 nt, synthetic construct
  misc_feature 1..30: note = Hydroxyacylglutathione hydrolase, mitochondrial (27-36)
  source 1..30: mol_type = other RNA
atcgtggaccccgtccagccgcagaaggtg

SEQ ID NO: 38202 - RNA, 39 nt, synthetic construct
  misc_feature 1..39: note = POTE ankyrin domain family member F (851-863)
  source 1..39: mol_type = other RNA
atcgtgatggacagcggcgacggggtcacccacaccgtg

SEQ ID NO: 38203 - RNA, 30 nt, synthetic construct
  misc_feature 1..30: note = Beta-secretase 2 (263-272)
  source 1..30: mol_type = other RNA
atctggtacacccccatcaaggaggagtgg

SEQ ID NO: 38204 - RNA, 27 nt, synthetic construct
  misc_feature 1..27: note = Solute carrier family 12 member 4 (260-268)
  source 1..27: mol_type = other RNA
atctacgccggcgggatcaagagcatc

SEQ ID NO: 38205 - RNA, 33 nt, synthetic construct
  misc_feature 1..33: note = 1-phosphatidylinositol 4,5-bisphosphate phosphodiesterase gamma-2 (1124-1134)
  source 1..33: mol_type = other RNA
atctacgaccccaacctggccttcctccgcttc

SEQ ID NO: 38206 - RNA, 30 nt, synthetic construct
  misc_feature 1..30: note = Cullin-4B (579-588)
  source 1..30: mol_type = other RNA
atctacggcaaggacgtgttcgaggccttc

SEQ ID NO: 38207 - RNA, 27 nt, synthetic construct
  misc_feature 1..27: note = ATP-dependent zinc metalloprotease YME1L1 (305-313)
  source 1..27: mol_type = other RNA
atctacggcctgctcaagaaccccttc

SEQ ID NO: 38208 - RNA, 27 nt, synthetic construct
  misc_feature 1..27: note = Protein transport protein Sec31A (147-155)
  source 1..27: mol_type = other RNA
atctacatctgggacctgaacaacttc

SEQ ID NO: 38209 - RNA, 27 nt, synthetic construct
  misc_feature 1..27: note = USP6 N-terminal-like protein (97-105)
  source 1..27: mol_type = other RNA
atctacaagggcatccccctgcagctc

SEQ ID NO: 38210 - RNA, 27 nt, synthetic construct
  misc_feature 1..27: note = Plectin (1069-1077)
  source 1..27: mol_type = other RNA
atctacctggagaagctcaagaccatc

SEQ ID NO: 38211 - RNA, 27 nt, synthetic construct
  misc_feature 1..27: note = Tumor susceptibility gene 101 protein (109-117)
  source 1..27: mol_type = other RNA
atctacctgccctacctccacgagtgg

SEQ ID NO: 38212 - RNA, 27 nt, synthetic construct
  misc_feature 1..27: note = Ubiquitin-conjugating enzyme E2 variant 3 (109-117)
  source 1..27: mol_type = other RNA
atctacctgccctacctccagaactgg

SEQ ID NO: 38213 - RNA, 27 nt, synthetic construct
  misc_feature 1..27: note = Collagen alpha-1(XV) chain (1157-1165)
  source 1..27: mol_type = other RNA
atctacctgcgcgacagcaccgagttc

SEQ ID NO: 38214 - RNA, 27 nt, synthetic construct
  misc_feature 1..27: note = Disks large homolog 1 (868-876)
  source 1..27: mol_type = other RNA
atctacaaccaggtgaagcagatcatc

SEQ ID NO: 38215 - RNA, 33 nt, synthetic construct
  misc_feature 1..33: note = Nuclear fragile X mental retardation-interacting protein 2 (473-483)
  source 1..33: mol_type = other RNA
atctaccccagcaacatgcagaccatgctgctc

SEQ ID NO: 38216 - RNA, 30 nt, synthetic construct
  misc_feature 1..30: note = Pre-mRNA-processing-splicing factor 8 (1694-1703)
  source 1..30: mol_type = other RNA
atctaccccagcccgaccggcgtgctgatc

SEQ ID NO: 38217 - RNA, 30 nt, synthetic construct
  misc_feature 1..30: note = 5'-3' exoribonuclease 1 (610-619)
  source 1..30: mol_type = other RNA
atctaccccagcccgtggcccgagaagttc

SEQ ID NO: 38218 - RNA, 27 nt, synthetic construct
  misc_feature 1..27: note = Protein unc-119 homolog B (91-99)
  source 1..27: mol_type = other RNA
atctacagcatcgacttcacccgcttc

SEQ ID NO: 38219 - RNA, 24 nt, synthetic construct
  misc_feature 1..24: note = Serine-protein kinase ATM (121-128)
  source 1..24: mol_type = other RNA
atctacaccctgatccactacatc

SEQ ID NO: 38220 - RNA, 27 nt, synthetic construct
  misc_feature 1..27: note = Exocyst complex component 6B (648-656)
  source 1..27: mol_type = other RNA
atctacaccaacctgaaccagaagatc

SEQ ID NO: 38221 - RNA, 27 nt, synthetic construct
  misc_feature 1..27: note = Aminoacylase-1 (390-398)
  source 1..27: mol_type = other RNA
atctacacccgcctgctccccgccctg

SEQ ID NO: 38222 - RNA, 27 nt, synthetic construct
  misc_feature 1..27: note = Kelch domain-containing protein 7B (353-361)
  source 1..27: mol_type = other RNA
atctacgtgaccggcgggcacctgttc

SEQ ID NO: 38223 - RNA, 30 nt, synthetic construct
  misc_feature 1..30: note = RNA polymerase I-specific transcription initiation factor RRN3 (572-581)
  source 1..30: mol_type = other RNA
aagttcatcgaccccatctaccaggtgtgg

SEQ ID NO: 38224 - RNA, 30 nt, synthetic construct
  misc_feature 1..30: note = Ubiquitin carboxyl-terminal hydrolase 8 (551-560)
  source 1..30: mol_type = other RNA
aagttcctggaccccatcaccggcaccttc

SEQ ID NO: 38225 - RNA, 27 nt, synthetic construct
  misc_feature 1..27: note = pre-rRNA processing protein FTSJ3 (64-72)
  source 1..27: mol_type = other RNA
aagttcatgcccgtgagctccctgatc

SEQ ID NO: 38226 - RNA, 27 nt, synthetic construct
  misc_feature 1..27: note = M-phase inducer phosphatase 2 (349-357)
  source 1..27: mol_type = other RNA
aagttcagcaacatcgtggacaagttc

SEQ ID NO: 38227 - RNA, 27 nt, synthetic construct
  misc_feature 1..27: note = Mitotic checkpoint protein BUB3 (21-29)
  source 1..27: mol_type = other RNA
aagttcagccccaacacctcccagttc

SEQ ID NO: 38228 - RNA, 27 nt, synthetic construct
  misc_feature 1..27: note = Protein SCAF11 (1039-1047)
  source 1..27: mol_type = other RNA
aagctggccgagagcaaggtgtccgtc

SEQ ID NO: 38229 - RNA, 27 nt, synthetic construct
  misc_feature 1..27: note = Neuroblast differentiation-associated protein AHNAK (2352-2360)
  source 1..27: mol_type = other RNA
aagctggacgccgacatgcccgaggtg

SEQ ID NO: 38230 - RNA, 27 nt, synthetic construct
  misc_feature 1..27: note = Ryanodine receptor 1 (3709-3717)
  source 1..27: mol_type = other RNA
aagctggacgaggactacctctacatg

SEQ ID NO: 38231 - RNA, 30 nt, synthetic construct
  misc_feature 1..30: note = Nucleobindin-1 (98-107)
  source 1..30: mol_type = other RNA
aagctggacgagctcaagcgccaggaggtg

SEQ ID NO: 38232 - RNA, 27 nt, synthetic construct
  misc_feature 1..27: note = Spectrin alpha chain, non-erythrocytic 1 (201-209)
  source 1..27: mol_type = other RNA
aagctggacgagaacagcgccttcctc

SEQ ID NO: 38233 - RNA, 27 nt, synthetic construct
  misc_feature 1..27: note = Striatin-3 (767-775)
  source 1..27: mol_type = other RNA
aagctggacgagagcatctacgacgtg

SEQ ID NO: 38234 - RNA, 27 nt, synthetic construct
  misc_feature 1..27: note = DNA topoisomerase 2-alpha (278-286)
  source 1..27: mol_type = other RNA
aagctggacgagaccggcaacagcctc

SEQ ID NO: 38235 - RNA, 27 nt, synthetic construct
  misc_feature 1..27: note = Eukaryotic initiation factor 4A-III (152-160)
  source 1..27: mol_type = other RNA
aagctggactacggccagcacgtggtc

SEQ ID NO: 38236 - RNA, 27 nt, synthetic construct
  misc_feature 1..27: note = HEAT repeat-containing protein 2 (624-632)
  source 1..27: mol_type = other RNA
aagctgttcagcatcctctccaccgtg

SEQ ID NO: 38237 - RNA, 27 nt, synthetic construct
  misc_feature 1..27: note = Helicase-like transcription factor (170-178)
  source 1..27: mol_type = other RNA
aagctgggccccgccccgaagaccctc

SEQ ID NO: 38238 - RNA, 27 nt, synthetic construct
  misc_feature 1..27: note = Serine/threonine-protein kinase ULK4 (46-54)
  source 1..27: mol_type = other RNA
aagctgatccccctcatcttcgaggtg

SEQ ID NO: 38239 - RNA, 33 nt, synthetic construct
  misc_feature 1..33: note = GTP-binding protein Rheb (102-112)
  source 1..33: mol_type = other RNA
aagctgctcgacatggtgggcaaggtccagatc

SEQ ID NO: 38240 - RNA, 27 nt, synthetic construct
  misc_feature 1..27: note = Probable E3 ubiquitin-protein ligase HERC3 (474-482)
  source 1..27: mol_type = other RNA
aagctgctcgagaagctgtacaaggtg

SEQ ID NO: 38241 - RNA, 30 nt, synthetic construct
  misc_feature 1..30: note = Dedicator of cytokinesis protein 1 (386-395)
  source 1..30: mol_type = other RNA
aagctgctccccggcgacatccaccagatc

SEQ ID NO: 38242 - RNA, 27 nt, synthetic construct
  misc_feature 1..27: note = Adenosylhomocysteinase 2 (47-55)
  source 1..27: mol_type = other RNA
aagctgaacgaggtgatccgccaggtc

SEQ ID NO: 38243 - RNA, 27 nt, synthetic construct
  misc_feature 1..27: note = V-type proton ATPase catalytic subunit A (220-228)
  source 1..27: mol_type = other RNA
aagctgcccgccaaccacccgctcctg

SEQ ID NO: 38244 - RNA, 27 nt, synthetic construct
  misc_feature 1..27: note = Proline-rich protein 11 (128-136)
  source 1..27: mol_type = other RNA
aagctgcaggaggccctcaagaccatc

SEQ ID NO: 38245 - RNA, 27 nt, synthetic construct
  misc_feature 1..27: note = Serine/threonine-protein kinase MRCK alpha (461-469)
  source 1..27: mol_type = other RNA
aagctgcaggagagcacccagaccgtg

SEQ ID NO: 38246 - RNA, 30 nt, synthetic construct
  misc_feature 1..30: note = Integrin alpha-V (338-347)
  source 1..30: mol_type = other RNA
aagctgcaggaggtgggccaggtcagcgtg

SEQ ID NO: 38247 - RNA, 33 nt, synthetic construct
  misc_feature 1..33: note = 78 kDa glucose-regulated protein (2-12)
  source 1..33: mol_type = other RNA
aagctgagcctcgtggccgccatgctgctgctc

SEQ ID NO: 38248 - RNA, 27 nt, synthetic construct
  misc_feature 1..27: note = Serum albumin (257-265)
  source 1..27: mol_type = other RNA
aagctggtgaccgacctcaccaaggtc

SEQ ID NO: 38249 - RNA, 27 nt, synthetic construct
  misc_feature 1..27: note = Zinc finger and BTB domain-containing protein 38 (661-669)
  source 1..27: mol_type = other RNA
aagatggacctggacaacaacttctac

SEQ ID NO: 38250 - RNA, 27 nt, synthetic construct
  misc_feature 1..27: note = Sister chromatid cohesion protein PDS5 homolog B (1060-1068)
  source 1..27: mol_type = other RNA
aagatgaacgagaagctgtacaccgtg

SEQ ID NO: 38251 - RNA, 27 nt, synthetic construct
  misc_feature 1..27: note = Nucleophosmin (250-258)
  source 1..27: mol_type = other RNA
aagatgcaggccagcatcgagaaggcc

SEQ ID NO: 38252 - RNA, 36 nt, synthetic construct
  misc_feature 1..36: note = Breast cancer anti-estrogen resistance protein 1 (335-346)
  source 1..36: mol_type = other RNA
aagcccttcgacccggcccgcacccccctggtgctc

SEQ ID NO: 38253 - RNA, 27 nt, synthetic construct
  misc_feature 1..27: note = Poly (ADP-ribose) polymerase 1 (388-396)
  source 1..27: mol_type = other RNA
aagcccctgagcaacatgaagatcctc

SEQ ID NO: 38254 - RNA, 27 nt, synthetic construct
  misc_feature 1..27: note = Vitamin K-dependent protein S (29-37)
  source 1..27: mol_type = other RNA
aagcagcaggccagccaggtgctggtc

SEQ ID NO: 38255 - RNA, 27 nt, synthetic construct
  misc_feature 1..27: note = POZ-, AT hook-, and zinc finger-containing protein 1 (157-165)
  source 1..27: mol_type = other RNA
aagcagagcaacgtgcagatcctggtc

SEQ ID NO: 38256 - RNA, 27 nt, synthetic construct
  misc_feature 1..27: note = Probable global transcription activator SNF2L1 (37-45)
  source 1..27: mol_type = other RNA
aagcagaccgagctgttcgcccacttc

SEQ ID NO: 38257 - RNA, 27 nt, synthetic construct
  misc_feature 1..27: note = Probable ATP-dependent RNA helicase DDX5 (451-459)
  source 1..27: mol_type = other RNA
aagcaggtgagcgacctgatctccgtc

SEQ ID NO: 38258 - RNA, 36 nt, synthetic construct
  misc_feature 1..36: note = Myosin-10 (296-307)
  source 1..36: mol_type = other RNA
aagagcgacctgctcctggagggcttcaacaactac

SEQ ID NO: 38259 - RNA, 27 nt, synthetic construct
  misc_feature 1..27: note = Importin-11 (549-557)
  source 1..27: mol_type = other RNA
aagagcgacctgcgccccatgctctac

SEQ ID NO: 38260 - RNA, 30 nt, synthetic construct
  misc_feature 1..30: note = Hepatocyte growth factor receptor (32-41)
  source 1..30: mol_type = other RNA
aagagcgagatgaacgtgaacatgaagtac

SEQ ID NO: 38261 - RNA, 27 nt, synthetic construct
  misc_feature 1..27: note = Leucine-rich repeat-containing protein 42 (68-76)
  source 1..27: mol_type = other RNA
aagaccgaccacttcatcttcacctac

SEQ ID NO: 38262 - RNA, 33 nt, synthetic construct
  misc_feature 1..33: note = AMP deaminase 2 (106-116)
  source 1..33: mol_type = other RNA
aagaccgacagcgactccgacctgcagctctac

SEQ ID NO: 38263 - RNA, 27 nt, synthetic construct
  misc_feature 1..27: note = pre-rRNA processing protein FTSJ3 (466-474)
  source 1..27: mol_type = other RNA
aagaccgagatcatgagccccctgtac

SEQ ID NO: 38264 - RNA, 27 nt, synthetic construct
  misc_feature 1..27: note = Fanconi anemia group I protein (402-410)
  source 1..27: mol_type = other RNA
aagaccatcgagaccagcccctccctg

SEQ ID NO: 38265 - RNA, 39 nt, synthetic construct
  misc_feature 1..39: note = Tubulin alpha-1C chain (5-17)
  source 1..39: mol_type = other RNA
aagaccatcggcgggggcgacgacagcttcaacaccttc

SEQ ID NO: 38266 - RNA, 36 nt, synthetic construct
  misc_feature 1..36: note = Calnexin (227-238)
  source 1..36: mol_type = other RNA
aagacctacttcaccgacaagaagacgcacctgtac

SEQ ID NO: 38267 - RNA, 27 nt, synthetic construct
  misc_feature 1..27: note = General transcription factor 3C polypeptide 1 (135-143)
  source 1..27: mol_type = other RNA
aaggtggacgccggcaagctgcactac

SEQ ID NO: 38268 - RNA, 33 nt, synthetic construct
  misc_feature 1..33: note = Protein phosphatase Slingshot homolog 3 (281-291)
  source 1..33: mol_type = other RNA
aaggtgctggacgtcagcgacctcgagtccgtg

SEQ ID NO: 38269 - RNA, 27 nt, synthetic construct
  misc_feature 1..27: note = HEAT repeat-containing protein 5A (1475-1483)
  source 1..27: mol_type = other RNA
aaggtgctggagaccctcgtcaccgtg

SEQ ID NO: 38270 - RNA, 30 nt, synthetic construct
  misc_feature 1..30: note = DNA-directed RNA polymerase II subunit RPB3 (175-184)
  source 1..30: mol_type = other RNA
aagtggaaccccaccgccggcgtggccttc

SEQ ID NO: 38271 - RNA, 27 nt, synthetic construct
  misc_feature 1..27: note = UDP-glucose:glycoprotein glucosyltransferase 2 (42-50)
  source 1..27: mol_type = other RNA
aagtggcccgagaccccgctgctcctg

SEQ ID NO: 38272 - RNA, 27 nt, synthetic construct
  misc_feature 1..27: note = Serine/threonine-protein kinase PLK3 (427-435)
  source 1..27: mol_type = other RNA
aagtgggtggactacagcaacaagttc

SEQ ID NO: 38273 - RNA, 27 nt, synthetic construct
  misc_feature 1..27: note = Integrin alpha-V (188-196)
  source 1..27: mol_type = other RNA
aagtacgaccccaacgtgtacagcatc

SEQ ID NO: 38274 - RNA, 27 nt, synthetic construct
  misc_feature 1..27: note = Kinesin-like protein KIF7 (588-596)
  source 1..27: mol_type = other RNA
aagtacttcgacaaggtggtcaccctg

SEQ ID NO: 38275 - RNA, 27 nt, synthetic construct
  misc_feature 1..27: note = Putative deoxyribonuclease TATDN1 (130-138)
  source 1..27: mol_type = other RNA
aagtacttcgagaagcagttcgagctg

SEQ ID NO: 38276 - RNA, 33 nt, synthetic construct
  misc_feature 1..33: note = BTB/POZ domain-containing protein 3 (484-494)
  source 1..33: mol_type = other RNA
aagtacttcagcgacggctccagcaacaccttc

SEQ ID NO: 38277 - RNA, 27 nt, synthetic construct
  misc_feature 1..27: note = Ras GTPase-activating-like protein IQGAP1 (191-199)
  source 1..27: mol_type = other RNA
aagtacggcatccagatgcccgccttc

SEQ ID NO: 38278 - RNA, 27 nt, synthetic construct
  misc_feature 1..27: note = General transcription factor IIF subunit 1 (83-91)
  source 1..27: mol_type = other RNA
aagtacggcatcgtgctgaaggagttc

SEQ ID NO: 38279 - RNA, 24 nt, synthetic construct
  misc_feature 1..24: note = Protein SOGA1 (415-422)
  source 1..24: mol_type = other RNA
aagtacggcatcgtgcaggagttc

SEQ ID NO: 38280 - RNA, 27 nt, synthetic construct
  misc_feature 1..27: note = Tyrosine-protein phosphatase non-receptor type 13 (1101-1109)
  source 1..27: mol_type = other RNA
aagtacggcctggggttccagatcatc

SEQ ID NO: 38281 - RNA, 27 nt, synthetic construct
  misc_feature 1..27: note = Serine/threonine-protein kinase Kist (248-256)
  source 1..27: mol_type = other RNA
aagtacggccccgtggtcagcctgctc

SEQ ID NO: 38282 - RNA, 24 nt, synthetic construct
  misc_feature 1..24: note = Serine/threonine-protein phosphatase 4 catalytic subunit (133-140)
  source 1..24: mol_type = other RNA
aagtacggcagcgtgaccgtctgg

SEQ ID NO: 38283 - RNA, 27 nt, synthetic construct
  misc_feature 1..27: note = Magnesium transporter protein 1 (356-364)
  source 1..27: mol_type = other RNA
aagtaccacggctacccctacagcttc

SEQ ID NO: 38284 - RNA, 27 nt, synthetic construct
  misc_feature 1..27: note = Protein cramped-like (21-29)
  source 1..27: mol_type = other RNA
aagtacatcgacttcgaccacgtgttc

SEQ ID NO: 38285 - RNA, 27 nt, synthetic construct
  misc_feature 1..27: note = Ataxin-2-like protein (371-379)
  source 1..27: mol_type = other RNA
aagtacatccccctgccgcagcgcgtg

SEQ ID NO: 38286 - RNA, 30 nt, synthetic construct
  misc_feature 1..30: note = Programmed cell death protein 6 (90-99)
  source 1..30: mol_type = other RNA
aagtacatcaccgactggcagaacgtgttc

SEQ ID NO: 38287 - RNA, 27 nt, synthetic construct
  misc_feature 1..27: note = Elongation of very long chain fatty acids protein 5 (200-208)
  source 1..27: mol_type = other RNA
aagtacatcacccagggccagctgctc

SEQ ID NO: 38288 - RNA, 27 nt, synthetic construct
  misc_feature 1..27: note = Muscleblind-like protein 3 (18-26)
  source 1..27: mol_type = other RNA
aagtacctgcaccccccgccccacctc

SEQ ID NO: 38289 - RNA, 27 nt, synthetic construct
  misc_feature 1..27: note = Muscleblind-like protein 2 (67-75)
  source 1..27: mol_type = other RNA
aagtacctgcaccccccgacccacctc

SEQ ID NO: 38290 - RNA, 27 nt, synthetic construct
  misc_feature 1..27: note = Nesprin-2 (895-903)
  source 1..27: mol_type = other RNA
aagtacctgaaggccgtggaggagctc

SEQ ID NO: 38291 - RNA, 27 nt, synthetic construct
  misc_feature 1..27: note = Presenilin-1 (239-247)
  source 1..27: mol_type = other RNA
aagtacctgcccgagtggaccgcctgg

SEQ ID NO: 38292 - RNA, 30 nt, synthetic construct
  misc_feature 1..30: note = ATP-dependent RNA helicase DDX24 (720-729)
  source 1..30: mol_type = other RNA
aagtacatggacgtggtcaaggagcgcatc

SEQ ID NO: 38293 - RNA, 30 nt, synthetic construct
  misc_feature 1..30: note = Protein polybromo-1 (653-662)
  source 1..30: mol_type = other RNA
aagtacatgacccccatgcagcagaagctg

SEQ ID NO: 38294 - RNA, 27 nt, synthetic construct
  misc_feature 1..27: note = Zinc finger protein 3 (173-181)
  source 1..27: mol_type = other RNA
aagtacaacgacttcggcaacagcttc

SEQ ID NO: 38295 - RNA, 30 nt, synthetic construct
  misc_feature 1..30: note = Putative endoplasmin-like protein (136-145)
  source 1..30: mol_type = other RNA
aagtacaacgacaccttctggaaggagttc

SEQ ID NO: 38296 - RNA, 27 nt, synthetic construct
  misc_feature 1..27: note = Sphingolipid delta(4)-desaturase DES1 (5-13)
  source 1..27: mol_type = other RNA
aagtaccccgagatcaagagcctgatg

SEQ ID NO: 38297 - RNA, 27 nt, synthetic construct
  misc_feature 1..27: note = Neurolysin, mitochondrial (244-252)
  source 1..27: mol_type = other RNA
aagtacccccactacttcccggtgatg

SEQ ID NO: 38298 - RNA, 27 nt, synthetic construct
  misc_feature 1..27: note = Protein farnesyltransferase/geranylgeranyltransferase type-1 subunit alpha (288-296)
  source 1..27: mol_type = other RNA
aagtaccccaacctgctcaaccagctg

SEQ ID NO: 38299 - RNA, 27 nt, synthetic construct
  misc_feature 1..27: note = Protein ERGIC-53 (288-296)
  source 1..27: mol_type = other RNA
aagtaccaggaggagttcgagcacttc

SEQ ID NO: 38300 - RNA, 27 nt, synthetic construct
  misc_feature 1..27: note = T-box transcription factor TBX3 (227-235)
  source 1..27: mol_type = other RNA
aagtaccagccccgcttccacatcgtg

SEQ ID NO: 38301 - RNA, 27 nt, synthetic construct
  misc_feature 1..27: note = Isoleucine-tRNA ligase, cytoplasmic (288-296)
  source 1..27: mol_type = other RNA
aagtaccgccccctgttcgactacttc

SEQ ID NO: 38302 - RNA, 27 nt, synthetic construct
  misc_feature 1..27: note = Bardet-Biedl syndrome 10 protein (585-593)
  source 1..27: mol_type = other RNA
aagtacagcttcccccacacctacatc

SEQ ID NO: 38303 - RNA, 27 nt, synthetic construct
  misc_feature 1..27: note = Ubiquitin-conjugating enzyme E2 variant 3 (36-44)
  source 1..27: mol_type = other RNA
aagtacagcatggacacctacgtgttc

SEQ ID NO: 38304 - RNA, 27 nt, synthetic construct
  misc_feature 1..27: note = Inositol-trisphosphate 3-kinase C (318-326)
  source 1..27: mol_type = other RNA
aagtacagccccttcgtggtctccttc

SEQ ID NO: 38305 - RNA, 27 nt, synthetic construct
  misc_feature 1..27: note = Serine/threonine-protein phosphatase 5 (314-322)
  source 1..27: mol_type = other RNA
aagtacaccgcccagatgtacgagctg

SEQ ID NO: 38306 - RNA, 27 nt, synthetic construct
  misc_feature 1..27: note = FACT complex subunit SPT16 (92-100)
  source 1..27: mol_type = other RNA
aagtacaccgagggcgtgcagagcctg

SEQ ID NO: 38307 - RNA, 30 nt, synthetic construct
  misc_feature 1..30: note = Glycogen debranching enzyme (495-504)
  source 1..30: mol_type = other RNA
aagtacaccgagatcaccgccacgtacttc

SEQ ID NO: 38308 - RNA, 27 nt, synthetic construct
  misc_feature 1..27: note = Phospholipase DDHD2 (124-132)
  source 1..27: mol_type = other RNA
aagtacgtgccctacagcgagtccttc

SEQ ID NO: 38309 - RNA, 27 nt, synthetic construct
  misc_feature 1..27: note = Serine/threonine-protein kinase RIO1 (222-230)
  source 1..27: mol_type = other RNA
aagtacgtgagcggcgagttccgcttc

SEQ ID NO: 38310 - RNA, 30 nt, synthetic construct
  misc_feature 1..30: note = Splicing factor U2AF 65 kDa subunit (90-99)
  source 1..30: mol_type = other RNA
aagtactgggacgtgcccccgcccggcttc

SEQ ID NO: 38311 - RNA, 27 nt, synthetic construct
  misc_feature 1..27: note = Catenin alpha-1 (777-785)
  source 1..27: mol_type = other RNA
ctggcctacctccagcgcatcgccctg

SEQ ID NO: 38312 - RNA, 24 nt, synthetic construct
  misc_feature 1..24: note = Heterogeneous nuclear ribonucleoprotein F (259-266)
  source 1..24: mol_type = other RNA
ctgttcggccgcgacctcagctac

SEQ ID NO: 38313 - RNA, 27 nt, synthetic construct
  misc_feature 1..27: note = Tubulin beta-6 chain (312-320)
  source 1..27: mol_type = other RNA
ctgttcaagcgcatcagcgagcagttc

SEQ ID NO: 38314 - RNA, 24 nt, synthetic construct
  misc_feature 1..24: note = Plectin (4148-4155)
  source 1..24: mol_type = other RNA
ctgatcgaccaccagacctacctc

SEQ ID NO: 38315 - RNA, 36 nt, synthetic construct
  misc_feature 1..36: note = Heat shock 70 kDa protein 1-like (198-209)
  source 1..36: mol_type = other RNA
ctgatcttcgacctcggcgggggcaccttcgacgtg

SEQ ID NO: 38316 - RNA, 27 nt, synthetic construct
  misc_feature 1..27: note = ATP synthase subunit beta, mitochondrial (215-223)
  source 1..27: mol_type = other RNA
ctgatcatggagctcatcaacaacgtg

SEQ ID NO: 38317 - RNA, 27 nt, synthetic construct
  misc_feature 1..27: note = DNA damage-binding protein 1 (880-888)
  source 1..27: mol_type = other RNA
ctgctcgccagcatcaactccaccgtg

SEQ ID NO: 38318 - RNA, 30 nt, synthetic construct
  misc_feature 1..30: note = Zinc finger protein 530 (30-39)
  source 1..30: mol_type = other RNA
ctgctcgacgagatgcagcgcctgctgtac

SEQ ID NO: 38319 - RNA, 27 nt, synthetic construct
  misc_feature 1..27: note = Phospholysine phosphohistidine inorganic pyrophosphate phosphatase (15-23)
  source 1..27: mol_type = other RNA
ctgctcgacatcagcggcgtgctgtac

SEQ ID NO: 38320 - RNA, 27 nt, synthetic construct
  misc_feature 1..27: note = Vacuolar fusion protein CCZ1 homolog (130-138)
  source 1..27: mol_type = other RNA
ctgctcgacaaggtgtacagctccgtc

SEQ ID NO: 38321 - RNA, 27 nt, synthetic construct
  misc_feature 1..27: note = SPRY domain-containing SOCS box protein 1 (138-146)
  source 1..27: mol_type = other RNA
ctgctcgacatgcccccggtgagctac

SEQ ID NO: 38322 - RNA, 27 nt, synthetic construct
  misc_feature 1..27: note = Beta-hexosaminidase subunit alpha (173-181)
  source 1..27: mol_type = other RNA
ctgctcgacaccagccgccactacctg

SEQ ID NO: 38323 - RNA, 27 nt, synthetic construct
  misc_feature 1..27: note = Fragile X mental retardation protein 1 (20-28)
  source 1..27: mol_type = other RNA
ctgctcgactaccacctgaactacctg

SEQ ID NO: 38324 - RNA, 27 nt, synthetic construct
  misc_feature 1..27: note = Supervillin (34-42)
  source 1..27: mol_type = other RNA
ctgctcgaggaggacaccccccgctac

SEQ ID NO: 38325 - RNA, 27 nt, synthetic construct
  misc_feature 1..27: note = LEM domain-containing protein 2 (269-277)
  source 1..27: mol_type = other RNA
ctgctcgagctgctgcacgagctctac

SEQ ID NO: 38326 - RNA, 33 nt, synthetic construct
  misc_feature 1..33: note = UDP-N-acetylglucosamine/UDP-glucose/GDP-mannose transporter (133-143)
  source 1..33: mol_type = other RNA
ctgctcgagaccatcatcctgggcaagcagtac

SEQ ID NO: 38327 - RNA, 33 nt, synthetic construct
  misc_feature 1..33: note = Complement decay-accelerating factor (9-19)
  source 1..33: mol_type = other RNA
ctgctcggcgagctgccccgcctgctcctgctg

SEQ ID NO: 38328 - RNA, 24 nt, synthetic construct
  misc_feature 1..24: note = Kelch-like protein 24 (405-412)
  source 1..24: mol_type = other RNA
ctgctcggcaaggtgtacgtcgtg

SEQ ID NO: 38329 - RNA, 27 nt, synthetic construct
  misc_feature 1..27: note = Myosin-9 (292-300)
  source 1..27: mol_type = other RNA
ctgctcctggagccctacaacaagtac

SEQ ID NO: 38330 - RNA, 33 nt, synthetic construct
  misc_feature 1..33: note = Plectin (3700-3710)
  source 1..33: mol_type = other RNA
ctgctcagcgccgaggtggcccgcctgctgctc

SEQ ID NO: 38331 - RNA, 27 nt, synthetic construct
  misc_feature 1..27: note = Integrin alpha-3 (830-838)
  source 1..27: mol_type = other RNA
ctgctctaccccaccgagatcaccgtg

SEQ ID NO: 38332 - RNA, 27 nt, synthetic construct
  misc_feature 1..27: note = Putative heat shock protein HSP 90-beta 2 (24-32)
  source 1..27: mol_type = other RNA
ctgatgagcctcatcatcaacaccttc

SEQ ID NO: 38333 - RNA, 27 nt, synthetic construct
  misc_feature 1..27: note = LIM and calponin homology domains-containing protein 1 (480-488)
  source 1..27: mol_type = other RNA
ctgaacgaccccaacccgatgaagtac

SEQ ID NO: 38334 - RNA, 27 nt, synthetic construct
  misc_feature 1..27: note = Leucine-rich repeat-containing protein 59 (77-85)
  source 1..27: mol_type = other RNA
ctgcccgccgacttcggccgcctcgtg

SEQ ID NO: 38335 - RNA, 27 nt, synthetic construct
  misc_feature 1..27: note = DNA-directed RNA polymerase II subunit RPB2 (74-82)
  source 1..27: mol_type = other RNA
ctgcccgccggcatcaacagcatcgtg

SEQ ID NO: 38336 - RNA, 27 nt, synthetic construct
  misc_feature 1..27: note = Lysosomal Pro-X carboxypeptidase (301-309)
  source 1..27: mol_type = other RNA
ctgcccgcctggccgatcaaggtggtc

SEQ ID NO: 38337 - RNA, 27 nt, synthetic construct
  misc_feature 1..27: note = Leucine-tRNA ligase, cytoplasmic (424-432)
  source 1..27: mol_type = other RNA
ctgcccttcgagccggtgcccgtcatc

SEQ ID NO: 38338 - RNA, 30 nt, synthetic construct
  misc_feature 1..30: note = RNA-binding protein 26 (329-338)
  source 1..30: mol_type = other RNA
ctgcccttcccggcccagccccccgtggtc

SEQ ID NO: 38339 - RNA, 30 nt, synthetic construct
  misc_feature 1..30: note = Putative RNA polymerase II subunit B1 CTD phosphatase RPAP2 (434-443)
  source 1..30: mol_type = other RNA
ctgcccttccgcggcagcgggaccgccatc

SEQ ID NO: 38340 - RNA, 27 nt, synthetic construct
  misc_feature 1..27: note = Major facilitator superfamily domain-containing protein 12 (308-316)
  source 1..27: mol_type = other RNA
ctgcccaagaagttcatcgccaccatc

SEQ ID NO: 38341 - RNA, 27 nt, synthetic construct
  misc_feature 1..27: note = Targeting protein for Xklp2 (528-536)
  source 1..27: mol_type = other RNA
ctgcccctcccgcacttcgacaccatc

SEQ ID NO: 38342 - RNA, 27 nt, synthetic construct
  misc_feature 1..27: note = Heat shock 70 kDa protein 13 (26-34)
  source 1..27: mol_type = other RNA
ctgcccctcccgacccccaaggtgatc

SEQ ID NO: 38343 - RNA, 27 nt, synthetic construct
  misc_feature 1..27: note = Alpha/beta hydrolase domain-containing protein 14B (203-211)
  source 1..27: mol_type = other RNA
ctgcccaaccaccgcgtgctcatcatg

SEQ ID NO: 38344 - RNA, 27 nt, synthetic construct
  misc_feature 1..27: note = Ubiquitin carboxyl-terminal hydrolase 11 (143-151)
  source 1..27: mol_type = other RNA
ctgcccaacatccagaaggtggaggtc

SEQ ID NO: 38345 - RNA, 24 nt, synthetic construct
  misc_feature 1..24: note = Protein transport protein Sec61 subunit alpha isoform 2 (217-224)
  source 1..24: mol_type = other RNA
ctgcccaacctcatgaacctgatc

SEQ ID NO: 38346 - RNA, 24 nt, synthetic construct
  misc_feature 1..24: note = Unconventional myosin-X (129-136)
  source 1..24: mol_type = other RNA
ctgcccccgcacatcttcgccatc

SEQ ID NO: 38347 - RNA, 27 nt, synthetic construct
  misc_feature 1..27: note = Mimitin, mitochondrial (121-129)
  source 1..27: mol_type = other RNA
ctgcccccgcccgtgcagacccagatc

SEQ ID NO: 38348 - RNA, 27 nt, synthetic construct
  misc_feature 1..27: note = Phosphoglycerate kinase 1 (181-189)
  source 1..27: mol_type = other RNA
ctgccccagaaggccggcgggttcctc

SEQ ID NO: 38349 - RNA, 27 nt, synthetic construct
  misc_feature 1..27: note = Coatomer subunit beta' (762-770)
  source 1..27: mol_type = other RNA
ctgcccagccaggtgtcccgcgtcgtg

SEQ ID NO: 38350 - RNA, 27 nt, synthetic construct
  misc_feature 1..27: note = Neutral amino acid transporter B(0) (246-254)
  source 1..27: mol_type = other RNA
ctgcccgtggaccacatcagcctcatc

SEQ ID NO: 38351 - RNA, 27 nt, synthetic construct
  misc_feature 1..27: note = Protein TALPID3 (38-46)
  source 1..27: mol_type = other RNA
ctgcccgtgggcaccgggaccagcctc

SEQ ID NO: 38352 - RNA, 27 nt, synthetic construct
  misc_feature 1..27: note = Centrosomal protein of 63 kDa (446-454)
  source 1..27: mol_type = other RNA
ctgcccgtgagcccgctcggctccatc

SEQ ID NO: 38353 - RNA, 24 nt, synthetic construct
  misc_feature 1..24: note = Clathrin heavy chain 1 (859-866)
  source 1..24: mol_type = other RNA
ctgccctggctcgaggcccgcatc

SEQ ID NO: 38354 - RNA, 24 nt, synthetic construct
  misc_feature 1..24: note = Protein transport protein Sec16A (155-162)
  source 1..24: mol_type = other RNA
ctgccctacctcccgcactacatc

SEQ ID NO: 38355 - RNA, 27 nt, synthetic construct
  misc_feature 1..27: note = Very-long-chain (3R)-3-hydroxyacyl-CoA dehydratase 3 (314-322)
  source 1..27: mol_type = other RNA
ctgccctacccggtgaagatcaaggtc

SEQ ID NO: 38356 - RNA, 27 nt, synthetic construct
  misc_feature 1..27: note = HAUS augmin-like complex subunit 6 (131-139)
  source 1..27: mol_type = other RNA
ctgagcgacctcaagcacatgcgctac

SEQ ID NO: 38357 - RNA, 27 nt, synthetic construct
  misc_feature 1..27: note = General transcription factor 3C polypeptide 1 (333-341)
  source 1..27: mol_type = other RNA
ctgagcgactcccagatgaagagctac

SEQ ID NO: 38358 - RNA, 30 nt, synthetic construct
  misc_feature 1..30: note = Importin-7 (681-690)
  source 1..30: mol_type = other RNA
ctgagcgacaccaagtacctcgagatgatc

SEQ ID NO: 38359 - RNA, 27 nt, synthetic construct
  misc_feature 1..27: note = Cytoplasmic dynein 1 heavy chain 1 (2161-2169)
  source 1..27: mol_type = other RNA
ctgagcgacgtgttccccggcgtccag

SEQ ID NO: 38360 - RNA, 30 nt, synthetic construct
  misc_feature 1..30: note = Cytoplasmic dynein 1 heavy chain 1 (2161-2170)
  source 1..30: mol_type = other RNA
ctgagcgacgtgttccccggcgtccagtac

SEQ ID NO: 38361 - RNA, 39 nt, synthetic construct
  misc_feature 1..39: note = Creatine kinase B-type (162-174)
  source 1..39: mol_type = other RNA
ctgagctccctcgacggcgacctggccgggcgctactac

SEQ ID NO: 38362 - RNA, 27 nt, synthetic construct
  misc_feature 1..27: note = Pumilio homolog 2 (167-175)
  source 1..27: mol_type = other RNA
ctgaccgccgcccagcagcagcagtac

SEQ ID NO: 38363 - RNA, 27 nt, synthetic construct
  misc_feature 1..27: note = 26S proteasome non-ATPase regulatory subunit 2 (391-399)
  source 1..27: mol_type = other RNA
ctgaccgacgacggcaacaagtggctc

SEQ ID NO: 38364 - RNA, 30 nt, synthetic construct
  misc_feature 1..30: note = Neural cell adhesion molecule L1 (975-984)
  source 1..30: mol_type = other RNA
ctgaccgacctcagcccccacctgcgctac

SEQ ID NO: 38365 - RNA, 30 nt, synthetic construct
  misc_feature 1..30: note = Pre-mRNA-processing-splicing factor 8 (246-255)
  source 1..30: mol_type = other RNA
ctgaccgacctcgtggacgacaactacttc

SEQ ID NO: 38366 - RNA, 27 nt, synthetic construct
  misc_feature 1..27: note = Exosome component 10 (356-364)
  source 1..27: mol_type = other RNA
ctgaccgaccccgccatcgtgaaggtc

SEQ ID NO: 38367 - RNA, 24 nt, synthetic construct
  misc_feature 1..24: note = Tubulin polyglutamylase complex subunit 2 (125-132)
  source 1..24: mol_type = other RNA
ctgaccgacaccttcacggcctac

SEQ ID NO: 38368 - RNA, 27 nt, synthetic construct
  misc_feature 1..27: note = Alpha-N-acetylglucosaminidase (121-129)
  source 1..27: mol_type = other RNA
ctgaccgaggccacccccaaccgctac

SEQ ID NO: 38369 - RNA, 27 nt, synthetic construct
  misc_feature 1..27: note = AF4/FMR2 family member 4 (1028-1036)
  source 1..27: mol_type = other RNA
ctgaccgagcacctcaagaacagctac

SEQ ID NO: 38370 - RNA, 33 nt, synthetic construct
  misc_feature 1..33: note = Unconventional myosin-X (71-81)
  source 1..33: mol_type = other RNA
ctgaccgagctccacggcgggagcatcatgtac

SEQ ID NO: 38371 - RNA, 27 nt, synthetic construct
  misc_feature 1..27: note = Actin-like protein 6A (94-102)
  source 1..27: mol_type = other RNA
ctgaccgagctcatgttcgagcactac

SEQ ID NO: 38372 - RNA, 33 nt, synthetic construct
  misc_feature 1..33: note = Adenosylhomocysteinase 2 (192-202)
  source 1..33: mol_type = other RNA
ctgaccgagctcaccgacgaccaggccaagtac

SEQ ID NO: 38373 - RNA, 27 nt, synthetic construct
  misc_feature 1..27: note = Semaphorin-4C (58-66)
  source 1..27: mol_type = other RNA
ctgaccgagcccaccggcctcctgtac

SEQ ID NO: 38374 - RNA, 27 nt, synthetic construct
  misc_feature 1..27: note = Oxysterol-binding protein-related protein 1 (580-588)
  source 1..27: mol_type = other RNA
ctgaccgagtacatggagcacacctac

SEQ ID NO: 38375 - RNA, 39 nt, synthetic construct
  misc_feature 1..39: note = Melanoma-associated antigen 1 (239-251)
  source 1..39: mol_type = other RNA
ctgacccaggacctcgtgcaggagaagtacctggagtac

SEQ ID NO: 38376 - RNA, 33 nt, synthetic construct
  misc_feature 1..33: note = Caspase recruitment domain-containing protein 8 (43-53)
  source 1..33: mol_type = other RNA
ctggtggacaacagcatccgcgagctccagtac

SEQ ID NO: 38377 - RNA, 27 nt, synthetic construct
  misc_feature 1..27: note = Non-canonical poly(A) RNA polymerase PAPD5 (82-90)
  source 1..27: mol_type = other RNA
ctgtacggccgccacttcaactacctc

SEQ ID NO: 38378 - RNA, 27 nt, synthetic construct
  misc_feature 1..27: note = Ras-related protein Rap-2c (70-78)
  source 1..27: mol_type = other RNA
ctgtacatcaagaacggccaggggttc

SEQ ID NO: 38379 - RNA, 30 nt, synthetic construct
  misc_feature 1..30: note = Dedicator of cytokinesis protein 7 (456-465)
  source 1..30: mol_type = other RNA
ctgtacatctacccccagagcctcaacttc

SEQ ID NO: 38380 - RNA, 27 nt, synthetic construct
  misc_feature 1..27: note = Mitochondrial carrier homolog 1 (63-71)
  source 1..27: mol_type = other RNA
ctgtacctccccagcttcttcacctac

SEQ ID NO: 38381 - RNA, 27 nt, synthetic construct
  misc_feature 1..27: note = Eukaryotic translation initiation factor 3 subunit C-like protein (609-617)
  source 1..27: mol_type = other RNA
ctgtacaaccgcaccatggtgcagctc

SEQ ID NO: 38382 - RNA, 27 nt, synthetic construct
  misc_feature 1..27: note = Serine/threonine-protein phosphatase 5 (284-292)
  source 1..27: mol_type = other RNA
ctgtaccccgaccacttccacctcctg

SEQ ID NO: 38383 - RNA, 27 nt, synthetic construct
  misc_feature 1..27: note = ATPase family AAA domain-containing protein 2B (421-429)
  source 1..27: mol_type = other RNA
ctgtaccccgagatcttcgagaagttc

SEQ ID NO: 38384 - RNA, 27 nt, synthetic construct
  misc_feature 1..27: note = Syntenin-1 (45-53)
  source 1..27: mol_type = other RNA
ctgtacccccgcctctacccggagctg

SEQ ID NO: 38385 - RNA, 27 nt, synthetic construct
  misc_feature 1..27: note = Nuclear factor erythroid 2-related factor 1 (392-400)
  source 1..27: mol_type = other RNA
ctgtaccaggaggtgttcggccgcctc

SEQ ID NO: 38386 - RNA, 27 nt, synthetic construct
  misc_feature 1..27: note = Rapamycin-insensitive companion of mTOR (1676-1684)
  source 1..27: mol_type = other RNA
ctgtacagcgaggtgtcccacctcctg

SEQ ID NO: 38387 - RNA, 24 nt, synthetic construct
  misc_feature 1..24: note = Nuclear protein 1 (29-36)
  source 1..24: mol_type = other RNA
ctgtacagcctcgcccactcctac

SEQ ID NO: 38388 - RNA, 27 nt, synthetic construct
  misc_feature 1..27: note = Protein CLEC16A (171-179)
  source 1..27: mol_type = other RNA
ctgtacaccgaggccatcaagttcttc

SEQ ID NO: 38389 - RNA, 27 nt, synthetic construct
  misc_feature 1..27: note = UDP-glucose:glycoprotein glucosyltransferase 1 (1417-1425)
  source 1..27: mol_type = other RNA
ctgtacgtggtcgacctcaagaagttc

SEQ ID NO: 38390 - RNA, 27 nt, synthetic construct
  misc_feature 1..27: note = Sorting nexin-30 (408-416)
  source 1..27: mol_type = other RNA
atggccgacaagaacatccagtactac

SEQ ID NO: 38391 - RNA, 24 nt, synthetic construct
  misc_feature 1..24: note = HLA class I histocompatibility antigen, Cw-2 alpha chain (4-11)
  source 1..24: mol_type = other RNA
atggccccccgcaccctgctcctg

SEQ ID NO: 38392 - RNA, 24 nt, synthetic construct
  misc_feature 1..24: note = HLA class I histocompatibility antigen, A-23 alpha chain (4-11)
  source 1..24: mol_type = other RNA
atggccccccgcaccctggtgctc

SEQ ID NO: 38393 - RNA, 30 nt, synthetic construct
  misc_feature 1..30: note = Uroporphyrinogen decarboxylase (66-75)
  source 1..30: mol_type = other RNA
atgctggacgacttcggcccccaccgctac

SEQ ID NO: 38394 - RNA, 27 nt, synthetic construct
  misc_feature 1..27: note = ATP-binding cassette sub-family F member 1 (474-482)
  source 1..27: mol_type = other RNA
atgctggacgagcccaccaaccacctc

SEQ ID NO: 38395 - RNA, 27 nt, synthetic construct
  misc_feature 1..27: note = V-type proton ATPase subunit S1 (306-314)
  source 1..27: mol_type = other RNA
atgctgcaggacttccagatccaggcc

SEQ ID NO: 38396 - RNA, 27 nt, synthetic construct
  misc_feature 1..27: note = Lysine-specific demethylase 5A (1454-1462)
  source 1..27: mol_type = other RNA
atgatggtgggcgacctgctcgaggtc

SEQ ID NO: 38397 - RNA, 27 nt, synthetic construct
  misc_feature 1..27: note = Inosine-5'-monophosphate dehydrogenase (348-356)
  source 1..27: mol_type = other RNA
atgatgtacagcggcgagctgaagttc

SEQ ID NO: 38398 - RNA, 27 nt, synthetic construct
  misc_feature 1..27: note = Nucleolar pre-ribosomal-associated protein 1 (691-699)
  source 1..27: mol_type = other RNA
atgccccacctgagcatgcagcaggtg

SEQ ID NO: 38399 - RNA, 24 nt, synthetic construct
  misc_feature 1..24: note = Myoferlin (1357-1364)
  source 1..24: mol_type = other RNA
atgcccccgctggtgatcaaggtc

SEQ ID NO: 38400 - RNA, 27 nt, synthetic construct
  misc_feature 1..27: note = Serine/threonine-protein kinase D3 (532-540)
  source 1..27: mol_type = other RNA
atgcccgtgaccccgcaggccagcgtc

SEQ ID NO: 38401 - RNA, 27 nt, synthetic construct
  misc_feature 1..27: note = Progressive ankylosis protein homolog (288-296)
  source 1..27: mol_type = other RNA
atgccctacggctggctgaccgagatc

SEQ ID NO: 38402 - RNA, 30 nt, synthetic construct
  misc_feature 1..30: note = YTH domain-containing family protein 2 (206-215)
  source 1..30: mol_type = other RNA
atgagcgactcctacctgcccagctactac

SEQ ID NO: 38403 - RNA, 27 nt, synthetic construct
  misc_feature 1..27: note = Bleomycin hydrolase (410-418)
  source 1..27: mol_type = other RNA
atgaccgacgagtggttcagcgagtac

SEQ ID NO: 38404 - RNA, 27 nt, synthetic construct
  misc_feature 1..27: note = Eukaryotic initiation factor 4A-III (233-241)
  source 1..27: mol_type = other RNA
atgaccgaccccatccgcatcctggtg

SEQ ID NO: 38405 - RNA, 36 nt, synthetic construct
  misc_feature 1..36: note = Cytochrome c oxidase subunit 1 (484-495)
  source 1..36: mol_type = other RNA
atggtggaggagcccagcatgaacctggagtggctc

SEQ ID NO: 38406 - RNA, 33 nt, synthetic construct
  misc_feature 1..33: note = Son of sevenless homolog 2 (615-625)
  source 1..33: mol_type = other RNA
atgtacgccgaccccaacttcgtgcgcaccttc

SEQ ID NO: 38407 - RNA, 27 nt, synthetic construct
  misc_feature 1..27: note = Trafficking protein particle complex subunit 2 (93-101)
  source 1..27: mol_type = other RNA
atgtacctgaagaccgtggacaagttc

SEQ ID NO: 38408 - RNA, 27 nt, synthetic construct
  misc_feature 1..27: note = Pyruvate carboxylase, mitochondrial (1012-1020)
  source 1..27: mol_type = other RNA
atgtaccccgacgtgttcgcccacttc

SEQ ID NO: 38409 - RNA, 27 nt, synthetic construct
  misc_feature 1..27: note = Constitutive coactivator of PPAR-gamma-like protein 1 (568-576)
  source 1..27: mol_type = other RNA
atgtacccctacatcttccacgtgctg

SEQ ID NO: 38410 - RNA, 27 nt, synthetic construct
  misc_feature 1..27: note = Msx2-interacting protein (2894-2902)
  source 1..27: mol_type = other RNA
aacgccagccccgtgatctccagcgtc

SEQ ID NO: 38411 - RNA, 27 nt, synthetic construct
  misc_feature 1..27: note = Cytoplasmic dynein 1 heavy chain 1 (3346-3354)
  source 1..27: mol_type = other RNA
aacttcatccccaccatcgtgaacttc

SEQ ID NO: 38412 - RNA, 30 nt, synthetic construct
  misc_feature 1..30: note = Ras GTPase-activating-like protein IQGAP3 (896-905)
  source 1..30: mol_type = other RNA
aacatcatggacatcaagatcggcctgctc

SEQ ID NO: 38413 - RNA, 27 nt, synthetic construct
  misc_feature 1..27: note = Tuberin (178-186)
  source 1..27: mol_type = other RNA
aacctggccgcctacgtgcccctcctg

SEQ ID NO: 38414 - RNA, 27 nt, synthetic construct
  misc_feature 1..27: note = Nestin (83-91)
  source 1..27: mol_type = other RNA
aacctggccgaggagctcgagggcgtg

SEQ ID NO: 38415 - RNA, 36 nt, synthetic construct
  misc_feature 1..36: note = Spliceosome RNA helicase DDX39B (201-212)
  source 1..36: mol_type = other RNA
aacctgttcggccgcgggatggacatcgagcgggtg

SEQ ID NO: 38416 - RNA, 27 nt, synthetic construct
  misc_feature 1..27: note = Protein unc-45 homolog A (297-305)
  source 1..27: mol_type = other RNA
aacctgctcgacctgctgaccgaggtg

SEQ ID NO: 38417 - RNA, 30 nt, synthetic construct
  misc_feature 1..30: note = Ras GTPase-activating-like protein IQGAP2 (826-835)
  source 1..30: mol_type = other RNA
aacctgatggacatcaagatcggcctcctg

SEQ ID NO: 38418 - RNA, 42 nt, synthetic construct
  misc_feature 1..42: note = Peroxisome proliferator-activated receptor gamma coactivator 1-alpha (767-780)
  source 1..42: mol_type = other RNA
aacagcgacgacttcgaccccgcctccaccaagagcaagtac

SEQ ID NO: 38419 - RNA, 33 nt, synthetic construct
  misc_feature 1..33: note = NADH-ubiquinone oxidoreductase chain 5 (109-119)
  source 1..33: mol_type = other RNA
aacagcgaccccaacatcaaccagttcttcaag

SEQ ID NO: 38420 - RNA, 27 nt, synthetic construct
  misc_feature 1..27: note = Cadherin EGF LAG seven-pass G-type receptor 2 (2584-2592)
  source 1..27: mol_type = other RNA
aacagcgacaccctgctcttccactac

SEQ ID NO: 38421 - RNA, 27 nt, synthetic construct
  misc_feature 1..27: note = Unconventional myosin-X (1519-1527)
  source 1..27: mol_type = other RNA
aacagcgacgtggtcgagcagatctac

SEQ ID NO: 38422 - RNA, 27 nt, synthetic construct
  misc_feature 1..27: note = Dedicator of cytokinesis protein 9 (118-126)
  source 1..27: mol_type = other RNA
aacagcgactggcacctggtgaactac

SEQ ID NO: 38423 - RNA, 27 nt, synthetic construct
  misc_feature 1..27: note = Serine/threonine-protein kinase RIO3 (378-386)
  source 1..27: mol_type = other RNA
aacagcgaggagatgaaggaggcctac

SEQ ID NO: 38424 - RNA, 27 nt, synthetic construct
  misc_feature 1..27: note = Nuclear factor erythroid 2-related factor 2 (178-186)
  source 1..27: mol_type = other RNA
aacaccgacttcggcgacgagttctac

SEQ ID NO: 38425 - RNA, 27 nt, synthetic construct
  misc_feature 1..27: note = 26S proteasome non-ATPase regulatory subunit 12 (218-226)
  source 1..27: mol_type = other RNA
aacaccgagaagctgaagctcaagtac

SEQ ID NO: 38426 - RNA, 27 nt, synthetic construct
  misc_feature 1..27: note = Transgelin-2 (106-114)
  source 1..27: mol_type = other RNA
aacaccaccgacatcttccagacggtg

SEQ ID NO: 38427 - RNA, 33 nt, synthetic construct
  misc_feature 1..33: note = Anaphase-promoting complex subunit 7 (236-246)
  source 1..33: mol_type = other RNA
aacgtggacctgctcggcagcctggccgacctg

SEQ ID NO: 38428 - RNA, 27 nt, synthetic construct
  misc_feature 1..27: note = C-Jun-amino-terminal kinase-interacting protein 4 (137-145)
  source 1..27: mol_type = other RNA
aactacgccgaccagatcagccgcctg

SEQ ID NO: 38429 - RNA, 30 nt, synthetic construct
  misc_feature 1..30: note = Heterogeneous nuclear ribonucleoprotein U-like protein 1 (472-481)
  source 1..30: mol_type = other RNA
aactacgccggccgctgggacgtgctgatc

SEQ ID NO: 38430 - RNA, 27 nt, synthetic construct
  misc_feature 1..27: note = Basic leucine zipper and W2 domain-containing protein 2 (110-118)
  source 1..27: mol_type = other RNA
aactacgcccaggtgttcaacaagctg

SEQ ID NO: 38431 - RNA, 27 nt, synthetic construct
  misc_feature 1..27: note = Baculoviral IAP repeat-containing protein 6 (803-811)
  source 1..27: mol_type = other RNA
aactacgccacccgcatcgtgaccctg

SEQ ID NO: 38432 - RNA, 27 nt, synthetic construct
  misc_feature 1..27: note = Cleavage stimulation factor subunit 3 (71-79)
  source 1..27: mol_type = other RNA
aactacgacaaggtggagaagctgttc

SEQ ID NO: 38433 - RNA, 27 nt, synthetic construct
  misc_feature 1..27: note = E3 ubiquitin-protein ligase SHPRH (409-417)
  source 1..27: mol_type = other RNA
aactacttcatccccagccactacttc

SEQ ID NO: 38434 - RNA, 30 nt, synthetic construct
  misc_feature 1..30: note = Translocon-associated protein subunit alpha (108-117)
  source 1..30: mol_type = other RNA
aactacaaggacctgaacggcaacgtgttc

SEQ ID NO: 38435 - RNA, 27 nt, synthetic construct
  misc_feature 1..27: note = Ubiquitin fusion degradation protein 1 homolog (197-205)
  source 1..27: mol_type = other RNA
aactacaacgagaagatctacgagctg

SEQ ID NO: 38436 - RNA, 27 nt, synthetic construct
  misc_feature 1..27: note = Neurofibromin (31-39)
  source 1..27: mol_type = other RNA
aactaccccgacgagttcaccaagctg

SEQ ID NO: 38437 - RNA, 27 nt, synthetic construct
  misc_feature 1..27: note = Zinc finger MYM-type protein 4 (344-352)
  source 1..27: mol_type = other RNA
aactaccagaacgtggtccacaagctg

SEQ ID NO: 38438 - RNA, 27 nt, synthetic construct
  misc_feature 1..27: note = Alpha-mannosidase 2x (441-449)
  source 1..27: mol_type = other RNA
aactaccagcgcctgttcgacttcttc

SEQ ID NO: 38439 - RNA, 27 nt, synthetic construct
  misc_feature 1..27: note = Neuron navigator 2 (1368-1376)
  source 1..27: mol_type = other RNA
aactacagcatcatcccctacctgctc

SEQ ID NO: 38440 - RNA, 27 nt, synthetic construct
  misc_feature 1..27: note = E1A-binding protein p400 (343-351)
  source 1..27: mol_type = other RNA
cccttcgccaagccgctgcccaccttc

SEQ ID NO: 38441 - RNA, 30 nt, synthetic construct
  misc_feature 1..30: note = Cyclic AMP-responsive element-binding protein 3-like protein 2 (17-26)
  source 1..30: mol_type = other RNA
cccagctacggcgggcagcagcagtcctac

SEQ ID NO: 38442 - RNA, 27 nt, synthetic construct
  misc_feature 1..27: note = Coatomer subunit alpha (1152-1160)
  source 1..27: mol_type = other RNA
cccaccgacgcctaccagctgaactac

SEQ ID NO: 38443 - RNA, 30 nt, synthetic construct
  misc_feature 1..30: note = Endoplasmin (497-506)
  source 1..30: mol_type = other RNA
cccaccgacatcaccagcctggaccagtac

SEQ ID NO: 38444 - RNA, 27 nt, synthetic construct
  misc_feature 1..27: note = Neurofibromin (147-155)
  source 1..27: mol_type = other RNA
cccaccgacctggagacccgcagctac

SEQ ID NO: 38445 - RNA, 27 nt, synthetic construct
  misc_feature 1..27: note = H/ACA ribonucleoprotein complex subunit 1 (96-104)
  source 1..27: mol_type = other RNA
ccctacttcaacgccccggtgtacctg

SEQ ID NO: 38446 - RNA, 27 nt, synthetic construct
  misc_feature 1..27: note = E3 ubiquitin-protein ligase UBR4 (190-198)
  source 1..27: mol_type = other RNA
ccctacatcatccacaccgtgctgtac

SEQ ID NO: 38447 - RNA, 27 nt, synthetic construct
  misc_feature 1..27: note = Procollagen-lysine,2-oxoglutarate 5-dioxygenase 1 (449-457)
  source 1..27: mol_type = other RNA
ccctacatcagcaacatctacctgatc

SEQ ID NO: 38448 - RNA, 27 nt, synthetic construct
  misc_feature 1..27: note = Zinc finger protein 503 (342-350)
  source 1..27: mol_type = other RNA
ccctacaagccgggccagaccgtgttc

SEQ ID NO: 38449 - RNA, 27 nt, synthetic construct
  misc_feature 1..27: note = Synergin gamma (94-102)
  source 1..27: mol_type = other RNA
ccctacctgggccaggccccgttcctc

SEQ ID NO: 38450 - RNA, 27 nt, synthetic construct
  misc_feature 1..27: note = Tubulin polyglutamylase TTLL4 (755-763)
  source 1..27: mol_type = other RNA
ccctacctgatcagcggctccaagttc

SEQ ID NO: 38451 - RNA, 33 nt, synthetic construct
  misc_feature 1..33: note = Protein-L-isoaspartate(D-aspartate) O-methyltransferase (45-55)
  source 1..33: mol_type = other RNA
ccctacatggacagcccgcagtccatcggcttc

SEQ ID NO: 38452 - RNA, 30 nt, synthetic construct
  misc_feature 1..30: note = Oxysterol-binding protein-related protein 10 (414-423)
  source 1..30: mol_type = other RNA
ccctacaacccgatcatcggcgagaccttc

SEQ ID NO: 38453 - RNA, 30 nt, synthetic construct
  misc_feature 1..30: note = Oxysterol-binding protein-related protein 8 (441-450)
  source 1..30: mol_type = other RNA
ccctacaacccgatcctgggcgagaccttc

SEQ ID NO: 38454 - RNA, 27 nt, synthetic construct
  misc_feature 1..27: note = DNA-dependent protein kinase catalytic subunit (2252-2260)
  source 1..27: mol_type = other RNA
ccctaccgcctgatcttcgagaagttc

SEQ ID NO: 38455 - RNA, 27 nt, synthetic construct
  misc_feature 1..27: note = Ubiquitin-associated protein 2-like (857-865)
  source 1..27: mol_type = other RNA
ccctacagcggcgacctgaccaagttc

SEQ ID NO: 38456 - RNA, 27 nt, synthetic construct
  misc_feature 1..27: note = Origin recognition complex subunit 5 (303-311)
  source 1..27: mol_type = other RNA
ccctactacagcaagttcatcctgatc

SEQ ID NO: 38457 - RNA, 27 nt, synthetic construct
  misc_feature 1..27: note = Spectrin alpha chain, non-erythrocytic 1 (417-425)
  source 1..27: mol_type = other RNA
cagctgctcggcagcgcccacgaggtg

SEQ ID NO: 38458 - RNA, 27 nt, synthetic construct
  misc_feature 1..27: note = LIM and calponin homology domains-containing protein 1 (431-439)
  source 1..27: mol_type = other RNA
cagatgttcgagggcgtggcccgcgtc

SEQ ID NO: 38459 - RNA, 27 nt, synthetic construct
  misc_feature 1..27: note = Protein transport protein Sec61 subunit alpha isoform 2 (272-280)
  source 1..27: mol_type = other RNA
cagagcgccctggtgtccaacctctac

SEQ ID NO: 38460 - RNA, 36 nt, synthetic construct
  misc_feature 1..36: note = HLA class I histocompatibility antigen, A-1 alpha chain (86-97)
  source 1..36: mol_type = other RNA
cagagcgaggacggctcccacaccatccagatcatg

SEQ ID NO: 38461 - RNA, 27 nt, synthetic construct
  misc_feature 1..27: note = Peroxisome proliferator-activated receptor gamma coactivator 1-alpha (61-69)
  source 1..27: mol_type = other RNA
cagagcgagatcatctccaaccagtac

SEQ ID NO: 38462 - RNA, 36 nt, synthetic construct
  misc_feature 1..36: note = Probable ubiquitin carboxyl-terminal hydrolase FAF-X (1852-1863)
  source 1..36: mol_type = other RNA
cagagcgagtccgagaccgccggcagcaccaagtac

SEQ ID NO: 38463 - RNA, 27 nt, synthetic construct
  misc_feature 1..27: note = Obscurin-like protein 1 (662-670)
  source 1..27: mol_type = other RNA
caggtggagcccggcgccctgcgctac

SEQ ID NO: 38464 - RNA, 33 nt, synthetic construct
  misc_feature 1..33: note = Regulator of nonsense transcripts 1 (738-748)
  source 1..33: mol_type = other RNA
cagtggccccagccggacaagcccatgttcttc

SEQ ID NO: 38465 - RNA, 27 nt, synthetic construct
  misc_feature 1..27: note = Bardet-Biedl syndrome 4 protein (147-155)
  source 1..27: mol_type = other RNA
cagtacgccagcgccttccacttcctg

SEQ ID NO: 38466 - RNA, 27 nt, synthetic construct
  misc_feature 1..27: note = Dynein light chain roadblock-type 1 (48-56)
  source 1..27: mol_type = other RNA
cagtacgccagcctgatgcactccttc

SEQ ID NO: 38467 - RNA, 27 nt, synthetic construct
  misc_feature 1..27: note = Serine/threonine-protein kinase PLK4 (655-663)
  source 1..27: mol_type = other RNA
cagtacgccagccgcttcgtgcagctg

SEQ ID NO: 38468 - RNA, 30 nt, synthetic construct
  misc_feature 1..30: note = Neuron navigator 2 (639-648)
  source 1..30: mol_type = other RNA
cagtacgacccctacaccgacagccgcttc

SEQ ID NO: 38469 - RNA, 27 nt, synthetic construct
  misc_feature 1..27: note = Disks large homolog 5 (1316-1324)
  source 1..27: mol_type = other RNA
cagtacaacccccacgtgcaccagctg

SEQ ID NO: 38470 - RNA, 27 nt, synthetic construct
  misc_feature 1..27: note = YY1-associated protein 1 (219-227)
  source 1..27: mol_type = other RNA
cagtacaaccccaagttccagaccctg

SEQ ID NO: 38471 - RNA, 27 nt, synthetic construct
  misc_feature 1..27: note = H/ACA ribonucleoprotein complex non-core subunit NAF1 (421-429)
  source 1..27: mol_type = other RNA
cagtaccccttcccgctgcccgtgttc

SEQ ID NO: 38472 - RNA, 27 nt, synthetic construct
  misc_feature 1..27: note = ATP-dependent RNA helicase DDX24 (585-593)
  source 1..27: mol_type = other RNA
cagtaccccggccgcagcctggtgttc

SEQ ID NO: 38473 - RNA, 33 nt, synthetic construct
  misc_feature 1..33: note = Signal transducer and activator of transcription 1-alpha/beta (67-77)
  source 1..33: mol_type = other RNA
cagtacagccgcttctccctggagaacaacttc

SEQ ID NO: 38474 - RNA, 27 nt, synthetic construct
  misc_feature 1..27: note = Regulatory-associated protein of mTOR (699-707)
  source 1..27: mol_type = other RNA
cagtacaccccccacagccaccagttc

SEQ ID NO: 38475 - RNA, 27 nt, synthetic construct
  misc_feature 1..27: note = 60S ribosomal protein L7 (200-208)
  source 1..27: mol_type = other RNA
cgcttcaaggaggccaacaacttcctg

SEQ ID NO: 38476 - RNA, 27 nt, synthetic construct
  misc_feature 1..27: note = Cullin-3 (709-717)
  source 1..27: mol_type = other RNA
cgcttcctgcccagcccggtggtcatc

SEQ ID NO: 38477 - RNA, 27 nt, synthetic construct
  misc_feature 1..27: note = 40S ribosomal protein S30 (115-123)
  source 1..27: mol_type = other RNA
cgcttcgtgaacgtcgtgcccaccttc

SEQ ID NO: 38478 - RNA, 27 nt, synthetic construct
  misc_feature 1..27: note = Putative PIP5K1A and PSMD4-like protein (555-563)
  source 1..27: mol_type = other RNA
cgcatcctgagcaagctccacaccgtg

SEQ ID NO: 38479 - RNA, 27 nt, synthetic construct
  misc_feature 1..27: note = Schlafen family member 5 (693-701)
  source 1..27: mol_type = other RNA
cgcatcatggagaagatccggaacgtg

SEQ ID NO: 38480 - RNA, 27 nt, synthetic construct
  misc_feature 1..27: note = Condensin complex subunit 1 (412-420)
  source 1..27: mol_type = other RNA
cgcctggccgacaagagcgtgctcgtc

SEQ ID NO: 38481 - RNA, 27 nt, synthetic construct
  misc_feature 1..27: note = DNA replication licensing factor MCM4 (739-747)
  source 1..27: mol_type = other RNA
cgcctggccgaggcccacgcgaaggtg

SEQ ID NO: 38482 - RNA, 30 nt, synthetic construct
  misc_feature 1..30: note = Histone-lysine N-methyltransferase ASH1L (2786-2795)
  source 1..30: mol_type = other RNA
cgcctggacaagagcgcccacctcttctac

SEQ ID NO: 38483 - RNA, 30 nt, synthetic construct
  misc_feature 1..30: note = Prolyl 3-hydroxylase 1 (554-563)
  source 1..30: mol_type = other RNA
cgcctggacacccccctctacttcagctac

SEQ ID NO: 38484 - RNA, 27 nt, synthetic construct
  misc_feature 1..27: note = Elongation factor 2 (239-247)
  source 1..27: mol_type = other RNA
cgcctgatggagcccatctacctcgtg

SEQ ID NO: 38485 - RNA, 30 nt, synthetic construct
  misc_feature 1..30: note = Solute carrier family 22 member 18 (149-158)
  source 1..30: mol_type = other RNA
cgccccgccgccctgggccggctcgggctg

SEQ ID NO: 38486 - RNA, 30 nt, synthetic construct
  misc_feature 1..30: note = BCL-6 corepressor (1395-1404)
  source 1..30: mol_type = other RNA
cgccccatgccgcccgaggcccggcgcctg

SEQ ID NO: 38487 - RNA, 33 nt, synthetic construct
  misc_feature 1..33: note = Protein FAM46B (291-301)
  source 1..33: mol_type = other RNA
cgcccccggccgagcaccgacgtgcgcgccctg

SEQ ID NO: 38488 - RNA, 27 nt, synthetic construct
  misc_feature 1..27: note = Nuclear factor 1 X-type (113-121)
  source 1..27: mol_type = other RNA
cgccaggccgacaaggtgtggcggctg

SEQ ID NO: 38489 - RNA, 27 nt, synthetic construct
  misc_feature 1..27: note = Multiple PDZ domain protein (911-919)
  source 1..27: mol_type = other RNA
cgccaggacgagaacacccccagcgtg

SEQ ID NO: 38490 - RNA, 30 nt, synthetic construct
  misc_feature 1..30: note = REST corepressor 1 (336-345)
  source 1..30: mol_type = other RNA
cgccagctggacatggagctcgtgagcgtc

SEQ ID NO: 38491 - RNA, 27 nt, synthetic construct
  misc_feature 1..27: note = Bifunctional coenzyme A synthase (204-212)
  source 1..27: mol_type = other RNA
cgccaggtggagaaggcctgggccctg

SEQ ID NO: 38492 - RNA, 36 nt, synthetic construct
  misc_feature 1..36: note = Serine/threonine-protein kinase SIK3 (368-379)
  source 1..36: mol_type = other RNA
cgcagcgacgcctacgaccactactccgccatctac

SEQ ID NO: 38493 - RNA, 27 nt, synthetic construct
  misc_feature 1..27: note = Truncated EKLF (17-25)
  source 1..27: mol_type = other RNA
cgcagcgacgagctgacccggcactac

SEQ ID NO: 38494 - RNA, 30 nt, synthetic construct
  misc_feature 1..30: note = Unconventional myosin-X (35-44)
  source 1..30: mol_type = other RNA
cgcaccgactacggccaggtgttcacctac

SEQ ID NO: 38495 - RNA, 27 nt, synthetic construct
  misc_feature 1..27: note = Ribonuclease P protein subunit p21 (66-74)
  source 1..27: mol_type = other RNA
cgcaccatcgccaagcggctggtgctc

SEQ ID NO: 38496 - RNA, 27 nt, synthetic construct
  misc_feature 1..27: note = Serine/threonine-protein kinase MRCK beta (1490-1498)
  source 1..27: mol_type = other RNA
cgcaccatggagtgggtgcagaccatc

SEQ ID NO: 38497 - RNA, 27 nt, synthetic construct
  misc_feature 1..27: note = Liprin-beta-1 (738-746)
  source 1..27: mol_type = other RNA
cgcgtggacggccggatgctgcactac

SEQ ID NO: 38498 - RNA, 33 nt, synthetic construct
  misc_feature 1..33: note = DNA damage-binding protein 1 (263-273)
  source 1..33: mol_type = other RNA
cgcgtggaccccaacggcagccggtacctgctc

SEQ ID NO: 38499 - RNA, 33 nt, synthetic construct
  misc_feature 1..33: note = Src substrate cortactin (131-141)
  source 1..33: mol_type = other RNA
cgcgtggaccagagcgccgtcggcttcgagtac

SEQ ID NO: 38500 - RNA, 30 nt, synthetic construct
  misc_feature 1..30: note = HLA class I histocompatibility antigen, alpha chain E (284-293)
  source 1..30: mol_type = other RNA
cgctggaagcccgccagccagccgaccatc

SEQ ID NO: 38501 - RNA, 33 nt, synthetic construct
  misc_feature 1..33: note = Serine/threonine-protein phosphatase 2A 55 kDa regulatory subunit B alpha isoform (100-110)
  source 1..33: mol_type = other RNA
cgctggctgccccagaagaacgccgcccagttc

SEQ ID NO: 38502 - RNA, 27 nt, synthetic construct
  misc_feature 1..27: note = snRNA-activating protein complex subunit 1 (64-72)
  source 1..27: mol_type = other RNA
cgctacttcctgcccccgtacaccttc

SEQ ID NO: 38503 - RNA, 27 nt, synthetic construct
  misc_feature 1..27: note = Heterogeneous nuclear ribonucleoprotein H (275-283)
  source 1..27: mol_type = other RNA
cgctacggcgacgggggcagcaccttc

SEQ ID NO: 38504 - RNA, 27 nt, synthetic construct
  misc_feature 1..27: note = Rab proteins geranylgeranyltransferase component A 1 (79-87)
  source 1..27: mol_type = other RNA
cgctacggcaacacccccttcctgttc

SEQ ID NO: 38505 - RNA, 30 nt, synthetic construct
  misc_feature 1..30: note = Pre-mRNA-processing-splicing factor 8 (1090-1099)
  source 1..30: mol_type = other RNA
cgctacatcgaccggatccacatcttcttc

SEQ ID NO: 38506 - RNA, 27 nt, synthetic construct
  misc_feature 1..27: note = Cystine/glutamate transporter (148-156)
  source 1..27: mol_type = other RNA
cgctacatcctggagcccttcttcatc

SEQ ID NO: 38507 - RNA, 27 nt, synthetic construct
  misc_feature 1..27: note = ER degradation-enhancing alpha-mannosidase-like protein 3 (281-289)
  source 1..27: mol_type = other RNA
cgctacatcagccagcccccgctgctc

SEQ ID NO: 38508 - RNA, 27 nt, synthetic construct
  misc_feature 1..27: note = Homeodomain-interacting protein kinase 2 (411-419)
  source 1..27: mol_type = other RNA
cgctacatcagccagacccagggcctg

SEQ ID NO: 38509 - RNA, 27 nt, synthetic construct
  misc_feature 1..27: note = DNA-directed RNA polymerase III subunit RPC3 (90-98)
  source 1..27: mol_type = other RNA
cgctacatctacaccaccaagacgctg

SEQ ID NO: 38510 - RNA, 27 nt, synthetic construct
  misc_feature 1..27: note = Probable global transcription activator SNF2L1 (867-875)
  source 1..27: mol_type = other RNA
cgctacaaggcccccttccaccagctg

SEQ ID NO: 38511 - RNA, 27 nt, synthetic construct
  misc_feature 1..27: note = Ras GTPase-activating-like protein IQGAP1 (102-110)
  source 1..27: mol_type = other RNA
cgctacaaggccaccggcctgcacttc

SEQ ID NO: 38512 - RNA, 30 nt, synthetic construct
  misc_feature 1..30: note = RNA pseudouridylate synthase domain-containing protein 2 (461-470)
  source 1..30: mol_type = other RNA
cgctacaagggccccgggttcgagtacttc

SEQ ID NO: 38513 - RNA, 27 nt, synthetic construct
  misc_feature 1..27: note = Cytoplasmic dynein 1 heavy chain 1 (979-987)
  source 1..27: mol_type = other RNA
cgctacaagctgtaccaggagatgttc

SEQ ID NO: 38514 - RNA, 30 nt, synthetic construct
  misc_feature 1..30: note = DENN domain-containing protein 1B (346-355)
  source 1..30: mol_type = other RNA
cgctacaagcccggcgagccgatcaccttc

SEQ ID NO: 38515 - RNA, 27 nt, synthetic construct
  misc_feature 1..27: note = Trimethylguanosine synthase (469-477)
  source 1..27: mol_type = other RNA
cgctacctggagaagaacgtgaagctc

SEQ ID NO: 38516 - RNA, 27 nt, synthetic construct
  misc_feature 1..27: note = Catechol O-methyltransferase (196-204)
  source 1..27: mol_type = other RNA
cgctacctgcccgacaccctcctgctg

SEQ ID NO: 38517 - RNA, 36 nt, synthetic construct
  misc_feature 1..36: note = Zinc finger protein 281 (390-401)
  source 1..36: mol_type = other RNA
cgctacctgcccaccgccagctccaacagcgccttc

SEQ ID NO: 38518 - RNA, 30 nt, synthetic construct
  misc_feature 1..30: note = Histone-binding protein RBBP7 (130-139)
  source 1..30: mol_type = other RNA
cgctacatgccccagaacccgcacatcatc

SEQ ID NO: 38519 - RNA, 27 nt, synthetic construct
  misc_feature 1..27: note = E3 ubiquitin-protein ligase DZIP3 (194-202)
  source 1..27: mol_type = other RNA
cgctacaacggcgggctgctcgagttc

SEQ ID NO: 38520 - RNA, 27 nt, synthetic construct
  misc_feature 1..27: note = Influenza virus NS1A-binding protein (531-539)
  source 1..27: mol_type = other RNA
cgctacaaccccgagaacaacacctgg

SEQ ID NO: 38521 - RNA, 27 nt, synthetic construct
  misc_feature 1..27: note = Kelch-like protein 11 (425-433)
  source 1..27: mol_type = other RNA
cgctacaaccccaacctgaacacctgg

SEQ ID NO: 38522 - RNA, 27 nt, synthetic construct
  misc_feature 1..27: note = Solute carrier family 35 member B1 (235-243)
  source 1..27: mol_type = other RNA
cgctaccccgccatcatctacaacatc

SEQ ID NO: 38523 - RNA, 30 nt, synthetic construct
  misc_feature 1..30: note = Myotubularin-related protein 5 (78-87)
  source 1..30: mol_type = other RNA
cgctaccccccggacatccgggccaccttc

SEQ ID NO: 38524 - RNA, 30 nt, synthetic construct
  misc_feature 1..30: note = Myotubularin-related protein 13 (1004-1013)
  source 1..30: mol_type = other RNA
cgctacccccagagcatcttctccaccttc

SEQ ID NO: 38525 - RNA, 27 nt, synthetic construct
  misc_feature 1..27: note = Golgin subfamily B member 1 (2035-2043)
  source 1..27: mol_type = other RNA
cgctaccaggagaagatcagcgccctg

SEQ ID NO: 38526 - RNA, 27 nt, synthetic construct
  misc_feature 1..27: note = Zinc phosphodiesterase ELAC protein 2 (313-321)
  source 1..27: mol_type = other RNA
cgctaccagcagtggatggagcggttc

SEQ ID NO: 38527 - RNA, 27 nt, synthetic construct
  misc_feature 1..27: note = Supervillin (423-431)
  source 1..27: mol_type = other RNA
cgctaccagacccagcccgtgaccctg

SEQ ID NO: 38528 - RNA, 36 nt, synthetic construct
  misc_feature 1..36: note = Magnesium transporter protein 1 (137-148)
  source 1..36: mol_type = other RNA
cgctacagctccgccttcaccaaccggatcttcttc

SEQ ID NO: 38529 - RNA, 33 nt, synthetic construct
  misc_feature 1..33: note = Retinoic acid receptor alpha (412-422)
  source 1..33: mol_type = other RNA
cgctacacccccgagcaggacaccatgacgttc

SEQ ID NO: 38530 - RNA, 27 nt, synthetic construct
  misc_feature 1..27: note = Beta-hexosaminidase subunit alpha (36-44)
  source 1..27: mol_type = other RNA
cgctacgtgctgtaccccaacaacttc

SEQ ID NO: 38531 - RNA, 33 nt, synthetic construct
  misc_feature 1..33: note = Beta-hexosaminidase subunit alpha (36-46)
  source 1..33: mol_type = other RNA
cgctacgtgctgtaccccaacaacttccagttc

SEQ ID NO: 38532 - RNA, 27 nt, synthetic construct
  misc_feature 1..27: note = 39S ribosomal protein L43, mitochondrial (21-29)
  source 1..27: mol_type = other RNA
cgctacgtgcagcagctgcagcggctc

SEQ ID NO: 38533 - RNA, 27 nt, synthetic construct
  misc_feature 1..27: note = Syntaxin-binding protein 1 (149-157)
  source 1..27: mol_type = other RNA
agcgccgactccttccagagcttctac

SEQ ID NO: 38534 - RNA, 27 nt, synthetic construct
  misc_feature 1..27: note = Histone-binding protein RBBP4 (220-228)
  source 1..27: mol_type = other RNA
agcttcaacccctactccgagttcatc

SEQ ID NO: 38535 - RNA, 27 nt, synthetic construct
  misc_feature 1..27: note = Hemoglobin subunit alpha (7-15)
  source 1..27: mol_type = other RNA
agcttccccaccaccaagacgtacttc

SEQ ID NO: 38536 - RNA, 27 nt, synthetic construct
  misc_feature 1..27: note Dolichyl-diphosphooligosaccharide-proteinosyltransferase subunit 2 (185-193)
  source 1..27: mol_type = other RNA
agcttcacccccgtgggcgacgtcttc

SEQ ID NO: 38537 - RNA, 36 nt, synthetic construct
  misc_feature 1..36: note = Heat shock-related 70 kDa protein 2 (211-222)
  source 1..36: mol_type = other RNA
agcatcctgaccatcgaggacggcatcttcgaggtg

SEQ ID NO: 38538 - RNA, 27 nt, synthetic construct
  misc_feature 1..27: note = Transcription factor BTF3 (88-96)
  source 1..27: mol_type = other RNA
agcctggccgccaacaccttcaccatc

SEQ ID NO: 38539 - RNA, 27 nt, synthetic construct
  misc_feature 1..27: note = Superkiller viralicidic activity 2-like 2 (92-100)
  source 1..27: mol_type = other RNA
agcctggccgacctcatgccccgcgtg

SEQ ID NO: 38540 - RNA, 30 nt, synthetic construct
  misc_feature 1..30: note = Aminopeptidase B (318-327)
  source 1..30: mol_type = other RNA
agcctggccgacgtgatcatccacgagatc

SEQ ID NO: 38541 - RNA, 27 nt, synthetic construct
  misc_feature 1..27: note = Epoxide hydrolase 1 (350-358)
  source 1..27: mol_type = other RNA
agcctggacgacctcctgaccaacgtg

SEQ ID NO: 38542 - RNA, 27 nt, synthetic construct
  misc_feature 1..27: note = Band 4.1-like protein 2 (550-558)
  source 1..27: mol_type = other RNA
agcctggacggcgcccccatcggggtg

SEQ ID NO: 38543 - RNA, 27 nt, synthetic construct
  misc_feature 1..27: note = RNA-binding motif protein, X-linked-like-2 (67-75)
  source 1..27: mol_type = other RNA
agcctggacggcaaggccatcaaggtg

SEQ ID NO: 38544 - RNA, 27 nt, synthetic construct
  misc_feature 1..27: note = Telomere-associated protein RIF1 (1157-1165)
  source 1..27: mol_type = other RNA
agcctggacaagacctcccccgagatg

SEQ ID NO: 38545 - RNA, 27 nt, synthetic construct
  misc_feature 1..27: note = Cytoskeleton-associated protein 4 (535-543)
  source 1..27: mol_type = other RNA
agcctggacaacctcaaggcctccgtg

SEQ ID NO: 38546 - RNA, 24 nt, synthetic construct
  misc_feature 1..24: note = Signal recognition particle 54 kDa protein (200-207)
  source 1..24: mol_type = other RNA
agcctgttcgaggagatgctccag

SEQ ID NO: 38547 - RNA, 27 nt, synthetic construct
  misc_feature 1..27: note = WD repeat and FYVE domain-containing protein 3 (1518-1526)
  source 1..27: mol_type = other RNA
agcctgttcgagcacttcatcgagctc

SEQ ID NO: 38548 - RNA, 30 nt, synthetic construct
  misc_feature 1..30: note = Programmed cell death 6-interacting protein (103-112)
  source 1..30: mol_type = other RNA
agcctgttcggcgggtccgtgaagctcgcc

SEQ ID NO: 38549 - RNA, 36 nt, synthetic construct
  misc_feature 1..36: note = Junction plakoglobin (670-681)
  source 1..36: mol_type = other RNA
agcctgttcaagcacgaccccgccgcctgggaggcg

SEQ ID NO: 38550 - RNA, 39 nt, synthetic construct
  misc_feature 1..39: note = Unconventional myosin-Ib (552-564)
  source 1..39: mol_type = other RNA
agcctgttccccgagggcaacccggccaagatcaacctc

SEQ ID NO: 38551 - RNA, 27 nt, synthetic construct
  misc_feature 1..27: note = Disintegrin and metalloproteinase domain-containing protein 10 (80-88)
  source 1..27: mol_type = other RNA
agcctgttctccgacgagttcaaggtg

SEQ ID NO: 38552 - RNA, 30 nt, synthetic construct
  misc_feature 1..30: note = Renin receptor (103-112)
  source 1..30: mol_type = other RNA
agcctgttctccgaggagacccccgtggtc

SEQ ID NO: 38553 - RNA, 27 nt, synthetic construct
  misc_feature 1..27: note = Tyrosine-protein phosphatase non-receptor type 9 (479-487)
  source 1..27: mol_type = other RNA
agcctgatcgacttcctccgcgtggtc

SEQ ID NO: 38554 - RNA, 27 nt, synthetic construct
  misc_feature 1..27: note = Probable E3 ubiquitin-protein ligase HECTD4 (234-242)
  source 1..27: mol_type = other RNA
agcctgaagaccttcgtgcacaccgtc

SEQ ID NO: 38555 - RNA, 30 nt, synthetic construct
  misc_feature 1..30: note = Acyl-coenzyme A thioesterase 1 isoform X1 (59-68)
  source 1..30: mol_type = other RNA
agcctgctcgccggcaaggggttcgccgtg

SEQ ID NO: 38556 - RNA, 27 nt, synthetic construct
  misc_feature 1..27: note = Cell cycle checkpoint control protein RAD9A (254-262)
  source 1..27: mol_type = other RNA
agcctgctcgacggccacttcgtgctg

SEQ ID NO: 38557 - RNA, 27 nt, synthetic construct
  misc_feature 1..27: note = Unconventional myosin-Ib (9-17)
  source 1..27: mol_type = other RNA
agcctgctcgacaacatgatcggcgtg

SEQ ID NO: 38558 - RNA, 27 nt, synthetic construct
  misc_feature 1..27: note = Protein virilizer homolog (1470-1478)
  source 1..27: mol_type = other RNA
agcctgctcgactccgtggtcggcctg

SEQ ID NO: 38559 - RNA, 27 nt, synthetic construct
  misc_feature 1..27: note = Programmed cell death 6-interacting protein (554-562)
  source 1..27: mol_type = other RNA
agcctgctctccaacctggacgaggtg

SEQ ID NO: 38560 - RNA, 33 nt, synthetic construct
  misc_feature 1..33: note = E3 ubiquitin-protein ligase UBR1 (683-693)
  source 1..33: mol_type = other RNA
agcctgatggaccccaacaagttcctcctgctg

SEQ ID NO: 38561 - RNA, 33 nt, synthetic construct
  misc_feature 1..33: note = Insulin receptor substrate 2 (1109-1119)
  source 1..33: mol_type = other RNA
agcctgatggagcaggtgtccggcgtcgaggcc

SEQ ID NO: 38562 - RNA, 27 nt, synthetic construct
  misc_feature 1..27: note = UHRF1-binding protein 1-like (1293-1301)
  source 1..27: mol_type = other RNA
agcctgatgaacatccagcacttcctc

SEQ ID NO: 38563 - RNA, 30 nt, synthetic construct
  misc_feature 1..30: note = DNA-dependent protein kinase catalytic subunit (3481-3490)
  source 1..30: mol_type = other RNA
agcctgatgaccaaggagatctccagcgtg

SEQ ID NO: 38564 - RNA, 27 nt, synthetic construct
  misc_feature 1..27: note = Serpin H1 (304-312)
  source 1..27: mol_type = other RNA
agcctgcccaagggcgtggtcgaggtg

SEQ ID NO: 38565 - RNA, 24 nt, synthetic construct
  misc_feature 1..24: note = Vimentin (226-233)
  source 1..24: mol_type = other RNA
agcctgcaggaggagatcgccttc

SEQ ID NO: 38566 - RNA, 30 nt, synthetic construct
  misc_feature 1..30: note = Enhancer of mRNA-decapping protein 4 (777-786)
  source 1..30: mol_type = other RNA
agcctgcaggagtccatcctcgcccaggtg

SEQ ID NO: 38567 - RNA, 27 nt, synthetic construct
  misc_feature 1..27: note = Plasma membrane calcium-transporting ATPase 4 (1197-1205)
  source 1..27: mol_type = other RNA
agcctgcagtccctcgagaccagcgtg

SEQ ID NO: 38568 - RNA, 27 nt, synthetic construct
  misc_feature 1..27: note = Ubiquitin-associated protein 2-like (493-501)
  source 1..27: mol_type = other RNA
agcctgacctccaagatccccgccctc

SEQ ID NO: 38569 - RNA, 33 nt, synthetic construct
  misc_feature 1..33: note = Ras-related C3 botulinum toxin substrate 1 (39-49)
  source 1..33: mol_type = other RNA
agcctggtgtcccccgccagcttcgagaacgtc

SEQ ID NO: 38570 - RNA, 27 nt, synthetic construct
  misc_feature 1..27: note = Renin receptor (241-249)
  source 1..27: mol_type = other RNA
agcctgtacggcgggaacgccgtggtc

SEQ ID NO: 38571 - RNA, 33 nt, synthetic construct
  misc_feature 1..33: note = Renin receptor (241-251)
  source 1..33: mol_type = other RNA
agcctgtacggcgggaacgccgtggtcgagctc

SEQ ID NO: 38572 - RNA, 39 nt, synthetic construct
  misc_feature 1..39: note = Renin receptor (241-253)
  source 1..39: mol_type = other RNA
agcctgtacggcgggaacgccgtggtcgagctcgtgacc

SEQ ID NO: 38573 - RNA, 27 nt, synthetic construct
  misc_feature 1..27: note = Nucleolar pre-ribosomal-associated protein 1 (1994-2002)
  source 1..27: mol_type = other RNA
agcctgtacatcaaggacatctggctc

SEQ ID NO: 38574 - RNA, 30 nt, synthetic construct
  misc_feature 1..30: note = Endoplasmin (71-80)
  source 1..30: mol_type = other RNA
agcctgtacaagaacaaggagatcttcctc

SEQ ID NO: 38575 - RNA, 27 nt, synthetic construct
  misc_feature 1..27: note = Probable ATP-dependent RNA helicase DDX59 (525-533)
  source 1..27: mol_type = other RNA
agcatggacgagtacgtgcaccagatc

SEQ ID NO: 38576 - RNA, 36 nt, synthetic construct
  misc_feature 1..36: note = Zinc finger protein 841 (58-69)
  source 1..36: mol_type = other RNA
agcatgctggagcagggcaaggagccctggaccgtg

SEQ ID NO: 38577 - RNA, 27 nt, synthetic construct
  misc_feature 1..27: note = E3 ubiquitin-protein ligase UBR2 (703-711)
  source 1..27: mol_type = other RNA
agcatgatggaccccaaccacttcctg

SEQ ID NO: 38578 - RNA, 27 nt, synthetic construct
  misc_feature 1..27: note = Neuroblast differentiation-associated protein AHNAK (323-331)
  source 1..27: mol_type = other RNA
agcatgtccgaggtggacctgaacgtc

SEQ ID NO: 38579 - RNA, 27 nt, synthetic construct
  misc_feature 1..27: note = Unhealthy ribosome biogenesis protein 2 homolog (629-637)
  source 1..27: mol_type = other RNA
agcatgtccggccccctgatcggggtg

SEQ ID NO: 38580 - RNA, 33 nt, synthetic construct
  misc_feature 1..33: note = Desmoplakin (1673-1683)
  source 1..33: mol_type = other RNA
agcatggtggaggacatcaccggcctgcgcctc

SEQ ID NO: 38581 - RNA, 39 nt, synthetic construct
  misc_feature 1..39: note = Aminoacyl tRNA synthase complex-interacting multifunctional protein 1 (90-102)
  source 1..39: mol_type = other RNA
agcatggtgtccgagaacgtcatccagagcaccgccgtg

SEQ ID NO: 38582 - RNA, 27 nt, synthetic construct
  misc_feature 1..27: note = Poly (ADP-ribose) polymerase 4 (1186-1194)
  source 1..27: mol_type = other RNA
agccccttcccggacatccccaaggtg

SEQ ID NO: 38583 - RNA, 27 nt, synthetic construct
  misc_feature 1..27: note = Neuroblast differentiation-associated protein AHNAK (1150-1158)
  source 1..27: mol_type = other RNA
agccccaagggcaagttctccctgttc

SEQ ID NO: 38584 - RNA, 30 nt, synthetic construct
  misc_feature 1..30: note = Cohesin subunit SA-1 (459-468)
  source 1..30: mol_type = other RNA
agccccaacggcaacctgatccgcatgctc

SEQ ID NO: 38585 - RNA, 27 nt, synthetic construct
  misc_feature 1..27: note = Neural Wiskott-Aldrich syndrome protein (82-90)
  source 1..27: mol_type = other RNA
agcccccgcggctacttccacaccttc

SEQ ID NO: 38586 - RNA, 27 nt, synthetic construct
  misc_feature 1..27: note = Collagen alpha-1(VII) chain (586-594)
  source 1..27: mol_type = other RNA
agcccccgcgtgccgtccatcgagctg

SEQ ID NO: 38587 - RNA, 27 nt, synthetic construct
  misc_feature 1..27: note = Microtubule-associated protein 4 (280-288)
  source 1..27: mol_type = other RNA
agccccaccaagctggacgtgaccctc

SEQ ID NO: 38588 - RNA, 27 nt, synthetic construct
  misc_feature 1..27: note = Kelch repeat and BTB domain-containing protein 2 (594-602)
  source 1..27: mol_type = other RNA
agcccctggaagccgcccacctacctg

SEQ ID NO: 38589 - RNA, 27 nt, synthetic construct
  misc_feature 1..27: note = Molybdenum cofactor sulfurase (515-523)
  source 1..27: mol_type = other RNA
agccaggccgacgtgatccccgccgtc

SEQ ID NO: 38590 - RNA, 27 nt, synthetic construct
  misc_feature 1..27: note = Protein FAM63A (74-82)
  source 1..27: mol_type = other RNA
agctccgcccccccgggccccaccctg

SEQ ID NO: 38591 - RNA, 27 nt, synthetic construct
  misc_feature 1..27: note = Coatomer subunit gamma-2 (186-194)
  source 1..27: mol_type = other RNA
agctccgacaacatcatggtgcagtac

SEQ ID NO: 38592 - RNA, 30 nt, synthetic construct
  misc_feature 1..30: note = Oxysterol-binding protein-related protein 8 (244-253)
  source 1..30: mol_type = other RNA
agctccgacagcacccacgtgaccttctac

SEQ ID NO: 38593 - RNA, 33 nt, synthetic construct
  misc_feature 1..33: note = RNA-binding protein with multiple splicing 2 (84-94)
  source 1..33: mol_type = other RNA
agctccgacaccacccagcagggctggaagtac

SEQ ID NO: 38594 - RNA, 27 nt, synthetic construct
  misc_feature 1..27: note = Discoidin domain-containing receptor 2 (676-684)
  source 1..27: mol_type = other RNA
agctccgacgtgcgcaccgtcagctac

SEQ ID NO: 38595 - RNA, 42 nt, synthetic construct
  misc_feature 1..42: note = RNA-binding protein EWS (265-278)
  source 1..42: mol_type = other RNA
agctccttccgccaggaccaccccagctccatgggcgtgtac

SEQ ID NO: 38596 - RNA, 27 nt, synthetic construct
  misc_feature 1..27: note = Bromodomain and WD repeat-containing protein 1 (343-351)
  source 1..27: mol_type = other RNA
agcaccgaccacgtgatccgcatgtac

SEQ ID NO: 38597 - RNA, 30 nt, synthetic construct
  misc_feature 1..30: note = Integrin alpha-5 (179-188)
  source 1..30: mol_type = other RNA
agcaccgacaacttcacccgcatcctggag

SEQ ID NO: 38598 - RNA, 27 nt, synthetic construct
  misc_feature 1..27: note = Actin filament-associated protein 1 (443-451)
  source 1..27: mol_type = other RNA
agcaccgaccccgaggccctgcactac

SEQ ID NO: 38599 - RNA, 33 nt, synthetic construct
  misc_feature 1..33: note = Eukaryotic translation initiation factor 2A (26-36)
  source 1..33: mol_type = other RNA
agcaccgacgtggacaagaccggcgcctcctac

SEQ ID NO: 38600 - RNA, 30 nt, synthetic construct
  misc_feature 1..30: note = NADH dehydrogenase (ubiquinone) iron-sulfur protein 8, mitochondrial (174-183)
  source 1..30: mol_type = other RNA
agcaccgagacccacgaggagctgctctac

SEQ ID NO: 38601 - RNA, 39 nt, synthetic construct
  misc_feature 1..39: note = Src substrate cortactin (285-297)
  source 1..39: mol_type = other RNA
agcaccttcgaggacgtgacccaggtctccagcgcctac

SEQ ID NO: 38602 - RNA, 30 nt, synthetic construct
  misc_feature 1..30: note = Protein Smaug homolog 1 (46-55)
  source 1..30: mol_type = other RNA
agcgtggactacggccagacccactactac

SEQ ID NO: 38603 - RNA, 27 nt, synthetic construct
  misc_feature 1..27: note = Eukaryotic peptide chain release factor subunit 1 (70-78)
  source 1..27: mol_type = other RNA
agcgtgctgggcgccatcacctccgtc

SEQ ID NO: 38604 - RNA, 30 nt, synthetic construct
  misc_feature 1..30: note = Elongation factor 2 (500-509)
  source 1..30: mol_type = other RNA
agcgtgtcccccgtcgtgcgcgtggccgtc

SEQ ID NO: 38605 - RNA, 27 nt, synthetic construct
  misc_feature 1..27: note = Serum paraoxonase/arylesterase 2 (334-342)
  source 1..27: mol_type = other RNA
agcgtgtacgacggcaagctgctcatc

SEQ ID NO: 38606 - RNA, 33 nt, synthetic construct
  misc_feature 1..33: note = Renin receptor (47-57)
  source 1..33: mol_type = other RNA
agctggcccggcctggccgtggggaacctcttc

SEQ ID NO: 38607 - RNA, 27 nt, synthetic construct
  misc_feature 1..27: note = Short transient receptor potential channel 4-associated protein (540-548)
  source 1..27: mol_type = other RNA
agctacgccgaccagatgttcctgctc

SEQ ID NO: 38608 - RNA, 27 nt, synthetic construct
  misc_feature 1..27: note = Ankyrin repeat and BTB/POZ domain-containing protein 2 (419-427)
  source 1..27: mol_type = other RNA
agctacgccgagacccccctgcagctc

SEQ ID NO: 38609 - RNA, 27 nt, synthetic construct
  misc_feature 1..27: note = Zinc-binding alcohol dehydrogenase domain-containing protein 2 (16-24)
  source 1..27: mol_type = other RNA
agctacgcccgccacttcctggacttc

SEQ ID NO: 38610 - RNA, 30 nt, synthetic construct
  misc_feature 1..30: note = Spatacsin (908-917)
  source 1..30: mol_type = other RNA
agctacgcctccctgcagcagaacaagtgg

SEQ ID NO: 38611 - RNA, 30 nt, synthetic construct
  misc_feature 1..30: note = Tubulin polyglutamylase TTLL4 (773-782)
  source 1..30: mol_type = other RNA
agctacgaccccctgcgcatctacctcttc

SEQ ID NO: 38612 - RNA, 27 nt, synthetic construct
  misc_feature 1..27: note = Kinectin (1090-1098)
  source 1..27: mol_type = other RNA
agctacggcgagtggctgcacgggttc

SEQ ID NO: 38613 - RNA, 27 nt, synthetic construct
  misc_feature 1..27: note = Serine/threonine-protein kinase 3 (65-73)
  source 1..27: mol_type = other RNA
agctacggctccgtgttcaaggccatc

SEQ ID NO: 38614 - RNA, 27 nt, synthetic construct
  misc_feature 1..27: note = Ubiquitin-like modifier-activating enzyme 1 (921-929)
  source 1..27: mol_type = other RNA
agctacaagaacggcttcctgaacctc

SEQ ID NO: 38615 - RNA, 27 nt, synthetic construct
  misc_feature 1..27: note = Unconventional myosin-Va (78-86)
  source 1..27: mol_type = other RNA
agctacctgcacgagcccgccgtgctc

SEQ ID NO: 38616 - RNA, 27 nt, synthetic construct
  misc_feature 1..27: note = Actin-related protein 10 (66-74)
  source 1..27: mol_type = other RNA
agctacctgaaggagttcatccacatc

SEQ ID NO: 38617 - RNA, 27 nt, synthetic construct
  misc_feature 1..27: note = Kelch-like protein 15 (402-410)
  source 1..27: mol_type = other RNA
agctacaacggcaagctgtacgtgttc

SEQ ID NO: 38618 - RNA, 33 nt, synthetic construct
  misc_feature 1..33: note = Coatomer subunit alpha (369-379)
  source 1..33: mol_type = other RNA
agctacaaccccgccgagaacgccgtgctgctc

SEQ ID NO: 38619 - RNA, 27 nt, synthetic construct
  misc_feature 1..27: note = Protein artemis (321-329)
  source 1..27: mol_type = other RNA
agctactccgagatcaaggacttcctg

SEQ ID NO: 38620 - RNA, 27 nt, synthetic construct
  misc_feature 1..27: note = Zinc finger protein 24 (343-351)
  source 1..27: mol_type = other RNA
agctactcccagagctccaacctgttc

SEQ ID NO: 38621 - RNA, 27 nt, synthetic construct
  misc_feature 1..27: note = Melanoma-associated antigen 3 (282-290)
  source 1..27: mol_type = other RNA
agctacgtgaaggtcctgcaccacatg

SEQ ID NO: 38622 - RNA, 27 nt, synthetic construct
  misc_feature 1..27: note = Basement membrane-specific heparan sulfate proteoglycan core protein (176-184)
  source 1..27: mol_type = other RNA
agctacgtgacctccccccagggcttc

SEQ ID NO: 38623 - RNA, 27 nt, synthetic construct
  misc_feature 1..27: note = Cell differentiation protein RCD1 homolog (6-14)
  source 1..27: mol_type = other RNA
accgccgcccccgtgccgaccacgctg

SEQ ID NO: 38624 - RNA, 27 nt, synthetic construct
  misc_feature 1..27: note = Protein PRRC2C (2488-2496)
  source 1..27: mol_type = other RNA
accgccatccacaacttccccaccgtg

SEQ ID NO: 38625 - RNA, 27 nt, synthetic construct
  misc_feature 1..27: note = Lipoma-preferred partner (284-292)
  source 1..27: mol_type = other RNA
accgccatggaccaggtgttccacgtc

SEQ ID NO: 38626 - RNA, 27 nt, synthetic construct
  misc_feature 1..27: note = Integrator complex subunit 1 (301-309)
  source 1..27: mol_type = other RNA
accgccaccatgcacatcctggtggtc

SEQ ID NO: 38627 - RNA, 27 nt, synthetic construct
  misc_feature 1..27: note = Histone-lysine N-methyltransferase 2C (316-324)
  source 1..27: mol_type = other RNA
accttccaggacttcagccacatcttc

SEQ ID NO: 38628 - RNA, 27 nt, synthetic construct
  misc_feature 1..27: note = Probable ATP-dependent RNA helicase DDX27 (430-438)
  source 1..27: mol_type = other RNA
accttcaccgaccacgtgatgctgttc

SEQ ID NO: 38629 - RNA, 27 nt, synthetic construct
  misc_feature 1..27: note = Zinc finger protein RFP (458-466)
  source 1..27: mol_type = other RNA
accttcaccttcagccacgccacgttc

SEQ ID NO: 38630 - RNA, 27 nt, synthetic construct
  misc_feature 1..27: note = WD repeat-containing protein 61 (32-40)
  source 1..27: mol_type = other RNA
acccacgtgggcaaggtcaacatcttc

SEQ ID NO: 38631 - RNA, 27 nt, synthetic construct
  misc_feature 1..27: note = Very-long-chain enoyl-CoA reductase (28-36)
  source 1..27: mol_type = other RNA
accatcgccgagatcaagaacctgttc

SEQ ID NO: 38632 - RNA, 27 nt, synthetic construct
  misc_feature 1..27: note = Heat shock-related 70 kDa protein 2 (214-222)
  source 1..27: mol_type = other RNA
accatcgaggacggcatcttcgaggtg

SEQ ID NO: 38633 - RNA, 27 nt, synthetic construct
  misc_feature 1..27: note = 40S ribosomal protein S4, X isoform (127-135)
  source 1..27: mol_type = other RNA
accatccgctaccccgacccgctgatc

SEQ ID NO: 38634 - RNA, 27 nt, synthetic construct
  misc_feature 1..27: note = Protein FAM73A (584-592)
  source 1..27: mol_type = other RNA
accctggccgaggacctcatgcagctg

SEQ ID NO: 38635 - RNA, 33 nt, synthetic construct
  misc_feature 1..33: note = Calmodulin-regulated spectrin-associated protein 1 (102-112)
  source 1..33: mol_type = other RNA
accctggccgagctccagcccccggtgcagctg

SEQ ID NO: 38636 - RNA, 27 nt, synthetic construct
  misc_feature 1..27: note = Importin-4 (587-595)
  source 1..27: mol_type = other RNA
accctggccgagaccatccagggcctc

SEQ ID NO: 38637 - RNA, 27 nt, synthetic construct
  misc_feature 1..27: note = E3 ubiquitin-protein ligase UBR4 (345-353)
  source 1..27: mol_type = other RNA
accctggacgccgccatcagcaaggtg

SEQ ID NO: 38638 - RNA, 27 nt, synthetic construct
  misc_feature 1..27: note = Molybdenum cofactor sulfurase (474-482)
  source 1..27: mol_type = other RNA
accctggacgacgtgcaggccttcctc

SEQ ID NO: 38639 - RNA, 27 nt, synthetic construct
  misc_feature 1..27: note = Solute carrier family 23 member 2 (493-501)
  source 1..27: mol_type = other RNA
accctgttcggcatgatcaccgccgtg

SEQ ID NO: 38640 - RNA, 33 nt, synthetic construct
  misc_feature 1..33: note = Putative elongation factor 1-alpha-like 3 (142-152)
  source 1..33: mol_type = other RNA
accctgggcgtgaagcagctcatcgtcggggtg

SEQ ID NO: 38641 - RNA, 27 nt, synthetic construct
  misc_feature 1..27: note = Dynactin subunit 1 (646-654)
  source 1..27: mol_type = other RNA
accctgcaccgctacgagcacgccctc

SEQ ID NO: 38642 - RNA, 30 nt, synthetic construct
  misc_feature 1..30: note = 60S acidic ribosomal protein P0 (50-59)
  source 1..30: mol_type = other RNA
accctgcacagccgcttcctcgagggcgtg

SEQ ID NO: 38643 - RNA, 27 nt, synthetic construct
  misc_feature 1..27: note = Peptidyl-prolyl cis-trans isomerase FKBP9 (457-465)
  source 1..27: mol_type = other RNA
accctgctcgacagcacctggaacctg

SEQ ID NO: 38644 - RNA, 30 nt, synthetic construct
  misc_feature 1..30: note = Midasin (3030-3039)
  source 1..30: mol_type = other RNA
accctgctcgaggtgggccagatcgccgtc

SEQ ID NO: 38645 - RNA, 30 nt, synthetic construct
  misc_feature 1..30: note = Puromycin-sensitive aminopeptidase (786-795)
  source 1..30: mol_type = other RNA
accctgctccccgacctgatccagaaggtg

SEQ ID NO: 38646 - RNA, 33 nt, synthetic construct
  misc_feature 1..33: note = 116 kDa U5 small nuclear ribonucleoprotein component (103-113)
  source 1..33: mol_type = other RNA
accctgatggagcagaccctccccgtgacggtc

SEQ ID NO: 38647 - RNA, 27 nt, synthetic construct
  misc_feature 1..27: note = SH3 domain-binding glutamic acid-rich-like protein 3 (218-226)
  source 1..27: mol_type = other RNA
accctgcaggagttcctcaagctggcc

SEQ ID NO: 38648 - RNA, 27 nt, synthetic construct
  misc_feature 1..27: note = Zinc finger BED domain-containing protein 5 (529-537)
  source 1..27: mol_type = other RNA
accctgagcgacttcctcaccgagatc

SEQ ID NO: 38649 - RNA, 27 nt, synthetic construct
  misc_feature 1..27: note = Elongation protein 4 homolog (S. cerevisiae), isoform CRA_b (319-327)
  source 1..27: mol_type = other RNA
accctgagcgacgtggtcgtgggcctc

SEQ ID NO: 38650 - RNA, 27 nt, synthetic construct
  misc_feature 1..27: note = Protein MON2 homolog (629-637)
  source 1..27: mol_type = other RNA
accctgagcaacaagtcctacagcgtg

SEQ ID NO: 38651 - RNA, 39 nt, synthetic construct
  misc_feature 1..39: note = Malate dehydrogenase, mitochondrial (54-66)
  source 1..39: mol_type = other RNA
accctgtacgacatcgcccacacccccggcgtggccgcg

SEQ ID NO: 38652 - RNA, 27 nt, synthetic construct
  misc_feature 1..27: note = Cyclic AMP-dependent transcription factor ATF-6 beta (30-38)
  source 1..27: mol_type = other RNA
accctgtacagcggcctcgacgaggtg

SEQ ID NO: 38653 - RNA, 30 nt, synthetic construct
  misc_feature 1..30: note = NAD(P)H dehydrogenase (quinone) 1 (124-133)
  source 1..30: mol_type = other RNA
acccccgccgacgcccgcatccagatcctg

SEQ ID NO: 38654 - RNA, 27 nt, synthetic construct
  misc_feature 1..27: note = Dual specificity protein phosphatase 4 (356-364)
  source 1..27: mol_type = other RNA
acccccgccaccccgacgagccagttc

SEQ ID NO: 38655 - RNA, 27 nt, synthetic construct
  misc_feature 1..27: note = Cytoplasmic dynein 1 heavy chain 1 (264-272)
  source 1..27: mol_type = other RNA
accccccgcatccagggcctgaccgtg

SEQ ID NO: 38656 - RNA, 27 nt, synthetic construct
  misc_feature 1..27: note = Exostosin-2 (555-563)
  source 1..27: mol_type = other RNA
accagcgacgagctgcagttcggctac

SEQ ID NO: 38657 - RNA, 30 nt, synthetic construct
  misc_feature 1..30: note = Anoctamin-1 (662-671)
  source 1..30: mol_type = other RNA
accagcgacttcatcccccgcctggtgtac

SEQ ID NO: 38658 - RNA, 33 nt, synthetic construct
  misc_feature 1..33: note = Actin-binding LIM protein 3 (350-360)
  source 1..33: mol_type = other RNA
accagcgaggacatctcccagaccagcaagtac

SEQ ID NO: 38659 - RNA, 33 nt, synthetic construct
  misc_feature 1..33: note = Serine/threonine-protein kinase MRCK alpha (699-709)
  source 1..33: mol_type = other RNA
accagcgagctggacaagctcaccacgctgtac

SEQ ID NO: 38660 - RNA, 30 nt, synthetic construct
  misc_feature 1..30: note = Catenin beta-1 (297-306)
  source 1..30: mol_type = other RNA
accaccgactgcctgcagatcctcgcctac

SEQ ID NO: 38661 - RNA, 30 nt, synthetic construct
  misc_feature 1..30: note = Junction plakoglobin (287-296)
  source 1..30: mol_type = other RNA
accaccgactgcctgcagctcctggcctac

SEQ ID NO: 38662 - RNA, 27 nt, synthetic construct
  misc_feature 1..27: note = ATP-dependent 6-phosphofructokinase, muscle type (251-259)
  source 1..27: mol_type = other RNA
accaccgacttcatcttcaacctgtac

SEQ ID NO: 38663 - RNA, 27 nt, synthetic construct
  misc_feature 1..27: note = Serine/threonine-protein kinase N2 (73-81)
  source 1..27: mol_type = other RNA
accaccgacaagaagagcctggcctac

SEQ ID NO: 38664 - RNA, 27 nt, synthetic construct
  misc_feature 1..27: note = Heterogeneous nuclear ribonucleoprotein F (256-264)
  source 1..27: mol_type = other RNA
accaccgacctgttcggccgcgacctc

SEQ ID NO: 38665 - RNA, 30 nt, synthetic construct
  misc_feature 1..30: note = Heterogeneous nuclear ribonucleoprotein F (256-265)
  source 1..30: mol_type = other RNA
accaccgacctgttcggccgcgacctcagc

SEQ ID NO: 38666 - RNA, 30 nt, synthetic construct
  misc_feature 1..30: note = Cofilin-1 (63-72)
  source 1..30: mol_type = other RNA
accgtggacgacccctacgccaccttcgtc

SEQ ID NO: 38667 - RNA, 27 nt, synthetic construct
  misc_feature 1..27: note = Heat shock cognate 71 kDa protein (138-146)
  source 1..27: mol_type = other RNA
accgtgaccaacgccgtcgtgacggtg

SEQ ID NO: 38668 - RNA, 27 nt, synthetic construct
  misc_feature 1..27: note = Kelch-like protein 9 (442-450)
  source 1..27: mol_type = other RNA
accgtgtacggcgggctgatgtacatc

SEQ ID NO: 38669 - RNA, 27 nt, synthetic construct
  misc_feature 1..27: note = Kelch-like protein 13 (468-476)
  source 1..27: mol_type = other RNA
accgtgtacggcggggtcatgtacatc

SEQ ID NO: 38670 - RNA, 30 nt, synthetic construct
  misc_feature 1..30: note = 60S ribosomal protein L13 (24-33)
  source 1..30: mol_type = other RNA
acctggttcaaccagcccgcccgcaagatc

SEQ ID NO: 38671 - RNA, 33 nt, synthetic construct
  misc_feature 1..33: note = WD repeat-containing protein 35 (163-173)
  source 1..33: mol_type = other RNA
acctggagcgccgactccaaggtgctgctcttc

SEQ ID NO: 38672 - RNA, 36 nt, synthetic construct
  misc_feature 1..36: note = 26S protease regulatory subunit 4 (183-194)
  source 1..36: mol_type = other RNA
acctacgccgacatcggcgggctggacaaccagatc

SEQ ID NO: 38673 - RNA, 27 nt, synthetic construct
  misc_feature 1..27: note = DNA replication licensing factor MCM3 (90-98)
  source 1..27: mol_type = other RNA
acctacgccaagcagtacgaggagttc

SEQ ID NO: 38674 - RNA, 27 nt, synthetic construct
  misc_feature 1..27: note = AT-rich interactive domain-containing protein 2 (938-946)
  source 1..27: mol_type = other RNA
acctacgcccccgccatccaccagatc

SEQ ID NO: 38675 - RNA, 27 nt, synthetic construct
  misc_feature 1..27: note = Ataxin-2-like protein (167-175)
  source 1..27: mol_type = other RNA
acctacgagggcatcttcaagaccctg

SEQ ID NO: 38676 - RNA, 27 nt, synthetic construct
  misc_feature 1..27: note = Dedicator of cytokinesis protein 7 (588-596)
  source 1..27: mol_type = other RNA
acctacttcgacaagaactacaacctg

SEQ ID NO: 38677 - RNA, 27 nt, synthetic construct
  misc_feature 1..27: note = Tubulin beta-6 chain (156-164)
  source 1..27: mol_type = other RNA
acctacggcgacctgaaccacctcgtg

SEQ ID NO: 38678 - RNA, 27 nt, synthetic construct
  misc_feature 1..27: note = Cytoplasmic aconitate hydratase (542-550)
  source 1..27: mol_type = other RNA
acctacatcaagagccccccgttcttc

SEQ ID NO: 38679 - RNA, 27 nt, synthetic construct
  misc_feature 1..27: note = Fanconi anemia group M protein (303-311)
  source 1..27: mol_type = other RNA
acctacatccagatcctggagagcttc

SEQ ID NO: 38680 - RNA, 27 nt, synthetic construct
  misc_feature 1..27: note = Protein FAM178B (655-663)
  source 1..27: mol_type = other RNA
acctacatccgctggcaggagctgctc

SEQ ID NO: 38681 - RNA, 27 nt, synthetic construct
  misc_feature 1..27: note = DNA-dependent protein kinase catalytic subunit (523-531)
  source 1..27: mol_type = other RNA
acctacaaggactacgtggacctgttc

SEQ ID NO: 38682 - RNA, 27 nt, synthetic construct
  misc_feature 1..27: note = ETS translocation variant 3 (134-142)
  source 1..27: mol_type = other RNA
acctacaagttcaacttcaacaagctg

SEQ ID NO: 38683 - RNA, 33 nt, synthetic construct
  misc_feature 1..33: note = Leucine-rich repeat-containing protein 58 (257-267)
  source 1..33: mol_type = other RNA
acctacctgccccgcgagatcctcaacctgatc

SEQ ID NO: 38684 - RNA, 30 nt, synthetic construct
  misc_feature 1..30: note = Eukaryotic translation initiation factor 3 subunit I (47-56)
  source 1..30: mol_type = other RNA
acctacatgggccacaccggggccgtgtgg

SEQ ID NO: 38685 - RNA, 27 nt, synthetic construct
  misc_feature 1..27: note = F-box only protein 38 (157-165)
  source 1..27: mol_type = other RNA
acctacatgccccacgtgcacatcctg

SEQ ID NO: 38686 - RNA, 30 nt, synthetic construct
  misc_feature 1..30: note = Protein polybromo-1 (261-270)
  source 1..30: mol_type = other RNA
acctacaacgagcccggcagccaggtgttc

SEQ ID NO: 38687 - RNA, 30 nt, synthetic construct
  misc_feature 1..30: note = Cell division cycle and apoptosis regulator protein 1 (191-200)
  source 1..30: mol_type = other RNA
acctacaaccccaacatgccgttcaagtgg

SEQ ID NO: 38688 - RNA, 27 nt, synthetic construct
  misc_feature 1..27: note = Cell cycle control protein 50A (296-304)
  source 1..27: mol_type = other RNA
acctacaactaccccgtgcactacttc

SEQ ID NO: 38689 - RNA, 27 nt, synthetic construct
  misc_feature 1..27: note = Aryl hydrocarbon receptor (47-55)
  source 1..27: mol_type = other RNA
acctaccccgccgagctgaacaacatc

SEQ ID NO: 38690 - RNA, 27 nt, synthetic construct
  misc_feature 1..27: note = Elongation factor 1-gamma (5-13)
  source 1..27: mol_type = other RNA
acctaccccgagaactggcgcgccttc

SEQ ID NO: 38691 - RNA, 27 nt, synthetic construct
  misc_feature 1..27: note = Pre-mRNA-processing-splicing factor 8 (224-232)
  source 1..27: mol_type = other RNA
acctaccagcgctggcagttcaccctg

SEQ ID NO: 38692 - RNA, 27 nt, synthetic construct
  misc_feature 1..27: note = Helicase SKI2W (746-754)
  source 1..27: mol_type = other RNA
acctacaccatgatcctgaacctcctg

SEQ ID NO: 38693 - RNA, 27 nt, synthetic construct
  misc_feature 1..27: note = U5 small nuclear ribonucleoprotein 200 kDa helicase (604-612)
  source 1..27: mol_type = other RNA
acctacacccagctggtgcgcctcatc

SEQ ID NO: 38694 - RNA, 27 nt, synthetic construct
  misc_feature 1..27: note = Catenin beta-1 (330-338)
  source 1..27: mol_type = other RNA
acctacacctacgagaagctgctctgg

SEQ ID NO: 38695 - RNA, 27 nt, synthetic construct
  misc_feature 1..27: note = Alanine-tRNA ligase, cytoplasmic (24-32)
  source 1..27: mol_type = other RNA
acctacgtgcacagctccgccaccatc

SEQ ID NO: 38696 - RNA, 27 nt, synthetic construct
  misc_feature 1..27: note = E3 ubiquitin-protein ligase RNF213 (931-939)
  source 1..27: mol_type = other RNA
acctacgtgaaggagatcgaggtctgg

SEQ ID NO: 38697 - RNA, 27 nt, synthetic construct
  misc_feature 1..27: note = tRNA wybutosine-synthesizing protein 4 (507-515)
  source 1..27: mol_type = other RNA
acctacgtgccctggccgctgatgctc

SEQ ID NO: 38698 - RNA, 27 nt, synthetic construct
  misc_feature 1..27: note = Cholinephosphotransferase 1 (178-186)
  source 1..27: mol_type = other RNA
acctacgtgagcggcatgctgcgcttc

SEQ ID NO: 38699 - RNA, 27 nt, synthetic construct
  misc_feature 1..27: note = Kinectin (1222-1230)
  source 1..27: mol_type = other RNA
acctacgtgaccgaggtccgcgagctg

SEQ ID NO: 38700 - RNA, 27 nt, synthetic construct
  misc_feature 1..27: note = Renin receptor (97-105)
  source 1..27: mol_type = other RNA
gtggccaacagcatccactccctgttc

SEQ ID NO: 38701 - RNA, 27 nt, synthetic construct
  misc_feature 1..27: note = Elongation factor 1-alpha 1 (433-441)
  source 1..27: mol_type = other RNA
gtggccgtcggcgtgatcaaggccgtg

SEQ ID NO: 38702 - RNA, 27 nt, synthetic construct
  misc_feature 1..27: note = Glycogen synthase kinase-3 alpha (117-125)
  source 1..27: mol_type = other RNA
gtggcctacaccgacatcaaggtcatc

SEQ ID NO: 38703 - RNA, 27 nt, synthetic construct
  misc_feature 1..27: note = Influenza virus NS1A-binding protein (484-492)
  source 1..27: mol_type = other RNA
gtgttcgaccccgtcaccaagctgtgg

SEQ ID NO: 38704 - RNA, 39 nt, synthetic construct
  misc_feature 1..39: note = Cathepsin D (178-190)
  source 1..39: mol_type = other RNA
gtgttcggcgaggccaccaagcagcccgggatcaccttc

SEQ ID NO: 38705 - RNA, 30 nt, synthetic construct
  misc_feature 1..30: note = Pre-mRNA-processing factor 19 (271-280)
  source 1..30: mol_type = other RNA
gtgttccaccccagccaggacctggtcttc

SEQ ID NO: 38706 - RNA, 27 nt, synthetic construct
  misc_feature 1..27: note = Heterogeneous nuclear ribonucleoprotein C-like 1 (18-26)
  source 1..27: mol_type = other RNA
gtgttcatcggcaacctgaacaccctc

SEQ ID NO: 38707 - RNA, 33 nt, synthetic construct
  misc_feature 1..33: note = Tectonic-3 (150-160)
  source 1..33: mol_type = other RNA
gtgttcatggacagcaacggcatccgccagttc

SEQ ID NO: 38708 - RNA, 30 nt, synthetic construct
  misc_feature 1..30: note = Serine/threonine-protein kinase N2 (753-762)
  source 1..30: mol_type = other RNA
gtgttcagcgagccccgcgccgtcttctac

SEQ ID NO: 38709 - RNA, 27 nt, synthetic construct
  misc_feature 1..27: note = Paired amphipathic helix protein Sin3b (212-220)
  source 1..27: mol_type = other RNA
gtgttcaccgaggtcgccaacctgttc

SEQ ID NO: 38710 - RNA, 33 nt, synthetic construct
  misc_feature 1..33: note = Cytospin-A (478-488)
  source 1..33: mol_type = other RNA
gtgatcgacgaggacgtcaagagcggccgctac

SEQ ID NO: 38711 - RNA, 27 nt, synthetic construct
  misc_feature 1..27: note = Bifunctional glutamate/proline-tRNA ligase (506-514)
  source 1..27: mol_type = other RNA
gtgatcgaccccgtcgccccgcgctac

SEQ ID NO: 38712 - RNA, 30 nt, synthetic construct
  misc_feature 1..30: note = Zinc finger protein 638 (208-217)
  source 1..30: mol_type = other RNA
gtgatcgactacggccacgccagcaagtac

SEQ ID NO: 38713 - RNA, 27 nt, synthetic construct
  misc_feature 1..27: note = DNA replication licensing factor MCM4 (151-159)
  source 1..27: mol_type = other RNA
gtgatctggggcaccgacgtcaacgtg

SEQ ID NO: 38714 - RNA, 27 nt, synthetic construct
  misc_feature 1..27: note = Eukaryotic initiation factor 4A-II (181-189)
  source 1..27: mol_type = other RNA
gtgctggacgaggccgacgagatgctc

SEQ ID NO: 38715 - RNA, 27 nt, synthetic construct
  misc_feature 1..27: note = Protein VPRBP (540-548)
  source 1..27: mol_type = other RNA
gtgctggacgaggccggcagcaccgtc

SEQ ID NO: 38716 - RNA, 27 nt, synthetic construct
  misc_feature 1..27: note = Protein ELYS (1430-1438)
  source 1..27: mol_type = other RNA
gtgctggacgagggcctcaccagcgtc

SEQ ID NO: 38717 - RNA, 33 nt, synthetic construct
  misc_feature 1..33: note = WD repeat-containing protein 48 (472-482)
  source 1..33: mol_type = other RNA
gtgctggaccccaacatggacctccgcaccgtc

SEQ ID NO: 38718 - RNA, 33 nt, synthetic construct
  misc_feature 1..33: note = Acylamino-acid-releasing enzyme (226-236)
  source 1..33: mol_type = other RNA
gtgctggacgtcgagagcggcaacatctccgtg

SEQ ID NO: 38719 - RNA, 30 nt, synthetic construct
  misc_feature 1..30: note = Serine/threonine-protein kinase Sgk1 (270-279)
  source 1..30: mol_type = other RNA
gtgctggactacatcaacggcggggagctc

SEQ ID NO: 38720 - RNA, 33 nt, synthetic construct
  misc_feature 1..33: note = Serine/threonine-protein kinase Sgk1 (270-280)
  source 1..33: mol_type = other RNA
gtgctggactacatcaacggcggggagctcttc

SEQ ID NO: 38721 - RNA, 36 nt, synthetic construct
  misc_feature 1..36: note = Serine/threonine-protein kinase Sgk1 (270-281)
  source 1..36: mol_type = other RNA
gtgctggactacatcaacggcggggagctcttctac

SEQ ID NO: 38722 - RNA, 27 nt, synthetic construct
  misc_feature 1..27: note = RNA-binding protein 34 (333-341)
  source 1..27: mol_type = other RNA
gtgctgttcgagaacaccgacagcgtc

SEQ ID NO: 38723 - RNA, 30 nt, synthetic construct
  misc_feature 1..30: note = Major prion protein (233-242)
  source 1..30: mol_type = other RNA
gtgctgttcagctcccccccggtcatcctc

SEQ ID NO: 38724 - RNA, 27 nt, synthetic construct
  misc_feature 1..27: note = Protein transport protein Sec16A (1388-1396)
  source 1..27: mol_type = other RNA
gtgctgatcggcagcaaccactccctc

SEQ ID NO: 38725 - RNA, 27 nt, synthetic construct
  misc_feature 1..27: note = ATP-binding cassette sub-family D member 3 (541-549)
  source 1..27: mol_type = other RNA
gtgctgaaggagtacctcgacaacgtc

SEQ ID NO: 38726 - RNA, 30 nt, synthetic construct
  misc_feature 1..30: note = Phosphotriesterase-related protein (148-157)
  source 1..30: mol_type = other RNA
gtgctgatgaacgagatcctccacggcgcc

SEQ ID NO: 38727 - RNA, 33 nt, synthetic construct
  misc_feature 1..33: note = Eukaryotic translation initiation factor 4 gamma 1 (187-197)
  source 1..33: mol_type = other RNA
gtgctgatgaaccagcccccgcagatcgccccc

SEQ ID NO: 38728 - RNA, 27 nt, synthetic construct
  misc_feature 1..27: note = GDP-L-fucose synthase (187-195)
  source 1..27: mol_type = other RNA
gtgctgcccggcctcatccacaaggtc

SEQ ID NO: 38729 - RNA, 27 nt, synthetic construct
  misc_feature 1..27: note = CCR4-NOT transcription complex subunit 4 (471-479)
  source 1..27: mol_type = other RNA
gtgctgccccagcgcttcccgcagttc

SEQ ID NO: 38730 - RNA, 27 nt, synthetic construct
  misc_feature 1..27: note = Mini-chromosome maintenance complex-binding protein (204-212)
  source 1..27: mol_type = other RNA
gtgctgcccagcgtcctcaacaagttc

SEQ ID NO: 38731 - RNA, 30 nt, synthetic construct
  misc_feature 1..30: note = Fatty acid synthase (1496-1505)
  source 1..30: mol_type = other RNA
gtgctgcagggcgacctcgtcatgaacgtg

SEQ ID NO: 38732 - RNA, 27 nt, synthetic construct
  misc_feature 1..27: note = Coatomer subunit alpha (130-138)
  source 1..27: mol_type = other RNA
gtgctgaccggccacaaccactacgtc

SEQ ID NO: 38733 - RNA, 27 nt, synthetic construct
  misc_feature 1..27: note = Protein O-GlcNAcase (247-255)
  source 1..27: mol_type = other RNA
gtgctgtggaccggccccaaggtcgtg

SEQ ID NO: 38734 - RNA, 33 nt, synthetic construct
  misc_feature 1..33: note = Integral membrane protein 2C (51-61)
  source 1..33: mol_type = other RNA
gtgctgtacgaggacagcctctccagccaggtc

SEQ ID NO: 38735 - RNA, 27 nt, synthetic construct
  misc_feature 1..27: note = Deoxynucleotidyltransferase terminal-interacting protein 2 (359-367)
  source 1..27: mol_type = other RNA
gtgatgaagagcctgacccagaccttc

SEQ ID NO: 38736 - RNA, 30 nt, synthetic construct
  misc_feature 1..30: note = Protein C-ets-2 (78-87)
  source 1..30: mol_type = other RNA
gtgatgagccaggccctgaaggccaccttc

SEQ ID NO: 38737 - RNA, 24 nt, synthetic construct
  misc_feature 1..24: note = ER membrane protein complex subunit 1 (192-199)
  source 1..24: mol_type = other RNA
gtgcccttcagccacgtcaacatc

SEQ ID NO: 38738 - RNA, 27 nt, synthetic construct
  misc_feature 1..27: note = ER membrane protein complex subunit 1 (192-200)
  source 1..27: mol_type = other RNA
gtgcccttcagccacgtcaacatcgtg

SEQ ID NO: 38739 - RNA, 24 nt, synthetic construct
  misc_feature 1..24: note = Interferon-induced 35 kDa protein (52-59)
  source 1..24: mol_type = other RNA
gtgcccttcagcgtcccgaagatc

SEQ ID NO: 38740 - RNA, 27 nt, synthetic construct
  misc_feature 1..27: note = Protein transport protein Sec16A (69-77)
  source 1..27: mol_type = other RNA
gtgccccacttcccgacccccagcatc

SEQ ID NO: 38741 - RNA, 30 nt, synthetic construct
  misc_feature 1..30: note = Filamin-A (436-445)
  source 1..30: mol_type = other RNA
gtgcccatcccgcgcagcccctacaccgtc

SEQ ID NO: 38742 - RNA, 27 nt, synthetic construct
  misc_feature 1..27: note = Tubulin alpha-1C chain (394-402)
  source 1..27: mol_type = other RNA
gtgcccaaggacgtcaacgccgccatc

SEQ ID NO: 38743 - RNA, 27 nt, synthetic construct
  misc_feature 1..27: note = Helicase with zinc finger domain 2 (656-664)
  source 1..27: mol_type = other RNA
gtgcccgtcggcttcttcagccacatc

SEQ ID NO: 38744 - RNA, 27 nt, synthetic construct
  misc_feature 1..27: note = RNA-binding protein NOB1 (300-308)
  source 1..27: mol_type = other RNA
gtgagcgacgacggcaccctgcacatg

SEQ ID NO: 38745 - RNA, 33 nt, synthetic construct
  misc_feature 1..33: note = rRNA 2'-O-methyltransferase fibrillarin (174-184)
  source 1..33: mol_type = other RNA
gtgagcgacatcgtcggccccgacgggctggtg

SEQ ID NO: 38746 - RNA, 30 nt, synthetic construct
  misc_feature 1..30: note = Glyoxalase domain-containing protein 4 (145-154)
  source 1..30: mol_type = other RNA
gtgagcgacctgcagaagtccctcaactac

SEQ ID NO: 38747 - RNA, 27 nt, synthetic construct
  misc_feature 1..27: note = Tripeptidyl-peptidase 1 (68-76)
  source 1..27: mol_type = other RNA
gtgagcgacccctccagcccgcagtac

SEQ ID NO: 38748 - RNA, 27 nt, synthetic construct
  misc_feature 1..27: note = DENN domain-containing protein 1B (677-685)
  source 1..27: mol_type = other RNA
gtgagcgaccccacctccggcctggac

SEQ ID NO: 38749 - RNA, 30 nt, synthetic construct
  misc_feature 1..30: note = DENN domain-containing protein 1B (677-686)
  source 1..30: mol_type = other RNA
gtgagcgaccccacctccggcctggacttc

SEQ ID NO: 38750 - RNA, 33 nt, synthetic construct
  misc_feature 1..33: note = Liprin-beta-1 (207-217)
  source 1..33: mol_type = other RNA
gtgagcgagatggactccgagcgcctgcagtac

SEQ ID NO: 38751 - RNA, 27 nt, synthetic construct
  misc_feature 1..27: note = DnaJ homolog subfamily B member 12 (287-295)
  source 1..27: mol_type = other RNA
gtgaccgaccacctgggcgtcgtgtac

SEQ ID NO: 38752 - RNA, 27 nt, synthetic construct
  misc_feature 1..27: note = Selenocysteine insertion sequence-binding protein 2 (645-653)
  source 1..27: mol_type = other RNA
gtgaccgacctgctcaaggagctggtc

SEQ ID NO: 38753 - RNA, 27 nt, synthetic construct
  misc_feature 1..27: note = Disabled homolog 2 (128-136)
  source 1..27: mol_type = other RNA
gtgaccgacaaccgcgccttcggctac

SEQ ID NO: 38754 - RNA, 27 nt, synthetic construct
  misc_feature 1..27: note = Integrin beta-1 (77-85)
  source 1..27: mol_type = other RNA
gtgaccgaggagttccagcccgtctac

SEQ ID NO: 38755 - RNA, 33 nt, synthetic construct
  misc_feature 1..33: note = Neutral alpha-glucosidase AB (29-39)
  source 1..33: mol_type = other RNA
gtgaccgagggcggggagccctaccgcctgtac

SEQ ID NO: 38756 - RNA, 27 nt, synthetic construct
  misc_feature 1..27: note = Cohesin subunit SA-1 (101-109)
  source 1..27: mol_type = other RNA
gtggtcgacgactggatcgagagctac

SEQ ID NO: 38757 - RNA, 30 nt, synthetic construct
  misc_feature 1..30: note = Tubulin-tyrosine ligase (13-22)
  source 1..30: mol_type = other RNA
gtgtacgccgaggtcagccgcctgctcctg

SEQ ID NO: 38758 - RNA, 27 nt, synthetic construct
  misc_feature 1..27: note = E3 ubiquitin-protein ligase MARCH6 (744-752)
  source 1..27: mol_type = other RNA
gtgtacgccaacggcatccgcaacatc

SEQ ID NO: 38759 - RNA, 27 nt, synthetic construct
  misc_feature 1..27: note = Enoyl-CoA delta isomerase 2, mitochondrial (230-238)
  source 1..27: mol_type = other RNA
gtgtacgccagcgaccgcgccaccttc

SEQ ID NO: 38760 - RNA, 27 nt, synthetic construct
  misc_feature 1..27: note = Receptor tyrosine-protein kinase erbB-3 (110-118)
  source 1..27: mol_type = other RNA
gtgtacgacggcaagttcgccatcttc

SEQ ID NO: 38761 - RNA, 27 nt, synthetic construct
  misc_feature 1..27: note = SRR1-like protein (178-186)
  source 1..27: mol_type = other RNA
gtgtacgaccccctgttcagccagctc

SEQ ID NO: 38762 - RNA, 33 nt, synthetic construct
  misc_feature 1..33: note = Prolow-density lipoprotein receptor-related protein 1 (736-746)
  source 1..33: mol_type = other RNA
gtgtacgagggccccgagctgaaccacgccttc

SEQ ID NO: 38763 - RNA, 30 nt, synthetic construct
  misc_feature 1..30: note = Partitioning defective 3 homolog B (682-691)
  source 1..30: mol_type = other RNA
gtgtacttccccgaccagcacatcaacttc

SEQ ID NO: 38764 - RNA, 27 nt, synthetic construct
  misc_feature 1..27: note = Exocyst complex component 6B (452-460)
  source 1..27: mol_type = other RNA
gtgtacggcttccccgtcaaccagctg

SEQ ID NO: 38765 - RNA, 33 nt, synthetic construct
  misc_feature 1..33: note = Phosphatidylinositol-binding clathrin assembly protein (87-97)
  source 1..33: mol_type = other RNA
gtgtacggcaacgagcgcttcatccagtacctg

SEQ ID NO: 38766 - RNA, 27 nt, synthetic construct
  misc_feature 1..27: note = Alanine-tRNA ligase, cytoplasmic (92-100)
  source 1..27: mol_type = other RNA
gtgtaccaccacaccttcttcgagatg

SEQ ID NO: 38767 - RNA, 27 nt, synthetic construct
  misc_feature 1..27: note = Elongator complex protein 1 (1236-1244)
  source 1..27: mol_type = other RNA
gtgtaccacatcctgaaggtcctcttc

SEQ ID NO: 38768 - RNA, 27 nt, synthetic construct
  misc_feature 1..27: note = Sterol regulatory element-binding protein cleavage-activating protein (751-759)
  source 1..27: mol_type = other RNA
gtgtacatcgaccagaccatggtcctg

SEQ ID NO: 38769 - RNA, 27 nt, synthetic construct
  misc_feature 1..27: note = Prelamin-A/C (44-52)
  source 1..27: mol_type = other RNA
gtgtacatcgaccgcgtccggagcctg

SEQ ID NO: 38770 - RNA, 27 nt, synthetic construct
  misc_feature 1..27: note = F-box only protein 42 (181-189)
  source 1..27: mol_type = other RNA
gtgtacaaggacctgctcgtcctgttc

SEQ ID NO: 38771 - RNA, 27 nt, synthetic construct
  misc_feature 1..27: note = mRNA cap guanine-N7 methyltransferase (390-398)
  source 1..27: mol_type = other RNA
gtgtacaagaagaccttcctggagttc

SEQ ID NO: 38772 - RNA, 27 nt, synthetic construct
  misc_feature 1..27: note = Kelch repeat and BTB domain-containing protein 6 (407-415)
  source 1..27: mol_type = other RNA
gtgtacaagcccgcccagaacagctgg

SEQ ID NO: 38773 - RNA, 27 nt, synthetic construct
  misc_feature 1..27: note = Brain-specific angiogenesis inhibitor 1-associated protein 2 (16-24)
  source 1..27: mol_type = other RNA
gtgtacaagaccatcatggagcagttc

SEQ ID NO: 38774 - RNA, 27 nt, synthetic construct
  misc_feature 1..27: note = Polymerase I and transcript release factor (225-233)
  source 1..27: mol_type = other RNA
gtgtacaaggtccccccgttcaccttc

SEQ ID NO: 38775 - RNA, 27 nt, synthetic construct
  misc_feature 1..27: note = Sarcolemmal membrane-associated protein (22-30)
  source 1..27: mol_type = other RNA
gtgtacctggacgagcccatcaagatc

SEQ ID NO: 38776 - RNA, 33 nt, synthetic construct
  misc_feature 1..33: note = Molybdenum cofactor sulfurase (50-60)
  source 1..33: mol_type = other RNA
gtgtacctggaccacgccggcgccaccctcttc

SEQ ID NO: 38777 - RNA, 30 nt, synthetic construct
  misc_feature 1..30: note = Plectin (3681-3690)
  source 1..30: mol_type = other RNA
gtgtacctgcccggcagccgccagaccctc

SEQ ID NO: 38778 - RNA, 27 nt, synthetic construct
  misc_feature 1..27: note = Nuclear nucleic acid-binding protein C1D (92-100)
  source 1..27: mol_type = other RNA
gtgtacatgaaccgcgtcaaggagatc

SEQ ID NO: 38779 - RNA, 27 nt, synthetic construct
  misc_feature 1..27: note = Pre-mRNA-splicing factor SPF27 (137-145)
  source 1..27: mol_type = other RNA
gtgtacaacgagaacctggtccacatg

SEQ ID NO: 38780 - RNA, 27 nt, synthetic construct
  misc_feature 1..27: note = Kelch-like protein 11 (473-481)
  source 1..27: mol_type = other RNA
gtgtacaaccccgagctggacaagtgg

SEQ ID NO: 38781 - RNA, 27 nt, synthetic construct
  misc_feature 1..27: note = Kelch repeat and BTB domain-containing protein 6 (536-544)
  source 1..27: mol_type = other RNA
gtgtacaaccccgtccgcgccgagtgg

SEQ ID NO: 38782 - RNA, 33 nt, synthetic construct
  misc_feature 1..33: note = Zinc transporter ZIP6 (191-201)
  source 1..33: mol_type = other RNA
gtgtacaacaccgtcagcgagggcacccacttc

SEQ ID NO: 38783 - RNA, 30 nt, synthetic construct
  misc_feature 1..30: note = BAG family molecular chaperone regulator 3 (113-122)
  source 1..30: mol_type = other RNA
gtgtacccccagccgggcatgcagcgcttc

SEQ ID NO: 38784 - RNA, 33 nt, synthetic construct
  misc_feature 1..33: note = 3-ketodihydrosphingosine reductase (150-160)
  source 1..33: mol_type = other RNA
gtgtaccccagccgcgccgtcatcaccaccatg

SEQ ID NO: 38785 - RNA, 27 nt, synthetic construct
  misc_feature 1..27: note = Hemoglobin subunit gamma-2 (35-43)
  source 1..27: mol_type = other RNA
gtgtacccctggacccagcgcttcttc

SEQ ID NO: 38786 - RNA, 27 nt, synthetic construct
  misc_feature 1..27: note = Nuclear factor of activated T-cells 5 (855-863)
  source 1..27: mol_type = other RNA
gtgtaccagcagaccagccacatgatg

SEQ ID NO: 38787 - RNA, 27 nt, synthetic construct
  misc_feature 1..27: note = Anaphase-promoting complex subunit 2 (564-572)
  source 1..27: mol_type = other RNA
gtgtacagcgccggcgtctaccgcctg

SEQ ID NO: 38788 - RNA, 33 nt, synthetic construct
  misc_feature 1..33: note = N-acetylgalactosamine kinase (311-321)
  source 1..33: mol_type = other RNA
gtgtacagcgaggccgcccgcgtcctgcagttc

SEQ ID NO: 38789 - RNA, 27 nt, synthetic construct
  misc_feature 1..27: note = Zinc transporter 6 (62-70)
  source 1..27: mol_type = other RNA
gtgtacagcttcggcttcgagcgcctg

SEQ ID NO: 38790 - RNA, 27 nt, synthetic construct
  misc_feature 1..27: note = La-related protein 4 (319-327)
  source 1..27: mol_type = other RNA
gtgtacagcatcgtcccccagtcctgg

SEQ ID NO: 38791 - RNA, 33 nt, synthetic construct
  misc_feature 1..33: note = Pre-mRNA-processing-splicing factor 8 (1177-1187)
  source 1..33: mol_type = other RNA
gtgtacagcaaggacaaccccaacctgctcttc

SEQ ID NO: 38792 - RNA, 27 nt, synthetic construct
  misc_feature 1..27: note = Condensin-2 complex subunit H2 (66-74)
  source 1..27: mol_type = other RNA
gtgtacagcaagaaggtcgagtacctg

SEQ ID NO: 38793 - RNA, 27 nt, synthetic construct
  misc_feature 1..27: note = Zinc transporter 7 (318-326)
  source 1..27: mol_type = other RNA
gtgtacagcctgcaggagcagcacttc

SEQ ID NO: 38794 - RNA, 33 nt, synthetic construct
  misc_feature 1..33: note = Ribonuclease P protein subunit p30 (155-165)
  source 1..33: mol_type = other RNA
gtgtacagccccgccatcaaggactccaccatg

SEQ ID NO: 38795 - RNA, 27 nt, synthetic construct
  misc_feature 1..27: note = E3 ubiquitin-protein ligase MGRN1 (148-156)
  source 1..27: mol_type = other RNA
gtgtacagccccaagtccccgagcctg

SEQ ID NO: 38796 - RNA, 27 nt, synthetic construct
  misc_feature 1..27: note = DDB1- and CUL4-associated factor 13 (310-318)
  source 1..27: mol_type = other RNA
gtgtacaccggcatcgaccaccactgg

SEQ ID NO: 38797 - RNA, 30 nt, synthetic construct
  misc_feature 1..30: note = Nuclear pore complex protein Nup153 (667-676)
  source 1..30: mol_type = other RNA
gtgtacacccgccccgccatcagctccttc

SEQ ID NO: 38798 - RNA, 27 nt, synthetic construct
  misc_feature 1..27: note = Tensin-2 (334-342)
  source 1..27: mol_type = other RNA
gtgtacaccagcggcgtctaccacatc

SEQ ID NO: 38799 - RNA, 27 nt, synthetic construct
  misc_feature 1..27: note = Pre-mRNA-processing-splicing factor 8 (809-817)
  source 1..27: mol_type = other RNA
gtgtacaccaccacggtccactggctg

SEQ ID NO: 38800 - RNA, 27 nt, synthetic construct
  misc_feature 1..27: note = Volume-regulated anion channel subunit LRRC8E (11-19)
  source 1..27: mol_type = other RNA
gtgtacgtcgagaagatcagcttcctg

SEQ ID NO: 38801 - RNA, 27 nt, synthetic construct
  misc_feature 1..27: note = Cleavage and polyadenylation specificity factor subunit 7 (127-135)
  source 1..27: mol_type = other RNA
gtgtacgtcggcagcttctcctggtgg

SEQ ID NO: 38802 - RNA, 27 nt, synthetic construct
  misc_feature 1..27: note = Kinesin-like protein KIF3B (174-182)
  source 1..27: mol_type = other RNA
gtgtacgtcaaggacctgagctccttc

SEQ ID NO: 38803 - RNA, 27 nt, synthetic construct
  misc_feature 1..27: note = Cytochrome c oxidase assembly protein COX11, mitochondrial (223-231)
  source 1..27: mol_type = other RNA
gtgtacgtcctggagagctggcacctc

SEQ ID NO: 38804 - RNA, 27 nt, synthetic construct
  misc_feature 1..27: note = Splicing factor 3B subunit 1 (254-262)
  source 1..27: mol_type = other RNA
gtgtactggaagatctacaacagcatc

SEQ ID NO: 38805 - RNA, 27 nt, synthetic construct
  misc_feature 1..27: note Dolichyl-diphosphooligosaccharide-proteinosyltransferase subunit 2 (453-461)
  source 1..27: mol_type = other RNA
gtgtactggacccagctgaacatgttc

SEQ ID NO: 38806 - RNA, 27 nt, synthetic construct
  misc_feature 1..27: note = Tripartite motif-containing protein 47 (182-190)
  source 1..27: mol_type = other RNA
tacgccgaccgcgccctggcgttctac

SEQ ID NO: 38807 - RNA, 27 nt, synthetic construct
  misc_feature 1..27: note = Monocarboxylate transporter 1 (34-42)
  source 1..27: mol_type = other RNA
tacgccttccccaagagcatcaccgtg

SEQ ID NO: 38808 - RNA, 24 nt, synthetic construct
  misc_feature 1..24: note = DDB1- and CUL4-associated factor 4 (355-362)
  source 1..24: mol_type = other RNA
tacgcctacctgcccctccacgtg

SEQ ID NO: 38809 - RNA, 30 nt, synthetic construct
  misc_feature 1..30: note = Septin-9 (180-189)
  source 1..30: mol_type = other RNA
tacttcatccccgccaccggccacagcctg

SEQ ID NO: 38810 - RNA, 27 nt, synthetic construct
  misc_feature 1..27: note = Serine/threonine-protein kinase ATR (1253-1261)
  source 1..27: mol_type = other RNA
tacttcctgcccgaccacccggagctc

SEQ ID NO: 38811 - RNA, 27 nt, synthetic construct
  misc_feature 1..27: note = Cytochrome c oxidase subunit 2 (113-121)
  source 1..27: mol_type = other RNA
tacggcgggctgatcttcaacagctac

SEQ ID NO: 38812 - RNA, 27 nt, synthetic construct
  misc_feature 1..27: note = Sterol O-acyltransferase 1 (161-169)
  source 1..27: mol_type = other RNA
tacatcgacgagggccgcctggtgctc

SEQ ID NO: 38813 - RNA, 27 nt, synthetic construct
  misc_feature 1..27: note = Unconventional myosin-Ic (44-52)
  source 1..27: mol_type = other RNA
tacatcggccccgtgctggtcagcgtg

SEQ ID NO: 38814 - RNA, 27 nt, synthetic construct
  misc_feature 1..27: note = DENN domain-containing protein 5B (228-236)
  source 1..27: mol_type = other RNA
tacatccacaacatcctgtacgaggtg

SEQ ID NO: 38815 - RNA, 27 nt, synthetic construct
  misc_feature 1..27: note = Kinesin-like protein KIF1A (510-518)
  source 1..27: mol_type = other RNA
tacatcaaggacggcatcacccgcgtg

SEQ ID NO: 38816 - RNA, 36 nt, synthetic construct
  misc_feature 1..36: note = Signal recognition particle 9 kDa protein (18-29)
  source 1..36: mol_type = other RNA
tacctggccgaccccatgaaggcccgcgtggtcctc

SEQ ID NO: 38817 - RNA, 27 nt, synthetic construct
  misc_feature 1..27: note = Ras GTPase-activating-like protein IQGAP2 (898-906)
  source 1..27: mol_type = other RNA
tacctggccaagctcatcttccagatg

SEQ ID NO: 38818 - RNA, 27 nt, synthetic construct
  misc_feature 1..27: note = Kinesin-like protein KIF13A (1108-1116)
  source 1..27: mol_type = other RNA
tacctggacgagcagatcaagaaggtg

SEQ ID NO: 38819 - RNA, 27 nt, synthetic construct
  misc_feature 1..27: note = Metastasis-associated protein MTA3 (123-131)
  source 1..27: mol_type = other RNA
tacctggacaaggaggacaccttcttc

SEQ ID NO: 38820 - RNA, 24 nt, synthetic construct
  misc_feature 1..24: note = Guanine nucleotide-binding protein-like 3-like protein (294-301)
  source 1..24: mol_type = other RNA
tacctggacaagttcatccgcctc

SEQ ID NO: 38821 - RNA, 27 nt, synthetic construct
  misc_feature 1..27: note = DNA topoisomerase 1 (723-731)
  source 1..27: mol_type = other RNA
tacctggacccccgcatcaccgtggcc

SEQ ID NO: 38822 - RNA, 30 nt, synthetic construct
  misc_feature 1..30: note = Proteasome activator complex subunit 3 (188-197)
  source 1..30: mol_type = other RNA
tacctggaccagatcagccgctactacatc

SEQ ID NO: 38823 - RNA, 36 nt, synthetic construct
  misc_feature 1..36: note = Lysosomal protective protein (125-136)
  source 1..36: mol_type = other RNA
tacctggagagccccgccggcgtggggttctcctac

SEQ ID NO: 38824 - RNA, 33 nt, synthetic construct
  misc_feature 1..33: note = ATP synthase F(0) complex subunit B1, mitochondrial (165-175)
  source 1..33: mol_type = other RNA
tacctgttcgacgtgcagcgcaacaacatcgcc

SEQ ID NO: 38825 - RNA, 36 nt, synthetic construct
  misc_feature 1..36: note = ATP synthase F(0) complex subunit B1, mitochondrial (165-176)
  source 1..36: mol_type = other RNA
tacctgttcgacgtgcagcgcaacaacatcgccatg

SEQ ID NO: 38826 - RNA, 27 nt, synthetic construct
  misc_feature 1..27: note = WD repeat-containing protein 81 (72-80)
  source 1..27: mol_type = other RNA
tacctgttcgagcccgtggccaaggcc

SEQ ID NO: 38827 - RNA, 27 nt, synthetic construct
  misc_feature 1..27: note = WD repeat and FYVE domain-containing protein 3 (158-166)
  source 1..27: mol_type = other RNA
tacctgttcttcgacctcccccacgtg

SEQ ID NO: 38828 - RNA, 27 nt, synthetic construct
  misc_feature 1..27: note = LIM domain-containing protein ajuba (391-399)
  source 1..27: mol_type = other RNA
tacctgttcagcggcttccaggaggcc

SEQ ID NO: 38829 - RNA, 27 nt, synthetic construct
  misc_feature 1..27: note = Heat shock cognate 71 kDa protein (134-142)
  source 1..27: mol_type = other RNA
tacctgggcaagaccgtgaccaacgcc

SEQ ID NO: 38830 - RNA, 30 nt, synthetic construct
  misc_feature 1..30: note = Intraflagellar transport protein 172 homolog (461-470)
  source 1..30: mol_type = other RNA
tacctgatcgacatcaagaccatcgccatc

SEQ ID NO: 38831 - RNA, 27 nt, synthetic construct
  misc_feature 1..27: note = Ankyrin repeat domain-containing protein 17 (599-607)
  source 1..27: mol_type = other RNA
tacctgctcgactaccccaacaacctg

SEQ ID NO: 38832 - RNA, 30 nt, synthetic construct
  misc_feature 1..30: note = Ankyrin repeat domain-containing protein 17 (599-608)
  source 1..30: mol_type = other RNA
tacctgctcgactaccccaacaacctgctg

SEQ ID NO: 38833 - RNA, 33 nt, synthetic construct
  misc_feature 1..33: note = Filamin-A (148-158)
  source 1..33: mol_type = other RNA
tacctgctcaaggacaagggcgagtacaccctg

SEQ ID NO: 38834 - RNA, 27 nt, synthetic construct
  misc_feature 1..27: note = Condensin complex subunit 3 (370-378)
  source 1..27: mol_type = other RNA
tacctgctcagctacatccagtccatc

SEQ ID NO: 38835 - RNA, 27 nt, synthetic construct
  misc_feature 1..27: note = UDP-glucose 6-dehydrogenase (143-151)
  source 1..27: mol_type = other RNA
tacctgatggacgagggcgcccacctc

SEQ ID NO: 38836 - RNA, 27 nt, synthetic construct
  misc_feature 1..27: note = L-lactate dehydrogenase A chain (172-180)
  source 1..27: mol_type = other RNA
tacctgatgggcgagcgcctcggggtg

SEQ ID NO: 38837 - RNA, 36 nt, synthetic construct
  misc_feature 1..36: note = H/ACA ribonucleoprotein complex subunit 3 (6-17)
  source 1..36: mol_type = other RNA
tacctgaacgagcagggcgaccgcgtgtacaccctc

SEQ ID NO: 38838 - RNA, 27 nt, synthetic construct
  misc_feature 1..27: note = POZ-, AT hook-, and zinc finger-containing protein 1 (645-653)
  source 1..27: mol_type = other RNA
tacctgaacaagcacatccagaaggtg

SEQ ID NO: 38839 - RNA, 27 nt, synthetic construct
  misc_feature 1..27: note = Structural maintenance of chromosomes protein 4 (748-756)
  source 1..27: mol_type = other RNA
tacctgaacgtgcaggtcaaggagctc

SEQ ID NO: 38840 - RNA, 27 nt, synthetic construct
  misc_feature 1..27: note = Mitochondrial-processing peptidase subunit alpha (107-115)
  source 1..27: mol_type = other RNA
tacctgagcggcatcgcccacttcctc

SEQ ID NO: 38841 - RNA, 27 nt, synthetic construct
  misc_feature 1..27: note = Gelsolin (409-417)
  source 1..27: mol_type = other RNA
tacctgagctcccacatcgccaacgtg

SEQ ID NO: 38842 - RNA, 27 nt, synthetic construct
  misc_feature 1..27: note = Protein S100-A10 (25-33)
  source 1..27: mol_type = other RNA
tacctgaccaaggaggacctccgcgtg

SEQ ID NO: 38843 - RNA, 30 nt, synthetic construct
  misc_feature 1..30: note = Plectin (73-82)
  source 1..30: mol_type = other RNA
tacctgaccaacgagggcatcgcccacctc

SEQ ID NO: 38844 - RNA, 33 nt, synthetic construct
  misc_feature 1..33: note = Mitochondrial carrier homolog 1 (278-288)
  source 1..33: mol_type = other RNA
tacctggtggacgacagcttctcccaggccctc

SEQ ID NO: 38845 - RNA, 27 nt, synthetic construct
  misc_feature 1..27: note = Thimet oligopeptidase (612-620)
  source 1..27: mol_type = other RNA
tacctgtggagcgaggtgtactccatg

SEQ ID NO: 38846 - RNA, 36 nt, synthetic construct
  misc_feature 1..36: note = SWI/SNF-related matrix-associated actin-dependent regulator of chromatin subfamily A containing DEAD/H box 1 (108-119)
  source 1..36: mol_type = other RNA
tacctgtaccaggagggcaacaacgggccccacctc

SEQ ID NO: 38847 - RNA, 27 nt, synthetic construct
  misc_feature 1..27: note = Transcriptional enhancer factor TEF-3 (369-377)
  source 1..27: mol_type = other RNA
tacatgatcaacttcatccacaagctg

SEQ ID NO: 38848 - RNA, 24 nt, synthetic construct
  misc_feature 1..24: note = Pterin-4-alpha-carbinolamine dehydratase (70-77)
  source 1..24: mol_type = other RNA
tacaacaaggtgcacatcaccctg

SEQ ID NO: 38849 - RNA, 24 nt, synthetic construct
  misc_feature 1..24: note = Mid1-interacting protein 1 (7-14)
  source 1..24: mol_type = other RNA
tacaaccagaagcacagcctgttc

SEQ ID NO: 38850 - RNA, 27 nt, synthetic construct
  misc_feature 1..27: note = Phosducin-like protein 3 (158-166)
  source 1..27: mol_type = other RNA
taccccgaccgcaacctgccgaccatc

SEQ ID NO: 38851 - RNA, 33 nt, synthetic construct
  misc_feature 1..33: note = Lipase maturation factor 2 (522-532)
  source 1..33: mol_type = other RNA
taccccttccacaagcagccgcccacctacgtg

SEQ ID NO: 38852 - RNA, 24 nt, synthetic construct
  misc_feature 1..24: note = Ubiquitin-conjugating enzyme E2 K (66-73)
  source 1..24: mol_type = other RNA
taccccttcaacccgcccaaggtg

SEQ ID NO: 38853 - RNA, 36 nt, synthetic construct
  misc_feature 1..36: note Dolichyl-diphosphooligosaccharide-proteinosyltransferase 48 kDa subunit (233-244)
  source 1..36: mol_type = other RNA
tacccccacgccgtgggcaagaacaccctgctcatc

SEQ ID NO: 38854 - RNA, 27 nt, synthetic construct
  misc_feature 1..27: note = Ganglioside-induced differentiation-associated protein 2 (176-184)
  source 1..27: mol_type = other RNA
taccccctggaggacgccacccacatc

SEQ ID NO: 38855 - RNA, 27 nt, synthetic construct
  misc_feature 1..27: note = TFIIH basal transcription factor complex helicase XPD subunit (39-47)
  source 1..27: mol_type = other RNA
taccccctggaggtgaccaagctcatc

SEQ ID NO: 38856 - RNA, 27 nt, synthetic construct
  misc_feature 1..27: note = AP-2 complex subunit beta (421-429)
  source 1..27: mol_type = other RNA
taccccaacaagtacgagagcatcatc

SEQ ID NO: 38857 - RNA, 30 nt, synthetic construct
  misc_feature 1..30: note = BAG family molecular chaperone regulator 4 (184-193)
  source 1..30: mol_type = other RNA
tacccctacggcgacgggaaccgcagcgtg

SEQ ID NO: 38858 - RNA, 33 nt, synthetic construct
  misc_feature 1..33: note = InaD-like protein (703-713)
  source 1..33: mol_type = other RNA
taccaggaccccctggacccgacccgcagcgtg

SEQ ID NO: 38859 - RNA, 33 nt, synthetic construct
  misc_feature 1..33: note = DNA mismatch repair protein Msh6 (977-987)
  source 1..33: mol_type = other RNA
taccagctggagatccccgagaacttcaccacc

SEQ ID NO: 38860 - RNA, 27 nt, synthetic construct
  misc_feature 1..27: note = Ubiquitin-like-conjugating enzyme ATG3 (210-218)
  source 1..27: mol_type = other RNA
taccagaccccccgcctgtggctcttc

SEQ ID NO: 38861 - RNA, 27 nt, synthetic construct
  misc_feature 1..27: note = RNA binding protein fox-1 homolog 2 (317-325)
  source 1..27: mol_type = other RNA
tacagcgacggctacgggcgcgtgtac

SEQ ID NO: 38862 - RNA, 27 nt, synthetic construct
  misc_feature 1..27: note = Signal transducer and activator of transcription 3 (22-30)
  source 1..27: mol_type = other RNA
tacagcgactccttccccatggagctg

SEQ ID NO: 38863 - RNA, 30 nt, synthetic construct
  misc_feature 1..30: note = Protein TANC2 (62-71)
  source 1..30: mol_type = other RNA
tacagcgagaacgtggagcgcaccaagtac

SEQ ID NO: 38864 - RNA, 24 nt, synthetic construct
  misc_feature 1..24: note = Putative heat shock protein HSP 90-beta 2 (33-40)
  source 1..24: mol_type = other RNA
tacagcaacaaggagatcttcctg

SEQ ID NO: 38865 - RNA, 33 nt, synthetic construct
  misc_feature 1..33: note = Probable E3 ubiquitin-protein ligase HECTD2 (624-634)
  source 1..33: mol_type = other RNA
tacaccgacttcctgctcaacaagagcatctac

SEQ ID NO: 38866 - RNA, 27 nt, synthetic construct
  misc_feature 1..27: note = Tight junction protein ZO-1 (1054-1062)
  source 1..27: mol_type = other RNA
tacaccgaccagttcagccgcaactac

SEQ ID NO: 38867 - RNA, 27 nt, synthetic construct
  misc_feature 1..27: note = RNA-binding protein FUS (324-332)
  source 1..27: mol_type = other RNA
tacaccgaccgcgagaccggcaagctg

SEQ ID NO: 38868 - RNA, 30 nt, synthetic construct
  misc_feature 1..30: note = Cytochrome c oxidase subunit 2 (110-119)
  source 1..30: mol_type = other RNA
tacaccgactacggcgggctgatcttcaac

SEQ ID NO: 38869 - RNA, 33 nt, synthetic construct
  misc_feature 1..33: note = Cytochrome c oxidase subunit 2 (110-120)
  source 1..33: mol_type = other RNA
tacaccgactacggcgggctgatcttcaacagc

SEQ ID NO: 38870 - RNA, 24 nt, synthetic construct
  misc_feature 1..24: note = Peroxisomal multifunctional enzyme type 2 (339-346)
  source 1..24: mol_type = other RNA
tacaccgagctggaggccatcatg

SEQ ID NO: 38871 - RNA, 27 nt, synthetic construct
  misc_feature 1..27: note = Peroxisomal multifunctional enzyme type 2 (339-347)
  source 1..27: mol_type = other RNA
tacaccgagctggaggccatcatgtac

SEQ ID NO: 38872 - RNA, 27 nt, synthetic construct
  misc_feature 1..27: note = RNA-binding protein FUS (6-14)
  source 1..27: mol_type = other RNA
tacacccagcaggccacccagagctac

SEQ ID NO: 38873 - RNA, 30 nt, synthetic construct
  misc_feature 1..30: note = F-box only protein 11 (224-233)
  source 1..30: mol_type = other RNA
tacaccagctaccccatgcacgacttctac

SEQ ID NO: 38874 - RNA, 27 nt, synthetic construct
  misc_feature 1..27: note = Zinc finger and BTB domain-containing protein 38 (794-802)
  source 1..27: mol_type = other RNA
tacgtggccgaccccggcgggagcctg

SEQ ID NO: 38875 - RNA, 24 nt, synthetic construct
  misc_feature 1..24: note = Bax inhibitor 1 (92-99)
  source 1..24: mol_type = other RNA
tacgtgcacatggtcacccacttc

SEQ ID NO: 38876 - RNA, 36 nt, synthetic construct
  misc_feature 1..36: note = Negative elongation factor E (265-276)
  source 1..36: mol_type = other RNA
tacgtgtacggcgaggacatgacccccaccctgctc

SEQ ID NO: 38877 - RNA, 27 nt, synthetic construct
  misc_feature 1..27: note = Medium-chain specific acyl-CoA dehydrogenase, mitochondrial (316-324)
  source 1..27: mol_type = other RNA
tactacgccagcatcgccaaggcgttc

SEQ ID NO: 38878 - RNA, 30 nt, synthetic construct
  misc_feature 1..30: note = Eukaryotic translation initiation factor 3 subunit A (275-284)
  source 1..30: mol_type = other RNA
tactacaacaaggtgagcaccgtcttctgg

SEQ ID NO: 38879 - RNA, 33 nt, synthetic construct
  misc_feature 1..33: note = Importin-7 (763-773)
  source 1..33: mol_type = other RNA
tactacaacccccacctgctcctgaacaccctg

SEQ ID NO: 38880 - RNA, 27 nt, synthetic construct
  misc_feature 1..27: note = Prenylcysteine oxidase 1 (220-228)
  source 1..27: mol_type = other RNA
tactaccagcacatcgtgaccaccctg

SEQ ID NO: 38881 - RNA, 27 nt, synthetic construct
  misc_feature 1..27: note = Protein PAT1 homolog 1 (367-375)
  source 1..27: mol_type = other RNA
tactaccagaactacttcgagaagctg

SEQ ID NO: 38882 - RNA, 27 nt, synthetic construct
  misc_feature 1..27: note = ATP-binding cassette sub-family F member 1 (528-536)
  source 1..27: mol_type = other RNA
tactaccgcggcaactacatgaccttc

SEQ ID NO: 38883 - RNA, 27 nt, synthetic construct
  misc_feature 1..27: note = Polypyrimidine tract-binding protein 2 (124-132)
  source 1..27: mol_type = other RNA
tactacagcgccgtgaccccccacctg

SEQ ID NO: 38884 - RNA, 27 nt, synthetic construct
  misc_feature 1..27: note = Eukaryotic translation initiation factor 2A (345-353)
  source 1..27: mol_type = other RNA
tactacagcccccacggccacatcctg

SEQ ID NO: 38885 - RNA, 27 nt, synthetic construct
  misc_feature 1..27: note = 26S protease regulatory subunit 6B (111-119)
  source 1..27: mol_type = other RNA
tactacgtgcgcatcctgagcaccatc

SEQ ID NO: 38886 - RNA, 33 nt, synthetic construct
  misc_feature 1..33: note = Glutathione peroxidase 1 (7-17)
  source 1..33: mol_type = other RNA
gccgccgcggccgccgccgcccagagcgtgtac

SEQ ID NO: 38887 - RNA, 27 nt, synthetic construct
  misc_feature 1..27: note = Interferon alpha-inducible protein 27-like protein 2 (6-14)
  source 1..27: mol_type = other RNA
gccgccgcggccgtgggcggggccctg

SEQ ID NO: 38888 - RNA, 27 nt, synthetic construct
  misc_feature 1..27: note = Pumilio homolog 2 (304-312)
  source 1..27: mol_type = other RNA
gccgccgcgaaccccaccctggccttc

SEQ ID NO: 38889 - RNA, 27 nt, synthetic construct
  misc_feature 1..27: note = Angiomotin (918-926)
  source 1..27: mol_type = other RNA
gccgccgcgcccgccgccgccgccgcg

SEQ ID NO: 38890 - RNA, 27 nt, synthetic construct
  misc_feature 1..27: note = RNA-binding protein 38 (217-225)
  source 1..27: mol_type = other RNA
gccgccgcgcccgccggcaccaccttc

SEQ ID NO: 38891 - RNA, 30 nt, synthetic construct
  misc_feature 1..30: note = Protein SON (246-255)
  source 1..30: mol_type = other RNA
gccgccgcgcccgtgccgaccaccacgctg

SEQ ID NO: 38892 - RNA, 27 nt, synthetic construct
  misc_feature 1..27: note = Kelch-like protein 7 (15-23)
  source 1..27: mol_type = other RNA
gccgccgcgagccacttcttcaacctg

SEQ ID NO: 38893 - RNA, 27 nt, synthetic construct
  misc_feature 1..27: note = Ephrin-A1 (167-175)
  source 1..27: mol_type = other RNA
gccgccgacgaccccgaggtgcgcgtc

SEQ ID NO: 38894 - RNA, 27 nt, synthetic construct
  misc_feature 1..27: note = RNA-binding protein 4 (47-55)
  source 1..27: mol_type = other RNA
gccgccgaggacgcgatccgcaacctg

SEQ ID NO: 38895 - RNA, 27 nt, synthetic construct
  misc_feature 1..27: note = Death-associated protein kinase 3 (334-342)
  source 1..27: mol_type = other RNA
gccgccgaggagggcctgcgcgagctc

SEQ ID NO: 38896 - RNA, 27 nt, synthetic construct
  misc_feature 1..27: note = Perilipin-3 (62-70)
  source 1..27: mol_type = other RNA
gccgccgagaagggcgtgcgcaccctg

SEQ ID NO: 38897 - RNA, 24 nt, synthetic construct
  misc_feature 1..24: note = Ribosome-binding protein 1 (105-112)
  source 1..24: mol_type = other RNA
gccgccttcgagaagcaggtgctg

SEQ ID NO: 38898 - RNA, 27 nt, synthetic construct
  misc_feature 1..27: note = Glycine dehydrogenase (decarboxylating), mitochondrial (969-977)
  source 1..27: mol_type = other RNA
gccgccttccccctgccgttcgtgaag

SEQ ID NO: 38899 - RNA, 27 nt, synthetic construct
  misc_feature 1..27: note = DNA-directed RNA polymerase II subunit RPB1 (1495-1503)
  source 1..27: mol_type = other RNA
gccgccggccccaccgggatgttcttc

SEQ ID NO: 38900 - RNA, 27 nt, synthetic construct
  misc_feature 1..27: note = Programmed cell death protein 4 (282-290)
  source 1..27: mol_type = other RNA
gccgccctggacaaggcgaccgtgctc

SEQ ID NO: 38901 - RNA, 27 nt, synthetic construct
  misc_feature 1..27: note = Leucine-rich repeat-containing protein 59 (36-44)
  source 1..27: mol_type = other RNA
gccgccctgcccaaggcgaccatcctc

SEQ ID NO: 38902 - RNA, 27 nt, synthetic construct
  misc_feature 1..27: note = E3 ubiquitin-protein ligase BRE1B (225-233)
  source 1..27: mol_type = other RNA
gccgcccaggcgcacacccgcgagctg

SEQ ID NO: 38903 - RNA, 33 nt, synthetic construct
  misc_feature 1..33: note = NEDD8-activating enzyme E1 regulatory subunit (495-505)
  source 1..33: mol_type = other RNA
gccgcccaggaggtgatcaagatcatcaccaag

SEQ ID NO: 38904 - RNA, 27 nt, synthetic construct
  misc_feature 1..27: note = Protein FAM50A (7-15)
  source 1..27: mol_type = other RNA
gccgccagcgaggcgggccgcgccatg

SEQ ID NO: 38905 - RNA, 27 nt, synthetic construct
  misc_feature 1..27: note = 4F2 cell-surface antigen heavy chain (127-135)
  source 1..27: mol_type = other RNA
gccgccagcggcgcggccatgtccctg

SEQ ID NO: 38906 - RNA, 27 nt, synthetic construct
  misc_feature 1..27: note = Nuclear pore membraneoprotein 210 (1023-1031)
  source 1..27: mol_type = other RNA
gccgccagccccatcatcaccctggtg

SEQ ID NO: 38907 - RNA, 27 nt, synthetic construct
  misc_feature 1..27: note = Cirhin (108-116)
  source 1..27: mol_type = other RNA
gccgccagcccctccggcagccagctg

SEQ ID NO: 38908 - RNA, 27 nt, synthetic construct
  misc_feature 1..27: note = 40S ribosomal protein SA (92-100)
  source 1..27: mol_type = other RNA
gccgccaccggcgcgacccccatcgcc

SEQ ID NO: 38909 - RNA, 27 nt, synthetic construct
  misc_feature 1..27: note = ELM2 and SANT domain-containing protein 1 (966-974)
  source 1..27: mol_type = other RNA
gccgccgtgaaggcgacccagaccctg

SEQ ID NO: 38910 - RNA, 27 nt, synthetic construct
  misc_feature 1..27: note = UPF0668 protein C10orf76 (556-564)
  source 1..27: mol_type = other RNA
gccgccgtgaaccacatcagccagctg

SEQ ID NO: 38911 - RNA, 27 nt, synthetic construct
  misc_feature 1..27: note = Leucine-rich repeat and calponin homology domain-containing protein 3 (56-64)
  source 1..27: mol_type = other RNA
gccgccgtgaccggcgtcctgagcctc

SEQ ID NO: 38912 - RNA, 27 nt, synthetic construct
  misc_feature 1..27: note = Synaptonemal complex protein SC65 (428-436)
  source 1..27: mol_type = other RNA
gccgaggccgagcccgagccggagctg

SEQ ID NO: 38913 - RNA, 27 nt, synthetic construct
  misc_feature 1..27: note = Rhotekin (187-195)
  source 1..27: mol_type = other RNA
gccgaggccggccccgacttcgagctg

SEQ ID NO: 38914 - RNA, 30 nt, synthetic construct
  misc_feature 1..30: note = Catenin alpha-1 (750-759)
  source 1..30: mol_type = other RNA
gccgaggccggcagccgcatggacaagctg

SEQ ID NO: 38915 - RNA, 27 nt, synthetic construct
  misc_feature 1..27: note = Leucine-tRNA ligase, cytoplasmic (461-469)
  source 1..27: mol_type = other RNA
gccgaggccaaggagaagatctacctg

SEQ ID NO: 38916 - RNA, 36 nt, synthetic construct
  misc_feature 1..36: note = 5'-AMP-activated protein kinase catalytic subunit alpha-1 (501-512)
  source 1..36: mol_type = other RNA
gccgaggcccagggcaagagctccgaggtgagcctg

SEQ ID NO: 38917 - RNA, 27 nt, synthetic construct
  misc_feature 1..27: note = Something about silencing protein 10 (119-127)
  source 1..27: mol_type = other RNA
gccgaggccagcgtggacccctccctg

SEQ ID NO: 38918 - RNA, 33 nt, synthetic construct
  misc_feature 1..33: note = Mediator of DNA damage checkpoint protein 1 (431-441)
  source 1..33: mol_type = other RNA
gccgaggaggacatgccccagcgcgtggtcctg

SEQ ID NO: 38919 - RNA, 27 nt, synthetic construct
  misc_feature 1..27: note = NudC domain-containing protein 1 (175-183)
  source 1..27: mol_type = other RNA
gccgaggagcacagcatcgccaccctg

SEQ ID NO: 38920 - RNA, 27 nt, synthetic construct
  misc_feature 1..27: note = Peroxisome assembly protein 26 (71-79)
  source 1..27: mol_type = other RNA
gccgaggagcccgccggcaccagcctg

SEQ ID NO: 38921 - RNA, 27 nt, synthetic construct
  misc_feature 1..27: note = Alpha-actinin-4 (804-812)
  source 1..27: mol_type = other RNA
gccgagttcaaccgcatcatgagcctg

SEQ ID NO: 38922 - RNA, 27 nt, synthetic construct
  misc_feature 1..27: note = Coatomer subunit beta' (333-341)
  source 1..27: mol_type = other RNA
gccgagatcaaggacggcgagcgcctg

SEQ ID NO: 38923 - RNA, 33 nt, synthetic construct
  misc_feature 1..33: note = Stathmin (73-83)
  source 1..33: mol_type = other RNA
gccgagaagcgcgagcacgagaaggaggtgctg

SEQ ID NO: 38924 - RNA, 27 nt, synthetic construct
  misc_feature 1..27: note = Heat shock protein 105 kDa (311-319)
  source 1..27: mol_type = other RNA
gccgagctgctccagaagatcgaggtg

SEQ ID NO: 38925 - RNA, 27 nt, synthetic construct
  misc_feature 1..27: note = LisH domain-containing protein ARMC9 (557-565)
  source 1..27: mol_type = other RNA
gccgagatgatccgccagatcgagttc

SEQ ID NO: 38926 - RNA, 36 nt, synthetic construct
  misc_feature 1..36: note = V-type proton ATPase subunit C 1 (170-181)
  source 1..36: mol_type = other RNA
gccgagatggtggtcccccgcagctccaacgtgctg

SEQ ID NO: 38927 - RNA, 33 nt, synthetic construct
  misc_feature 1..33: note = Centromere protein F (2273-2283)
  source 1..33: mol_type = other RNA
gccgagaacagcaaggccgaggtggagaccctg

SEQ ID NO: 38928 - RNA, 33 nt, synthetic construct
  misc_feature 1..33: note = Thioredoxin domain-containing protein 5 (207-217)
  source 1..33: mol_type = other RNA
gccgagcccgaggccgacaagggcaccgtgctg

SEQ ID NO: 38929 - RNA, 33 nt, synthetic construct
  misc_feature 1..33: note = Cell cycle and apoptosis regulator protein 2 (303-313)
  source 1..33: mol_type = other RNA
gccgagcagcaggacagcggccgcctgtacctc

SEQ ID NO: 38930 - RNA, 30 nt, synthetic construct
  misc_feature 1..30: note = AP-1 complex subunit beta-1 (188-197)
  source 1..30: mol_type = other RNA
gccgagagccacccctccagcaacctgctc

SEQ ID NO: 38931 - RNA, 33 nt, synthetic construct
  misc_feature 1..33: note = Clathrin heavy chain 1 (493-503)
  source 1..33: mol_type = other RNA
gccgagaccggccaggtgcagaagatcgtcctg

SEQ ID NO: 38932 - RNA, 39 nt, synthetic construct
  misc_feature 1..39: note = T-complex protein 1 subunit eta (76-88)
  source 1..39: mol_type = other RNA
gccgaggtgggcgacgggaccaccagcgtcacgctgctc

SEQ ID NO: 38933 - RNA, 27 nt, synthetic construct
  misc_feature 1..27: note = Heterogeneous nuclear ribonucleoprotein M (129-137)
  source 1..27: mol_type = other RNA
gccgaggtgctgaacaagcacagcctc

SEQ ID NO: 38934 - RNA, 27 nt, synthetic construct
  misc_feature 1..27: note = X-box-binding protein 1 (28-36)
  source 1..27: mol_type = other RNA
gccggcgcccccgcggggcaggccctg

SEQ ID NO: 38935 - RNA, 27 nt, synthetic construct
  misc_feature 1..27: note = Protein YIF1A (153-161)
  source 1..27: mol_type = other RNA
gccggcatggccctggggatccagaag

SEQ ID NO: 38936 - RNA, 27 nt, synthetic construct
  misc_feature 1..27: note = PAB-dependent poly(A)-specific ribonuclease subunit PAN2 (870-878)
  source 1..27: mol_type = other RNA
gcccacatcaaggtgggcgagacctac

SEQ ID NO: 38937 - RNA, 27 nt, synthetic construct
  misc_feature 1..27: note = Coatomer subunit gamma-1 (45-53)
  source 1..27: mol_type = other RNA
gcccacatcctgaccaagatcctctac

SEQ ID NO: 38938 - RNA, 27 nt, synthetic construct
  misc_feature 1..27: note = Clathrin heavy chain 1 (1312-1320)
  source 1..27: mol_type = other RNA
gcccacatgggcatgttcaccgagctg

SEQ ID NO: 38939 - RNA, 27 nt, synthetic construct
  misc_feature 1..27: note = Elongation factor 2 (491-499)
  source 1..27: mol_type = other RNA
gcccacaacatgcgcgtgatgaagttc

SEQ ID NO: 38940 - RNA, 27 nt, synthetic construct
  misc_feature 1..27: note = Methionine-R-sulfoxide reductase B1 (38-46)
  source 1..27: mol_type = other RNA
gcccacagctccccctggccggccttc

SEQ ID NO: 38941 - RNA, 27 nt, synthetic construct
  misc_feature 1..27: note = Calcineurin-binding protein cabin-1 (1962-1970)
  source 1..27: mol_type = other RNA
gcccacaccaagccccgcccggccctg

SEQ ID NO: 38942 - RNA, 27 nt, synthetic construct
  misc_feature 1..27: note = Protein RTF2 homolog (296-304)
  source 1..27: mol_type = other RNA
gcccactgggtgacccacaccagctac

SEQ ID NO: 38943 - RNA, 30 nt, synthetic construct
  misc_feature 1..30: note = Endoplasmic reticulum-Golgi intermediate compartment protein 2 (241-250)
  source 1..30: mol_type = other RNA
gccatcgaccacaaccagatgttccagtac

SEQ ID NO: 38944 - RNA, 27 nt, synthetic construct
  misc_feature 1..27: note = E3 ubiquitin-protein ligase RNF135 (258-266)
  source 1..27: mol_type = other RNA
gccatccaccccaccttcaacctgaag

SEQ ID NO: 38945 - RNA, 27 nt, synthetic construct
  misc_feature 1..27: note = Proteasome subunit alpha type-2 (187-195)
  source 1..27: mol_type = other RNA
gccatccacaccgccatcctgaccctc

SEQ ID NO: 38946 - RNA, 27 nt, synthetic construct
  misc_feature 1..27: note = All-trans-retinol 13,14-reductase (189-197)
  source 1..27: mol_type = other RNA
gccatcatcgacaagtacatcaagctg

SEQ ID NO: 38947 - RNA, 27 nt, synthetic construct
  misc_feature 1..27: note = General transcription factor 3C polypeptide 3 (294-302)
  source 1..27: mol_type = other RNA
gccatcctggacaagaacttccgcaag

SEQ ID NO: 38948 - RNA, 27 nt, synthetic construct
  misc_feature 1..27: note = AP-1 complex subunit beta-1 (487-495)
  source 1..27: mol_type = other RNA
gccatcgtgaagctgttcctcaagaag

SEQ ID NO: 38949 - RNA, 27 nt, synthetic construct
  misc_feature 1..27: note = Ribosomal RNA processing protein 36 homolog (221-229)
  source 1..27: mol_type = other RNA
gccctggccgagaagttcaaggagctc

SEQ ID NO: 38950 - RNA, 27 nt, synthetic construct
  misc_feature 1..27: note = Gem-associated protein 4 (288-296)
  source 1..27: mol_type = other RNA
gccctggccgagaaggtgaaggaggcg

SEQ ID NO: 38951 - RNA, 27 nt, synthetic construct
  misc_feature 1..27: note = Glycosylphosphatidylinositol anchor attachment 1 protein (584-592)
  source 1..27: mol_type = other RNA
gccctggcccagggcgtgctcgagcac

SEQ ID NO: 38952 - RNA, 39 nt, synthetic construct
  misc_feature 1..39: note = Ankyrin repeat and KH domain-containing protein 1 (182-194)
  source 1..39: mol_type = other RNA
gccctggacgaggccgcggccgccctcacccgcatgaag

SEQ ID NO: 38953 - RNA, 27 nt, synthetic construct
  misc_feature 1..27: note = Hexokinase-1 (530-538)
  source 1..27: mol_type = other RNA
gccctggacctcggcgggaccaacttc

SEQ ID NO: 38954 - RNA, 30 nt, synthetic construct
  misc_feature 1..30: note = N-acylneuraminate cytidylyltransferase (79-88)
  source 1..30: mol_type = other RNA
gccctggacagcggcgccttccagtccgtg

SEQ ID NO: 38955 - RNA, 30 nt, synthetic construct
  misc_feature 1..30: note = EP300-interacting inhibitor of differentiation 1 (70-79)
  source 1..30: mol_type = other RNA
gccctggaggaggccgacaagatgttcctc

SEQ ID NO: 38956 - RNA, 30 nt, synthetic construct
  misc_feature 1..30: note = Zinc finger protein ZXDC (46-55)
  source 1..30: mol_type = other RNA
gccctgttcagcgacacccccgccaacgcg

SEQ ID NO: 38957 - RNA, 27 nt, synthetic construct
  misc_feature 1..27: note = Dystonin (1368-1376)
  source 1..27: mol_type = other RNA
gccctgttcagcaaggtgctcgagcgc

SEQ ID NO: 38958 - RNA, 27 nt, synthetic construct
  misc_feature 1..27: note = Protein transport protein Sec23A (40-48)
  source 1..27: mol_type = other RNA
gccctgttcacccccctcaaggagcgc

SEQ ID NO: 38959 - RNA, 27 nt, synthetic construct
  misc_feature 1..27: note = PRKCA-binding protein (279-287)
  source 1..27: mol_type = other RNA
gccctgggcgagcccctctaccgcgtg

SEQ ID NO: 38960 - RNA, 27 nt, synthetic construct
  misc_feature 1..27: note = Talin-2 (171-179)
  source 1..27: mol_type = other RNA
gccctgcacgacctcctgcagcacgtg

SEQ ID NO: 38961 - RNA, 27 nt, synthetic construct
  misc_feature 1..27: note = Golgin subfamily A member 3 (270-278)
  source 1..27: mol_type = other RNA
gccctgcacgagcgcatccaggccctc

SEQ ID NO: 38962 - RNA, 27 nt, synthetic construct
  misc_feature 1..27: note = SURP and G-patch domain-containing protein 2 (429-437)
  source 1..27: mol_type = other RNA
gccctgctcggccagaccttcagcctg

SEQ ID NO: 38963 - RNA, 27 nt, synthetic construct
  misc_feature 1..27: note = E3 ubiquitin-protein ligase AMFR (24-32)
  source 1..27: mol_type = other RNA
gccctgctcggcaccatcatcagcgcc

SEQ ID NO: 38964 - RNA, 30 nt, synthetic construct
  misc_feature 1..30: note = Tropomodulin-3 (44-53)
  source 1..30: mol_type = other RNA
gccctgctccccgccggcttccgccagaag

SEQ ID NO: 38965 - RNA, 36 nt, synthetic construct
  misc_feature 1..36: note = RNA-binding protein NOB1 (19-30)
  source 1..36: mol_type = other RNA
gccctgcaggacatcggcaagaacatctacaccatc

SEQ ID NO: 38966 - RNA, 27 nt, synthetic construct
  misc_feature 1..27: note = Kinesin-1 heavy chain (666-674)
  source 1..27: mol_type = other RNA
gccctgagcgaggagctcgtgcagctg

SEQ ID NO: 38967 - RNA, 30 nt, synthetic construct
  misc_feature 1..30: note = Syntaxin-8 (157-166)
  source 1..30: mol_type = other RNA
gccctgagctccatcatcagccgccagaag

SEQ ID NO: 38968 - RNA, 27 nt, synthetic construct
  misc_feature 1..27: note = Protein RCC2 (151-159)
  source 1..27: mol_type = other RNA
gccctgaccgagaccggcagcgtgttc

SEQ ID NO: 38969 - RNA, 27 nt, synthetic construct
  misc_feature 1..27: note = Zinc finger BED domain-containing protein 4 (250-258)
  source 1..27: mol_type = other RNA
gccctggtgggcagctccccccacctc

SEQ ID NO: 38970 - RNA, 33 nt, synthetic construct
  misc_feature 1..33: note = Protein unc-93 homolog B1 (440-450)
  source 1..33: mol_type = other RNA
gccctgtggggcgtggggagcgccctcaacaag

SEQ ID NO: 38971 - RNA, 30 nt, synthetic construct
  misc_feature 1..30: note = Galectin-3-binding protein (184-193)
  source 1..30: mol_type = other RNA
gccctgtggaaggagcccggcagcaacgtg

SEQ ID NO: 38972 - RNA, 27 nt, synthetic construct
  misc_feature 1..27: note = Fructose-bisphosphate aldolase A (132-140)
  source 1..27: mol_type = other RNA
gccatggccaccgtgaccgcgctgcgc

SEQ ID NO: 38973 - RNA, 30 nt, synthetic construct
  misc_feature 1..30: note = Myosin-9 (1912-1921)
  source 1..30: mol_type = other RNA
gccatgaaccgcgaggtgagctccctgaag

SEQ ID NO: 38974 - RNA, 27 nt, synthetic construct
  misc_feature 1..27: note = NAD(P)H dehydrogenase (quinone) 1 (128-136)
  source 1..27: mol_type = other RNA
gccatgtacgacaagggccccttccgc

SEQ ID NO: 38975 - RNA, 27 nt, synthetic construct
  misc_feature 1..27: note = Type II inositol 3,4-bisphosphate 4-phosphatase (368-376)
  source 1..27: mol_type = other RNA
gcccccgccgcgcacttccagggcttc

SEQ ID NO: 38976 - RNA, 33 nt, synthetic construct
  misc_feature 1..33: note = Ankyrin repeat and zinc finger domain-containing protein 1 (4-14)
  source 1..33: mol_type = other RNA
gcccccgacgccgcgccggcccccgccagcatc

SEQ ID NO: 38977 - RNA, 30 nt, synthetic construct
  misc_feature 1..30: note = E3 ubiquitin-protein ligase NEURL1B (119-128)
  source 1..30: mol_type = other RNA
gccccccgcccggacggcgggcggaccctg

SEQ ID NO: 38978 - RNA, 27 nt, synthetic construct
  misc_feature 1..27: note = 40S ribosomal protein S4, Y isoform 1 (27-35)
  source 1..27: mol_type = other RNA
gccccccgcccgagcaccggcccccac

SEQ ID NO: 38979 - RNA, 30 nt, synthetic construct
  misc_feature 1..30: note = 60S ribosomal protein L36 (51-60)
  source 1..30: mol_type = other RNA
gccccctacgagcgccgggccatggagctg

SEQ ID NO: 38980 - RNA, 30 nt, synthetic construct
  misc_feature 1..30: note = PHD and RING finger domain-containing protein 1 (159-168)
  source 1..30: mol_type = other RNA
gcccagttcggcgggaagatcctgcgcaag

SEQ ID NO: 38981 - RNA, 33 nt, synthetic construct
  misc_feature 1..33: note = Cleavage stimulation factor subunit 3 (59-69)
  source 1..33: mol_type = other RNA
gcccagttccccagctccggccgcttctggaag

SEQ ID NO: 38982 - RNA, 30 nt, synthetic construct
  misc_feature 1..30: note = Transcription and mRNA export factor ENY2 (10-19)
  source 1..30: mol_type = other RNA
gcccagatgcgcgccgcgatcaaccagaag

SEQ ID NO: 38983 - RNA, 27 nt, synthetic construct
  misc_feature 1..27: note = V-type proton ATPase 21 kDa proteolipid subunit (10-18)
  source 1..27: mol_type = other RNA
gcccagaaccccagcctgttcgtgaag

SEQ ID NO: 38984 - RNA, 24 nt, synthetic construct
  misc_feature 1..24: note = Myosin-9 (2-9)
  source 1..24: mol_type = other RNA
gcccagcaggccgcggacaagtac

SEQ ID NO: 38985 - RNA, 27 nt, synthetic construct
  misc_feature 1..27: note = MICOS complex subunit MIC60 (196-204)
  source 1..27: mol_type = other RNA
gcccagcaggagaagcaggagcaggtg

SEQ ID NO: 38986 - RNA, 27 nt, synthetic construct
  misc_feature 1..27: note = Ubiquitin-like protein 5 (33-41)
  source 1..27: mol_type = other RNA
gcccagaccggcacccgctggaacaag

SEQ ID NO: 38987 - RNA, 27 nt, synthetic construct
  misc_feature 1..27: note = Cytochrome c oxidase assembly factor 3 homolog, mitochondrial (44-52)
  source 1..27: mol_type = other RNA
gcccagtggcagaaggtgctgccccgc

SEQ ID NO: 38988 - RNA, 27 nt, synthetic construct
  misc_feature 1..27: note = SUMO-activating enzyme subunit 1 (17-25)
  source 1..27: mol_type = other RNA
gcccagtacgaccgccagatccggctg

SEQ ID NO: 38989 - RNA, 27 nt, synthetic construct
  misc_feature 1..27: note = Poly(U)-binding-splicing factor PUF60 (204-212)
  source 1..27: mol_type = other RNA
gcccgcgccttcaaccggatctacgtg

SEQ ID NO: 38990 - RNA, 27 nt, synthetic construct
  misc_feature 1..27: note = Protein transport protein Sec61 subunit alpha isoform 1 (310-318)
  source 1..27: mol_type = other RNA
gcccgcttcagcggcaacctgctcgtg

SEQ ID NO: 38991 - RNA, 27 nt, synthetic construct
  misc_feature 1..27: note = Ran GTPase-activating protein 1 (576-584)
  source 1..27: mol_type = other RNA
gcccgccacagcctgctccagaccctg

SEQ ID NO: 38992 - RNA, 33 nt, synthetic construct
  misc_feature 1..33: note = Probable RNA-binding protein 19 (488-498)
  source 1..33: mol_type = other RNA
gccagcgccctgggctccagctcctacaagaag

SEQ ID NO: 38993 - RNA, 27 nt, synthetic construct
  misc_feature 1..27: note = Polyadenylate-binding protein 1 (551-559)
  source 1..27: mol_type = other RNA
gccagcgcccccccgcaggagcagaag

SEQ ID NO: 38994 - RNA, 27 nt, synthetic construct
  misc_feature 1..27: note = 3'(2'),5'-bisphosphate nucleotidase 1 (13-21)
  source 1..27: mol_type = other RNA
gccagcgcctactccatcgcgcagaag

SEQ ID NO: 38995 - RNA, 27 nt, synthetic construct
  misc_feature 1..27: note = WD repeat-containing protein 26 (616-624)
  source 1..27: mol_type = other RNA
gccagcgacgacggcaccgtgcgcatc

SEQ ID NO: 38996 - RNA, 27 nt, synthetic construct
  misc_feature 1..27: note = WD repeat-containing protein 61 (115-123)
  source 1..27: mol_type = other RNA
gccagcgacgacggctacatcaagatc

SEQ ID NO: 38997 - RNA, 30 nt, synthetic construct
  misc_feature 1..30: note = Selenoprotein O (215-224)
  source 1..30: mol_type = other RNA
gccagcgacaacaccggccgctacgcctac

SEQ ID NO: 38998 - RNA, 27 nt, synthetic construct
  misc_feature 1..27: note = Protein flightless-1 homolog (1107-1115)
  source 1..27: mol_type = other RNA
gccagcgaccccgacgaggccaagctg

SEQ ID NO: 38999 - RNA, 30 nt, synthetic construct
  misc_feature 1..30: note = Transcription factor 20 (70-79)
  source 1..30: mol_type = other RNA
gccagcgagacctccggccaccaggggtac

SEQ ID NO: 39000 - RNA, 33 nt, synthetic construct
  misc_feature 1..33: note = Zinc finger protein 622 (77-87)
  source 1..33: mol_type = other RNA
gccagcttcaacgcctacgagaaccacctgaag

SEQ ID NO: 39001 - RNA, 27 nt, synthetic construct
  misc_feature 1..27: note = LIM domain and actin-binding protein 1 (496-504)
  source 1..27: mol_type = other RNA
gccagcttccagtccaccagcgtgaag

SEQ ID NO: 39002 - RNA, 33 nt, synthetic construct
  misc_feature 1..33: note = Origin recognition complex subunit 3 (514-524)
  source 1..33: mol_type = other RNA
gccagcggctcccagcccaaggggctgcagaag

SEQ ID NO: 39003 - RNA, 33 nt, synthetic construct
  misc_feature 1..33: note = Serine/threonine-protein phosphatase 6 regulatory ankyrin repeat subunit B (624-634)
  source 1..33: mol_type = other RNA
gccagcatcttcgtgaaggacaacgtcaccaag

SEQ ID NO: 39004 - RNA, 33 nt, synthetic construct
  misc_feature 1..33: note = Serine/threonine-protein phosphatase 6 regulatory ankyrin repeat subunit A (637-647)
  source 1..33: mol_type = other RNA
gccagcatcctggtgaaggactacatcctcaag

SEQ ID NO: 39005 - RNA, 33 nt, synthetic construct
  misc_feature 1..33: note = 39S ribosomal protein L22, mitochondrial (37-47)
  source 1..33: mol_type = other RNA
gccagcctggacatctcccgcaagtgggagaag

SEQ ID NO: 39006 - RNA, 27 nt, synthetic construct
  misc_feature 1..27: note = Centrosome-associated protein 350 (95-103)
  source 1..27: mol_type = other RNA
gccagcctgatcaagcagctcgaggtg

SEQ ID NO: 39007 - RNA, 33 nt, synthetic construct
  misc_feature 1..33: note = Deoxynucleotidyltransferase terminal-interacting protein 2 (668-678)
  source 1..33: mol_type = other RNA
gccagcatggaccccaagcgcttctacaagaag

SEQ ID NO: 39008 - RNA, 33 nt, synthetic construct
  misc_feature 1..33: note = Myosin-10 (370-380)
  source 1..33: mol_type = other RNA
gccagcatgcccgagaacaccgtggcccagaag

SEQ ID NO: 39009 - RNA, 36 nt, synthetic construct
  misc_feature 1..36: note = Discoidin, CUB and LCCL domain-containing protein 2 (153-164)
  source 1..36: mol_type = other RNA
gccagcaacttcctggagcccgagttctccaagtac

SEQ ID NO: 39010 - RNA, 27 nt, synthetic construct
  misc_feature 1..27: note = Chromosome transmission fidelity protein 8 homolog isoform 2 (379-387)
  source 1..27: mol_type = other RNA
gccagcaaccccgccaccttccagcgc

SEQ ID NO: 39011 - RNA, 36 nt, synthetic construct
  misc_feature 1..36: note = Heterogeneous nuclear ribonucleoprotein H (160-171)
  source 1..36: mol_type = other RNA
gccagccaggagatcgccgagaaggcgctgaagaag

SEQ ID NO: 39012 - RNA, 27 nt, synthetic construct
  misc_feature 1..27: note = Zinc finger protein 574 (226-234)
  source 1..27: mol_type = other RNA
gccagccaggagctgtggctcaaccac

SEQ ID NO: 39013 - RNA, 27 nt, synthetic construct
  misc_feature 1..27: note = E3 ubiquitin-protein ligase MARCH7 (344-352)
  source 1..27: mol_type = other RNA
gccagccagggcttccgcttcctgcgg

SEQ ID NO: 39014 - RNA, 27 nt, synthetic construct
  misc_feature 1..27: note = Ubiquitin-conjugating enzyme E2 T (183-191)
  source 1..27: mol_type = other RNA
gccagccagctggtgggcatcgagaag

SEQ ID NO: 39015 - RNA, 39 nt, synthetic construct
  misc_feature 1..39: note = Anthrax toxin receptor 2 (131-143)
  source 1..39: mol_type = other RNA
gccagctactacggcgggcgcggcgtggggggcatcaag

SEQ ID NO: 39016 - RNA, 27 nt, synthetic construct
  misc_feature 1..27: note = Transmembrane protein 147 (107-115)
  source 1..27: mol_type = other RNA
gccaccgccgagctgatcatgagccgc

SEQ ID NO: 39017 - RNA, 30 nt, synthetic construct
  misc_feature 1..30: note = Multifunctional protein ADE2 (2-11)
  source 1..30: mol_type = other RNA
gccaccgccgaggtgctgaacatcggcaag

SEQ ID NO: 39018 - RNA, 33 nt, synthetic construct
  misc_feature 1..33: note = Clathrin heavy chain 1 (311-321)
  source 1..33: mol_type = other RNA
gccaccgccggcatcatcggggtgaaccgcaag

SEQ ID NO: 39019 - RNA, 27 nt, synthetic construct
  misc_feature 1..27: note = Cilia- and flagella-associated protein 58 (79-87)
  source 1..27: mol_type = other RNA
gccaccgccctgaagctcagccaggac

SEQ ID NO: 39020 - RNA, 33 nt, synthetic construct
  misc_feature 1..33: note = Mitogen-activated protein kinase-binding protein 1 (686-696)
  source 1..33: mol_type = other RNA
gccaccgccagccccttctccggcctgcagaag

SEQ ID NO: 39021 - RNA, 27 nt, synthetic construct
  misc_feature 1..27: note = Glucosamine 6-phosphate N-acetyltransferase (99-107)
  source 1..27: mol_type = other RNA
gccaccgccaccctgatcatcgagcac

SEQ ID NO: 39022 - RNA, 27 nt, synthetic construct
  misc_feature 1..27: note = UPF0472 protein C16orf72 (67-75)
  source 1..27: mol_type = other RNA
gccaccgccgtggcgcagctgtacaag

SEQ ID NO: 39023 - RNA, 30 nt, synthetic construct
  misc_feature 1..30: note = NAD(P) transhydrogenase, mitochondrial (730-739)
  source 1..30: mol_type = other RNA
gccaccgacgccgcggccaacctgaccaag

SEQ ID NO: 39024 - RNA, 33 nt, synthetic construct
  misc_feature 1..33: note = E3 ubiquitin-protein ligase RNF220 (291-301)
  source 1..33: mol_type = other RNA
gccaccgacgacctgcaccacagcgaccgctac

SEQ ID NO: 39025 - RNA, 30 nt, synthetic construct
  misc_feature 1..30: note = Collagen alpha-1(XII) chain (183-192)
  source 1..30: mol_type = other RNA
gccaccgaccccgacgacacccacgcctac

SEQ ID NO: 39026 - RNA, 27 nt, synthetic construct
  misc_feature 1..27: note = V-type proton ATPase 21 kDa proteolipid subunit (120-128)
  source 1..27: mol_type = other RNA
gccaccgaccccaaggccatcggccac

SEQ ID NO: 39027 - RNA, 27 nt, synthetic construct
  misc_feature 1..27: note = ATP-dependent RNA helicase DDX1 (614-622)
  source 1..27: mol_type = other RNA
gccaccgagaaggagaaggtgtggtac

SEQ ID NO: 39028 - RNA, 36 nt, synthetic construct
  misc_feature 1..36: note = Apoptosis inhibitor 5 (17-28)
  source 1..36: mol_type = other RNA
gccaccgagcaggtgggccagcacaaggacgcctac

SEQ ID NO: 39029 - RNA, 33 nt, synthetic construct
  misc_feature 1..33: note = Calcium-binding protein 39 (186-196)
  source 1..33: mol_type = other RNA
gccaccttcaaggacctgctcacccgccacaag

SEQ ID NO: 39030 - RNA, 30 nt, synthetic construct
  misc_feature 1..30: note = Serine/threonine-protein kinase OSR1 (172-181)
  source 1..30: mol_type = other RNA
gccaccggcggggacatcacccgcaacaag

SEQ ID NO: 39031 - RNA, 30 nt, synthetic construct
  misc_feature 1..30: note = Inositol-pentakisphosphate 2-kinase (170-179)
  source 1..30: mol_type = other RNA
gccaccggcaagtggaagcagatcagcaag

SEQ ID NO: 39032 - RNA, 30 nt, synthetic construct
  misc_feature 1..30: note = DNA-directed RNA polymerase II subunit RPB2 (442-451)
  source 1..30: mol_type = other RNA
gccaccggcaactggggggaccagaagaag

SEQ ID NO: 39033 - RNA, 27 nt, synthetic construct
  misc_feature 1..27: note = Plexin-B2 (68-76)
  source 1..27: mol_type = other RNA
gccaccggccccgccctggacaacaag

SEQ ID NO: 39034 - RNA, 27 nt, synthetic construct
  misc_feature 1..27: note = General transcription factor IIH subunit 2 (32-40)
  source 1..27: mol_type = other RNA
gccaccatcgaggacatcctgttcaag

SEQ ID NO: 39035 - RNA, 33 nt, synthetic construct
  misc_feature 1..33: note = Polycomb group RING finger protein 6 (210-220)
  source 1..33: mol_type = other RNA
gccaccatcggccacgtggagaagttcctgcgc

SEQ ID NO: 39036 - RNA, 33 nt, synthetic construct
  misc_feature 1..33: note = Isocitrate dehydrogenase (NAD) subunit alpha, mitochondrial (333-343)
  source 1..33: mol_type = other RNA
gccaccatcaaggacggcaagagcctgaccaag

SEQ ID NO: 39037 - RNA, 27 nt, synthetic construct
  misc_feature 1..27: note = Protein MMS22-like (831-839)
  source 1..27: mol_type = other RNA
gccaccatccccccgatcagctccctg

SEQ ID NO: 39038 - RNA, 30 nt, synthetic construct
  misc_feature 1..30: note = Ankyrin repeat and KH domain-containing protein 1 (1428-1437)
  source 1..30: mol_type = other RNA
gccaccatcaccgacaaggagctgctcaag

SEQ ID NO: 39039 - RNA, 33 nt, synthetic construct
  misc_feature 1..33: note = Ankyrin repeat and KH domain-containing protein 1 (1428-1438)
  source 1..33: mol_type = other RNA
gccaccatcaccgacaaggagctgctcaagaag

SEQ ID NO: 39040 - RNA, 33 nt, synthetic construct
  misc_feature 1..33: note = Ankyrin repeat domain-containing protein 17 (1306-1316)
  source 1..33: mol_type = other RNA
gccaccatcaccgacaaggagatgctgaagaag

SEQ ID NO: 39041 - RNA, 30 nt, synthetic construct
  misc_feature 1..30: note = HAUS augmin-like complex subunit 7 (418-427)
  source 1..30: mol_type = other RNA
gccaccaagatgaacgagctgatggagaag

SEQ ID NO: 39042 - RNA, 27 nt, synthetic construct
  misc_feature 1..27: note = E3 SUMO-protein ligase NSE2 (69-77)
  source 1..27: mol_type = other RNA
gccaccctggaccgccagctcaaccac

SEQ ID NO: 39043 - RNA, 33 nt, synthetic construct
  misc_feature 1..33: note = PIN2/TERF1-interacting telomerase inhibitor 1 (312-322)
  source 1..33: mol_type = other RNA
gccaccctggaggagaccctcgtgaagaagaag

SEQ ID NO: 39044 - RNA, 33 nt, synthetic construct
  misc_feature 1..33: note = Coatomer subunit beta (111-121)
  source 1..33: mol_type = other RNA
gccaccctgggcgacctcaagctggtggagaag

SEQ ID NO: 39045 - RNA, 36 nt, synthetic construct
  misc_feature 1..36: note = DNA-directed RNA polymerase II subunit RPB1 (907-918)
  source 1..36: mol_type = other RNA
gccaccctgaagcccagcaacaaggccttcgagaag

SEQ ID NO: 39046 - RNA, 33 nt, synthetic construct
  misc_feature 1..33: note = Telomerase protein component 1 (83-93)
  source 1..33: mol_type = other RNA
gccaccctgagcgacctcaagaccatggagaag

SEQ ID NO: 39047 - RNA, 30 nt, synthetic construct
  misc_feature 1..30: note = KIF1-binding protein (254-263)
  source 1..30: mol_type = other RNA
gccaccctgagccagttctacatcaacaag

SEQ ID NO: 39048 - RNA, 36 nt, synthetic construct
  misc_feature 1..36: note = Eukaryotic initiation factor 4A-I (214-225)
  source 1..36: mol_type = other RNA
gccaccatgcccagcgacgtgctggaggtcaccaag

SEQ ID NO: 39049 - RNA, 33 nt, synthetic construct
  misc_feature 1..33: note = Activity-dependent neuroprotector homeobox protein (988-998)
  source 1..33: mol_type = other RNA
gccaccatgcagggcgaccgcgagcagctgaag

SEQ ID NO: 39050 - RNA, 30 nt, synthetic construct
  misc_feature 1..30: note = Arf-GAP with coiled-coil, ANK repeat and PH domain-containing protein 2 (155-164)
  source 1..30: mol_type = other RNA
gccaccaacatcctgaccgccacgcgcaag

SEQ ID NO: 39051 - RNA, 30 nt, synthetic construct
  misc_feature 1..30: note = Homeobox protein Hox-A13 (342-351)
  source 1..30: mol_type = other RNA
gccaccaacaagttcatcaccaaggacaag

SEQ ID NO: 39052 - RNA, 30 nt, synthetic construct
  misc_feature 1..30: note = Rho-related BTB domain-containing protein 3 (557-566)
  source 1..30: mol_type = other RNA
gccaccaactacctgatcttcagccagaag

SEQ ID NO: 39053 - RNA, 27 nt, synthetic construct
  misc_feature 1..27: note = Glutathione S-transferase kappa 1 (148-156)
  source 1..27: mol_type = other RNA
gccacccccaaggtgaagaaccagctg

SEQ ID NO: 39054 - RNA, 30 nt, synthetic construct
  misc_feature 1..30: note = Splicing factor 1 (7-16)
  source 1..30: mol_type = other RNA
gccacccccctggacttcccgagcaagaag

SEQ ID NO: 39055 - RNA, 27 nt, synthetic construct
  misc_feature 1..27: note = Geranylgeranyl transferase type-2 subunit alpha (31-39)
  source 1..27: mol_type = other RNA
gccacccaggccgtgttccagaagcgc

SEQ ID NO: 39056 - RNA, 36 nt, synthetic construct
  misc_feature 1..36: note = Forkhead box protein J3 (44-55)
  source 1..36: mol_type = other RNA
gccacccagaacgcccacggcaccgggatcagcaag

SEQ ID NO: 39057 - RNA, 27 nt, synthetic construct
  misc_feature 1..27: note = Tubby-related protein 4 (741-749)
  source 1..27: mol_type = other RNA
gccacccagtaccccgtgagcaaccgc

SEQ ID NO: 39058 - RNA, 33 nt, synthetic construct
  misc_feature 1..33: note = Importin subunit alpha-5 (407-417)
  source 1..33: mol_type = other RNA
gccaccagcggcgggtccgccgagcagatcaag

SEQ ID NO: 39059 - RNA, 27 nt, synthetic construct
  misc_feature 1..27: note = CLIP-associating protein 1 (426-434)
  source 1..27: mol_type = other RNA
gccaccagcggcgtggtcgccgtgcgc

SEQ ID NO: 39060 - RNA, 27 nt, synthetic construct
  misc_feature 1..27: note = Origin recognition complex subunit 3 (253-261)
  source 1..27: mol_type = other RNA
gccaccagccccatcatcatccaccgc

SEQ ID NO: 39061 - RNA, 30 nt, synthetic construct
  misc_feature 1..30: note = Origin recognition complex subunit 3 (253-262)
  source 1..30: mol_type = other RNA
gccaccagccccatcatcatccaccgcctg

SEQ ID NO: 39062 - RNA, 27 nt, synthetic construct
  misc_feature 1..27: note = Importin subunit alpha-1 (60-68)
  source 1..27: mol_type = other RNA
gccaccagccccctgcaggagaaccgc

SEQ ID NO: 39063 - RNA, 27 nt, synthetic construct
  misc_feature 1..27: note = tRNA pseudouridine synthase-like 1 (125-133)
  source 1..27: mol_type = other RNA
gccaccagccgcacctacctgtaccgg

SEQ ID NO: 39064 - RNA, 33 nt, synthetic construct
  misc_feature 1..33: note = Golgi apparatus membrane protein TVP23 homolog B (186-196)
  source 1..33: mol_type = other RNA
gccaccagctacttcggcaagcagttcctgcgc

SEQ ID NO: 39065 - RNA, 33 nt, synthetic construct
  misc_feature 1..33: note = ATP-citrate synthase (93-103)
  source 1..33: mol_type = other RNA
gccaccgtgggcaaggccaccgggttcctgaag

SEQ ID NO: 39066 - RNA, 27 nt, synthetic construct
  misc_feature 1..27: note = Phosphoribosyl pyrophosphate synthase-associated protein 1 (222-230)
  source 1..27: mol_type = other RNA
gccaccgtgcaccccggcctggagctc

SEQ ID NO: 39067 - RNA, 30 nt, synthetic construct
  misc_feature 1..30: note = Integrator complex subunit 7 (445-454)
  source 1..30: mol_type = other RNA
gccaccgtgatcttcgtcgccagccagaag

SEQ ID NO: 39068 - RNA, 27 nt, synthetic construct
  misc_feature 1..27: note = Pre-mRNA-processing factor 19 (180-188)
  source 1..27: mol_type = other RNA
gccaccgtgctgaccacggagcgcaag

SEQ ID NO: 39069 - RNA, 33 nt, synthetic construct
  misc_feature 1..33: note = Mitochondrial folate transporter/carrier (241-251)
  source 1..33: mol_type = other RNA
gccacctacccctaccaggtggtccgcgcccgg

SEQ ID NO: 39070 - RNA, 33 nt, synthetic construct
  misc_feature 1..33: note = Eukaryotic translation initiation factor 3 subunit D (48-58)
  source 1..33: mol_type = other RNA
gccacctaccaggacaagcgctacaccaacaag

SEQ ID NO: 39071 - RNA, 27 nt, synthetic construct
  misc_feature 1..27: note = Cleavage and polyadenylation specificity factor subunit 2 (52-60)
  source 1..27: mol_type = other RNA
gccacctacgtgcagccccgccggaag

SEQ ID NO: 39072 - RNA, 27 nt, synthetic construct
  misc_feature 1..27: note = Protein phosphatase methylesterase 1 (362-370)
  source 1..27: mol_type = other RNA
gccgtggccaccttcctgatccgccac

SEQ ID NO: 39073 - RNA, 27 nt, synthetic construct
  misc_feature 1..27: note = Serine/threonine-protein kinase SIK2 (699-707)
  source 1..27: mol_type = other RNA
gccgtggacccccagcacaacggctac

SEQ ID NO: 39074 - RNA, 27 nt, synthetic construct
  misc_feature 1..27: note = Fanconi anemia group D2 protein (69-77)
  source 1..27: mol_type = other RNA
gccgtggaccagatcgccttccagaag

SEQ ID NO: 39075 - RNA, 27 nt, synthetic construct
  misc_feature 1..27: note = Breast cancer type 1 susceptibility protein (1104-1112)
  source 1..27: mol_type = other RNA
gccgtgttcagcaagtccgtccagaag

SEQ ID NO: 39076 - RNA, 33 nt, synthetic construct
  misc_feature 1..33: note = Uncharacterized aarF domain-containing protein kinase 5 (335-345)
  source 1..33: mol_type = other RNA
gccgtgcacgacatcgccgagaagctgatcaag

SEQ ID NO: 39077 - RNA, 27 nt, synthetic construct
  misc_feature 1..27: note = Telomere-associated protein RIF1 (481-489)
  source 1..27: mol_type = other RNA
gccgtgcacgacagcttcgtcgccgtg

SEQ ID NO: 39078 - RNA, 33 nt, synthetic construct
  misc_feature 1..33: note = Protein canopy homolog 4 (15-25)
  source 1..33: mol_type = other RNA
gccgtgcacgaggcctgggcgggcatgctgaag

SEQ ID NO: 39079 - RNA, 27 nt, synthetic construct
  misc_feature 1..27: note = Zinc transporter ZIP3 (302-310)
  source 1..27: mol_type = other RNA
gccgtgcacgagaccctggtcgccgtg

SEQ ID NO: 39080 - RNA, 27 nt, synthetic construct
  misc_feature 1..27: note = Bifunctional methylenetetrahydrofolate dehydrogenase/cyclohydrolase, mitochondrial (270-278)
  source 1..27: mol_type = other RNA
gccgtgatcgacgtcggcatcaaccgc

SEQ ID NO: 39081 - RNA, 39 nt, synthetic construct
  misc_feature 1..39: note = Cytoplasmic dynein 1 heavy chain 1 (3288-3300)
  source 1..39: mol_type = other RNA
gccgtgatcgaggcccagaacgcggtcaagagcatcaag

SEQ ID NO: 39082 - RNA, 27 nt, synthetic construct
  misc_feature 1..27: note = Nucleosome-remodeling factor subunit BPTF (2407-2415)
  source 1..27: mol_type = other RNA
gccgtgatcgagcacctgaagcagaag

SEQ ID NO: 39083 - RNA, 33 nt, synthetic construct
  misc_feature 1..33: note = L-xylulose reductase (110-120)
  source 1..33: mol_type = other RNA
gccgtgatccaggtcagccagatcgtggcccgc

SEQ ID NO: 39084 - RNA, 33 nt, synthetic construct
  misc_feature 1..33: note = Protein S100-A16 (11-21)
  source 1..33: mol_type = other RNA
gccgtgatcgtcctggtggagaacttctacaag

SEQ ID NO: 39085 - RNA, 30 nt, synthetic construct
  misc_feature 1..30: note = Periodic tryptophan protein 1 homolog (46-55)
  source 1..30: mol_type = other RNA
gccgtgctggacctcagctggaacaagctg

SEQ ID NO: 39086 - RNA, 33 nt, synthetic construct
  misc_feature 1..33: note = Zinc finger SWIM domain-containing protein 8 (430-440)
  source 1..33: mol_type = other RNA
gccgtgctggaccccgccctcagcccgcagcgc

SEQ ID NO: 39087 - RNA, 27 nt, synthetic construct
  misc_feature 1..27: note = Vacuolar protein sorting-associated protein 11 homolog (740-748)
  source 1..27: mol_type = other RNA
gccgtgctgaagcacatcgagaacaag

SEQ ID NO: 39088 - RNA, 33 nt, synthetic construct
  misc_feature 1..33: note = Charged multivesicular body protein 3 (30-40)
  source 1..33: mol_type = other RNA
gccgtgctgcgcgtcgccggcagcctccagaag

SEQ ID NO: 39089 - RNA, 33 nt, synthetic construct
  misc_feature 1..33: note = Long-chain-fatty-acid-CoA ligase 4 (332-342)
  source 1..33: mol_type = other RNA
gccgtgcccgagatcatggaccgcatctacaag

SEQ ID NO: 39090 - RNA, 33 nt, synthetic construct
  misc_feature 1..33: note = Aspartyl aminopeptidase (23-33)
  source 1..33: mol_type = other RNA
gccgtgcagaccgccgcgaaggagctgctcaag

SEQ ID NO: 39091 - RNA, 30 nt, synthetic construct
  misc_feature 1..30: note = TSC22 domain family protein 4 (336-345)
  source 1..30: mol_type = other RNA
gccgtgcgcgaggaggtcgaggtgctgaag

SEQ ID NO: 39092 - RNA, 30 nt, synthetic construct
  misc_feature 1..30: note = Peroxisomal acyl-coenzyme A oxidase 1 (63-72)
  source 1..30: mol_type = other RNA
gccgtgcgcaagagcgccatcatggtcaag

SEQ ID NO: 39093 - RNA, 33 nt, synthetic construct
  misc_feature 1..33: note = Pre-mRNA-processing factor 6 (914-924)
  source 1..33: mol_type = other RNA
gccgtgagcaaggacatcgccaactggcagaag

SEQ ID NO: 39094 - RNA, 27 nt, synthetic construct
  misc_feature 1..27: note = 5'-AMP-activated protein kinase subunit gamma-1 (141-149)
  source 1..27: mol_type = other RNA
gccgtgagctccctgatccgcaacaag

SEQ ID NO: 39095 - RNA, 33 nt, synthetic construct
  misc_feature 1..33: note = CD99 antigen-like protein 2 (58-68)
  source 1..33: mol_type = other RNA
gccgtgagctcctacatcagctaccagcagaag

SEQ ID NO: 39096 - RNA, 27 nt, synthetic construct
  misc_feature 1..27: note = Inactive hydroxysteroid dehydrogenase-like protein 1 (258-266)
  source 1..27: mol_type = other RNA
gccgtgagcaccctgggcatctccaag

SEQ ID NO: 39097 - RNA, 33 nt, synthetic construct
  misc_feature 1..33: note = CD81 antigen (63-73)
  source 1..33: mol_type = other RNA
gccgtggtcgacgacgacgccaacaacgcgaag

SEQ ID NO: 39098 - RNA, 27 nt, synthetic construct
  misc_feature 1..27: note = GTP-binding protein 2 (496-504)
  source 1..27: mol_type = other RNA
gccgtggtcgagaagatccacgccaag

SEQ ID NO: 39099 - RNA, 33 nt, synthetic construct
  misc_feature 1..33: note = Mitochondrial folate transporter/carrier (154-164)
  source 1..33: mol_type = other RNA
gccgtggtcaacagcccccaccgccagtacaag

SEQ ID NO: 39100 - RNA, 27 nt, synthetic construct
  misc_feature 1..27: note = Inositol 1,4,5-trisphosphate receptor-interacting protein (385-393)
  source 1..27: mol_type = other RNA
gccgtgtacgagcgccacttcctgcgg

SEQ ID NO: 39101 - RNA, 33 nt, synthetic construct
  misc_feature 1..33: note = Nuclear factor interleukin-3-regulated protein (146-156)
  source 1..33: mol_type = other RNA
gccgtgtacttccaggactaccagaccagcaag

SEQ ID NO: 39102 - RNA, 27 nt, synthetic construct
  misc_feature 1..27: note = Aladin (158-166)
  source 1..27: mol_type = other RNA
gcctggcacccccacaccaacaagttc

SEQ ID NO: 39103 - RNA, 27 nt, synthetic construct
  misc_feature 1..27: note = Ankyrin-2 (1480-1488)
  source 1..27: mol_type = other RNA
gcctacatcgccgaccacctgggcttc

SEQ ID NO: 39104 - RNA, 27 nt, synthetic construct
  misc_feature 1..27: note = Leucine-rich repeat protein SHOC-2 (468-476)
  source 1..27: mol_type = other RNA
gcctacctgaaggacctccagaagctg

SEQ ID NO: 39105 - RNA, 27 nt, synthetic construct
  misc_feature 1..27: note = Fragile X mental retardation syndrome-related protein 1 (356-364)
  source 1..27: mol_type = other RNA
gcctacctgaaggaggtggagcagctc

SEQ ID NO: 39106 - RNA, 27 nt, synthetic construct
  misc_feature 1..27: note = Serine/threonine-protein kinase RIO1 (156-164)
  source 1..27: mol_type = other RNA
gcctacctgagcaaggccatggagatc

SEQ ID NO: 39107 - RNA, 27 nt, synthetic construct
  misc_feature 1..27: note = ER degradation-enhancing alpha-mannosidase-like protein 1 (395-403)
  source 1..27: mol_type = other RNA
gcctaccagagcatccagaactacctg

SEQ ID NO: 39108 - RNA, 27 nt, synthetic construct
  misc_feature 1..27: note = Angiomotin-like protein 1 (604-612)
  source 1..27: mol_type = other RNA
gcctacgtggagaaggtcgagaagctg

SEQ ID NO: 39109 - RNA, 27 nt, synthetic construct
  misc_feature 1..27: note = Angiomotin-like protein 2 (481-489)
  source 1..27: mol_type = other RNA
gcctacgtggagaaggtcgagcgcctg

SEQ ID NO: 39110 - RNA, 27 nt, synthetic construct
  misc_feature 1..27: note = Zinc finger protein 580 (248-256)
  source 1..27: mol_type = other RNA
gacgccgccgagctggcgcagcacgtg

SEQ ID NO: 39111 - RNA, 27 nt, synthetic construct
  misc_feature 1..27: note = Embryonic stem cell-specific 5-hydroxymethylcytosine-binding protein (62-70)
  source 1..27: mol_type = other RNA
gacgccgacagctccgagcgcatcatc

SEQ ID NO: 39112 - RNA, 27 nt, synthetic construct
  misc_feature 1..27: note = Proteasome subunit beta type-10 (90-98)
  source 1..27: mol_type = other RNA
gacgccgagatgaccacccgcatggtg

SEQ ID NO: 39113 - RNA, 27 nt, synthetic construct
  misc_feature 1..27: note = Torsin-1A-interacting protein 2 (129-137)
  source 1..27: mol_type = other RNA
gacgcccacctgggcagctccagcgtg

SEQ ID NO: 39114 - RNA, 27 nt, synthetic construct
  misc_feature 1..27: note = Centrosomal protein of 95 kDa (61-69)
  source 1..27: mol_type = other RNA
gacgcccacaacgtgcaggccgtcatc

SEQ ID NO: 39115 - RNA, 27 nt, synthetic construct
  misc_feature 1..27: note = Cohesin subunit SA-1 (302-310)
  source 1..27: mol_type = other RNA
gacgccatcgccgagatccgcgcgatc

SEQ ID NO: 39116 - RNA, 27 nt, synthetic construct
  misc_feature 1..27: note = Heat shock cognate 71 kDa protein (323-331)
  source 1..27: mol_type = other RNA
gacgccaagctggacaagagccagatc

SEQ ID NO: 39117 - RNA, 24 nt, synthetic construct
  misc_feature 1..24: note = Phosphatidylinositol 4-kinase alpha (403-410)
  source 1..24: mol_type = other RNA
gacgcccccgagctgagccacgtg

SEQ ID NO: 39118 - RNA, 24 nt, synthetic construct
  misc_feature 1..24: note = Carnitine O-palmitoyltransferase 1, liver isoform (477-484)
  source 1..24: mol_type = other RNA
gacgcccccatcgtggcccacctg

SEQ ID NO: 39119 - RNA, 30 nt, synthetic construct
  misc_feature 1..30: note = Transcription activator BRG1 (696-705)
  source 1..30: mol_type = other RNA
gacgcccccaaggccggccagctggaggcg

SEQ ID NO: 39120 - RNA, 27 nt, synthetic construct
  misc_feature 1..27: note = Protein RMD5 homolog B (51-59)
  source 1..27: mol_type = other RNA
gacgcccgcgagcagcagcagcagatc

SEQ ID NO: 39121 - RNA, 27 nt, synthetic construct
  misc_feature 1..27: note = Myotubularin (278-286)
  source 1..27: mol_type = other RNA
gacgcccgccccagcgtgaacgccgtc

SEQ ID NO: 39122 - RNA, 27 nt, synthetic construct
  misc_feature 1..27: note = Filamin-A (1614-1622)
  source 1..27: mol_type = other RNA
gacgccagcaagtgcaccgtgaccgtc

SEQ ID NO: 39123 - RNA, 27 nt, synthetic construct
  misc_feature 1..27: note = E3 ubiquitin-protein ligase RNF114 (127-135)
  source 1..27: mol_type = other RNA
gacgccagcctgcagccccgcaacgtg

SEQ ID NO: 39124 - RNA, 27 nt, synthetic construct
  misc_feature 1..27: note = Translocon-associated protein subunit delta (40-48)
  source 1..27: mol_type = other RNA
gacgccgtgatcagcaccgagaccgtc

SEQ ID NO: 39125 - RNA, 24 nt, synthetic construct
  misc_feature 1..24: note = DNA-directed RNA polymerase II subunit RPB2 (306-313)
  source 1..24: mol_type = other RNA
gacgccgtgaacgtccagaagatc

SEQ ID NO: 39126 - RNA, 27 nt, synthetic construct
  misc_feature 1..27: note = Adipocyte plasma membrane-associated protein (180-188)
  source 1..27: mol_type = other RNA
gacgcctacaagggcctgttcgaggtg

SEQ ID NO: 39127 - RNA, 27 nt, synthetic construct
  misc_feature 1..27: note = Securin (108-116)
  source 1..27: mol_type = other RNA
gacgcctaccccgagatcgagaagttc

SEQ ID NO: 39128 - RNA, 33 nt, synthetic construct
  misc_feature 1..33: note = Proteasome subunit beta type-4 (118-128)
  source 1..33: mol_type = other RNA
gacgaggagctgctcggcgacgggcacagctac

SEQ ID NO: 39129 - RNA, 27 nt, synthetic construct
  misc_feature 1..27: note = DNA polymerase alpha catalytic subunit (336-344)
  source 1..27: mol_type = other RNA
gacgaggagcaggtgttccacttctac

SEQ ID NO: 39130 - RNA, 33 nt, synthetic construct
  misc_feature 1..33: note = 26S protease regulatory subunit 8 (123-133)
  source 1..33: mol_type = other RNA
gacgagatcgacagcatcggctccagccgcctg

SEQ ID NO: 39131 - RNA, 27 nt, synthetic construct
  misc_feature 1..27: note = N-alpha-acetyltransferase 10 (47-55)
  source 1..27: mol_type = other RNA
gacgagaacggcaagatcgtggggtac

SEQ ID NO: 39132 - RNA, 27 nt, synthetic construct
  misc_feature 1..27: note = 40S ribosomal protein S18 (62-70)
  source 1..27: mol_type = other RNA
gacgaggtggagcgcgtcatcaccatc

SEQ ID NO: 39133 - RNA, 27 nt, synthetic construct
  misc_feature 1..27: note = Rab GDP dissociation inhibitor beta (21-29)
  source 1..27: mol_type = other RNA
gacttcaaggtgaccgagggcagcttc

SEQ ID NO: 39134 - RNA, 27 nt, synthetic construct
  misc_feature 1..27: note = Fatty acid synthase (2469-2477)
  source 1..27: mol_type = other RNA
gacggcaaggtgagcgtccacgtgatc

SEQ ID NO: 39135 - RNA, 27 nt, synthetic construct
  misc_feature 1..27: note = Nucleoporin NUP53 (211-219)
  source 1..27: mol_type = other RNA
gacggccgcatcttcggggagagcatc

SEQ ID NO: 39136 - RNA, 27 nt, synthetic construct
  misc_feature 1..27: note = Nicotinamide/nicotinic acid mononucleotide adenylyltransferase 1 (112-120)
  source 1..27: mol_type = other RNA
gaccaccagcagaacagccccaccctg

SEQ ID NO: 39137 - RNA, 42 nt, synthetic construct
  misc_feature 1..42: note = Glia-derived nexin (118-131)
  source 1..42: mol_type = other RNA
gacatcgtgaccgtcgccaacgccgtgttcgtgaagaacgcg

SEQ ID NO: 39138 - RNA, 27 nt, synthetic construct
  misc_feature 1..27: note = Non-POU domain-containing octamer-binding protein (226-234)
  source 1..27: mol_type = other RNA
gacctgatgcgccggcaggaggagctc

SEQ ID NO: 39139 - RNA, 27 nt, synthetic construct
  misc_feature 1..27: note = Homeodomain-interacting protein kinase 1 (252-260)
  source 1..27: mol_type = other RNA
gaccccttccagcagaccttcatcgtg

SEQ ID NO: 39140 - RNA, 27 nt, synthetic construct
  misc_feature 1..27: note = Mediator of RNA polymerase II transcription subunit 13-like (1410-1418)
  source 1..27: mol_type = other RNA
gacccctacggcgggcaccgcgacgtg

SEQ ID NO: 39141 - RNA, 24 nt, synthetic construct
  misc_feature 1..24: note = Plectin (3424-3431)
  source 1..24: mol_type = other RNA
gacccctacagcggctccaccatc

SEQ ID NO: 39142 - RNA, 27 nt, synthetic construct
  misc_feature 1..27: note = Elongator complex protein 2 (46-54)
  source 1..27: mol_type = other RNA
gaccagttccagaaggtgctgagcctc

SEQ ID NO: 39143 - RNA, 30 nt, synthetic construct
  misc_feature 1..30: note = Ras GTPase-activating protein-binding protein 2 (285-294)
  source 1..30: mol_type = other RNA
gacagcgacaaccgccggatcatccgctac

SEQ ID NO: 39144 - RNA, 24 nt, synthetic construct
  misc_feature 1..24: note = AP-3 complex subunit delta-1 (314-321)
  source 1..24: mol_type = other RNA
gacagcgaccagaacctgaagtac

SEQ ID NO: 39145 - RNA, 27 nt, synthetic construct
  misc_feature 1..27: note = Ubiquitin carboxyl-terminal hydrolase 28 (507-515)
  source 1..27: mol_type = other RNA
gacagctacggcgggctgcgcaacgtg

SEQ ID NO: 39146 - RNA, 27 nt, synthetic construct
  misc_feature 1..27: note = Zinc transporter ZIP6 (485-493)
  source 1..27: mol_type = other RNA
gacaccgacgaccgcaccgagggctac

SEQ ID NO: 39147 - RNA, 24 nt, synthetic construct
  misc_feature 1..24: note = Poly (ADP-ribose) polymerase 14 (118-125)
  source 1..24: mol_type = other RNA
gacaccatcatggccaccaagctg

SEQ ID NO: 39148 - RNA, 24 nt, synthetic construct
  misc_feature 1..24: note = Protein S100-A9 (67-74)
  source 1..24: mol_type = other RNA
gacaccaacgccgacaagcagctg

SEQ ID NO: 39149 - RNA, 27 nt, synthetic construct
  misc_feature 1..27: note = Protein FAM172A (263-271)
  source 1..27: mol_type = other RNA
gacgtgaagaacaaggtcaccgccgtg

SEQ ID NO: 39150 - RNA, 27 nt, synthetic construct
  misc_feature 1..27: note = Cytochrome c oxidase subunit 6C (57-65)
  source 1..27: mol_type = other RNA
gacgtgatgaaggacttcgaggagatg

SEQ ID NO: 39151 - RNA, 27 nt, synthetic construct
  misc_feature 1..27: note = N-acetyl-D-glucosamine kinase (175-183)
  source 1..27: mol_type = other RNA
gaggccgccccccacgacatcggctac

SEQ ID NO: 39152 - RNA, 30 nt, synthetic construct
  misc_feature 1..30: note = Myosin light polypeptide 6 (148-157)
  source 1..30: mol_type = other RNA
gaggccttcgtgcgccacatcctgagcggc

SEQ ID NO: 39153 - RNA, 27 nt, synthetic construct
  misc_feature 1..27: note = Hsp70-binding protein 1 (201-209)
  source 1..27: mol_type = other RNA
gaggccggcgccgcggggctgcgctgg

SEQ ID NO: 39154 - RNA, 24 nt, synthetic construct
  misc_feature 1..24: note = Probable U3 small nucleolar RNA-associated protein 11 (43-50)
  source 1..24: mol_type = other RNA
gaggccaagaagatcgagcgcctg

SEQ ID NO: 39155 - RNA, 27 nt, synthetic construct
  misc_feature 1..27: note = Ribosomal RNA-processing protein 7 homolog A (260-268)
  source 1..27: mol_type = other RNA
gaggaggacaagcagcgcatcgagctg

SEQ ID NO: 39156 - RNA, 27 nt, synthetic construct
  misc_feature 1..27: note = WD40 repeat-containing protein SMU1 (197-205)
  source 1..27: mol_type = other RNA
gaggaggagaagttccccacccagctg

SEQ ID NO: 39157 - RNA, 30 nt, synthetic construct
  misc_feature 1..30: note = Guanine nucleotide-binding protein-like 3-like protein (97-106)
  source 1..30: mol_type = other RNA
gaggagttcgagcacaaggaggaggtgctg

SEQ ID NO: 39158 - RNA, 27 nt, synthetic construct
  misc_feature 1..27: note = Protocadherin Fat 1 (2948-2956)
  source 1..27: mol_type = other RNA
gaggagatcaaccgccaggtgacctac

SEQ ID NO: 39159 - RNA, 27 nt, synthetic construct
  misc_feature 1..27: note = Midasin (582-590)
  source 1..27: mol_type = other RNA
gaggagatcagccacctgatctccttc

SEQ ID NO: 39160 - RNA, 27 nt, synthetic construct
  misc_feature 1..27: note = Protein strawberry notch homolog 2 (93-101)
  source 1..27: mol_type = other RNA
gaggagctgggccacaccgagacctac

SEQ ID NO: 39161 - RNA, 27 nt, synthetic construct
  misc_feature 1..27: note = X-ray repair cross-complementing protein 5 (651-659)
  source 1..27: mol_type = other RNA
gaggagcagcgcttcaacaacttcctg

SEQ ID NO: 39162 - RNA, 24 nt, synthetic construct
  misc_feature 1..24: note = Angiomotin-like protein 2 (573-580)
  source 1..24: mol_type = other RNA
gaggagcgcgccatgcggcagttc

SEQ ID NO: 39163 - RNA, 30 nt, synthetic construct
  misc_feature 1..30: note = Methylmalonic aciduria and homocystinuria type D protein, mitochondrial (191-200)
  source 1..30: mol_type = other RNA
gaggaggtggagatcgagcgcgaggtcctg

SEQ ID NO: 39164 - RNA, 27 nt, synthetic construct
  misc_feature 1..27: note = Mitotic checkpoint serine/threonine-protein kinase BUB1 beta (160-168)
  source 1..27: mol_type = other RNA
gaggagtacgaggcccgcgagaacttc

SEQ ID NO: 39165 - RNA, 27 nt, synthetic construct
  misc_feature 1..27: note = Mediator of RNA polymerase II transcription subunit 18 (128-136)
  source 1..27: mol_type = other RNA
gagttcgtggccaagggccacctgttc

SEQ ID NO: 39166 - RNA, 27 nt, synthetic construct
  misc_feature 1..27: note = Glycerol-3-phosphate dehydrogenase 1-like protein (49-57)
  source 1..27: mol_type = other RNA
gagggccccgaggggctgaagctcatc

SEQ ID NO: 39167 - RNA, 27 nt, synthetic construct
  misc_feature 1..27: note = 3-ketoacyl-CoA thiolase, mitochondrial (221-229)
  source 1..27: mol_type = other RNA
gagcacgcccgcccccagaccaccctg

SEQ ID NO: 39168 - RNA, 27 nt, synthetic construct
  misc_feature 1..27: note = COMM domain-containing protein 6 (77-85)
  source 1..27: mol_type = other RNA
gagatcgccgccgtgatcgagaccgtc

SEQ ID NO: 39169 - RNA, 30 nt, synthetic construct
  misc_feature 1..30: note = Actin-related protein 6 (47-56)
  source 1..30: mol_type = other RNA
gagatcaaggaccccagcggcctgttctac

SEQ ID NO: 39170 - RNA, 27 nt, synthetic construct
  misc_feature 1..27: note = Spectrin beta chain, non-erythrocytic 1 (1987-1995)
  source 1..27: mol_type = other RNA
gagatcaaggagaagctgctccagctg

SEQ ID NO: 39171 - RNA, 27 nt, synthetic construct
  misc_feature 1..27: note = DnaJ homolog subfamily C member 8 (83-91)
  source 1..27: mol_type = other RNA
gagatcaagaagcgcttccggcagctg

SEQ ID NO: 39172 - RNA, 27 nt, synthetic construct
  misc_feature 1..27: note = Heat shock protein 105 kDa (740-748)
  source 1..27: mol_type = other RNA
gagatcaagaccaagatcaaggagctg

SEQ ID NO: 39173 - RNA, 27 nt, synthetic construct
  misc_feature 1..27: note = Replication protein A 14 kDa subunit (62-70)
  source 1..27: mol_type = other RNA
gagatcagcggcatcgtggaggtcgtg

SEQ ID NO: 39174 - RNA, 27 nt, synthetic construct
  misc_feature 1..27: note = Centrosomal protein of 170 kDa (1472-1480)
  source 1..27: mol_type = other RNA
gagatcagctccatcctgcaggagctc

SEQ ID NO: 39175 - RNA, 33 nt, synthetic construct
  misc_feature 1..33: note = Peptidyl-prolyl cis-trans isomerase CWC27 homolog (445-455)
  source 1..33: mol_type = other RNA
gagatctacgacccccgcaacccggtgaacaag

SEQ ID NO: 39176 - RNA, 27 nt, synthetic construct
  misc_feature 1..27: note = Serine-protein kinase ATM (1146-1154)
  source 1..27: mol_type = other RNA
gagatctacaaccgcaagagcgtgctg

SEQ ID NO: 39177 - RNA, 27 nt, synthetic construct
  misc_feature 1..27: note = Translin-associated protein X (45-53)
  source 1..27: mol_type = other RNA
gagctggacgcccgccacgacaagtac

SEQ ID NO: 39178 - RNA, 27 nt, synthetic construct
  misc_feature 1..27: note = Ankyrin repeat domain-containing protein 40 (281-289)
  source 1..27: mol_type = other RNA
gagctggaccgccaggagctcacctac

SEQ ID NO: 39179 - RNA, 27 nt, synthetic construct
  misc_feature 1..27: note = Uncharacterized protein C16orf45 (98-106)
  source 1..27: mol_type = other RNA
gagctgatccagaagatccacaagctc

SEQ ID NO: 39180 - RNA, 27 nt, synthetic construct
  misc_feature 1..27: note = ATP-dependent DNA helicase Q1 (34-42)
  source 1..27: mol_type = other RNA
gagctgatccagaagaagaaggtgctc

SEQ ID NO: 39181 - RNA, 27 nt, synthetic construct
  misc_feature 1..27: note = Dedicator of cytokinesis protein 7 (661-669)
  source 1..27: mol_type = other RNA
gagctgaagagctccatcagcgccctc

SEQ ID NO: 39182 - RNA, 27 nt, synthetic construct
  misc_feature 1..27: note = Protein Spindly (108-116)
  source 1..27: mol_type = other RNA
gagctgaagaccaagatcgagaagctc

SEQ ID NO: 39183 - RNA, 27 nt, synthetic construct
  misc_feature 1..27: note = Hypoxia-inducible factor 1-alpha (705-713)
  source 1..27: mol_type = other RNA
gagctgaaccccaagatcctcgccctg

SEQ ID NO: 39184 - RNA, 27 nt, synthetic construct
  misc_feature 1..27: note = NF-kappa-B inhibitor-interacting Ras-like protein 1 (70-78)
  source 1..27: mol_type = other RNA
gagctgcccaagcactacttcagcttc

SEQ ID NO: 39185 - RNA, 27 nt, synthetic construct
  misc_feature 1..27: note = Transmembrane emp24 domain-containing protein 9 (163-171)
  source 1..27: mol_type = other RNA
gagctgcagctccgcgtgcggcagctg

SEQ ID NO: 39186 - RNA, 27 nt, synthetic construct
  misc_feature 1..27: note = FRAS1-related extracellular matrix protein 2 (2560-2568)
  source 1..27: mol_type = other RNA
gagctgagcaacttcgagctcaccctg

SEQ ID NO: 39187 - RNA, 27 nt, synthetic construct
  misc_feature 1..27: note = Immediate early response gene 5 protein (99-107)
  source 1..27: mol_type = other RNA
gagccccagccggagcgcagctccgtg

SEQ ID NO: 39188 - RNA, 27 nt, synthetic construct
  misc_feature 1..27: note = Tubulin beta-6 chain (116-124)
  source 1..27: mol_type = other RNA
gagccctacaacgccaccctgagcgtg

SEQ ID NO: 39189 - RNA, 30 nt, synthetic construct
  misc_feature 1..30: note = Proline-rich protein PRCC (289-298)
  source 1..30: mol_type = other RNA
gagccctacccgtaccccatccccaccgtg

SEQ ID NO: 39190 - RNA, 24 nt, synthetic construct
  misc_feature 1..24: note = Eukaryotic translation initiation factor 3 subunit A (641-648)
  source 1..24: mol_type = other RNA
gagcagatcaagaagaccgagctg

SEQ ID NO: 39191 - RNA, 27 nt, synthetic construct
  misc_feature 1..27: note = Integrator complex subunit 1 (747-755)
  source 1..27: mol_type = other RNA
gagcagcccgagacctactacaagtgg

SEQ ID NO: 39192 - RNA, 27 nt, synthetic construct
  misc_feature 1..27: note = Oxysterol-binding protein-related protein 9 (151-159)
  source 1..27: mol_type = other RNA
gagcagcgcaagaagatcgagaccctg

SEQ ID NO: 39193 - RNA, 39 nt, synthetic construct
  misc_feature 1..39: note = (1108-1120)
  source 1..39: mol_type = other RNA
gagagcgacaagtacgccgagcgcaagggcgccgcgtac

SEQ ID NO: 39194 - RNA, 30 nt, synthetic construct
  misc_feature 1..30: note = 39S ribosomal protein L2, mitochondrial (197-206)
  source 1..30: mol_type = other RNA
gagagcgagcccggccgcggggcccagtac

SEQ ID NO: 39195 - RNA, 27 nt, synthetic construct
  misc_feature 1..27: note = Trafficking protein particle complex subunit 3 (73-81)
  source 1..27: mol_type = other RNA
gagaccgccgacgtgatcgccaaggtc

SEQ ID NO: 39196 - RNA, 33 nt, synthetic construct
  misc_feature 1..33: note = 60S ribosomal protein L17 (31-41)
  source 1..33: mol_type = other RNA
gagaccgcccaggccatcaagggcatgcacatc

SEQ ID NO: 39197 - RNA, 33 nt, synthetic construct
  misc_feature 1..33: note = Semaphorin-3C (312-322)
  source 1..33: mol_type = other RNA
gagaccgacaacccccgcaccacgctggtgtac

SEQ ID NO: 39198 - RNA, 27 nt, synthetic construct
  misc_feature 1..27: note = Maturin (26-34)
  source 1..27: mol_type = other RNA
gagaccgagcgccggatggacttctac

SEQ ID NO: 39199 - RNA, 27 nt, synthetic construct
  misc_feature 1..27: note = Type II inositol 3,4-bisphosphate 4-phosphatase (389-397)
  source 1..27: mol_type = other RNA
gagaccgagcgccggaacaccggctac

SEQ ID NO: 39200 - RNA, 27 nt, synthetic construct
  misc_feature 1..27: note = Crooked neck-like protein 1 (679-687)
  source 1..27: mol_type = other RNA
gagaccgagcgcacccggaacctgtac

SEQ ID NO: 39201 - RNA, 27 nt, synthetic construct
  misc_feature 1..27: note = Mortality factor 4-like protein 1 (187-195)
  source 1..27: mol_type = other RNA
gagaccttcatgaaccgcgtggaggtc

SEQ ID NO: 39202 - RNA, 27 nt, synthetic construct
  misc_feature 1..27: note = Proteasome-associated protein ECM29 homolog (349-357)
  source 1..27: mol_type = other RNA
gagaccttccccgccaacatccaggtg

SEQ ID NO: 39203 - RNA, 27 nt, synthetic construct
  misc_feature 1..27: note = Nucleoporin NUP188 homolog (337-345)
  source 1..27: mol_type = other RNA
gagaccagctccgtggtccgcaagatc

SEQ ID NO: 39204 - RNA, 27 nt, synthetic construct
  misc_feature 1..27: note = NF-kappa-B-repressing factor (487-495)
  source 1..27: mol_type = other RNA
gaggtgatcgccgaggccgtcggcgtg

SEQ ID NO: 39205 - RNA, 27 nt, synthetic construct
  misc_feature 1..27: note = Sphingolipid delta(4)-desaturase DES1 (150-158)
  source 1..27: mol_type = other RNA
gaggtgatcaacaccgtcgcccaggtg

SEQ ID NO: 39206 - RNA, 27 nt, synthetic construct
  misc_feature 1..27: note = U11/U12 small nuclear ribonucleoprotein 48 kDa protein (239-247)
  source 1..27: mol_type = other RNA
gaggtgatccgcgacgtcatcaacgtg

SEQ ID NO: 39207 - RNA, 27 nt, synthetic construct
  misc_feature 1..27: note = T-complex protein 1 subunit theta (462-470)
  source 1..27: mol_type = other RNA
gaggtgatcagcaagctgtacgccgtc

SEQ ID NO: 39208 - RNA, 27 nt, synthetic construct
  misc_feature 1..27: note = Protein O-GlcNAcase (266-274)
  source 1..27: mol_type = other RNA
gaggtgagcaagatcatcaagcgcgcc

SEQ ID NO: 39209 - RNA, 30 nt, synthetic construct
  misc_feature 1..30: note = Prolyl 3-hydroxylase OGFOD1 (211-220)
  source 1..30: mol_type = other RNA
gaggtgagccccgtctccttccaccaggtg

SEQ ID NO: 39210 - RNA, 30 nt, synthetic construct
  misc_feature 1..30: note = Melanoma-associated antigen 1 (222-231)
  source 1..30: mol_type = other RNA
gaggtgtacgacggccgcgagcacagcgcc

SEQ ID NO: 39211 - RNA, 27 nt, synthetic construct
  misc_feature 1..27: note = Exocyst complex component 4 (587-595)
  source 1..27: mol_type = other RNA
gagtacatccacgccctgaccctcctg

SEQ ID NO: 39212 - RNA, 33 nt, synthetic construct
  misc_feature 1..33: note = Inactive tyrosine-protein kinase transmembrane receptor ROR1 (4-14)
  source 1..33: mol_type = other RNA
gagtacatcaaccagggcgacctgcacgagttc

SEQ ID NO: 39213 - RNA, 27 nt, synthetic construct
  misc_feature 1..27: note = Vacuolar protein sorting-associated protein 4B (64-72)
  source 1..27: mol_type = other RNA
gagtacctggaccgcgccgagaagctc

SEQ ID NO: 39214 - RNA, 27 nt, synthetic construct
  misc_feature 1..27: note = 5'-3' exoribonuclease 1 (989-997)
  source 1..27: mol_type = other RNA
gagtacctggagcgcgcccccgagctc

SEQ ID NO: 39215 - RNA, 24 nt, synthetic construct
  misc_feature 1..24: note = Tubulin beta chain (178-185)
  source 1..24: mol_type = other RNA
gagtaccccgaccgcatcatgaac

SEQ ID NO: 39216 - RNA, 30 nt, synthetic construct
  misc_feature 1..30: note = Zinc finger protein 281 (515-524)
  source 1..30: mol_type = other RNA
gagtacagcaagtacctgcagcaggccttc

SEQ ID NO: 39217 - RNA, 27 nt, synthetic construct
  misc_feature 1..27: note = UPF0469 protein KIAA0907 (327-335)
  source 1..27: mol_type = other RNA
gagtacagccgcttcgtgaaccagatc

SEQ ID NO: 39218 - RNA, 27 nt, synthetic construct
  misc_feature 1..27: note = Melanoma-associated antigen D1 (504-512)
  source 1..27: mol_type = other RNA
gagtacaccgacgtgtaccccgagatc

SEQ ID NO: 39219 - RNA, 27 nt, synthetic construct
  misc_feature 1..27: note = Probable global transcription activator SNF2L2 (535-543)
  source 1..27: mol_type = other RNA
gagtacgtggccaacctgaccaacctc

SEQ ID NO: 39220 - RNA, 33 nt, synthetic construct
  misc_feature 1..33: note = HLA class I histocompatibility antigen, alpha chain F (43-53)
  source 1..33: mol_type = other RNA
gagtacgtggacgacacccagttcctgcgcttc

SEQ ID NO: 39221 - RNA, 27 nt, synthetic construct
  misc_feature 1..27: note = Zinc finger protein 506 (117-125)
  source 1..27: mol_type = other RNA
gagtacgtgaagttcctgcacaagttc

SEQ ID NO: 39222 - RNA, 27 nt, synthetic construct
  misc_feature 1..27: note = Kinesin-like protein KIF22 (218-226)
  source 1..27: mol_type = other RNA
ttcgccgacttcgagcgccacttcctg

SEQ ID NO: 39223 - RNA, 27 nt, synthetic construct
  misc_feature 1..27: note = Phosphatidylinositol 4-phosphate 3-kinase C2 domain-containing subunit alpha (950-958)
  source 1..27: mol_type = other RNA
ttcgccgaccaggaggtgcgcagcctg

SEQ ID NO: 39224 - RNA, 27 nt, synthetic construct
  misc_feature 1..27: note = E3 ubiquitin-protein ligase TRIM22 (386-394)
  source 1..27: mol_type = other RNA
ttcgccttcgaccccagcgtgaactac

SEQ ID NO: 39225 - RNA, 27 nt, synthetic construct
  misc_feature 1..27: note = Protein disulfide-isomerase A3 (184-192)
  source 1..27: mol_type = other RNA
ttcgcccacaccaacgtggagagcctg

SEQ ID NO: 39226 - RNA, 27 nt, synthetic construct
  misc_feature 1..27: note = Sarcosine dehydrogenase, mitochondrial (859-867)
  source 1..27: mol_type = other RNA
ttcgccatcgacaagaccatcgcctac

SEQ ID NO: 39227 - RNA, 27 nt, synthetic construct
  misc_feature 1..27: note = Eukaryotic translation initiation factor 3 subunit E (53-61)
  source 1..27: mol_type = other RNA
ttcgccatggacgtgtacaagaacctg

SEQ ID NO: 39228 - RNA, 27 nt, synthetic construct
  misc_feature 1..27: note = Protein-tyrosine kinase 2-beta (257-265)
  source 1..27: mol_type = other RNA
ttcgccaacatcgaccaggagacctac

SEQ ID NO: 39229 - RNA, 33 nt, synthetic construct
  misc_feature 1..33: note = Glutamine and serine-rich protein 1 (1659-1669)
  source 1..33: mol_type = other RNA
ttcgccgtggaccccgagaagatccagctgtac

SEQ ID NO: 39230 - RNA, 27 nt, synthetic construct
  misc_feature 1..27: note = Ubiquilin-1 (50-58)
  source 1..27: mol_type = other RNA
ttcgccgtgcccgagaacagctccgtc

SEQ ID NO: 39231 - RNA, 30 nt, synthetic construct
  misc_feature 1..30: note = Eukaryotic translation initiation factor 3 subunit B (568-577)
  source 1..30: mol_type = other RNA
ttcgcctgggagcccaacggcagcaagttc

SEQ ID NO: 39232 - RNA, 33 nt, synthetic construct
  misc_feature 1..33: note = Probable ATP-dependent RNA helicase DDX56 (464-474)
  source 1..33: mol_type = other RNA
ttcgaggacaacccccgcgacctgcagctcctg

SEQ ID NO: 39233 - RNA, 27 nt, synthetic construct
  misc_feature 1..27: note = Coatomer subunit gamma-1 (783-791)
  source 1..27: mol_type = other RNA
ttcgagaaggaggagaccttcaccctg

SEQ ID NO: 39234 - RNA, 27 nt, synthetic construct
  misc_feature 1..27: note = Alpha-parvin (133-141)
  source 1..27: mol_type = other RNA
ttcgagaagctggagagcgagaagctc

SEQ ID NO: 39235 - RNA, 30 nt, synthetic construct
  misc_feature 1..30: note = Glycogen phosphorylase, brain form (327-336)
  source 1..30: mol_type = other RNA
ttcgagaccttccccgacaaggtggccatc

SEQ ID NO: 39236 - RNA, 33 nt, synthetic construct
  misc_feature 1..33: note = Destrin (89-99)
  source 1..33: mol_type = other RNA
ttcgagaccaaggagagccgcaaggaggagctg

SEQ ID NO: 39237 - RNA, 27 nt, synthetic construct
  misc_feature 1..27: note = Zinc finger protein 462 (268-276)
  source 1..27: mol_type = other RNA
ttcggcgacagcgggcgcctgtactac

SEQ ID NO: 39238 - RNA, 27 nt, synthetic construct
  misc_feature 1..27: note = Endoplasmic reticulum-Golgi intermediate compartment protein 3 (214-222)
  source 1..27: mol_type = other RNA
ttccacttcgcccccggcaagagcttc

SEQ ID NO: 39239 - RNA, 30 nt, synthetic construct
  misc_feature 1..30: note = HLA class II histocompatibility antigen, DQ alpha 1 chain (134-143)
  source 1..30: mol_type = other RNA
ttcatcgacaagttcacccccccggtggtc

SEQ ID NO: 39240 - RNA, 27 nt, synthetic construct
  misc_feature 1..27: note = Guanine nucleotide-binding protein G(I)/G(S)/G(T) subunit beta-1 (58-66)
  source 1..27: mol_type = other RNA
ttcctggacgacaaccagatcgtgacc

SEQ ID NO: 39241 - RNA, 27 nt, synthetic construct
  misc_feature 1..27: note = Basigin (25-33)
  source 1..27: mol_type = other RNA
ttcctgcccgagccgatgggcaccgcc

SEQ ID NO: 39242 - RNA, 30 nt, synthetic construct
  misc_feature 1..30: note = Volume-regulated anion channel subunit LRRC8D (80-89)
  source 1..30: mol_type = other RNA
ttcctgagcgaggtgtccgagaacaagctc

SEQ ID NO: 39243 - RNA, 27 nt, synthetic construct
  misc_feature 1..27: note = Transmembrane protein 97 (18-26)
  source 1..27: mol_type = other RNA
ttcctgagccacatccccatcaccctc

SEQ ID NO: 39244 - RNA, 30 nt, synthetic construct
  misc_feature 1..30: note = Vitamin K-dependent protein S (26-35)
  source 1..30: mol_type = other RNA
ttcctgagcaagcagcaggcctcccaggtg

SEQ ID NO: 39245 - RNA, 27 nt, synthetic construct
  misc_feature 1..27: note = Helicase with zinc finger domain 2 (630-638)
  source 1..27: mol_type = other RNA
ttccgccccccgacccgggccgagctg

SEQ ID NO: 39246 - RNA, 27 nt, synthetic construct
  misc_feature 1..27: note = Myeloid leukemia factor 2 (203-211)
  source 1..27: mol_type = other RNA
ttccgccagcagcggcccctggagttc

SEQ ID NO: 39247 - RNA, 27 nt, synthetic construct
  misc_feature 1..27: note = Importin subunit alpha-7 (90-98)
  source 1..27: mol_type = other RNA
ttcagcgacgactccgacctgcagctc

SEQ ID NO: 39248 - RNA, 27 nt, synthetic construct
  misc_feature 1..27: note = Protein phosphatase 1D (12-20)
  source 1..27: mol_type = other RNA
ttcagcgaccagggcgggcgcaagtac

SEQ ID NO: 39249 - RNA, 27 nt, synthetic construct
  misc_feature 1..27: note = 60S ribosomal protein L11 (98-106)
  source 1..27: mol_type = other RNA
ttcagcgacaccggcaacttcgggttc

SEQ ID NO: 39250 - RNA, 27 nt, synthetic construct
  misc_feature 1..27: note = Renin receptor (105-113)
  source 1..27: mol_type = other RNA
ttcagcgaggagacccccgtggtcctg

SEQ ID NO: 39251 - RNA, 27 nt, synthetic construct
  misc_feature 1..27: note = Transforming protein RhoA (80-88)
  source 1..27: mol_type = other RNA
ttcagcatcgactcccccgacagcctg

SEQ ID NO: 39252 - RNA, 27 nt, synthetic construct
  misc_feature 1..27: note = Condensin complex subunit 3 (305-313)
  source 1..27: mol_type = other RNA
ttcagcatcacccccctgtccgagctc

SEQ ID NO: 39253 - RNA, 27 nt, synthetic construct
  misc_feature 1..27: note = Unconventional myosin-Ib (364-372)
  source 1..27: mol_type = other RNA
ttcagctccgaccacctgatcgagatg

SEQ ID NO: 39254 - RNA, 27 nt, synthetic construct
  misc_feature 1..27: note = TBC1 domain family member 22B (80-88)
  source 1..27: mol_type = other RNA
ttcagctcccccagcttccagaccctg

SEQ ID NO: 39255 - RNA, 27 nt, synthetic construct
  misc_feature 1..27: note = Basic leucine zipper and W2 domain-containing protein 2 (234-242)
  source 1..27: mol_type = other RNA
ttcaccgacgccggcctgaaggagctc

SEQ ID NO: 39256 - RNA, 27 nt, synthetic construct
  misc_feature 1..27: note = Multidrug resistance protein 1 (175-183)
  source 1..27: mol_type = other RNA
ttcaccgacaaggagctgctcgcctac

SEQ ID NO: 39257 - RNA, 27 nt, synthetic construct
  misc_feature 1..27: note = Protein VPRBP (1070-1078)
  source 1..27: mol_type = other RNA
ttcaccgaggaccactacgtggagttc

SEQ ID NO: 39258 - RNA, 30 nt, synthetic construct
  misc_feature 1..30: note = Neuronal calcium sensor 1 (22-31)
  source 1..30: mol_type = other RNA
ttcaccgagaaggaggtgcagcagtggtac

SEQ ID NO: 39259 - RNA, 27 nt, synthetic construct
  misc_feature 1..27: note = RNMT-activating mini protein (19-27)
  source 1..27: mol_type = other RNA
ttcaccgagaacgacaaggagtaccag

SEQ ID NO: 39260 - RNA, 39 nt, synthetic construct
  misc_feature 1..39: note = DNA-directed RNA polymerase II subunit RPB7 (31-43)
  source 1..39: mol_type = other RNA
ttcaccgaggtggagggcacctgcacggggaagtacggc

SEQ ID NO: 39261 - RNA, 27 nt, synthetic construct
  misc_feature 1..27: note = SURP and G-patch domain-containing protein 1 (198-206)
  source 1..27: mol_type = other RNA
ttcgtggccgagggcgggcccgagctg

SEQ ID NO: 39262 - RNA, 30 nt, synthetic construct
  misc_feature 1..30: note = Glutamyl-tRNA(Gln) amidotransferase subunit C, mitochondrial (112-121)
  source 1..30: mol_type = other RNA
ttcgtggcccccccgggcaacatcagcctg

SEQ ID NO: 39263 - RNA, 27 nt, synthetic construct
  misc_feature 1..27: note = E3 ubiquitin-protein ligase RNF187 (182-190)
  source 1..27: mol_type = other RNA
ttcgtggaggaggaggagcacttcctg

SEQ ID NO: 39264 - RNA, 27 nt, synthetic construct
  misc_feature 1..27: note = Ubiquitin carboxyl-terminal hydrolase 22 (45-53)
  source 1..27: mol_type = other RNA
ttcgtgtggagcggcaccgccgaggcc

SEQ ID NO: 39265 - RNA, 33 nt, synthetic construct
  misc_feature 1..33: note = Membrane cofactor protein (69-79)
  source 1..33: mol_type = other RNA
ttctacatccccccgctggccacccacaccatc

SEQ ID NO: 39266 - RNA, 27 nt, synthetic construct
  misc_feature 1..27: note = GPI transamidase component PIG-T (539-547)
  source 1..27: mol_type = other RNA
ttctacaacctgctcacccgcaccttc

SEQ ID NO: 39267 - RNA, 27 nt, synthetic construct
  misc_feature 1..27: note = RNA polymerase II-associated factor 1 homolog (423-431)
  source 1..27: mol_type = other RNA
ggcgccaccgccgcggcccccgtgccg

SEQ ID NO: 39268 - RNA, 33 nt, synthetic construct
  misc_feature 1..33: note = Nuclear mitotic apparatus protein 1 (775-785)
  source 1..33: mol_type = other RNA
ggcgaggcccaccaggccgagaccgaggtgctg

SEQ ID NO: 39269 - RNA, 30 nt, synthetic construct
  misc_feature 1..30: note = Cytoplasmic dynein 1 light intermediate chain 2 (61-70)
  source 1..30: mol_type = other RNA
ggcgaggacgggagcggcaagaccaccctg

SEQ ID NO: 39270 - RNA, 33 nt, synthetic construct
  misc_feature 1..33: note = von Willebrand factor A domain-containing protein 5A (208-218)
  source 1..33: mol_type = other RNA
ggcgaggacaagaccagcgcccaggtgtccctg

SEQ ID NO: 39271 - RNA, 27 nt, synthetic construct
  misc_feature 1..27: note = Protein Jade-2 (168-176)
  source 1..27: mol_type = other RNA
ggcgaggacctggagaaggtgaccctc

SEQ ID NO: 39272 - RNA, 30 nt, synthetic construct
  misc_feature 1..30: note = Zinc finger protein 622 (359-368)
  source 1..30: mol_type = other RNA
ggcgaggaccccaacaaggccgaggagctg

SEQ ID NO: 39273 - RNA, 33 nt, synthetic construct
  misc_feature 1..33: note = Eukaryotic translation initiation factor 3 subunit C-like protein (542-552)
  source 1..33: mol_type = other RNA
ggcgaggacagcgccgtgctgatggagcgcctc

SEQ ID NO: 39274 - RNA, 27 nt, synthetic construct
  misc_feature 1..27: note = Poly(U)-binding-splicing factor PUF60 (123-131)
  source 1..27: mol_type = other RNA
ggcgaggacaccatccgccaggccttc

SEQ ID NO: 39275 - RNA, 30 nt, synthetic construct
  misc_feature 1..30: note = Glutamine-tRNA ligase (351-360)
  source 1..30: mol_type = other RNA
ggcgaggagctgaaggggcacaacaccctc

SEQ ID NO: 39276 - RNA, 27 nt, synthetic construct
  misc_feature 1..27: note = DNA damage-binding protein 1 (783-791)
  source 1..27: mol_type = other RNA
ggcgaggaggtggaggtccacaacctg

SEQ ID NO: 39277 - RNA, 30 nt, synthetic construct
  misc_feature 1..30: note = RNA-binding protein 8A (81-90)
  source 1..30: mol_type = other RNA
ggcgagatcaagaacatccacctgaacctc

SEQ ID NO: 39278 - RNA, 33 nt, synthetic construct
  misc_feature 1..33: note = Supervillin (797-807)
  source 1..33: mol_type = other RNA
ggcgagatcaagacccccaccggggagggcctg

SEQ ID NO: 39279 - RNA, 27 nt, synthetic construct
  misc_feature 1..27: note = Hsc70-interacting protein (128-136)
  source 1..27: mol_type = other RNA
ggcgagctgcagaaggccatcgacctc

SEQ ID NO: 39280 - RNA, 27 nt, synthetic construct
  misc_feature 1..27: note = Antigen peptide transporter 2 (87-95)
  source 1..27: mol_type = other RNA
ggcgagctgacccaggggagcctcctg

SEQ ID NO: 39281 - RNA, 30 nt, synthetic construct
  misc_feature 1..30: note = Cytoplasmic dynein 1 heavy chain 1 (2173-2182)
  source 1..30: mol_type = other RNA
ggcgagatgaccgccctgcgcgaggagctc

SEQ ID NO: 39282 - RNA, 30 nt, synthetic construct
  misc_feature 1..30: note = Ras-related protein Rab-5A (27-36)
  source 1..30: mol_type = other RNA
ggcgagagcgccgtggggaagtccagcctg

SEQ ID NO: 39283 - RNA, 33 nt, synthetic construct
  misc_feature 1..33: note = U4/U6 small nuclear ribonucleoprotein Prp4 (45-55)
  source 1..33: mol_type = other RNA
ggcgagagcgggatcctgggcaaggacgggctc

SEQ ID NO: 39284 - RNA, 27 nt, synthetic construct
  misc_feature 1..27: note = tRNA wybutosine-synthesizing protein 2 homolog (54-62)
  source 1..27: mol_type = other RNA
ggcgagaccctgcccgagcagcacctc

SEQ ID NO: 39285 - RNA, 27 nt, synthetic construct
  misc_feature 1..27: note = Nuclear protein localization protein 4 homolog (480-488)
  source 1..27: mol_type = other RNA
ggcgagacccaggacttccacagcctg

SEQ ID NO: 39286 - RNA, 27 nt, synthetic construct
  misc_feature 1..27: note = Eukaryotic translation initiation factor 5A-1 (106-114)
  source 1..27: mol_type = other RNA
ggcgaggtgcgcgaggacctgcggctc

SEQ ID NO: 39287 - RNA, 27 nt, synthetic construct
  misc_feature 1..27: note = Heterogeneous nuclear ribonucleoprotein H (422-430)
  source 1..27: mol_type = other RNA
ggcgggtacggcgggcagagctccatg

SEQ ID NO: 39288 - RNA, 27 nt, synthetic construct
  misc_feature 1..27: note = Class E basic helix-loop-helix protein 41 (81-89)
  source 1..27: mol_type = other RNA
ggccacctggagaaggccgtggtcctc

SEQ ID NO: 39289 - RNA, 27 nt, synthetic construct
  misc_feature 1..27: note = Guanine nucleotide-binding protein subunit beta-2-like 1 (13-21)
  source 1..27: mol_type = other RNA
ggccacaacgggtgggtgacccagatc

SEQ ID NO: 39290 - RNA, 27 nt, synthetic construct
  misc_feature 1..27: note = Oxysterol-binding protein-related protein 9 (262-270)
  source 1..27: mol_type = other RNA
ggccacagccccccgtccagctccctg

SEQ ID NO: 39291 - RNA, 27 nt, synthetic construct
  misc_feature 1..27: note = DNA replication licensing factor MCM6 (508-516)
  source 1..27: mol_type = other RNA
ggccactacgaccgcagcaagtccctg

SEQ ID NO: 39292 - RNA, 33 nt, synthetic construct
  misc_feature 1..33: note = 40S ribosomal protein S15 (113-123)
  source 1..33: mol_type = other RNA
ggccactacctgggggagttcagcatcacctac

SEQ ID NO: 39293 - RNA, 27 nt, synthetic construct
  misc_feature 1..27: note = Coatomer subunit alpha (731-739)
  source 1..27: mol_type = other RNA
ggccactaccagaacgccctgtacctc

SEQ ID NO: 39294 - RNA, 27 nt, synthetic construct
  misc_feature 1..27: note = Poly(rC)-binding protein 1 (259-267)
  source 1..27: mol_type = other RNA
ggcatcgacagctccagccccgaggtg

SEQ ID NO: 39295 - RNA, 27 nt, synthetic construct
  misc_feature 1..27: note = Mitogen-activated protein kinase kinase kinase 6 (197-205)
  source 1..27: mol_type = other RNA
ggcctggccgacgggctcgtgcaggcc

SEQ ID NO: 39296 - RNA, 27 nt, synthetic construct
  misc_feature 1..27: note = Multiple PDZ domain protein (814-822)
  source 1..27: mol_type = other RNA
ggcctggccgacaagcccctcttccgc

SEQ ID NO: 39297 - RNA, 27 nt, synthetic construct
  misc_feature 1..27: note = Ras GTPase-activating-like protein IQGAP3 (153-161)
  source 1..27: mol_type = other RNA
ggcctggccccccagatccacgacctc

SEQ ID NO: 39298 - RNA, 27 nt, synthetic construct
  misc_feature 1..27: note = 26S protease regulatory subunit 8 (27-35)
  source 1..27: mol_type = other RNA
ggcctggacaagcagatcaaggagatc

SEQ ID NO: 39299 - RNA, 27 nt, synthetic construct
  misc_feature 1..27: note = Nuclear autoantigenic sperm protein (409-417)
  source 1..27: mol_type = other RNA
ggcctggaggagaaggtgcgcgccaag

SEQ ID NO: 39300 - RNA, 27 nt, synthetic construct
  misc_feature 1..27: note = Nuclear pore complex protein Nup98-Nup96 (50-58)
  source 1..27: mol_type = other RNA
ggcctgttcgggaacagccagaccaag

SEQ ID NO: 39301 - RNA, 27 nt, synthetic construct
  misc_feature 1..27: note = Box C/D snoRNA protein 1 (14-22)
  source 1..27: mol_type = other RNA
ggcctgcacagcgtggccgagggggtc

SEQ ID NO: 39302 - RNA, 27 nt, synthetic construct
  misc_feature 1..27: note = 60S ribosomal protein L11 (85-93)
  source 1..27: mol_type = other RNA
ggcctgaaggtgcgcgagtacgagctc

SEQ ID NO: 39303 - RNA, 27 nt, synthetic construct
  misc_feature 1..27: note = Kinesin-like protein KIF3A (576-584)
  source 1..27: mol_type = other RNA
ggcctgctcgagaacatccgccagctg

SEQ ID NO: 39304 - RNA, 33 nt, synthetic construct
  misc_feature 1..33: note = Mitochondrial import inner membrane translocase subunit TIM50 (78-88)
  source 1..33: mol_type = other RNA
ggcctgctcggggccggcgggaccgtgagcgtc

SEQ ID NO: 39305 - RNA, 27 nt, synthetic construct
  misc_feature 1..27: note = C-terminal-binding protein 1 (238-246)
  source 1..27: mol_type = other RNA
ggcctgaacgagcacaaccaccacctc

SEQ ID NO: 39306 - RNA, 30 nt, synthetic construct
  misc_feature 1..30: note = Acyl-CoA synthetase family member 4 (721-730)
  source 1..30: mol_type = other RNA
ggcctgaacagccccgtgctcatcgggaag

SEQ ID NO: 39307 - RNA, 27 nt, synthetic construct
  misc_feature 1..27: note = Fos-related antigen 2 (165-173)
  source 1..27: mol_type = other RNA
ggcctgcagaaggagatcgccgagctc

SEQ ID NO: 39308 - RNA, 27 nt, synthetic construct
  misc_feature 1..27: note = Mitofusin-1 (547-555)
  source 1..27: mol_type = other RNA
ggcctgagcgagcccatcttccagctc

SEQ ID NO: 39309 - RNA, 27 nt, synthetic construct
  misc_feature 1..27: note = Serine/threonine-protein phosphatase 2B catalytic subunit beta isoform (228-236)
  source 1..27: mol_type = other RNA
ggcctgagccccgagatccacaccctc

SEQ ID NO: 39310 - RNA, 27 nt, synthetic construct
  misc_feature 1..27: note = Neurofibromin (37-45)
  source 1..27: mol_type = other RNA
ggcctgaccaccatcctcaagaacgtg

SEQ ID NO: 39311 - RNA, 27 nt, synthetic construct
  misc_feature 1..27: note = Retinoic acid receptor gamma (203-211)
  source 1..27: mol_type = other RNA
ggcctgtgggacaagttcagcgagctc

SEQ ID NO: 39312 - RNA, 27 nt, synthetic construct
  misc_feature 1..27: note = Uncharacterized protein C17orf85 (252-260)
  source 1..27: mol_type = other RNA
ggcctgtacgccgacacccgcgagaag

SEQ ID NO: 39313 - RNA, 24 nt, synthetic construct
  misc_feature 1..24: note = Very-long-chain (3R)-3-hydroxyacyl-CoA dehydratase 1 (106-113)
  source 1..24: mol_type = other RNA
ggcctgtacaagagcatccagaag

SEQ ID NO: 39314 - RNA, 27 nt, synthetic construct
  misc_feature 1..27: note = Tripartite motif-containing protein 65 (17-25)
  source 1..27: mol_type = other RNA
ggcctgtaccaggaccccgtgaccctc

SEQ ID NO: 39315 - RNA, 30 nt, synthetic construct
  misc_feature 1..30: note = Thioredoxin reductase 1, cytoplasmic (282-291)
  source 1..30: mol_type = other RNA
ggccagttcatcgggccccaccgcatcaag

SEQ ID NO: 39316 - RNA, 27 nt, synthetic construct
  misc_feature 1..27: note = Cdc42 effector protein 3 (76-84)
  source 1..27: mol_type = other RNA
ggccagttccccgggcacaacgagttc

SEQ ID NO: 39317 - RNA, 27 nt, synthetic construct
  misc_feature 1..27: note = Regulator of chromosome condensation (439-447)
  source 1..27: mol_type = other RNA
ggccagcacaccgtgctgctcgtcaag

SEQ ID NO: 39318 - RNA, 27 nt, synthetic construct
  misc_feature 1..27: note = Chromodomain-helicase-DNA-binding protein 4 (1164-1172)
  source 1..27: mol_type = other RNA
ggccagaacaagaaggtgatgatctac

SEQ ID NO: 39319 - RNA, 39 nt, synthetic construct
  misc_feature 1..39: note = EH domain-containing protein 2 (65-77)
  source 1..39: mol_type = other RNA
ggccagtacagcaccgggaagacctccttcatccagtac

SEQ ID NO: 39320 - RNA, 33 nt, synthetic construct
  misc_feature 1..33: note = Heterogeneous nuclear ribonucleoprotein H (256-266)
  source 1..33: mol_type = other RNA
ggcagcgaccgcttcgggcgggacctgaactac

SEQ ID NO: 39321 - RNA, 27 nt, synthetic construct
  misc_feature 1..27: note = Mitochondrial import inner membrane translocase subunit TIM50 (62-70)
  source 1..27: mol_type = other RNA
ggcagcgaggggccctcctacgccaag

SEQ ID NO: 39322 - RNA, 33 nt, synthetic construct
  misc_feature 1..33: note = Ribonucleoside-diphosphate reductase subunit M2 (238-248)
  source 1..33: mol_type = other RNA
ggcagcttcgcctccatcttctggctgaagaag

SEQ ID NO: 39323 - RNA, 27 nt, synthetic construct
  misc_feature 1..27: note = HLA class I histocompatibility antigen, A-2 alpha chain (25-33)
  source 1..27: mol_type = other RNA
ggcagccactccatgcgctacttcttc

SEQ ID NO: 39324 - RNA, 30 nt, synthetic construct
  misc_feature 1..30: note = HLA class I histocompatibility antigen, A-1 alpha chain (25-34)
  source 1..30: mol_type = other RNA
ggcagccactccatgcgctacttcttcacc

SEQ ID NO: 39325 - RNA, 27 nt, synthetic construct
  misc_feature 1..27: note = HLA class I histocompatibility antigen, Cw-4 alpha chain (25-33)
  source 1..27: mol_type = other RNA
ggcagccactccatgcgctacttcagc

SEQ ID NO: 39326 - RNA, 27 nt, synthetic construct
  misc_feature 1..27: note = 60S ribosomal protein L37 (23-31)
  source 1..27: mol_type = other RNA
ggcagcaaggcctaccacctgcagaag

SEQ ID NO: 39327 - RNA, 33 nt, synthetic construct
  misc_feature 1..33: note = Protein PRR14L (865-875)
  source 1..33: mol_type = other RNA
ggcagcctgcccggggacaagatccgcaacaag

SEQ ID NO: 39328 - RNA, 30 nt, synthetic construct
  misc_feature 1..30: note = Smoothelin (449-458)
  source 1..30: mol_type = other RNA
ggcaccgccgagcccgggggcagcatgaag

SEQ ID NO: 39329 - RNA, 33 nt, synthetic construct
  misc_feature 1..33: note = Embryonic stem cell-specific 5-hydroxymethylcytosine-binding protein (329-339)
  source 1..33: mol_type = other RNA
ggcaccgccgggctgctcgagcagtggctgaag

SEQ ID NO: 39330 - RNA, 33 nt, synthetic construct
  misc_feature 1..33: note = Glutamine-rich protein 1 (209-219)
  source 1..33: mol_type = other RNA
ggcaccgccagcgtgctgcagcccgtcaagaag

SEQ ID NO: 39331 - RNA, 30 nt, synthetic construct
  misc_feature 1..30: note = Sphingosine-1-phosphate phosphatase 1 (135-144)
  source 1..30: mol_type = other RNA
ggcaccgagctggggaacgagctcttctac

SEQ ID NO: 39332 - RNA, 33 nt, synthetic construct
  misc_feature 1..33: note = WD repeat-containing protein 92 (479-489)
  source 1..33: mol_type = other RNA
ggcaccttcggggccaccagcctgcagcagcgc

SEQ ID NO: 39333 - RNA, 33 nt, synthetic construct
  misc_feature 1..33: note = Cactin isoform X2 (208-218)
  source 1..33: mol_type = other RNA
ggcaccttcatctggaacaaggccctggagaag

SEQ ID NO: 39334 - RNA, 33 nt, synthetic construct
  misc_feature 1..33: note = Unconventional myosin-IXa (2491-2501)
  source 1..33: mol_type = other RNA
ggcaccttcaaccccgagaaggggaagcagaag

SEQ ID NO: 39335 - RNA, 27 nt, synthetic construct
  misc_feature 1..27: note = Biogenesis of lysosome-related organelles complex 1 subunit 4 (164-172)
  source 1..27: mol_type = other RNA
ggcaccttcccccgcgccttcaagaag

SEQ ID NO: 39336 - RNA, 30 nt, synthetic construct
  misc_feature 1..30: note = Actin-like protein 6A (362-371)
  source 1..30: mol_type = other RNA
ggcaccttccagcagatgtggatcagcaag

SEQ ID NO: 39337 - RNA, 33 nt, synthetic construct
  misc_feature 1..33: note = Neurobeachin-like protein 1 (754-764)
  source 1..33: mol_type = other RNA
ggcaccatcgagaagagcaagctgatcaccaag

SEQ ID NO: 39338 - RNA, 27 nt, synthetic construct
  misc_feature 1..27: note = Isoleucine-tRNA ligase, cytoplasmic (62-70)
  source 1..27: mol_type = other RNA
ggcaccatcaaggacatcgtgacccgc

SEQ ID NO: 39339 - RNA, 36 nt, synthetic construct
  misc_feature 1..36: note = Histone H2B type 1-K (115-126)
  source 1..36: mol_type = other RNA
ggcaccaaggccgtgaccaagtacacgagcgccaag

SEQ ID NO: 39340 - RNA, 30 nt, synthetic construct
  misc_feature 1..30: note = Integrator complex subunit 5 (378-387)
  source 1..30: mol_type = other RNA
ggcaccctgcagcccccgttcaccgcccgc

SEQ ID NO: 39341 - RNA, 27 nt, synthetic construct
  misc_feature 1..27: note = Phosphomannomutase 1 (22-30)
  source 1..27: mol_type = other RNA
ggcaccctgacccccgcccgccagaag

SEQ ID NO: 39342 - RNA, 33 nt, synthetic construct
  misc_feature 1..33: note = Probable phospholipid-transporting ATPase IIA (238-248)
  source 1..33: mol_type = other RNA
ggcaccctgacccagaacgagatgatcttcaag

SEQ ID NO: 39343 - RNA, 27 nt, synthetic construct
  misc_feature 1..27: note = Thioredoxin domain-containing protein 9 (203-211)
  source 1..27: mol_type = other RNA
ggcaccaacttcaccaagctggagaag

SEQ ID NO: 39344 - RNA, 27 nt, synthetic construct
  misc_feature 1..27: note = Rho guanine nucleotide exchange factor 17 (1361-1369)
  source 1..27: mol_type = other RNA
ggcacccaggggagccccatcaccaag

SEQ ID NO: 39345 - RNA, 30 nt, synthetic construct
  misc_feature 1..30: note = Inter-alpha-trypsin inhibitor heavy chain H5 (656-665)
  source 1..30: mol_type = other RNA
ggcacccagcccgggccgctgctcaagaag

SEQ ID NO: 39346 - RNA, 36 nt, synthetic construct
  misc_feature 1..36: note = Sorting nexin-1 (275-286)
  source 1..36: mol_type = other RNA
ggcacccagaccctgagcggggccggcctcctgaag

SEQ ID NO: 39347 - RNA, 39 nt, synthetic construct
  misc_feature 1..39: note = HCLS1-binding protein 3 (136-148)
  source 1..39: mol_type = other RNA
ggcacccgcagccccggggccgccggcctgacctcccgg

SEQ ID NO: 39348 - RNA, 27 nt, synthetic construct
  misc_feature 1..27: note = Bardet-Biedl syndrome 10 protein (375-383)
  source 1..27: mol_type = other RNA
ggcaccagctccctgttcatctacaag

SEQ ID NO: 39349 - RNA, 27 nt, synthetic construct
  misc_feature 1..27: note = Proteasome subunit beta type-7 (229-237)
  source 1..27: mol_type = other RNA
ggcaccaccgccgtgctgacggagaag

SEQ ID NO: 39350 - RNA, 30 nt, synthetic construct
  misc_feature 1..30: note = E3 ubiquitin-protein ligase CBL (49-58)
  source 1..30: mol_type = other RNA
ggcaccgtggacaagaagatggtcgagaag

SEQ ID NO: 39351 - RNA, 27 nt, synthetic construct
  misc_feature 1..27: note = E3 SUMO-protein ligase PIAS1 (411-419)
  source 1..27: mol_type = other RNA
ggcacctgggcccccatgcgcagcaag

SEQ ID NO: 39352 - RNA, 27 nt, synthetic construct
  misc_feature 1..27: note = Rho-associated protein kinase 2 (301-309)
  source 1..27: mol_type = other RNA
ggcacctacagcaagatcatggaccac

SEQ ID NO: 39353 - RNA, 27 nt, synthetic construct
  misc_feature 1..27: note = 40S ribosomal protein S16 (64-72)
  source 1..27: mol_type = other RNA
ggcgtggacatccgcgtccgggtgaag

SEQ ID NO: 39354 - RNA, 30 nt, synthetic construct
  misc_feature 1..30: note = Phosphoribosyl pyrophosphate synthase-associated protein 1 (94-103)
  source 1..30: mol_type = other RNA
ggcgtgatcccctacttcccgtacagcaag

SEQ ID NO: 39355 - RNA, 27 nt, synthetic construct
  misc_feature 1..27: note = Tenascin (23-31)
  source 1..27: mol_type = other RNA
ggcgtgctgaagaaggtcatccgccac

SEQ ID NO: 39356 - RNA, 27 nt, synthetic construct
  misc_feature 1..27: note = Sterol regulatory element-binding protein 2 (852-860)
  source 1..27: mol_type = other RNA
ggcgtgatgagccccccgctgtcccgc

SEQ ID NO: 39357 - RNA, 30 nt, synthetic construct
  misc_feature 1..30: note = NADH dehydrogenase (ubiquinone) iron-sulfur protein 6, mitochondrial (29-38)
  source 1..30: mol_type = other RNA
ggcgtgcgcgtcagccccaccggggagaag

SEQ ID NO: 39358 - RNA, 27 nt, synthetic construct
  misc_feature 1..27: note = Double-strand-break repair protein rad21 homolog (62-70)
  source 1..27: mol_type = other RNA
ggcgtggtccgcatctaccaccggaag

SEQ ID NO: 39359 - RNA, 24 nt, synthetic construct
  misc_feature 1..24: note = Melanoma-associated antigen B2 (231-238)
  source 1..24: mol_type = other RNA
ggcgtgtacgacggggaggagcac

SEQ ID NO: 39360 - RNA, 27 nt, synthetic construct
  misc_feature 1..27: note = RNA-binding motif, single-stranded-interacting protein 2 (399-407)
  source 1..27: mol_type = other RNA
ggcgtgtacagcttccagttcaacaag

SEQ ID NO: 39361 - RNA, 27 nt, synthetic construct
  misc_feature 1..27: note = Glutathione synthetase (158-166)
  source 1..27: mol_type = other RNA
ggctacatgccccgccagtacagcctg

SEQ ID NO: 39362 - RNA, 27 nt, synthetic construct
  misc_feature 1..27: note = Far upstream element-binding protein 3 (340-348)
  source 1..27: mol_type = other RNA
cacgccgcccacatcatcagcgagctg

SEQ ID NO: 39363 - RNA, 27 nt, synthetic construct
  misc_feature 1..27: note = Ectonucleoside triphosphate diphosphohydrolase 4 (473-481)
  source 1..27: mol_type = other RNA
cacgccgacctgcaccgcctcaagtac

SEQ ID NO: 39364 - RNA, 27 nt, synthetic construct
  misc_feature 1..27: note = V-type proton ATPase subunit B, brain isoform (310-318)
  source 1..27: mol_type = other RNA
cacgccgacgtgagcaaccagctgtac

SEQ ID NO: 39365 - RNA, 27 nt, synthetic construct
  misc_feature 1..27: note = BRCA1-A complex subunit BRE (227-235)
  source 1..27: mol_type = other RNA
cacgccctgggcgggagctccgccctc

SEQ ID NO: 39366 - RNA, 24 nt, synthetic construct
  misc_feature 1..24: note Dolichyl-diphosphooligosaccharide-proteinosyltransferase 48 kDa subunit (235-242)
  source 1..24: mol_type = other RNA
cacgccgtgggcaagaacaccctg

SEQ ID NO: 39367 - RNA, 27 nt, synthetic construct
  misc_feature 1..27: note = Perilipin-3 (249-257)
  source 1..27: mol_type = other RNA
cacgcctacgagcacagcctgggcaag

SEQ ID NO: 39368 - RNA, 27 nt, synthetic construct
  misc_feature 1..27: note = TBC1 domain family member 14 (206-214)
  source 1..27: mol_type = other RNA
cacgaggccgaggagggcagcaagctg

SEQ ID NO: 39369 - RNA, 33 nt, synthetic construct
  misc_feature 1..33: note = DNA-directed RNA polymerases I and III subunit RPAC2 (45-55)
  source 1..33: mol_type = other RNA
cacgaggaggaccacaccctgggcaacagcctc

SEQ ID NO: 39370 - RNA, 30 nt, synthetic construct
  misc_feature 1..30: note = Exosome complex exonuclease RRP44 (679-688)
  source 1..30: mol_type = other RNA
cacgaggagttcagcgagcacgccctgctc

SEQ ID NO: 39371 - RNA, 27 nt, synthetic construct
  misc_feature 1..27: note = THO complex subunit 5 homolog (154-162)
  source 1..27: mol_type = other RNA
cacgaggagatcgacctggtgagcctc

SEQ ID NO: 39372 - RNA, 27 nt, synthetic construct
  misc_feature 1..27: note = Tuftelin-interacting protein 11 (365-373)
  source 1..27: mol_type = other RNA
cacgaggagcgcgtgatcagcaacctg

SEQ ID NO: 39373 - RNA, 27 nt, synthetic construct
  misc_feature 1..27: note = X-linked retinitis pigmentosa GTPase regulator (637-645)
  source 1..27: mol_type = other RNA
cacgagttcagcaagaccgaggagctg

SEQ ID NO: 39374 - RNA, 27 nt, synthetic construct
  misc_feature 1..27: note = GON-4-like protein (1051-1059)
  source 1..27: mol_type = other RNA
cacgagggcgggcccgacagcaagctg

SEQ ID NO: 39375 - RNA, 27 nt, synthetic construct
  misc_feature 1..27: note = AP-3 complex subunit delta-1 (103-111)
  source 1..27: mol_type = other RNA
cacgagggcaccgacgtgatcatgctg

SEQ ID NO: 39376 - RNA, 27 nt, synthetic construct
  misc_feature 1..27: note = Gem-associated protein 5 (588-596)
  source 1..27: mol_type = other RNA
cacgagcacggcagccagcccgagctg

SEQ ID NO: 39377 - RNA, 27 nt, synthetic construct
  misc_feature 1..27: note = Zinc finger protein 644 (930-938)
  source 1..27: mol_type = other RNA
cacgagatccacgacccccagcacctg

SEQ ID NO: 39378 - RNA, 27 nt, synthetic construct
  misc_feature 1..27: note = Glycerol-3-phosphate dehydrogenase, mitochondrial (539-547)
  source 1..27: mol_type = other RNA
cacgagatcctgaacgaggtggacctc

SEQ ID NO: 39379 - RNA, 27 nt, synthetic construct
  misc_feature 1..27: note = Eukaryotic translation initiation factor 3 subunit I (165-173)
  source 1..27: mol_type = other RNA
cacgagagcggcgagctgaaccagtac

SEQ ID NO: 39380 - RNA, 27 nt, synthetic construct
  misc_feature 1..27: note = Insulin-like growth factor 2 mRNA-binding protein 2 (301-309)
  source 1..27: mol_type = other RNA
cacgagaccggcaccaagatcacgatc

SEQ ID NO: 39381 - RNA, 27 nt, synthetic construct
  misc_feature 1..27: note = Inositol-trisphosphate 3-kinase B (874-882)
  source 1..27: mol_type = other RNA
cacgaggtgatcggcagctccctgctc

SEQ ID NO: 39382 - RNA, 27 nt, synthetic construct
  misc_feature 1..27: note = Trabeculin-alpha (2620-2628)
  source 1..27: mol_type = other RNA
cacgaggtgaaggaggcccagaccctg

SEQ ID NO: 39383 - RNA, 30 nt, synthetic construct
  misc_feature 1..30: note = Translocation protein SEC62 (284-293)
  source 1..30: mol_type = other RNA
cacgagtacaagggccccaaggccgacctg

SEQ ID NO: 39384 - RNA, 24 nt, synthetic construct
  misc_feature 1..24: note = Bifunctional glutamate/proline-tRNA ligase (272-279)
  source 1..24: mol_type = other RNA
cacttcgagaccatcatgaagtac

SEQ ID NO: 39385 - RNA, 27 nt, synthetic construct
  misc_feature 1..27: note = PTB domain-containing engulfment adapter protein 1 (23-31)
  source 1..27: mol_type = other RNA
cacttcatcccctacaacgccaagttc

SEQ ID NO: 39386 - RNA, 27 nt, synthetic construct
  misc_feature 1..27: note = Squalene synthase (268-276)
  source 1..27: mol_type = other RNA
caccacatccccgacgtgatcacctac

SEQ ID NO: 39387 - RNA, 27 nt, synthetic construct
  misc_feature 1..27: note = CD109 antigen (1425-1433)
  source 1..27: mol_type = other RNA
caccacagctccgtgatcttcatcttc

SEQ ID NO: 39388 - RNA, 27 nt, synthetic construct
  misc_feature 1..27: note = Protein Churchill (92-100)
  source 1..27: mol_type = other RNA
caccacgtgatcgcccgccacgagtac

SEQ ID NO: 39389 - RNA, 27 nt, synthetic construct
  misc_feature 1..27: note = SUN domain-containing protein 1 (591-599)
  source 1..27: mol_type = other RNA
caccacgtgagcgtcaccaagcagctg

SEQ ID NO: 39390 - RNA, 27 nt, synthetic construct
  misc_feature 1..27: note = Huntingtin (895-903)
  source 1..27: mol_type = other RNA
caccactacaccggcctgctcaagctg

SEQ ID NO: 39391 - RNA, 33 nt, synthetic construct
  misc_feature 1..33: note = DNA-directed RNA polymerase III subunit RPC1 (122-132)
  source 1..33: mol_type = other RNA
cacatcgacgagcagagcggcaaggagaagtac

SEQ ID NO: 39392 - RNA, 36 nt, synthetic construct
  misc_feature 1..36: note = GPI transamidase component PIG-T (548-559)
  source 1..36: mol_type = other RNA
cacatcgaggagccccgcaccggcgggctggccaag

SEQ ID NO: 39393 - RNA, 27 nt, synthetic construct
  misc_feature 1..27: note = Peroxisomal acyl-coenzyme A oxidase 1 (21-29)
  source 1..27: mol_type = other RNA
cacatcctggacggcagccccgagaag

SEQ ID NO: 39394 - RNA, 33 nt, synthetic construct
  misc_feature 1..33: note = Kinesin-like protein KIF20B (82-92)
  source 1..33: mol_type = other RNA
cacatcctggacagccagaccgtggtcctcaag

SEQ ID NO: 39395 - RNA, 30 nt, synthetic construct
  misc_feature 1..30: note = Protein polybromo-1 (618-627)
  source 1..30: mol_type = other RNA
cacatcctggagaagctcctgaaggagaag

SEQ ID NO: 39396 - RNA, 27 nt, synthetic construct
  misc_feature 1..27: note = ADNP homeobox protein 2 (899-907)
  source 1..27: mol_type = other RNA
cacatcatgcccaccgtgcacaccgtc

SEQ ID NO: 39397 - RNA, 27 nt, synthetic construct
  misc_feature 1..27: note = Cytoskeleton-associated protein 5 (447-455)
  source 1..27: mol_type = other RNA
cacatcaacgacagcgcccccgaggtg

SEQ ID NO: 39398 - RNA, 30 nt, synthetic construct
  misc_feature 1..30: note = Tumor suppressor candidate 3 (250-259)
  source 1..30: mol_type = other RNA
cacatccgcggccccccgtacgcccacaag

SEQ ID NO: 39399 - RNA, 27 nt, synthetic construct
  misc_feature 1..27: note = E3 ubiquitin-protein ligase pellino homolog 3 (110-118)
  source 1..27: mol_type = other RNA
cacatcagcacccccctggtgtccaag

SEQ ID NO: 39400 - RNA, 27 nt, synthetic construct
  misc_feature 1..27: note = Death-associated protein kinase 3 (166-174)
  source 1..27: mol_type = other RNA
cacaagatcgaggccggcaacgagttc

SEQ ID NO: 39401 - RNA, 27 nt, synthetic construct
  misc_feature 1..27: note = Alpha-actinin-4 (413-421)
  source 1..27: mol_type = other RNA
cacctggccgagaagttccgccagaag

SEQ ID NO: 39402 - RNA, 27 nt, synthetic construct
  misc_feature 1..27: note = Synembryn-A (382-390)
  source 1..27: mol_type = other RNA
cacctggacaccgacgtgaagcgcgtc

SEQ ID NO: 39403 - RNA, 27 nt, synthetic construct
  misc_feature 1..27: note = CAD protein (188-196)
  source 1..27: mol_type = other RNA
cacctgttcaacgtggcccacaccctc

SEQ ID NO: 39404 - RNA, 30 nt, synthetic construct
  misc_feature 1..30: note = AP-5 complex subunit zeta-1 (1130-1139)
  source 1..30: mol_type = other RNA
cacctgttcagcggccacctctccaccctg

SEQ ID NO: 39405 - RNA, 30 nt, synthetic construct
  misc_feature 1..30: note = Proteasome inhibitor PI31 subunit (116-125)
  source 1..30: mol_type = other RNA
cacctgggcgacttccaccgcacctacaag

SEQ ID NO: 39406 - RNA, 27 nt, synthetic construct
  misc_feature 1..27: note = Cytoplasmic FMR1-interacting protein 1 (638-646)
  source 1..27: mol_type = other RNA
cacctgatcaacttcagcgagaccctc

SEQ ID NO: 39407 - RNA, 33 nt, synthetic construct
  misc_feature 1..33: note = Centromere protein H (132-142)
  source 1..33: mol_type = other RNA
cacctgctcgagctgaacaagctgatcatgaag

SEQ ID NO: 39408 - RNA, 27 nt, synthetic construct
  misc_feature 1..27: note = Solute carrier family 35 member C2 (289-297)
  source 1..27: mol_type = other RNA
cacctgctcggcgaccagatcagcctg

SEQ ID NO: 39409 - RNA, 27 nt, synthetic construct
  misc_feature 1..27: note = Rotatin (987-995)
  source 1..27: mol_type = other RNA
cacctgcccgtgcacgtcatcggccac

SEQ ID NO: 39410 - RNA, 27 nt, synthetic construct
  misc_feature 1..27: note = SAP30-binding protein (125-133)
  source 1..27: mol_type = other RNA
cacctgcaggacaagatccagaagctc

SEQ ID NO: 39411 - RNA, 33 nt, synthetic construct
  misc_feature 1..33: note = Collagen alpha-1(XV) chain (1257-1267)
  source 1..33: mol_type = other RNA
cacctgcaggacctcagcaccatcgtgcgcaag

SEQ ID NO: 39412 - RNA, 27 nt, synthetic construct
  misc_feature 1..27: note = Small integral membrane protein 17 (92-100)
  source 1..27: mol_type = other RNA
cacctgaccatcatggtggccgtcgtg

SEQ ID NO: 39413 - RNA, 30 nt, synthetic construct
  misc_feature 1..30: note = Dysbindin (37-46)
  source 1..30: mol_type = other RNA
cacctggtggagaagcagctcatcagcaag

SEQ ID NO: 39414 - RNA, 27 nt, synthetic construct
  misc_feature 1..27: note = Zinc finger and BTB domain-containing protein 7B (252-260)
  source 1..27: mol_type = other RNA
cacctggtgcccgaggtcccgaccgtg

SEQ ID NO: 39415 - RNA, 30 nt, synthetic construct
  misc_feature 1..30: note = Ubinuclein-1 (86-95)
  source 1..30: mol_type = other RNA
cacctgtacgagcagggcgggcgcctcaag

SEQ ID NO: 39416 - RNA, 30 nt, synthetic construct
  misc_feature 1..30: note = Fructosamine-3-kinase (111-120)
  source 1..30: mol_type = other RNA
cacctgtacaaccagaagctccgcgagaag

SEQ ID NO: 39417 - RNA, 30 nt, synthetic construct
  misc_feature 1..30: note = Cysteine-tRNA ligase, cytoplasmic (30-39)
  source 1..30: mol_type = other RNA
cacctgtacaacagcctcacccgcaacaag

SEQ ID NO: 39418 - RNA, 27 nt, synthetic construct
  misc_feature 1..27: note = Protein TANC1 (1825-1833)
  source 1..27: mol_type = other RNA
cacctgtaccaggagagcatctccaag

SEQ ID NO: 39419 - RNA, 27 nt, synthetic construct
  misc_feature 1..27: note = Importin-7 (406-414)
  source 1..27: mol_type = other RNA
cacatgatcggcagcctggccgagatc

SEQ ID NO: 39420 - RNA, 33 nt, synthetic construct
  misc_feature 1..33: note = ATP-dependent RNA helicase DDX18 (255-265)
  source 1..33: mol_type = other RNA
cacatgcagaacacccccggcttcatgtacaag

SEQ ID NO: 39421 - RNA, 27 nt, synthetic construct
  misc_feature 1..27: note = Proline-rich protein 11 (150-158)
  source 1..27: mol_type = other RNA
cacatgagcggcaagctgaccaacgtg

SEQ ID NO: 39422 - RNA, 27 nt, synthetic construct
  misc_feature 1..27: note = Protein CutA (98-106)
  source 1..27: mol_type = other RNA
cacccctacgaggtggccgaggtcatc

SEQ ID NO: 39423 - RNA, 27 nt, synthetic construct
  misc_feature 1..27: note = Cyclic AMP-dependent transcription factor ATF-6 beta (691-699)
  source 1..27: mol_type = other RNA
caccaggccagccaccagcccctgtac

SEQ ID NO: 39424 - RNA, 27 nt, synthetic construct
  misc_feature 1..27: note = NUAK family SNF1-like kinase 2 (201-209)
  source 1..27: mol_type = other RNA
caccagggcaagttcctgcagaccttc

SEQ ID NO: 39425 - RNA, 27 nt, synthetic construct
  misc_feature 1..27: note = Golgi resident protein GCP60 (496-504)
  source 1..27: mol_type = other RNA
caccagtaccccggccgcggggtgtac

SEQ ID NO: 39426 - RNA, 27 nt, synthetic construct
  misc_feature 1..27: note = Major prion protein (148-156)
  source 1..27: mol_type = other RNA
caccgctaccccaaccaggtgtactac

SEQ ID NO: 39427 - RNA, 27 nt, synthetic construct
  misc_feature 1..27: note = STAGA complex 65 subunit gamma (129-137)
  source 1..27: mol_type = other RNA
cacagcgaccccgagtccgacttctac

SEQ ID NO: 39428 - RNA, 27 nt, synthetic construct
  misc_feature 1..27: note = Histone-lysine N-methyltransferase NSD3 (877-885)
  source 1..27: mol_type = other RNA
cacagcgaccccatgttctccagctac

SEQ ID NO: 39429 - RNA, 30 nt, synthetic construct
  misc_feature 1..30: note = Protein FAM135A (1394-1403)
  source 1..30: mol_type = other RNA
cacagcgacccccgccagaccttcctgtac

SEQ ID NO: 39430 - RNA, 27 nt, synthetic construct
  misc_feature 1..27: note = PERQ amino acid-rich with GYF domain-containing protein 1 (731-739)
  source 1..27: mol_type = other RNA
cacagcgacccctccatcctgggctac

SEQ ID NO: 39431 - RNA, 27 nt, synthetic construct
  misc_feature 1..27: note = NAD(P)H dehydrogenase (quinone) 1 (9-17)
  source 1..27: mol_type = other RNA
cacagcgagcgcacctccttcaactac

SEQ ID NO: 39432 - RNA, 33 nt, synthetic construct
  misc_feature 1..33: note = Heterogeneous nuclear ribonucleoproteins A2/B1 (72-82)
  source 1..33: mol_type = other RNA
cacagcatcgacggccgcgtggtcgagcccaag

SEQ ID NO: 39433 - RNA, 30 nt, synthetic construct
  misc_feature 1..30: note = Rho-related BTB domain-containing protein 3 (176-185)
  source 1..30: mol_type = other RNA
cacagcctggacgacttctacatcggcaag

SEQ ID NO: 39434 - RNA, 27 nt, synthetic construct
  misc_feature 1..27: note = Cytochrome c1, heme protein, mitochondrial (27-35)
  source 1..27: mol_type = other RNA
cacagcatggacttcgtggcctaccgc

SEQ ID NO: 39435 - RNA, 27 nt, synthetic construct
  misc_feature 1..27: note = FUN14 domain-containing protein 1 (39-47)
  source 1..27: mol_type = other RNA
cacagctccggccccatggtggagaag

SEQ ID NO: 39436 - RNA, 27 nt, synthetic construct
  misc_feature 1..27: note = Isocitrate dehydrogenase (NAD) subunit gamma, mitochondrial (342-350)
  source 1..27: mol_type = other RNA
cacagctacgccacctccatccgcaag

SEQ ID NO: 39437 - RNA, 27 nt, synthetic construct
  misc_feature 1..27: note = KAT8 regulatory NSL complex subunit 1 (802-810)
  source 1..27: mol_type = other RNA
cacaccgacatgagctccagctcctac

SEQ ID NO: 39438 - RNA, 30 nt, synthetic construct
  misc_feature 1..30: note = Histone-lysine N-methyltransferase SETD1A (230-239)
  source 1..30: mol_type = other RNA
cacaccatcaccaacctgacgacccccaag

SEQ ID NO: 39439 - RNA, 33 nt, synthetic construct
  misc_feature 1..33: note = DNA damage-binding protein 2 (96-106)
  source 1..33: mol_type = other RNA
cacaccctggacagctaccgcatcctccagaag

SEQ ID NO: 39440 - RNA, 27 nt, synthetic construct
  misc_feature 1..27: note = Transmembraneoprotein NMB (178-186)
  source 1..27: mol_type = other RNA
cacaccctgggccagtacttccagaag

SEQ ID NO: 39441 - RNA, 27 nt, synthetic construct
  misc_feature 1..27: note = Necdin (95-103)
  source 1..27: mol_type = other RNA
cacaccatggagttcgccctggtgaag

SEQ ID NO: 39442 - RNA, 27 nt, synthetic construct
  misc_feature 1..27: note = Integrin beta-5 (781-789)
  source 1..27: mol_type = other RNA
cacaccgtggacttcaccttcaacaag

SEQ ID NO: 39443 - RNA, 27 nt, synthetic construct
  misc_feature 1..27: note = Histone-lysine N-methyltransferase 2A (25-33)
  source 1..27: mol_type = other RNA
cacgtggaccaggacctgaccacctac

SEQ ID NO: 39444 - RNA, 27 nt, synthetic construct
  misc_feature 1..27: note = Adapter protein CIKS (72-80)
  source 1..27: mol_type = other RNA
cacgtgtacagctggcccaagaacaag

SEQ ID NO: 39445 - RNA, 27 nt, synthetic construct
  misc_feature 1..27: note = KN motif and ankyrin repeat domain-containing protein 1 (825-833)
  source 1..27: mol_type = other RNA
cactacatcgagcgcatccagaagctg

SEQ ID NO: 39446 - RNA, 27 nt, synthetic construct
  misc_feature 1..27: note = Astrotactin-2 (291-299)
  source 1..27: mol_type = other RNA
cactacaacagccactacgagaagttc

SEQ ID NO: 39447 - RNA, 27 nt, synthetic construct
  misc_feature 1..27: note = Tensin-1 (1660-1668)
  source 1..27: mol_type = other RNA
cactaccccctgaacaccgtgaccttc

SEQ ID NO: 39448 - RNA, 27 nt, synthetic construct
  misc_feature 1..27: note = Kelch-like protein 15 (472-480)
  source 1..27: mol_type = other RNA
cactacagcgactccatcctgaccttc

SEQ ID NO: 39449 - RNA, 27 nt, synthetic construct
  misc_feature 1..27: note = ATP-dependent RNA helicase DHX36 (726-734)
  source 1..27: mol_type = other RNA
atcgccgacgcccgccggaaggagctg

SEQ ID NO: 39450 - RNA, 30 nt, synthetic construct
  misc_feature 1..30: note = Small ubiquitin-related modifier 1 (46-55)
  source 1..30: mol_type = other RNA
atcgccgacaaccacacccccaaggagctg

SEQ ID NO: 39451 - RNA, 27 nt, synthetic construct
  misc_feature 1..27: note = Sarcoplasmic/endoplasmic reticulum calcium ATPase 1 (718-726)
  source 1..27: mol_type = other RNA
atcgccatgggcagcgggaccgccgtg

SEQ ID NO: 39452 - RNA, 30 nt, synthetic construct
  misc_feature 1..30: note = DNA-directed RNA polymerase I subunit RPA1 (1631-1640)
  source 1..30: mol_type = other RNA
atcgccgtggacccccgccacctgagcctc

SEQ ID NO: 39453 - RNA, 27 nt, synthetic construct
  misc_feature 1..27: note = Derlin-3 (176-184)
  source 1..27: mol_type = other RNA
atcgccgtgggccacatctactacttc

SEQ ID NO: 39454 - RNA, 33 nt, synthetic construct
  misc_feature 1..33: note = CD99 antigen (129-139)
  source 1..33: mol_type = other RNA
atcgcctaccagaagaagaagctgtgcttcaag

SEQ ID NO: 39455 - RNA, 27 nt, synthetic construct
  misc_feature 1..27: note Dolichyl-diphosphooligosaccharide-proteinosyltransferase subunit 1 (381-389)
  source 1..27: mol_type = other RNA
atcgagatcgacagcccctacgagatc

SEQ ID NO: 39456 - RNA, 27 nt, synthetic construct
  misc_feature 1..27: note = NEDD8-activating enzyme E1 regulatory subunit (166-174)
  source 1..27: mol_type = other RNA
atcgagagccaccccgacaacgccctg

SEQ ID NO: 39457 - RNA, 27 nt, synthetic construct
  misc_feature 1..27: note = Splicing factor 3A subunit 1 (762-770)
  source 1..27: mol_type = other RNA
atcttcatcaaggacagcaactccctg

SEQ ID NO: 39458 - RNA, 27 nt, synthetic construct
  misc_feature 1..27: note = Retinoic acid receptor RXR-gamma (443-451)
  source 1..27: mol_type = other RNA
atcggcgacacccccatcgacaccttc

SEQ ID NO: 39459 - RNA, 27 nt, synthetic construct
  misc_feature 1..27: note = C-myc promoter-binding protein (1082-1090)
  source 1..27: mol_type = other RNA
atcggcaagcccccgctgcgcagcaag

SEQ ID NO: 39460 - RNA, 27 nt, synthetic construct
  misc_feature 1..27: note = Serine/threonine-protein kinase tousled-like 2 (421-429)
  source 1..27: mol_type = other RNA
atccacaacgaggacaacagccagttc

SEQ ID NO: 39461 - RNA, 27 nt, synthetic construct
  misc_feature 1..27: note = Exportin-2 (769-777)
  source 1..27: mol_type = other RNA
atcatcatccccgagatccagaaggtg

SEQ ID NO: 39462 - RNA, 27 nt, synthetic construct
  misc_feature 1..27: note = Cytoplasmic dynein 1 heavy chain 1 (201-209)
  source 1..27: mol_type = other RNA
atcatcaccaaggacctgttccaggtg

SEQ ID NO: 39463 - RNA, 27 nt, synthetic construct
  misc_feature 1..27: note = Renin receptor (326-334)
  source 1..27: mol_type = other RNA
atcatctaccgcatgaccaaccagaag

SEQ ID NO: 39464 - RNA, 39 nt, synthetic construct
  misc_feature 1..39: note = Putative heat shock 70 kDa protein 7 (30-42)
  source 1..39: mol_type = other RNA
atcctggccaacgaccagggcaaccgcaccacccccagc

SEQ ID NO: 39465 - RNA, 27 nt, synthetic construct
  misc_feature 1..27: note = Very-long-chain enoyl-CoA reductase (8-16)
  source 1..27: mol_type = other RNA
atcctggacgccaagacccgcgagaag

SEQ ID NO: 39466 - RNA, 33 nt, synthetic construct
  misc_feature 1..33: note = Ribosome-binding protein 1 (545-555)
  source 1..33: mol_type = other RNA
atcctggaggacgagcagacccagcgccagaag

SEQ ID NO: 39467 - RNA, 30 nt, synthetic construct
  misc_feature 1..30: note = 60S ribosomal protein L19 (118-127)
  source 1..30: mol_type = other RNA
atcctgatggagcacatccacaagctcaag

SEQ ID NO: 39468 - RNA, 27 nt, synthetic construct
  misc_feature 1..27: note = Chromobox protein homolog 6 (175-183)
  source 1..27: mol_type = other RNA
atcctgaacctcaaggtgatcgacaag

SEQ ID NO: 39469 - RNA, 30 nt, synthetic construct
  misc_feature 1..30: note = A-kinase anchor protein 8-like (468-477)
  source 1..30: mol_type = other RNA
atcctgaacaacaagctcatcagcaagaag

SEQ ID NO: 39470 - RNA, 36 nt, synthetic construct
  misc_feature 1..36: note = Replication factor C subunit 3 (55-66)
  source 1..36: mol_type = other RNA
atcctgcgcgagctctacggcgtgggggtcgagaag

SEQ ID NO: 39471 - RNA, 33 nt, synthetic construct
  misc_feature 1..33: note = Beta-crystallin B2 (110-120)
  source 1..33: mol_type = other RNA
atcctgtacgagaaccccaacttcaccggcaag

SEQ ID NO: 39472 - RNA, 36 nt, synthetic construct
  misc_feature 1..36: note = Discoidin, CUB and LCCL domain-containing protein 2 (337-348)
  source 1..36: mol_type = other RNA
atcctgtacagcgacgacggccagaagtggaccgtg

SEQ ID NO: 39473 - RNA, 27 nt, synthetic construct
  misc_feature 1..27: note = Tight junction protein ZO-1 (1314-1322)
  source 1..27: mol_type = other RNA
atccccgagccgcagaagccccagctg

SEQ ID NO: 39474 - RNA, 27 nt, synthetic construct
  misc_feature 1..27: note = Histone H2A.V (85-93)
  source 1..27: mol_type = other RNA
atcccccacatccacaagagcctgatc

SEQ ID NO: 39475 - RNA, 27 nt, synthetic construct
  misc_feature 1..27: note = Msx2-interacting protein (466-474)
  source 1..27: mol_type = other RNA
atccccatcccgaccctgcccagcgtg

SEQ ID NO: 39476 - RNA, 27 nt, synthetic construct
  misc_feature 1..27: note = Histone-lysine N-methyltransferase 2E (370-378)
  source 1..27: mol_type = other RNA
atccccaagggcaccgagatcaccatc

SEQ ID NO: 39477 - RNA, 27 nt, synthetic construct
  misc_feature 1..27: note = E3 ubiquitin-protein ligase UBR4 (92-100)
  source 1..27: mol_type = other RNA
atcccccgcaaccagctgcagagcgtg

SEQ ID NO: 39478 - RNA, 27 nt, synthetic construct
  misc_feature 1..27: note = Nucleoporin GLE1 (428-436)
  source 1..27: mol_type = other RNA
atccccgtgagccagatctccaccatc

SEQ ID NO: 39479 - RNA, 27 nt, synthetic construct
  misc_feature 1..27: note = ER membrane protein complex subunit 1 (895-903)
  source 1..27: mol_type = other RNA
atcccctacagcccggacgtgcagatc

SEQ ID NO: 39480 - RNA, 33 nt, synthetic construct
  misc_feature 1..33: note = Elongator complex protein 6 (249-259)
  source 1..33: mol_type = other RNA
atccaggacaagagcgtgtccttcttcgccaag

SEQ ID NO: 39481 - RNA, 27 nt, synthetic construct
  misc_feature 1..27: note = GPI transamidase component PIG-T (440-448)
  source 1..27: mol_type = other RNA
atccagttcgagcgcgccctgctcaag

SEQ ID NO: 39482 - RNA, 30 nt, synthetic construct
  misc_feature 1..30: note = Kelch domain-containing protein 2 (308-317)
  source 1..30: mol_type = other RNA
atccagttcaaccacccctacaccgagaag

SEQ ID NO: 39483 - RNA, 27 nt, synthetic construct
  misc_feature 1..27: note = Helicase with zinc finger domain 2 (2172-2180)
  source 1..27: mol_type = other RNA
atccagggccccccggggaccggcaag

SEQ ID NO: 39484 - RNA, 27 nt, synthetic construct
  misc_feature 1..27: note = Large proline-rich protein BAG6 (377-385)
  source 1..27: mol_type = other RNA
atccagatcaacgtgggcaccaccgtc

SEQ ID NO: 39485 - RNA, 30 nt, synthetic construct
  misc_feature 1..30: note = Focadhesin (263-272)
  source 1..30: mol_type = other RNA
atccagctgacccagatgagcctccagctg

SEQ ID NO: 39486 - RNA, 36 nt, synthetic construct
  misc_feature 1..36: note = Beta-2-microglobulin (21-32)
  source 1..36: mol_type = other RNA
atccagcgcacccccaagatccaggtgtacagccgg

SEQ ID NO: 39487 - RNA, 30 nt, synthetic construct
  misc_feature 1..30: note = 26S proteasome non-ATPase regulatory subunit 7 (266-275)
  source 1..30: mol_type = other RNA
atccgcagcgtggtcgccctgcacaacctc

SEQ ID NO: 39488 - RNA, 27 nt, synthetic construct
  misc_feature 1..27: note = Kinesin-like protein KIF20B (1684-1692)
  source 1..27: mol_type = other RNA
atcagcgacgaccgcaactccagcgtg

SEQ ID NO: 39489 - RNA, 27 nt, synthetic construct
  misc_feature 1..27: note = Sperm-specific antigen 2 (226-234)
  source 1..27: mol_type = other RNA
atcagcgacgaggccaactccaacttc

SEQ ID NO: 39490 - RNA, 27 nt, synthetic construct
  misc_feature 1..27: note = Lysosome-associated membraneoprotein 2 (66-74)
  source 1..27: mol_type = other RNA
atcagcgaccacggcaccgtgacctac

SEQ ID NO: 39491 - RNA, 27 nt, synthetic construct
  misc_feature 1..27: note Dolichyl-diphosphooligosaccharide-proteinosyltransferase 48 kDa subunit (164-172)
  source 1..27: mol_type = other RNA
atcagcgacctgggccagcacaccctc

SEQ ID NO: 39492 - RNA, 27 nt, synthetic construct
  misc_feature 1..27: note = Dynamin-1-like protein (174-182)
  source 1..27: mol_type = other RNA
atcagcaaccccaactccatcatcctg

SEQ ID NO: 39493 - RNA, 27 nt, synthetic construct
  misc_feature 1..27: note = HEAT repeat-containing protein 1 (915-923)
  source 1..27: mol_type = other RNA
atcagctcccccgtggtcaccagcctg

SEQ ID NO: 39494 - RNA, 33 nt, synthetic construct
  misc_feature 1..33: note = UBAP1-MVB12-associated (UMA)-domain containing protein 1 isoform b (69-79)
  source 1..33: mol_type = other RNA
atcaccgacctgcccgaccacctcctgagctac

SEQ ID NO: 39495 - RNA, 27 nt, synthetic construct
  misc_feature 1..27: note = U4/U6.U5 tri-snRNP-associated protein 2 (264-272)
  source 1..27: mol_type = other RNA
atcaccgagaaggagtacaagacctac

SEQ ID NO: 39496 - RNA, 30 nt, synthetic construct
  misc_feature 1..30: note = T-complex protein 1 subunit delta (70-79)
  source 1..30: mol_type = other RNA
atcaccaacgacggcgccaccatcctgaag

SEQ ID NO: 39497 - RNA, 33 nt, synthetic construct
  misc_feature 1..33: note = Cytoplasmic dynein 2 heavy chain 1 (74-84)
  source 1..33: mol_type = other RNA
atcacctacgagagccccccgggcctgaagaag

SEQ ID NO: 39498 - RNA, 33 nt, synthetic construct
  misc_feature 1..33: note = Isocitrate dehydrogenase (NADP) cytoplasmic (55-65)
  source 1..33: mol_type = other RNA
atcacctacacccccagcgacggcacgcagaag

SEQ ID NO: 39499 - RNA, 27 nt, synthetic construct
  misc_feature 1..27: note = ATP-binding cassette sub-family F member 1 (656-664)
  source 1..27: mol_type = other RNA
atcgtgggccccaacggggtcggcaag

SEQ ID NO: 39500 - RNA, 39 nt, synthetic construct
  misc_feature 1..39: note = Glia-derived nexin (119-131)
  source 1..39: mol_type = other RNA
atcgtgaccgtcgccaacgccgtgttcgtgaagaacgcg

SEQ ID NO: 39501 - RNA, 30 nt, synthetic construct
  misc_feature 1..30: note = Protein enabled homolog (37-46)
  source 1..30: mol_type = other RNA
atctaccaccacaccggcaacaacaccttc

SEQ ID NO: 39502 - RNA, 27 nt, synthetic construct
  misc_feature 1..27: note = Vacuolar protein sorting-associated protein 13C (1267-1275)
  source 1..27: mol_type = other RNA
atctaccaccccgacatccagctgctc

SEQ ID NO: 39503 - RNA, 27 nt, synthetic construct
  misc_feature 1..27: note = Calpain-5 (449-457)
  source 1..27: mol_type = other RNA
atctacatcaacagccgctccgtgttc

SEQ ID NO: 39504 - RNA, 27 nt, synthetic construct
  misc_feature 1..27: note = Cyclin E variant ex7del (19-27)
  source 1..27: mol_type = other RNA
atctaccccccgaagctgcaccagttc

SEQ ID NO: 39505 - RNA, 27 nt, synthetic construct
  misc_feature 1..27: note = BTB/POZ domain-containing protein 10 (83-91)
  source 1..27: mol_type = other RNA
atctacagcaccaagctgtaccgcttc

SEQ ID NO: 39506 - RNA, 30 nt, synthetic construct
  misc_feature 1..30: note = Beta-soluble NSF attachment protein (71-80)
  source 1..30: mol_type = other RNA
atctacaccgacatgggccgcttcaccatc

SEQ ID NO: 39507 - RNA, 27 nt, synthetic construct
  misc_feature 1..27: note = WD repeat-containing protein 1 (53-61)
  source 1..27: mol_type = other RNA
atctacaccgagcacgcccaccaggtg

SEQ ID NO: 39508 - RNA, 27 nt, synthetic construct
  misc_feature 1..27: note = SMC5-SMC6 complex localization factor protein 2 (149-157)
  source 1..27: mol_type = other RNA
atctacgtgcccagctcctaccacctg

SEQ ID NO: 39509 - RNA, 33 nt, synthetic construct
  misc_feature 1..33: note = WW domain-binding protein 2 (229-239)
  source 1..33: mol_type = other RNA
aaggccgccgaggcggccgccagcgcctactac

SEQ ID NO: 39510 - RNA, 27 nt, synthetic construct
  misc_feature 1..27: note = 40S ribosomal protein S17 (11-19)
  source 1..27: mol_type = other RNA
aaggccgcccgcgtgatcatcgagaag

SEQ ID NO: 39511 - RNA, 27 nt, synthetic construct
  misc_feature 1..27: note = F-box/WD repeat-containing protein 8 (325-333)
  source 1..27: mol_type = other RNA
aaggccgaggacagcgcccgcaccctg

SEQ ID NO: 39512 - RNA, 36 nt, synthetic construct
  misc_feature 1..36: note = Vacuolar fusion protein CCZ1 homolog (154-165)
  source 1..36: mol_type = other RNA
aaggccatggaggacggcggggtgaagctgctcaag

SEQ ID NO: 39513 - RNA, 27 nt, synthetic construct
  misc_feature 1..27: note = Ceramide synthase 2 (35-43)
  source 1..27: mol_type = other RNA
aaggccagcgacctgtacatcaccctc

SEQ ID NO: 39514 - RNA, 27 nt, synthetic construct
  misc_feature 1..27: note = Vacuolar protein sorting-associated protein 11 homolog (811-819)
  source 1..27: mol_type = other RNA
aaggccagccccaagatcttccagaag

SEQ ID NO: 39515 - RNA, 27 nt, synthetic construct
  misc_feature 1..27: note = 60S ribosomal protein L4 (175-183)
  source 1..27: mol_type = other RNA
aaggcctggaacgacatcaagaaggtg

SEQ ID NO: 39516 - RNA, 33 nt, synthetic construct
  misc_feature 1..33: note = Replication protein A 70 kDa DNA-binding subunit (157-167)
  source 1..33: mol_type = other RNA
aaggcctacggcgccagcaagaccttcgggaag

SEQ ID NO: 39517 - RNA, 36 nt, synthetic construct
  misc_feature 1..36: note = NHP2-like protein 1 (9-20)
  source 1..36: mol_type = other RNA
aaggcctaccccctggccgacgcgcacctcaccaag

SEQ ID NO: 39518 - RNA, 27 nt, synthetic construct
  misc_feature 1..27: note = WD repeat-containing protein WRAP73 (276-284)
  source 1..27: mol_type = other RNA
aaggaggccgagaagagcccccagctg

SEQ ID NO: 39519 - RNA, 30 nt, synthetic construct
  misc_feature 1..30: note = Kinesin-like protein KIF20A (425-434)
  source 1..30: mol_type = other RNA
aaggaggccggcaacatcaacaccagcctg

SEQ ID NO: 39520 - RNA, 30 nt, synthetic construct
  misc_feature 1..30: note = Golgin subfamily B member 1 (533-542)
  source 1..30: mol_type = other RNA
aaggaggcccaggaggagatcgccttcctg

SEQ ID NO: 39521 - RNA, 30 nt, synthetic construct
  misc_feature 1..30: note = Transmembrane protein 165 (82-91)
  source 1..30: mol_type = other RNA
aaggaggaccccgccacccagaccaacctg

SEQ ID NO: 39522 - RNA, 27 nt, synthetic construct
  misc_feature 1..27: note = Zinc finger protein AEBP2 (439-447)
  source 1..27: mol_type = other RNA
aaggaggacagcggcaagatcaagctg

SEQ ID NO: 39523 - RNA, 27 nt, synthetic construct
  misc_feature 1..27: note = Charged multivesicular body protein 4a (192-200)
  source 1..27: mol_type = other RNA
aaggaggaggagcccagcgtgaagctg

SEQ ID NO: 39524 - RNA, 27 nt, synthetic construct
  misc_feature 1..27: note = E3 ubiquitin-protein ligase makorin-1 (351-359)
  source 1..27: mol_type = other RNA
aaggaggagaagcagaagctgatcctc

SEQ ID NO: 39525 - RNA, 27 nt, synthetic construct
  misc_feature 1..27: note = DNA topoisomerase I, mitochondrial (544-552)
  source 1..27: mol_type = other RNA
aaggaggagaacaagcaggtggccctg

SEQ ID NO: 39526 - RNA, 33 nt, synthetic construct
  misc_feature 1..33: note = DNA damage-binding protein 1 (287-297)
  source 1..33: mol_type = other RNA
aaggaggagcagatggacggcaccgtgaccctg

SEQ ID NO: 39527 - RNA, 30 nt, synthetic construct
  misc_feature 1..30: note = TATA element modulatory factor (490-499)
  source 1..30: mol_type = other RNA
aaggaggagagctccagcatctccagcctg

SEQ ID NO: 39528 - RNA, 27 nt, synthetic construct
  misc_feature 1..27: note = Transcriptional adapter 3 (372-380)
  source 1..27: mol_type = other RNA
aaggaggaggtgagccgccaggagctg

SEQ ID NO: 39529 - RNA, 27 nt, synthetic construct
  misc_feature 1..27: note = Peptidyl-prolyl cis-trans isomerase-like 2 (4-12)
  source 1..27: mol_type = other RNA
aaggagttcaagggcgacgagatcctg

SEQ ID NO: 39530 - RNA, 30 nt, synthetic construct
  misc_feature 1..30: note = Protein transport protein Sec31A (436-445)
  source 1..30: mol_type = other RNA
aaggagttcctgagccgctccgaccagctc

SEQ ID NO: 39531 - RNA, 27 nt, synthetic construct
  misc_feature 1..27: note = Heterogeneous nuclear ribonucleoprotein Q (66-74)
  source 1..27: mol_type = other RNA
aaggagttcaacgaggacggcgccctg

SEQ ID NO: 39532 - RNA, 27 nt, synthetic construct
  misc_feature 1..27: note = CUGBP Elav-like family member 2 (417-425)
  source 1..27: mol_type = other RNA
aaggagggccccgagggggccaacctg

SEQ ID NO: 39533 - RNA, 27 nt, synthetic construct
  misc_feature 1..27: note = Nuclear nucleic acid-binding protein C1D (79-87)
  source 1..27: mol_type = other RNA
aaggagcaccccgtgaagcaggagctg

SEQ ID NO: 39534 - RNA, 30 nt, synthetic construct
  misc_feature 1..30: note = Trafficking kinesin-binding protein 2 (299-308)
  source 1..30: mol_type = other RNA
aaggagcacgtgatcgagaaggaggagctg

SEQ ID NO: 39535 - RNA, 33 nt, synthetic construct
  misc_feature 1..33: note = HEAT repeat-containing protein 1 (449-459)
  source 1..33: mol_type = other RNA
aaggagatcgccgacctgaagaagcaggagctc

SEQ ID NO: 39536 - RNA, 30 nt, synthetic construct
  misc_feature 1..30: note = Serine palmitoyltransferase 2 (526-535)
  source 1..30: mol_type = other RNA
aaggagatcgacgaggtgggcgacctgctc

SEQ ID NO: 39537 - RNA, 30 nt, synthetic construct
  misc_feature 1..30: note = (Pyruvate dehydrogenase (acetyl-transferring)) kinase isozyme 4, mitochondrial (34-43)
  source 1..30: mol_type = other RNA
aaggagatcgacatcctgcccacccagctc

SEQ ID NO: 39538 - RNA, 33 nt, synthetic construct
  misc_feature 1..33: note = Cytochrome b-c1 complex subunit Rieske, mitochondrial (182-192)
  source 1..33: mol_type = other RNA
aaggagatcgagcaggaggccgccgtggagctg

SEQ ID NO: 39539 - RNA, 33 nt, synthetic construct
  misc_feature 1..33: note = 40S ribosomal protein S7 (47-57)
  source 1..33: mol_type = other RNA
aaggagatcgaggtgggcgggggccgcaaggcc

SEQ ID NO: 39540 - RNA, 27 nt, synthetic construct
  misc_feature 1..27: note = RuvB-like 1 (172-180)
  source 1..27: mol_type = other RNA
aaggagatcatccaggacgtgaccctg

SEQ ID NO: 39541 - RNA, 30 nt, synthetic construct
  misc_feature 1..30: note = Structural maintenance of chromosomes protein 4 (263-272)
  source 1..30: mol_type = other RNA
aaggagatcaacgagaagagcaacatcctg

SEQ ID NO: 39542 - RNA, 30 nt, synthetic construct
  misc_feature 1..30: note = Deoxynucleotidyltransferase terminal-interacting protein 2 (311-320)
  source 1..30: mol_type = other RNA
aaggagatcaacgagaagagctcccagctg

SEQ ID NO: 39543 - RNA, 27 nt, synthetic construct
  misc_feature 1..27: note = Protein bicaudal D homolog 2 (150-158)
  source 1..27: mol_type = other RNA
aaggagatcaaccagaacgtggagatc

SEQ ID NO: 39544 - RNA, 27 nt, synthetic construct
  misc_feature 1..27: note = Nibrin (635-643)
  source 1..27: mol_type = other RNA
aaggagatcagcaacaacgacaagctg

SEQ ID NO: 39545 - RNA, 33 nt, synthetic construct
  misc_feature 1..33: note = SNW domain-containing protein 1 (141-151)
  source 1..33: mol_type = other RNA
aaggagatcaccgagaagacccgcgtggccctg

SEQ ID NO: 39546 - RNA, 27 nt, synthetic construct
  misc_feature 1..27: note = Sperm-associated antigen 5 (893-901)
  source 1..27: mol_type = other RNA
aaggagaagaccgagcaggagaccctg

SEQ ID NO: 39547 - RNA, 30 nt, synthetic construct
  misc_feature 1..30: note = Microfibrillar-associated protein 1 (250-259)
  source 1..30: mol_type = other RNA
aaggagctggaggagaacaagcgcagcctc

SEQ ID NO: 39548 - RNA, 27 nt, synthetic construct
  misc_feature 1..27: note = LYR motif-containing protein 2 (77-85)
  source 1..27: mol_type = other RNA
aaggagctggagaagaccctcgccctg

SEQ ID NO: 39549 - RNA, 30 nt, synthetic construct
  misc_feature 1..30: note = Prefoldin subunit 1 (92-101)
  source 1..30: mol_type = other RNA
aaggagctggagcagaagaagagctacctc

SEQ ID NO: 39550 - RNA, 30 nt, synthetic construct
  misc_feature 1..30: note = Developmentally-regulated GTP-binding protein 2 (161-170)
  source 1..30: mol_type = other RNA
aaggagctggagagcgtgggcatccgcctc

SEQ ID NO: 39551 - RNA, 30 nt, synthetic construct
  misc_feature 1..30: note = Ancient ubiquitous protein 1 (250-259)
  source 1..30: mol_type = other RNA
aaggagctgggccagaccgggacccgcctc

SEQ ID NO: 39552 - RNA, 30 nt, synthetic construct
  misc_feature 1..30: note = U2 small nuclear ribonucleoprotein B'' (57-66)
  source 1..30: mol_type = other RNA
aaggagctgggcagctccaccaacgccctc

SEQ ID NO: 39553 - RNA, 30 nt, synthetic construct
  misc_feature 1..30: note = TSC22 domain family protein 1 (1011-1020)
  source 1..30: mol_type = other RNA
aaggagctgatcgagaagaacagccagctc

SEQ ID NO: 39554 - RNA, 30 nt, synthetic construct
  misc_feature 1..30: note = Bifunctional 3'-phosphoadenosine 5'-phosphosulfate synthase 1 (235-244)
  source 1..30: mol_type = other RNA
aaggagctgtacgtgcccgagaacaagctc

SEQ ID NO: 39555 - RNA, 33 nt, synthetic construct
  misc_feature 1..33: note = Polymerase I and transcript release factor (170-180)
  source 1..33: mol_type = other RNA
aaggagaacctggagaagacccgccacaccctc

SEQ ID NO: 39556 - RNA, 27 nt, synthetic construct
  misc_feature 1..27: note = SCY1-like protein 2 (264-272)
  source 1..27: mol_type = other RNA
aaggagcaggagcaggcccagaagctg

SEQ ID NO: 39557 - RNA, 30 nt, synthetic construct
  misc_feature 1..30: note = Corepressor interacting with RBPJ 1 (48-57)
  source 1..30: mol_type = other RNA
aaggagcaggagagctacgacaaccgcctg

SEQ ID NO: 39558 - RNA, 27 nt, synthetic construct
  misc_feature 1..27: note = Kinesin-like protein (323-331)
  source 1..27: mol_type = other RNA
aaggagcagatcaccatcagccagctg

SEQ ID NO: 39559 - RNA, 30 nt, synthetic construct
  misc_feature 1..30: note = Catenin alpha-1 (81-90)
  source 1..30: mol_type = other RNA
aaggagagccagttcctgaaggaggagctc

SEQ ID NO: 39560 - RNA, 27 nt, synthetic construct
  misc_feature 1..27: note = General transcription factor II-I repeat domain-containing protein 1 (343-351)
  source 1..27: mol_type = other RNA
aaggagaccgaggacatcaacaccctg

SEQ ID NO: 39561 - RNA, 27 nt, synthetic construct
  misc_feature 1..27: note = Endothelial PAS domain-containing protein 1 (29-37)
  source 1..27: mol_type = other RNA
aaggagaccgaggtgttctacgagctg

SEQ ID NO: 39562 - RNA, 33 nt, synthetic construct
  misc_feature 1..33: note = Activator of 90 kDa heat shock protein ATPase homolog 1 (136-146)
  source 1..33: mol_type = other RNA
aaggagaccttcctgaccagccccgaggagctc

SEQ ID NO: 39563 - RNA, 27 nt, synthetic construct
  misc_feature 1..27: note = Double-strand-break repair protein rad21 homolog (364-372)
  source 1..27: mol_type = other RNA
aaggagaccggcggggtggagaagctg

SEQ ID NO: 39564 - RNA, 30 nt, synthetic construct
  misc_feature 1..30: note = Transcription factor BTF3 (46-55)
  source 1..30: mol_type = other RNA
aaggagaccatcatgaaccaggagaagctg

SEQ ID NO: 39565 - RNA, 27 nt, synthetic construct
  misc_feature 1..27: note = RNA-binding protein PNO1 (122-130)
  source 1..27: mol_type = other RNA
aaggagaccaaggacgtgagcgccctg

SEQ ID NO: 39566 - RNA, 27 nt, synthetic construct
  misc_feature 1..27: note = Spectrin beta chain, non-erythrocytic 1 (832-840)
  source 1..27: mol_type = other RNA
aaggaggtggccgagctgacccgcctc

SEQ ID NO: 39567 - RNA, 30 nt, synthetic construct
  misc_feature 1..30: note = Sequestosome-1 (324-333)
  source 1..30: mol_type = other RNA
aaggaggtggaccccagcaccggcgagctg

SEQ ID NO: 39568 - RNA, 30 nt, synthetic construct
  misc_feature 1..30: note = Vacuolar protein sorting-associated protein 52 homolog (10-19)
  source 1..30: mol_type = other RNA
aaggaggtggagagcttccagcagctgctc

SEQ ID NO: 39569 - RNA, 30 nt, synthetic construct
  misc_feature 1..30: note = Sodium/potassium-transporting ATPase subunit alpha-1 (37-46)
  source 1..30: mol_type = other RNA
aaggaggtgagcatggacgaccacaagctg

SEQ ID NO: 39570 - RNA, 33 nt, synthetic construct
  misc_feature 1..33: note = Actin-related protein 5 (555-565)
  source 1..33: mol_type = other RNA
aaggagtacgaggagaagggcggggagtacctg

SEQ ID NO: 39571 - RNA, 27 nt, synthetic construct
  misc_feature 1..27: note = Erythrocyte band 7 integral membrane protein (58-66)
  source 1..27: mol_type = other RNA
aaggagtacgagcgcgccatcatcttc

SEQ ID NO: 39572 - RNA, 27 nt, synthetic construct
  misc_feature 1..27: note = Son of sevenless homolog 1 (679-687)
  source 1..27: mol_type = other RNA
aaggagtacatccagcccgtgcagctg

SEQ ID NO: 39573 - RNA, 27 nt, synthetic construct
  misc_feature 1..27: note = Ran-binding protein 17 (349-357)
  source 1..27: mol_type = other RNA
aaggagtaccccgaggtgatccgcctg

SEQ ID NO: 39574 - RNA, 36 nt, synthetic construct
  misc_feature 1..36: note = Intermediate filament family orphan 2 (103-114)
  source 1..36: mol_type = other RNA
aaggagtaccaggagaccatcggccagatcgagctg

SEQ ID NO: 39575 - RNA, 27 nt, synthetic construct
  misc_feature 1..27: note = Mitochondrial ubiquitin ligase activator of NFKB 1 (158-166)
  source 1..27: mol_type = other RNA
aagttccaccccagcatccagtccttc

SEQ ID NO: 39576 - RNA, 30 nt, synthetic construct
  misc_feature 1..30: note = Structural maintenance of chromosomes protein 4 (295-304)
  source 1..30: mol_type = other RNA
aagttcatcgaggagaacaaggagaagttc

SEQ ID NO: 39577 - RNA, 27 nt, synthetic construct
  misc_feature 1..27: note = NADH dehydrogenase (ubiquinone) 1 alpha subcomplex subunit 12 (107-115)
  source 1..27: mol_type = other RNA
aagttcatctggaccaaccacaagttc

SEQ ID NO: 39578 - RNA, 27 nt, synthetic construct
  misc_feature 1..27: note = Kelch domain-containing protein 3 (136-144)
  source 1..27: mol_type = other RNA
aagttcaaccccgtgagcttcacctgg

SEQ ID NO: 39579 - RNA, 27 nt, synthetic construct
  misc_feature 1..27: note = Bromodomain and WD repeat-containing protein 1 (309-317)
  source 1..27: mol_type = other RNA
aagttcagcccccgcccgctgaagttc

SEQ ID NO: 39580 - RNA, 27 nt, synthetic construct
  misc_feature 1..27: note = Protein SHQ1 homolog (255-263)
  source 1..27: mol_type = other RNA
aagttcgtgaacaagagctacctgctc

SEQ ID NO: 39581 - RNA, 27 nt, synthetic construct
  misc_feature 1..27: note = Tyrosine-protein phosphatase non-receptor type 9 (176-184)
  source 1..27: mol_type = other RNA
aagggcgccttccccgcccgcctgaag

SEQ ID NO: 39582 - RNA, 27 nt, synthetic construct
  misc_feature 1..27: note = Protein SCAF8 (528-536)
  source 1..27: mol_type = other RNA
aagggcctgcccccgatccgcagcaag

SEQ ID NO: 39583 - RNA, 27 nt, synthetic construct
  misc_feature 1..27: note = BTB/POZ domain-containing adapter for CUL3-mediated RhoA degradation protein 2 (78-86)
  source 1..27: mol_type = other RNA
aagcacttcggcaccatcctgaactac

SEQ ID NO: 39584 - RNA, 27 nt, synthetic construct
  misc_feature 1..27: note = Hsp90 co-chaperone Cdc37 (147-155)
  source 1..27: mol_type = other RNA
aagcacaagaccttcgtggagaagtac

SEQ ID NO: 39585 - RNA, 27 nt, synthetic construct
  misc_feature 1..27: note = Transcription intermediary factor 1-beta (340-348)
  source 1..27: mol_type = other RNA
aagcaccaggagcacatcctgcgcttc

SEQ ID NO: 39586 - RNA, 27 nt, synthetic construct
  misc_feature 1..27: note = Proliferating cell nuclear antigen (240-248)
  source 1..27: mol_type = other RNA
aagatcgccgacatgggccacctgaag

SEQ ID NO: 39587 - RNA, 27 nt, synthetic construct
  misc_feature 1..27: note = Ubiquitin-conjugating enzyme E2 G2 (125-133)
  source 1..27: mol_type = other RNA
aagatcgccaagcagatcgtgcagaag

SEQ ID NO: 39588 - RNA, 27 nt, synthetic construct
  misc_feature 1..27: note = Signal peptidase complex subunit 2 (40-48)
  source 1..27: mol_type = other RNA
aagatcgacgacaagcccgtgaagatc

SEQ ID NO: 39589 - RNA, 27 nt, synthetic construct
  misc_feature 1..27: note = T-box transcription factor TBX3 (273-281)
  source 1..27: mol_type = other RNA
aagatcgacaacaaccccttcgccaag

SEQ ID NO: 39590 - RNA, 27 nt, synthetic construct
  misc_feature 1..27: note = Myeloid leukemia factor 1 (90-98)
  source 1..27: mol_type = other RNA
aagatcggcgacgagcccccgaaggtg

SEQ ID NO: 39591 - RNA, 27 nt, synthetic construct
  misc_feature 1..27: note = Ras GTPase-activating-like protein IQGAP1 (916-924)
  source 1..27: mol_type = other RNA
aagatcggcctgctcgtgaagaacaag

SEQ ID NO: 39592 - RNA, 33 nt, synthetic construct
  misc_feature 1..33: note = Replication factor C subunit 1 (468-478)
  source 1..33: mol_type = other RNA
aagatcatcgacgaggacggcctgctcaacctg

SEQ ID NO: 39593 - RNA, 27 nt, synthetic construct
  misc_feature 1..27: note = Nucleoprotein TPR (1420-1428)
  source 1..27: mol_type = other RNA
aagatcatcgacatccaggagaaggtg

SEQ ID NO: 39594 - RNA, 27 nt, synthetic construct
  misc_feature 1..27: note = Importin-8 (102-110)
  source 1..27: mol_type = other RNA
aagatcctggaccagtaccgccagaag

SEQ ID NO: 39595 - RNA, 33 nt, synthetic construct
  misc_feature 1..33: note = Sorting nexin-14 (635-645)
  source 1..33: mol_type = other RNA
aagatcctgcccgacgtgaacctcggcaagatc

SEQ ID NO: 39596 - RNA, 27 nt, synthetic construct
  misc_feature 1..27: note = V-type proton ATPase subunit E 2 (52-60)
  source 1..27: mol_type = other RNA
aagatcatggagtactacgagaagaag

SEQ ID NO: 39597 - RNA, 27 nt, synthetic construct
  misc_feature 1..27: note = Heat shock protein HSP 90-alpha (389-397)
  source 1..27: mol_type = other RNA
aagatcatgaaggacatcctggagaag

SEQ ID NO: 39598 - RNA, 27 nt, synthetic construct
  misc_feature 1..27: note = Calcium-independent phospholipase A2-gamma (789-797)
  source 1..27: mol_type = other RNA
aagatcaacgactggatcaagctgaag

SEQ ID NO: 39599 - RNA, 27 nt, synthetic construct
  misc_feature 1..27: note = Heterogeneous nuclear ribonucleoprotein U-like protein 1 (262-270)
  source 1..27: mol_type = other RNA
aagatcaacgaggagatcagcgtgaag

SEQ ID NO: 39600 - RNA, 30 nt, synthetic construct
  misc_feature 1..30: note = UDP-glucose:glycoprotein glucosyltransferase 2 (148-157)
  source 1..30: mol_type = other RNA
aagatcaacgagatcaagaagctgctcaag

SEQ ID NO: 39601 - RNA, 30 nt, synthetic construct
  misc_feature 1..30: note = Serine/threonine-protein phosphatase 4 regulatory subunit 3B (55-64)
  source 1..30: mol_type = other RNA
aagatcaaccccaacaccgcctaccagaag

SEQ ID NO: 39602 - RNA, 30 nt, synthetic construct
  misc_feature 1..30: note = Oral-facial-digital syndrome 1 protein (116-125)
  source 1..30: mol_type = other RNA
aagatcaaccccaccagctccctgtacaag

SEQ ID NO: 39603 - RNA, 27 nt, synthetic construct
  misc_feature 1..27: note = Poly(A) polymerase alpha (641-649)
  source 1..27: mol_type = other RNA
aagatccccaccccgatcgtgggcgtc

SEQ ID NO: 39604 - RNA, 27 nt, synthetic construct
  misc_feature 1..27: note = Prefoldin subunit 5 (129-137)
  source 1..27: mol_type = other RNA
aagatccagcccgccctgcaggagaag

SEQ ID NO: 39605 - RNA, 36 nt, synthetic construct
  misc_feature 1..36: note = Oxysterol-binding protein-related protein 9 (687-698)
  source 1..36: mol_type = other RNA
aagatccgcgacatcgacgccgccaccgaggcgaag

SEQ ID NO: 39606 - RNA, 27 nt, synthetic construct
  misc_feature 1..27: note = Protein IMPACT (108-116)
  source 1..27: mol_type = other RNA
aagatccgcgacgtgctgatccagaag

SEQ ID NO: 39607 - RNA, 30 nt, synthetic construct
  misc_feature 1..30: note = Proto-oncogene tyrosine-protein kinase receptor Ret (156-165)
  source 1..30: mol_type = other RNA
aagatccgcgagtacgagcagaccctgaag

SEQ ID NO: 39608 - RNA, 30 nt, synthetic construct
  misc_feature 1..30: note = Heat shock factor protein 1 (131-140)
  source 1..30: mol_type = other RNA
aagatccgccaggacagcgtgaccaagctg

SEQ ID NO: 39609 - RNA, 36 nt, synthetic construct
  misc_feature 1..36: note = PDZ domain-containing RING finger protein 4 (443-454)
  source 1..36: mol_type = other RNA
aagatccgcagcgacggcacccggtacatcaccaag

SEQ ID NO: 39610 - RNA, 33 nt, synthetic construct
  misc_feature 1..33: note = Insulin-like growth factor I (3-13)
  source 1..33: mol_type = other RNA
aagatcagctccctgcccacccagctcttcaag

SEQ ID NO: 39611 - RNA, 27 nt, synthetic construct
  misc_feature 1..27: note = Importin-7 (419-427)
  source 1..27: mol_type = other RNA
aagatctacaaggaccagatggagtac

SEQ ID NO: 39612 - RNA, 27 nt, synthetic construct
  misc_feature 1..27: note = Mothers against decapentaplegic homolog 4 (428-436)
  source 1..27: mol_type = other RNA
aagatctaccccagcgcctacatcaag

SEQ ID NO: 39613 - RNA, 27 nt, synthetic construct
  misc_feature 1..27: note = RING finger protein 113A (151-159)
  source 1..27: mol_type = other RNA
aagatctaccgcggcatcaacaactac

SEQ ID NO: 39614 - RNA, 30 nt, synthetic construct
  misc_feature 1..30: note = Prefoldin subunit 1 (28-37)
  source 1..30: mol_type = other RNA
aagctggccgacatccagatcgagcagctc

SEQ ID NO: 39615 - RNA, 36 nt, synthetic construct
  misc_feature 1..36: note = DNA topoisomerase 2-alpha (976-987)
  source 1..36: mol_type = other RNA
aagctggccgaggccgagcgcgtgggcctccacaag

SEQ ID NO: 39616 - RNA, 27 nt, synthetic construct
  misc_feature 1..27: note = Retinoblastoma-like protein 1 (329-337)
  source 1..27: mol_type = other RNA
aagctggccgagatcctctactacaag

SEQ ID NO: 39617 - RNA, 27 nt, synthetic construct
  misc_feature 1..27: note = Neuron navigator 3 (940-948)
  source 1..27: mol_type = other RNA
aagctggccgagtacgtgatcaccaag

SEQ ID NO: 39618 - RNA, 33 nt, synthetic construct
  misc_feature 1..33: note = Protein PRR14L (1625-1635)
  source 1..33: mol_type = other RNA
aagctggcccccgccatgaagacccagaagctc

SEQ ID NO: 39619 - RNA, 27 nt, synthetic construct
  misc_feature 1..27: note = Ubiquitin-40S ribosomal protein S27a (95-103)
  source 1..27: mol_type = other RNA
aagctggccgtgctcaagtactacaag

SEQ ID NO: 39620 - RNA, 30 nt, synthetic construct
  misc_feature 1..30: note = Disco-interacting protein 2 homolog A (376-385)
  source 1..30: mol_type = other RNA
aagctggcctacaccctcctgaacaagctg

SEQ ID NO: 39621 - RNA, 27 nt, synthetic construct
  misc_feature 1..27: note = Conserved oligomeric Golgi complex subunit 3 (394-402)
  source 1..27: mol_type = other RNA
aagctggacgagctcctggagaagctg

SEQ ID NO: 39622 - RNA, 30 nt, synthetic construct
  misc_feature 1..30: note = REST corepressor 1 (145-154)
  source 1..30: mol_type = other RNA
aagctggacgagtacatcgccatcgccaag

SEQ ID NO: 39623 - RNA, 30 nt, synthetic construct
  misc_feature 1..30: note = 40S ribosomal protein S7 (145-154)
  source 1..30: mol_type = other RNA
aagctggacggcagccgcctcatcaaggtg

SEQ ID NO: 39624 - RNA, 27 nt, synthetic construct
  misc_feature 1..27: note = CASP8-associated protein 2 (343-351)
  source 1..27: mol_type = other RNA
aagctggacaagaaccccaaccaggtg

SEQ ID NO: 39625 - RNA, 27 nt, synthetic construct
  misc_feature 1..27: note = Cysteine and histidine-rich protein 1 (100-108)
  source 1..27: mol_type = other RNA
aagctggaggagcgcctctacagcgtg

SEQ ID NO: 39626 - RNA, 27 nt, synthetic construct
  misc_feature 1..27: note = Glutathione S-transferase omega-1 (152-160)
  source 1..27: mol_type = other RNA
aagctggaggaggtgctcaccaacaag

SEQ ID NO: 39627 - RNA, 33 nt, synthetic construct
  misc_feature 1..33: note = Thioredoxin domain-containing protein 5 (32-42)
  source 1..33: mol_type = other RNA
aagctgttcaagcccggccaggaggccgtgaag

SEQ ID NO: 39628 - RNA, 33 nt, synthetic construct
  misc_feature 1..33: note = Mitotic checkpoint serine/threonine-protein kinase BUB1 (954-964)
  source 1..33: mol_type = other RNA
aagctgttccccaagggcaccatcttcaccgcc

SEQ ID NO: 39629 - RNA, 27 nt, synthetic construct
  misc_feature 1..27: note = Vacuolar protein sorting-associated protein 11 homolog (687-695)
  source 1..27: mol_type = other RNA
aagctgttccagcagatcatgcactac

SEQ ID NO: 39630 - RNA, 39 nt, synthetic construct
  misc_feature 1..39: note = YEATS domain-containing protein 4 (115-127)
  source 1..39: mol_type = other RNA
aagctgttccagagcgacaccaacgccatgctcggcaag

SEQ ID NO: 39631 - RNA, 27 nt, synthetic construct
  misc_feature 1..27: note = Peroxisomal acyl-coenzyme A oxidase 1 (537-545)
  source 1..27: mol_type = other RNA
aagctgttcagcgagaagctcctgaag

SEQ ID NO: 39632 - RNA, 33 nt, synthetic construct
  misc_feature 1..33: note = 28S ribosomal protein S33, mitochondrial (35-45)
  source 1..33: mol_type = other RNA
aagctgttcagcgagctccccctggccaagaag

SEQ ID NO: 39633 - RNA, 27 nt, synthetic construct
  misc_feature 1..27: note = BAH and coiled-coil domain-containing protein 1 (52-60)
  source 1..27: mol_type = other RNA
aagctgttctacaaggccatcgtgcgc

SEQ ID NO: 39634 - RNA, 30 nt, synthetic construct
  misc_feature 1..30: note = Nucleolar protein 58 (93-102)
  source 1..30: mol_type = other RNA
aagctgggcggggtgatcaaggagaagctc

SEQ ID NO: 39635 - RNA, 30 nt, synthetic construct
  misc_feature 1..30: note = Histone H1.2 (81-90)
  source 1..30: mol_type = other RNA
aagctgggcctcaagagcctggtgtccaag

SEQ ID NO: 39636 - RNA, 27 nt, synthetic construct
  misc_feature 1..27: note = Cytochrome c oxidase subunit NDUFA4 (39-47)
  source 1..27: mol_type = other RNA
aagctgggccccaacgaccagtacaag

SEQ ID NO: 39637 - RNA, 27 nt, synthetic construct
  misc_feature 1..27: note = DCC-interacting protein 13-alpha (553-561)
  source 1..27: mol_type = other RNA
aagctgatcgacccccagacccaggtg

SEQ ID NO: 39638 - RNA, 27 nt, synthetic construct
  misc_feature 1..27: note = DNA topoisomerase 2-beta (209-217)
  source 1..27: mol_type = other RNA
aagctgatcgaggtggtcaagaagaag

SEQ ID NO: 39639 - RNA, 27 nt, synthetic construct
  misc_feature 1..27: note = Dynactin subunit 4 (146-154)
  source 1..27: mol_type = other RNA
aagctgatcgagtactaccagcagctc

SEQ ID NO: 39640 - RNA, 30 nt, synthetic construct
  misc_feature 1..30: note = Glycerol-3-phosphate dehydrogenase 1-like protein (55-64)
  source 1..30: mol_type = other RNA
aagctgatcagcgacatcatccgcgagaag

SEQ ID NO: 39641 - RNA, 27 nt, synthetic construct
  misc_feature 1..27: note = Spectrin beta chain, non-erythrocytic 1 (387-395)
  source 1..27: mol_type = other RNA
aagctgatcagcgacatcaacaaggcc

SEQ ID NO: 39642 - RNA, 39 nt, synthetic construct
  misc_feature 1..39: note = Transcription elongation factor B polypeptide 1 (4-16)
  source 1..39: mol_type = other RNA
aagctgatcagctccgacggccacgagttcatcgtgaag

SEQ ID NO: 39643 - RNA, 27 nt, synthetic construct
  misc_feature 1..27: note = Vacuolar protein sorting-associated protein 4B (71-79)
  source 1..27: mol_type = other RNA
aagctgaaggagtacctcaagaacaag

SEQ ID NO: 39644 - RNA, 36 nt, synthetic construct
  misc_feature 1..36: note = Heterogeneous nuclear ribonucleoproteins C1/C2 (187-198)
  source 1..36: mol_type = other RNA
aagctgaagggcgacgacctccaggccatcaagaag

SEQ ID NO: 39645 - RNA, 33 nt, synthetic construct
  misc_feature 1..33: note = Tight junction-associated protein 1 (150-160)
  source 1..33: mol_type = other RNA
aagctgctcgacgccaagaacaccatcaacaag

SEQ ID NO: 39646 - RNA, 33 nt, synthetic construct
  misc_feature 1..33: note = 26S proteasome non-ATPase regulatory subunit 7 (204-214)
  source 1..33: mol_type = other RNA
aagctgctcgacatccgcagctacctggagaag

SEQ ID NO: 39647 - RNA, 33 nt, synthetic construct
  misc_feature 1..33: note = Methionine-tRNA ligase, cytoplasmic (453-463)
  source 1..33: mol_type = other RNA
aagctgctcgacctgaagaagcagctggccgtg

SEQ ID NO: 39648 - RNA, 27 nt, synthetic construct
  misc_feature 1..27: note = Dihydrolipoyllysine-residue succinyltransferase component of 2-oxoglutarate dehydrogenase complex, mitochondrial (80-88)
  source 1..27: mol_type = other RNA
aagctgctcgagacccagctgcagaag

SEQ ID NO: 39649 - RNA, 30 nt, synthetic construct
  misc_feature 1..30: note = Aspartate-tRNA ligase, cytoplasmic (373-382)
  source 1..30: mol_type = other RNA
aagctgctcggccacctggtgaaggagaag

SEQ ID NO: 39650 - RNA, 27 nt, synthetic construct
  misc_feature 1..27: note = U3 small nucleolar ribonucleoprotein protein IMP3 (11-19)
  source 1..27: mol_type = other RNA
aagctgctcaagcaggtggacttcctg

SEQ ID NO: 39651 - RNA, 27 nt, synthetic construct
  misc_feature 1..27: note = Protein Smaug homolog 1 (103-111)
  source 1..27: mol_type = other RNA
aagctgctccccaagatcctggcccac

SEQ ID NO: 39652 - RNA, 27 nt, synthetic construct
  misc_feature 1..27: note = Box C/D snoRNA protein 1 (321-329)
  source 1..27: mol_type = other RNA
aagctgctccccaacggcttcaccaag

SEQ ID NO: 39653 - RNA, 27 nt, synthetic construct
  misc_feature 1..27: note = Anaphase-promoting complex subunit 5 (482-490)
  source 1..27: mol_type = other RNA
aagctgctccagaagctgctggtgcac

SEQ ID NO: 39654 - RNA, 33 nt, synthetic construct
  misc_feature 1..33: note = Nucleoprotein TPR (1356-1366)
  source 1..33: mol_type = other RNA
aagctgctcagcgagaaggaggtgcacaccaag

SEQ ID NO: 39655 - RNA, 30 nt, synthetic construct
  misc_feature 1..30: note = DNA replication ATP-dependent helicase/nuclease DNA2 (580-589)
  source 1..30: mol_type = other RNA
aagctgatggagaacaccttcgtgagcaag

SEQ ID NO: 39656 - RNA, 30 nt, synthetic construct
  misc_feature 1..30: note = Integrin alpha-9 (198-207)
  source 1..30: mol_type = other RNA
aagctgaacgacgaggtgatcatgaaccgc

SEQ ID NO: 39657 - RNA, 27 nt, synthetic construct
  misc_feature 1..27: note = Eukaryotic translation initiation factor 3 subunit C-like protein (333-341)
  source 1..27: mol_type = other RNA
aagctgaacgagatcctccaggcccgc

SEQ ID NO: 39658 - RNA, 33 nt, synthetic construct
  misc_feature 1..33: note = Eukaryotic translation initiation factor 3 subunit C-like protein (333-343)
  source 1..33: mol_type = other RNA
aagctgaacgagatcctccaggcccgcggcaag

SEQ ID NO: 39659 - RNA, 27 nt, synthetic construct
  misc_feature 1..27: note = PHD finger protein 14 (693-701)
  source 1..27: mol_type = other RNA
aagctgaacatccccgccatcctccgc

SEQ ID NO: 39660 - RNA, 27 nt, synthetic construct
  misc_feature 1..27: note = EH domain-containing protein 4 (478-486)
  source 1..27: mol_type = other RNA
aagctgcccaacagcgtgctcggcaag

SEQ ID NO: 39661 - RNA, 30 nt, synthetic construct
  misc_feature 1..30: note = Sarcospan (62-71)
  source 1..30: mol_type = other RNA
aagctgcccagctccgagccgctcagccgc

SEQ ID NO: 39662 - RNA, 27 nt, synthetic construct
  misc_feature 1..27: note = 40S ribosomal protein S18 (106-114)
  source 1..27: mol_type = other RNA
aagctgcgcgaggacctcgagcggctg

SEQ ID NO: 39663 - RNA, 33 nt, synthetic construct
  misc_feature 1..33: note = Catenin delta-1 (688-698)
  source 1..33: mol_type = other RNA
aagctgcgcgagacccagggcatcgagaagctc

SEQ ID NO: 39664 - RNA, 33 nt, synthetic construct
  misc_feature 1..33: note = Ankycorbin (218-228)
  source 1..33: mol_type = other RNA
aagctgagcgagaacgccggcatccagtccctc

SEQ ID NO: 39665 - RNA, 27 nt, synthetic construct
  misc_feature 1..27: note = Serine/threonine-protein kinase N1 (262-270)
  source 1..27: mol_type = other RNA
aagctgaccgagagcaaccagaagctc

SEQ ID NO: 39666 - RNA, 27 nt, synthetic construct
  misc_feature 1..27: note = Melanoma-associated antigen D1 (477-485)
  source 1..27: mol_type = other RNA
aagctggtgaagtacctcatgctgaag

SEQ ID NO: 39667 - RNA, 27 nt, synthetic construct
  misc_feature 1..27: note = Cytochrome c oxidase subunit 5B, mitochondrial (121-129)
  source 1..27: mol_type = other RNA
aagctggtgccccagcagctcgcccac

SEQ ID NO: 39668 - RNA, 30 nt, synthetic construct
  misc_feature 1..30: note = E3 ubiquitin-protein ligase TTC3 (1097-1106)
  source 1..30: mol_type = other RNA
aagctgtgggacatgaaccccaagcagaag

SEQ ID NO: 39669 - RNA, 30 nt, synthetic construct
  misc_feature 1..30: note = Fatty acid desaturase 2 (413-422)
  source 1..30: mol_type = other RNA
aagctgtggctcgacgcctacctgcacaag

SEQ ID NO: 39670 - RNA, 27 nt, synthetic construct
  misc_feature 1..27: note = Serine/threonine-protein kinase ATR (289-297)
  source 1..27: mol_type = other RNA
aagctgtacgaggagcccctcagcaag

SEQ ID NO: 39671 - RNA, 27 nt, synthetic construct
  misc_feature 1..27: note = Retinoblastoma-like protein 2 (304-312)
  source 1..27: mol_type = other RNA
aagctgtacgagaagaagctcctgaag

SEQ ID NO: 39672 - RNA, 30 nt, synthetic construct
  misc_feature 1..30: note = Lamina-associated polypeptide 2, isoforms beta/gamma (140-149)
  source 1..30: mol_type = other RNA
aagctgtacgagaagaagctcctgaagctg

SEQ ID NO: 39673 - RNA, 27 nt, synthetic construct
  misc_feature 1..27: note = Dedicator of cytokinesis protein 7 (424-432)
  source 1..27: mol_type = other RNA
aagctgtaccccgacagccgcgtgcgg

SEQ ID NO: 39674 - RNA, 27 nt, synthetic construct
  misc_feature 1..27: note = Protein diaphanous homolog 3 (930-938)
  source 1..27: mol_type = other RNA
aagctgtaccagagcatcatcggctac

SEQ ID NO: 39675 - RNA, 30 nt, synthetic construct
  misc_feature 1..30: note = Nuclear pore complex protein Nup98-Nup96 (1480-1489)
  source 1..30: mol_type = other RNA
aagctgtacagcgactccatccgcgagaag

SEQ ID NO: 39676 - RNA, 27 nt, synthetic construct
  misc_feature 1..27: note = NADH dehydrogenase (ubiquinone) iron-sulfur protein 7, mitochondrial (74-82)
  source 1..27: mol_type = other RNA
aagatggcccccgccctgcgcaaggtg

SEQ ID NO: 39677 - RNA, 27 nt, synthetic construct
  misc_feature 1..27: note = TRPM8 channel-associated factor 1 (447-455)
  source 1..27: mol_type = other RNA
aagatgttcagccaccaggtgcagaag

SEQ ID NO: 39678 - RNA, 36 nt, synthetic construct
  misc_feature 1..36: note = Heat shock cognate 71 kDa protein (82-93)
  source 1..36: mol_type = other RNA
aagatgaaggagatcgccgaggcctacctgggcaag

SEQ ID NO: 39679 - RNA, 30 nt, synthetic construct
  misc_feature 1..30: note = Neuroblast differentiation-associated protein AHNAK (380-389)
  source 1..30: mol_type = other RNA
aagatgcccaagatgaagatgccgaccttc

SEQ ID NO: 39680 - RNA, 27 nt, synthetic construct
  misc_feature 1..27: note = DNA replication licensing factor MCM7 (236-244)
  source 1..27: mol_type = other RNA
aagatgcaggagcacagcgaccaggtg

SEQ ID NO: 39681 - RNA, 27 nt, synthetic construct
  misc_feature 1..27: note = Intraflagellar transport protein 74 homolog (462-470)
  source 1..27: mol_type = other RNA
aagatgaccgaggagcagcacagcctg

SEQ ID NO: 39682 - RNA, 27 nt, synthetic construct
  misc_feature 1..27: note = Nuclear receptor corepressor 1 (1336-1344)
  source 1..27: mol_type = other RNA
aagccctacgacggcatcaccaccatc

SEQ ID NO: 39683 - RNA, 30 nt, synthetic construct
  misc_feature 1..30: note = Hippocampus abundant transcript-like protein 1 (216-225)
  source 1..30: mol_type = other RNA
aagcaggccgaccccttcgccagcctgaag

SEQ ID NO: 39684 - RNA, 27 nt, synthetic construct
  misc_feature 1..27: note = T-complex protein 1 subunit zeta (39-47)
  source 1..27: mol_type = other RNA
aagcaggacgagcccatcgacctgttc

SEQ ID NO: 39685 - RNA, 27 nt, synthetic construct
  misc_feature 1..27: note = Catenin alpha-1 (865-873)
  source 1..27: mol_type = other RNA
aagcaggacgagacccagaccaagatc

SEQ ID NO: 39686 - RNA, 27 nt, synthetic construct
  misc_feature 1..27: note = Cytoplasmic dynein 1 heavy chain 1 (1181-1189)
  source 1..27: mol_type = other RNA
aagcagttcgagaagcaggtggagctg

SEQ ID NO: 39687 - RNA, 27 nt, synthetic construct
  misc_feature 1..27: note = Probable E3 ubiquitin-protein ligase makorin-2 (226-234)
  source 1..27: mol_type = other RNA
aagcagttcgagaaccccatcatcaag

SEQ ID NO: 39688 - RNA, 27 nt, synthetic construct
  misc_feature 1..27: note = Bromodomain adjacent to zinc finger domain protein 2A (588-596)
  source 1..27: mol_type = other RNA
aagcagttccccgaggtgatcaagtac

SEQ ID NO: 39689 - RNA, 27 nt, synthetic construct
  misc_feature 1..27: note = 60S ribosomal protein L22-like 1 (69-77)
  source 1..27: mol_type = other RNA
aagcagttcagcaagcgctacctgaag

SEQ ID NO: 39690 - RNA, 27 nt, synthetic construct
  misc_feature 1..27: note = Interleukin enhancer-binding factor 3 (519-527)
  source 1..27: mol_type = other RNA
aagcagcagggccccatcctgaccaag

SEQ ID NO: 39691 - RNA, 27 nt, synthetic construct
  misc_feature 1..27: note = Actin-related protein 8 (80-88)
  source 1..27: mol_type = other RNA
aagcagcagggccagcccctgtacaag

SEQ ID NO: 39692 - RNA, 27 nt, synthetic construct
  misc_feature 1..27: note = SAM and SH3 domain-containing protein 1 (898-906)
  source 1..27: mol_type = other RNA
aagcgcttcagcgagccccagaagctg

SEQ ID NO: 39693 - RNA, 27 nt, synthetic construct
  misc_feature 1..27: note = AP-3 complex subunit mu-2 (240-248)
  source 1..27: mol_type = other RNA
aagcgctgggagagcgagcggatcctg

SEQ ID NO: 39694 - RNA, 27 nt, synthetic construct
  misc_feature 1..27: note = AP-3 complex subunit mu-1 (186-194)
  source 1..27: mol_type = other RNA
aagcgctgggagagcgagcgggtgctg

SEQ ID NO: 39695 - RNA, 27 nt, synthetic construct
  misc_feature 1..27: note = Rabankyrin-5 (851-859)
  source 1..27: mol_type = other RNA
aagagcgccgaggccatcctgaagcgc

SEQ ID NO: 39696 - RNA, 27 nt, synthetic construct
  misc_feature 1..27: note = Neuron-specific calcium-binding protein hippocalcin (174-182)
  source 1..27: mol_type = other RNA
aagagcgacccctccatcgtgcgcctg

SEQ ID NO: 39697 - RNA, 30 nt, synthetic construct
  misc_feature 1..30: note = Pre-mRNA-processing factor 40 homolog B (165-174)
  source 1..30: mol_type = other RNA
aagagcgacaccggcaagccctactactac

SEQ ID NO: 39698 - RNA, 30 nt, synthetic construct
  misc_feature 1..30: note = Supervillin (396-405)
  source 1..30: mol_type = other RNA
aagagcttcgacgagcagaacgtgcccaag

SEQ ID NO: 39699 - RNA, 33 nt, synthetic construct
  misc_feature 1..33: note = Tumor protein D54 (26-36)
  source 1..33: mol_type = other RNA
aagagcttcgaggaccgcgtgggcaccatcaag

SEQ ID NO: 39700 - RNA, 27 nt, synthetic construct
  misc_feature 1..27: note = Mitogen-activated protein kinase kinase kinase kinase 4 (1062-1070)
  source 1..27: mol_type = other RNA
aagagcttcggcgagctggtgcacaag

SEQ ID NO: 39701 - RNA, 33 nt, synthetic construct
  misc_feature 1..33: note = Myristoylated alanine-rich C-kinase substrate (162-172)
  source 1..33: mol_type = other RNA
aagagcttcaagctgtccggcttcagcttcaag

SEQ ID NO: 39702 - RNA, 27 nt, synthetic construct
  misc_feature 1..27: note = Kinetochore protein Spc25 (11-19)
  source 1..27: mol_type = other RNA
aagagcatcaacgagttctggaacaag

SEQ ID NO: 39703 - RNA, 27 nt, synthetic construct
  misc_feature 1..27: note = MICOS complex subunit MIC60 (102-110)
  source 1..27: mol_type = other RNA
aagagcatccagtccggccccctgaag

SEQ ID NO: 39704 - RNA, 27 nt, synthetic construct
  misc_feature 1..27: note = DNA-dependent protein kinase catalytic subunit (2416-2424)
  source 1..27: mol_type = other RNA
aagagcaaggacttcgtgcaggtcatg

SEQ ID NO: 39705 - RNA, 27 nt, synthetic construct
  misc_feature 1..27: note = Choline-phosphate cytidylyltransferase A (259-267)
  source 1..27: mol_type = other RNA
aagagcaaggagttcgtgcagaaggtc

SEQ ID NO: 39706 - RNA, 27 nt, synthetic construct
  misc_feature 1..27: note = Phosphatidylinositol 4,5-bisphosphate 3-kinase catalytic subunit delta isoform (860-868)
  source 1..27: mol_type = other RNA
aagagcaagaaccccggcgaggccctg

SEQ ID NO: 39707 - RNA, 30 nt, synthetic construct
  misc_feature 1..30: note = Arf-GAP with Rho-GAP domain, ANK repeat and PH domain-containing protein 3 (219-228)
  source 1..30: mol_type = other RNA
aagagcctggaccagcccttcctctccaag

SEQ ID NO: 39708 - RNA, 30 nt, synthetic construct
  misc_feature 1..30: note = Golgi-specific brefeldin A-resistance guanine nucleotide exchange factor 1 (944-953)
  source 1..30: mol_type = other RNA
aagagcctggaggagaccatcatccagaag

SEQ ID NO: 39709 - RNA, 33 nt, synthetic construct
  misc_feature 1..33: note = Charged multivesicular body protein 2a (94-104)
  source 1..33: mol_type = other RNA
aagagcaacaactccatggcccaggccatgaag

SEQ ID NO: 39710 - RNA, 27 nt, synthetic construct
  misc_feature 1..27: note = B9 domain-containing protein 1 (56-64)
  source 1..27: mol_type = other RNA
aagagccaggacgtgcgccaggccctg

SEQ ID NO: 39711 - RNA, 36 nt, synthetic construct
  misc_feature 1..36: note = 5-aminolevulinate synthase, nonspecific, mitochondrial (174-185)
  source 1..36: mol_type = other RNA
aagaccgacggcggggaccccagcggcctgctcaag

SEQ ID NO: 39712 - RNA, 27 nt, synthetic construct
  misc_feature 1..27: note = BRCA1-associated protein (26-34)
  source 1..27: mol_type = other RNA
aagaccgacggcaagatcgtgcagtac

SEQ ID NO: 39713 - RNA, 27 nt, synthetic construct
  misc_feature 1..27: note = Zinc finger homeobox protein 3 (90-98)
  source 1..27: mol_type = other RNA
aagaccgacaagcacgtgcagaagtac

SEQ ID NO: 39714 - RNA, 30 nt, synthetic construct
  misc_feature 1..30: note = Ubiquitin carboxyl-terminal hydrolase 7 (381-390)
  source 1..30: mol_type = other RNA
aagaccgaccccaaggacccggccaactac

SEQ ID NO: 39715 - RNA, 27 nt, synthetic construct
  misc_feature 1..27: note = Origin recognition complex subunit 3 (194-202)
  source 1..27: mol_type = other RNA
aagaccgaccccaagatgctgagcaag

SEQ ID NO: 39716 - RNA, 27 nt, synthetic construct
  misc_feature 1..27: note = U2 small nuclear ribonucleoprotein B'' (85-93)
  source 1..27: mol_type = other RNA
aagaccgacagcgacatcatctccaag

SEQ ID NO: 39717 - RNA, 30 nt, synthetic construct
  misc_feature 1..30: note = Membrane metallo-endopeptidase-like 1 (728-737)
  source 1..30: mol_type = other RNA
aagaccgacgtgcacagccccctgaagtac

SEQ ID NO: 39718 - RNA, 27 nt, synthetic construct
  misc_feature 1..27: note = Phosphatidylinositol 4,5-bisphosphate 3-kinase catalytic subunit alpha isoform (1030-1038)
  source 1..27: mol_type = other RNA
aagaccgagcaggaggccctggagtac

SEQ ID NO: 39719 - RNA, 27 nt, synthetic construct
  misc_feature 1..27: note = Vesicle-associated membrane protein-associated protein B/C (147-155)
  source 1..27: mol_type = other RNA
aagaccgagacccccatcgtgagcaag

SEQ ID NO: 39720 - RNA, 33 nt, synthetic construct
  misc_feature 1..33: note = Leukotriene A-4 hydrolase (355-365)
  source 1..33: mol_type = other RNA
aagaccttcggcgagacccaccccttcacgaag

SEQ ID NO: 39721 - RNA, 30 nt, synthetic construct
  misc_feature 1..30: note = Zinc finger CCCH domain-containing protein 11A (404-413)
  source 1..30: mol_type = other RNA
aagaccttcagcgaggtgctggccgagaag

SEQ ID NO: 39722 - RNA, 33 nt, synthetic construct
  misc_feature 1..33: note = 60S ribosomal protein L39-like (5-15)
  source 1..33: mol_type = other RNA
aagaccttcaccatcaagcgcttcctggccaag

SEQ ID NO: 39723 - RNA, 27 nt, synthetic construct
  misc_feature 1..27: note = Microtubule-actin cross-linking factor 1, isoforms 1/2/3/5 (99-107)
  source 1..27: mol_type = other RNA
aagaccttcaccaagtgggtgaacaag

SEQ ID NO: 39724 - RNA, 30 nt, synthetic construct
  misc_feature 1..30: note = Transcription initiation factor TFIID subunit 7 (78-87)
  source 1..30: mol_type = other RNA
aagaccatcgacaagaagaccttctacaag

SEQ ID NO: 39725 - RNA, 33 nt, synthetic construct
  misc_feature 1..33: note = Transforming growth factor beta-1 (34-44)
  source 1..33: mol_type = other RNA
aagaccatcgacatggagctggtgaagcgcaag

SEQ ID NO: 39726 - RNA, 27 nt, synthetic construct
  misc_feature 1..27: note = Max-like protein X (125-133)
  source 1..27: mol_type = other RNA
aagaccatcgactacatccagttcctg

SEQ ID NO: 39727 - RNA, 33 nt, synthetic construct
  misc_feature 1..33: note = Max-like protein X (125-135)
  source 1..33: mol_type = other RNA
aagaccatcgactacatccagttcctgcacaag

SEQ ID NO: 39728 - RNA, 39 nt, synthetic construct
  misc_feature 1..39: note = tRNA pseudouridine synthase A, mitochondrial (110-122)
  source 1..39: mol_type = other RNA
aagaccatcgaggacgacctggtgagcgccctcgtccgc

SEQ ID NO: 39729 - RNA, 27 nt, synthetic construct
  misc_feature 1..27: note = Polymerase delta-interacting protein 3 (147-155)
  source 1..27: mol_type = other RNA
aagaccatccaggtgccccagcagaag

SEQ ID NO: 39730 - RNA, 33 nt, synthetic construct
  misc_feature 1..33: note = Cyclin-dependent kinase 11A (11-21)
  source 1..33: mol_type = other RNA
aagaccctggacgagatcctccaggagaagaag

SEQ ID NO: 39731 - RNA, 33 nt, synthetic construct
  misc_feature 1..33: note = Exportin-2 (17-27)
  source 1..33: mol_type = other RNA
aagaccctggaccccgacccggccatccgccgg

SEQ ID NO: 39732 - RNA, 36 nt, synthetic construct
  misc_feature 1..36: note = Coatomer subunit gamma-1 (795-806)
  source 1..36: mol_type = other RNA
aagaccctggaggaggccgtgggcaacatcgtcaag

SEQ ID NO: 39733 - RNA, 27 nt, synthetic construct
  misc_feature 1..27: note = Protein prune homolog 2 (118-126)
  source 1..27: mol_type = other RNA
aagaccctggagagcgccgtggtcaag

SEQ ID NO: 39734 - RNA, 33 nt, synthetic construct
  misc_feature 1..33: note = Chromatin assembly factor 1 subunit B (467-477)
  source 1..33: mol_type = other RNA
aagaccctgcagcccagctcccagaacaccaag

SEQ ID NO: 39735 - RNA, 33 nt, synthetic construct
  misc_feature 1..33: note = RE1-silencing transcription factor (417-427)
  source 1..33: mol_type = other RNA
aagaccatggacgtgagcaaggtcaagctgaag

SEQ ID NO: 39736 - RNA, 33 nt, synthetic construct
  misc_feature 1..33: note = Arfaptin-2 (216-226)
  source 1..33: mol_type = other RNA
aagaccatggaggacaccctgatgacggtgaag

SEQ ID NO: 39737 - RNA, 27 nt, synthetic construct
  misc_feature 1..27: note = Asparagine synthetase domain-containing protein 1 (361-369)
  source 1..27: mol_type = other RNA
aagaccatgcccaccacgttcaaccgc

SEQ ID NO: 39738 - RNA, 27 nt, synthetic construct
  misc_feature 1..27: note = Uncharacterized protein C15orf41 (95-103)
  source 1..27: mol_type = other RNA
aagacccccgacttcatcctgcaggtg

SEQ ID NO: 39739 - RNA, 27 nt, synthetic construct
  misc_feature 1..27: note = Neuroblast differentiation-associated protein AHNAK (489-497)
  source 1..27: mol_type = other RNA
aagacccccgagatgatcatccagaag

SEQ ID NO: 39740 - RNA, 30 nt, synthetic construct
  misc_feature 1..30: note = LIM and SH3 domain protein 1 (112-121)
  source 1..30: mol_type = other RNA
aagacccaggaccagatcagcaacatcaag

SEQ ID NO: 39741 - RNA, 27 nt, synthetic construct
  misc_feature 1..27: note = mRNA-capping enzyme (403-411)
  source 1..27: mol_type = other RNA
aagacccaggagcccttcagcgtgcgc

SEQ ID NO: 39742 - RNA, 33 nt, synthetic construct
  misc_feature 1..33: note = mRNA-capping enzyme (403-413)
  source 1..33: mol_type = other RNA
aagacccaggagcccttcagcgtgcgcaacaag

SEQ ID NO: 39743 - RNA, 27 nt, synthetic construct
  misc_feature 1..27: note = Actin-related protein 10 (403-411)
  source 1..27: mol_type = other RNA
aagacccagcccccgctgatgaagcgc

SEQ ID NO: 39744 - RNA, 33 nt, synthetic construct
  misc_feature 1..33: note = Src substrate cortactin (299-309)
  source 1..33: mol_type = other RNA
aagaccgtgcccgtcgaggccgtgaccagcaag

SEQ ID NO: 39745 - RNA, 36 nt, synthetic construct
  misc_feature 1..36: note = X-ray repair cross-complementing protein 5 (274-285)
  source 1..36: mol_type = other RNA
aagacctggaccgtggtcgacgccaagacgctgaag

SEQ ID NO: 39746 - RNA, 30 nt, synthetic construct
  misc_feature 1..30: note = NADH dehydrogenase (ubiquinone) 1 subunit C2 (106-115)
  source 1..30: mol_type = other RNA
aagacctacggcgagatcttcgagaagttc

SEQ ID NO: 39747 - RNA, 33 nt, synthetic construct
  misc_feature 1..33: note = Zinc finger protein SNAI2 (135-145)
  source 1..33: mol_type = other RNA
aagacctacagcaccttctccggcctggccaag

SEQ ID NO: 39748 - RNA, 30 nt, synthetic construct
  misc_feature 1..30: note = ETS translocation variant 1 (301-310)
  source 1..30: mol_type = other RNA
aaggtggccggcgagcgctacgtctacaag

SEQ ID NO: 39749 - RNA, 27 nt, synthetic construct
  misc_feature 1..27: note = 5'-AMP-activated protein kinase catalytic subunit alpha-2 (41-49)
  source 1..27: mol_type = other RNA
aaggtggccgtcaagatcctgaaccgc

SEQ ID NO: 39750 - RNA, 27 nt, synthetic construct
  misc_feature 1..27: note = Heat shock cognate 71 kDa protein (601-609)
  source 1..27: mol_type = other RNA
aaggtgtgcaaccccatcatcaccaag

SEQ ID NO: 39751 - RNA, 24 nt, synthetic construct
  misc_feature 1..24: note = Proteasome activator complex subunit 3 (6-13)
  source 1..24: mol_type = other RNA
aaggtggaccaggaggtcaagctg

SEQ ID NO: 39752 - RNA, 27 nt, synthetic construct
  misc_feature 1..27: note = Proteasome activator complex subunit 3 (6-14)
  source 1..27: mol_type = other RNA
aaggtggaccaggaggtcaagctgaag

SEQ ID NO: 39753 - RNA, 30 nt, synthetic construct
  misc_feature 1..30: note = Kinesin-like protein KIFC3 (522-531)
  source 1..30: mol_type = other RNA
aaggtgttcgagttcggccacaccaaccgc

SEQ ID NO: 39754 - RNA, 33 nt, synthetic construct
  misc_feature 1..33: note = Nucleolin (370-380)
  source 1..33: mol_type = other RNA
aaggtgttcggcaacgagatcaagctggagaag

SEQ ID NO: 39755 - RNA, 36 nt, synthetic construct
  misc_feature 1..36: note = CUGBP Elav-like family member 2 (453-464)
  source 1..36: mol_type = other RNA
aaggtgttcatcgacaagcagaccaacctgagcaag

SEQ ID NO: 39756 - RNA, 27 nt, synthetic construct
  misc_feature 1..27: note = Cathepsin L1 (104-112)
  source 1..27: mol_type = other RNA
aaggtgttccaggagcccctgttctac

SEQ ID NO: 39757 - RNA, 27 nt, synthetic construct
  misc_feature 1..27: note = Aspartyl/asparaginyl beta-hydroxylase (462-470)
  source 1..27: mol_type = other RNA
aaggtgcactacggcttcatcctgaag

SEQ ID NO: 39758 - RNA, 39 nt, synthetic construct
  misc_feature 1..39: note = Homeodomain-interacting protein kinase 2 (343-355)
  source 1..39: mol_type = other RNA
aaggtgatcgacttcggcagcgcctcccacgtcagcaag

SEQ ID NO: 39759 - RNA, 33 nt, synthetic construct
  misc_feature 1..33: note = Leucine-rich repeat-containing protein 61 (158-168)
  source 1..33: mol_type = other RNA
aaggtgatcgacggcgagcgcgtcatcgggcgg

SEQ ID NO: 39760 - RNA, 27 nt, synthetic construct
  misc_feature 1..27: note = Prefoldin subunit 1 (19-27)
  source 1..27: mol_type = other RNA
aaggtgatcgacacccagcagaaggtc

SEQ ID NO: 39761 - RNA, 27 nt, synthetic construct
  misc_feature 1..27: note = UPF0428 protein CXorf56 (42-50)
  source 1..27: mol_type = other RNA
aaggtgatcgagaagcagctggagcgc

SEQ ID NO: 39762 - RNA, 33 nt, synthetic construct
  misc_feature 1..33: note = Liprin-alpha-1 (251-261)
  source 1..33: mol_type = other RNA
aaggtgatcgagctgcaggagatcatcagcaag

SEQ ID NO: 39763 - RNA, 33 nt, synthetic construct
  misc_feature 1..33: note = Signal-induced proliferation-associated 1-like protein 2 (559-569)
  source 1..33: mol_type = other RNA
aaggtgatcaacgccgagaacgccgcgcacaag

SEQ ID NO: 39764 - RNA, 27 nt, synthetic construct
  misc_feature 1..27: note = 60S acidic ribosomal protein P2 (41-49)
  source 1..27: mol_type = other RNA
aaggtgatcagcgagctgaacggcaag

SEQ ID NO: 39765 - RNA, 33 nt, synthetic construct
  misc_feature 1..33: note = Protein PRRC2C (1140-1150)
  source 1..33: mol_type = other RNA
aaggtgatcagcaaggacctggtcatcgagcgc

SEQ ID NO: 39766 - RNA, 33 nt, synthetic construct
  misc_feature 1..33: note = Zinc finger protein 721 (156-166)
  source 1..33: mol_type = other RNA
aaggtgatcaccagctccagctccttcgccaag

SEQ ID NO: 39767 - RNA, 36 nt, synthetic construct
  misc_feature 1..36: note = Probable U3 small nucleolar RNA-associated protein 11 (109-120)
  source 1..36: mol_type = other RNA
aaggtgaagggcgtcaccaaccagaccgggctgaag

SEQ ID NO: 39768 - RNA, 33 nt, synthetic construct
  misc_feature 1..33: note = Neuroblast differentiation-associated protein AHNAK (487-497)
  source 1..33: mol_type = other RNA
aaggtgaagacccccgagatgatcatccagaag

SEQ ID NO: 39769 - RNA, 30 nt, synthetic construct
  misc_feature 1..30: note = Gamma-interferon-inducible protein 16 (243-252)
  source 1..30: mol_type = other RNA
aaggtgctgaacaccagcctcaaggagaag

SEQ ID NO: 39770 - RNA, 30 nt, synthetic construct
  misc_feature 1..30: note = E3 ubiquitin-protein ligase RNF216 (197-206)
  source 1..30: mol_type = other RNA
aaggtgctgccccagaccatcctctacaag

SEQ ID NO: 39771 - RNA, 30 nt, synthetic construct
  misc_feature 1..30: note = Serine/threonine-protein kinase Sgk1 (222-231)
  source 1..30: mol_type = other RNA
aaggtgctgcagaagaaggccatcctcaag

SEQ ID NO: 39772 - RNA, 33 nt, synthetic construct
  misc_feature 1..33: note = Flavin reductaseADPH) (137-147)
  source 1..33: mol_type = other RNA
aaggtgctgcgcgagagcggcctcaagtacgtc

SEQ ID NO: 39773 - RNA, 30 nt, synthetic construct
  misc_feature 1..30: note = Polymerase I and transcript release factor (227-236)
  source 1..30: mol_type = other RNA
aaggtgcccccgttcaccttccacgtcaag

SEQ ID NO: 39774 - RNA, 33 nt, synthetic construct
  misc_feature 1..33: note = Leucine-tRNA ligase, cytoplasmic (486-496)
  source 1..33: mol_type = other RNA
aaggtgcaggacgtcaagaagaccatccagaag

SEQ ID NO: 39775 - RNA, 30 nt, synthetic construct
  misc_feature 1..30: note = 28S ribosomal protein S29, mitochondrial (203-212)
  source 1..30: mol_type = other RNA
aaggtgcaggagaagtacgtctggaacaag

SEQ ID NO: 39776 - RNA, 27 nt, synthetic construct
  misc_feature 1..27: note = Prelamin-A/C (108-116)
  source 1..27: mol_type = other RNA
aaggtgcgcgaggagttcaaggagctg

SEQ ID NO: 39777 - RNA, 30 nt, synthetic construct
  misc_feature 1..30: note = ATP-dependent RNA helicase DHX8 (1091-1100)
  source 1..30: mol_type = other RNA
aaggtgagcgaccccaccaagctgtccaag

SEQ ID NO: 39778 - RNA, 27 nt, synthetic construct
  misc_feature 1..27: note = Protein O-GlcNAcase (850-858)
  source 1..27: mol_type = other RNA
aaggtgaccgaccccagcgtcgccaag

SEQ ID NO: 39779 - RNA, 27 nt, synthetic construct
  misc_feature 1..27: note = Voltage-dependent anion-selective channel protein 1 (53-61)
  source 1..27: mol_type = other RNA
aaggtgaccggcagcctggagaccaag

SEQ ID NO: 39780 - RNA, 33 nt, synthetic construct
  misc_feature 1..33: note = Septin-9 (202-212)
  source 1..33: mol_type = other RNA
aaggtggtcaacatcgtgcccgtgatcgccaag

SEQ ID NO: 39781 - RNA, 27 nt, synthetic construct
  misc_feature 1..27: note = Arf-GAP with Rho-GAP domain, ANK repeat and PH domain-containing protein 3 (53-61)
  source 1..27: mol_type = other RNA
aaggtgtacctgggcatccgcaagaag

SEQ ID NO: 39782 - RNA, 27 nt, synthetic construct
  misc_feature 1..27: note = Ubiquitin carboxyl-terminal hydrolase 32 (278-286)
  source 1..27: mol_type = other RNA
aagtacgccccccgcttcaacggcttc

SEQ ID NO: 39783 - RNA, 27 nt, synthetic construct
  misc_feature 1..27: note = Methionine synthase (216-224)
  source 1..27: mol_type = other RNA
aagtacgccccccgcccgatcttcatc

SEQ ID NO: 39784 - RNA, 27 nt, synthetic construct
  misc_feature 1..27: note = Metastasis-associated protein MTA2 (282-290)
  source 1..27: mol_type = other RNA
aagtacggcaaggacttcaacgacatc

SEQ ID NO: 39785 - RNA, 27 nt, synthetic construct
  misc_feature 1..27: note = Glycerol-3-phosphate acyltransferase 4 (365-373)
  source 1..27: mol_type = other RNA
aagtacggcatggtgacctacctgctc

SEQ ID NO: 39786 - RNA, 24 nt, synthetic construct
  misc_feature 1..24: note = Splicing factor 3B subunit 6 (41-48)
  source 1..24: mol_type = other RNA
aagtacggccccatccgccagatc

SEQ ID NO: 39787 - RNA, 27 nt, synthetic construct
  misc_feature 1..27: note = Inositol 1,4,5-trisphosphate receptor type 3 (117-125)
  source 1..27: mol_type = other RNA
aagtacggcagcgtgatccagctgctc

SEQ ID NO: 39788 - RNA, 27 nt, synthetic construct
  misc_feature 1..27: note = KH domain-containing, RNA-binding, signal transduction-associated protein 3 (44-52)
  source 1..27: mol_type = other RNA
aagtacatcgacgtggtcatcaacaag

SEQ ID NO: 39789 - RNA, 27 nt, synthetic construct
  misc_feature 1..27: note = Probable E3 ubiquitin-protein ligase HERC6 (822-830)
  source 1..27: mol_type = other RNA
aagtacatcgactacatcttcaacgtg

SEQ ID NO: 39790 - RNA, 33 nt, synthetic construct
  misc_feature 1..33: note = Zinc finger FYVE domain-containing protein 16 (1129-1139)
  source 1..33: mol_type = other RNA
aagtacatcgagaacctggacaacatcaccttc

SEQ ID NO: 39791 - RNA, 27 nt, synthetic construct
  misc_feature 1..27: note = Serine/threonine-protein kinase RIO3 (304-312)
  source 1..27: mol_type = other RNA
aagtacatcaaggacgacttccgcttc

SEQ ID NO: 39792 - RNA, 27 nt, synthetic construct
  misc_feature 1..27: note = FERM domain-containing protein 6 (210-218)
  source 1..27: mol_type = other RNA
aagtacatcaaggaggccgtgcgcctg

SEQ ID NO: 39793 - RNA, 27 nt, synthetic construct
  misc_feature 1..27: note = ER membrane protein complex subunit 3 (66-74)
  source 1..27: mol_type = other RNA
aagtacatccccaagcagagcttcctg

SEQ ID NO: 39794 - RNA, 27 nt, synthetic construct
  misc_feature 1..27: note = Cleavage stimulation factor subunit 1 (212-220)
  source 1..27: mol_type = other RNA
aagtacatccaggaggccgagatgctg

SEQ ID NO: 39795 - RNA, 27 nt, synthetic construct
  misc_feature 1..27: note = Poly(A)-specific ribonuclease PARN (21-29)
  source 1..27: mol_type = other RNA
aagtacatcaccaagagcttcaacttc

SEQ ID NO: 39796 - RNA, 27 nt, synthetic construct
  misc_feature 1..27: note = Tetratricopeptide repeat protein 14 (427-435)
  source 1..27: mol_type = other RNA
aagtacatgcagaagagcctggagctc

SEQ ID NO: 39797 - RNA, 27 nt, synthetic construct
  misc_feature 1..27: note = Heparan sulfate 2-sulfotransferase (241-249)
  source 1..27: mol_type = other RNA
aagtacaacctgatcaacgagtacttc

SEQ ID NO: 39798 - RNA, 27 nt, synthetic construct
  misc_feature 1..27: note = Homeobox protein Hox-B7 (13-21)
  source 1..27: mol_type = other RNA
aagtaccccgccagctccagcgtgttc

SEQ ID NO: 39799 - RNA, 27 nt, synthetic construct
  misc_feature 1..27: note = Adenosylhomocysteinase 2 (210-218)
  source 1..27: mol_type = other RNA
aagtaccccaacgtgttcaagaagatc

SEQ ID NO: 39800 - RNA, 27 nt, synthetic construct
  misc_feature 1..27: note = Zinc finger C2HC domain-containing protein 1A (306-314)
  source 1..27: mol_type = other RNA
aagtaccccgtggagtgggccaagttc

SEQ ID NO: 39801 - RNA, 27 nt, synthetic construct
  misc_feature 1..27: note = T-box transcription factor TBX15 (239-247)
  source 1..27: mol_type = other RNA
aagtaccagccccgcgtgcacgtcatc

SEQ ID NO: 39802 - RNA, 30 nt, synthetic construct
  misc_feature 1..30: note = Intron-binding protein aquarius (90-99)
  source 1..30: mol_type = other RNA
aagtacagcaacatggagcagtccctgttc

SEQ ID NO: 39803 - RNA, 27 nt, synthetic construct
  misc_feature 1..27: note = Putative zinc finger protein 724 (149-157)
  source 1..27: mol_type = other RNA
aagtacgtgaaggacttccacaagttc

SEQ ID NO: 39804 - RNA, 27 nt, synthetic construct
  misc_feature 1..27: note = Zinc finger protein 107 (80-88)
  source 1..27: mol_type = other RNA
aagtacgtgaaggtcttcgacaagttc

SEQ ID NO: 39805 - RNA, 27 nt, synthetic construct
  misc_feature 1..27: note = Zinc finger protein 486 (191-199)
  source 1..27: mol_type = other RNA
aagtacgtgaaggtcttccaccagttc

SEQ ID NO: 39806 - RNA, 27 nt, synthetic construct
  misc_feature 1..27: note = Zinc finger protein 675 (148-156)
  source 1..27: mol_type = other RNA
aagtacgtgaaggtcttcaacaagttc

SEQ ID NO: 39807 - RNA, 27 nt, synthetic construct
  misc_feature 1..27: note = Nuclear pore membraneoprotein 210 (17-25)
  source 1..27: mol_type = other RNA
ctggccgccggccccagcgcggccgcc

SEQ ID NO: 39808 - RNA, 27 nt, synthetic construct
  misc_feature 1..27: note = Lck-interacting transmembrane adapter 1 (150-158)
  source 1..27: mol_type = other RNA
ctggccgccctccccggcgtgagcctg

SEQ ID NO: 39809 - RNA, 27 nt, synthetic construct
  misc_feature 1..27: note = Prolyl endopeptidase-like (376-384)
  source 1..27: mol_type = other RNA
ctggccgacgacagcgtgcgctccctc

SEQ ID NO: 39810 - RNA, 27 nt, synthetic construct
  misc_feature 1..27: note = Helicase ARIP4 (250-258)
  source 1..27: mol_type = other RNA
ctggccatcgtgcccgtcaacaccctc

SEQ ID NO: 39811 - RNA, 27 nt, synthetic construct
  misc_feature 1..27: note = Receptor-interacting serine/threonine-protein kinase 4 (637-645)
  source 1..27: mol_type = other RNA
ctggccaagcagcccggcgtgagcgtc

SEQ ID NO: 39812 - RNA, 27 nt, synthetic construct
  misc_feature 1..27: note = Importin-9 (625-633)
  source 1..27: mol_type = other RNA
ctggcccaggacatcttcaaggagctc

SEQ ID NO: 39813 - RNA, 27 nt, synthetic construct
  misc_feature 1..27: note = Exosome complex exonuclease RRP44 (767-775)
  source 1..27: mol_type = other RNA
ctggccagccccatctacacccacttc

SEQ ID NO: 39814 - RNA, 27 nt, synthetic construct
  misc_feature 1..27: note = Serine/threonine-protein kinase 17B (265-273)
  source 1..27: mol_type = other RNA
ctggccaccgacttcatccagagcctc

SEQ ID NO: 39815 - RNA, 27 nt, synthetic construct
  misc_feature 1..27: note = Junction plakoglobin (139-147)
  source 1..27: mol_type = other RNA
ctggccacccgcgccctccccgagctg

SEQ ID NO: 39816 - RNA, 27 nt, synthetic construct
  misc_feature 1..27: note = UBX domain-containing protein 8 (242-250)
  source 1..27: mol_type = other RNA
ctggccgtggagggcgggcagagcctc

SEQ ID NO: 39817 - RNA, 27 nt, synthetic construct
  misc_feature 1..27: note = F-box only protein 32 (100-108)
  source 1..27: mol_type = other RNA
ctggaggaccagcagaacatccgcctc

SEQ ID NO: 39818 - RNA, 27 nt, synthetic construct
  misc_feature 1..27: note = Ubiquitin carboxyl-terminal hydrolase 22 (475-483)
  source 1..27: mol_type = other RNA
ctggagagcggccactacacctccttc

SEQ ID NO: 39819 - RNA, 27 nt, synthetic construct
  misc_feature 1..27: note = Gamma-aminobutyric acid receptor subunit pi (247-255)
  source 1..27: mol_type = other RNA
ctggagacctacgtgcccagcaccttc

SEQ ID NO: 39820 - RNA, 27 nt, synthetic construct
  misc_feature 1..27: note = Condensin-2 complex subunit H2 (434-442)
  source 1..27: mol_type = other RNA
ctgttcatcgccaccagccagaagttc

SEQ ID NO: 39821 - RNA, 27 nt, synthetic construct
  misc_feature 1..27: note = ATP-dependent RNA helicase DDX54 (153-161)
  source 1..27: mol_type = other RNA
ctgatcctcagccccacccgcgagctg

SEQ ID NO: 39822 - RNA, 27 nt, synthetic construct
  misc_feature 1..27: note = Lysine-specific demethylase 4B (245-253)
  source 1..27: mol_type = other RNA
ctgatcagccccatcatcctcaagaag

SEQ ID NO: 39823 - RNA, 27 nt, synthetic construct
  misc_feature 1..27: note = Protocadherin-1 (27-35)
  source 1..27: mol_type = other RNA
ctgctcgcccccagcccgggccacgcc

SEQ ID NO: 39824 - RNA, 33 nt, synthetic construct
  misc_feature 1..33: note = ETS translocation variant 5 (377-387)
  source 1..33: mol_type = other RNA
ctgctcgacgaccccgccaacgcccacttcatc

SEQ ID NO: 39825 - RNA, 27 nt, synthetic construct
  misc_feature 1..27: note = ATP-binding cassette sub-family F member 3 (350-358)
  source 1..27: mol_type = other RNA
ctgctcgacgagcccaccaacatgctg

SEQ ID NO: 39826 - RNA, 30 nt, synthetic construct
  misc_feature 1..30: note = Zinc finger protein 490 (73-82)
  source 1..30: mol_type = other RNA
ctgctcgaccccggccagcgcaacatctac

SEQ ID NO: 39827 - RNA, 27 nt, synthetic construct
  misc_feature 1..27: note = Probable global transcription activator SNF2L1 (721-729)
  source 1..27: mol_type = other RNA
ctgctcgagaaggagatcctgtactac

SEQ ID NO: 39828 - RNA, 39 nt, synthetic construct
  misc_feature 1..39: note = NKG2D ligand 3 (11-23)
  source 1..39: mol_type = other RNA
ctgctcttcgactggagcggcaccgggcgcgccgacgcc

SEQ ID NO: 39829 - RNA, 27 nt, synthetic construct
  misc_feature 1..27: note = Sterol regulatory element-binding protein 2 (843-851)
  source 1..27: mol_type = other RNA
ctgctccacagcttcgtggactccgtc

SEQ ID NO: 39830 - RNA, 27 nt, synthetic construct
  misc_feature 1..27: note = Uncharacterized protein C18orf63 (124-132)
  source 1..27: mol_type = other RNA
ctgctcatccagggccgcgacttcctg

SEQ ID NO: 39831 - RNA, 27 nt, synthetic construct
  misc_feature 1..27: note = Transmembrane emp24 domain-containing protein 3 (78-86)
  source 1..27: mol_type = other RNA
ctgctcaagagcttcttcaccgagaag

SEQ ID NO: 39832 - RNA, 33 nt, synthetic construct
  misc_feature 1..33: note = Protein disulfide-isomerase A3 (14-24)
  source 1..33: mol_type = other RNA
ctgctcctggccgccgcgcgcctggccgccgcc

SEQ ID NO: 39833 - RNA, 27 nt, synthetic construct
  misc_feature 1..27: note = Peptidyl-prolyl cis-trans isomerase B (16-24)
  source 1..27: mol_type = other RNA
ctgctcctgcccggcccgagcgccgcc

SEQ ID NO: 39834 - RNA, 30 nt, synthetic construct
  misc_feature 1..30: note = Plasma alpha-L-fucosidase (19-28)
  source 1..30: mol_type = other RNA
ctgctcctgcccccgcccccctgccccgcc

SEQ ID NO: 39835 - RNA, 27 nt, synthetic construct
  misc_feature 1..27: note = PRKC apoptosis WT1 regulator protein (216-224)
  source 1..27: mol_type = other RNA
ctgctccaggagcccccgcgcaccgtg

SEQ ID NO: 39836 - RNA, 30 nt, synthetic construct
  misc_feature 1..30: note = Chromodomain-helicase-DNA-binding protein 7 (695-704)
  source 1..30: mol_type = other RNA
ctgctcgtgaacagcctgttcgccggcatg

SEQ ID NO: 39837 - RNA, 33 nt, synthetic construct
  misc_feature 1..33: note = Notchless protein homolog 1 (181-191)
  source 1..33: mol_type = other RNA
ctgctctgggaccccagcaccggcaagcaggtg

SEQ ID NO: 39838 - RNA, 27 nt, synthetic construct
  misc_feature 1..27: note = Adenosine 3'-phospho 5'-phosphosulfate transporter 1 (251-259)
  source 1..27: mol_type = other RNA
ctgctctacggccacaccgtgaccgtc

SEQ ID NO: 39839 - RNA, 27 nt, synthetic construct
  misc_feature 1..27: note = Activating signal cointegrator 1 complex subunit 1 (68-76)
  source 1..27: mol_type = other RNA
ctgctctacaagcacatcgtgggcaag

SEQ ID NO: 39840 - RNA, 27 nt, synthetic construct
  misc_feature 1..27: note = DNA-dependent protein kinase catalytic subunit (3482-3490)
  source 1..27: mol_type = other RNA
ctgatgaccaaggagatcagctccgtg

SEQ ID NO: 39841 - RNA, 27 nt, synthetic construct
  misc_feature 1..27: note = Nucleus accumbens-associated protein 1 (343-351)
  source 1..27: mol_type = other RNA
ctgcccgccgagctcatcaaccagatc

SEQ ID NO: 39842 - RNA, 24 nt, synthetic construct
  misc_feature 1..24: note = Mothers against decapentaplegic homolog 2 (5-12)
  source 1..24: mol_type = other RNA
ctgcccttcaccccgcccgtggtc

SEQ ID NO: 39843 - RNA, 27 nt, synthetic construct
  misc_feature 1..27: note = Biorientation of chromosomes in cell division protein 1-like 1 (907-915)
  source 1..27: mol_type = other RNA
ctgcccatcagctccgccaccaccatc

SEQ ID NO: 39844 - RNA, 27 nt, synthetic construct
  misc_feature 1..27: note = Catenin alpha-1 (553-561)
  source 1..27: mol_type = other RNA
ctgccccaggagcagaaggccaagatc

SEQ ID NO: 39845 - RNA, 27 nt, synthetic construct
  misc_feature 1..27: note = E3 ubiquitin-protein ligase RNF213 (5003-5011)
  source 1..27: mol_type = other RNA
ctgcccagctccgtgatcagcgccatc

SEQ ID NO: 39846 - RNA, 24 nt, synthetic construct
  misc_feature 1..24: note = Eukaryotic translation initiation factor 3 subunit C-like protein (816-823)
  source 1..24: mol_type = other RNA
ctgcccaccgtgcacagcatcatc

SEQ ID NO: 39847 - RNA, 24 nt, synthetic construct
  misc_feature 1..24: note = Regulation of nuclear pre-mRNA domain-containing protein 1A (190-197)
  source 1..24: mol_type = other RNA
ctgcccgtggaggtccaggaggtg

SEQ ID NO: 39848 - RNA, 27 nt, synthetic construct
  misc_feature 1..27: note = CDK5 and ABL1 enzyme substrate 2 (40-48)
  source 1..27: mol_type = other RNA
ctgccctacggcgaggggctccgcatc

SEQ ID NO: 39849 - RNA, 27 nt, synthetic construct
  misc_feature 1..27: note = Collagen alpha-1(XII) chain (105-113)
  source 1..27: mol_type = other RNA
ctgccctacaagggcgggaacaccctc

SEQ ID NO: 39850 - RNA, 27 nt, synthetic construct
  misc_feature 1..27: note = A-kinase anchor protein 1, mitochondrial (646-654)
  source 1..27: mol_type = other RNA
ctgccctacacccagagcgtgcagatc

SEQ ID NO: 39851 - RNA, 27 nt, synthetic construct
  misc_feature 1..27: note = Putative tRNA (cytidine(32)/guanosine(34)-2'-O)-methyltransferase (30-38)
  source 1..27: mol_type = other RNA
ctgcagctcgacaaggagttccagctg

SEQ ID NO: 39852 - RNA, 27 nt, synthetic construct
  misc_feature 1..27: note = Double-stranded RNA-binding protein Staufen homolog 1 (119-127)
  source 1..27: mol_type = other RNA
ctgcagaacgagcccctcccggagcgc

SEQ ID NO: 39853 - RNA, 30 nt, synthetic construct
  misc_feature 1..30: note = CD44 antigen (331-340)
  source 1..30: mol_type = other RNA
ctgcagaacgtggacatgaagatcggcgtc

SEQ ID NO: 39854 - RNA, 27 nt, synthetic construct
  misc_feature 1..27: note = Vimentin (44-52)
  source 1..27: mol_type = other RNA
ctgcgccccagcacctcccggagcctc

SEQ ID NO: 39855 - RNA, 27 nt, synthetic construct
  misc_feature 1..27: note = Protein CASC5 (113-121)
  source 1..27: mol_type = other RNA
ctgagcgcccccatccacacccagatg

SEQ ID NO: 39856 - RNA, 30 nt, synthetic construct
  misc_feature 1..30: note = Fibronectin type III domain-containing protein 3B (320-329)
  source 1..30: mol_type = other RNA
ctgagcgacaagggccgcgacgggaagtac

SEQ ID NO: 39857 - RNA, 27 nt, synthetic construct
  misc_feature 1..27: note = Cytoplasmic dynein 1 heavy chain 1 (69-77)
  source 1..27: mol_type = other RNA
ctgagcgacccccaggtgcacaccgtc

SEQ ID NO: 39858 - RNA, 27 nt, synthetic construct
  misc_feature 1..27: note = Stress-induced-phosphoprotein 1 (194-202)
  source 1..27: mol_type = other RNA
ctgagcgaccccacctaccgcgagctc

SEQ ID NO: 39859 - RNA, 27 nt, synthetic construct
  misc_feature 1..27: note = Cytochrome c oxidase subunit 4 isoform 1, mitochondrial (131-139)
  source 1..27: mol_type = other RNA
ctgagcgaccccgtgatccactccctc

SEQ ID NO: 39860 - RNA, 33 nt, synthetic construct
  misc_feature 1..33: note = tRNA-splicing endonuclease subunit Sen54 (146-156)
  source 1..33: mol_type = other RNA
ctgaccgaccacaccgtgacgttcctccagtac

SEQ ID NO: 39861 - RNA, 33 nt, synthetic construct
  misc_feature 1..33: note = Beta-galactosidase-1-like protein 2 (348-358)
  source 1..33: mol_type = other RNA
ctgaccgaggccggcgactacaccgccaagtac

SEQ ID NO: 39862 - RNA, 24 nt, synthetic construct
  misc_feature 1..24: note = Serine/threonine-protein kinase 24 (284-291)
  source 1..24: mol_type = other RNA
ctgaccgagctcatcgaccgctac

SEQ ID NO: 39863 - RNA, 27 nt, synthetic construct
  misc_feature 1..27: note = Endoplasmic reticulum-Golgi intermediate compartment protein 3 (39-47)
  source 1..27: mol_type = other RNA
ctgaccaccgaggtgcaccccgagctc

SEQ ID NO: 39864 - RNA, 24 nt, synthetic construct
  misc_feature 1..24: note = POTE ankyrin domain family member F (708-715)
  source 1..24: mol_type = other RNA
ctggtgatcgacaacggcagcggg

SEQ ID NO: 39865 - RNA, 36 nt, synthetic construct
  misc_feature 1..36: note = CD44 antigen (399-410)
  source 1..36: mol_type = other RNA
ctggtgaacaaggagagctccgagacccccgaccag

SEQ ID NO: 39866 - RNA, 27 nt, synthetic construct
  misc_feature 1..27: note = Structural maintenance of chromosomes flexible hinge domain-containing protein 1 (857-865)
  source 1..27: mol_type = other RNA
ctggtgaccgacatccagcccgtcctc

SEQ ID NO: 39867 - RNA, 27 nt, synthetic construct
  misc_feature 1..27: note = Cytoplasmic dynein 1 light intermediate chain 1 (179-187)
  source 1..27: mol_type = other RNA
ctggtgtacaagtacatcgtccagaag

SEQ ID NO: 39868 - RNA, 27 nt, synthetic construct
  misc_feature 1..27: note = Protein archease (109-117)
  source 1..27: mol_type = other RNA
ctgtacaagttcagcgccgacgagttc

SEQ ID NO: 39869 - RNA, 27 nt, synthetic construct
  misc_feature 1..27: note = Tumor protein D54 (125-133)
  source 1..27: mol_type = other RNA
ctgtacaagaagacccaggagaccctc

SEQ ID NO: 39870 - RNA, 30 nt, synthetic construct
  misc_feature 1..30: note = CD109 antigen (139-148)
  source 1..30: mol_type = other RNA
ctgtacaagcccaagcaggaggtgaagttc

SEQ ID NO: 39871 - RNA, 27 nt, synthetic construct
  misc_feature 1..27: note = Ras-related GTP-binding protein C (292-300)
  source 1..27: mol_type = other RNA
ctgtacctcaaggaggtgaccaagttc

SEQ ID NO: 39872 - RNA, 27 nt, synthetic construct
  misc_feature 1..27: note = Exportin-5 (626-634)
  source 1..27: mol_type = other RNA
ctgtacaaccacgtgaagcagctcctg

SEQ ID NO: 39873 - RNA, 27 nt, synthetic construct
  misc_feature 1..27: note = Interferon-induced GTP-binding protein Mx2 (422-430)
  source 1..27: mol_type = other RNA
ctgtacaacaagatccgcgaggacttc

SEQ ID NO: 39874 - RNA, 27 nt, synthetic construct
  misc_feature 1..27: note = ATPase family AAA domain-containing protein 2 (447-455)
  source 1..27: mol_type = other RNA
ctgtaccccgaggtgttcgagaagttc

SEQ ID NO: 39875 - RNA, 27 nt, synthetic construct
  misc_feature 1..27: note = TELO2-interacting protein 2 (300-308)
  source 1..27: mol_type = other RNA
ctgtacacccccgagcaccacctcatc

SEQ ID NO: 39876 - RNA, 27 nt, synthetic construct
  misc_feature 1..27: note = Formin-binding protein 1-like (181-189)
  source 1..27: mol_type = other RNA
atggccgacgagaacaagaacgagtac

SEQ ID NO: 39877 - RNA, 30 nt, synthetic construct
  misc_feature 1..30: note = Condensin complex subunit 1 (1002-1011)
  source 1..30: mol_type = other RNA
atggagctgctcgacggcaagcagaccctg

SEQ ID NO: 39878 - RNA, 30 nt, synthetic construct
  misc_feature 1..30: note = Nucleoprotein TPR (1009-1018)
  source 1..30: mol_type = other RNA
atggaggtggagaaggagaagcaggagctg

SEQ ID NO: 39879 - RNA, 33 nt, synthetic construct
  misc_feature 1..33: note = Eukaryotic translation initiation factor 2 subunit 2 (6-16)
  source 1..33: mol_type = other RNA
atgatcttcgaccccaccatgagcaagaagaag

SEQ ID NO: 39880 - RNA, 27 nt, synthetic construct
  misc_feature 1..27: note = Melanoma-associated antigen D1 (497-505)
  source 1..27: mol_type = other RNA
atgctgcgcgacatcatccgggagtac

SEQ ID NO: 39881 - RNA, 30 nt, synthetic construct
  misc_feature 1..30: note = Cytochrome c oxidase subunit NDUFA4 (1-10)
  source 1..30: mol_type = other RNA
atgctgcgccagatcatcggccaggccaag

SEQ ID NO: 39882 - RNA, 27 nt, synthetic construct
  misc_feature 1..27: note = Tetratricopeptide repeat protein 17 (580-588)
  source 1..27: mol_type = other RNA
atgcccgacgaccacgcccgcaagatc

SEQ ID NO: 39883 - RNA, 24 nt, synthetic construct
  misc_feature 1..24: note = Protein polybromo-1 (426-433)
  source 1..24: mol_type = other RNA
atgcccatcagcctgcagcagatc

SEQ ID NO: 39884 - RNA, 30 nt, synthetic construct
  misc_feature 1..30: note = Cell division cycle protein 27 homolog (515-524)
  source 1..30: mol_type = other RNA
atgcaggccgagcgcatcttcagcgaggtg

SEQ ID NO: 39885 - RNA, 33 nt, synthetic construct
  misc_feature 1..33: note = CD44 antigen (412-422)
  source 1..33: mol_type = other RNA
atgaccgccgacgagacccgcaacctgcagaac

SEQ ID NO: 39886 - RNA, 33 nt, synthetic construct
  misc_feature 1..33: note = 14-3-3 protein beta/alpha (1-11)
  source 1..33: mol_type = other RNA
atgaccatggacaagagcgagctggtgcagaag

SEQ ID NO: 39887 - RNA, 27 nt, synthetic construct
  misc_feature 1..27: note = Centromere/kinetochore protein zw10 homolog (415-423)
  source 1..27: mol_type = other RNA
atgaccagcgagatccacaacaccgtg

SEQ ID NO: 39888 - RNA, 27 nt, synthetic construct
  misc_feature 1..27: note = Pyridoxal kinase (93-101)
  source 1..27: mol_type = other RNA
atggtggtcgacatcgtgcaggagctg

SEQ ID NO: 39889 - RNA, 27 nt, synthetic construct
  misc_feature 1..27: note = Nucleoside diphosphate kinase (76-84)
  source 1..27: mol_type = other RNA
atggtgtgggagggcctgaacgtcgtg

SEQ ID NO: 39890 - RNA, 27 nt, synthetic construct
  misc_feature 1..27: note = Tyrosine-protein phosphatase non-receptor type 14 (204-212)
  source 1..27: mol_type = other RNA
atgtacatcaacgaggtggagcgcctg

SEQ ID NO: 39891 - RNA, 27 nt, synthetic construct
  misc_feature 1..27: note = Phosphatidate cytidylyltransferase 2 (308-316)
  source 1..27: mol_type = other RNA
atgtaccccttccagatccacagcatc

SEQ ID NO: 39892 - RNA, 27 nt, synthetic construct
  misc_feature 1..27: note = M-phase phosphoprotein 8 (351-359)
  source 1..27: mol_type = other RNA
aacgccttcctggagaagaagaccgtg

SEQ ID NO: 39893 - RNA, 27 nt, synthetic construct
  misc_feature 1..27: note = E3 ubiquitin-protein ligase RNF213 (2663-2671)
  source 1..27: mol_type = other RNA
aacgccttcctgagcaagtccagcgtg

SEQ ID NO: 39894 - RNA, 27 nt, synthetic construct
  misc_feature 1..27: note = H/ACA ribonucleoprotein complex subunit 4 (161-169)
  source 1..27: mol_type = other RNA
aacgccatcgagggcgggacccagctg

SEQ ID NO: 39895 - RNA, 27 nt, synthetic construct
  misc_feature 1..27: note = Protein transport protein Sec31A (866-874)
  source 1..27: mol_type = other RNA
aacgcctaccccaacaccccgtacatc

SEQ ID NO: 39896 - RNA, 27 nt, synthetic construct
  misc_feature 1..27: note = Ribonuclease P/MRP protein subunit POP5 (58-66)
  source 1..27: mol_type = other RNA
aacgcctacaccggcatcgtgctgctc

SEQ ID NO: 39897 - RNA, 27 nt, synthetic construct
  misc_feature 1..27: note = Cytoplasmic dynein 1 heavy chain 1 (1442-1450)
  source 1..27: mol_type = other RNA
aacgaggccatcgtgaaggacgtcctg

SEQ ID NO: 39898 - RNA, 30 nt, synthetic construct
  misc_feature 1..30: note = Hsc70-interacting protein (314-323)
  source 1..30: mol_type = other RNA
aacgagatcctgagcgaccccgaggtgctc

SEQ ID NO: 39899 - RNA, 24 nt, synthetic construct
  misc_feature 1..24: note = DENN domain-containing protein 5A (694-701)
  source 1..24: mol_type = other RNA
aacgagatcaccggccacacctac

SEQ ID NO: 39900 - RNA, 27 nt, synthetic construct
  misc_feature 1..27: note = Nucleoprotein TPR (857-865)
  source 1..27: mol_type = other RNA
aacgaggtggagcagcgccacaccctg

SEQ ID NO: 39901 - RNA, 27 nt, synthetic construct
  misc_feature 1..27: note = Serine/arginine repetitive matrix protein 2 (2175-2183)
  source 1..27: mol_type = other RNA
aaccacgcccagagccgcatcgccctg

SEQ ID NO: 39902 - RNA, 27 nt, synthetic construct
  misc_feature 1..27: note = EH domain-containing protein 1 (209-217)
  source 1..27: mol_type = other RNA
aaccacgaggacaagatccgcgtggtc

SEQ ID NO: 39903 - RNA, 30 nt, synthetic construct
  misc_feature 1..30: note = Nuclear receptor coactivator 6 (844-853)
  source 1..30: mol_type = other RNA
aaccacttcagcggccacgggatgtccttc

SEQ ID NO: 39904 - RNA, 27 nt, synthetic construct
  misc_feature 1..27: note = UDP-N-acetylhexosamine pyrophosphorylase (327-335)
  source 1..27: mol_type = other RNA
aacatcgccaaccacttcttcaccgtg

SEQ ID NO: 39905 - RNA, 27 nt, synthetic construct
  misc_feature 1..27: note = Mediator of RNA polymerase II transcription subunit 22 (67-75)
  source 1..27: mol_type = other RNA
aacatcgtgcgcgccggcgagagcctg

SEQ ID NO: 39906 - RNA, 27 nt, synthetic construct
  misc_feature 1..27: note = Peroxisomal acyl-coenzyme A oxidase 1 (642-650)
  source 1..27: mol_type = other RNA
aacaaggccgaggtgcacgagagctac

SEQ ID NO: 39907 - RNA, 30 nt, synthetic construct
  misc_feature 1..30: note = FERM domain-containing protein 6 (261-270)
  source 1..30: mol_type = other RNA
aacctggacgaggagaagcagctcctgtac

SEQ ID NO: 39908 - RNA, 24 nt, synthetic construct
  misc_feature 1..24: note = WD repeat-containing protein 43 (333-340)
  source 1..24: mol_type = other RNA
aacctgatcaagaagaccgtgctc

SEQ ID NO: 39909 - RNA, 27 nt, synthetic construct
  misc_feature 1..27: note = C-terminal-binding protein 2 (784-792)
  source 1..27: mol_type = other RNA
aacctgaacgagcacaaccaccacctc

SEQ ID NO: 39910 - RNA, 33 nt, synthetic construct
  misc_feature 1..33: note = CD44 antigen (330-340)
  source 1..33: mol_type = other RNA
aacctgcagaacgtggacatgaagatcggcgtc

SEQ ID NO: 39911 - RNA, 30 nt, synthetic construct
  misc_feature 1..30: note = E3 ubiquitin-protein ligase makorin-1 (292-301)
  source 1..30: mol_type = other RNA
aaccccagcgagcgccggttcggcatcctg

SEQ ID NO: 39912 - RNA, 33 nt, synthetic construct
  misc_feature 1..33: note = Transcription factor COE2 (207-217)
  source 1..33: mol_type = other RNA
aaccagggctacatccgcaacaccagctccatc

SEQ ID NO: 39913 - RNA, 27 nt, synthetic construct
  misc_feature 1..27: note = Interferon-induced GTP-binding protein Mx2 (643-651)
  source 1..27: mol_type = other RNA
aaccagatccccttcatcatccagtac

SEQ ID NO: 39914 - RNA, 27 nt, synthetic construct
  misc_feature 1..27: note = Transportin-1 (49-57)
  source 1..27: mol_type = other RNA
aaccagtaccccgacttcaacaactac

SEQ ID NO: 39915 - RNA, 27 nt, synthetic construct
  misc_feature 1..27: note Dolichyl-diphosphooligosaccharide-proteinosyltransferase 48 kDa subunit (395-403)
  source 1..27: mol_type = other RNA
aaccgcctgggctacacccacctctac

SEQ ID NO: 39916 - RNA, 27 nt, synthetic construct
  misc_feature 1..27: note = TATA-binding protein-associated factor 2N (227-235)
  source 1..27: mol_type = other RNA
aacagcgacaacaacaccatcttcgtg

SEQ ID NO: 39917 - RNA, 27 nt, synthetic construct
  misc_feature 1..27: note = Niban-like protein 1 (154-162)
  source 1..27: mol_type = other RNA
aacagcgaccccaacctgcacctcctg

SEQ ID NO: 39918 - RNA, 27 nt, synthetic construct
  misc_feature 1..27: note = Serine/threonine-protein kinase TBK1 (330-338)
  source 1..27: mol_type = other RNA
aacaccgccaccatcttccacgagctg

SEQ ID NO: 39919 - RNA, 30 nt, synthetic construct
  misc_feature 1..30: note = GREB1-like protein (1697-1706)
  source 1..30: mol_type = other RNA
aacaccgacctgacccagaacgtgcagtac

SEQ ID NO: 39920 - RNA, 30 nt, synthetic construct
  misc_feature 1..30: note = Eukaryotic translation initiation factor 3 subunit C-like protein (462-471)
  source 1..30: mol_type = other RNA
aacaccgacccccacagccaggagtacgtg

SEQ ID NO: 39921 - RNA, 30 nt, synthetic construct
  misc_feature 1..30: note = Guanine deaminase (328-337)
  source 1..30: mol_type = other RNA
aacaccgaccgccccggcgggtacagctac

SEQ ID NO: 39922 - RNA, 30 nt, synthetic construct
  misc_feature 1..30: note = 26S proteasome non-ATPase regulatory subunit 13 (227-236)
  source 1..30: mol_type = other RNA
aacaccgaccgccagtggctgatcgacacc

SEQ ID NO: 39923 - RNA, 33 nt, synthetic construct
  misc_feature 1..33: note = Polypyrimidine tract-binding protein 1 (102-112)
  source 1..33: mol_type = other RNA
aacaccgaggaggccgccaacaccatggtgaac

SEQ ID NO: 39924 - RNA, 27 nt, synthetic construct
  misc_feature 1..27: note = MOB kinase activator 1A (60-68)
  source 1..27: mol_type = other RNA
aacaccgtggacttcttcaaccagatc

SEQ ID NO: 39925 - RNA, 27 nt, synthetic construct
  misc_feature 1..27: note = Vesicular integral-membrane protein VIP36 (305-313)
  source 1..27: mol_type = other RNA
aacgtggacgaccccaccggcaacttc

SEQ ID NO: 39926 - RNA, 33 nt, synthetic construct
  misc_feature 1..33: note = Dynactin subunit 6 (105-115)
  source 1..33: mol_type = other RNA
aacgtgatcgagagcaaggcctacgtcggccgc

SEQ ID NO: 39927 - RNA, 27 nt, synthetic construct
  misc_feature 1..27: note = Sperm-associated antigen 16 protein (89-97)
  source 1..27: mol_type = other RNA
aacgtgcccgacgtctacacccagatc

SEQ ID NO: 39928 - RNA, 27 nt, synthetic construct
  misc_feature 1..27: note = Activity-dependent neuroprotector homeobox protein (450-458)
  source 1..27: mol_type = other RNA
aactacatcatgaagatccacaacttc

SEQ ID NO: 39929 - RNA, 27 nt, synthetic construct
  misc_feature 1..27: note = Abelson tyrosine-protein kinase 2 (124-132)
  source 1..27: mol_type = other RNA
aactacatcacccccgtgaacagcctg

SEQ ID NO: 39930 - RNA, 27 nt, synthetic construct
  misc_feature 1..27: note = Opioid growth factor receptor (195-203)
  source 1..27: mol_type = other RNA
aactaccagaagcgcttccagaacctg

SEQ ID NO: 39931 - RNA, 27 nt, synthetic construct
  misc_feature 1..27: note = DNA-directed RNA polymerase II subunit RPB4 (66-74)
  source 1..27: mol_type = other RNA
aactacaccgcccgcttcagccggttc

SEQ ID NO: 39932 - RNA, 30 nt, synthetic construct
  misc_feature 1..30: note = BTB/POZ domain-containing adapter for CUL3-mediated RhoA degradation protein 3 (245-254)
  source 1..30: mol_type = other RNA
cccgaggcccgcatctacgaggagaccctg

SEQ ID NO: 39933 - RNA, 27 nt, synthetic construct
  misc_feature 1..27: note = Ubiquitin-like modifier-activating enzyme 7 (898-906)
  source 1..27: mol_type = other RNA
cccttcgccccggccatccagaccttc

SEQ ID NO: 39934 - RNA, 27 nt, synthetic construct
  misc_feature 1..27: note = Short-chain dehydrogenase/reductase 3 (219-227)
  source 1..27: mol_type = other RNA
cccttccacaccagcaccgagatgttc

SEQ ID NO: 39935 - RNA, 30 nt, synthetic construct
  misc_feature 1..30: note = Nodal modulator 2 (293-302)
  source 1..30: mol_type = other RNA
cccttctaccgcggcgagcggatcaccttc

SEQ ID NO: 39936 - RNA, 30 nt, synthetic construct
  misc_feature 1..30: note = Beta-2-microglobulin (110-119)
  source 1..30: mol_type = other RNA
cccaagatcgtgaagtgggaccgcgacatg

SEQ ID NO: 39937 - RNA, 27 nt, synthetic construct
  misc_feature 1..27: note = Proteasomal ubiquitin receptor ADRM1 (86-94)
  source 1..27: mol_type = other RNA
ccccagtgcccgagcggccgcgtgtac

SEQ ID NO: 39938 - RNA, 36 nt, synthetic construct
  misc_feature 1..36: note = NADH dehydrogenase (ubiquinone) 1 alpha subcomplex subunit 3 (73-84)
  source 1..36: mol_type = other RNA
ccccagggcccgagcctggagtggctcaagaagctg

SEQ ID NO: 39939 - RNA, 27 nt, synthetic construct
  misc_feature 1..27: note = Signal recognition particle 9 kDa protein (2-10)
  source 1..27: mol_type = other RNA
ccccagtaccagacctgggaggagttc

SEQ ID NO: 39940 - RNA, 30 nt, synthetic construct
  misc_feature 1..30: note = Gamma-aminobutyric acid receptor-associated protein (52-61)
  source 1..30: mol_type = other RNA
cccagcgacctgaccgtgggccagttctac

SEQ ID NO: 39941 - RNA, 33 nt, synthetic construct
  misc_feature 1..33: note = B-cell CLL/lymphoma 9-like protein (1331-1341)
  source 1..33: mol_type = other RNA
cccagcgagaagccgtccagcaccctgcagtac

SEQ ID NO: 39942 - RNA, 27 nt, synthetic construct
  misc_feature 1..27: note = Retroviral-like aspartic protease 1 (314-322)
  source 1..27: mol_type = other RNA
cccgtgggcgggagcctggaggacgag

SEQ ID NO: 39943 - RNA, 27 nt, synthetic construct
  misc_feature 1..27: note = Procollagen-lysine,2-oxoglutarate 5-dioxygenase 3 (459-467)
  source 1..27: mol_type = other RNA
ccctacatcagccaggcctacgtgatc

SEQ ID NO: 39944 - RNA, 27 nt, synthetic construct
  misc_feature 1..27: note = Telomerase protein component 1 (1087-1095)
  source 1..27: mol_type = other RNA
ccctacgtgggcgggctggaggagttc

SEQ ID NO: 39945 - RNA, 27 nt, synthetic construct
  misc_feature 1..27: note = U5 small nuclear ribonucleoprotein 200 kDa helicase (643-651)
  source 1..27: mol_type = other RNA
caggaggacgtgcgcctgatcggcctc

SEQ ID NO: 39946 - RNA, 27 nt, synthetic construct
  misc_feature 1..27: note = Ras GTPase-activating protein-binding protein 1 (211-219)
  source 1..27: mol_type = other RNA
caggaggagaagcccgagccggtgctg

SEQ ID NO: 39947 - RNA, 27 nt, synthetic construct
  misc_feature 1..27: note = Threonylcarbamoyladenosine tRNA methylthiotransferase (57-65)
  source 1..27: mol_type = other RNA
caggaggagaacaagaagatcgtgctg

SEQ ID NO: 39948 - RNA, 30 nt, synthetic construct
  misc_feature 1..30: note = Eukaryotic translation initiation factor 3 subunit K (94-103)
  source 1..30: mol_type = other RNA
caggaggagcgccccatccggcagatcctg

SEQ ID NO: 39949 - RNA, 36 nt, synthetic construct
  misc_feature 1..36: note = RNA polymerase II subunit A C-terminal domain phosphatase SSU72 (177-188)
  source 1..36: mol_type = other RNA
caggagttcgaggagaagagcggccgcaccttcctg

SEQ ID NO: 39950 - RNA, 27 nt, synthetic construct
  misc_feature 1..27: note = Clathrin heavy chain 1 (10-18)
  source 1..27: mol_type = other RNA
caggagcacctgcagctccagaacctg

SEQ ID NO: 39951 - RNA, 27 nt, synthetic construct
  misc_feature 1..27: note = Bifunctional arginine demethylase and lysyl-hydroxylase JMJD6 (356-364)
  source 1..27: mol_type = other RNA
caggagcaccccgagctggccgtgctc

SEQ ID NO: 39952 - RNA, 30 nt, synthetic construct
  misc_feature 1..30: note = F-box only protein 11 (141-150)
  source 1..30: mol_type = other RNA
caggagaagctgcccgacgaggtggtcctc

SEQ ID NO: 39953 - RNA, 30 nt, synthetic construct
  misc_feature 1..30: note = protein PET100 homolog, mitochondrial (48-57)
  source 1..30: mol_type = other RNA
caggagctggaggagttcaaggagcgcctc

SEQ ID NO: 39954 - RNA, 30 nt, synthetic construct
  misc_feature 1..30: note = Protein SHQ1 homolog (236-245)
  source 1..30: mol_type = other RNA
caggagaaccacgccaccctggtgagcttc

SEQ ID NO: 39955 - RNA, 30 nt, synthetic construct
  misc_feature 1..30: note = Histone-lysine N-methyltransferase SETD7 (253-262)
  source 1..30: mol_type = other RNA
caggaggtggacagccgcgactgggccctg

SEQ ID NO: 39956 - RNA, 27 nt, synthetic construct
  misc_feature 1..27: note = Neutral amino acid transporter B(0) (224-232)
  source 1..27: mol_type = other RNA
caggaggtggagggcatgaacatcctg

SEQ ID NO: 39957 - RNA, 27 nt, synthetic construct
  misc_feature 1..27: note = Uridine-cytidine kinase 2 (143-151)
  source 1..27: mol_type = other RNA
caggaggtgcgcgacctgttccagatg

SEQ ID NO: 39958 - RNA, 27 nt, synthetic construct
  misc_feature 1..27: note = WD repeat-containing protein 3 (640-648)
  source 1..27: mol_type = other RNA
cagttcgtgcccaagagccacctgttc

SEQ ID NO: 39959 - RNA, 27 nt, synthetic construct
  misc_feature 1..27: note = Niban-like protein 1 (79-87)
  source 1..27: mol_type = other RNA
cagatcagcatccccttcctgctcaag

SEQ ID NO: 39960 - RNA, 27 nt, synthetic construct
  misc_feature 1..27: note = Rho-associated protein kinase 2 (563-571)
  source 1..27: mol_type = other RNA
cagctggacgagaccaacgccctcctg

SEQ ID NO: 39961 - RNA, 27 nt, synthetic construct
  misc_feature 1..27: note = Ras-associated and pleckstrin homology domains-containing protein 1 (496-504)
  source 1..27: mol_type = other RNA
cagctggaccacgtgaacgtctactac

SEQ ID NO: 39962 - RNA, 27 nt, synthetic construct
  misc_feature 1..27: note = Disco-interacting protein 2 homolog A (1561-1569)
  source 1..27: mol_type = other RNA
cagctggaccccatctacgtggcctac

SEQ ID NO: 39963 - RNA, 27 nt, synthetic construct
  misc_feature 1..27: note = Transcription elongation factor SPT5 (537-545)
  source 1..27: mol_type = other RNA
cagctggacccccagaccgtgggcgtc

SEQ ID NO: 39964 - RNA, 27 nt, synthetic construct
  misc_feature 1..27: note = Transcriptional repressor CTCF (65-73)
  source 1..27: mol_type = other RNA
cagctggaccccaccctcctgcagatg

SEQ ID NO: 39965 - RNA, 27 nt, synthetic construct
  misc_feature 1..27: note = Ubiquitin-40S ribosomal protein S27a (69-77)
  source 1..27: mol_type = other RNA
cagctggaggacggccgcaccctcagc

SEQ ID NO: 39966 - RNA, 27 nt, synthetic construct
  misc_feature 1..27: note = Mortality factor 4-like protein 2 (145-153)
  source 1..27: mol_type = other RNA
cagctgttccagctccccgccaagaag

SEQ ID NO: 39967 - RNA, 30 nt, synthetic construct
  misc_feature 1..30: note = Transitional endoplasmic reticulum ATPase (50-59)
  source 1..30: mol_type = other RNA
cagctgttccgcggcgacaccgtgctcctg

SEQ ID NO: 39968 - RNA, 33 nt, synthetic construct
  misc_feature 1..33: note = Transitional endoplasmic reticulum ATPase (50-60)
  source 1..33: mol_type = other RNA
cagctgttccgcggcgacaccgtgctcctgaag

SEQ ID NO: 39969 - RNA, 30 nt, synthetic construct
  misc_feature 1..30: note = Mitofusin-2 (172-181)
  source 1..30: mol_type = other RNA
cagctgcacgccggcagcctcgtgtccgtc

SEQ ID NO: 39970 - RNA, 27 nt, synthetic construct
  misc_feature 1..27: note = Kinesin-like protein KIF15 (1210-1218)
  source 1..27: mol_type = other RNA
cagctgatcgagaagaactggctcctg

SEQ ID NO: 39971 - RNA, 27 nt, synthetic construct
  misc_feature 1..27: note = Cleavage and polyadenylation specificity factor subunit 2 (95-103)
  source 1..27: mol_type = other RNA
cagctgctcgaccagatctggcgcacc

SEQ ID NO: 39972 - RNA, 27 nt, synthetic construct
  misc_feature 1..27: note = Eukaryotic translation initiation factor 4 gamma 1 (739-747)
  source 1..27: mol_type = other RNA
cagctgatgaagcaggtgacccagctc

SEQ ID NO: 39973 - RNA, 27 nt, synthetic construct
  misc_feature 1..27: note = Lanosterol 14-alpha demethylase (218-226)
  source 1..27: mol_type = other RNA
cagctgaacgagaaggtggcccagctc

SEQ ID NO: 39974 - RNA, 27 nt, synthetic construct
  misc_feature 1..27: note = Pleckstrin homology-like domain family B member 1 (775-783)
  source 1..27: mol_type = other RNA
cagctgcaggagaagctcgtggccctg

SEQ ID NO: 39975 - RNA, 27 nt, synthetic construct
  misc_feature 1..27: note = WD and tetratricopeptide repeats protein 1 (274-282)
  source 1..27: mol_type = other RNA
cagctgtacagcaaggccgtgcagcgc

SEQ ID NO: 39976 - RNA, 27 nt, synthetic construct
  misc_feature 1..27: note = Zinc finger protein ubi-d4 (70-78)
  source 1..27: mol_type = other RNA
cagctgtacagctaccccgcccgccgg

SEQ ID NO: 39977 - RNA, 27 nt, synthetic construct
  misc_feature 1..27: note = KxDL motif-containing protein 1 (65-73)
  source 1..27: mol_type = other RNA
cagatgagcgagcgcttcctgcaccac

SEQ ID NO: 39978 - RNA, 27 nt, synthetic construct
  misc_feature 1..27: note = Helicase with zinc finger domain 2 (1555-1563)
  source 1..27: mol_type = other RNA
cagcccgccccgcgcagccagcagctg

SEQ ID NO: 39979 - RNA, 27 nt, synthetic construct
  misc_feature 1..27: note = V-type proton ATPase subunit B, brain isoform (42-50)
  source 1..27: mol_type = other RNA
cagccccgcctgacctacaagaccgtg

SEQ ID NO: 39980 - RNA, 30 nt, synthetic construct
  misc_feature 1..30: note = Transmembrane protein 160 (91-100)
  source 1..30: mol_type = other RNA
cagagcgacatgggccgcgaggccgcctac

SEQ ID NO: 39981 - RNA, 27 nt, synthetic construct
  misc_feature 1..27: note = Synaptotagmin-like protein 2 (379-387)
  source 1..27: mol_type = other RNA
cagagcgaccccaagccgtcccagtac

SEQ ID NO: 39982 - RNA, 30 nt, synthetic construct
  misc_feature 1..30: note = Very long-chain specific acyl-CoA dehydrogenase, mitochondrial (600-609)
  source 1..30: mol_type = other RNA
cagagcgacccctggcagcaggagctgtac

SEQ ID NO: 39983 - RNA, 27 nt, synthetic construct
  misc_feature 1..27: note = E3 ubiquitin-protein ligase TRAF7 (293-301)
  source 1..27: mol_type = other RNA
cagaccgacgaccgcttccacgagatg

SEQ ID NO: 39984 - RNA, 27 nt, synthetic construct
  misc_feature 1..27: note = WD repeat and FYVE domain-containing protein 3 (796-804)
  source 1..27: mol_type = other RNA
cagaccgacgagcgcctggcccagtac

SEQ ID NO: 39985 - RNA, 30 nt, synthetic construct
  misc_feature 1..30: note = Tetratricopeptide repeat protein 19, mitochondrial (128-137)
  source 1..30: mol_type = other RNA
cagaccgacaacaagaaggccatcacctac

SEQ ID NO: 39986 - RNA, 33 nt, synthetic construct
  misc_feature 1..33: note = Nuclear pore complex protein Nup133 (878-888)
  source 1..33: mol_type = other RNA
cagaccgacaaccagagccgcctgcagcggtac

SEQ ID NO: 39987 - RNA, 27 nt, synthetic construct
  misc_feature 1..27: note = Signal recognition particle receptor subunit beta (32-40)
  source 1..27: mol_type = other RNA
cagaccgaccccaccctgctcagcgtg

SEQ ID NO: 39988 - RNA, 27 nt, synthetic construct
  misc_feature 1..27: note = Helicase with zinc finger domain 2 (612-620)
  source 1..27: mol_type = other RNA
cagaccgaccccgtgaccctgcagtac

SEQ ID NO: 39989 - RNA, 27 nt, synthetic construct
  misc_feature 1..27: note = Small G protein signaling modulator 3 (245-253)
  source 1..27: mol_type = other RNA
cagaccgaccagcgcgtgctgcggcac

SEQ ID NO: 39990 - RNA, 30 nt, synthetic construct
  misc_feature 1..30: note = SWI/SNF-related matrix-associated actin-dependent regulator of chromatin subfamily A member 5 (85-94)
  source 1..30: mol_type = other RNA
cagaccgaccgcgccaaccggttcgagtac

SEQ ID NO: 39991 - RNA, 30 nt, synthetic construct
  misc_feature 1..30: note = Sodium-dependent lysophosphatidylcholine symporter 1 (104-113)
  source 1..30: mol_type = other RNA
cagaccgagcgcgacagcgccaccgcctac

SEQ ID NO: 39992 - RNA, 27 nt, synthetic construct
  misc_feature 1..27: note = Ras GTPase-activating-like protein IQGAP1 (980-988)
  source 1..27: mol_type = other RNA
cagaccaaccccacctacctggccaag

SEQ ID NO: 39993 - RNA, 27 nt, synthetic construct
  misc_feature 1..27: note = Mitochondrial-processing peptidase subunit alpha (144-152)
  source 1..27: mol_type = other RNA
cagaccagccgcgacaccacgatgtac

SEQ ID NO: 39994 - RNA, 27 nt, synthetic construct
  misc_feature 1..27: note = DNA-directed RNA polymerase III subunit RPC5 (106-114)
  source 1..27: mol_type = other RNA
cagaccaccagcaacacgtcccgctac

SEQ ID NO: 39995 - RNA, 27 nt, synthetic construct
  misc_feature 1..27: note = Catenin beta-1 (78-86)
  source 1..27: mol_type = other RNA
caggtggccgacatcgacggccagtac

SEQ ID NO: 39996 - RNA, 27 nt, synthetic construct
  misc_feature 1..27: note = Regulator of microtubule dynamics protein 1 (253-261)
  source 1..27: mol_type = other RNA
caggtggaccccaacttctacagcaag

SEQ ID NO: 39997 - RNA, 30 nt, synthetic construct
  misc_feature 1..30: note = Cell division cycle protein 27 homolog (594-603)
  source 1..30: mol_type = other RNA
caggtggaccccaactacgcctacgcctac

SEQ ID NO: 39998 - RNA, 42 nt, synthetic construct
  misc_feature 1..42: note = Protein Tob2 (303-316)
  source 1..42: mol_type = other RNA
caggtgttcggcgggggcgccaacagcctgttcctcgagaag

SEQ ID NO: 39999 - RNA, 33 nt, synthetic construct
  misc_feature 1..33: note = UPF0488 protein C8orf33 (189-199)
  source 1..33: mol_type = other RNA
caggtgcagcccgtcgacggcgccacccgcaag

SEQ ID NO: 40000 - RNA, 27 nt, synthetic construct
  misc_feature 1..27: note = Dynamin-like 120 kDa protein, mitochondrial (858-866)
  source 1..27: mol_type = other RNA
caggtgtaccgccggcacttcctgaag

SEQ ID NO: 40001 - RNA, 27 nt, synthetic construct
  misc_feature 1..27: note = Zinc finger MIZ domain-containing protein 2 (283-291)
  source 1..27: mol_type = other RNA
cagtacgcccccagcaccgcccagttc

SEQ ID NO: 40002 - RNA, 27 nt, synthetic construct
  misc_feature 1..27: note = HEAT repeat-containing protein 6 (870-878)
  source 1..27: mol_type = other RNA
cagtacgcccgcatctggaacgccctg

SEQ ID NO: 40003 - RNA, 27 nt, synthetic construct
  misc_feature 1..27: note = Ubiquitin carboxyl-terminal hydrolase 48 (677-685)
  source 1..27: mol_type = other RNA
cagtacttccccaaggccccggagttc

SEQ ID NO: 40004 - RNA, 27 nt, synthetic construct
  misc_feature 1..27: note = DNA-directed RNA polymerase III subunit RPC2 (60-68)
  source 1..27: mol_type = other RNA
cagtacaaggacgtgcccatcacctac

SEQ ID NO: 40005 - RNA, 33 nt, synthetic construct
  misc_feature 1..33: note = Negative elongation factor A (142-152)
  source 1..33: mol_type = other RNA
cagtacctgaacaagaacgccctcaccaccctg

SEQ ID NO: 40006 - RNA, 27 nt, synthetic construct
  misc_feature 1..27: note = Laminin subunit alpha-4 (1299-1307)
  source 1..27: mol_type = other RNA
cagtacaacgacggcctgagccacttc

SEQ ID NO: 40007 - RNA, 27 nt, synthetic construct
  misc_feature 1..27: note = Protein spire homolog 1 (293-301)
  source 1..27: mol_type = other RNA
cagtacaaccccctgccgatcgagtac

SEQ ID NO: 40008 - RNA, 27 nt, synthetic construct
  misc_feature 1..27: note = Protein transport protein Sec61 subunit alpha isoform 1 (275-283)
  source 1..27: mol_type = other RNA
cagtacaacacctaccccatcaagctg

SEQ ID NO: 40009 - RNA, 30 nt, synthetic construct
  misc_feature 1..30: note = Protein transport protein Sec61 subunit alpha isoform 1 (275-284)
  source 1..30: mol_type = other RNA
cagtacaacacctaccccatcaagctgttc

SEQ ID NO: 40010 - RNA, 27 nt, synthetic construct
  misc_feature 1..27: note = Gem-associated protein 5 (1174-1182)
  source 1..27: mol_type = other RNA
cagtaccaggaggccttccagaagctg

SEQ ID NO: 40011 - RNA, 27 nt, synthetic construct
  misc_feature 1..27: note = E3 ubiquitin-protein ligase RNF213 (2046-2054)
  source 1..27: mol_type = other RNA
cagtaccagaaggtgcccgtcctgttc

SEQ ID NO: 40012 - RNA, 27 nt, synthetic construct
  misc_feature 1..27: note = Spectrin beta chain, non-erythrocytic 2 (18-26)
  source 1..27: mol_type = other RNA
cagtacagcgacatcaacaaccgctgg

SEQ ID NO: 40013 - RNA, 27 nt, synthetic construct
  misc_feature 1..27: note = Ubiquitin-like modifier-activating enzyme 1 (717-725)
  source 1..27: mol_type = other RNA
cagtacagcaacaacatccgccagctg

SEQ ID NO: 40014 - RNA, 27 nt, synthetic construct
  misc_feature 1..27: note = Phosphatidylinositol transfer protein beta isoform (56-64)
  source 1..27: mol_type = other RNA
cagtacacccacaagatctaccacctg

SEQ ID NO: 40015 - RNA, 27 nt, synthetic construct
  misc_feature 1..27: note = Laminin subunit gamma-1 (6-14)
  source 1..27: mol_type = other RNA
cgcgccgcccccgcgctgcggccgcgc

SEQ ID NO: 40016 - RNA, 27 nt, synthetic construct
  misc_feature 1..27: note = CCAAT/enhancer-binding protein beta (62-70)
  source 1..27: mol_type = other RNA
cgcgccatcgacttcagcccctacctg

SEQ ID NO: 40017 - RNA, 33 nt, synthetic construct
  misc_feature 1..33: note = X-ray repair cross-complementing protein 6 (586-596)
  source 1..33: mol_type = other RNA
cgcgcctacggcctgaagagcgggctcaagaag

SEQ ID NO: 40018 - RNA, 27 nt, synthetic construct
  misc_feature 1..27: note = Filamin-B (649-657)
  source 1..27: mol_type = other RNA
cgcgcctacggccccgggctggagaag

SEQ ID NO: 40019 - RNA, 27 nt, synthetic construct
  misc_feature 1..27: note = Ras and Rab interactor 2 (179-187)
  source 1..27: mol_type = other RNA
cgcgacgtgctgcccttcaccctcaag

SEQ ID NO: 40020 - RNA, 33 nt, synthetic construct
  misc_feature 1..33: note = Glutamine-tRNA ligase (34-44)
  source 1..33: mol_type = other RNA
cgcgaggccgccacccaggcgcagcagaccctg

SEQ ID NO: 40021 - RNA, 33 nt, synthetic construct
  misc_feature 1..33: note = Pre-mRNA-processing-splicing factor 8 (1275-1285)
  source 1..33: mol_type = other RNA
cgcgaggccgtggtcaacacccaggagctgctc

SEQ ID NO: 40022 - RNA, 27 nt, synthetic construct
  misc_feature 1..27: note = TFIIH basal transcription factor complex helicase XPB subunit (472-480)
  source 1..27: mol_type = other RNA
cgcgaggacgacaagatcgtggacctg

SEQ ID NO: 40023 - RNA, 33 nt, synthetic construct
  misc_feature 1..33: note = Nuclear pore complex protein Nup107 (142-152)
  source 1..33: mol_type = other RNA
cgcgaggacgaccccggcgaggccgccagcatg

SEQ ID NO: 40024 - RNA, 30 nt, synthetic construct
  misc_feature 1..30: note = Translationally-controlled tumor protein (152-161)
  source 1..30: mol_type = other RNA
cgcgaggacggcgtgaccccctacatgatc

SEQ ID NO: 40025 - RNA, 27 nt, synthetic construct
  misc_feature 1..27: note = Catenin beta-1 (457-465)
  source 1..27: mol_type = other RNA
cgcgaggacatcaccgagcccgccatc

SEQ ID NO: 40026 - RNA, 36 nt, synthetic construct
  misc_feature 1..36: note = Histone-lysine N-methyltransferase 2D (2065-2076)
  source 1..36: mol_type = other RNA
cgcgaggaccccggcaccgggatgggcagctccctg

SEQ ID NO: 40027 - RNA, 33 nt, synthetic construct
  misc_feature 1..33: note = Protein ELYS (1949-1959)
  source 1..33: mol_type = other RNA
cgcgaggacagcaacctggagtccagccagctc

SEQ ID NO: 40028 - RNA, 33 nt, synthetic construct
  misc_feature 1..33: note = DNA damage-inducible transcript 4 protein (39-49)
  source 1..33: mol_type = other RNA
cgcgaggagggcttcgaccggagcacctccctg

SEQ ID NO: 40029 - RNA, 30 nt, synthetic construct
  misc_feature 1..30: note = Protein THEMIS2 (210-219)
  source 1..30: mol_type = other RNA
cgcgaggagaaccccgagttcaccagcctg

SEQ ID NO: 40030 - RNA, 30 nt, synthetic construct
  misc_feature 1..30: note = Serine/threonine-protein phosphatase 2B catalytic subunit beta isoform (441-450)
  source 1..30: mol_type = other RNA
cgcgaggagagcgagtccgtgctgaccctc

SEQ ID NO: 40031 - RNA, 30 nt, synthetic construct
  misc_feature 1..30: note = Poly(rC)-binding protein 2 (40-49)
  source 1..30: mol_type = other RNA
cgcgaggagagcggcgcccggatcaacatc

SEQ ID NO: 40032 - RNA, 30 nt, synthetic construct
  misc_feature 1..30: note = Vigilin (608-617)
  source 1..30: mol_type = other RNA
cgcgaggagagcaacaccaagatcgacctg

SEQ ID NO: 40033 - RNA, 27 nt, synthetic construct
  misc_feature 1..27: note = Double-strand-break repair protein rad21 homolog (146-154)
  source 1..27: mol_type = other RNA
cgcgaggaggtgggcaacatcagcatc

SEQ ID NO: 40034 - RNA, 27 nt, synthetic construct
  misc_feature 1..27: note = U3 small nucleolar RNA-associated protein 14 homolog A (370-378)
  source 1..27: mol_type = other RNA
cgcgagttcgaggagcggcgcagcctg

SEQ ID NO: 40035 - RNA, 33 nt, synthetic construct
  misc_feature 1..33: note = ADP-ribose pyrophosphatase, mitochondrial (229-239)
  source 1..33: mol_type = other RNA
cgcgagttcggcgaggaggccctgaacagcctc

SEQ ID NO: 40036 - RNA, 27 nt, synthetic construct
  misc_feature 1..27: note = Procollagen-lysine,2-oxoglutarate 5-dioxygenase 2 (100-108)
  source 1..27: mol_type = other RNA
cgcgagttcatcgcccccgtgaccctg

SEQ ID NO: 40037 - RNA, 30 nt, synthetic construct
  misc_feature 1..30: note = Peptidyl-prolyl cis-trans isomerase FKBP14 (202-211)
  source 1..30: mol_type = other RNA
cgcgagttcacctacaagcacgacgagctg

SEQ ID NO: 40038 - RNA, 27 nt, synthetic construct
  misc_feature 1..27: note = Splicing factor 3B subunit 1 (390-398)
  source 1..27: mol_type = other RNA
cgcgagatcgacgagcggaaccgcccc

SEQ ID NO: 40039 - RNA, 30 nt, synthetic construct
  misc_feature 1..30: note = Nucleolin (546-555)
  source 1..30: mol_type = other RNA
cgcgagatcgagggccgggccatccgcctg

SEQ ID NO: 40040 - RNA, 27 nt, synthetic construct
  misc_feature 1..27: note = Cytoplasmic dynein 1 heavy chain 1 (254-262)
  source 1..27: mol_type = other RNA
cgcgagatccagaaggtgaccaagctg

SEQ ID NO: 40041 - RNA, 33 nt, synthetic construct
  misc_feature 1..33: note = Death-associated protein kinase 3 (69-79)
  source 1..33: mol_type = other RNA
cgcgagatccggcaccccaacatcatcaccctg

SEQ ID NO: 40042 - RNA, 30 nt, synthetic construct
  misc_feature 1..30: note = E3 ubiquitin-protein ligase BRE1B (440-449)
  source 1..30: mol_type = other RNA
cgcgagaaggacgacgccaacttcaagctg

SEQ ID NO: 40043 - RNA, 27 nt, synthetic construct
  misc_feature 1..27: note = Transcription factor AP-2 alpha (Activating enhancer binding protein 2 alpha), isoform CRA_c (266-274)
  source 1..27: mol_type = other RNA
cgcgagaagctggacaagatcggcctc

SEQ ID NO: 40044 - RNA, 27 nt, synthetic construct
  misc_feature 1..27: note = Putative pituitary tumor-transforming gene 3 protein (153-161)
  source 1..27: mol_type = other RNA
cgcgagctggagaagctcttccagctg

SEQ ID NO: 40045 - RNA, 30 nt, synthetic construct
  misc_feature 1..30: note = Guanine nucleotide-binding protein G(I)/G(S)/G(T) subunit beta-2 (137-146)
  source 1..30: mol_type = other RNA
cgcgagctgcccggccacaccgggtacctc

SEQ ID NO: 40046 - RNA, 30 nt, synthetic construct
  misc_feature 1..30: note = Glycosylphosphatidylinositol anchor attachment 1 protein (565-574)
  source 1..30: mol_type = other RNA
cgcgagctgcaggaggcccccctcagcctg

SEQ ID NO: 40047 - RNA, 30 nt, synthetic construct
  misc_feature 1..30: note = Ataxin-10 (119-128)
  source 1..30: mol_type = other RNA
cgcgagctgcgggtggagcaggagagcctc

SEQ ID NO: 40048 - RNA, 30 nt, synthetic construct
  misc_feature 1..30: note = TSC22 domain family protein 3 (77-86)
  source 1..30: mol_type = other RNA
cgcgagctggtggagaagaacagccagctc

SEQ ID NO: 40049 - RNA, 33 nt, synthetic construct
  misc_feature 1..33: note = Src substrate cortactin (59-69)
  source 1..33: mol_type = other RNA
cgcgagaacgtgttccaggagcaccagaccctg

SEQ ID NO: 40050 - RNA, 33 nt, synthetic construct
  misc_feature 1..33: note = WW domain-containing transcription regulator protein 1 (308-318)
  source 1..33: mol_type = other RNA
cgcgagcagagcaccgactccggcctggggctc

SEQ ID NO: 40051 - RNA, 27 nt, synthetic construct
  misc_feature 1..27: note = Endoplasmin (427-435)
  source 1..27: mol_type = other RNA
cgcgagaccctgcagcagcacaagctc

SEQ ID NO: 40052 - RNA, 30 nt, synthetic construct
  misc_feature 1..30: note = Rho guanine nucleotide exchange factor 2 (633-642)
  source 1..30: mol_type = other RNA
cgcgaggtggagggcctgaaggacctcctg

SEQ ID NO: 40053 - RNA, 27 nt, synthetic construct
  misc_feature 1..27: note = Bifunctional methylenetetrahydrofolate dehydrogenase/cyclohydrolase, mitochondrial (337-345)
  source 1..27: mol_type = other RNA
cgcgaggtgctgaagagcaaggagctc

SEQ ID NO: 40054 - RNA, 27 nt, synthetic construct
  misc_feature 1..27: note = Phosphoserine aminotransferase (319-327)
  source 1..27: mol_type = other RNA
cgcttcctggacaaggccctcgagctg

SEQ ID NO: 40055 - RNA, 30 nt, synthetic construct
  misc_feature 1..30: note = AP-5 complex subunit sigma-1 (172-181)
  source 1..30: mol_type = other RNA
cgcttcctgccccacggccagctcctgttc

SEQ ID NO: 40056 - RNA, 27 nt, synthetic construct
  misc_feature 1..27: note = Arf-GAP with coiled-coil, ANK repeat and PH domain-containing protein 2 (770-778)
  source 1..27: mol_type = other RNA
cgcttccagcaggacagccagaagttc

SEQ ID NO: 40057 - RNA, 27 nt, synthetic construct
  misc_feature 1..27: note = NADH dehydrogenase (ubiquinone) 1 beta subcomplex subunit 5, mitochondrial (61-69)
  source 1..27: mol_type = other RNA
cgcttctacgaccggcgcttcctgaag

SEQ ID NO: 40058 - RNA, 33 nt, synthetic construct
  misc_feature 1..33: note = Putative helicase MOV-10 (450-460)
  source 1..33: mol_type = other RNA
cgcggcctggacgacatcaaggacctcaaggtg

SEQ ID NO: 40059 - RNA, 33 nt, synthetic construct
  misc_feature 1..33: note = Protein EFR3 homolog A (165-175)
  source 1..33: mol_type = other RNA
cgcatcgccggcatccgggggatccagggcgtg

SEQ ID NO: 40060 - RNA, 33 nt, synthetic construct
  misc_feature 1..33: note = Nuclear cap-binding protein subunit 1 (194-204)
  source 1..33: mol_type = other RNA
cgcatcttcgccaacaccgagagctacctgaag

SEQ ID NO: 40061 - RNA, 27 nt, synthetic construct
  misc_feature 1..27: note = Transcription cofactor vestigial-like protein 4 (79-87)
  source 1..27: mol_type = other RNA
cgcatcttcaacccccacctgaacaag

SEQ ID NO: 40062 - RNA, 27 nt, synthetic construct
  misc_feature 1..27: note = Tubulin polyglutamylase TTLL7 (765-773)
  source 1..27: mol_type = other RNA
cgcatcttcaaccgggtgttcaaccgc

SEQ ID NO: 40063 - RNA, 30 nt, synthetic construct
  misc_feature 1..30: note = Centrosomal protein of 192 kDa (1349-1358)
  source 1..30: mol_type = other RNA
cgcatcttccccgacaagttcgtgctgaag

SEQ ID NO: 40064 - RNA, 27 nt, synthetic construct
  misc_feature 1..27: note = V-type proton ATPase subunit B, brain isoform (380-388)
  source 1..27: mol_type = other RNA
cgcatcttccccaaggagatgctgaag

SEQ ID NO: 40065 - RNA, 27 nt, synthetic construct
  misc_feature 1..27: note = COUP transcription factor 2 (293-301)
  source 1..27: mol_type = other RNA
cgcatcttccaggagcaggtggagaag

SEQ ID NO: 40066 - RNA, 27 nt, synthetic construct
  misc_feature 1..27: note = BolA-like protein 3 (99-107)
  source 1..27: mol_type = other RNA
cgcatcttcaccagcgtgcccaagcgg

SEQ ID NO: 40067 - RNA, 30 nt, synthetic construct
  misc_feature 1..30: note = Serine/threonine-protein kinase PLK2 (71-80)
  source 1..30: mol_type = other RNA
cgcatcatcgtggaccccaccaccggcaag

SEQ ID NO: 40068 - RNA, 27 nt, synthetic construct
  misc_feature 1..27: note = Exostosin-2 (166-174)
  source 1..27: mol_type = other RNA
cgcatcaaggagaccgcccaggccatg

SEQ ID NO: 40069 - RNA, 33 nt, synthetic construct
  misc_feature 1..33: note = Calcium-independent phospholipase A2-gamma (131-141)
  source 1..33: mol_type = other RNA
cgcatcaagagcaccctgaactccgtgagcaag

SEQ ID NO: 40070 - RNA, 33 nt, synthetic construct
  misc_feature 1..33: note = Inactive tyrosine-protein kinase 7 (630-640)
  source 1..33: mol_type = other RNA
cgcatcctggaccccaccaagctcggcccgcgg

SEQ ID NO: 40071 - RNA, 33 nt, synthetic construct
  misc_feature 1..33: note = MORC family CW-type zinc finger protein 3 (659-669)
  source 1..33: mol_type = other RNA
cgcatcctggagatgaacgacaagtacgtgaag

SEQ ID NO: 40072 - RNA, 27 nt, synthetic construct
  misc_feature 1..27: note = Eukaryotic translation initiation factor 3 subunit C-like protein (507-515)
  source 1..27: mol_type = other RNA
cgcatcctgcacacctactacaagttc

SEQ ID NO: 40073 - RNA, 30 nt, synthetic construct
  misc_feature 1..30: note = DNA polymerase alpha subunit B (497-506)
  source 1..30: mol_type = other RNA
cgcatcctgaagcacatcctcacccagcgg

SEQ ID NO: 40074 - RNA, 27 nt, synthetic construct
  misc_feature 1..27: note = Chromodomain-helicase-DNA-binding protein 4 (623-631)
  source 1..27: mol_type = other RNA
cgcatcctgaaccacagcgtggacaag

SEQ ID NO: 40075 - RNA, 27 nt, synthetic construct
  misc_feature 1..27: note = Catechol O-methyltransferase (58-66)
  source 1..27: mol_type = other RNA
cgcatcctgaaccacgtgctccagcac

SEQ ID NO: 40076 - RNA, 30 nt, synthetic construct
  misc_feature 1..30: note = Cleavage stimulation factor subunit 2 tau variant (180-189)
  source 1..30: mol_type = other RNA
cgcatcatggaccccgagatcgccctgaag

SEQ ID NO: 40077 - RNA, 27 nt, synthetic construct
  misc_feature 1..27: note = Rho GTPase-activating protein 7 (278-286)
  source 1..27: mol_type = other RNA
cgcatcaacgtgcccatggtccggaag

SEQ ID NO: 40078 - RNA, 33 nt, synthetic construct
  misc_feature 1..33: note = Pleckstrin homology domain-containing family A member 5 (177-187)
  source 1..33: mol_type = other RNA
cgcatccaggacgtgatggagggcctgagcaag

SEQ ID NO: 40079 - RNA, 27 nt, synthetic construct
  misc_feature 1..27: note = ATP-dependent RNA helicase DDX19B (454-462)
  source 1..27: mol_type = other RNA
cgcatccaggagcacttcaacaagaag

SEQ ID NO: 40080 - RNA, 27 nt, synthetic construct
  misc_feature 1..27: note Dolichyl-diphosphooligosaccharide-proteinosyltransferase subunit DAD1 (74-82)
  source 1..27: mol_type = other RNA
cgcatccagatcaacccccagaacaag

SEQ ID NO: 40081 - RNA, 27 nt, synthetic construct
  misc_feature 1..27: note = Dynamin-like 120 kDa protein, mitochondrial (500-508)
  source 1..27: mol_type = other RNA
cgcatccagcagatcatcgagggcaag

SEQ ID NO: 40082 - RNA, 33 nt, synthetic construct
  misc_feature 1..33: note = Coronin-2B (108-118)
  source 1..33: mol_type = other RNA
cgcatctgggagatccccgagggcgggctgaag

SEQ ID NO: 40083 - RNA, 36 nt, synthetic construct
  misc_feature 1..36: note = Coronin-2B (113-124)
  source 1..36: mol_type = other RNA
cgcatctgggagatccccgagggcgggctgaagcgg

SEQ ID NO: 40084 - RNA, 27 nt, synthetic construct
  misc_feature 1..27: note = E3 ubiquitin-protein ligase HECTD1 (480-488)
  source 1..27: mol_type = other RNA
cgcatctgggagcccacctacaccatc

SEQ ID NO: 40085 - RNA, 30 nt, synthetic construct
  misc_feature 1..30: note = Protein kinase C iota type (269-278)
  source 1..30: mol_type = other RNA
cgcatctacgccatgaaggtggtcaagaag

SEQ ID NO: 40086 - RNA, 30 nt, synthetic construct
  misc_feature 1..30: note = DNA dC-dU-editing enzyme APOBEC-3B (119-128)
  source 1..30: mol_type = other RNA
cgcatctacgactacgaccccctgtacaag

SEQ ID NO: 40087 - RNA, 36 nt, synthetic construct
  misc_feature 1..36: note = Fragile X mental retardation syndrome-related protein 1 (263-274)
  source 1..36: mol_type = other RNA
cgcatctacggcgagagcgccgacgccgtgaagaag

SEQ ID NO: 40088 - RNA, 33 nt, synthetic construct
  misc_feature 1..33: note = Arpin (3-13)
  source 1..33: mol_type = other RNA
cgcatctaccacgacggcgccctgcggaacaag

SEQ ID NO: 40089 - RNA, 27 nt, synthetic construct
  misc_feature 1..27: note = Long-chain-fatty-acid-CoA ligase 3 (389-397)
  source 1..27: mol_type = other RNA
cgcatctacaagaacgtgatgaacaag

SEQ ID NO: 40090 - RNA, 36 nt, synthetic construct
  misc_feature 1..36: note = Reticulon-1 (565-576)
  source 1..36: mol_type = other RNA
cgcatctacaagagcgtgctgcaggccgtccagaag

SEQ ID NO: 40091 - RNA, 27 nt, synthetic construct
  misc_feature 1..27: note = Protein MMS22-like (284-292)
  source 1..27: mol_type = other RNA
cgcatctacagcaagttccaccagaag

SEQ ID NO: 40092 - RNA, 33 nt, synthetic construct
  misc_feature 1..33: note = Cytoplasmic dynein 1 heavy chain 1 (1603-1613)
  source 1..33: mol_type = other RNA
cgcctggccgacctcctgggcaagatccagaag

SEQ ID NO: 40093 - RNA, 27 nt, synthetic construct
  misc_feature 1..27: note = NADH dehydrogenase (ubiquinone) 1 beta subcomplex subunit 4 (36-44)
  source 1..27: mol_type = other RNA
cgcctggccatccgggcccagctcaag

SEQ ID NO: 40094 - RNA, 27 nt, synthetic construct
  misc_feature 1..27: note = Vacuolar protein sorting-associated protein 51 homolog (159-167)
  source 1..27: mol_type = other RNA
cgcctggcccagcagctccggcagcgc

SEQ ID NO: 40095 - RNA, 27 nt, synthetic construct
  misc_feature 1..27: note = Replication initiator 1 (39-47)
  source 1..27: mol_type = other RNA
cgcctggccagcctccagtccgaggtg

SEQ ID NO: 40096 - RNA, 27 nt, synthetic construct
  misc_feature 1..27: note = HEAT repeat-containing protein 2 (751-759)
  source 1..27: mol_type = other RNA
cgcctggacgacgtgagcaacgacgtc

SEQ ID NO: 40097 - RNA, 27 nt, synthetic construct
  misc_feature 1..27: note = Arf-GAP with Rho-GAP domain, ANK repeat and PH domain-containing protein 1 (106-114)
  source 1..27: mol_type = other RNA
cgcctggacaccgaccacctccggtac

SEQ ID NO: 40098 - RNA, 30 nt, synthetic construct
  misc_feature 1..30: note = Centrosomal protein of 41 kDa (29-38)
  source 1..30: mol_type = other RNA
cgcctggacaccggcaacagcatgaccaag

SEQ ID NO: 40099 - RNA, 27 nt, synthetic construct
  misc_feature 1..27: note = Protein flightless-1 homolog (672-680)
  source 1..27: mol_type = other RNA
cgcctgttcgccgagaagatcaacaag

SEQ ID NO: 40100 - RNA, 27 nt, synthetic construct
  misc_feature 1..27: note = Elongator complex protein 2 (264-272)
  source 1..27: mol_type = other RNA
cgcctgttcgccccctggaagcggaag

SEQ ID NO: 40101 - RNA, 27 nt, synthetic construct
  misc_feature 1..27: note = NEDD8-conjugating enzyme Ubc12 (158-166)
  source 1..27: mol_type = other RNA
cgcctgttcgagcagaacgtgcagcgg

SEQ ID NO: 40102 - RNA, 27 nt, synthetic construct
  misc_feature 1..27: note = Synaptonemal complex protein SC65 (104-112)
  source 1..27: mol_type = other RNA
cgcctgttcggccgggtgctcgagcgc

SEQ ID NO: 40103 - RNA, 27 nt, synthetic construct
  misc_feature 1..27: note = Plectin (177-185)
  source 1..27: mol_type = other RNA
cgcctgttcaacgccatcatccaccgg

SEQ ID NO: 40104 - RNA, 30 nt, synthetic construct
  misc_feature 1..30: note = Transformation/transcription domain-associated protein (1453-1462)
  source 1..30: mol_type = other RNA
cgcctgttccccaacagcttcaacgacaag

SEQ ID NO: 40105 - RNA, 30 nt, synthetic construct
  misc_feature 1..30: note = Zinc finger protein ZXDC (460-469)
  source 1..30: mol_type = other RNA
cgcctgttcaccagcaagcactccatgaag

SEQ ID NO: 40106 - RNA, 27 nt, synthetic construct
  misc_feature 1..27: note = Insulin-degrading enzyme (683-691)
  source 1..27: mol_type = other RNA
cgcctgcacatcgaggccctcctgcac

SEQ ID NO: 40107 - RNA, 33 nt, synthetic construct
  misc_feature 1..33: note = Proteasome subunit alpha type-4 (20-30)
  source 1..33: mol_type = other RNA
cgcctgatcgcccagcggtacctcctgcagtac

SEQ ID NO: 40108 - RNA, 30 nt, synthetic construct
  misc_feature 1..30: note = Probable ATP-dependent RNA helicase DDX17 (304-313)
  source 1..30: mol_type = other RNA
cgcctgatcgacttcctcgagagcggcaag

SEQ ID NO: 40109 - RNA, 33 nt, synthetic construct
  misc_feature 1..33: note = General transcription factor 3C polypeptide 1 (377-387)
  source 1..33: mol_type = other RNA
cgcctgatcgagagcctcttcaccatccagaag

SEQ ID NO: 40110 - RNA, 36 nt, synthetic construct
  misc_feature 1..36: note = Protein S100-A13 (77-88)
  source 1..36: mol_type = other RNA
cgcctgatcggcgagctcgccaaggagatccggaag

SEQ ID NO: 40111 - RNA, 33 nt, synthetic construct
  misc_feature 1..33: note = ATP synthase subunit a (41-51)
  source 1..33: mol_type = other RNA
cgcctgatcaccacccagcagtggctcatcaag

SEQ ID NO: 40112 - RNA, 33 nt, synthetic construct
  misc_feature 1..33: note = Peroxisomal multifunctional enzyme type 2 (634-644)
  source 1..33: mol_type = other RNA
cgcctgaaggacatcggccccgaggtggtcaag

SEQ ID NO: 40113 - RNA, 27 nt, synthetic construct
  misc_feature 1..27: note = Cardiolipin synthase (CMP-forming) (235-243)
  source 1..27: mol_type = other RNA
cgcctgaagcccaccttcatcagcaag

SEQ ID NO: 40114 - RNA, 36 nt, synthetic construct
  misc_feature 1..36: note = Eukaryotic translation initiation factor 3 subunit A (340-351)
  source 1..36: mol_type = other RNA
cgcctgctcgacatggacggcatcatcgtggagaag

SEQ ID NO: 40115 - RNA, 27 nt, synthetic construct
  misc_feature 1..27: note = Oxidation resistance protein 1 (21-37)
  source 1..27: mol_type = other RNA
cgcctgctcgacagcgagatcaagctg

SEQ ID NO: 40116 - RNA, 30 nt, synthetic construct
  misc_feature 1..30: note = Mucosa-associated lymphoid tissue lymphoma translocation protein 1 (834-843)
  source 1..30: mol_type = other RNA
cgcctgctcgaggacaagaagatcaccgtg

SEQ ID NO: 40117 - RNA, 33 nt, synthetic construct
  misc_feature 1..33: note = Condensin-2 complex subunit D3 (225-235)
  source 1..33: mol_type = other RNA
cgcctgctccccaagttcagcctgaaggagaag

SEQ ID NO: 40118 - RNA, 30 nt, synthetic construct
  misc_feature 1..30: note = Uridine-cytidine kinase-like 1 (31-40)
  source 1..30: mol_type = other RNA
cgcctgctccccccggtgggcaccgggcgg

SEQ ID NO: 40119 - RNA, 30 nt, synthetic construct
  misc_feature 1..30: note = Lymphokine-activated killer T-cell-originated protein kinase (81-90)
  source 1..30: mol_type = other RNA
cgcctgatggacgaggccaagatcctcaag

SEQ ID NO: 40120 - RNA, 27 nt, synthetic construct
  misc_feature 1..27: note = GCN1 general control of amino-acid synthesis 1-like 1 (961-969)
  source 1..27: mol_type = other RNA
cgcctgatggagatctaccaggagaag

SEQ ID NO: 40121 - RNA, 27 nt, synthetic construct
  misc_feature 1..27: note = RILP-like protein 1 (200-208)
  source 1..27: mol_type = other RNA
cgcctgatgaagatcaaccacgacctc

SEQ ID NO: 40122 - RNA, 27 nt, synthetic construct
  misc_feature 1..27: note = Sperm-specific antigen 2 (294-302)
  source 1..27: mol_type = other RNA
cgcctgatgaagaccctcagcaagctg

SEQ ID NO: 40123 - RNA, 27 nt, synthetic construct
  misc_feature 1..27: note = Glyoxylate reductase/hydroxypyruvate reductase (5-13)
  source 1..27: mol_type = other RNA
cgcctgatgaaggtgttcgtcacccgg

SEQ ID NO: 40124 - RNA, 27 nt, synthetic construct
  misc_feature 1..27: note = Bombesin receptor-activated protein C6orf89 (119-127)
  source 1..27: mol_type = other RNA
cgcctgatgagcctccccatcgccaag

SEQ ID NO: 40125 - RNA, 30 nt, synthetic construct
  misc_feature 1..30: note = Fibronectin type-III domain-containing protein 3A (948-957)
  source 1..30: mol_type = other RNA
cgcctgaacgagagcacctcctacaagttc

SEQ ID NO: 40126 - RNA, 27 nt, synthetic construct
  misc_feature 1..27: note = DNA damage-binding protein 1 (1057-1065)
  source 1..27: mol_type = other RNA
cgcctgaacaaggtgatcaagagcgtc

SEQ ID NO: 40127 - RNA, 30 nt, synthetic construct
  misc_feature 1..30: note = Serine/threonine-protein phosphatase 2A 56 kDa regulatory subunit delta isoform (408-417)
  source 1..30: mol_type = other RNA
cgcctgaacccccagtacccgatgttccgg

SEQ ID NO: 40128 - RNA, 27 nt, synthetic construct
  misc_feature 1..27: note = Tuberin (712-720)
  source 1..27: mol_type = other RNA
cgcctgcccgagagcctccggtacaag

SEQ ID NO: 40129 - RNA, 27 nt, synthetic construct
  misc_feature 1..27: note = Poly (ADP-ribose) polymerase 10 (221-229)
  source 1..27: mol_type = other RNA
cgcctgcccggcccgctcgggaccgtg

SEQ ID NO: 40130 - RNA, 30 nt, synthetic construct
  misc_feature 1..30: note = Lipase maturation factor 1 (191-200)
  source 1..30: mol_type = other RNA
cgcctgccccagcacaccccgaccagccgg

SEQ ID NO: 40131 - RNA, 27 nt, synthetic construct
  misc_feature 1..27: note = ER membrane protein complex subunit 7 (133-141)
  source 1..27: mol_type = other RNA
cgcctgccctacccgctccagatgaag

SEQ ID NO: 40132 - RNA, 30 nt, synthetic construct
  misc_feature 1..30: note = Guanine nucleotide-binding protein G(s) subunit alpha isoforms short (255-264)
  source 1..30: mol_type = other RNA
cgcctgcaggaggccctcaacctgttcaag

SEQ ID NO: 40133 - RNA, 27 nt, synthetic construct
  misc_feature 1..27: note = Syntaxin-18 (265-273)
  source 1..27: mol_type = other RNA
cgcctgcaggagatcttcaccgagaag

SEQ ID NO: 40134 - RNA, 27 nt, synthetic construct
  misc_feature 1..27: note = Pyridoxal-dependent decarboxylase domain-containing protein 1 (365-373)
  source 1..27: mol_type = other RNA
cgcctgcaggagagcctcaagaaggtg

SEQ ID NO: 40135 - RNA, 30 nt, synthetic construct
  misc_feature 1..30: note = Serine/threonine-protein kinase SIK2 (468-477)
  source 1..30: mol_type = other RNA
cgcctgcagaagcccagcctcctgtccaag

SEQ ID NO: 40136 - RNA, 27 nt, synthetic construct
  misc_feature 1..27: note = ELAV-like protein 1 (85-93)
  source 1..27: mol_type = other RNA
cgcctgcagagcaagaccatcaaggtg

SEQ ID NO: 40137 - RNA, 27 nt, synthetic construct
  misc_feature 1..27: note = E3 ubiquitin-protein ligase UBR5 (21-29)
  source 1..27: mol_type = other RNA
cgcctgcgggaggtgagcgagaagctc

SEQ ID NO: 40138 - RNA, 27 nt, synthetic construct
  misc_feature 1..27: note = Pituitary tumor-transforming gene 1 protein-interacting protein (14-22)
  source 1..27: mol_type = other RNA
cgcctgcggctcggcggggccgccctg

SEQ ID NO: 40139 - RNA, 27 nt, synthetic construct
  misc_feature 1..27: note = Serine/arginine-rich splicing factor 6 (8-16)
  source 1..27: mol_type = other RNA
cgcctgagctacaacgtgcgggagaag

SEQ ID NO: 40140 - RNA, 30 nt, synthetic construct
  misc_feature 1..30: note = DNA mismatch repair protein Mlh1 (265-274)
  source 1..30: mol_type = other RNA
cgcctggtggagagcacctccctccggaag

SEQ ID NO: 40141 - RNA, 30 nt, synthetic construct
  misc_feature 1..30: note = E3 SUMO-protein ligase RanBP2 (170-179)
  source 1..30: mol_type = other RNA
cgcctggtggaggtctaccggagcaccaag

SEQ ID NO: 40142 - RNA, 27 nt, synthetic construct
  misc_feature 1..27: note = V-type proton ATPase subunit E 2 (44-52)
  source 1..27: mol_type = other RNA
cgcctggtgcagacccagcggctcaag

SEQ ID NO: 40143 - RNA, 27 nt, synthetic construct
  misc_feature 1..27: note = Sterol regulatory element-binding protein 2 (632-640)
  source 1..27: mol_type = other RNA
cgcctggtgcggtggctcctgaagaag

SEQ ID NO: 40144 - RNA, 27 nt, synthetic construct
  misc_feature 1..27: note = Protein disulfide-isomerase A3 (115-123)
  source 1..27: mol_type = other RNA
cgcctgtggcacatccagagcaagaag

SEQ ID NO: 40145 - RNA, 27 nt, synthetic construct
  misc_feature 1..27: note = Transducin beta-like protein 3 (102-110)
  source 1..27: mol_type = other RNA
cgcctgtggaaggccatccacaccgcc

SEQ ID NO: 40146 - RNA, 30 nt, synthetic construct
  misc_feature 1..30: note = GRAM domain-containing protein 1B (198-207)
  source 1..30: mol_type = other RNA
cgcctgtggcagaacgccctcctggagaag

SEQ ID NO: 40147 - RNA, 30 nt, synthetic construct
  misc_feature 1..30: note = Inositol 1,4,5-trisphosphate receptor type 3 (801-810)
  source 1..30: mol_type = other RNA
cgcctgtggaccgagatccccaccgccatc

SEQ ID NO: 40148 - RNA, 27 nt, synthetic construct
  misc_feature 1..27: note = Annexin A5 (89-97)
  source 1..27: mol_type = other RNA
cgcctgtacgacgcctacgagctcaag

SEQ ID NO: 40149 - RNA, 30 nt, synthetic construct
  misc_feature 1..30: note = DNA damage-binding protein 1 (134-143)
  source 1..30: mol_type = other RNA
cgcctgtacgacggcctcttcaaggtgatc

SEQ ID NO: 40150 - RNA, 27 nt, synthetic construct
  misc_feature 1..27: note = Nesprin-1 (318-326)
  source 1..27: mol_type = other RNA
cgcctgtacgacctccccgccaagcgg

SEQ ID NO: 40151 - RNA, 27 nt, synthetic construct
  misc_feature 1..27: note = Annexin A2 (273-281)
  source 1..27: mol_type = other RNA
cgcctgtacgacagcatgaagggcaag

SEQ ID NO: 40152 - RNA, 27 nt, synthetic construct
  misc_feature 1..27: note = DNA topoisomerase 3-alpha (407-415)
  source 1..27: mol_type = other RNA
cgcctgtacgagttcatcgtgcggcac

SEQ ID NO: 40153 - RNA, 27 nt, synthetic construct
  misc_feature 1..27: note = Glutamine-tRNA ligase (679-687)
  source 1..27: mol_type = other RNA
cgcctgtacgagcggctcttccagcac

SEQ ID NO: 40154 - RNA, 36 nt, synthetic construct
  misc_feature 1..36: note = Eukaryotic translation initiation factor 3 subunit A (172-183)
  source 1..36: mol_type = other RNA
cgcctgtaccacgacatcgcccagcaggccttcaag

SEQ ID NO: 40155 - RNA, 27 nt, synthetic construct
  misc_feature 1..27: note = GPI transamidase component PIG-T (503-511)
  source 1..27: mol_type = other RNA
cgcctgtacaccgagcccctcctggtg

SEQ ID NO: 40156 - RNA, 27 nt, synthetic construct
  misc_feature 1..27: note = 2-hydroxyacyl-CoA lyase 1 (135-143)
  source 1..27: mol_type = other RNA
cgcctgtacaccaagttcagcgcccgg

SEQ ID NO: 40157 - RNA, 24 nt, synthetic construct
  misc_feature 1..24: note = Uncharacterized protein (677-684)
  source 1..24: mol_type = other RNA
cgcctgtacgtgggccgggagaag

SEQ ID NO: 40158 - RNA, 27 nt, synthetic construct
  misc_feature 1..27: note = Protein sel-1 homolog 3 (282-290)
  source 1..27: mol_type = other RNA
cgcatggactaccccgtgttcaccgtc

SEQ ID NO: 40159 - RNA, 33 nt, synthetic construct
  misc_feature 1..33: note = Vimentin (13-23)
  source 1..33: mol_type = other RNA
cgcatgttcggcgggcccggcaccgccagccgg

SEQ ID NO: 40160 - RNA, 27 nt, synthetic construct
  misc_feature 1..27: note = Dynamin-1 (271-279)
  source 1..27: mol_type = other RNA
cgcatgggcaccccctacctgcagaag

SEQ ID NO: 40161 - RNA, 27 nt, synthetic construct
  misc_feature 1..27: note = Eukaryotic translation initiation factor 3 subunit C-like protein (709-717)
  source 1..27: mol_type = other RNA
cgcatgatcagcaagcagttccaccac

SEQ ID NO: 40162 - RNA, 30 nt, synthetic construct
  misc_feature 1..30: note = Protein FAM208B (229-238)
  source 1..30: mol_type = other RNA
cgcatgaaggaccccaccttcctgggcaag

SEQ ID NO: 40163 - RNA, 30 nt, synthetic construct
  misc_feature 1..30: note = UPF0585 protein C16orf13 (168-177)
  source 1..30: mol_type = other RNA
cgcatggtggacatgcccgccaacaacaag

SEQ ID NO: 40164 - RNA, 27 nt, synthetic construct
  misc_feature 1..27: note = 60S ribosomal protein L13a (117-125)
  source 1..27: mol_type = other RNA
cgcatggtggtccccgccgccctgaag

SEQ ID NO: 40165 - RNA, 27 nt, synthetic construct
  misc_feature 1..27: note = Cytoplasmic FMR1-interacting protein 1 (286-294)
  source 1..27: mol_type = other RNA
cgcatgtacctgacccccagcgagaag

SEQ ID NO: 40166 - RNA, 30 nt, synthetic construct
  misc_feature 1..30: note = Phosphatidate cytidylyltransferase 2 (307-316)
  source 1..30: mol_type = other RNA
cgcatgtaccccttccagatccacagcatc

SEQ ID NO: 40167 - RNA, 27 nt, synthetic construct
  misc_feature 1..27: note = RNA cytidine acetyltransferase (629-637)
  source 1..27: mol_type = other RNA
cgccccgccgagcggctggactacctc

SEQ ID NO: 40168 - RNA, 27 nt, synthetic construct
  misc_feature 1..27: note = Cell division cycle protein 23 homolog (423-431)
  source 1..27: mol_type = other RNA
cgccccaacgacagccggatgctggtg

SEQ ID NO: 40169 - RNA, 27 nt, synthetic construct
  misc_feature 1..27: note = Transgelin-2 (44-52)
  source 1..27: mol_type = other RNA
cgcccccagccgggccgggagaacttc

SEQ ID NO: 40170 - RNA, 30 nt, synthetic construct
  misc_feature 1..30: note = Myosin regulatory light polypeptide 9 (14-23)
  source 1..30: mol_type = other RNA
cgcccccagcgggccaccagcaacgtgttc

SEQ ID NO: 40171 - RNA, 27 nt, synthetic construct
  misc_feature 1..27: note = Pre-mRNA-splicing factor SYF1 (370-378)
  source 1..27: mol_type = other RNA
cgcccccgggagatcatcaacacctac

SEQ ID NO: 40172 - RNA, 30 nt, synthetic construct
  misc_feature 1..30: note = Trafficking protein particle complex subunit 4 (100-109)
  source 1..30: mol_type = other RNA
cgcccccggctgaccagcaacgagaagctc

SEQ ID NO: 40173 - RNA, 30 nt, synthetic construct
  misc_feature 1..30: note = Cytochrome c oxidase assembly factor 3 homolog, mitochondrial (39-48)
  source 1..30: mol_type = other RNA
cgccaggccgagctggcccagtggcagaag

SEQ ID NO: 40174 - RNA, 27 nt, synthetic construct
  misc_feature 1..27: note = Focal adhesion kinase 1 (476-484)
  source 1..27: mol_type = other RNA
cgccagttcgaccacccccacatcgtg

SEQ ID NO: 40175 - RNA, 33 nt, synthetic construct
  misc_feature 1..33: note = Acidic fibroblast growth factor intracellular-binding protein (136-146)
  source 1..33: mol_type = other RNA
cgccagttcgacaacttcaagcgggtgttcaag

SEQ ID NO: 40176 - RNA, 33 nt, synthetic construct
  misc_feature 1..33: note = MICOS complex subunit MIC19 (130-140)
  source 1..33: mol_type = other RNA
cgccagctggaggagaaggaccgggtgctcaag

SEQ ID NO: 40177 - RNA, 33 nt, synthetic construct
  misc_feature 1..33: note = 40S ribosomal protein S29 (44-54)
  source 1..33: mol_type = other RNA
cgccagtacgccaaggacatcggcttcatcaag

SEQ ID NO: 40178 - RNA, 30 nt, synthetic construct
  misc_feature 1..30: note = F-box only protein 33 (21-30)
  source 1..30: mol_type = other RNA
cgccagtacgacaagttcctgacccacttc

SEQ ID NO: 40179 - RNA, 27 nt, synthetic construct
  misc_feature 1..27: note = SH2B adapter protein 1 (560-568)
  source 1..27: mol_type = other RNA
cgccggggcgagtacgtgctgaccttc

SEQ ID NO: 40180 - RNA, 27 nt, synthetic construct
  misc_feature 1..27: note = Multivesicular body subunit 12A (198-206)
  source 1..27: mol_type = other RNA
cgccggaacgacagcatctacgaggcc

SEQ ID NO: 40181 - RNA, 27 nt, synthetic construct
  misc_feature 1..27: note = Chloride intracellular channel protein 1 (50-58)
  source 1..27: mol_type = other RNA
cgccggaccgagaccgtgcagaagctg

SEQ ID NO: 40182 - RNA, 27 nt, synthetic construct
  misc_feature 1..27: note = Eukaryotic translation initiation factor 3 subunit L (327-335)
  source 1..27: mol_type = other RNA
cgccggtaccaggacgccatccgcgtg

SEQ ID NO: 40183 - RNA, 27 nt, synthetic construct
  misc_feature 1..27: note = Breast cancer metastasis-suppressor 1-like protein (255-263)
  source 1..27: mol_type = other RNA
cgcagcgaggagggccggctgtactac

SEQ ID NO: 40184 - RNA, 33 nt, synthetic construct
  misc_feature 1..33: note = Putative protein N-methyltransferase FAM86B1 (27-37)
  source 1..33: mol_type = other RNA
cgcagcttcccctggcagtccctggaggccaag

SEQ ID NO: 40185 - RNA, 33 nt, synthetic construct
  misc_feature 1..33: note = Dual specificity protein kinase CLK1 (60-70)
  source 1..33: mol_type = other RNA
cgcagcatcaacgagaaggactaccactcccgg

SEQ ID NO: 40186 - RNA, 33 nt, synthetic construct
  misc_feature 1..33: note = Transmembrane protein 209 (277-287)
  source 1..33: mol_type = other RNA
cgcagcatgggcgactacgcccagaccctgaag

SEQ ID NO: 40187 - RNA, 27 nt, synthetic construct
  misc_feature 1..27: note = Annexin A11 (302-310)
  source 1..27: mol_type = other RNA
cgcagcaacgagcacatccgggagctg

SEQ ID NO: 40188 - RNA, 27 nt, synthetic construct
  misc_feature 1..27: note = Cullin-associated NEDD8-dissociated protein 1 (758-766)
  source 1..27: mol_type = other RNA
cgcagcaccgactccatccggctgctc

SEQ ID NO: 40189 - RNA, 27 nt, synthetic construct
  misc_feature 1..27: note = Non-structural maintenance of chromosomes element 4 homolog A (203-211)
  source 1..27: mol_type = other RNA
cgcaccgccgagaacaccttcaacaag

SEQ ID NO: 40190 - RNA, 33 nt, synthetic construct
  misc_feature 1..33: note = Nephrocystin-1 (181-191)
  source 1..33: mol_type = other RNA
cgcaccgacccccactggagcgccgtgcagaag

SEQ ID NO: 40191 - RNA, 30 nt, synthetic construct
  misc_feature 1..30: note = Arginine-glutamic acid dipeptide repeats protein (74-83)
  source 1..30: mol_type = other RNA
cgcaccgacaccggcgagatcacgagctac

SEQ ID NO: 40192 - RNA, 33 nt, synthetic construct
  misc_feature 1..33: note = Ectonucleoside triphosphate diphosphohydrolase 6 (319-329)
  source 1..33: mol_type = other RNA
cgcaccgaggaggtgaagcacgtcgacttctac

SEQ ID NO: 40193 - RNA, 36 nt, synthetic construct
  misc_feature 1..36: note = Protein LSM12 homolog (95-106)
  source 1..36: mol_type = other RNA
cgcaccgagaaggaggagaagctgagccaggcctac

SEQ ID NO: 40194 - RNA, 30 nt, synthetic construct
  misc_feature 1..30: note = Tubulin-tyrosine ligase-like protein 12 (394-403)
  source 1..30: mol_type = other RNA
cgcaccgagctgccccagttcgtgagctac

SEQ ID NO: 40195 - RNA, 27 nt, synthetic construct
  misc_feature 1..27: note = A-kinase anchor protein 13 (994-1002)
  source 1..27: mol_type = other RNA
cgcaccttcagctacatcaagaacaag

SEQ ID NO: 40196 - RNA, 36 nt, synthetic construct
  misc_feature 1..36: note = Biogenesis of lysosome-related organelles complex 1 subunit 1 (106-117)
  source 1..36: mol_type = other RNA
cgcaccatcgccaccgccctggagtacgtgtacaag

SEQ ID NO: 40197 - RNA, 27 nt, synthetic construct
  misc_feature 1..27: note = WASH complex subunit 7 (330-338)
  source 1..27: mol_type = other RNA
cgcaccatcgacaagaagttctacaag

SEQ ID NO: 40198 - RNA, 27 nt, synthetic construct
  misc_feature 1..27: note = Leucine-rich repeat-containing protein 57 (41-49)
  source 1..27: mol_type = other RNA
cgcaccatcgacctgagcaacaacaag

SEQ ID NO: 40199 - RNA, 36 nt, synthetic construct
  misc_feature 1..36: note = DNA damage-binding protein 2 (181-192)
  source 1..36: mol_type = other RNA
cgcaccatcgacgtgttcgacggcaacagcgggaag

SEQ ID NO: 40200 - RNA, 33 nt, synthetic construct
  misc_feature 1..33: note = F-box only protein 25 (19-29)
  source 1..33: mol_type = other RNA
cgcaccatcctggagatgacccagatcctcaag

SEQ ID NO: 40201 - RNA, 33 nt, synthetic construct
  misc_feature 1..33: note = DDB1- and CUL4-associated factor 4 (390-400)
  source 1..33: mol_type = other RNA
cgcaccatccccagcccgtaccccgcctccaag

SEQ ID NO: 40202 - RNA, 27 nt, synthetic construct
  misc_feature 1..27: note = Protein CEBPZOS (3-11)
  source 1..27: mol_type = other RNA
cgcaccctggagcccctcgccaagaag

SEQ ID NO: 40203 - RNA, 36 nt, synthetic construct
  misc_feature 1..36: note = Solute carrier family 22 member 18 (377-388)
  source 1..36: mol_type = other RNA
cgcaccctgggccccaccgtggggggcctcctgtac

SEQ ID NO: 40204 - RNA, 27 nt, synthetic construct
  misc_feature 1..27: note = Coatomer subunit gamma-2 (309-317)
  source 1..27: mol_type = other RNA
cgcaccctgaacaaggtggccatgaag

SEQ ID NO: 40205 - RNA, 36 nt, synthetic construct
  misc_feature 1..36: note = Nuclear factor 1 C-type (82-93)
  source 1..36: mol_type = other RNA
cgcaccctgcccagcacctccagctccggcagcaag

SEQ ID NO: 40206 - RNA, 27 nt, synthetic construct
  misc_feature 1..27: note = Pinin (6-14)
  source 1..27: mol_type = other RNA
cgcaccctgcaggagcagctcgagaag

SEQ ID NO: 40207 - RNA, 33 nt, synthetic construct
  misc_feature 1..33: note = Ornithine decarboxylase antizyme 1 (32-42)
  source 1..33: mol_type = other RNA
cgcaccatgcccctgctcagcctgcactcccgg

SEQ ID NO: 40208 - RNA, 27 nt, synthetic construct
  misc_feature 1..27: note = 2,4-dienoyl-CoA reductase, mitochondrial (33-41)
  source 1..27: mol_type = other RNA
cgcaccaacttcttcagcaactggaag

SEQ ID NO: 40209 - RNA, 27 nt, synthetic construct
  misc_feature 1..27: note = Endoplasmic reticulum-Golgi intermediate compartment protein 3 (297-305)
  source 1..27: mol_type = other RNA
cgcaccaaccagttcagcgtgacccgg

SEQ ID NO: 40210 - RNA, 27 nt, synthetic construct
  misc_feature 1..27: note = RNA-binding protein 26 (515-523)
  source 1..27: mol_type = other RNA
cgcaccaacagccccggcttccagaag

SEQ ID NO: 40211 - RNA, 30 nt, synthetic construct
  misc_feature 1..30: note = Breast cancer type 2 susceptibility protein (2034-2043)
  source 1..30: mol_type = other RNA
cgcacccccgagcacctgatcagccagaag

SEQ ID NO: 40212 - RNA, 27 nt, synthetic construct
  misc_feature 1..27: note = Short transient receptor potential channel 4-associated protein (364-372)
  source 1..27: mol_type = other RNA
cgcacccagctgccccagagcatgaag

SEQ ID NO: 40213 - RNA, 33 nt, synthetic construct
  misc_feature 1..33: note = Signal recognition particle 14 kDa protein (21-31)
  source 1..33: mol_type = other RNA
cgcaccagcggctccgtgtacatcaccctgaag

SEQ ID NO: 40214 - RNA, 27 nt, synthetic construct
  misc_feature 1..27: note = Histone-lysine N-methyltransferase 2A (1655-1663)
  source 1..27: mol_type = other RNA
cgcaccaccagccacctgctccggtac

SEQ ID NO: 40215 - RNA, 30 nt, synthetic construct
  misc_feature 1..30: note = Diphosphoinositol polyphosphate phosphohydrolase 3-alpha (9-18)
  source 1..30: mol_type = other RNA
cgcacctacgaccccgagggcttcaagaag

SEQ ID NO: 40216 - RNA, 33 nt, synthetic construct
  misc_feature 1..33: note = Transcription factor p65 (287-297)
  source 1..33: mol_type = other RNA
cgcacctacgagaccttcaagagcatcatgaag

SEQ ID NO: 40217 - RNA, 30 nt, synthetic construct
  misc_feature 1..30: note = Ras and Rab interactor 1 (442-451)
  source 1..30: mol_type = other RNA
cgcacctacagcccctccgcccaggtgaag

SEQ ID NO: 40218 - RNA, 33 nt, synthetic construct
  misc_feature 1..33: note = Ras and Rab interactor 1 (442-452)
  source 1..33: mol_type = other RNA
cgcacctacagcccctccgcccaggtgaagcgg

SEQ ID NO: 40219 - RNA, 33 nt, synthetic construct
  misc_feature 1..33: note = Acyl-CoA dehydrogenase family member 10 (557-567)
  source 1..33: mol_type = other RNA
cgcgtggccgccatcctgcagggcgtctacaag

SEQ ID NO: 40220 - RNA, 33 nt, synthetic construct
  misc_feature 1..33: note = Cytochrome c oxidase subunit 7A-related protein, mitochondrial (26-36)
  source 1..33: mol_type = other RNA
cgcgtggcccccggccagctggggcacgagaag

SEQ ID NO: 40221 - RNA, 27 nt, synthetic construct
  misc_feature 1..27: note = E3 ubiquitin-protein ligase TRIP12 (1581-1589)
  source 1..27: mol_type = other RNA
cgcgtggccccccggctggaccgcaag

SEQ ID NO: 40222 - RNA, 33 nt, synthetic construct
  misc_feature 1..33: note = Coiled-coil domain-containing protein 115 (34-44)
  source 1..33: mol_type = other RNA
cgcgtggaggagggctggctgagcctcgccaag

SEQ ID NO: 40223 - RNA, 27 nt, synthetic construct
  misc_feature 1..27: note = Serine/threonine-protein kinase B-raf (158-166)
  source 1..27: mol_type = other RNA
cgcgtgttcctgcccaacaagcagcgg

SEQ ID NO: 40224 - RNA, 33 nt, synthetic construct
  misc_feature 1..33: note = Coatomer subunit gamma-1 (32-42)
  source 1..33: mol_type = other RNA
cgcgtgttcaacgagacccccatcaacccgcgg

SEQ ID NO: 40225 - RNA, 27 nt, synthetic construct
  misc_feature 1..27: note = Arf-GAP with GTPase, ANK repeat and PH domain-containing protein 3 (240-248)
  source 1..27: mol_type = other RNA
cgcgtgttccaggacgtcgcccagaag

SEQ ID NO: 40226 - RNA, 30 nt, synthetic construct
  misc_feature 1..30: note = 28S ribosomal protein S15, mitochondrial (238-247)
  source 1..30: mol_type = other RNA
cgcgtgttccaggagacccagaagctgaag

SEQ ID NO: 40227 - RNA, 33 nt, synthetic construct
  misc_feature 1..33: note = 28S ribosomal protein S15, mitochondrial (238-248)
  source 1..33: mol_type = other RNA
cgcgtgttccaggagacccagaagctgaagaag

SEQ ID NO: 40228 - RNA, 27 nt, synthetic construct
  misc_feature 1..27: note = EH domain-containing protein 2 (305-313)
  source 1..27: mol_type = other RNA
cgcgtgcacgcctacatcatcagctac

SEQ ID NO: 40229 - RNA, 30 nt, synthetic construct
  misc_feature 1..30: note = L-lactate dehydrogenase A chain (269-278)
  source 1..30: mol_type = other RNA
cgcgtgcaccccgtcagcaccatgatcaag

SEQ ID NO: 40230 - RNA, 30 nt, synthetic construct
  misc_feature 1..30: note = E3 ubiquitin-protein ligase NEDD4 (24-33)
  source 1..30: mol_type = other RNA
cgcgtgatcgccggcatcgggctggccaag

SEQ ID NO: 40231 - RNA, 27 nt, synthetic construct
  misc_feature 1..27: note = 60S ribosomal protein L3 (156-164)
  source 1..27: mol_type = other RNA
cgcgtgatcgcccacacccagatgcgg

SEQ ID NO: 40232 - RNA, 27 nt, synthetic construct
  misc_feature 1..27: note = Lon protease homolog 2, peroxisomal (241-249)
  source 1..27: mol_type = other RNA
cgcgtgatcgccatccggcccatccgc

SEQ ID NO: 40233 - RNA, 27 nt, synthetic construct
  misc_feature 1..27: note = Ran GTPase-activating protein 1 (67-75)
  source 1..27: mol_type = other RNA
cgcgtgatcgccaaggccctggagaag

SEQ ID NO: 40234 - RNA, 30 nt, synthetic construct
  misc_feature 1..30: note = SAFB-like transcription modulator (26-35)
  source 1..30: mol_type = other RNA
cgcgtgatcgacctgaagagcgagctcaag

SEQ ID NO: 40235 - RNA, 33 nt, synthetic construct
  misc_feature 1..33: note = Histone-binding protein RBBP7 (58-68)
  source 1..33: mol_type = other RNA
cgcgtgatcaacgaggagtacaagatctggaag

SEQ ID NO: 40236 - RNA, 27 nt, synthetic construct
  misc_feature 1..27: note = Pumilio homolog 2 (311-319)
  source 1..27: mol_type = other RNA
cgcgtgatccagcggatcctggagcac

SEQ ID NO: 40237 - RNA, 33 nt, synthetic construct
  misc_feature 1..33: note = 60S ribosomal protein L13 (167-177)
  source 1..33: mol_type = other RNA
cgcgtgatcaccgaggaggagaagaacttcaag

SEQ ID NO: 40238 - RNA, 36 nt, synthetic construct
  misc_feature 1..36: note = Cullin-4A (273-284)
  source 1..36: mol_type = other RNA
cgcgtgatcacctacctggaccacagcacccagaag

SEQ ID NO: 40239 - RNA, 30 nt, synthetic construct
  misc_feature 1..30: note = COX assembly mitochondrial protein 2 homolog (63-72)
  source 1..30: mol_type = other RNA
cgcgtgatcgtcacccacggcagcctgaag

SEQ ID NO: 40240 - RNA, 36 nt, synthetic construct
  misc_feature 1..36: note = Guanine nucleotide-binding protein G(I)/G(S)/G(O) subunit gamma-5 (25-36)
  source 1..36: mol_type = other RNA
cgcgtgaaggtcagccaggccgccgcggacctgaag

SEQ ID NO: 40241 - RNA, 33 nt, synthetic construct
  misc_feature 1..33: note = Monofunctional C1-tetrahydrofolate synthase, mitochondrial (497-507)
  source 1..33: mol_type = other RNA
cgcgtgctggacaccaacgaccggttcctccgc

SEQ ID NO: 40242 - RNA, 27 nt, synthetic construct
  misc_feature 1..27: note = 3-hydroxybutyrate dehydrogenase type 2 (55-63)
  source 1..27: mol_type = other RNA
cgcgtgctggacgtcaccaagaagaag

SEQ ID NO: 40243 - RNA, 30 nt, synthetic construct
  misc_feature 1..30: note = Cysteine-rich with EGF-like domain protein 1 (411-420)
  source 1..30: mol_type = other RNA
cgcgtgctggagggcttcatcaaggggcgg

SEQ ID NO: 40244 - RNA, 36 nt, synthetic construct
  misc_feature 1..36: note = Serine hydroxymethyltransferase, mitochondrial (374-385)
  source 1..36: mol_type = other RNA
cgcgtgctggagctcgtcagcatcaccgccaacaag

SEQ ID NO: 40245 - RNA, 36 nt, synthetic construct
  misc_feature 1..36: note = Lon protease homolog 2, peroxisomal (308-319)
  source 1..36: mol_type = other RNA
cgcgtgctggagtacctcgccgtccggcagctgaag

SEQ ID NO: 40246 - RNA, 27 nt, synthetic construct
  misc_feature 1..27: note = Focadhesin (1784-1792)
  source 1..27: mol_type = other RNA
cgcgtgctgcccgagttcaagaagaag

SEQ ID NO: 40247 - RNA, 33 nt, synthetic construct
  misc_feature 1..33: note = Zinc finger MYM-type protein 1 (867-877)
  source 1..33: mol_type = other RNA
cgcgtgctgagcgtcaccggcatcctctccaag

SEQ ID NO: 40248 - RNA, 27 nt, synthetic construct
  misc_feature 1..27: note = Exostosin-like 2 (12-20)
  source 1..27: mol_type = other RNA
cgcgtgatgggcatccgggtcctgcgc

SEQ ID NO: 40249 - RNA, 33 nt, synthetic construct
  misc_feature 1..33: note = Inner centromere protein (907-917)
  source 1..33: mol_type = other RNA
cgcgtgcccagctccctggcctacagcctcaag

SEQ ID NO: 40250 - RNA, 30 nt, synthetic construct
  misc_feature 1..30: note = DNA topoisomerase I, mitochondrial (376-385)
  source 1..30: mol_type = other RNA
cgcgtgcccgtcgagaagccggtgtacaag

SEQ ID NO: 40251 - RNA, 27 nt, synthetic construct
  misc_feature 1..27: note = 6-phosphofructo-2-kinase/fructose-2,6-bisphosphatase 3 (43-51)
  source 1..27: mol_type = other RNA
cgcgtgcaggaccacatccagagccgg

SEQ ID NO: 40252 - RNA, 30 nt, synthetic construct
  misc_feature 1..30: note = Melanoma inhibitory activity protein 3 (1184-1193)
  source 1..30: mol_type = other RNA
cgcgtgcaggaggagaacgcccggctgaag

SEQ ID NO: 40253 - RNA, 27 nt, synthetic construct
  misc_feature 1..27: note = DNA replication licensing factor MCM3 (234-242)
  source 1..27: mol_type = other RNA
cgcgtgcaggtcgtgggcacctaccgg

SEQ ID NO: 40254 - RNA, 42 nt, synthetic construct
  misc_feature 1..42: note = LysM and putative peptidoglycan-binding domain-containing protein 2 (74-87)
  source 1..42: mol_type = other RNA
cgcgtgcgggccggcgacaccctgcaggggatcgccctcaag

SEQ ID NO: 40255 - RNA, 33 nt, synthetic construct
  misc_feature 1..33: note = Galectin-1 (11-21)
  source 1..33: mol_type = other RNA
cgcgtgcggggcgaggtcgcccccgacgccaag

SEQ ID NO: 40256 - RNA, 27 nt, synthetic construct
  misc_feature 1..27: note = Protein phosphatase methylesterase 1 (228-236)
  source 1..27: mol_type = other RNA
cgcgtgagcatggtcggccaggtgaag

SEQ ID NO: 40257 - RNA, 30 nt, synthetic construct
  misc_feature 1..30: note = SLAIN motif-containing protein 2 (375-384)
  source 1..30: mol_type = other RNA
cgcgtgagcccccagccgatgatctcccgg

SEQ ID NO: 40258 - RNA, 27 nt, synthetic construct
  misc_feature 1..27: note = RNA-binding protein Raly (133-141)
  source 1..27: mol_type = other RNA
cgcgtgaccgtccccctggtgcggcgc

SEQ ID NO: 40259 - RNA, 27 nt, synthetic construct
  misc_feature 1..27: note = 5'-AMP-activated protein kinase subunit gamma-1 (236-244)
  source 1..27: mol_type = other RNA
cgcgtggtcgacatctacagcaagttc

SEQ ID NO: 40260 - RNA, 27 nt, synthetic construct
  misc_feature 1..27: note = Clathrin heavy chain 1 (903-911)
  source 1..27: mol_type = other RNA
cgcgtggtcggcaagtactgcgagaag

SEQ ID NO: 40261 - RNA, 30 nt, synthetic construct
  misc_feature 1..30: note = Coatomer subunit alpha (160-169)
  source 1..30: mol_type = other RNA
cgcgtgtgggacatcagcggcctgcggaag

SEQ ID NO: 40262 - RNA, 27 nt, synthetic construct
  misc_feature 1..27: note = SWI/SNF complex subunit SMARCC1 (56-64)
  source 1..27: mol_type = other RNA
cgcgtgtggctgggcaagcactacaag

SEQ ID NO: 40263 - RNA, 33 nt, synthetic construct
  misc_feature 1..33: note = Charged multivesicular body protein 1a (46-56)
  source 1..33: mol_type = other RNA
cgcgtgtacgccgagaacgccatccggaagaag

SEQ ID NO: 40264 - RNA, 30 nt, synthetic construct
  misc_feature 1..30: note = WD repeat-containing protein 74 (208-217)
  source 1..30: mol_type = other RNA
cgcgtgtacgaccccgccagcccgcagcgg

SEQ ID NO: 40265 - RNA, 30 nt, synthetic construct
  misc_feature 1..30: note = Protein Churchill (86-95)
  source 1..30: mol_type = other RNA
cgcgtgtaccacgccgtcagcgtgatgcgg

SEQ ID NO: 40266 - RNA, 27 nt, synthetic construct
  misc_feature 1..27: note = Cytochrome c oxidase assembly protein COX14 (33-41)
  source 1..27: mol_type = other RNA
cgcgtgtaccactacttccagtggcgg

SEQ ID NO: 40267 - RNA, 33 nt, synthetic construct
  misc_feature 1..33: note = Uncharacterized protein KIAA1522 (239-249)
  source 1..33: mol_type = other RNA
cgcgtgtaccgggacgacaccttcgtcggccgc

SEQ ID NO: 40268 - RNA, 27 nt, synthetic construct
  misc_feature 1..27: note = Poly(U)-binding-splicing factor PUF60 (112-120)
  source 1..27: mol_type = other RNA
cgcgtgtacgtcggcagcatctactac

SEQ ID NO: 40269 - RNA, 27 nt, synthetic construct
  misc_feature 1..27: note = Adipocyte plasma membrane-associated protein (296-304)
  source 1..27: mol_type = other RNA
cgcgtgtacgtcagcggcctgatgaag

SEQ ID NO: 40270 - RNA, 33 nt, synthetic construct
  misc_feature 1..33: note = Histone-lysine N-methyltransferase 2A (2053-2063)
  source 1..33: mol_type = other RNA
cgcgtgtactggagcaccaccgacgcccggaag

SEQ ID NO: 40271 - RNA, 33 nt, synthetic construct
  misc_feature 1..33: note = 60S ribosome subunit biogenesis protein NIP7 homolog (43-53)
  source 1..33: mol_type = other RNA
cgcgtgtactacgtcagcgagaagatcatgaag

SEQ ID NO: 40272 - RNA, 27 nt, synthetic construct
  misc_feature 1..27: note = Kinesin-like protein KIF2C (467-475)
  source 1..27: mol_type = other RNA
cgctacgccgaccgggtgaaggagctg

SEQ ID NO: 40273 - RNA, 30 nt, synthetic construct
  misc_feature 1..30: note = Protein-cysteine N-palmitoyltransferase HHAT (337-346)
  source 1..30: mol_type = other RNA
cgctacttcgacgtgggcctgcacaacttc

SEQ ID NO: 40274 - RNA, 27 nt, synthetic construct
  misc_feature 1..27: note = von Willebrand factor A domain-containing protein 8 (1836-1844)
  source 1..27: mol_type = other RNA
cgctacggcatccaccccgccaagttc

SEQ ID NO: 40275 - RNA, 27 nt, synthetic construct
  misc_feature 1..27: note = Serine/threonine-protein kinase PLK2 (271-279)
  source 1..27: mol_type = other RNA
cgctacatcgacacccacaaccgggtg

SEQ ID NO: 40276 - RNA, 27 nt, synthetic construct
  misc_feature 1..27: note = Deoxyguanosine kinase, mitochondrial (148-156)
  source 1..27: mol_type = other RNA
cgctacatcttcgccaagaacctgttc

SEQ ID NO: 40277 - RNA, 27 nt, synthetic construct
  misc_feature 1..27: note = Rho GTPase-activating protein 35 (208-216)
  source 1..27: mol_type = other RNA
cgctacatccgggacgcccacaccttc

SEQ ID NO: 40278 - RNA, 27 nt, synthetic construct
  misc_feature 1..27: note = Structural maintenance of chromosomes protein 5 (245-253)
  source 1..27: mol_type = other RNA
cgctacaagcaggacgtggagcggttc

SEQ ID NO: 40279 - RNA, 33 nt, synthetic construct
  misc_feature 1..33: note = Tumor suppressor candidate 3 (18-28)
  source 1..33: mol_type = other RNA
cgctacctgcccaccggcagcttcccgttcctc

SEQ ID NO: 40280 - RNA, 27 nt, synthetic construct
  misc_feature 1..27: note = Potassium voltage-gated channel subfamily G member 1 (168-176)
  source 1..27: mol_type = other RNA
cgctacctgcagaagatcgaggagttc

SEQ ID NO: 40281 - RNA, 27 nt, synthetic construct
  misc_feature 1..27: note = Cell division cycle protein 16 homolog (320-328)
  source 1..27: mol_type = other RNA
cgctacctgagcaaggccaccaccctc

SEQ ID NO: 40282 - RNA, 27 nt, synthetic construct
  misc_feature 1..27: note = Histone-binding protein RBBP7 (130-138)
  source 1..27: mol_type = other RNA
cgctacatgccccagaacccgcacatc

SEQ ID NO: 40283 - RNA, 27 nt, synthetic construct
  misc_feature 1..27: note = Kelch-like protein 24 (592-600)
  source 1..27: mol_type = other RNA
cgctacaacgagaagtgcttcaagctg

SEQ ID NO: 40284 - RNA, 27 nt, synthetic construct
  misc_feature 1..27: note = Kelch-like protein 20 (478-486)
  source 1..27: mol_type = other RNA
cgctacaacccccggaccaaccagtgg

SEQ ID NO: 40285 - RNA, 27 nt, synthetic construct
  misc_feature 1..27: note = Thyroid transcription factor 1-associated protein 26 (88-96)
  source 1..27: mol_type = other RNA
cgctaccccgacaacctgaagcacctc

SEQ ID NO: 40286 - RNA, 30 nt, synthetic construct
  misc_feature 1..30: note = Thyroid transcription factor 1-associated protein 26 (88-97)
  source 1..30: mol_type = other RNA
cgctaccccgacaacctgaagcacctctac

SEQ ID NO: 40287 - RNA, 27 nt, synthetic construct
  misc_feature 1..27: note = Serine/threonine-protein phosphatase 4 catalytic subunit (103-111)
  source 1..27: mol_type = other RNA
cgctaccccgaccggatcaccctgatc

SEQ ID NO: 40288 - RNA, 27 nt, synthetic construct
  misc_feature 1..27: note = Lysophosphatidylcholine acyltransferase 1 (98-106)
  source 1..27: mol_type = other RNA
cgctaccccaacaagctggacaccatc

SEQ ID NO: 40289 - RNA, 30 nt, synthetic construct
  misc_feature 1..30: note = CCR4-NOT transcription complex subunit 1 (438-447)
  source 1..30: mol_type = other RNA
cgctaccccaacagccacacccactacttc

SEQ ID NO: 40290 - RNA, 27 nt, synthetic construct
  misc_feature 1..27: note = Uncharacterized protein C1orf43 (178-186)
  source 1..27: mol_type = other RNA
cgctaccaggaggccctgagcgagctc

SEQ ID NO: 40291 - RNA, 27 nt, synthetic construct
  misc_feature 1..27: note = YTH domain-containing protein 1 (550-558)
  source 1..27: mol_type = other RNA
cgctaccaggaggtggaccggcgcttc

SEQ ID NO: 40292 - RNA, 27 nt, synthetic construct
  misc_feature 1..27: note = High affinity cationic amino acid transporter 1 (419-427)
  source 1..27: mol_type = other RNA
cgctaccagcccgagcagccgaacctg

SEQ ID NO: 40293 - RNA, 27 nt, synthetic construct
  misc_feature 1..27: note = Centrosomal protein of 89 kDa (331-339)
  source 1..27: mol_type = other RNA
cgctaccagaccaagttccggcacctg

SEQ ID NO: 40294 - RNA, 27 nt, synthetic construct
  misc_feature 1..27: note = Leucine zipper putative tumor suppressor 1 (36-44)
  source 1..27: mol_type = other RNA
cgctacagcgacggcctgctccggttc

SEQ ID NO: 40295 - RNA, 27 nt, synthetic construct
  misc_feature 1..27: note = Myotubularin related protein 6 (594-602)
  source 1..27: mol_type = other RNA
cgctacagcgagtacgccgaggagttc

SEQ ID NO: 40296 - RNA, 27 nt, synthetic construct
  misc_feature 1..27: note = Rap guanine nucleotide exchange factor 6 (57-65)
  source 1..27: mol_type = other RNA
cgctacagcggcaaccaggtgctgttc

SEQ ID NO: 40297 - RNA, 27 nt, synthetic construct
  misc_feature 1..27: note = Cation-independent mannose-6-phosphate receptor (1582-1590)
  source 1..27: mol_type = other RNA
cgctacgtggaccaggtcctgcagctc

SEQ ID NO: 40298 - RNA, 27 nt, synthetic construct
  misc_feature 1..27: note = Calpain-5 (466-474)
  source 1..27: mol_type = other RNA
cgctacgtgatcatccccaccaccttc

SEQ ID NO: 40299 - RNA, 27 nt, synthetic construct
  misc_feature 1..27: note = Histone-lysine N-methyltransferase EHMT2 (935-943)
  source 1..27: mol_type = other RNA
cgctactacggcaacatcagccggttc

SEQ ID NO: 40300 - RNA, 30 nt, synthetic construct
  misc_feature 1..30: note = Myosin-9 (104-113)
  source 1..30: mol_type = other RNA
cgctactacagcggcctgatctacacctac

SEQ ID NO: 40301 - RNA, 27 nt, synthetic construct
  misc_feature 1..27: note = Fanconi anemia group C protein (413-421)
  source 1..27: mol_type = other RNA
agcgccgccgagcccccgaccgcgctg

SEQ ID NO: 40302 - RNA, 27 nt, synthetic construct
  misc_feature 1..27: note = V-type proton ATPase 16 kDa proteolipid subunit (20-28)
  source 1..27: mol_type = other RNA
agcgccgccatggtgttctccgcgctg

SEQ ID NO: 40303 - RNA, 27 nt, synthetic construct
  misc_feature 1..27: note = Factor VIII intron 22 protein (251-259)
  source 1..27: mol_type = other RNA
agcgccgccccctccccggcggccctg

SEQ ID NO: 40304 - RNA, 27 nt, synthetic construct
  misc_feature 1..27: note = Phosphoacetylglucosamine mutase (515-523)
  source 1..27: mol_type = other RNA
agcgccgaccacctggcccacgaggtg

SEQ ID NO: 40305 - RNA, 27 nt, synthetic construct
  misc_feature 1..27: note = Melanoma-associated antigen 1 (62-70)
  source 1..27: mol_type = other RNA
agcgccttccccaccaccatcaacttc

SEQ ID NO: 40306 - RNA, 27 nt, synthetic construct
  misc_feature 1..27: note = Multiple epidermal growth factor-like domains protein 8 (745-753)
  source 1..27: mol_type = other RNA
agcgccggccccgggcactccgagctg

SEQ ID NO: 40307 - RNA, 27 nt, synthetic construct
  misc_feature 1..27: note = AT-rich interactive domain-containing protein 2 (319-327)
  source 1..27: mol_type = other RNA
agcgcccactcccacttcatcagcctg

SEQ ID NO: 40308 - RNA, 27 nt, synthetic construct
  misc_feature 1..27: note = ADP-ribosylation factor GTPase-activating protein 3 (167-175)
  source 1..27: mol_type = other RNA
agcgccatcgccgagccctccagcctg

SEQ ID NO: 40309 - RNA, 27 nt, synthetic construct
  misc_feature 1..27: note = Catenin alpha-1 (366-374)
  source 1..27: mol_type = other RNA
agcgccatcgacaagatgaccaagaag

SEQ ID NO: 40310 - RNA, 27 nt, synthetic construct
  misc_feature 1..27: note = COBW domain-containing protein 5 (82-90)
  source 1..27: mol_type = other RNA
agcgccctggagaagtccctcgccgtg

SEQ ID NO: 40311 - RNA, 36 nt, synthetic construct
  misc_feature 1..36: note = Vimentin (42-53)
  source 1..36: mol_type = other RNA
agcgccctgcgcccctccaccagccggtccctctac

SEQ ID NO: 40312 - RNA, 30 nt, synthetic construct
  misc_feature 1..30: note = Putative annexin A2-like protein (89-98)
  source 1..30: mol_type = other RNA
agcgccctgtccggccacctcgagaccgtg

SEQ ID NO: 40313 - RNA, 27 nt, synthetic construct
  misc_feature 1..27: note = Ran GTPase-activating protein 1 (174-182)
  source 1..27: mol_type = other RNA
agcgcccagggcaagcccctggccctc

SEQ ID NO: 40314 - RNA, 27 nt, synthetic construct
  misc_feature 1..27: note = Protein virilizer homolog (804-812)
  source 1..27: mol_type = other RNA
agcgccgtgggccacgtcttctccctg

SEQ ID NO: 40315 - RNA, 27 nt, synthetic construct
  misc_feature 1..27: note = MICAL-like protein 2 (424-432)
  source 1..27: mol_type = other RNA
agcgccgtgcccccgggcacctccctg

SEQ ID NO: 40316 - RNA, 30 nt, synthetic construct
  misc_feature 1..30: note = Eukaryotic peptide chain release factor GTP-binding subunit ERF3A (27-36)
  source 1..30: mol_type = other RNA
agcgaggccgagcccggcgggggctccctg

SEQ ID NO: 40317 - RNA, 27 nt, synthetic construct
  misc_feature 1..27: note = Neuron navigator 2 (1899-1907)
  source 1..27: mol_type = other RNA
agcgaggccgagaccgtgatgcagctg

SEQ ID NO: 40318 - RNA, 27 nt, synthetic construct
  misc_feature 1..27: note = Transportin-1 (59-67)
  source 1..27: mol_type = other RNA
agcgaggacgagcccacccgctccctg

SEQ ID NO: 40319 - RNA, 27 nt, synthetic construct
  misc_feature 1..27: note = Zinc finger protein 217 (77-85)
  source 1..27: mol_type = other RNA
agcgaggacctgaacaagcacgtgctc

SEQ ID NO: 40320 - RNA, 27 nt, synthetic construct
  misc_feature 1..27: note = Vacuolar protein sorting-associated protein 35 (500-508)
  source 1..27: mol_type = other RNA
agcgaggaccccgaccagcagtacctg

SEQ ID NO: 40321 - RNA, 30 nt, synthetic construct
  misc_feature 1..30: note = Protein CASC3 (106-115)
  source 1..30: mol_type = other RNA
agcgaggaggagaactccaaggtggagctg

SEQ ID NO: 40322 - RNA, 27 nt, synthetic construct
  misc_feature 1..27: note = Ribosome biogenesis protein BOP1 (459-467)
  source 1..27: mol_type = other RNA
agcgaggaggagcgccaggtgggcctg

SEQ ID NO: 40323 - RNA, 27 nt, synthetic construct
  misc_feature 1..27: note = GPI-anchor transamidase (176-184)
  source 1..27: mol_type = other RNA
agcgaggagatcaccaacatcgagctg

SEQ ID NO: 40324 - RNA, 30 nt, synthetic construct
  misc_feature 1..30: note = Tyrosine-protein kinase JAK1 (600-609)
  source 1..30: mol_type = other RNA
agcgaggagaagaagatcaaggtgatcctg

SEQ ID NO: 40325 - RNA, 27 nt, synthetic construct
  misc_feature 1..27: note = DNA mismatch repair protein Msh2 (900-908)
  source 1..27: mol_type = other RNA
agcgaggagaacatcaccatcaagctg

SEQ ID NO: 40326 - RNA, 27 nt, synthetic construct
  misc_feature 1..27: note = Selenocysteine insertion sequence-binding protein 2 (597-605)
  source 1..27: mol_type = other RNA
agcgaggagcccccgggcaccgagctg

SEQ ID NO: 40327 - RNA, 33 nt, synthetic construct
  misc_feature 1..33: note = Rac GTPase-activating protein 1 (44-54)
  source 1..33: mol_type = other RNA
agcgaggagcagaagtccgccctggccttcctc

SEQ ID NO: 40328 - RNA, 30 nt, synthetic construct
  misc_feature 1..30: note = X-ray repair cross-complementing protein 5 (546-555)
  source 1..30: mol_type = other RNA
agcgaggagcagcgcttcaacaacttcctg

SEQ ID NO: 40329 - RNA, 27 nt, synthetic construct
  misc_feature 1..27: note = Caspase-8 (168-176)
  source 1..27: mol_type = other RNA
agcgaggaggtgtcccgcagcgagctg

SEQ ID NO: 40330 - RNA, 27 nt, synthetic construct
  misc_feature 1..27: note = E3 ubiquitin-protein ligase UBR5 (2161-2169)
  source 1..27: mol_type = other RNA
agcgagggccccccgctgacctccttc

SEQ ID NO: 40331 - RNA, 36 nt, synthetic construct
  misc_feature 1..36: note = Basigin (49-60)
  source 1..36: mol_type = other RNA
agcgagcacatcaacgagggcgagaccgccatgctg

SEQ ID NO: 40332 - RNA, 33 nt, synthetic construct
  misc_feature 1..33: note = Kinesin-like protein KIF20A (608-618)
  source 1..33: mol_type = other RNA
agcgagcacctggacacccagaaggagctcctg

SEQ ID NO: 40333 - RNA, 33 nt, synthetic construct
  misc_feature 1..33: note = La-related protein 4 (384-394)
  source 1..33: mol_type = other RNA
agcgagcactccaccgagggcagcgtgtccctg

SEQ ID NO: 40334 - RNA, 39 nt, synthetic construct
  misc_feature 1..39: note = AP-1 complex subunit beta-1 (185-197)
  source 1..39: mol_type = other RNA
agcgagatcgccgagtcccaccccagctccaacctgctc

SEQ ID NO: 40335 - RNA, 30 nt, synthetic construct
  misc_feature 1..30: note = Endothelial PAS domain-containing protein 1 (345-354)
  source 1..30: mol_type = other RNA
agcgagatcgagaagaacgacgtggtcttc

SEQ ID NO: 40336 - RNA, 33 nt, synthetic construct
  misc_feature 1..33: note = Centrosomal protein of 170 kDa (569-579)
  source 1..33: mol_type = other RNA
agcgagatcggcgagaagcaggacaccgagctg

SEQ ID NO: 40337 - RNA, 30 nt, synthetic construct
  misc_feature 1..30: note = Protein OS-9 (136-145)
  source 1..30: mol_type = other RNA
agcgagatcaagggcgaggtgctgtacctc

SEQ ID NO: 40338 - RNA, 33 nt, synthetic construct
  misc_feature 1..33: note = BCL-6 corepressor (765-775)
  source 1..33: mol_type = other RNA
agcgagatcctggagacctccagcaccaagctc

SEQ ID NO: 40339 - RNA, 39 nt, synthetic construct
  misc_feature 1..39: note = AP-2 complex subunit beta (185-197)
  source 1..39: mol_type = other RNA
agcgagatctccgagagccaccccaactccaacctgctc

SEQ ID NO: 40340 - RNA, 30 nt, synthetic construct
  misc_feature 1..30: note = E3 ubiquitin-protein ligase UBR4 (365-374)
  source 1..30: mol_type = other RNA
agcgagatcaccgaccccgagtccttcctg

SEQ ID NO: 40341 - RNA, 30 nt, synthetic construct
  misc_feature 1..30: note = Centrin-1 (98-107)
  source 1..30: mol_type = other RNA
agcgagaaggacaccaaggaggagatcctg

SEQ ID NO: 40342 - RNA, 30 nt, synthetic construct
  misc_feature 1..30: note = Ubiquitin carboxyl-terminal hydrolase 43 (210-219)
  source 1..30: mol_type = other RNA
agcgagaagctgcccccggaggccaccaag

SEQ ID NO: 40343 - RNA, 27 nt, synthetic construct
  misc_feature 1..27: note = Spatacsin (742-750)
  source 1..27: mol_type = other RNA
agcgagctgctcaagaacatgggcttc

SEQ ID NO: 40344 - RNA, 27 nt, synthetic construct
  misc_feature 1..27: note = Nuclear pore complex protein Nup155 (1180-1188)
  source 1..27: mol_type = other RNA
agcgagctgatggacatcaccaagctc

SEQ ID NO: 40345 - RNA, 30 nt, synthetic construct
  misc_feature 1..30: note = WD repeat-containing protein 43 (123-132)
  source 1..30: mol_type = other RNA
agcgagaacaaggaggagcccgtgaagctg

SEQ ID NO: 40346 - RNA, 30 nt, synthetic construct
  misc_feature 1..30: note = Caspase recruitment domain-containing protein 19 (24-33)
  source 1..30: mol_type = other RNA
agcgagcagcaggtggaccgcatcatcctg

SEQ ID NO: 40347 - RNA, 30 nt, synthetic construct
  misc_feature 1..30: note = Protein deglycase DJ-1 (83-92)
  source 1..30: mol_type = other RNA
agcgagtccgccgccgtgaaggagatcctg

SEQ ID NO: 40348 - RNA, 33 nt, synthetic construct
  misc_feature 1..33: note = Coatomer subunit gamma-1 (429-439)
  source 1..33: mol_type = other RNA
agcgagtccaaggagaccggcctgagccacctc

SEQ ID NO: 40349 - RNA, 27 nt, synthetic construct
  misc_feature 1..27: note = Probable ubiquitin carboxyl-terminal hydrolase FAF-X (1855-1863)
  source 1..27: mol_type = other RNA
agcgagaccgccggctccaccaagtac

SEQ ID NO: 40350 - RNA, 30 nt, synthetic construct
  misc_feature 1..30: note = Homocysteine-responsive endoplasmic reticulum-resident ubiquitin-like domain member 1 protein (3-12)
  source 1..30: mol_type = other RNA
agcgagaccgagcccgagccggtgaccctg

SEQ ID NO: 40351 - RNA, 27 nt, synthetic construct
  misc_feature 1..27: note = DNA-dependent protein kinase catalytic subunit (1564-1572)
  source 1..27: mol_type = other RNA
agcgagaccatcaacaccgagctgctc

SEQ ID NO: 40352 - RNA, 30 nt, synthetic construct
  misc_feature 1..30: note = Adipocyte plasma membrane-associated protein (402-411)
  source 1..30: mol_type = other RNA
agcgaggtgcacgagcacgacggccacctg

SEQ ID NO: 40353 - RNA, 27 nt, synthetic construct
  misc_feature 1..27: note = Ubiquitin-like modifier-activating enzyme 1 (251-259)
  source 1..27: mol_type = other RNA
agcgaggtgcagggcatggtcgagctg

SEQ ID NO: 40354 - RNA, 33 nt, synthetic construct
  misc_feature 1..33: note = Zinc finger and BTB domain-containing protein 2 (491-501)
  source 1..33: mol_type = other RNA
agcgaggtgaccgagcccgaccacccggtcctg

SEQ ID NO: 40355 - RNA, 30 nt, synthetic construct
  misc_feature 1..30: note = 60S ribosomal protein L28 (37-46)
  source 1..30: mol_type = other RNA
agcttccgctacaacggcctgatccaccgg

SEQ ID NO: 40356 - RNA, 27 nt, synthetic construct
  misc_feature 1..27: note = Prelamin-A/C (424-432)
  source 1..27: mol_type = other RNA
agcggcgaccccgccgagtacaacctg

SEQ ID NO: 40357 - RNA, 27 nt, synthetic construct
  misc_feature 1..27: note = Replication protein A 70 kDa DNA-binding subunit (149-157)
  source 1..27: mol_type = other RNA
agcggcatggggtccaccgtgagcaag

SEQ ID NO: 40358 - RNA, 27 nt, synthetic construct
  misc_feature 1..27: note = Exocyst complex component 4 (448-456)
  source 1..27: mol_type = other RNA
agccacgccatctccatgagcgcctac

SEQ ID NO: 40359 - RNA, 27 nt, synthetic construct
  misc_feature 1..27: note = Unconventional myosin-Ib (546-554)
  source 1..27: mol_type = other RNA
agccacgccctgatcaagtccctcttc

SEQ ID NO: 40360 - RNA, 27 nt, synthetic construct
  misc_feature 1..27: note = Transcription factor 4 (246-254)
  source 1..27: mol_type = other RNA
agccacatcccccagtccagctcctac

SEQ ID NO: 40361 - RNA, 27 nt, synthetic construct
  misc_feature 1..27: note = Dual specificity mitogen-activated protein kinase kinase 1 (86-94)
  source 1..27: mol_type = other RNA
agccacaagccctccggcctggtgatg

SEQ ID NO: 40362 - RNA, 27 nt, synthetic construct
  misc_feature 1..27: note = Rho-related GTP-binding protein RhoE (218-226)
  source 1..27: mol_type = other RNA
agccacatgccctcccgcccggagctg

SEQ ID NO: 40363 - RNA, 27 nt, synthetic construct
  misc_feature 1..27: note = Reticulon-3 (10-18)
  source 1..27: mol_type = other RNA
agccactccatcagctccagctccttc

SEQ ID NO: 40364 - RNA, 27 nt, synthetic construct
  misc_feature 1..27: note = Aminoacylase-1 (79-87)
  source 1..27: mol_type = other RNA
agccacaccgacgtggtccccgtgttc

SEQ ID NO: 40365 - RNA, 27 nt, synthetic construct
  misc_feature 1..27: note = Sialin (259-267)
  source 1..27: mol_type = other RNA
agccactacgagaaggagtacatcctg

SEQ ID NO: 40366 - RNA, 27 nt, synthetic construct
  misc_feature 1..27: note = Solute carrier family 35 member C2 (273-281)
  source 1..27: mol_type = other RNA
agcatcgccggcatcttcaaggaggtg

SEQ ID NO: 40367 - RNA, 27 nt, synthetic construct
  misc_feature 1..27: note = 40S ribosomal protein S4, X isoform (72-80)
  source 1..27: mol_type = other RNA
agcatcgacaagaccggcgagaacttc

SEQ ID NO: 40368 - RNA, 33 nt, synthetic construct
  misc_feature 1..33: note = YTH domain-containing family protein 1 (434-444)
  source 1..33: mol_type = other RNA
agcatcttcgacgacttcgcccactacgagaag

SEQ ID NO: 40369 - RNA, 33 nt, synthetic construct
  misc_feature 1..33: note = YTH domain-containing family protein 2 (707-717)
  source 1..33: mol_type = other RNA
agcatcttcgacgacttctcccactacgagaag

SEQ ID NO: 40370 - RNA, 27 nt, synthetic construct
  misc_feature 1..27: note = Transmembrane emp24 domain-containing protein 7 (192-200)
  source 1..27: mol_type = other RNA
agcatcggccaggtgttcctgctcaag

SEQ ID NO: 40371 - RNA, 27 nt, synthetic construct
  misc_feature 1..27: note = Kit ligand (99-107)
  source 1..27: mol_type = other RNA
agcatcatcgacaagctggtgaacatc

SEQ ID NO: 40372 - RNA, 27 nt, synthetic construct
  misc_feature 1..27: note = Heat shock protein HSP 90-alpha (763-771)
  source 1..27: mol_type = other RNA
agcatcatcgagaccctgcgccagaag

SEQ ID NO: 40373 - RNA, 36 nt, synthetic construct
  misc_feature 1..36: note = Poly(rC)-binding protein 2 (27-38)
  source 1..36: mol_type = other RNA
agcatcatcggcaagaagggggagtccgtgaagaag

SEQ ID NO: 40374 - RNA, 27 nt, synthetic construct
  misc_feature 1..27: note = NADH dehydrogenase (ubiquinone) 1 alpha subcomplex subunit 13 (40-48)
  source 1..27: mol_type = other RNA
agcatcatgaagtggaaccgcgagcgg

SEQ ID NO: 40375 - RNA, 27 nt, synthetic construct
  misc_feature 1..27: note = Sterol regulatory element-binding protein 1 (338-346)
  source 1..27: mol_type = other RNA
agcatcaacgacaagatcatcgagctg

SEQ ID NO: 40376 - RNA, 30 nt, synthetic construct
  misc_feature 1..30: note = Ubiquitin-associated protein 2-like (325-334)
  source 1..30: mol_type = other RNA
agcatcccccagaagccgcagaccaacaag

SEQ ID NO: 40377 - RNA, 33 nt, synthetic construct
  misc_feature 1..33: note = Alkyldihydroxyacetonephosphate synthase, peroxisomal (630-640)
  source 1..33: mol_type = other RNA
agcatctccgacgtgggcttcgggatgctgaag

SEQ ID NO: 40378 - RNA, 27 nt, synthetic construct
  misc_feature 1..27: note = Progressive ankylosis protein homolog (165-173)
  source 1..27: mol_type = other RNA
agcatctccgacgtgatcgcccaggtc

SEQ ID NO: 40379 - RNA, 36 nt, synthetic construct
  misc_feature 1..36: note = Insulin-like growth factor 2 mRNA-binding protein 2 (181-192)
  source 1..36: mol_type = other RNA
agcatctacaaccccgagcgcaccatcaccgtgaag

SEQ ID NO: 40380 - RNA, 33 nt, synthetic construct
  misc_feature 1..33: note = Fibronectin type III domain-containing protein 3B (555-565)
  source 1..33: mol_type = other RNA
agcatctaccgcggcccctcccacacctacaag

SEQ ID NO: 40381 - RNA, 30 nt, synthetic construct
  misc_feature 1..30: note = Nuclear receptor coactivator 3 (336-345)
  source 1..30: mol_type = other RNA
agcctggccgacggcaccatcgtgaccgcc

SEQ ID NO: 40382 - RNA, 27 nt, synthetic construct
  misc_feature 1..27: note = Calmodulin-regulated spectrin-associated protein 2 (271-279)
  source 1..27: mol_type = other RNA
agcctggccgactccctctacaacctg

SEQ ID NO: 40383 - RNA, 30 nt, synthetic construct
  misc_feature 1..30: note = ATPase family AAA domain-containing protein 2 (410-419)
  source 1..30: mol_type = other RNA
agcctggccgacgtggaccccatgcagctc

SEQ ID NO: 40384 - RNA, 27 nt, synthetic construct
  misc_feature 1..27: note = Wiskott-Aldrich syndrome protein family member 2 (67-75)
  source 1..27: mol_type = other RNA
agcctggccgagcgcgtggaccggctc

SEQ ID NO: 40385 - RNA, 27 nt, synthetic construct
  misc_feature 1..27: note = Histone H1x (66-74)
  source 1..27: mol_type = other RNA
agcctggccaagatctacaccgaggcc

SEQ ID NO: 40386 - RNA, 27 nt, synthetic construct
  misc_feature 1..27: note = Discoidin, CUB and LCCL domain-containing protein 2 (222-230)
  source 1..27: mol_type = other RNA
agcctggccaacaacgtgacctccgtc

SEQ ID NO: 40387 - RNA, 36 nt, synthetic construct
  misc_feature 1..36: note = Prohibitin (227-238)
  source 1..36: mol_type = other RNA
agcctggccaccgccggcgacgggctcatcgagctg

SEQ ID NO: 40388 - RNA, 27 nt, synthetic construct
  misc_feature 1..27: note = Arf-GAP with Rho-GAP domain, ANK repeat and PH domain-containing protein 3 (220-228)
  source 1..27: mol_type = other RNA
agcctggaccagcccttcctctccaag

SEQ ID NO: 40389 - RNA, 27 nt, synthetic construct
  misc_feature 1..27: note = Transcription intermediary factor 1-beta (265-273)
  source 1..27: mol_type = other RNA
agcctggaccagcccggcgggaccctc

SEQ ID NO: 40390 - RNA, 27 nt, synthetic construct
  misc_feature 1..27: note Dolichyl-diphosphooligosaccharide-proteinosyltransferase subunit 2 (40-48)
  source 1..27: mol_type = other RNA
agcctggaccgccccttcaccaacctc

SEQ ID NO: 40391 - RNA, 30 nt, synthetic construct
  misc_feature 1..30: note = Spatacsin (1958-1967)
  source 1..30: mol_type = other RNA
agcctggactcccagaagttcgtgaccgtc

SEQ ID NO: 40392 - RNA, 27 nt, synthetic construct
  misc_feature 1..27: note = Mothers against decapentaplegic homolog 6 (187-195)
  source 1..27: mol_type = other RNA
agcctggacaccctcctggaggccgtg

SEQ ID NO: 40393 - RNA, 30 nt, synthetic construct
  misc_feature 1..30: note = Activating transcription factor 7-interacting protein 2 (272-281)
  source 1..30: mol_type = other RNA
agcctggacaccaacaacaactcccactac

SEQ ID NO: 40394 - RNA, 27 nt, synthetic construct
  misc_feature 1..27: note = Transcription factor E2-alpha (165-173)
  source 1..27: mol_type = other RNA
agcctggacacccagcccaagaaggtg

SEQ ID NO: 40395 - RNA, 30 nt, synthetic construct
  misc_feature 1..30: note = Transformation/transcription domain-associated protein (976-985)
  source 1..30: mol_type = other RNA
agcctggaggacaacaagcacgccctctac

SEQ ID NO: 40396 - RNA, 30 nt, synthetic construct
  misc_feature 1..30: note = Probable E3 ubiquitin-protein ligase HERC6 (177-186)
  source 1..30: mol_type = other RNA
agcctggagggcatccccctcgcccaggtg

SEQ ID NO: 40397 - RNA, 27 nt, synthetic construct
  misc_feature 1..27: note = Uncharacterized protein C17orf112 (97-105)
  source 1..27: mol_type = other RNA
agcctggagctcgaccccccgtccctg

SEQ ID NO: 40398 - RNA, 27 nt, synthetic construct
  misc_feature 1..27: note = Transmembrane emp24 domain-containing protein 9 (130-138)
  source 1..27: mol_type = other RNA
agcctgttcgccggcgggatgctccgc

SEQ ID NO: 40399 - RNA, 30 nt, synthetic construct
  misc_feature 1..30: note = Splicing factor 3A subunit 3 (299-308)
  source 1..30: mol_type = other RNA
agcctgttcgccaagaaccccaagtccaag

SEQ ID NO: 40400 - RNA, 27 nt, synthetic construct
  misc_feature 1..27: note = Probable E3 ubiquitin-protein ligase HECTD4 (550-558)
  source 1..27: mol_type = other RNA
agcctgttcggcgggacctccggcctc

SEQ ID NO: 40401 - RNA, 27 nt, synthetic construct
  misc_feature 1..27: note = ADP-ribosylation factor 4 (7-15)
  source 1..27: mol_type = other RNA
agcctgttctcccgcctcttcggcaag

SEQ ID NO: 40402 - RNA, 30 nt, synthetic construct
  misc_feature 1..30: note = Leukocyte tyrosine kinase receptor (149-158)
  source 1..30: mol_type = other RNA
agcctgggcctcggggagtccctgtacatc

SEQ ID NO: 40403 - RNA, 30 nt, synthetic construct
  misc_feature 1..30: note = PRELI domain containing protein 3A (115-124)
  source 1..30: mol_type = other RNA
agcctgggctcctacctcgagagcctgatg

SEQ ID NO: 40404 - RNA, 33 nt, synthetic construct
  misc_feature 1..33: note = Epidermal growth factor receptor kinase substrate 8 (115-125)
  source 1..33: mol_type = other RNA
agcctgatcgacctcgagtccaagaacgagctg

SEQ ID NO: 40405 - RNA, 30 nt, synthetic construct
  misc_feature 1..30: note = Sugar phosphate exchanger 3 (370-379)
  source 1..30: mol_type = other RNA
agcctgatcggctactccctcttcagcgtg

SEQ ID NO: 40406 - RNA, 27 nt, synthetic construct
  misc_feature 1..27: note = Type I inositol 3,4-bisphosphate 4-phosphatase (107-115)
  source 1..27: mol_type = other RNA
agcctgatcaaccagatgacccaggtg

SEQ ID NO: 40407 - RNA, 27 nt, synthetic construct
  misc_feature 1..27: note = Kinectin (369-377)
  source 1..27: mol_type = other RNA
agcctgaaggcccacgtgcaggaggtc

SEQ ID NO: 40408 - RNA, 27 nt, synthetic construct
  misc_feature 1..27: note Dolichyl-diphosphooligosaccharide-proteinosyltransferase 48 kDa subunit (66-74)
  source 1..27: mol_type = other RNA
agcctgaaggaccgcggcttcgagctc

SEQ ID NO: 40409 - RNA, 27 nt, synthetic construct
  misc_feature 1..27: note = Gamma-interferon-inducible protein 16 (248-256)
  source 1..27: mol_type = other RNA
agcctgaaggagaagttcaacggcaag

SEQ ID NO: 40410 - RNA, 27 nt, synthetic construct
  misc_feature 1..27: note = KN motif and ankyrin repeat domain-containing protein 1 (464-472)
  source 1..27: mol_type = other RNA
agcctgaaggagaagatctaccgcctc

SEQ ID NO: 40411 - RNA, 30 nt, synthetic construct
  misc_feature 1..30: note = Histone-lysine N-methyltransferase NSD2 (177-186)
  source 1..30: mol_type = other RNA
agcctgctcgagcagggcctggtggaggcc

SEQ ID NO: 40412 - RNA, 36 nt, synthetic construct
  misc_feature 1..36: note = TSC22 domain family protein 1 (28-39)
  source 1..36: mol_type = other RNA
agcctgctcggcaccgagaacgcctccgtgcgcctg

SEQ ID NO: 40413 - RNA, 36 nt, synthetic construct
  misc_feature 1..36: note = Homocysteine-responsive endoplasmic reticulum-resident ubiquitin-like domain member 1 protein (221-232)
  source 1..36: mol_type = other RNA
agcctgctccccgagggcccgcccgccatcgccaac

SEQ ID NO: 40414 - RNA, 27 nt, synthetic construct
  misc_feature 1..27: note = Ankyrin repeat and KH domain-containing protein 1 (2544-2552)
  source 1..27: mol_type = other RNA
agcctgctcccctccgtgccggccctg

SEQ ID NO: 40415 - RNA, 27 nt, synthetic construct
  misc_feature 1..27: note = E3 ubiquitin-protein ligase TRIM38 (21-29)
  source 1..27: mol_type = other RNA
agcctgatgaccaaccccgtgtccatc

SEQ ID NO: 40416 - RNA, 27 nt, synthetic construct
  misc_feature 1..27: note = Coiled-coil domain-containing protein 93 (321-329)
  source 1..27: mol_type = other RNA
agcctgaacaagcagatcgcccagaag

SEQ ID NO: 40417 - RNA, 27 nt, synthetic construct
  misc_feature 1..27: note = Deubiquitinating protein VCIP135 (181-189)
  source 1..27: mol_type = other RNA
agcctgaactccaacgtgtacgacgtc

SEQ ID NO: 40418 - RNA, 27 nt, synthetic construct
  misc_feature 1..27: note = Disintegrin and metalloproteinase domain-containing protein 10 (100-108)
  source 1..27: mol_type = other RNA
agcctgaacaccggcatcatcaccgtg

SEQ ID NO: 40419 - RNA, 27 nt, synthetic construct
  misc_feature 1..27: note = E3 ubiquitin-protein ligase BRE1B (149-157)
  source 1..27: mol_type = other RNA
agcctgcagaaccacaaccaccagctc

SEQ ID NO: 40420 - RNA, 27 nt, synthetic construct
  misc_feature 1..27: note = DNA primase small subunit (265-273)
  source 1..27: mol_type = other RNA
agcctgcagcgctgggagcacctcaag

SEQ ID NO: 40421 - RNA, 27 nt, synthetic construct
  misc_feature 1..27: note = Integrin alpha-3 (452-460)
  source 1..27: mol_type = other RNA
agcctgtccgaccacatcgtgctcctg

SEQ ID NO: 40422 - RNA, 27 nt, synthetic construct
  misc_feature 1..27: note = Pleckstrin homology-like domain family B member 2 (117-125)
  source 1..27: mol_type = other RNA
agcctgtccggctaccccctcgggcgc

SEQ ID NO: 40423 - RNA, 27 nt, synthetic construct
  misc_feature 1..27: note = GDH/6PGL endoplasmic bifunctional protein (741-749)
  source 1..27: mol_type = other RNA
agcctgtccctccccctgatcaaccgc

SEQ ID NO: 40424 - RNA, 36 nt, synthetic construct
  misc_feature 1..36: note = 26S proteasome non-ATPase regulatory subunit 3 (262-273)
  source 1..36: mol_type = other RNA
agcctgtacgaccaggccgagaagctcgtgtccaag

SEQ ID NO: 40425 - RNA, 27 nt, synthetic construct
  misc_feature 1..27: note = Delta(24)-sterol reductase (399-407)
  source 1..27: mol_type = other RNA
agcctgtaccacaagctccgcgagaag

SEQ ID NO: 40426 - RNA, 39 nt, synthetic construct
  misc_feature 1..39: note = D-beta-hydroxybutyrate dehydrogenase, mitochondrial (246-258)
  source 1..39: mol_type = other RNA
agcctgtactcccccgagagcatccaggccatcgccaag

SEQ ID NO: 40427 - RNA, 27 nt, synthetic construct
  misc_feature 1..27: note = TATA box-binding protein-associated factor RNA polymerase I subunit B (255-263)
  source 1..27: mol_type = other RNA
agcctgtactggctctccacccagaag

SEQ ID NO: 40428 - RNA, 27 nt, synthetic construct
  misc_feature 1..27: note = Bifunctional 3'-phosphoadenosine 5'-phosphosulfate synthase 2 (537-545)
  source 1..27: mol_type = other RNA
agcatggcccccggcctgacctccgtg

SEQ ID NO: 40429 - RNA, 27 nt, synthetic construct
  misc_feature 1..27: note = Protein SON (1023-1031)
  source 1..27: mol_type = other RNA
agcatgatgtcccccatggccgagcgc

SEQ ID NO: 40430 - RNA, 27 nt, synthetic construct
  misc_feature 1..27: note = Small nuclear ribonucleoprotein Sm D1 (35-43)
  source 1..27: mol_type = other RNA
agcatgaacacccacctgaaggccgtg

SEQ ID NO: 40431 - RNA, 27 nt, synthetic construct
  misc_feature 1..27: note = Ubiquitin carboxyl-terminal hydrolase isozyme L5 (131-139)
  source 1..27: mol_type = other RNA
agcaactccgacgtgatccgccaggtc

SEQ ID NO: 40432 - RNA, 27 nt, synthetic construct
  misc_feature 1..27: note = Chloride channel CLIC-like protein 1 (324-332)
  source 1..27: mol_type = other RNA
agccccgccgccgagaaggcgcagctg

SEQ ID NO: 40433 - RNA, 27 nt, synthetic construct
  misc_feature 1..27: note = Eukaryotic translation initiation factor 2A (347-355)
  source 1..27: mol_type = other RNA
agcccccacggccacatcctggtgctc

SEQ ID NO: 40434 - RNA, 33 nt, synthetic construct
  misc_feature 1..33: note = Zinc finger SWIM domain-containing protein 7 (59-69)
  source 1..33: mol_type = other RNA
agcccctccggccgccgggtgtaccaggtcctg

SEQ ID NO: 40435 - RNA, 27 nt, synthetic construct
  misc_feature 1..27: note = Spermatogenesis-associated protein 20 (30-38)
  source 1..27: mol_type = other RNA
agccccacctcccgcctgaacagcctc

SEQ ID NO: 40436 - RNA, 27 nt, synthetic construct
  misc_feature 1..27: note = mRNA-decapping enzyme 1A (62-70)
  source 1..27: mol_type = other RNA
agcccctaccacggcttcaccatcgtg

SEQ ID NO: 40437 - RNA, 27 nt, synthetic construct
  misc_feature 1..27: note = Complex I assembly factor TIMMDC1, mitochondrial (108-116)
  source 1..27: mol_type = other RNA
agccaggccgagatctaccacaaccgc

SEQ ID NO: 40438 - RNA, 33 nt, synthetic construct
  misc_feature 1..33: note = Centromere protein J (1081-1091)
  source 1..33: mol_type = other RNA
agccagatctccagcggcacccaggtggagaag

SEQ ID NO: 40439 - RNA, 27 nt, synthetic construct
  misc_feature 1..27: note = G protein pathway suppressor 2 (319-327)
  source 1..27: mol_type = other RNA
agccagaacccccgcttctaccacaag

SEQ ID NO: 40440 - RNA, 27 nt, synthetic construct
  misc_feature 1..27: note = T-complex protein 1 subunit eta (157-165)
  source 1..27: mol_type = other RNA
agccagcagaaggccttcttcgccaag

SEQ ID NO: 40441 - RNA, 30 nt, synthetic construct
  misc_feature 1..30: note = 3-hydroxy-3-methylglutaryl-coenzyme A reductase (226-235)
  source 1..30: mol_type = other RNA
agccgcgagggccggcccatctggcagctg

SEQ ID NO: 40442 - RNA, 27 nt, synthetic construct
  misc_feature 1..27: note = Protein CYR61 (3-11)
  source 1..27: mol_type = other RNA
agccgcatcgcccgggccctggcgctc

SEQ ID NO: 40443 - RNA, 27 nt, synthetic construct
  misc_feature 1..27: note = Polyadenylate-binding protein 4 (289-297)
  source 1..27: mol_type = other RNA
agccgctaccagggcgtgaacctgtac

SEQ ID NO: 40444 - RNA, 30 nt, synthetic construct
  misc_feature 1..30: note = NUMB protein (52-61)
  source 1..30: mol_type = other RNA
agctccgccaccaccagccccttcttcaag

SEQ ID NO: 40445 - RNA, 27 nt, synthetic construct
  misc_feature 1..27: note = Nucleoporin GLE1 (16-24)
  source 1..27: mol_type = other RNA
agctccgacaagggccgcctgtgctac

SEQ ID NO: 40446 - RNA, 30 nt, synthetic construct
  misc_feature 1..30: note = Rho guanine nucleotide exchange factor 35 (173-182)
  source 1..30: mol_type = other RNA
agctccgacaacagcggccagacccgctac

SEQ ID NO: 40447 - RNA, 27 nt, synthetic construct
  misc_feature 1..27: note = Integrin alpha-7 (233-241)
  source 1..27: mol_type = other RNA
agctccgaccccgaccagctggtgtac

SEQ ID NO: 40448 - RNA, 33 nt, synthetic construct
  misc_feature 1..33: note = Transcriptional coactivator YAP1 (331-341)
  source 1..33: mol_type = other RNA
agctccgaccccttcctgaacagcggcacctac

SEQ ID NO: 40449 - RNA, 27 nt, synthetic construct
  misc_feature 1..27: note = Plastin-3 (113-121)
  source 1..27: mol_type = other RNA
agctccgagggcacccagcacagctac

SEQ ID NO: 40450 - RNA, 30 nt, synthetic construct
  misc_feature 1..30: note = Spermatogenesis-associated serine-rich protein 2 (123-132)
  source 1..30: mol_type = other RNA
agctccgagaagggcgggatgaacggctac

SEQ ID NO: 40451 - RNA, 33 nt, synthetic construct
  misc_feature 1..33: note = Myotubularin-related protein 14 (229-239)
  source 1..33: mol_type = other RNA
agctccgagaaggtggacaaggcccagcgctac

SEQ ID NO: 40452 - RNA, 27 nt, synthetic construct
  misc_feature 1..27: note = Liprin-beta-1 (506-514)
  source 1..27: mol_type = other RNA
agctccttcggccgcgggttcttcaag

SEQ ID NO: 40453 - RNA, 27 nt, synthetic construct
  misc_feature 1..27: note = Breast cancer type 2 susceptibility protein (661-669)
  source 1..27: mol_type = other RNA
agctccttcggcaccatcctgcgcaag

SEQ ID NO: 40454 - RNA, 27 nt, synthetic construct
  misc_feature 1..27: note = 60S ribosomal protein L28 (14-22)
  source 1..27: mol_type = other RNA
agctccttcctgatcaagcgcaacaag

SEQ ID NO: 40455 - RNA, 27 nt, synthetic construct
  misc_feature 1..27: note = AP-3 complex subunit mu-2 (10-18)
  source 1..27: mol_type = other RNA
agctccggcgacatcttcctggagaag

SEQ ID NO: 40456 - RNA, 27 nt, synthetic construct
  misc_feature 1..27: note = Deoxynucleotidyltransferase terminal-interacting protein 2 (562-570)
  source 1..27: mol_type = other RNA
agctccatcgaccccggcctgagcatc

SEQ ID NO: 40457 - RNA, 27 nt, synthetic construct
  misc_feature 1..27: note = 60S ribosomal protein L28 (91-99)
  source 1..27: mol_type = other RNA
agctccatccgccacatgatccggaag

SEQ ID NO: 40458 - RNA, 36 nt, synthetic construct
  misc_feature 1..36: note = Dermcidin (63-74)
  source 1..36: mol_type = other RNA
agctccctgctcgagaagggcctggacggggccaag

SEQ ID NO: 40459 - RNA, 27 nt, synthetic construct
  misc_feature 1..27: note = Integrator complex subunit 3 (459-467)
  source 1..27: mol_type = other RNA
agctccctgaaccacatcgtggagaag

SEQ ID NO: 40460 - RNA, 27 nt, synthetic construct
  misc_feature 1..27: note = Retinoblastoma-like protein 2 (834-842)
  source 1..27: mol_type = other RNA
agctccctgagcctcttcttccgcaag

SEQ ID NO: 40461 - RNA, 30 nt, synthetic construct
  misc_feature 1..30: note = GATS-like protein 2 (89-98)
  source 1..30: mol_type = other RNA
agctccagccagcccatcggcgtgaccaag

SEQ ID NO: 40462 - RNA, 33 nt, synthetic construct
  misc_feature 1..33: note = Synaptotagmin-like protein 2 (280-290)
  source 1..33: mol_type = other RNA
agctccagcaccgactccgagaccctgcgctac

SEQ ID NO: 40463 - RNA, 33 nt, synthetic construct
  misc_feature 1..33: note = WD repeat-containing protein 62 (49-59)
  source 1..33: mol_type = other RNA
agcaccgcctccgaggagaccgtgcagaaccgc

SEQ ID NO: 40464 - RNA, 27 nt, synthetic construct
  misc_feature 1..27: note = Cyclic AMP-responsive element-binding protein 3-like protein 2 (116-124)
  source 1..27: mol_type = other RNA
agcaccgacttcccctccaccagcatc

SEQ ID NO: 40465 - RNA, 36 nt, synthetic construct
  misc_feature 1..36: note = ETS-related transcription factor Elf-1 (430-441)
  source 1..36: mol_type = other RNA
agcaccgacccctccgccggcaccgggagccagaag

SEQ ID NO: 40466 - RNA, 30 nt, synthetic construct
  misc_feature 1..30: note = Epidermal growth factor receptor kinase substrate 8 (476-485)
  source 1..30: mol_type = other RNA
agcaccgagcactccagcgtgtccgagtac

SEQ ID NO: 40467 - RNA, 27 nt, synthetic construct
  misc_feature 1..27: note = Nuclear receptor subfamily 2 group C member 2 (226-234)
  source 1..27: mol_type = other RNA
agcaccgagaagatctacatccgcaag

SEQ ID NO: 40468 - RNA, 30 nt, synthetic construct
  misc_feature 1..30: note = V-type proton ATPase subunit H (296-305)
  source 1..30: mol_type = other RNA
agcaccgagcgcgagacccggcaggagtac

SEQ ID NO: 40469 - RNA, 30 nt, synthetic construct
  misc_feature 1..30: note = Nucleolar protein 56 (354-363)
  source 1..30: mol_type = other RNA
agcaccttcatcggccgcgccgccgcgaag

SEQ ID NO: 40470 - RNA, 33 nt, synthetic construct
  misc_feature 1..33: note = Ankyrin repeat and KH domain-containing protein 1 (1842-1852)
  source 1..33: mol_type = other RNA
agcaccttccagcccgccaacaagctgaacaag

SEQ ID NO: 40471 - RNA, 33 nt, synthetic construct
  misc_feature 1..33: note = 5-aminolevulinate synthase, nonspecific, mitochondrial (212-222)
  source 1..33: mol_type = other RNA
agcaccttccagtacgaccgcttcttcgagaag

SEQ ID NO: 40472 - RNA, 27 nt, synthetic construct
  misc_feature 1..27: note = Nuclear autoantigen Sp-100 (389-397)
  source 1..27: mol_type = other RNA
agcaccttccgcgagtccttcaagaag

SEQ ID NO: 40473 - RNA, 30 nt, synthetic construct
  misc_feature 1..30: note = Zinc finger protein SNAI2 (138-147)
  source 1..30: mol_type = other RNA
agcaccttctccggcctggccaagcacaag

SEQ ID NO: 40474 - RNA, 36 nt, synthetic construct
  misc_feature 1..36: note = Oxidative stress-responsive serine-rich protein 1 (96-107)
  source 1..36: mol_type = other RNA
agcaccatcgcctccagctccagctcccagctgaag

SEQ ID NO: 40475 - RNA, 27 nt, synthetic construct
  misc_feature 1..27: note = Clathrin interactor 1 (210-218)
  source 1..27: mol_type = other RNA
agcaccatcgacgacaccatctccaag

SEQ ID NO: 40476 - RNA, 33 nt, synthetic construct
  misc_feature 1..33: note = Ligand-dependent nuclear receptor-interacting factor 1 (338-348)
  source 1..33: mol_type = other RNA
agcaccatcgacccctccggcacccgcagcaag

SEQ ID NO: 40477 - RNA, 30 nt, synthetic construct
  misc_feature 1..30: note = Regulation of nuclear pre-mRNA domain-containing protein 2 (942-951)
  source 1..30: mol_type = other RNA
agcaccatcgagttcaagaacatgctgaag

SEQ ID NO: 40478 - RNA, 27 nt, synthetic construct
  misc_feature 1..27: note = Probable RNA-binding protein 23 (53-61)
  source 1..27: mol_type = other RNA
agcaccatcggcgagacctccaaccgc

SEQ ID NO: 40479 - RNA, 36 nt, synthetic construct
  misc_feature 1..36: note = Hexokinase-2 (408-419)
  source 1..36: mol_type = other RNA
agcaccatcggcgtggacgggtccgtctacaagaag

SEQ ID NO: 40480 - RNA, 33 nt, synthetic construct
  misc_feature 1..33: note = Transcription intermediary factor 1-alpha (597-607)
  source 1..33: mol_type = other RNA
agcaccatcatgctggacaacatcgtgcgcaag

SEQ ID NO: 40481 - RNA, 27 nt, synthetic construct
  misc_feature 1..27: note = Tigger transposable element-derived protein 2 (379-387)
  source 1..27: mol_type = other RNA
agcaccatcaccaaggcctggaagaag

SEQ ID NO: 40482 - RNA, 33 nt, synthetic construct
  misc_feature 1..33: note = Mediator of RNA polymerase II transcription subunit 20 (51-61)
  source 1..33: mol_type = other RNA
agcaccctgggctcccaggggcagaccggcaag

SEQ ID NO: 40483 - RNA, 27 nt, synthetic construct
  misc_feature 1..27: note = KN motif and ankyrin repeat domain-containing protein 1 (972-980)
  source 1..27: mol_type = other RNA
agcaccctgaagtccatcatgaagaag

SEQ ID NO: 40484 - RNA, 33 nt, synthetic construct
  misc_feature 1..33: note = Alanine-tRNA ligase, cytoplasmic (3-13)
  source 1..33: mol_type = other RNA
agcaccctgaccgcctccgagatccgccagcgg

SEQ ID NO: 40485 - RNA, 27 nt, synthetic construct
  misc_feature 1..27: note = Guanine nucleotide-binding protein G(I)/G(S)/G(O) subunit gamma-12 (7-15)
  source 1..27: mol_type = other RNA
agcaccaacaacatcgcccaggcccgc

SEQ ID NO: 40486 - RNA, 27 nt, synthetic construct
  misc_feature 1..27: note = AP-3 complex subunit delta-1 (232-240)
  source 1..27: mol_type = other RNA
agcaccaacaactgggtgctgatcaag

SEQ ID NO: 40487 - RNA, 27 nt, synthetic construct
  misc_feature 1..27: note = Guanine nucleotide-binding protein G(I)/G(S)/G(O) subunit gamma-5 (55-63)
  source 1..27: mol_type = other RNA
agcaccaaccccttccgcccgcagaag

SEQ ID NO: 40488 - RNA, 33 nt, synthetic construct
  misc_feature 1..33: note = ATP synthase F(0) complex subunit B1, mitochondrial (228-238)
  source 1..33: mol_type = other RNA
agcacccagcaggagaaggagaccatcgccaag

SEQ ID NO: 40489 - RNA, 30 nt, synthetic construct
  misc_feature 1..30: note = Band 4.1-like protein 2 (78-87)
  source 1..30: mol_type = other RNA
agcaccaccacgaccacccacatcaccaag

SEQ ID NO: 40490 - RNA, 27 nt, synthetic construct
  misc_feature 1..27: note = Mediator of RNA polymerase II transcription subunit 25 (129-137)
  source 1..27: mol_type = other RNA
agcaccgtggcccccggctccgggctg

SEQ ID NO: 40491 - RNA, 27 nt, synthetic construct
  misc_feature 1..27: note = SEC14-like protein 1 (142-150)
  source 1..27: mol_type = other RNA
agcaccgtggagaagatcgccatgaag

SEQ ID NO: 40492 - RNA, 33 nt, synthetic construct
  misc_feature 1..33: note = Signal recognition particle 14 kDa protein (68-78)
  source 1..33: mol_type = other RNA
agcaccgtggtctccagcaaggaggtgaacaag

SEQ ID NO: 40493 - RNA, 30 nt, synthetic construct
  misc_feature 1..30: note = Cleavage and polyadenylation specificity factor subunit 3 (66-75)
  source 1..30: mol_type = other RNA
agcacctacggcacccacatccacgagaag

SEQ ID NO: 40494 - RNA, 30 nt, synthetic construct
  misc_feature 1..30: note = DmX-like protein 2 (1766-1775)
  source 1..30: mol_type = other RNA
agcacctacatctccatcctgaaccagaag

SEQ ID NO: 40495 - RNA, 33 nt, synthetic construct
  misc_feature 1..33: note = Lysosomal protective protein (339-349)
  source 1..33: mol_type = other RNA
agcacctacctgaacaacccctacgtgcgcaag

SEQ ID NO: 40496 - RNA, 30 nt, synthetic construct
  misc_feature 1..30: note = E3 ubiquitin-protein ligase HECTD1 (546-555)
  source 1..30: mol_type = other RNA
agcacctacaacctgcagatcctcacccgc

SEQ ID NO: 40497 - RNA, 33 nt, synthetic construct
  misc_feature 1..33: note = Protein FAM84B (105-115)
  source 1..33: mol_type = other RNA
agcacctacacccccgagaacctgctcaacaag

SEQ ID NO: 40498 - RNA, 30 nt, synthetic construct
  misc_feature 1..30: note = Lysine-specific demethylase 5B (847-856)
  source 1..30: mol_type = other RNA
agcgtggcccagcagctgctcaacggcaag

SEQ ID NO: 40499 - RNA, 27 nt, synthetic construct
  misc_feature 1..27: note = Perilipin-2 (129-137)
  source 1..27: mol_type = other RNA
agcgtggcctccaccatcaccggcgtc

SEQ ID NO: 40500 - RNA, 33 nt, synthetic construct
  misc_feature 1..33: note = Oral-facial-digital syndrome 1 protein (92-102)
  source 1..33: mol_type = other RNA
agcgtgttcttccccgagtccggcctggccaag

SEQ ID NO: 40501 - RNA, 33 nt, synthetic construct
  misc_feature 1..33: note = Short coiled-coil protein (42-52)
  source 1..33: mol_type = other RNA
agcgtgttccagaccaccgacacgaagtccaag

SEQ ID NO: 40502 - RNA, 27 nt, synthetic construct
  misc_feature 1..27: note = Centromere protein F (215-223)
  source 1..27: mol_type = other RNA
agcgtgttctcctggcagcaggagaag

SEQ ID NO: 40503 - RNA, 33 nt, synthetic construct
  misc_feature 1..33: note = Probable 18S rRNA (guanine-N(7))-methyltransferase (228-238)
  source 1..33: mol_type = other RNA
agcgtgttcaccaacgagcgcttccccctgcgg

SEQ ID NO: 40504 - RNA, 36 nt, synthetic construct
  misc_feature 1..36: note = Protein FAN (644-655)
  source 1..36: mol_type = other RNA
agcgtgttcaccacctcccaggacagcacgctgaag

SEQ ID NO: 40505 - RNA, 27 nt, synthetic construct
  misc_feature 1..27: note = Acyl-CoA desaturase (245-253)
  source 1..27: mol_type = other RNA
agcgtgttcgtcgccaccttcctgcgc

SEQ ID NO: 40506 - RNA, 27 nt, synthetic construct
  misc_feature 1..27: note = Nitric oxide synthase-interacting protein (147-155)
  source 1..27: mol_type = other RNA
agcgtgggccccccgtccaaggacaag

SEQ ID NO: 40507 - RNA, 30 nt, synthetic construct
  misc_feature 1..30: note = V-type proton ATPase subunit d 1 (68-77)
  source 1..30: mol_type = other RNA
agcgtgatcgacgaccgcctgaaggagaag

SEQ ID NO: 40508 - RNA, 33 nt, synthetic construct
  misc_feature 1..33: note = Striatin (234-244)
  source 1..33: mol_type = other RNA
agcgtgatcgacacctccaccatcgtccgcaag

SEQ ID NO: 40509 - RNA, 33 nt, synthetic construct
  misc_feature 1..33: note = Phosducin-like protein (220-230)
  source 1..33: mol_type = other RNA
agcgtgatcggcgcctccagccagttcacccgc

SEQ ID NO: 40510 - RNA, 27 nt, synthetic construct
  misc_feature 1..27: note = Protein fuzzy homolog (41-49)
  source 1..27: mol_type = other RNA
agcgtgatcggctccctgaacggggtc

SEQ ID NO: 40511 - RNA, 27 nt, synthetic construct
  misc_feature 1..27: note = MAP kinase-activating death domain protein (1140-1148)
  source 1..27: mol_type = other RNA
agcgtgatcggcgtctcccccgccgtg

SEQ ID NO: 40512 - RNA, 27 nt, synthetic construct
  misc_feature 1..27: note = Tubby-related protein 3 (322-330)
  source 1..27: mol_type = other RNA
agcgtgatcatccccggcatgaccctg

SEQ ID NO: 40513 - RNA, 27 nt, synthetic construct
  misc_feature 1..27: note = ETS-related transcription factor Elf-1 (531-539)
  source 1..27: mol_type = other RNA
agcgtgatcaagacccaggagaccaag

SEQ ID NO: 40514 - RNA, 27 nt, synthetic construct
  misc_feature 1..27: note = SEC14 domain and spectrin repeat-containing protein 1 (4-12)
  source 1..27: mol_type = other RNA
agcgtgatcctgcccatcctcaagaag

SEQ ID NO: 40515 - RNA, 27 nt, synthetic construct
  misc_feature 1..27: note = Serine/threonine-protein kinase RIO1 (130-138)
  source 1..27: mol_type = other RNA
agcgtgatcaacaaggtcaccgagaag

SEQ ID NO: 40516 - RNA, 27 nt, synthetic construct
  misc_feature 1..27: note = NHS-like protein 1 (635-643)
  source 1..27: mol_type = other RNA
agcgtgatcaacgtcttcgtgggccgc

SEQ ID NO: 40517 - RNA, 33 nt, synthetic construct
  misc_feature 1..33: note = E3 ubiquitin-protein ligase Topors (307-317)
  source 1..33: mol_type = other RNA
agcgtgctgggcaaggacgagcagatcaacaag

SEQ ID NO: 40518 - RNA, 27 nt, synthetic construct
  misc_feature 1..27: note = Nuclear pore complex protein Nup50 (280-288)
  source 1..27: mol_type = other RNA
agcgtgctgggctccctcagctccgtc

SEQ ID NO: 40519 - RNA, 27 nt, synthetic construct
  misc_feature 1..27: note = Superkiller viralicidic activity 2-like 2 (759-767)
  source 1..27: mol_type = other RNA
agcgtgctgaagtccatccaggaggtc

SEQ ID NO: 40520 - RNA, 27 nt, synthetic construct
  misc_feature 1..27: note = Nuclear pore membraneoprotein 210 (659-667)
  source 1..27: mol_type = other RNA
agcgtgctgaacttcgccaccaaccgc

SEQ ID NO: 40521 - RNA, 36 nt, synthetic construct
  misc_feature 1..36: note = Little elongation complex subunit 1 (852-863)
  source 1..36: mol_type = other RNA
agcgtgctgcccaaccaggtctccgtgatcaccaag

SEQ ID NO: 40522 - RNA, 33 nt, synthetic construct
  misc_feature 1..33: note = Lysine-specific demethylase 3A (512-522)
  source 1..33: mol_type = other RNA
agcgtgctgaccgaccccgccaagctcaagaag

SEQ ID NO: 40523 - RNA, 27 nt, synthetic construct
  misc_feature 1..27: note = Enhancer of mRNA-decapping protein 4 (927-935)
  source 1..27: mol_type = other RNA
agcgtgatggcccaggtccgccagaag

SEQ ID NO: 40524 - RNA, 30 nt, synthetic construct
  misc_feature 1..30: note = Poly(U)-binding-splicing factor PUF60 (174-183)
  source 1..30: mol_type = other RNA
agcgtgatgctgggcgggcgcaacatcaag

SEQ ID NO: 40525 - RNA, 27 nt, synthetic construct
  misc_feature 1..27: note = TGF-beta-activated kinase 1 and MAP3K7-binding protein 2 (354-362)
  source 1..27: mol_type = other RNA
agcgtgaactcccagaccctgaaccgc

SEQ ID NO: 40526 - RNA, 30 nt, synthetic construct
  misc_feature 1..30: note = Rho GDP-dissociation inhibitor 1 (24-33)
  source 1..30: mol_type = other RNA
agcgtgaactacaagcccccggcccagaag

SEQ ID NO: 40527 - RNA, 30 nt, synthetic construct
  misc_feature 1..30: note = LON peptidase N-terminal domain and RING finger protein 1 (418-427)
  source 1..30: mol_type = other RNA
agcgtgcaggagaagggcgtcctgctcaag

SEQ ID NO: 40528 - RNA, 27 nt, synthetic construct
  misc_feature 1..27: note = Kinesin-like protein KIF11 (750-758)
  source 1..27: mol_type = other RNA
agcgtgcaggagaacatccagcagaag

SEQ ID NO: 40529 - RNA, 27 nt, synthetic construct
  misc_feature 1..27: note = DNA topoisomerase 2-binding protein 1 (587-595)
  source 1..27: mol_type = other RNA
agcgtgcaggagtacttcgtccgcaag

SEQ ID NO: 40530 - RNA, 27 nt, synthetic construct
  misc_feature 1..27: note = Zinc-binding alcohol dehydrogenase domain-containing protein 2 (299-307)
  source 1..27: mol_type = other RNA
agcgtgcagggcttcttcctgaaccac

SEQ ID NO: 40531 - RNA, 33 nt, synthetic construct
  misc_feature 1..33: note = E3 ubiquitin-protein ligase MARCH7 (13-23)
  source 1..33: mol_type = other RNA
agcgtgcagccctccagctccctgagcgcccgc

SEQ ID NO: 40532 - RNA, 33 nt, synthetic construct
  misc_feature 1..33: note = MAP7 domain-containing protein 3 (532-542)
  source 1..33: mol_type = other RNA
agcgtgcagtccgccagctccaccgtcaagaag

SEQ ID NO: 40533 - RNA, 30 nt, synthetic construct
  misc_feature 1..30: note = BRCA1-associated RING domain protein 1 (162-171)
  source 1..30: mol_type = other RNA
agcgtgcagacccagcccgccatcaagaag

SEQ ID NO: 40534 - RNA, 27 nt, synthetic construct
  misc_feature 1..27: note = DNA-directed RNA polymerase, mitochondrial (77-85)
  source 1..27: mol_type = other RNA
agcgtgtccgaggtcgtggtgaaccgc

SEQ ID NO: 40535 - RNA, 30 nt, synthetic construct
  misc_feature 1..30: note = GAS2-like protein 3 (568-577)
  source 1..30: mol_type = other RNA
agcgtgtcccccgtcaaggccacccagaag

SEQ ID NO: 40536 - RNA, 27 nt, synthetic construct
  misc_feature 1..27: note = Lipoma-preferred partner (35-43)
  source 1..27: mol_type = other RNA
agcgtgtccacccagcagcccccgaag

SEQ ID NO: 40537 - RNA, 27 nt, synthetic construct
  misc_feature 1..27: note = Probable 8-oxo-dGTP diphosphatase NUDT15 (78-86)
  source 1..27: mol_type = other RNA
agcgtggtcaactccttcatcgagaag

SEQ ID NO: 40538 - RNA, 27 nt, synthetic construct
  misc_feature 1..27: note = Transmembrane and TPR repeat-containing protein 2 (627-635)
  source 1..27: mol_type = other RNA
agcgtgtacaaggaggccatccagaag

SEQ ID NO: 40539 - RNA, 27 nt, synthetic construct
  misc_feature 1..27: note = Cytoplasmic dynein 1 heavy chain 1 (2957-2965)
  source 1..27: mol_type = other RNA
agcgtgtaccagatcaaggtccaccgc

SEQ ID NO: 40540 - RNA, 27 nt, synthetic construct
  misc_feature 1..27: note = Tetratricopeptide repeat protein 28 (60-68)
  source 1..27: mol_type = other RNA
agctaccacaactacgtgctggagctc

SEQ ID NO: 40541 - RNA, 27 nt, synthetic construct
  misc_feature 1..27: note = Long-chain-fatty-acid-CoA ligase 3 (616-624)
  source 1..27: mol_type = other RNA
agctaccactcctacgtgatcggcttc

SEQ ID NO: 40542 - RNA, 27 nt, synthetic construct
  misc_feature 1..27: note = 14-3-3 protein beta/alpha (212-220)
  source 1..27: mol_type = other RNA
agctacaaggactccaccctgatcatg

SEQ ID NO: 40543 - RNA, 27 nt, synthetic construct
  misc_feature 1..27: note = Serine/threonine-protein kinase 24 (88-96)
  source 1..27: mol_type = other RNA
agctacctgaaggacaccaagctctgg

SEQ ID NO: 40544 - RNA, 27 nt, synthetic construct
  misc_feature 1..27: note = Selenoprotein N (310-318)
  source 1..27: mol_type = other RNA
agctacctgcccttcaccgaggccttc

SEQ ID NO: 40545 - RNA, 27 nt, synthetic construct
  misc_feature 1..27: note = Zinc finger protein 383 (239-247)
  source 1..27: mol_type = other RNA
agctacctgtcccagcaccagcgcatc

SEQ ID NO: 40546 - RNA, 27 nt, synthetic construct
  misc_feature 1..27: note = Tumor necrosis factor receptor superfamily member 3 (87-95)
  source 1..27: mol_type = other RNA
agctacaacgagcactggaactacctg

SEQ ID NO: 40547 - RNA, 27 nt, synthetic construct
  misc_feature 1..27: note = Transmembrane protein 39A (477-485)
  source 1..27: mol_type = other RNA
agctaccccctgaactcctacgagctc

SEQ ID NO: 40548 - RNA, 27 nt, synthetic construct
  misc_feature 1..27: note = Tetraspanin-10 (217-225)
  source 1..27: mol_type = other RNA
agctaccaggactggcagcagaacctg

SEQ ID NO: 40549 - RNA, 27 nt, synthetic construct
  misc_feature 1..27: note = Calcyclin-binding protein (124-132)
  source 1..27: mol_type = other RNA
agctactccatgatcgtgaacaacctg

SEQ ID NO: 40550 - RNA, 27 nt, synthetic construct
  misc_feature 1..27: note = Transmembrane protein 39A (363-371)
  source 1..27: mol_type = other RNA
agctactccaacgccccccagcacatc

SEQ ID NO: 40551 - RNA, 27 nt, synthetic construct
  misc_feature 1..27: note = Serine/threonine-protein kinase LATS2 (554-562)
  source 1..27: mol_type = other RNA
agctactccccctacgccttcaagttc

SEQ ID NO: 40552 - RNA, 27 nt, synthetic construct
  misc_feature 1..27: note = AF4/FMR2 family member 4 (1095-1103)
  source 1..27: mol_type = other RNA
agctacgtgcaggtcacctccaacttc

SEQ ID NO: 40553 - RNA, 33 nt, synthetic construct
  misc_feature 1..33: note = Basement membrane-specific heparan sulfate proteoglycan core protein (176-186)
  source 1..33: mol_type = other RNA
agctacgtgacctccccccagggcttccagttc

SEQ ID NO: 40554 - RNA, 27 nt, synthetic construct
  misc_feature 1..27: note = Transcription factor BTF3 (82-90)
  source 1..27: mol_type = other RNA
accgccgacgacaagaagctgcagttc

SEQ ID NO: 40555 - RNA, 27 nt, synthetic construct
  misc_feature 1..27: note Dolichyl-diphosphooligosaccharide-proteinosyltransferase 48 kDa subunit (78-86)
  source 1..27: mol_type = other RNA
accgccgacgaccccagcctgtccctc

SEQ ID NO: 40556 - RNA, 30 nt, synthetic construct
  misc_feature 1..30: note = Transducin beta-like protein 3 (197-206)
  source 1..30: mol_type = other RNA
accgccgaccacaacctgctcctgtacgag

SEQ ID NO: 40557 - RNA, 27 nt, synthetic construct
  misc_feature 1..27: note = Lymphocyte cytosolic protein 2 (227-235)
  source 1..27: mol_type = other RNA
accgccaagctgcccgccccgagcatc

SEQ ID NO: 40558 - RNA, 27 nt, synthetic construct
  misc_feature 1..27: note = Pyridine nucleotide-disulfide oxidoreductase domain-containing protein 1 (42-50)
  source 1..27: mol_type = other RNA
accgccagccccgtgatcaaggccgtc

SEQ ID NO: 40559 - RNA, 27 nt, synthetic construct
  misc_feature 1..27: note = Programmed cell death 6-interacting protein (658-666)
  source 1..27: mol_type = other RNA
accgcctacgacaacttcgtggagctg

SEQ ID NO: 40560 - RNA, 42 nt, synthetic construct
  misc_feature 1..42: note = Cullin-4B (24-37)
  source 1..42: mol_type = other RNA
accgacggcaacaccagcacgacccccccgacctccgccaag

SEQ ID NO: 40561 - RNA, 27 nt, synthetic construct
  misc_feature 1..27: note = Putative sodium-coupled neutral amino acid transporter 10 (253-261)
  source 1..27: mol_type = other RNA
accgaggccaccgccggcaacgtgctg

SEQ ID NO: 40562 - RNA, 33 nt, synthetic construct
  misc_feature 1..33: note = Optineurin (373-383)
  source 1..33: mol_type = other RNA
accgaggacgagaagagcaagctgaccgtgctc

SEQ ID NO: 40563 - RNA, 36 nt, synthetic construct
  misc_feature 1..36: note = Nuclear factor erythroid 2-related factor 2 (160-171)
  source 1..36: mol_type = other RNA
accgaggaccccaaccagctgaccgtgaacagcctc

SEQ ID NO: 40564 - RNA, 33 nt, synthetic construct
  misc_feature 1..33: note = Actin-related protein 2/3 complex subunit 1A (312-322)
  source 1..33: mol_type = other RNA
accgaggaccgcaacaccgccctggagacgctc

SEQ ID NO: 40565 - RNA, 27 nt, synthetic construct
  misc_feature 1..27: note = Dynactin subunit 2 (131-139)
  source 1..27: mol_type = other RNA
accgaggagaagctgacccccgtgctc

SEQ ID NO: 40566 - RNA, 30 nt, synthetic construct
  misc_feature 1..30: note = Dynactin subunit 2 (131-140)
  source 1..30: mol_type = other RNA
accgaggagaagctgacccccgtgctcctg

SEQ ID NO: 40567 - RNA, 30 nt, synthetic construct
  misc_feature 1..30: note = Protein fuzzy homolog (371-380)
  source 1..30: mol_type = other RNA
accgaggagcccggcaccggggtgcgcctg

SEQ ID NO: 40568 - RNA, 33 nt, synthetic construct
  misc_feature 1..33: note = BRF1 protein (61-71)
  source 1..33: mol_type = other RNA
accgagttcgaggacacccccacgagccagctg

SEQ ID NO: 40569 - RNA, 30 nt, synthetic construct
  misc_feature 1..30: note = Dystonin (2514-2523)
  source 1..30: mol_type = other RNA
accgagatcgacagcaagtggcaggagctg

SEQ ID NO: 40570 - RNA, 27 nt, synthetic construct
  misc_feature 1..27: note = Protein TBRG4 (216-224)
  source 1..27: mol_type = other RNA
accgagatcgaggacagccacaccctg

SEQ ID NO: 40571 - RNA, 27 nt, synthetic construct
  misc_feature 1..27: note = RuvB-like 1 (44-52)
  source 1..27: mol_type = other RNA
accgagatcaagaagaccgaggtgctg

SEQ ID NO: 40572 - RNA, 27 nt, synthetic construct
  misc_feature 1..27: note = MIF2 suppressor (12-20)
  source 1..27: mol_type = other RNA
accgagaacaacgaccacatcaacctg

SEQ ID NO: 40573 - RNA, 27 nt, synthetic construct
  misc_feature 1..27: note = Sodium/potassium-transporting ATPase subunit alpha-1 (206-214)
  source 1..27: mol_type = other RNA
accgagaaccagagcggcgtgtccttc

SEQ ID NO: 40574 - RNA, 27 nt, synthetic construct
  misc_feature 1..27: note = Eukaryotic translation initiation factor 3 subunit L (482-490)
  source 1..27: mol_type = other RNA
accgagcaggagttccgcatccagctg

SEQ ID NO: 40575 - RNA, 30 nt, synthetic construct
  misc_feature 1..30: note = Golgi-associated PDZ and coiled-coil motif-containing protein (106-115)
  source 1..30: mol_type = other RNA
accgagacccaggccgagaaggtggtcctg

SEQ ID NO: 40576 - RNA, 30 nt, synthetic construct
  misc_feature 1..30: note Dolichyl-diphosphooligosaccharide-proteinosyltransferase subunit 2 (371-380)
  source 1..30: mol_type = other RNA
accgaggtgggcatcaccaacgtcgacctg

SEQ ID NO: 40577 - RNA, 30 nt, synthetic construct
  misc_feature 1..30: note = Apoptosis-inducing factor 2 (163-172)
  source 1..30: mol_type = other RNA
accgagtaccccgagaaggaggtgaccctg

SEQ ID NO: 40578 - RNA, 27 nt, synthetic construct
  misc_feature 1..27: note = Fibronectin type III domain-containing protein 3B (635-643)
  source 1..27: mol_type = other RNA
acccacctgaagcccggcaccctctac

SEQ ID NO: 40579 - RNA, 27 nt, synthetic construct
  misc_feature 1..27: note = Transcription factor 12 (468-476)
  source 1..27: mol_type = other RNA
acccaccgcgaggacagcgtgtccctg

SEQ ID NO: 40580 - RNA, 27 nt, synthetic construct
  misc_feature 1..27: note = N-alpha-acetyltransferase 25, NatB auxiliary subunit (500-508)
  source 1..27: mol_type = other RNA
acccacagcccctccaacgcccagttc

SEQ ID NO: 40581 - RNA, 27 nt, synthetic construct
  misc_feature 1..27: note = Minor histocompatibility antigen H13 (287-295)
  source 1..27: mol_type = other RNA
acccacacctacttctacacgagcttc

SEQ ID NO: 40582 - RNA, 27 nt, synthetic construct
  misc_feature 1..27: note = GLTSCR1-like protein (169-177)
  source 1..27: mol_type = other RNA
acccacgtgcccgtcggcgccagcttc

SEQ ID NO: 40583 - RNA, 27 nt, synthetic construct
  misc_feature 1..27: note = Asparagine synthetase (glutamine-hydrolyzing) (553-561)
  source 1..27: mol_type = other RNA
acccactacaagagcgccgtgaaggcc

SEQ ID NO: 40584 - RNA, 33 nt, synthetic construct
  misc_feature 1..33: note = Sorting nexin-18 (279-289)
  source 1..33: mol_type = other RNA
accatcgacgaccccaccaagcagacgaagttc

SEQ ID NO: 40585 - RNA, 27 nt, synthetic construct
  misc_feature 1..27: note = Clathrin interactor 1 (211-219)
  source 1..27: mol_type = other RNA
accatcgacgacaccatcagcaagttc

SEQ ID NO: 40586 - RNA, 27 nt, synthetic construct
  misc_feature 1..27: note = Nucleolar GTP-binding protein 1 (163-171)
  source 1..27: mol_type = other RNA
accatcgaccccaacacccgcacgctg

SEQ ID NO: 40587 - RNA, 39 nt, synthetic construct
  misc_feature 1..39: note = Signal transducer and activator of transcription 5B (372-384)
  source 1..39: mol_type = other RNA
accatcatcagcgagcagcaggccaagtccctgctcaag

SEQ ID NO: 40588 - RNA, 27 nt, synthetic construct
  misc_feature 1..27: note = Sorting nexin-14 (74-82)
  source 1..27: mol_type = other RNA
accatcaagtacaagcccaagcagctg

SEQ ID NO: 40589 - RNA, 33 nt, synthetic construct
  misc_feature 1..33: note = Heterogeneous nuclear ribonucleoproteins A2/B1 (164-174)
  source 1..33: mol_type = other RNA
accatcaacggccacaacgccgaggtgcgcaag

SEQ ID NO: 40590 - RNA, 30 nt, synthetic construct
  misc_feature 1..30: note = Similar to calcium-independent phospholipase A2 (165-174)
  source 1..30: mol_type = other RNA
accatcgtgaaccgcggcatcacccccaag

SEQ ID NO: 40591 - RNA, 33 nt, synthetic construct
  misc_feature 1..33: note = Cytoplasmic dynein 1 heavy chain 1 (1281-1291)
  source 1..33: mol_type = other RNA
accatctacgagggcaagttcgggcgcctgaag

SEQ ID NO: 40592 - RNA, 27 nt, synthetic construct
  misc_feature 1..27: note = Melanoma-associated antigen D1 (153-161)
  source 1..27: mol_type = other RNA
accaaggtgggccccaacgccacctac

SEQ ID NO: 40593 - RNA, 27 nt, synthetic construct
  misc_feature 1..27: note = Calmodulin-binding transcription activator 1 (1179-1187)
  source 1..27: mol_type = other RNA
accctggccgagcacatcatcgaggcc

SEQ ID NO: 40594 - RNA, 36 nt, synthetic construct
  misc_feature 1..36: note = Syndecan-3 (348-359)
  source 1..36: mol_type = other RNA
accctggaggagcccaagcaggccagcgtgacctac

SEQ ID NO: 40595 - RNA, 36 nt, synthetic construct
  misc_feature 1..36: note = Septin-7 (426-437)
  source 1..36: mol_type = other RNA
accctggagaagaacaagaagaagggcaagatcttc

SEQ ID NO: 40596 - RNA, 33 nt, synthetic construct
  misc_feature 1..33: note = Histone-lysine N-methyltransferase ASH1L (2959-2969)
  source 1..33: mol_type = other RNA
accctgttcatccccgagaacagcttccgcaag

SEQ ID NO: 40597 - RNA, 33 nt, synthetic construct
  misc_feature 1..33: note = Uncharacterized protein C1orf198 (300-310)
  source 1..33: mol_type = other RNA
accctgttcagcgagcccaagttcgcccaggtg

SEQ ID NO: 40598 - RNA, 33 nt, synthetic construct
  misc_feature 1..33: note = Signal recognition particle receptor subunit beta (114-124)
  source 1..33: mol_type = other RNA
accctgatcgacctccccggccacgagagcctg

SEQ ID NO: 40599 - RNA, 27 nt, synthetic construct
  misc_feature 1..27: note = Conserved oligomeric Golgi complex subunit 5 (271-279)
  source 1..27: mol_type = other RNA
accctgaaggacaccatcacgagcgtg

SEQ ID NO: 40600 - RNA, 27 nt, synthetic construct
  misc_feature 1..27: note = Transcription intermediary factor 1-beta (187-195)
  source 1..27: mol_type = other RNA
accctgcagaagagcaccaaggaggtg

SEQ ID NO: 40601 - RNA, 27 nt, synthetic construct
  misc_feature 1..27: note = Cell division cycle protein 20 homolog (304-312)
  source 1..27: mol_type = other RNA
accctgagcggccactcccaggaggtg

SEQ ID NO: 40602 - RNA, 27 nt, synthetic construct
  misc_feature 1..27: note = Zinc finger BED domain-containing protein 4 (953-961)
  source 1..27: mol_type = other RNA
accctgagccaggtgatccccatggtc

SEQ ID NO: 40603 - RNA, 27 nt, synthetic construct
  misc_feature 1..27: note = Ubiquitin-60S ribosomal protein L40 (12-20)
  source 1..27: mol_type = other RNA
accctgaccggcaagacgatcaccctc

SEQ ID NO: 40604 - RNA, 27 nt, synthetic construct
  misc_feature 1..27: note = Sodium/potassium-transporting ATPase subunit alpha-3 (782-790)
  source 1..27: mol_type = other RNA
accctgaccagcaacatccccgagatc

SEQ ID NO: 40605 - RNA, 33 nt, synthetic construct
  misc_feature 1..33: note = Putative heat shock protein HSP 90-beta 2 (85-95)
  source 1..33: mol_type = other RNA
accctggtggacaccggcatcgggatgacgaag

SEQ ID NO: 40606 - RNA, 33 nt, synthetic construct
  misc_feature 1..33: note = Lathosterol oxidase (245-255)
  source 1..33: mol_type = other RNA
accctgtgggaccgcatcggcgggagcttcaag

SEQ ID NO: 40607 - RNA, 27 nt, synthetic construct
  misc_feature 1..27: note = Nicotinamide phosphoribosyltransferase (435-443)
  source 1..27: mol_type = other RNA
acccccgccggcaacttcgtgaccctg

SEQ ID NO: 40608 - RNA, 27 nt, synthetic construct
  misc_feature 1..27: note = SH3 domain-containing protein 19 (137-145)
  source 1..27: mol_type = other RNA
acccccgccccgcgccccctgctcctg

SEQ ID NO: 40609 - RNA, 27 nt, synthetic construct
  misc_feature 1..27: note = Ephrin-A5 (207-215)
  source 1..27: mol_type = other RNA
accccccgcatcccgagccggctgctc

SEQ ID NO: 40610 - RNA, 27 nt, synthetic construct
  misc_feature 1..27: note = 40S ribosomal protein S2 (285-293)
  source 1..27: mol_type = other RNA
acccaggcccccgccgtggcgaccacg

SEQ ID NO: 40611 - RNA, 27 nt, synthetic construct
  misc_feature 1..27: note = RNA-binding protein EWS (33-41)
  source 1..27: mol_type = other RNA
acccaggcctacggccagcagagctac

SEQ ID NO: 40612 - RNA, 27 nt, synthetic construct
  misc_feature 1..27: note = 28S ribosomal protein S12, mitochondrial (115-123)
  source 1..27: mol_type = other RNA
acccaggacctgcccggcgtgaagctc

SEQ ID NO: 40613 - RNA, 33 nt, synthetic construct
  misc_feature 1..33: note = Synphilin-1 (60-70)
  source 1..33: mol_type = other RNA
acccagaagcccaccggcatcgccgacgtgtac

SEQ ID NO: 40614 - RNA, 27 nt, synthetic construct
  misc_feature 1..27: note = U5 small nuclear ribonucleoprotein 200 kDa helicase (1765-1773)
  source 1..27: mol_type = other RNA
acccagaaccccaactactacaacctg

SEQ ID NO: 40615 - RNA, 27 nt, synthetic construct
  misc_feature 1..27: note = SWI/SNF-related matrix-associated actin-dependent regulator of chromatin subfamily D member 1 (436-444)
  source 1..27: mol_type = other RNA
acccagcgcgagttcatgctgagcttc

SEQ ID NO: 40616 - RNA, 27 nt, synthetic construct
  misc_feature 1..27: note = Protein FAM204A (125-133)
  source 1..27: mol_type = other RNA
acccagtggaaggagctgacccagtac

SEQ ID NO: 40617 - RNA, 27 nt, synthetic construct
  misc_feature 1..27: note = Cytoskeleton-associated protein 2 (274-282)
  source 1..27: mol_type = other RNA
accagcgccaacgtgaccatccgcaag

SEQ ID NO: 40618 - RNA, 27 nt, synthetic construct
  misc_feature 1..27: note = Uncharacterized protein KIAA2013 (598-606)
  source 1..27: mol_type = other RNA
accagcgcccccaccggccacacgttc

SEQ ID NO: 40619 - RNA, 27 nt, synthetic construct
  misc_feature 1..27: note = Long-chain-fatty-acid-CoA ligase 4 (10-18)
  source 1..27: mol_type = other RNA
accagcgacaagcccggctccccgtac

SEQ ID NO: 40620 - RNA, 27 nt, synthetic construct
  misc_feature 1..27: note = Zinc finger MYM-type protein 1 (293-301)
  source 1..27: mol_type = other RNA
accagcgacctgggcaagaccgagctc

SEQ ID NO: 40621 - RNA, 27 nt, synthetic construct
  misc_feature 1..27: note = Importin subunit alpha-4 (81-89)
  source 1..27: mol_type = other RNA
accagcgacaaccccgtggtccagctg

SEQ ID NO: 40622 - RNA, 27 nt, synthetic construct
  misc_feature 1..27: note = Dual specificity mitogen-activated protein kinase kinase 3 (150-158)
  source 1..27: mol_type = other RNA
accagcctggacaagttctaccgcaag

SEQ ID NO: 40623 - RNA, 33 nt, synthetic construct
  misc_feature 1..33: note = Prothymosin alpha (8-18)
  source 1..33: mol_type = other RNA
accagctccgagatcaccacgaaggacctgaag

SEQ ID NO: 40624 - RNA, 27 nt, synthetic construct
  misc_feature 1..27: note = Histone-lysine N-methyltransferase SETD2 (1436-1444)
  source 1..27: mol_type = other RNA
accagcgtgcccccgggctccgccctg

SEQ ID NO: 40625 - RNA, 27 nt, synthetic construct
  misc_feature 1..27: note = Metastasis-associated protein MTA2 (312-320)
  source 1..27: mol_type = other RNA
accaccgaccgctacatccagcagaag

SEQ ID NO: 40626 - RNA, 27 nt, synthetic construct
  misc_feature 1..27: note = Cyclin-dependent kinase 1 (25-33)
  source 1..27: mol_type = other RNA
accaccggccaggtggtcgccatgaag

SEQ ID NO: 40627 - RNA, 33 nt, synthetic construct
  misc_feature 1..33: note = ATP-dependent RNA helicase DHX8 (1166-1176)
  source 1..33: mol_type = other RNA
accaccatcgacccccgctggctggtggagttc

SEQ ID NO: 40628 - RNA, 27 nt, synthetic construct
  misc_feature 1..27: note = Splicing factor 3A subunit 1 (123-131)
  source 1..27: mol_type = other RNA
accacccagcagcagctgccccagaag

SEQ ID NO: 40629 - RNA, 27 nt, synthetic construct
  misc_feature 1..27: note = Germinal-center associated nuclear protein (203-211)
  source 1..27: mol_type = other RNA
accaccagcaacttcacgttctccaag

SEQ ID NO: 40630 - RNA, 27 nt, synthetic construct
  misc_feature 1..27: note = Vacuolar protein sorting-associated protein 35 (375-383)
  source 1..27: mol_type = other RNA
accaccgtggagatcttcaacaagctg

SEQ ID NO: 40631 - RNA, 30 nt, synthetic construct
  misc_feature 1..30: note = Eukaryotic translation initiation factor 3 subunit L (353-362)
  source 1..30: mol_type = other RNA
accacctacaagtacgagatgatcaacaag

SEQ ID NO: 40632 - RNA, 27 nt, synthetic construct
  misc_feature 1..27: note = Cofilin-1 (12-20)
  source 1..27: mol_type = other RNA
accgtggacgacccctacgccaccttc

SEQ ID NO: 40633 - RNA, 27 nt, synthetic construct
  misc_feature 1..27: note = CCAAT/enhancer-binding protein beta (266-274)
  source 1..27: mol_type = other RNA
accgtggacaagcacagcgacgagtac

SEQ ID NO: 40634 - RNA, 33 nt, synthetic construct
  misc_feature 1..33: note = WD repeat-containing protein 48 (379-389)
  source 1..33: mol_type = other RNA
accgtggacaagaacatgcccaagttcaacaag

SEQ ID NO: 40635 - RNA, 27 nt, synthetic construct
  misc_feature 1..27: note = TRAF2 and NCK-interacting protein kinase (352-360)
  source 1..27: mol_type = other RNA
accgtggaggagggccagcgcctgaag

SEQ ID NO: 40636 - RNA, 30 nt, synthetic construct
  misc_feature 1..30: note = Nicotinamide phosphoribosyltransferase (460-469)
  source 1..30: mol_type = other RNA
accgtgttcaagaacggcaaggtcaccaag

SEQ ID NO: 40637 - RNA, 27 nt, synthetic construct
  misc_feature 1..27: note = E3 ubiquitin-protein ligase RNF213 (4830-4838)
  source 1..27: mol_type = other RNA
accgtgttcctgagcacctggaacaag

SEQ ID NO: 40638 - RNA, 27 nt, synthetic construct
  misc_feature 1..27: note = Chromatin assembly factor 1 subunit B (444-452)
  source 1..27: mol_type = other RNA
accgtgatccgcgaccccccgagcatc

SEQ ID NO: 40639 - RNA, 27 nt, synthetic construct
  misc_feature 1..27: note = Glycine-tRNA ligase (350-358)
  source 1..27: mol_type = other RNA
accgtgctgggctacttcatcgggcgc

SEQ ID NO: 40640 - RNA, 33 nt, synthetic construct
  misc_feature 1..33: note = Beta-lactamase-like protein 2 (237-247)
  source 1..33: mol_type = other RNA
accgtgatggagctggtcaagatcatctacaag

SEQ ID NO: 40641 - RNA, 27 nt, synthetic construct
  misc_feature 1..27: note = Probable U3 small nucleolar RNA-associated protein 11 (238-246)
  source 1..27: mol_type = other RNA
accgtgaacagccccgccatctacaag

SEQ ID NO: 40642 - RNA, 30 nt, synthetic construct
  misc_feature 1..30: note = Complex I assembly factor TIMMDC1, mitochondrial (151-160)
  source 1..30: mol_type = other RNA
accgtgaacaccagcctgaacgtctaccgc

SEQ ID NO: 40643 - RNA, 27 nt, synthetic construct
  misc_feature 1..27: note = Coiled-coil domain-containing protein 66 (124-132)
  source 1..27: mol_type = other RNA
accgtgaacaccagcctggtcggcaag

SEQ ID NO: 40644 - RNA, 27 nt, synthetic construct
  misc_feature 1..27: note = Exportin-1 (648-656)
  source 1..27: mol_type = other RNA
accgtgcaggagcacctgatcgagaag

SEQ ID NO: 40645 - RNA, 27 nt, synthetic construct
  misc_feature 1..27: note = SWI/SNF-related matrix-associated actin-dependent regulator of chromatin subfamily A containing DEAD/H box 1 (109-117)
  source 1..27: mol_type = other RNA
accgtgcaggagaagaccttcaacaag

SEQ ID NO: 40646 - RNA, 27 nt, synthetic construct
  misc_feature 1..27: note = Collagen alpha-3(VI) chain (2723-2731)
  source 1..27: mol_type = other RNA
accgtgcgccccccggtcgccgtgaag

SEQ ID NO: 40647 - RNA, 27 nt, synthetic construct
  misc_feature 1..27: note = Cleavage and polyadenylation specificity factor subunit 3 (440-448)
  source 1..27: mol_type = other RNA
accgtgaccacggtcatcctggaggtg

SEQ ID NO: 40648 - RNA, 33 nt, synthetic construct
  misc_feature 1..33: note = Transformation/transcription domain-associated protein (10-20)
  source 1..33: mol_type = other RNA
accgtggtcgaccagaccacgctgatgaagaag

SEQ ID NO: 40649 - RNA, 36 nt, synthetic construct
  misc_feature 1..36: note = Endoplasmic reticulum-Golgi intermediate compartment protein 1 (103-114)
  source 1..36: mol_type = other RNA
accgtgtacgaggacaagagcggcaagcagcgctac

SEQ ID NO: 40650 - RNA, 36 nt, synthetic construct
  misc_feature 1..36: note = HIG1 domain family member 2A, mitochondrial (27-38)
  source 1..36: mol_type = other RNA
accgtgtaccgcaaccccgagagcttcaaggagaag

SEQ ID NO: 40651 - RNA, 27 nt, synthetic construct
  misc_feature 1..27: note = Neuroblastoma-amplified sequence (1950-1958)
  source 1..27: mol_type = other RNA
acctacgccgacaccctgaaccacctc

SEQ ID NO: 40652 - RNA, 27 nt, synthetic construct
  misc_feature 1..27: note = Dystonin (672-680)
  source 1..27: mol_type = other RNA
acctacgccgagaagctgcaccgcctc

SEQ ID NO: 40653 - RNA, 27 nt, synthetic construct
  misc_feature 1..27: note = Unconventional myosin-Va (386-394)
  source 1..27: mol_type = other RNA
acctacatcaagcccatcagcaagctg

SEQ ID NO: 40654 - RNA, 27 nt, synthetic construct
  misc_feature 1..27: note = Protein transport protein Sec24B (640-648)
  source 1..27: mol_type = other RNA
acctacatcaaccccttcgtgagcttc

SEQ ID NO: 40655 - RNA, 33 nt, synthetic construct
  misc_feature 1..33: note = MORN repeat-containing protein 1 (177-187)
  source 1..33: mol_type = other RNA
acctacaagggccagtggcacagcgacgtgttc

SEQ ID NO: 40656 - RNA, 27 nt, synthetic construct
  misc_feature 1..27: note = Nesprin-2 (2589-2597)
  source 1..27: mol_type = other RNA
acctacctggacaagatcaagaagttc

SEQ ID NO: 40657 - RNA, 27 nt, synthetic construct
  misc_feature 1..27: note = Interferon-induced protein with tetratricopeptide repeats 1 (116-124)
  source 1..27: mol_type = other RNA
acctacctggacaaggtggagaacatc

SEQ ID NO: 40658 - RNA, 27 nt, synthetic construct
  misc_feature 1..27: note = Putative UDP-GlcNAc:betaGal beta-1,3-N-acetylglucosaminyltransferase LOC100288842 (347-355)
  source 1..27: mol_type = other RNA
acctacctggacagcttcaagcgcttc

SEQ ID NO: 40659 - RNA, 33 nt, synthetic construct
  misc_feature 1..33: note = Tenascin (710-720)
  source 1..33: mol_type = other RNA
acctacctgcccgccccggagggcctcaagttc

SEQ ID NO: 40660 - RNA, 27 nt, synthetic construct
  misc_feature 1..27: note = Mid1-interacting protein 1 (6-14)
  source 1..27: mol_type = other RNA
acctacaaccagaagcacagcctgttc

SEQ ID NO: 40661 - RNA, 27 nt, synthetic construct
  misc_feature 1..27: note = Glycogenin-2 (121-129)
  source 1..27: mol_type = other RNA
acctacagccccgccttcaagcagttc

SEQ ID NO: 40662 - RNA, 27 nt, synthetic construct
  misc_feature 1..27: note = 60S ribosomal protein L28 (24-32)
  source 1..27: mol_type = other RNA
acctacagcaccgagcccaacaacctg

SEQ ID NO: 40663 - RNA, 33 nt, synthetic construct
  misc_feature 1..33: note = Vacuolar protein sorting-associated protein 13B (523-533)
  source 1..33: mol_type = other RNA
acctacaccgagatcgccggcatgcagcgcttc

SEQ ID NO: 40664 - RNA, 27 nt, synthetic construct
  misc_feature 1..27: note = 5'-3' exoribonuclease 1 (313-321)
  source 1..27: mol_type = other RNA
acctacgtgaccatcctgcccgagctc

SEQ ID NO: 40665 - RNA, 27 nt, synthetic construct
  misc_feature 1..27: note = EF-hand calcium-binding domain-containing protein 11 (105-113)
  source 1..27: mol_type = other RNA
acctactaccgcggcttcctgaccctc

SEQ ID NO: 40666 - RNA, 27 nt, synthetic construct
  misc_feature 1..27: note = Exocyst complex component 4 (15-23)
  source 1..27: mol_type = other RNA
gtggccgccgcgcacagcgtcgtgctg

SEQ ID NO: 40667 - RNA, 27 nt, synthetic construct
  misc_feature 1..27: note = Pre-mRNA-splicing factor RBM22 (282-290)
  source 1..27: mol_type = other RNA
gtggccgccgagaagagcttcaacaag

SEQ ID NO: 40668 - RNA, 27 nt, synthetic construct
  misc_feature 1..27: note = Protein disulfide-isomerase A4 (76-84)
  source 1..27: mol_type = other RNA
gtggccgacaaggacaccgtcctgctc

SEQ ID NO: 40669 - RNA, 30 nt, synthetic construct
  misc_feature 1..30: note Dolichyl-diphosphooligosaccharide-proteinosyltransferase 48 kDa subunit (203-212)
  source 1..30: mol_type = other RNA
gtggccgaccccgacaacccgctggtcctc

SEQ ID NO: 40670 - RNA, 33 nt, synthetic construct
  misc_feature 1..33: note = KN motif and ankyrin repeat domain-containing protein 2 (489-499)
  source 1..33: mol_type = other RNA
gtggccgaccccaccgcccaccgccggagcctg

SEQ ID NO: 40671 - RNA, 27 nt, synthetic construct
  misc_feature 1..27: note = 40S ribosomal protein S5 (11-19)
  source 1..27: mol_type = other RNA
gtggccgagacccccgacatcaagctg

SEQ ID NO: 40672 - RNA, 27 nt, synthetic construct
  misc_feature 1..27: note = ATP-dependent 6-phosphofructokinase, liver type (717-725)
  source 1..27: mol_type = other RNA
gtggccttcagccccgtcaccgagctg

SEQ ID NO: 40673 - RNA, 27 nt, synthetic construct
  misc_feature 1..27: note = Inosine-5'-monophosphate dehydrogenase 2 (219-227)
  source 1..27: mol_type = other RNA
gtggccatcatcgcccgcaccgacctg

SEQ ID NO: 40674 - RNA, 27 nt, synthetic construct
  misc_feature 1..27: note = Transmembrane protein 41B (243-251)
  source 1..27: mol_type = other RNA
gtggccatcaaggccggcaccaccctg

SEQ ID NO: 40675 - RNA, 33 nt, synthetic construct
  misc_feature 1..33: note = Importin-9 (102-112)
  source 1..33: mol_type = other RNA
gtggccatgagccccgagctgatccagcagttc

SEQ ID NO: 40676 - RNA, 27 nt, synthetic construct
  misc_feature 1..27: note = Cytochrome c oxidase subunit 7A2, mitochondrial (75-83)
  source 1..27: mol_type = other RNA
gtggccagcttccccaagaagcaggag

SEQ ID NO: 40677 - RNA, 27 nt, synthetic construct
  misc_feature 1..27: note = Transketolase (365-373)
  source 1..27: mol_type = other RNA
gtggccaccgagaaggccgtcgagctg

SEQ ID NO: 40678 - RNA, 27 nt, synthetic construct
  misc_feature 1..27: note = Hydroxyacylglutathione hydrolase-like protein (26-34)
  source 1..27: mol_type = other RNA
gtggccgtcgacgtggccgtgcccaag

SEQ ID NO: 40679 - RNA, 42 nt, synthetic construct
  misc_feature 1..42: note = Myosin-9 (1950-1963)
  source 1..42: mol_type = other RNA
gtggacggcaaggccgacggggccgaggcgaagcccgccgag

SEQ ID NO: 40680 - RNA, 27 nt, synthetic construct
  misc_feature 1..27: note = StAR-related lipid transfer protein 13 (841-849)
  source 1..27: mol_type = other RNA
gtggaggcccccccgagcgtcgtgctg

SEQ ID NO: 40681 - RNA, 30 nt, synthetic construct
  misc_feature 1..30: note = Cytoplasmic dynein 1 heavy chain 1 (236-245)
  source 1..30: mol_type = other RNA
gtggaggaccccaccttcctgaaccagctc

SEQ ID NO: 40682 - RNA, 30 nt, synthetic construct
  misc_feature 1..30: note = Protein strawberry notch homolog 1 (1087-1096)
  source 1..30: mol_type = other RNA
gtggaggaccgcagcggcatcctgaccctc

SEQ ID NO: 40683 - RNA, 33 nt, synthetic construct
  misc_feature 1..33: note = Condensin complex subunit 3 (683-693)
  source 1..33: mol_type = other RNA
gtggaggagaccgccaccgccaagaacgtcctg

SEQ ID NO: 40684 - RNA, 30 nt, synthetic construct
  misc_feature 1..30: note = Serine/threonine-protein phosphatase 2A 55 kDa regulatory subunit B alpha isoform (34-43)
  source 1..30: mol_type = other RNA
gtggagttcaaccacagcggcgagctgctc

SEQ ID NO: 40685 - RNA, 33 nt, synthetic construct
  misc_feature 1..33: note = Dynactin subunit 3 (113-123)
  source 1..33: mol_type = other RNA
gtggagatcaccgaggagagcaaggccctgctc

SEQ ID NO: 40686 - RNA, 33 nt, synthetic construct
  misc_feature 1..33: note = Coatomer subunit delta (229-239)
  source 1..33: mol_type = other RNA
gtggagaacgaggacaagaagggcgtccagctg

SEQ ID NO: 40687 - RNA, 36 nt, synthetic construct
  misc_feature 1..36: note = Transmembrane emp24 domain-containing protein 4 (79-90)
  source 1..36: mol_type = other RNA
gtggaggtcaaggaccccgacggcaaggtggtgctg

SEQ ID NO: 40688 - RNA, 30 nt, synthetic construct
  misc_feature 1..30: note = Neuroblast differentiation-associated protein AHNAK (866-875)
  source 1..30: mol_type = other RNA
gtggaggtccagggccccgactggcacctg

SEQ ID NO: 40689 - RNA, 27 nt, synthetic construct
  misc_feature 1..27: note = Coatomer subunit alpha (256-264)
  source 1..27: mol_type = other RNA
gtgttccacccccgccaggagctgatc

SEQ ID NO: 40690 - RNA, 27 nt, synthetic construct
  misc_feature 1..27: note = Alpha-internexin (107-115)
  source 1..27: mol_type = other RNA
gtgttcatcgagaaggtccaccagctg

SEQ ID NO: 40691 - RNA, 27 nt, synthetic construct
  misc_feature 1..27: note = Protein unc-119 homolog B (162-170)
  source 1..27: mol_type = other RNA
gtgggcgacaagcccgtcagcaacttc

SEQ ID NO: 40692 - RNA, 27 nt, synthetic construct
  misc_feature 1..27: note = Dehydrogenase/reductase SDR family member on chromosome X (20-28)
  source 1..27: mol_type = other RNA
gtgatcctggcccagctcctgcgccgg

SEQ ID NO: 40693 - RNA, 30 nt, synthetic construct
  misc_feature 1..30: note = Transcription initiation factor IIA subunit 1 (21-30)
  source 1..30: mol_type = other RNA
gtgatcaacgacgtccgcgacatcttcctg

SEQ ID NO: 40694 - RNA, 27 nt, synthetic construct
  misc_feature 1..27: note = Protein FAM208B (1046-1054)
  source 1..27: mol_type = other RNA
gtgatcaaccccgagccgatcaccctg

SEQ ID NO: 40695 - RNA, 27 nt, synthetic construct
  misc_feature 1..27: note = Copine-2 (523-531)
  source 1..27: mol_type = other RNA
gtgctggccgagctcccccagcaggtc

SEQ ID NO: 40696 - RNA, 33 nt, synthetic construct
  misc_feature 1..33: note = High affinity cationic amino acid transporter 1 (147-157)
  source 1..33: mol_type = other RNA
gtgctggccgagaaccccgacatcttcgccgtc

SEQ ID NO: 40697 - RNA, 39 nt, synthetic construct
  misc_feature 1..39: note = Neudesin (19-31)
  source 1..39: mol_type = other RNA
gtgctggccctcgcccccggcctgccgaccgcgcgcgcc

SEQ ID NO: 40698 - RNA, 39 nt, synthetic construct
  misc_feature 1..39: note = Activating signal cointegrator 1 complex subunit 2 (166-178)
  source 1..39: mol_type = other RNA
gtgctgttcggcaaggggaacagccccctcctgcagaag

SEQ ID NO: 40699 - RNA, 33 nt, synthetic construct
  misc_feature 1..33: note = Acyl-CoA:lysophosphatidylglycerol acyltransferase 1 (180-190)
  source 1..33: mol_type = other RNA
gtgctgttccccgagggcgggttcctccgcaag

SEQ ID NO: 40700 - RNA, 27 nt, synthetic construct
  misc_feature 1..27: note = Importin-7 (169-177)
  source 1..27: mol_type = other RNA
gtgctgatccagaagcagatcttcaag

SEQ ID NO: 40701 - RNA, 27 nt, synthetic construct
  misc_feature 1..27: note = Tight junction protein ZO-1 (1634-1642)
  source 1..27: mol_type = other RNA
gtgctgagctccatcgagaccggcgtc

SEQ ID NO: 40702 - RNA, 27 nt, synthetic construct
  misc_feature 1..27: note = Interleukin-4 receptor subunit alpha (335-343)
  source 1..27: mol_type = other RNA
gtgctgtggcccgagagcatctccgtc

SEQ ID NO: 40703 - RNA, 36 nt, synthetic construct
  misc_feature 1..36: note Dolichyl-diphosphooligosaccharide-proteinosyltransferase subunit 4 (23-34)
  source 1..36: mol_type = other RNA
gtgctgtaccactacgtcgccgtgaacaaccccaag

SEQ ID NO: 40704 - RNA, 33 nt, synthetic construct
  misc_feature 1..33: note = Clathrin heavy chain 1 (788-798)
  source 1..33: mol_type = other RNA
gtgctgtacctctaccgcaacaacctgcagaag

SEQ ID NO: 40705 - RNA, 27 nt, synthetic construct
  misc_feature 1..27: note = ADNP homeobox protein 2 (968-976)
  source 1..27: mol_type = other RNA
gtgatgcacgacagctccttcagcgtc

SEQ ID NO: 40706 - RNA, 30 nt, synthetic construct
  misc_feature 1..30: note = Myosin-10 (1967-1976)
  source 1..30: mol_type = other RNA
gtgaacgagacccagcccccgcagagcgag

SEQ ID NO: 40707 - RNA, 27 nt, synthetic construct
  misc_feature 1..27: note = Fas-activated serine/threonine kinase (383-391)
  source 1..27: mol_type = other RNA
gtgcccatcttcccgcagcccctgatc

SEQ ID NO: 40708 - RNA, 33 nt, synthetic construct
  misc_feature 1..33: note = DNA-(apurinic or apyrimidinic site) lyase (172-182)
  source 1..33: mol_type = other RNA
gtgcccaacgccggccgcgggctggtccggctc

SEQ ID NO: 40709 - RNA, 27 nt, synthetic construct
  misc_feature 1..27: note = Eukaryotic translation initiation factor 3 subunit A (428-436)
  source 1..27: mol_type = other RNA
gtgccccagctgcagaacaacaccatc

SEQ ID NO: 40710 - RNA, 27 nt, synthetic construct
  misc_feature 1..27: note = Zinc finger CCCH domain-containing protein 7A (237-245)
  source 1..27: mol_type = other RNA
gtgcccgtcatgccgctgaccagcatc

SEQ ID NO: 40711 - RNA, 24 nt, synthetic construct
  misc_feature 1..24: note = Cellular tumor antigen p53 (218-225)
  source 1..24: mol_type = other RNA
gtgccctacgagccgcccgaggtc

SEQ ID NO: 40712 - RNA, 27 nt, synthetic construct
  misc_feature 1..27: note = 40S ribosomal protein S11 (120-128)
  source 1..27: mol_type = other RNA
gtgcagatcggcgacatcgtcaccgtg

SEQ ID NO: 40713 - RNA, 27 nt, synthetic construct
  misc_feature 1..27: note = Golgin-45 (153-161)
  source 1..27: mol_type = other RNA
gtgcagaccgaggtcaaccgcgagctg

SEQ ID NO: 40714 - RNA, 27 nt, synthetic construct
  misc_feature 1..27: note = Centrosomal protein of 192 kDa (314-322)
  source 1..27: mol_type = other RNA
gtgcgcaacccccggatcaccagcctg

SEQ ID NO: 40715 - RNA, 27 nt, synthetic construct
  misc_feature 1..27: note = Oxidoreductase HTATIP2 (105-113)
  source 1..27: mol_type = other RNA
gtgcgcgtcgaccgggactacgtgctg

SEQ ID NO: 40716 - RNA, 27 nt, synthetic construct
  misc_feature 1..27: note = Serine/threonine-protein phosphatase 4 catalytic subunit (102-110)
  source 1..27: mol_type = other RNA
gtgcgctaccccgaccggatcaccctg

SEQ ID NO: 40717 - RNA, 27 nt, synthetic construct
  misc_feature 1..27: note = Phosphorylated CTD-interacting factor 1 (411-419)
  source 1..27: mol_type = other RNA
gtgagcgcccccccgatgccctccgtc

SEQ ID NO: 40718 - RNA, 27 nt, synthetic construct
  misc_feature 1..27: note = Protein prenyltransferase alpha subunit repeat-containing protein 1 (214-222)
  source 1..27: mol_type = other RNA
gtgagcgaccactccggcttccactac

SEQ ID NO: 40719 - RNA, 36 nt, synthetic construct
  misc_feature 1..36: note = Nuclear protein localization protein 4 homolog (316-327)
  source 1..36: mol_type = other RNA
gtgagcgaggacacccgcaagggcaccgtccggtac

SEQ ID NO: 40720 - RNA, 27 nt, synthetic construct
  misc_feature 1..27: note = Neuronal regeneration-related protein (79-87)
  source 1..27: mol_type = other RNA
gtgagccaggagcccttcccgaacaag

SEQ ID NO: 40721 - RNA, 27 nt, synthetic construct
  misc_feature 1..27: note = Mannosyl-oligosaccharide glucosidase (210-218)
  source 1..27: mol_type = other RNA
gtgaccgacggcaaggaggtcctgctc

SEQ ID NO: 40722 - RNA, 27 nt, synthetic construct
  misc_feature 1..27: note = Attractin (8-16)
  source 1..27: mol_type = other RNA
gtgaccgacggccccgggaactacaag

SEQ ID NO: 40723 - RNA, 27 nt, synthetic construct
  misc_feature 1..27: note = U3 small nucleolar ribonucleoprotein protein IMP3 (23-31)
  source 1..27: mol_type = other RNA
gtgaccgaccacaacctgcacgagctc

SEQ ID NO: 40724 - RNA, 27 nt, synthetic construct
  misc_feature 1..27: note = Protocadherin Fat 1 (1217-1225)
  source 1..27: mol_type = other RNA
gtgaccgacaacggcagccccccgaag

SEQ ID NO: 40725 - RNA, 30 nt, synthetic construct
  misc_feature 1..30: note = Death-inducer obliterator 1 (716-725)
  source 1..30: mol_type = other RNA
gtgaccgacaaccgctacaagagcaagtac

SEQ ID NO: 40726 - RNA, 33 nt, synthetic construct
  misc_feature 1..33: note = Fructose-bisphosphate aldolase A (87-97)
  source 1..33: mol_type = other RNA
gtgaccgagaaggtcctggccgccgtgtacaag

SEQ ID NO: 40727 - RNA, 33 nt, synthetic construct
  misc_feature 1..33: note = Prefoldin subunit 4 (11-21)
  source 1..33: mol_type = other RNA
gtgaccttcgaggaccagcagaagatcaacaag

SEQ ID NO: 40728 - RNA, 33 nt, synthetic construct
  misc_feature 1..33: note = Phosphoserine aminotransferase (349-359)
  source 1..33: mol_type = other RNA
gtgaccatcgaggacgtccagaagctggccgcc

SEQ ID NO: 40729 - RNA, 39 nt, synthetic construct
  misc_feature 1..39: note = Phosphate carrier protein, mitochondrial (107-119)
  source 1..39: mol_type = other RNA
gtgaccctgaaggaggacggcgtccgcgggctcgccaag

SEQ ID NO: 40730 - RNA, 30 nt, synthetic construct
  misc_feature 1..30: note = Apoptosis inhibitor 5 (368-377)
  source 1..30: mol_type = other RNA
gtgaccctgagctggaagcccgtccagaag

SEQ ID NO: 40731 - RNA, 30 nt, synthetic construct
  misc_feature 1..30: note = Small subunit processome component 20 homolog (830-839)
  source 1..30: mol_type = other RNA
gtgaccaaccccgacatcgccgccaagaag

SEQ ID NO: 40732 - RNA, 27 nt, synthetic construct
  misc_feature 1..27: note = Putative PIP5K1A and PSMD4-like protein (656-664)
  source 1..27: mol_type = other RNA
gtgaccgtccccccgggccccagcctg

SEQ ID NO: 40733 - RNA, 30 nt, synthetic construct
  misc_feature 1..30: note = Something about silencing protein 10 (302-311)
  source 1..30: mol_type = other RNA
gtgacctaccgcaacctgatcaacaagctc

SEQ ID NO: 40734 - RNA, 27 nt, synthetic construct
  misc_feature 1..27: note = 116 kDa U5 small nuclear ribonucleoprotein component (795-803)
  source 1..27: mol_type = other RNA
gtggtcgcccaggagcccctgcaccgc

SEQ ID NO: 40735 - RNA, 27 nt, synthetic construct
  misc_feature 1..27: note = E3 ubiquitin-protein ligase TRIM23 (309-317)
  source 1..27: mol_type = other RNA
gtggtcgacgcccacgtgcgcgagaag

SEQ ID NO: 40736 - RNA, 27 nt, synthetic construct
  misc_feature 1..27: note = X-ray repair cross-complementing protein 5 (174-182)
  source 1..27: mol_type = other RNA
gtggtcgacgccaagaccctgaagaag

SEQ ID NO: 40737 - RNA, 36 nt, synthetic construct
  misc_feature 1..36: note = DNA damage-binding protein 1 (364-375)
  source 1..36: mol_type = other RNA
gtggtcgacctggagcgccagggccaggggcagctc

SEQ ID NO: 40738 - RNA, 33 nt, synthetic construct
  misc_feature 1..33: note = Vacuolar protein sorting-associated protein 45 (3-13)
  source 1..33: mol_type = other RNA
gtggtcttcgccgtgaagcagtacatcagcaag

SEQ ID NO: 40739 - RNA, 33 nt, synthetic construct
  misc_feature 1..33: note = 60S ribosomal protein L8 (15-25)
  source 1..33: mol_type = other RNA
gtggtcttccgcgacccctaccggttcaagaag

SEQ ID NO: 40740 - RNA, 30 nt, synthetic construct
  misc_feature 1..30: note = Rho-related BTB domain-containing protein 3 (256-265)
  source 1..30: mol_type = other RNA
gtggtcttctacaaccccaacctgaagaag

SEQ ID NO: 40741 - RNA, 33 nt, synthetic construct
  misc_feature 1..33: note = Protein FAM171B (18-28)
  source 1..33: mol_type = other RNA
gtggtcctgctcaaggcccgcctggtgcccgcc

SEQ ID NO: 40742 - RNA, 33 nt, synthetic construct
  misc_feature 1..33: note = Clathrin interactor 1 (17-27)
  source 1..33: mol_type = other RNA
gtggtcatgaactacagcgagatcgagtccaag

SEQ ID NO: 40743 - RNA, 33 nt, synthetic construct
  misc_feature 1..33: note = Protein disulfide-isomerase A4 (356-366)
  source 1..33: mol_type = other RNA
gtggtcatgcagcccgagaagttccagagcaag

SEQ ID NO: 40744 - RNA, 30 nt, synthetic construct
  misc_feature 1..30: note = Sulfate anion transporter 1 (417-426)
  source 1..30: mol_type = other RNA
gtggtcagcgccaccgtggtgctgctcgtc

SEQ ID NO: 40745 - RNA, 27 nt, synthetic construct
  misc_feature 1..27: note = 26S proteasome non-ATPase regulatory subunit 14 (143-151)
  source 1..27: mol_type = other RNA
gtggtcgtggaccccatccagagcgtg

SEQ ID NO: 40746 - RNA, 27 nt, synthetic construct
  misc_feature 1..27: note = Sodium/potassium-transporting ATPase subunit alpha-1 (185-193)
  source 1..27: mol_type = other RNA
gtggtcgtgggcgacctggtggaggtc

SEQ ID NO: 40747 - RNA, 27 nt, synthetic construct
  misc_feature 1..27: note = Receptor tyrosine-protein kinase erbB-3 (147-155)
  source 1..27: mol_type = other RNA
gtgtacatcgagaagaacgacaagctg

SEQ ID NO: 40748 - RNA, 27 nt, synthetic construct
  misc_feature 1..27: note = Uncharacterized protein C5orf42 (702-710)
  source 1..27: mol_type = other RNA
gtgtacatcctgcagcccgaggtcatc

SEQ ID NO: 40749 - RNA, 30 nt, synthetic construct
  misc_feature 1..30: note = Small nuclear ribonucleoprotein Sm D3 (61-70)
  source 1..30: mol_type = other RNA
gtgtacatccgcggcagcaagatccggttc

SEQ ID NO: 40750 - RNA, 27 nt, synthetic construct
  misc_feature 1..27: note = Selenoprotein K (56-64)
  source 1..27: mol_type = other RNA
gtgtacatcagcaacggccaggtcctg

SEQ ID NO: 40751 - RNA, 27 nt, synthetic construct
  misc_feature 1..27: note = Fibronectin type III domain-containing protein 3B (651-659)
  source 1..27: mol_type = other RNA
gtgtacaagggcgaggaggccaccttc

SEQ ID NO: 40752 - RNA, 24 nt, synthetic construct
  misc_feature 1..24: note = Transmembrane protein 41B (71-78)
  source 1..24: mol_type = other RNA
gtgtacaagaacttcccccagctg

SEQ ID NO: 40753 - RNA, 27 nt, synthetic construct
  misc_feature 1..27: note = Surfeit locus protein 4 (220-228)
  source 1..27: mol_type = other RNA
gtgtacaagcccatgcacgacttcctg

SEQ ID NO: 40754 - RNA, 30 nt, synthetic construct
  misc_feature 1..30: note = Mitogen-activated protein kinase-binding protein 1 (356-365)
  source 1..30: mol_type = other RNA
gtgtacaacgaccacagcatctacgtctgg

SEQ ID NO: 40755 - RNA, 27 nt, synthetic construct
  misc_feature 1..27: note CMP-N-acetylneuraminate-beta-galactosamide-alpha-2,3-sialyl transf erase 1 (190-198)
  source 1..27: mol_type = other RNA
gtgtaccccgagagcttccgcgagctg

SEQ ID NO: 40756 - RNA, 27 nt, synthetic construct
  misc_feature 1..27: note = Inactive tyrosine-protein kinase 7 (603-611)
  source 1..27: mol_type = other RNA
gtgtaccagggccacaccgccctgctc

SEQ ID NO: 40757 - RNA, 27 nt, synthetic construct
  misc_feature 1..27: note = Bcl-2 homologous antagonist/killer (142-150)
  source 1..27: mol_type = other RNA
gtgtaccagcacggcctgaccgggttc

SEQ ID NO: 40758 - RNA, 27 nt, synthetic construct
  misc_feature 1..27: note = Rho GTPase-activating protein 5 (413-421)
  source 1..27: mol_type = other RNA
gtgtaccagaaccacgtccagcacctg

SEQ ID NO: 40759 - RNA, 27 nt, synthetic construct
  misc_feature 1..27: note = Mitochondrial peptide methionine sulfoxide reductase (82-90)
  source 1..27: mol_type = other RNA
gtgtaccagcccgagcacatgagcttc

SEQ ID NO: 40760 - RNA, 33 nt, synthetic construct
  misc_feature 1..33: note = Complex I assembly factor TIMMDC1, mitochondrial (158-168)
  source 1..33: mol_type = other RNA
gtgtaccgcaacaaggacgccctgagccacttc

SEQ ID NO: 40761 - RNA, 30 nt, synthetic construct
  misc_feature 1..30: note = Unconventional myosin-XVIIIa (453-462)
  source 1..30: mol_type = other RNA
gtgtacagcgagaaggtcatgcacatgttc

SEQ ID NO: 40762 - RNA, 30 nt, synthetic construct
  misc_feature 1..30: note = Latent-transforming growth factor beta-binding protein 3 (448-457)
  source 1..30: mol_type = other RNA
gtgtacagctccgccgagttccacagcctg

SEQ ID NO: 40763 - RNA, 27 nt, synthetic construct
  misc_feature 1..27: note = Uncharacterized protein C11orf80 (292-300)
  source 1..27: mol_type = other RNA
gtgtacaccctgctcaccacgcacctg

SEQ ID NO: 40764 - RNA, 27 nt, synthetic construct
  misc_feature 1..27: note = Integrin alpha-11 (440-448)
  source 1..27: mol_type = other RNA
gtgtacgtcgccggcgccccccgcttc

SEQ ID NO: 40765 - RNA, 27 nt, synthetic construct
  misc_feature 1..27: note = Angiomotin (598-606)
  source 1..27: mol_type = other RNA
gtgtacgtcgacaaggtggagaagatg

SEQ ID NO: 40766 - RNA, 27 nt, synthetic construct
  misc_feature 1..27: note = Early endosome antigen 1 (285-293)
  source 1..27: mol_type = other RNA
gtgtacgtccaggagctgcagaagctc

SEQ ID NO: 40767 - RNA, 27 nt, synthetic construct
  misc_feature 1..27: note = Transformation/transcription domain-associated protein (1973-1981)
  source 1..27: mol_type = other RNA
gtgtactaccccgtccgccaccacctg

SEQ ID NO: 40768 - RNA, 27 nt, synthetic construct
  misc_feature 1..27: note = Actin-binding protein anillin (212-220)
  source 1..27: mol_type = other RNA
tgggaggacgacgtgaaccacagcttc

SEQ ID NO: 40769 - RNA, 27 nt, synthetic construct
  misc_feature 1..27: note = AP-5 complex subunit zeta-1 (1307-1315)
  source 1..27: mol_type = other RNA
tacgccgccggcgtgcacagcgtcctg

SEQ ID NO: 40770 - RNA, 30 nt, synthetic construct
  misc_feature 1..30: note = Proline-rich protein 12 (50-59)
  source 1..30: mol_type = other RNA
tacgccgccccccacccgctgcagagctac

SEQ ID NO: 40771 - RNA, 27 nt, synthetic construct
  misc_feature 1..27: note = A-kinase anchor protein 12 (1228-1236)
  source 1..27: mol_type = other RNA
tacgccgacgagaagaccaaggacgtg

SEQ ID NO: 40772 - RNA, 27 nt, synthetic construct
  misc_feature 1..27: note = Maturin (34-42)
  source 1..27: mol_type = other RNA
tacgccgaccccggcgtgagcttctac

SEQ ID NO: 40773 - RNA, 27 nt, synthetic construct
  misc_feature 1..27: note = Integrin alpha-V (110-118)
  source 1..27: mol_type = other RNA
tacgccaaggacgaccccctggagttc

SEQ ID NO: 40774 - RNA, 27 nt, synthetic construct
  misc_feature 1..27: note = Ras-related protein Rab-1B (43-51)
  source 1..27: mol_type = other RNA
tacgccagcgagaacgtgaacaagctg

SEQ ID NO: 40775 - RNA, 27 nt, synthetic construct
  misc_feature 1..27: note = Acetyl-CoA carboxylase 2 (1068-1076)
  source 1..27: mol_type = other RNA
tacgccagcaacatcacctccgtgctg

SEQ ID NO: 40776 - RNA, 30 nt, synthetic construct
  misc_feature 1..30: note = Translocon-associated protein subunit beta (33-42)
  source 1..30: mol_type = other RNA
tacgccgtggagggccgcgacctgaccctc

SEQ ID NO: 40777 - RNA, 24 nt, synthetic construct
  misc_feature 1..24: note = Melanoma-associated antigen B2 (233-240)
  source 1..24: mol_type = other RNA
tacgacggcgaggagcacagcgtg

SEQ ID NO: 40778 - RNA, 33 nt, synthetic construct
  misc_feature 1..33: note = Protein phosphatase 1A (59-69)
  source 1..33: mol_type = other RNA
tacgacggccacgccgggagccaggtggccaag

SEQ ID NO: 40779 - RNA, 27 nt, synthetic construct
  misc_feature 1..27: note = NAD(P)H dehydrogenase (quinone) 1 (130-138)
  source 1..27: mol_type = other RNA
tacgacaagggccccttccgcagcaag

SEQ ID NO: 40780 - RNA, 30 nt, synthetic construct
  misc_feature 1..30: note = Proteasome subunit beta type-4 (177-186)
  source 1..30: mol_type = other RNA
tacgaggcccccagcctggccaccggctac

SEQ ID NO: 40781 - RNA, 27 nt, synthetic construct
  misc_feature 1..27: note = RNA-binding motif protein, X-linked 2 (84-92)
  source 1..27: mol_type = other RNA
tacgaggaccagcgcagcaccatcctg

SEQ ID NO: 40782 - RNA, 27 nt, synthetic construct
  misc_feature 1..27: note = SAP30-binding protein (41-49)
  source 1..27: mol_type = other RNA
tacggcgaggacgacttcagccgcctg

SEQ ID NO: 40783 - RNA, 27 nt, synthetic construct
  misc_feature 1..27: note = Tubulin-specific chaperone C (219-227)
  source 1..27: mol_type = other RNA
tacggcaaccccaacaccctgcgcctc

SEQ ID NO: 40784 - RNA, 27 nt, synthetic construct
  misc_feature 1..27: note = Regulator of microtubule dynamics protein 1 (188-196)
  source 1..27: mol_type = other RNA
tacatcatcaaggagcacttcgagaag

SEQ ID NO: 40785 - RNA, 27 nt, synthetic construct
  misc_feature 1..27: note = Tensin-3 (11-19)
  source 1..27: mol_type = other RNA
tacatcaccgagcgcatcatcgccgtg

SEQ ID NO: 40786 - RNA, 27 nt, synthetic construct
  misc_feature 1..27: note = Uncharacterized protein CXorf57 (109-117)
  source 1..27: mol_type = other RNA
tacctggaccccagcctcaactccctg

SEQ ID NO: 40787 - RNA, 27 nt, synthetic construct
  misc_feature 1..27: note = Ragulator complex protein LAMTOR2 (114-122)
  source 1..27: mol_type = other RNA
tacctggaggagcccctcacccaggtg

SEQ ID NO: 40788 - RNA, 27 nt, synthetic construct
  misc_feature 1..27: note = HLA class I histocompatibility antigen, B-15 alpha chain (195-203)
  source 1..27: mol_type = other RNA
tacctggagaacggcaaggagaccctc

SEQ ID NO: 40789 - RNA, 27 nt, synthetic construct
  misc_feature 1..27: note = Proteasome activator complex subunit 4 (1375-1383)
  source 1..27: mol_type = other RNA
tacctggagcccaagctcacccaggtg

SEQ ID NO: 40790 - RNA, 27 nt, synthetic construct
  misc_feature 1..27: note = Inhibitor of nuclear factor kappa-B kinase subunit alpha (354-362)
  source 1..27: mol_type = other RNA
tacctgttcgacaagagcaagaccgtg

SEQ ID NO: 40791 - RNA, 27 nt, synthetic construct
  misc_feature 1..27: note = Unconventional myosin-X (243-251)
  source 1..27: mol_type = other RNA
tacctgctcgagaagaaccgcgtggtc

SEQ ID NO: 40792 - RNA, 33 nt, synthetic construct
  misc_feature 1..33: note = Protein-lysine N-methyltransferase EEF2KMT (112-122)
  source 1..33: mol_type = other RNA
tacctgctccccagcggcgggtccgtgaccctg

SEQ ID NO: 40793 - RNA, 27 nt, synthetic construct
  misc_feature 1..27: note = ER lumen protein-retaining receptor 3 (196-204)
  source 1..27: mol_type = other RNA
tacctgtacgtgaccaaggtcctcaag

SEQ ID NO: 40794 - RNA, 30 nt, synthetic construct
  misc_feature 1..30: note = Zinc-binding alcohol dehydrogenase domain-containing protein 2 (355-364)
  source 1..30: mol_type = other RNA
tacatgtacatgggcaagaacaccgggaag

SEQ ID NO: 40795 - RNA, 27 nt, synthetic construct
  misc_feature 1..27: note = Ubiquitin-60S ribosomal protein L40 (64-72)
  source 1..27: mol_type = other RNA
tacaacatccagaaggagagcaccctg

SEQ ID NO: 40796 - RNA, 30 nt, synthetic construct
  misc_feature 1..30: note = Disabled homolog 2-interacting protein (418-427)
  source 1..30: mol_type = other RNA
taccccgacgaccgcaccgcccggaccctg

SEQ ID NO: 40797 - RNA, 33 nt, synthetic construct
  misc_feature 1..33: note = 7-methylguanosine phosphate-specific 5'-nucleotidase (85-95)
  source 1..33: mol_type = other RNA
taccccatcgagatcgacccgcaccgcaccgtg

SEQ ID NO: 40798 - RNA, 27 nt, synthetic construct
  misc_feature 1..27: note = RNA polymerase II-associated protein 3 (96-104)
  source 1..27: mol_type = other RNA
taccccaaggaggccgacatcgtgatc

SEQ ID NO: 40799 - RNA, 27 nt, synthetic construct
  misc_feature 1..27: note = Rabankyrin-5 (262-270)
  source 1..27: mol_type = other RNA
taccccctgcacaaggccatcaaggtg

SEQ ID NO: 40800 - RNA, 27 nt, synthetic construct
  misc_feature 1..27: note = AP-1 complex subunit beta-1 (421-429)
  source 1..27: mol_type = other RNA
taccccaacaagtacgagagcgtgatc

SEQ ID NO: 40801 - RNA, 27 nt, synthetic construct
  misc_feature 1..27: note = Ataxin-2 (759-767)
  source 1..27: mol_type = other RNA
taccccgtgccggtcagccccggcgtg

SEQ ID NO: 40802 - RNA, 27 nt, synthetic construct
  misc_feature 1..27: note = Ataxin-2-like protein (752-760)
  source 1..27: mol_type = other RNA
tacccctacccggtgagcaactccgtc

SEQ ID NO: 40803 - RNA, 27 nt, synthetic construct
  misc_feature 1..27: note = Long-chain-fatty-acid-CoA ligase 3 (709-717)
  source 1..27: mol_type = other RNA
taccaggccgacatcgagcgcatgtac

SEQ ID NO: 40804 - RNA, 27 nt, synthetic construct
  misc_feature 1..27: note = RNA-binding motif protein 22 (253-261)
  source 1..27: mol_type = other RNA
taccagttcggcgagatccgcaccatc

SEQ ID NO: 40805 - RNA, 27 nt, synthetic construct
  misc_feature 1..27: note = Copine-1 (66-74)
  source 1..27: mol_type = other RNA
taccgcttcgagaccgtgcagaagctg

SEQ ID NO: 40806 - RNA, 24 nt, synthetic construct
  misc_feature 1..24: note = Fibronectin type III domain-containing protein 3B (557-564)
  source 1..24: mol_type = other RNA
taccgcggccccagccacacctac

SEQ ID NO: 40807 - RNA, 27 nt, synthetic construct
  misc_feature 1..27: note = Myosin-9 (40-48)
  source 1..27: mol_type = other RNA
taccgcatcggccagagcaaggtgttc

SEQ ID NO: 40808 - RNA, 27 nt, synthetic construct
  misc_feature 1..27: note = Fatty acid desaturase 2 (166-174)
  source 1..27: mol_type = other RNA
taccgcaagcccaagtggaaccacctg

SEQ ID NO: 40809 - RNA, 27 nt, synthetic construct
  misc_feature 1..27: note = Breast cancer anti-estrogen resistance protein 3 (757-765)
  source 1..27: mol_type = other RNA
taccgcatgaacgccgagcggatcctg

SEQ ID NO: 40810 - RNA, 27 nt, synthetic construct
  misc_feature 1..27: note = Unconventional myosin-Ib (72-80)
  source 1..27: mol_type = other RNA
taccgcaaccggaacttctacgagctg

SEQ ID NO: 40811 - RNA, 27 nt, synthetic construct
  misc_feature 1..27: note = Constitutive coactivator of PPAR-gamma-like protein 1 (602-610)
  source 1..27: mol_type = other RNA
taccgccccgtgcggcagtacgtctac

SEQ ID NO: 40812 - RNA, 27 nt, synthetic construct
  misc_feature 1..27: note = E3 ubiquitin-protein ligase MARCH6 (469-477)
  source 1..27: mol_type = other RNA
tacagcgacgcccccgtgtccgagctg

SEQ ID NO: 40813 - RNA, 33 nt, synthetic construct
  misc_feature 1..33: note = Discoidin, CUB and LCCL domain-containing protein 2 (339-349)
  source 1..33: mol_type = other RNA
tacagcgacgacggccagaagtggaccgtgtac

SEQ ID NO: 40814 - RNA, 27 nt, synthetic construct
  misc_feature 1..27: note = TM2 domain-containing protein 2 (68-76)
  source 1..27: mol_type = other RNA
tacagcgacgtggagcacacctccgtc

SEQ ID NO: 40815 - RNA, 27 nt, synthetic construct
  misc_feature 1..27: note = Caveolin-2 (19-27)
  source 1..27: mol_type = other RNA
tacagccaccactccggcctggagtac

SEQ ID NO: 40816 - RNA, 33 nt, synthetic construct
  misc_feature 1..33: note = Calcium-responsive transactivator (198-208)
  source 1..33: mol_type = other RNA
tacagctccgcccagggcgggagccagcactac

SEQ ID NO: 40817 - RNA, 30 nt, synthetic construct
  misc_feature 1..30: note = Paxillin (31-40)
  source 1..30: mol_type = other RNA
tacagctaccccaccggcaaccacacctac

SEQ ID NO: 40818 - RNA, 27 nt, synthetic construct
  misc_feature 1..27: note = Uridine phosphorylase 1 (20-28)
  source 1..27: mol_type = other RNA
tacaccgagaaggacaagcaggcctac

SEQ ID NO: 40819 - RNA, 33 nt, synthetic construct
  misc_feature 1..33: note = Nucleolin (463-473)
  source 1..33: mol_type = other RNA
tacaccggcgagaaggggcagaaccaggactac

SEQ ID NO: 40820 - RNA, 27 nt, synthetic construct
  misc_feature 1..27: note = Melanophilin (121-129)
  source 1..27: mol_type = other RNA
tactacgagcacgtgaaggcccgcttc

SEQ ID NO: 40821 - RNA, 27 nt, synthetic construct
  misc_feature 1..27: note = 26S proteasome non-ATPase regulatory subunit 3 (212-220)
  source 1..27: mol_type = other RNA
tactaccacgcccgcgtgtacgagttc

SEQ ID NO: 40822 - RNA, 27 nt, synthetic construct
  misc_feature 1..27: note = Neuroepithelial cell-transforming gene 1 protein (222-230)
  source 1..27: mol_type = other RNA
tactacatcgacaagctggagtacctc

SEQ ID NO: 40823 - RNA, 27 nt, synthetic construct
  misc_feature 1..27: note = Disheveled-associated activator of morphogenesis 2 (101-109)
  source 1..27: mol_type = other RNA
tactacatcgaccgcatcaacagcatg

SEQ ID NO: 40824 - RNA, 30 nt, synthetic construct
  misc_feature 1..30: note = DNA-dependent protein kinase catalytic subunit (3101-3110)
  source 1..30: mol_type = other RNA
tactacatccagaacggcatccagagcttc

SEQ ID NO: 40825 - RNA, 27 nt, synthetic construct
  misc_feature 1..27: note = Coiled-coil domain-containing protein 130 (79-87)
  source 1..27: mol_type = other RNA
tactacaccacccccatctaccgcttc

SEQ ID NO: 40826 - RNA, 27 nt, synthetic construct
  misc_feature 1..27: note = RING finger protein 145 (469-477)
  source 1..27: mol_type = other RNA
tactacgtgaacggcacctaccgcctg

SEQ ID NO: 40827 - RNA, 27 nt, synthetic construct
  misc_feature 1..27: note = EH domain-containing protein 4 (505-513)
  source 1..27: mol_type = other RNA
gccctggccaagcacctcatcaagatc

SEQ ID NO: 40828 - RNA, 24 nt, synthetic construct
  misc_feature 1..24: note = Ubiquitin carboxyl-terminal hydrolase 10 (606-613)
  source 1..24: mol_type = other RNA
ttcggcgggcacatccgcagcgtg

SEQ ID NO: 40829 - RNA, 21 nt, synthetic construct
  misc_feature 1..21: note = Guanine nucleotide-binding protein subunit beta-5 (322-328)
  source 1..21: mol_type = other RNA
ttcggccacgagaaccgcgtg

SEQ ID NO: 40830 - RNA, 30 nt, synthetic construct
  misc_feature 1..30: note = Alpha-actinin-3 (113-122)
  source 1..30: mol_type = other RNA
ttcatcgccagcaagggcgtgaagctggtc

SEQ ID NO: 40831 - RNA, 27 nt, synthetic construct
  misc_feature 1..27: note = Transcriptional regulator Kaiso (564-572)
  source 1..27: mol_type = other RNA
ttcatgagctcccacatcaagagcgtg

SEQ ID NO: 40832 - RNA, 33 nt, synthetic construct
  misc_feature 1..33: note = DNA fragmentation factor subunit alpha (139-149)
  source 1..33: mol_type = other RNA
atcctgctcagcgaggaggacctgcagatgctg

SEQ ID NO: 40833 - RNA, 27 nt, synthetic construct
  misc_feature 1..27: note = Serine/threonine-protein kinase ULK3 (108-116)
  source 1..27: mol_type = other RNA
atcctgcccgagaaggtggcccgcgtc

SEQ ID NO: 40834 - RNA, 27 nt, synthetic construct
  misc_feature 1..27: note = Protein-lysine N-methyltransferase EEF2KMT (154-162)
  source 1..27: mol_type = other RNA
aagctggacagcccccgcgtgaccgtc

SEQ ID NO: 40835 - RNA, 27 nt, synthetic construct
  misc_feature 1..27: note = WASH complex subunit 7 (85-93)
  source 1..27: mol_type = other RNA
aaggtgctgaacaaggtcatcaccgtg

SEQ ID NO: 40836 - RNA, 24 nt, synthetic construct
  misc_feature 1..24: note = Myelin expression factor 2 (298-305)
  source 1..24: mol_type = other RNA
ctgttcgaccgccccatgcacgtg

SEQ ID NO: 40837 - RNA, 27 nt, synthetic construct
  misc_feature 1..27: note = cAMP-specific 3',5'-cyclic phosphodiesterase 4B (450-458)
  source 1..27: mol_type = other RNA
ctgctcgccgacctgaagaccatggtg

SEQ ID NO: 40838 - RNA, 27 nt, synthetic construct
  misc_feature 1..27: note = Multifunctional methyltransferase subunit TRM112-like protein (8-16)
  source 1..27: mol_type = other RNA
ctgctcagctcccacgtgcgcggcgtc

SEQ ID NO: 40839 - RNA, 21 nt, synthetic construct
  misc_feature 1..21: note = 60S ribosomal protein L19 (120-126)
  source 1..21: mol_type = other RNA
atggagcacatccacaagctg

SEQ ID NO: 40840 - RNA, 27 nt, synthetic construct
  misc_feature 1..27: note = Melanoma antigen preferentially expressed in tumors (394-402)
  source 1..27: mol_type = other RNA
cagctgctcgccctgctgcccagcctc

SEQ ID NO: 40841 - RNA, 27 nt, synthetic construct
  misc_feature 1..27: note = Proteasome activator complex subunit 4 (564-572)
  source 1..27: mol_type = other RNA
cagctgctcagcgagatcacccgcgtg

SEQ ID NO: 40842 - RNA, 27 nt, synthetic construct
  misc_feature 1..27: note = Eukaryotic translation initiation factor 3 subunit C (478-486)
  source 1..27: mol_type = other RNA
caggtgtgcgccatcatcgagcgcgtc

SEQ ID NO: 40843 - RNA, 27 nt, synthetic construct
  misc_feature 1..27: note = Methylsterol monooxygenase 1 (33-41)
  source 1..27: mol_type = other RNA
cgcatctacaagtacatccacaaggtg

SEQ ID NO: 40844 - RNA, 27 nt, synthetic construct
  misc_feature 1..27: note = Spectrin beta chain, erythrocytic (86-94)
  source 1..27: mol_type = other RNA
cgcatgctgatcaagctcctggaggtg

SEQ ID NO: 40845 - RNA, 33 nt, synthetic construct
  misc_feature 1..33: note = NHP2-like protein 1 (118-128)
  source 1..33: mol_type = other RNA
agcatccagcagtccatcgagcgcctgctcgtg

SEQ ID NO: 40846 - RNA, 27 nt, synthetic construct
  misc_feature 1..27: note = Erlin-2 (41-49)
  source 1..27: mol_type = other RNA
agcctgttctccgccgtgcacaagatc

SEQ ID NO: 40847 - RNA, 27 nt, synthetic construct
  misc_feature 1..27: note = Protein FAM214A (403-411)
  source 1..27: mol_type = other RNA
agcctgcactccaagctcttccgcgtg

SEQ ID NO: 40848 - RNA, 27 nt, synthetic construct
  misc_feature 1..27: note = Vacuole membrane protein 1 (82-90)
  source 1..27: mol_type = other RNA
agcctgtggtccatcatcagcaaggtg

SEQ ID NO: 40849 - RNA, 27 nt, synthetic construct
  misc_feature 1..27: note = Potassium voltage-gated channel subfamily KQT member 5 (530-538)
  source 1..27: mol_type = other RNA
agcatgctgggccgcgtggtcaaggtg

SEQ ID NO: 40850 - RNA, 27 nt, synthetic construct
  misc_feature 1..27: note = Sialate O-acetylesterase (32-40)
  source 1..27: mol_type = other RNA
accatcatgaagaaggtgaccagcgtc

SEQ ID NO: 40851 - RNA, 33 nt, synthetic construct
  misc_feature 1..33: note = Protein ELFN1 (17-27)
  source 1..33: mol_type = other RNA
accctgctccacgccggcgggctggcccgcgcg

SEQ ID NO: 40852 - RNA, 27 nt, synthetic construct
  misc_feature 1..27: note = Reticulocalbin-1 (21-29)
  source 1..27: mol_type = other RNA
gtgctggccccccgcgtcctccgggcc

SEQ ID NO: 40853 - RNA, 27 nt, synthetic construct
  misc_feature 1..27: note = Eukaryotic translation initiation factor 3 subunit A (379-387)
  source 1..27: mol_type = other RNA
gtgctgcagtacgtcgtgcccgaggtg

SEQ ID NO: 40854 - RNA, 27 nt, synthetic construct
  misc_feature 1..27: note = Intraflagellar transport protein 81 homolog (117-125)
  source 1..27: mol_type = other RNA
tacctggcccgcttcctcatcaagctg

SEQ ID NO: 40855 - RNA, 27 nt, synthetic construct
  misc_feature 1..27: note = Small subunit processome component 20 homolog (154-162)
  source 1..27: mol_type = other RNA
tacctgtacaagtacctctggcgcctg

SEQ ID NO: 40856 - RNA, 45 nt, synthetic construct
  misc_feature 1..45: note = Serum albumin (438-452)
  source 1..45: mol_type = other RNA
aaggtgccccaggtcagcaccccgaccctggtggaggtgtcccgc

SEQ ID NO: 40857 - RNA, 27 nt, synthetic construct
  misc_feature 1..27: note = Beta-secretase 2 (5-13)
  source 1..27: mol_type = other RNA
gcccgcgccctgctcctgcccctgctc

SEQ ID NO: 40858 - RNA, 27 nt, synthetic construct
  misc_feature 1..27: note = Proteasome subunit beta type-4 (79-87)
  source 1..27: mol_type = other RNA
gcccgcttccggaacatcagccgcatc

SEQ ID NO: 40859 - RNA, 30 nt, synthetic construct
  misc_feature 1..30: note = Protein sel-1 homolog 1 (629-638)
  source 1..30: mol_type = other RNA
gcccgcatcaagctgggcgactaccacttc

SEQ ID NO: 40860 - RNA, 30 nt, synthetic construct
  misc_feature 1..30: note = Lon protease homolog 2, peroxisomal (291-300)
  source 1..30: mol_type = other RNA
gcccgcatcctgctcgacaacgaccactac

SEQ ID NO: 40861 - RNA, 33 nt, synthetic construct
  misc_feature 1..33: note = NAD(P)H dehydrogenase (quinone) 1 (128-138)
  source 1..33: mol_type = other RNA
gcccgcatccagatcctggagggctggaagaag

SEQ ID NO: 40862 - RNA, 27 nt, synthetic construct
  misc_feature 1..27: note = Zinc finger protein 721 (73-81)
  source 1..27: mol_type = other RNA
gcccgcgtgaaggtcttcagcaagttc

SEQ ID NO: 40863 - RNA, 27 nt, synthetic construct
  misc_feature 1..27: note = TATA-box-binding protein (218-226)
  source 1..27: mol_type = other RNA
gcccgcgtggtccagaagctgggcttc

SEQ ID NO: 40864 - RNA, 66 nt, synthetic construct
  misc_feature 1..66: note = Plectin (3368-3389)
  source 1..66: mol_type = other RNA
gccaccaccgccgcgctgctcctggaggcccaggccgccacgggcttcctggtggaccccgtccgc

SEQ ID NO: 40865 - RNA, 27 nt, synthetic construct
  misc_feature 1..27: note = Coatomer subunit alpha (338-346)
  source 1..27: mol_type = other RNA
gaccgcttcctgcggcagctcgacttc

SEQ ID NO: 40866 - RNA, 27 nt, synthetic construct
  misc_feature 1..27: note = Mannosyl-oligosaccharide glucosidase (370-378)
  source 1..27: mol_type = other RNA
gagcgcttcgagaagaccttccagctg

SEQ ID NO: 40867 - RNA, 27 nt, synthetic construct
  misc_feature 1..27: note = General transcription factor II-I (386-394)
  source 1..27: mol_type = other RNA
gagcgcatccggttcgtgatcaagaag

SEQ ID NO: 40868 - RNA, 27 nt, synthetic construct
  misc_feature 1..27: note = NADH dehydrogenase (ubiquinone) 1 beta subcomplex subunit 4 (35-43)
  source 1..27: mol_type = other RNA
gagcgcctggccatccgggcccagctc

SEQ ID NO: 40869 - RNA, 27 nt, synthetic construct
  misc_feature 1..27: note = Cytoplasmic dynein 1 heavy chain 1 (2441-2449)
  source 1..27: mol_type = other RNA
ttccagctggagcacatcatggacctc

SEQ ID NO: 40870 - RNA, 27 nt, synthetic construct
  misc_feature 1..27: note = AP-2 complex subunit sigma (52-60)
  source 1..27: mol_type = other RNA
ttccgcaacttcaagatcatctaccgg

SEQ ID NO: 40871 - RNA, 30 nt, synthetic construct
  misc_feature 1..30: note = Protein scribble homolog (1146-1155)
  source 1..30: mol_type = other RNA
ggccgcgacgggcggctgcgcgtgggcctc

SEQ ID NO: 40872 - RNA, 30 nt, synthetic construct
  misc_feature 1..30: note = Disintegrin and metalloproteinase domain-containing protein 10 (14-23)
  source 1..30: mol_type = other RNA
ggccgcttcgaggggttcatccagacccgg

SEQ ID NO: 40873 - RNA, 33 nt, synthetic construct
  misc_feature 1..33: note = Mitogen-activated protein kinase kinase kinase 12 (175-185)
  source 1..33: mol_type = other RNA
ggccgcttccacggggaggaggtggccgtcaag

SEQ ID NO: 40874 - RNA, 30 nt, synthetic construct
  misc_feature 1..30: note = Rho guanine nucleotide exchange factor 2 (459-468)
  source 1..30: mol_type = other RNA
ggccgcttcaaggacgtgctggtcctcctg

SEQ ID NO: 40875 - RNA, 27 nt, synthetic construct
  misc_feature 1..27: note Dolichyl-diphosphooligosaccharide-proteinosyltransferase subunit STT3A (230-238)
  source 1..27: mol_type = other RNA
ggccgcttcagccaccggatctacgtg

SEQ ID NO: 40876 - RNA, 27 nt, synthetic construct
  misc_feature 1..27: note = Small nuclear ribonucleoprotein-associated proteins B and B' (17-25)
  source 1..27: mol_type = other RNA
ggccgcatcttcatcgggaccttcaag

SEQ ID NO: 40877 - RNA, 27 nt, synthetic construct
  misc_feature 1..27: note = Sorbitol dehydrogenase (55-63)
  source 1..27: mol_type = other RNA
ggccgcatcgggaacttcatcgtgaag

SEQ ID NO: 40878 - RNA, 30 nt, synthetic construct
  misc_feature 1..30: note = Sorbitol dehydrogenase (55-64)
  source 1..30: mol_type = other RNA
ggccgcatcgggaacttcatcgtgaagaag

SEQ ID NO: 40879 - RNA, 27 nt, synthetic construct
  misc_feature 1..27: note = Dystonin (345-353)
  source 1..27: mol_type = other RNA
ggccgcatcaagctgctccaggggtac

SEQ ID NO: 40880 - RNA, 27 nt, synthetic construct
  misc_feature 1..27: note = 26S protease regulatory subunit 6B (325-333)
  source 1..27: mol_type = other RNA
ggccgcctggaccggaagatcgagttc

SEQ ID NO: 40881 - RNA, 27 nt, synthetic construct
  misc_feature 1..27: note = Serine/threonine-protein phosphatase 6 regulatory subunit 3 (311-319)
  source 1..27: mol_type = other RNA
ggccgcctggggagcttccacgagctc

SEQ ID NO: 40882 - RNA, 30 nt, synthetic construct
  misc_feature 1..30: note = H(+)/Cl(-) exchange transporter 3 (772-781)
  source 1..30: mol_type = other RNA
ggccgcctgctcgggatcatcaccaagaag

SEQ ID NO: 40883 - RNA, 27 nt, synthetic construct
  misc_feature 1..27: note = Thioredoxin reductase 1, cytoplasmic (45-53)
  source 1..27: mol_type = other RNA
ggccgcctgcagaagctcctgaagatg

SEQ ID NO: 40884 - RNA, 27 nt, synthetic construct
  misc_feature 1..27: note = Aurora kinase A-interacting protein (40-48)
  source 1..27: mol_type = other RNA
ggccgcctgaccagccagctcctgcgg

SEQ ID NO: 40885 - RNA, 30 nt, synthetic construct
  misc_feature 1..30: note = Lon protease homolog 2, peroxisomal (714-723)
  source 1..30: mol_type = other RNA
ggccgcctggtgcggagcgacgtcgccatg

SEQ ID NO: 40886 - RNA, 30 nt, synthetic construct
  misc_feature 1..30: note = Up-regulated during skeletal muscle growth protein 5 (26-35)
  source 1..30: mol_type = other RNA
ggccgcatgaactgcgtgctggccacctac

SEQ ID NO: 40887 - RNA, 27 nt, synthetic construct
  misc_feature 1..27: note = Tetratricopeptide repeat protein 12 (373-381)
  source 1..27: mol_type = other RNA
ggccgcagcctgatcatcaaccacctc

SEQ ID NO: 40888 - RNA, 30 nt, synthetic construct
  misc_feature 1..30: note = Plectin (2680-2689)
  source 1..30: mol_type = other RNA
ggccgcagctccatcgccgggctgctcctg

SEQ ID NO: 40889 - RNA, 27 nt, synthetic construct
  misc_feature 1..27: note = Nucleolar protein 11 (40-48)
  source 1..27: mol_type = other RNA
ggccgcaccgtgatcctgtacaaggtc

SEQ ID NO: 40890 - RNA, 48 nt, synthetic construct
  misc_feature 1..48: note = HLA class I histocompatibility antigen, A-1 alpha chain (25-40)
  source 1..48: mol_type = other RNA
ggcagccactccatgcgctacttcttcaccagcgtgtcccggcccggg

SEQ ID NO: 40891 - RNA, 27 nt, synthetic construct
  misc_feature 1..27: note = Transcription factor E2F4 (157-165)
  source 1..27: mol_type = other RNA
atccgcgcccccagcggcacctccctg

SEQ ID NO: 40892 - RNA, 27 nt, synthetic construct
  misc_feature 1..27: note = CAP-Gly domain-containing linker protein 4 (454-462)
  source 1..27: mol_type = other RNA
atccgcttcttcggcaccaccaacttc

SEQ ID NO: 40893 - RNA, 33 nt, synthetic construct
  misc_feature 1..33: note = Glutamine synthetase (323-333)
  source 1..33: mol_type = other RNA
atccgcatcccccggaccgtgggccaggagaag

SEQ ID NO: 40894 - RNA, 33 nt, synthetic construct
  misc_feature 1..33: note = NADH dehydrogenase (ubiquinone) iron-sulfur protein 5 (8-18)
  source 1..33: mol_type = other RNA
aagcgcttcggcctgaacatcgaccggtggctc

SEQ ID NO: 40895 - RNA, 30 nt, synthetic construct
  misc_feature 1..30: note = Cytoplasmic dynein 2 heavy chain 1 (804-813)
  source 1..30: mol_type = other RNA
aagcgcttcatcggcatccccaaccagttc

SEQ ID NO: 40896 - RNA, 27 nt, synthetic construct
  misc_feature 1..27: note = DNA-dependent protein kinase catalytic subunit (1074-1082)
  source 1..27: mol_type = other RNA
aagcgcctgggcgccagcctcgccttc

SEQ ID NO: 40897 - RNA, 27 nt, synthetic construct
  misc_feature 1..27: note = Fatty acyl-CoA reductase 1 (327-335)
  source 1..27: mol_type = other RNA
aagcgcaaccccctggagcaggccttc

SEQ ID NO: 40898 - RNA, 27 nt, synthetic construct
  misc_feature 1..27: note = ATP-dependent RNA helicase DDX18 (403-411)
  source 1..27: mol_type = other RNA
aagcgcaccaccacgttcttccagttc

SEQ ID NO: 40899 - RNA, 30 nt, synthetic construct
  misc_feature 1..30: note = Talin-1 (357-366)
  source 1..30: mol_type = other RNA
aagcgctgggccgccagccccaagtccttc

SEQ ID NO: 40900 - RNA, 27 nt, synthetic construct
  misc_feature 1..27: note = ATP-dependent RNA helicase DHX8 (289-297)
  source 1..27: mol_type = other RNA
aagcgctgggagggcctggtgcacatc

SEQ ID NO: 40901 - RNA, 27 nt, synthetic construct
  misc_feature 1..27: note = Eukaryotic translation initiation factor 4 gamma 1 (570-578)
  source 1..27: mol_type = other RNA
aagcgctacgaccgggagttcctgctc

SEQ ID NO: 40902 - RNA, 27 nt, synthetic construct
  misc_feature 1..27: note = E3 ubiquitin-protein ligase RNF213 (1227-1235)
  source 1..27: mol_type = other RNA
ctgcgcgacagccacatcttccagctc

SEQ ID NO: 40903 - RNA, 27 nt, synthetic construct
  misc_feature 1..27: note = Eukaryotic initiation factor 4A-II (229-237)
  source 1..27: mol_type = other RNA
atgcgcgaccccatccggatcctggtg

SEQ ID NO: 40904 - RNA, 27 nt, synthetic construct
  misc_feature 1..27: note = Abhydrolase domain-containing protein 2 (327-335)
  source 1..27: mol_type = other RNA
atgcgctacctgcaccggatctacgtg

SEQ ID NO: 40905 - RNA, 27 nt, synthetic construct
  misc_feature 1..27: note = Uncharacterized protein C15orf41 (140-148)
  source 1..27: mol_type = other RNA
aaccgcttcggccccgggctggtgatc

SEQ ID NO: 40906 - RNA, 27 nt, synthetic construct
  misc_feature 1..27: note = Heat shock protein HSP 90-alpha (808-816)
  source 1..27: mol_type = other RNA
aaccgcatctaccggatgatcaagctg

SEQ ID NO: 40907 - RNA, 27 nt, synthetic construct
  misc_feature 1..27: note = Guanine nucleotide-binding protein G(s) subunit alpha isoforms short (265-273)
  source 1..27: mol_type = other RNA
aaccgctggctgcggaccatcagcgtg

SEQ ID NO: 40908 - RNA, 42 nt, synthetic construct
  misc_feature 1..42: note = Zinc finger protein 608 (42-55)
  source 1..42: mol_type = other RNA
cccgccagcccgggcgccgggaacccccccggcacccccaag

SEQ ID NO: 40909 - RNA, 27 nt, synthetic construct
  misc_feature 1..27: note = Eukaryotic translation initiation factor 3 subunit L (152-160)
  source 1..27: mol_type = other RNA
cagcgcttcgagagctactacaactac

SEQ ID NO: 40910 - RNA, 27 nt, synthetic construct
  misc_feature 1..27: note = Eukaryotic translation initiation factor 3 subunit A (316-324)
  source 1..27: mol_type = other RNA
cagcgcatgagcacccgggtgctgctc

SEQ ID NO: 40911 - RNA, 27 nt, synthetic construct
  misc_feature 1..27: note = Transmembrane protein 141 (54-62)
  source 1..27: mol_type = other RNA
cgcaagttcccctacccgctgcagtgg

SEQ ID NO: 40912 - RNA, 33 nt, synthetic construct
  misc_feature 1..33: note = Nuclear envelope integral membrane protein 1 (157-167)
  source 1..33: mol_type = other RNA
cgccggttcgaccccaagctgttcctcgtgttc

SEQ ID NO: 40913 - RNA, 33 nt, synthetic construct
  misc_feature 1..33: note = Unconventional myosin-Id (770-780)
  source 1..33: mol_type = other RNA
cgccggttcgaggaggccctgcagaccatcttc

SEQ ID NO: 40914 - RNA, 39 nt, synthetic construct
  misc_feature 1..39: note = Pre-mRNA-processing-splicing factor 8 (820-832)
  source 1..39: mol_type = other RNA
cgccggttcagccccatcccgttcccccccctgtcctac

SEQ ID NO: 40915 - RNA, 27 nt, synthetic construct
  misc_feature 1..27: note = Exportin-1 (596-604)
  source 1..27: mol_type = other RNA
cgccggcacttcgtgcaggtccaggtg

SEQ ID NO: 40916 - RNA, 30 nt, synthetic construct
  misc_feature 1..30: note = Negative elongation factor C/D (83-92)
  source 1..30: mol_type = other RNA
cgccggatcgcccaggaggtgcagcgcttc

SEQ ID NO: 40917 - RNA, 30 nt, synthetic construct
  misc_feature 1..30: note = cAMP-dependent protein kinase type I-beta regulatory subunit (232-241)
  source 1..30: mol_type = other RNA
cgccggatcctgatgggcagcaccctccgc

SEQ ID NO: 40918 - RNA, 30 nt, synthetic construct
  misc_feature 1..30: note = Cytoplasmic FMR1-interacting protein 2 (148-157)
  source 1..30: mol_type = other RNA
cgccggaaggacttcgtgagcgaggcctac

SEQ ID NO: 40919 - RNA, 27 nt, synthetic construct
  misc_feature 1..27: note = Nuclear pore complex protein Nup98-Nup96 (778-786)
  source 1..27: mol_type = other RNA
cgccggaaggaggtggtcgtgtacctg

SEQ ID NO: 40920 - RNA, 30 nt, synthetic construct
  misc_feature 1..30: note = NADH dehydrogenase (ubiquinone) 1 alpha subcomplex subunit 13 (49-58)
  source 1..30: mol_type = other RNA
cgccggctgcagatcgaggacttcgaggcc

SEQ ID NO: 40921 - RNA, 30 nt, synthetic construct
  misc_feature 1..30: note = Signal peptide peptidase-like 2A (5-14)
  source 1..30: mol_type = other RNA
cgccggctgagccccgccggcgccgcgctc

SEQ ID NO: 40922 - RNA, 39 nt, synthetic construct
  misc_feature 1..39: note = Splicing factor, proline- and glutamine-rich (547-559)
  source 1..39: mol_type = other RNA
cgccggatggaggagctgcacaaccaggagatgcagaag

SEQ ID NO: 40923 - RNA, 27 nt, synthetic construct
  misc_feature 1..27: note = Probable ATP-dependent RNA helicase DDX10 (353-361)
  source 1..27: mol_type = other RNA
cgccggatggaggtgtacaacgagttc

SEQ ID NO: 40924 - RNA, 36 nt, synthetic construct
  misc_feature 1..36: note = 40S ribosomal protein S21 (60-71)
  source 1..36: mol_type = other RNA
cgccggatgggcgagagcgacgactccatcctgcgc

SEQ ID NO: 40925 - RNA, 27 nt, synthetic construct
  misc_feature 1..27: note = HLA class II histocompatibility antigen, DQ beta 1 chain (88-96)
  source 1..27: mol_type = other RNA
cgccgggtggagcccaccgtcaccatc

SEQ ID NO: 40926 - RNA, 36 nt, synthetic construct
  misc_feature 1..36: note = HLA class I histocompatibility antigen, B-15 alpha chain (193-204)
  source 1..36: mol_type = other RNA
cgccggtacctggagaacggcaaggagaccctccag

SEQ ID NO: 40927 - RNA, 27 nt, synthetic construct
  misc_feature 1..27: note = Glucoside xylosyltransferase 1 (2-10)
  source 1..27: mol_type = other RNA
cgccggtacctgcgcgtggtcgtgctc

SEQ ID NO: 40928 - RNA, 33 nt, synthetic construct
  misc_feature 1..33: note = Eukaryotic initiation factor 4A-I (168-178)
  source 1..33: mol_type = other RNA
cgccggtacctgagccccaagtacatcaagatg

SEQ ID NO: 40929 - RNA, 45 nt, synthetic construct
  misc_feature 1..45: note = HLA class II histocompatibility antigen, DR alpha chain (48-62)
  source 1..45: mol_type = other RNA
agcttcgaggcccagggcgccctggcgaacatcgccgtggacaag

SEQ ID NO: 40930 - RNA, 30 nt, synthetic construct
  misc_feature 1..30: note = EH domain-containing protein 4 (129-138)
  source 1..30: mol_type = other RNA
agccgcttcggcaacgccttcctgaaccgg

SEQ ID NO: 40931 - RNA, 30 nt, synthetic construct
  misc_feature 1..30: note = Cohesin subunit SA-2 (369-378)
  source 1..30: mol_type = other RNA
agccgcttcaaggaccggatcgtgtccatg

SEQ ID NO: 40932 - RNA, 27 nt, synthetic construct
  misc_feature 1..27: note = Nucleolar pre-ribosomal-associated protein 1 (628-636)
  source 1..27: mol_type = other RNA
agccgcttcaaccggtactactccctg

SEQ ID NO: 40933 - RNA, 27 nt, synthetic construct
  misc_feature 1..27: note = 26S proteasome non-ATPase regulatory subunit 13 (153-161)
  source 1..27: mol_type = other RNA
agccgcttctacgacctgtccagcaag

SEQ ID NO: 40934 - RNA, 27 nt, synthetic construct
  misc_feature 1..27: note = Lysine-specific demethylase 3A (1085-1093)
  source 1..27: mol_type = other RNA
agccgcctgcccaactacttcgtgcgg

SEQ ID NO: 40935 - RNA, 27 nt, synthetic construct
  misc_feature 1..27: note = RRP12-like protein (519-527)
  source 1..27: mol_type = other RNA
acccgcctgggcttcttcaccacgtac

SEQ ID NO: 40936 - RNA, 27 nt, synthetic construct
  misc_feature 1..27: note = Voltage-dependent anion-selective channel protein 2 (165-173)
  source 1..27: mol_type = other RNA
acccgcaacaacttcgccgtgggctac

SEQ ID NO: 40937 - RNA, 33 nt, synthetic construct
  misc_feature 1..33: note Dolichyl-diphosphooligosaccharide-proteinosyltransferase 48 kDa subunit (358-368)
  source 1..33: mol_type = other RNA
gtgcgcatcgaccccttcgtccggaccttcctg

SEQ ID NO: 40938 - RNA, 27 nt, synthetic construct
  misc_feature 1..27: note = Phosphatidylinositol 4-phosphate 5-kinase type-1 alpha (54-62)
  source 1..27: mol_type = other RNA
taccgcttcgtgaagaagctggagcac

SEQ ID NO: 40939 - RNA, 27 nt, synthetic construct
  misc_feature 1..27: note = PERQ amino acid-rich with GYF domain-containing protein 2 (41-49)
  source 1..27: mol_type = other RNA
taccgctacggccgggaggagatgctg

SEQ ID NO: 40940 - RNA, 27 nt, synthetic construct
  misc_feature 1..27: note = Alpha-actinin-1 (567-575)
  source 1..27: mol_type = other RNA
gccatcctgggcatccacaacgaggtg

SEQ ID NO: 40941 - RNA, 27 nt, synthetic construct
  misc_feature 1..27: note = CCR4-NOT transcription complex subunit 1 (2294-2302)
  source 1..27: mol_type = other RNA
gccatccaggagcagatcacccgcgtg

SEQ ID NO: 40942 - RNA, 30 nt, synthetic construct
  misc_feature 1..30: note = GEM-interacting protein (553-562)
  source 1..30: mol_type = other RNA
gccctggacgtgcagggcatctaccgcgtc

SEQ ID NO: 40943 - RNA, 30 nt, synthetic construct
  misc_feature 1..30: note = Glycogen phosphorylase, brain form (417-426)
  source 1..30: mol_type = other RNA
gccctgttccccggcgacgtggaccgcctc

SEQ ID NO: 40944 - RNA, 39 nt, synthetic construct
  misc_feature 1..39: note = T-complex protein 1 subunit gamma (186-198)
  source 1..39: mol_type = other RNA
gaggagaacggccgcaaggagatcgacatcaagaagtac

SEQ ID NO: 40945 - RNA, 27 nt, synthetic construct
  misc_feature 1..27: note = Glycerol-3-phosphate dehydrogenase, mitochondrial (467-475)
  source 1..27: mol_type = other RNA
gagaccgcccgcaagttcctgtactac

SEQ ID NO: 40946 - RNA, 27 nt, synthetic construct
  misc_feature 1..27: note = Hexokinase-2 (850-858)
  source 1..27: mol_type = other RNA
ggcctggacgccctcaaggtgaccgtc

SEQ ID NO: 40947 - RNA, 27 nt, synthetic construct
  misc_feature 1..27: note = NF-kappa-B-repressing factor (193-201)
  source 1..27: mol_type = other RNA
ggcagcgacaagatcaactacacctac

SEQ ID NO: 40948 - RNA, 27 nt, synthetic construct
  misc_feature 1..27: note = Galectin-3 (217-225)
  source 1..27: mol_type = other RNA
cacctgctccagtacaaccaccgcgtg

SEQ ID NO: 40949 - RNA, 27 nt, synthetic construct
  misc_feature 1..27: note = Serine-protein kinase ATM (2898-2906)
  source 1..27: mol_type = other RNA
aagatcctgcccaccccggagaccgtg

SEQ ID NO: 40950 - RNA, 27 nt, synthetic construct
  misc_feature 1..27: note = F-box only protein 7 (226-234)
  source 1..27: mol_type = other RNA
aagatcaacaacgagatccgcagcgtg

SEQ ID NO: 40951 - RNA, 27 nt, synthetic construct
  misc_feature 1..27: note = DNA topoisomerase 2-beta (151-159)
  source 1..27: mol_type = other RNA
aagctggacgagaccggcgtggccctc

SEQ ID NO: 40952 - RNA, 30 nt, synthetic construct
  misc_feature 1..30: note = Coatomer subunit gamma-1 (75-84)
  source 1..30: mol_type = other RNA
aagctgttccagagcaacgaccccaccctc

SEQ ID NO: 40953 - RNA, 30 nt, synthetic construct
  misc_feature 1..30: note = Protein S100-A6 (47-56)
  source 1..30: mol_type = other RNA
aagctgcaggacgccgagatcgcccgcctc

SEQ ID NO: 40954 - RNA, 27 nt, synthetic construct
  misc_feature 1..27: note = Nucleoprotein TPR (699-707)
  source 1..27: mol_type = other RNA
aagctgcaggagcaggtgaccgacctc

SEQ ID NO: 40955 - RNA, 27 nt, synthetic construct
  misc_feature 1..27: note = Unconventional myosin-Ic (409-417)
  source 1..27: mol_type = other RNA
aagctgcagcagctcttcatcgagctg

SEQ ID NO: 40956 - RNA, 27 nt, synthetic construct
  misc_feature 1..27: note = 26S proteasome non-ATPase regulatory subunit 11 (159-167)
  source 1..27: mol_type = other RNA
aagatggacgacaaggccctgctcgtg

SEQ ID NO: 40957 - RNA, 27 nt, synthetic construct
  misc_feature 1..27: note = Serine/threonine-protein kinase/endoribonuclease IRE1 (690-698)
  source 1..27: mol_type = other RNA
aagccccacaacatcctgatcagcatg

SEQ ID NO: 40958 - RNA, 27 nt, synthetic construct
  misc_feature 1..27: note = Zinc finger protein 277 (158-166)
  source 1..27: mol_type = other RNA
aagagcgagctgggcctcaacttctac

SEQ ID NO: 40959 - RNA, 27 nt, synthetic construct
  misc_feature 1..27: note = Profilin-1 (105-113)
  source 1..27: mol_type = other RNA
aagaccgacaagaccctggtgctcctg

SEQ ID NO: 40960 - RNA, 27 nt, synthetic construct
  misc_feature 1..27: note = RHO/RAC effector protein (462-470)
  source 1..27: mol_type = other RNA
aagaccgagcgcagcgacctggagtac

SEQ ID NO: 40961 - RNA, 27 nt, synthetic construct
  misc_feature 1..27: note = Replication protein A 70 kDa DNA-binding subunit (489-497)
  source 1..27: mol_type = other RNA
aaggtgatcgaccagcagaacggcctg

SEQ ID NO: 40962 - RNA, 27 nt, synthetic construct
  misc_feature 1..27: note = Plectin (2572-2580)
  source 1..27: mol_type = other RNA
ctgctcgccgaggagaaccagcgcctg

SEQ ID NO: 40963 - RNA, 27 nt, synthetic construct
  misc_feature 1..27: note = Clathrin heavy chain 1 (333-341)
  source 1..27: mol_type = other RNA
aacatcatcccctacatcaccaacgtg

SEQ ID NO: 40964 - RNA, 27 nt, synthetic construct
  misc_feature 1..27: note = Cell division cycle protein 27 homolog (216-224)
  source 1..27: mol_type = other RNA
aacctggagagctccaacagcaagtac

SEQ ID NO: 40965 - RNA, 30 nt, synthetic construct
  misc_feature 1..30: note = Band 4.1-like protein 2 (252-261)
  source 1..30: mol_type = other RNA
aacctgctcgagaaggactacttcggcctg

SEQ ID NO: 40966 - RNA, 27 nt, synthetic construct
  misc_feature 1..27: note = Keratin, type I cytoskeletal 18 (100-108)
  source 1..27: mol_type = other RNA
cgcctggccgccgacgacttccgggtg

SEQ ID NO: 40967 - RNA, 30 nt, synthetic construct
  misc_feature 1..30: note = Vacuolar protein sorting-associated protein 35 (226-235)
  source 1..30: mol_type = other RNA
cgcctgagccagctcgagggcgtgaacgtc

SEQ ID NO: 40968 - RNA, 27 nt, synthetic construct
  misc_feature 1..27: note = DNA topoisomerase 2-alpha (230-238)
  source 1..27: mol_type = other RNA
agcctggacaaggacatcgtggccctc

SEQ ID NO: 40969 - RNA, 27 nt, synthetic construct
  misc_feature 1..27: note = Ubiquitin carboxyl-terminal hydrolase 14 (241-249)
  source 1..27: mol_type = other RNA
agcctgatcgaccagttcttcggcgtg

SEQ ID NO: 40970 - RNA, 27 nt, synthetic construct
  misc_feature 1..27: note = Calcium-binding mitochondrial carrier protein Aralar1 (25-33)
  source 1..27: mol_type = other RNA
agcaccgaggtggacggcgagcgctac

SEQ ID NO: 40971 - RNA, 27 nt, synthetic construct
  misc_feature 1..27: note = Thymosin beta-10 (26-34)
  source 1..27: mol_type = other RNA
accgagacccaggagaagaacacgctg

SEQ ID NO: 40972 - RNA, 27 nt, synthetic construct
  misc_feature 1..27: note = L-lactate dehydrogenase B chain (323-331)
  source 1..27: mol_type = other RNA
accctgtgggacatccagaaggacctc

SEQ ID NO: 40973 - RNA, 27 nt, synthetic construct
  misc_feature 1..27: note = SAM and SH3 domain-containing protein 1 (299-307)
  source 1..27: mol_type = other RNA
gtgctggacgagcgcagcgccctctac

SEQ ID NO: 40974 - RNA, 27 nt, synthetic construct
  misc_feature 1..27: note = Centromere protein F (684-692)
  source 1..27: mol_type = other RNA
gtgctggacagcaagtccgtcgaggtg

SEQ ID NO: 40975 - RNA, 30 nt, synthetic construct
  misc_feature 1..30: note = N(G),N(G)-dimethylarginine dimethylaminohydrolase 1 (92-101)
  source 1..30: mol_type = other RNA
gtgctgttcaccggccgcgagttcttcgtc

SEQ ID NO: 40976 - RNA, 60 nt, synthetic construct
  misc_feature 1..60: note = Cytochrome c oxidase subunit 7C, mitochondrial (44-63)
  source 1..60: mol_type = other RNA
tacttcggcagcgccttcgccacccccttcctggtggtccgccaccagctcctgaagacc

SEQ ID NO: 40977 - RNA, 27 nt, synthetic construct
  misc_feature 1..27: note = GTP-binding protein Rit1 (134-142)
  source 1..27: mol_type = other RNA
tacatcgacgacgtgttccacgccctg

SEQ ID NO: 40978 - RNA, 27 nt, synthetic construct
  misc_feature 1..27: note = WASH complex subunit 7 (733-741)
  source 1..27: mol_type = other RNA
tacctggacaagaccttctacaacctc

SEQ ID NO: 40979 - RNA, 30 nt, synthetic construct
  misc_feature 1..30: note = Coatomer subunit alpha (707-716)
  source 1..30: mol_type = other RNA
tacctgatcaccggcaacctcgagaagctg

SEQ ID NO: 40980 - RNA, 27 nt, synthetic construct
  misc_feature 1..27: note = cAMP-dependent protein kinase type I-alpha regulatory subunit (126-134)
  source 1..27: mol_type = other RNA
gccgccctggcgaaggccatcgagaag

SEQ ID NO: 40981 - RNA, 24 nt, synthetic construct
  misc_feature 1..24: note = Fatty acid synthase (1645-1652)
  source 1..24: mol_type = other RNA
gccgccagcgtgcccgtcgtgtac

SEQ ID NO: 40982 - RNA, 27 nt, synthetic construct
  misc_feature 1..27: note = Matrix Gla protein (90-98)
  source 1..27: mol_type = other RNA
gccgcctacaaccgctacttccggaag

SEQ ID NO: 40983 - RNA, 24 nt, synthetic construct
  misc_feature 1..24: note = 60S ribosomal protein L10 (29-36)
  source 1..24: mol_type = other RNA
gccaagatccgcatcttcgacctg

SEQ ID NO: 40984 - RNA, 27 nt, synthetic construct
  misc_feature 1..27: note = Sushi repeat-containing protein SRPX isoform 4 (328-336)
  source 1..27: mol_type = other RNA
gccctgctcgaccagttctacgagaag

SEQ ID NO: 40985 - RNA, 30 nt, synthetic construct
  misc_feature 1..30: note = Zinc finger MYM-type protein 4 (757-766)
  source 1..30: mol_type = other RNA
gccagcgccggccccccgtccctgcgcaag

SEQ ID NO: 40986 - RNA, 30 nt, synthetic construct
  misc_feature 1..30: note = Thymosin beta-10 (16-25)
  source 1..30: mol_type = other RNA
gccagcttcgacaaggccaagctgaagaag

SEQ ID NO: 40987 - RNA, 27 nt, synthetic construct
  misc_feature 1..27: note = Glycogen phosphorylase, muscle form (303-311)
  source 1..27: mol_type = other RNA
gccaccctgcaggacatcatccgccgg

SEQ ID NO: 40988 - RNA, 27 nt, synthetic construct
  misc_feature 1..27: note = Cell surfaceoprotein MUC18 (577-585)
  source 1..27: mol_type = other RNA
gccgtgctgtacttcctctacaagaag

SEQ ID NO: 40989 - RNA, 24 nt, synthetic construct
  misc_feature 1..24: note = Torsin-1A-interacting protein 1 (433-440)
  source 1..24: mol_type = other RNA
gcctacagctccttccgcagcgtg

SEQ ID NO: 40990 - RNA, 24 nt, synthetic construct
  misc_feature 1..24: note = Nucleolin (415-422)
  source 1..24: mol_type = other RNA
gacgccgccgagatccgcctggtg

SEQ ID NO: 40991 - RNA, 24 nt, synthetic construct
  misc_feature 1..24: note = Prohibitin (233-240)
  source 1..24: mol_type = other RNA
gacggcctgatcgagctccgcaag

SEQ ID NO: 40992 - RNA, 21 nt, synthetic construct
  misc_feature 1..21: note = Lysine-specific demethylase 5B (46-52)
  source 1..21: mol_type = other RNA
ttcgccttcatccacaagatc

SEQ ID NO: 40993 - RNA, 27 nt, synthetic construct
  misc_feature 1..27: note = Polypeptide N-acetylgalactosaminyltransferase 5 (282-290)
  source 1..27: mol_type = other RNA
ttccccaaggtgcgcatcctgcggctc

SEQ ID NO: 40994 - RNA, 30 nt, synthetic construct
  misc_feature 1..30: note = Dual specificity protein phosphatase 6 (130-139)
  source 1..30: mol_type = other RNA
ttctacctggagggcgggttcagcaagttc

SEQ ID NO: 40995 - RNA, 27 nt, synthetic construct
  misc_feature 1..27: note = Multiple PDZ domain protein (777-785)
  source 1..27: mol_type = other RNA
ggcaccgtgcgcatcggggtcgccaag

SEQ ID NO: 40996 - RNA, 30 nt, synthetic construct
  misc_feature 1..30: note = Calcyphosin (120-129)
  source 1..30: mol_type = other RNA
ggcgtgtacagcgggcgcgcccaccccaag

SEQ ID NO: 40997 - RNA, 30 nt, synthetic construct
  misc_feature 1..30: note = PEST proteolytic signal-containing nuclear protein (144-153)
  source 1..30: mol_type = other RNA
cacctgggcaacgtgcacgaccaggacaac

SEQ ID NO: 40998 - RNA, 30 nt, synthetic construct
  misc_feature 1..30: note = DAZ-associated protein 1 (397-406)
  source 1..30: mol_type = other RNA
cacaacgtgcagggcttccacccctaccgc

SEQ ID NO: 40999 - RNA, 45 nt, synthetic construct
  misc_feature 1..45: note = Ribonucleoprotein PTB-binding 1 (737-751)
  source 1..45: mol_type = other RNA
cacagccagggcctggggggccactacgccgactcctacctcaag

SEQ ID NO: 41000 - RNA, 27 nt, synthetic construct
  misc_feature 1..27: note = Melanocyte protein PMEL (189-197)
  source 1..27: mol_type = other RNA
cacaccatggaggtgaccgtctaccac

SEQ ID NO: 41001 - RNA, 33 nt, synthetic construct
  misc_feature 1..33: note = Neurosecretory protein VGF (2-12)
  source 1..33: mol_type = other RNA
aaggccctgcgcctcagcgcctccgcgctgttc

SEQ ID NO: 41002 - RNA, 27 nt, synthetic construct
  misc_feature 1..27: note = Serine/threonine-protein kinase Nek7 (81-89)
  source 1..27: mol_type = other RNA
aaggagatcgacctgctcaagcagctg

SEQ ID NO: 41003 - RNA, 27 nt, synthetic construct
  misc_feature 1..27: note = Calpain-3 (10-18)
  source 1..27: mol_type = other RNA
aaggtgctgaacaccgtcgtgaacaag

SEQ ID NO: 41004 - RNA, 27 nt, synthetic construct
  misc_feature 1..27: note = (Pyruvate dehydrogenase (acetyl-transferring))-phosphatase 1, mitochondrial (542-550)
  source 1..27: mol_type = other RNA
ctgcccgaggagctcgcccgcatgtac

SEQ ID NO: 41005 - RNA, 21 nt, synthetic construct
  misc_feature 1..21: note = Vimentin (116-122)
  source 1..21: mol_type = other RNA
aactacatcgacaaggtgcgc

SEQ ID NO: 41006 - RNA, 24 nt, synthetic construct
  misc_feature 1..24: note = Vimentin (116-123)
  source 1..24: mol_type = other RNA
aactacatcgacaaggtgcgcttc

SEQ ID NO: 41007 - RNA, 24 nt, synthetic construct
  misc_feature 1..24: note = Lysine-specific demethylase 5B (45-52)
  source 1..24: mol_type = other RNA
cccttcgccttcatccacaagatc

SEQ ID NO: 41008 - RNA, 24 nt, synthetic construct
  misc_feature 1..24: note = Isoleucine-tRNA ligase, cytoplasmic (611-618)
  source 1..24: mol_type = other RNA
cccgtgagcatcatccagaagtac

SEQ ID NO: 41009 - RNA, 27 nt, synthetic construct
  misc_feature 1..27: note = Ankyrin-2 (1316-1324)
  source 1..27: mol_type = other RNA
ccctacatggccaagttcgtggtcttc

SEQ ID NO: 41010 - RNA, 21 nt, synthetic construct
  misc_feature 1..21: note = Plectin (3425-3431)
  source 1..21: mol_type = other RNA
ccctacagcggctccaccatc

SEQ ID NO: 41011 - RNA, 27 nt, synthetic construct
  misc_feature 1..27: note = Crooked neck-like protein 1 (372-380)
  source 1..27: mol_type = other RNA
cgcttcgaggagaagcacgcctacttc

SEQ ID NO: 41012 - RNA, 27 nt, synthetic construct
  misc_feature 1..27: note = Vimentin (122-130)
  source 1..27: mol_type = other RNA
cgcttcctggagcagcagaacaagatc

SEQ ID NO: 41013 - RNA, 27 nt, synthetic construct
  misc_feature 1..27: note = Membrane-associated transporter protein (209-217)
  source 1..27: mol_type = other RNA
cgcctgctcggcaccgagttccaggtg

SEQ ID NO: 41014 - RNA, 24 nt, synthetic construct
  misc_feature 1..24: note = V-type proton ATPase subunit B, kidney isoform (40-47)
  source 1..24: mol_type = other RNA
cgcagcggccaggtgctggaggtc

SEQ ID NO: 41015 - RNA, 27 nt, synthetic construct
  misc_feature 1..27: note = Sialidase-4 (192-200)
  source 1..27: mol_type = other RNA
cgcaccagcccccactccttcgccttc

SEQ ID NO: 41016 - RNA, 27 nt, synthetic construct
  misc_feature 1..27: note = Tubulin beta-6 chain (244-252)
  source 1..27: mol_type = other RNA
cgctacctgaccgtggccaccgtcttc

SEQ ID NO: 41017 - RNA, 27 nt, synthetic construct
  misc_feature 1..27: note = Transcription elongation factor SPT5 (361-369)
  source 1..27: mol_type = other RNA
cgctacagccggaagggcttcctgttc

SEQ ID NO: 41018 - RNA, 27 nt, synthetic construct
  misc_feature 1..27: note = Zinc finger MYM-type protein 4 (758-766)
  source 1..27: mol_type = other RNA
agcgccggccccccgtccctgcgcaag

SEQ ID NO: 41019 - RNA, 27 nt, synthetic construct
  misc_feature 1..27: note = Melanoma-associated antigen 1 (230-238)
  source 1..27: mol_type = other RNA
agcgcctacggcgagccccgcaagctg

SEQ ID NO: 41020 - RNA, 39 nt, synthetic construct
  misc_feature 1..39: note = Heterogeneous nuclear ribonucleoproteins A2/B1 (289-301)
  source 1..39: mol_type = other RNA
agcggcgggtccggcgggtacggcgggcgcagccggtac

SEQ ID NO: 41021 - RNA, 39 nt, synthetic construct
  misc_feature 1..39: note = Elongation factor 1-alpha 1 (18-30)
  source 1..39: mol_type = other RNA
agcggcaagtccaccaccacggggcacctgatctacaag

SEQ ID NO: 41022 - RNA, 27 nt, synthetic construct
  misc_feature 1..27: note = G protein pathway suppressor 2 (319-327)
  source 1..27: mol_type = other RNA
agccagaacccccgcttctaccacaag

SEQ ID NO: 41023 - RNA, 27 nt, synthetic construct
  misc_feature 1..27: note = Nuclear pore complex protein Nup205 (214-222)
  source 1..27: mol_type = other RNA
agctccctgtacatcatcctcaagaag

SEQ ID NO: 41024 - RNA, 27 nt, synthetic construct
  misc_feature 1..27: note = RNA binding motif protein, X-linked-like-1 (142-150)
  source 1..27: mol_type = other RNA
agctcccgcggccccctgccggtgaag

SEQ ID NO: 41025 - RNA, 30 nt, synthetic construct
  misc_feature 1..30: note = Mitochondrial fission factor (79-88)
  source 1..30: mol_type = other RNA
agcacccccttcaagccgctggccctcaag

SEQ ID NO: 41026 - RNA, 51 nt, synthetic construct
  misc_feature 1..51: note = Prelamin-A/C (479-495)
  source 1..51: mol_type = other RNA
agcgtgggcgggtccggcgggggcagcttcggggacaacctggtcacccgc

SEQ ID NO: 41027 - RNA, 27 nt, synthetic construct
  misc_feature 1..27: note = Zinc finger MIZ domain-containing protein 1 (594-602)
  source 1..27: mol_type = other RNA
agcgtgctgcagggcctcctgaagaag

SEQ ID NO: 41028 - RNA, 27 nt, synthetic construct
  misc_feature 1..27: note = Anaphase-promoting complex subunit 5 (50-58)
  source 1..27: mol_type = other RNA
agcgtggtcggcctgttcctccgccac

SEQ ID NO: 41029 - RNA, 33 nt, synthetic construct
  misc_feature 1..33: note = Prohibitin (230-240)
  source 1..33: mol_type = other RNA
accgccggcgacgggctgatcgagctccgcaag

SEQ ID NO: 41030 - RNA, 45 nt, synthetic construct
  misc_feature 1..45: note = RNA polymerase II-associated factor 1 homolog (4-18)
  source 1..45: mol_type = other RNA
accatccagacccaggcccagcgcgaggacggccaccggcccaac

SEQ ID NO: 41031 - RNA, 45 nt, synthetic construct
  misc_feature 1..45: note = Thymosin beta-10 (33-47)
  source 1..45: mol_type = other RNA
accctgcccaccaaggagacgatcgagcaggagaagcgcagcgag

SEQ ID NO: 41032 - RNA, 51 nt, synthetic construct
  misc_feature 1..51: note = Thymosin beta-10 (33-49)
  source 1..51: mol_type = other RNA
accctgcccaccaaggagacgatcgagcaggagaagcgcagcgagatctcc

SEQ ID NO: 41033 - RNA, 42 nt, synthetic construct
  misc_feature 1..42: note = Golgi-specific brefeldin A-resistance guanine nucleotide exchange factor 1 (535-548)
  source 1..42: mol_type = other RNA
accccccgcccgaccgaccccatccccacgagcgaggtgaac

SEQ ID NO: 41034 - RNA, 33 nt, synthetic construct
  misc_feature 1..33: note = KH domain-containing, RNA-binding, signal transduction-associated protein 1 (33-43)
  source 1..33: mol_type = other RNA
acccccagccgccagccgcccctgccccaccgg

SEQ ID NO: 41035 - RNA, 45 nt, synthetic construct
  misc_feature 1..45: note = Probable ATP-dependent RNA helicase DDX5 (556-570)
  source 1..45: mol_type = other RNA
accagcttccgcaccggcaaccccacggggacctaccagaacggc

SEQ ID NO: 41036 - RNA, 24 nt, synthetic construct
  misc_feature 1..24: note = Elongation factor 1-alpha 1 (23-30)
  source 1..24: mol_type = other RNA
accaccggccacctgatctacaag

SEQ ID NO: 41037 - RNA, 45 nt, synthetic construct
  misc_feature 1..45: note = Vimentin (446-460)
  source 1..45: mol_type = other RNA
accgtggagacccgcgacggccaggtcatcaacgagacgagccag

SEQ ID NO: 41038 - RNA, 42 nt, synthetic construct
  misc_feature 1..42: note = Serum albumin (439-452)
  source 1..42: mol_type = other RNA
gtgccccaggtcagcaccccgaccctggtggaggtgtcccgc

SEQ ID NO: 41039 - RNA, 27 nt, synthetic construct
  misc_feature 1..27: note = Melanoma-associated antigen F1 (199-207)
  source 1..27: mol_type = other RNA
gtgcagcccagcaagtaccacttcctg

SEQ ID NO: 41040 - RNA, 24 nt, synthetic construct
  misc_feature 1..24: note = Vimentin (117-124)
  source 1..24: mol_type = other RNA
tacatcgacaaggtgcgcttcctg

SEQ ID NO: 41041 - RNA, 27 nt, synthetic construct
  misc_feature 1..27: note = Fatty acid synthase (2288-2296)
  source 1..27: mol_type = other RNA
tactacatcgactgcatccgccaggtg

SEQ ID NO: 41042 - RNA, 27 nt, synthetic construct
  misc_feature 1..27: note = Zinc finger protein 552 (2-10)
  source 1..27: mol_type = other RNA
gccgccgcggccctgcgcttccccgtg

SEQ ID NO: 41043 - RNA, 30 nt, synthetic construct
  misc_feature 1..30: note = Colipase-like protein 2 (3-12)
  source 1..30: mol_type = other RNA
gccgccctggcgctcgtggccggcgtcctg

SEQ ID NO: 41044 - RNA, 27 nt, synthetic construct
  misc_feature 1..27: note = ATP-binding cassette sub-family G member 1 (538-546)
  source 1..27: mol_type = other RNA
gccgccctgggcaccatgaccagcctc

SEQ ID NO: 41045 - RNA, 27 nt, synthetic construct
  misc_feature 1..27: note = Integrin beta-7 (351-359)
  source 1..27: mol_type = other RNA
gccgccctgcccgtgtaccaggagctc

SEQ ID NO: 41046 - RNA, 27 nt, synthetic construct
  misc_feature 1..27: note = Translocon-associated protein subunit delta (2-10)
  source 1..27: mol_type = other RNA
gccgccatggcgagcctgggcgccctc

SEQ ID NO: 41047 - RNA, 27 nt, synthetic construct
  misc_feature 1..27: note = Fumarate hydratase, mitochondrial (264-272)
  source 1..27: mol_type = other RNA
gccgccatgccccgcatctacgagctg

SEQ ID NO: 41048 - RNA, 24 nt, synthetic construct
  misc_feature 1..24: note = Interferon-induced GTP-binding protein Mx1 (15-22)
  source 1..24: mol_type = other RNA
gccgccagccaccccctgctcctg

SEQ ID NO: 41049 - RNA, 27 nt, synthetic construct
  misc_feature 1..27: note = Basement membrane-specific heparan sulfate proteoglycan core protein (1503-1511)
  source 1..27: mol_type = other RNA
gccgccagcatctccgcggtgagcctg

SEQ ID NO: 41050 - RNA, 27 nt, synthetic construct
  misc_feature 1..27: note = Zinc finger and BTB domain-containing protein 7B (478-486)
  source 1..27: mol_type = other RNA
gccgccagccccgcgggcctggacctc

SEQ ID NO: 41051 - RNA, 27 nt, synthetic construct
  misc_feature 1..27: note = Poly(rC)-binding protein 2 (92-100)
  source 1..27: mol_type = other RNA
gccgccagccgccccccggtgaccctg

SEQ ID NO: 41052 - RNA, 33 nt, synthetic construct
  misc_feature 1..33: note = Protein phosphatase inhibitor 2 (2-12)
  source 1..33: mol_type = other RNA
gccgccagcaccgcgtcccaccgccccatcaag

SEQ ID NO: 41053 - RNA, 27 nt, synthetic construct
  misc_feature 1..27: note = Transcription factor jun-B (200-208)
  source 1..27: mol_type = other RNA
gccgccgtgggcaccgggagctcctac

SEQ ID NO: 41054 - RNA, 27 nt, synthetic construct
  misc_feature 1..27: note = Carnitine O-palmitoyltransferase 1, liver isoform (476-484)
  source 1..27: mol_type = other RNA
gccgacgcccccatcgtggcgcacctg

SEQ ID NO: 41055 - RNA, 30 nt, synthetic construct
  misc_feature 1..30: note = Protein CDV3 homolog (2-11)
  source 1..30: mol_type = other RNA
gccgagaccgaggagcgcagcctggacaac

SEQ ID NO: 41056 - RNA, 27 nt, synthetic construct
  misc_feature 1..27: note = Cirhin (640-648)
  source 1..27: mol_type = other RNA
gccttcaagatcagcaagatctacaag

SEQ ID NO: 41057 - RNA, 27 nt, synthetic construct
  misc_feature 1..27: note = Tyrosine-protein kinase HCK (301-309)
  source 1..27: mol_type = other RNA
gccttcctggccgaggcgaacgtgatg

SEQ ID NO: 41058 - RNA, 27 nt, synthetic construct
  misc_feature 1..27: note = 2-oxoglutarate dehydrogenase, mitochondrial (85-93)
  source 1..27: mol_type = other RNA
gccggcgcccccccggggaccgcgtac

SEQ ID NO: 41059 - RNA, 24 nt, synthetic construct
  misc_feature 1..24: note = Fc receptor-like A (58-65)
  source 1..24: mol_type = other RNA
gccggcttccaggtgaaggcctac

SEQ ID NO: 41060 - RNA, 27 nt, synthetic construct
  misc_feature 1..27: note = Piezo-type mechanosensitive ion channel component 1 (211-219)
  source 1..27: mol_type = other RNA
gccggcatcgcccaccccagcgcgctg

SEQ ID NO: 41061 - RNA, 30 nt, synthetic construct
  misc_feature 1..30: note = Uncharacterized protein ENSP00000382042 (147-156)
  source 1..30: mol_type = other RNA
gccggcaccgggggcagccccgccctgctc

SEQ ID NO: 41062 - RNA, 27 nt, synthetic construct
  misc_feature 1..27: note = Glycogen debranching enzyme (1193-1201)
  source 1..27: mol_type = other RNA
gccggcaccctggaccagcccctcttc

SEQ ID NO: 41063 - RNA, 30 nt, synthetic construct
  misc_feature 1..30: note = Abelson tyrosine-protein kinase 2 (1157-1166)
  source 1..30: mol_type = other RNA
gccggcgtgcccgggaccaacccggtcctg

SEQ ID NO: 41064 - RNA, 27 nt, synthetic construct
  misc_feature 1..27: note = Heterogeneous nuclear ribonucleoprotein F (403-411)
  source 1..27: mol_type = other RNA
gccggctacagcgggcagaactccatg

SEQ ID NO: 41065 - RNA, 27 nt, synthetic construct
  misc_feature 1..27: note = Spectrin alpha chain, non-erythrocytic 1 (2132-2140)
  source 1..27: mol_type = other RNA
gcccacgacgccttccgcagctccctg

SEQ ID NO: 41066 - RNA, 27 nt, synthetic construct
  misc_feature 1..27: note = ER degradation-enhancing alpha-mannosidase-like protein 1 (264-272)
  source 1..27: mol_type = other RNA
gcccacgacctggccgtgcgcctcctg

SEQ ID NO: 41067 - RNA, 27 nt, synthetic construct
  misc_feature 1..27: note = DmX-like protein 2 (2940-2948)
  source 1..27: mol_type = other RNA
gcccacgacagcgccatcaaggcgctg

SEQ ID NO: 41068 - RNA, 27 nt, synthetic construct
  misc_feature 1..27: note = Testicular acid phosphatase (287-295)
  source 1..27: mol_type = other RNA
gcccacgacagcaccctgctcgccctg

SEQ ID NO: 41069 - RNA, 27 nt, synthetic construct
  misc_feature 1..27: note = Lysosomal acid phosphatase (285-293)
  source 1..27: mol_type = other RNA
gcccacgacaccaccctggtggccctc

SEQ ID NO: 41070 - RNA, 33 nt, synthetic construct
  misc_feature 1..33: note = U4/U6 small nuclear ribonucleoprotein Prp3 (510-520)
  source 1..33: mol_type = other RNA
gcccacgaggaggccaacgcggcccgcaagctg

SEQ ID NO: 41071 - RNA, 27 nt, synthetic construct
  misc_feature 1..27: note = Protein FAM195A (93-101)
  source 1..27: mol_type = other RNA
gcccacgaggagaacgtgcgcttcgtc

SEQ ID NO: 41072 - RNA, 27 nt, synthetic construct
  misc_feature 1..27: note = Synemin (147-155)
  source 1..27: mol_type = other RNA
gcccacgagcgcgacgtgcgggagctg

SEQ ID NO: 41073 - RNA, 27 nt, synthetic construct
  misc_feature 1..27: note = NADH dehydrogenase (ubiquinone) 1 alpha subcomplex subunit 1 (39-47)
  source 1..27: mol_type = other RNA
gcccacttcggctaccactggagcctg

SEQ ID NO: 41074 - RNA, 27 nt, synthetic construct
  misc_feature 1..27: note = GDP-mannose 4,6 dehydratase (74-82)
  source 1..27: mol_type = other RNA
gcccacatcgagggcaacatgaagctg

SEQ ID NO: 41075 - RNA, 27 nt, synthetic construct
  misc_feature 1..27: note = Striatin-3 (531-539)
  source 1..27: mol_type = other RNA
gcccacatcggccccgtgctgagcctc

SEQ ID NO: 41076 - RNA, 27 nt, synthetic construct
  misc_feature 1..27: note = Nuclear factor erythroid 2-related factor 2 (106-114)
  source 1..27: mol_type = other RNA
gcccacatccccaagagcgacgccctg

SEQ ID NO: 41077 - RNA, 27 nt, synthetic construct
  misc_feature 1..27: note = Nucleolar RNA helicase 2 (616-624)
  source 1..27: mol_type = other RNA
gcccacatcagcggcgccacctccgtg

SEQ ID NO: 41078 - RNA, 27 nt, synthetic construct
  misc_feature 1..27: note = Coatomer subunit beta' (555-563)
  source 1..27: mol_type = other RNA
gcccacctggaccgcaccatgtacctc

SEQ ID NO: 41079 - RNA, 27 nt, synthetic construct
  misc_feature 1..27: note = Nuclear inhibitor of protein phosphatase 1 (172-180)
  source 1..27: mol_type = other RNA
gcccacaacaagcgcatcagcaccctg

SEQ ID NO: 41080 - RNA, 24 nt, synthetic construct
  misc_feature 1..24: note = Suppressor of SWI4 1 homolog (136-143)
  source 1..24: mol_type = other RNA
gcccaccccccgctgctcgtgctg

SEQ ID NO: 41081 - RNA, 27 nt, synthetic construct
  misc_feature 1..27: note = Exosome complex component CSL4 (156-164)
  source 1..27: mol_type = other RNA
gcccacagcgagtccggcatccagatg

SEQ ID NO: 41082 - RNA, 30 nt, synthetic construct
  misc_feature 1..30: note = DNA mismatch repair protein Msh6 (457-466)
  source 1..30: mol_type = other RNA
gcccacagcggcttccccgagatcgccttc

SEQ ID NO: 41083 - RNA, 27 nt, synthetic construct
  misc_feature 1..27: note = 60S ribosomal protein L18a (121-129)
  source 1..27: mol_type = other RNA
gcccacagcatccagatcatgaaggtg

SEQ ID NO: 41084 - RNA, 27 nt, synthetic construct
  misc_feature 1..27: note = Sodium-coupled neutral amino acid transporter 5 (74-82)
  source 1..27: mol_type = other RNA
gcccacaccggcgtgatcttcttcctg

SEQ ID NO: 41085 - RNA, 27 nt, synthetic construct
  misc_feature 1..27: note = AP-2 complex subunit mu (194-202)
  source 1..27: mol_type = other RNA
gcccacgtgagcggccgcgtcgtgatg

SEQ ID NO: 41086 - RNA, 27 nt, synthetic construct
  misc_feature 1..27: note = Trafficking protein particle complex subunit 5 (162-170)
  source 1..27: mol_type = other RNA
gcccactggcacaagggcaccaccctg

SEQ ID NO: 41087 - RNA, 27 nt, synthetic construct
  misc_feature 1..27: note = LIM and SH3 domain protein 1 (55-63)
  source 1..27: mol_type = other RNA
gcccactaccccaagcagagcttcacc

SEQ ID NO: 41088 - RNA, 27 nt, synthetic construct
  misc_feature 1..27: note = Endoplasmic reticulum-Golgi intermediate compartment protein 3 (313-321)
  source 1..27: mol_type = other RNA
gccatcatcggcgggatgttcaccgtg

SEQ ID NO: 41089 - RNA, 27 nt, synthetic construct
  misc_feature 1..27: note = Parafibromin (184-192)
  source 1..27: mol_type = other RNA
gccatcaaggccaagatcatggcgaag

SEQ ID NO: 41090 - RNA, 27 nt, synthetic construct
  misc_feature 1..27: note = Exportin-4 (825-833)
  source 1..27: mol_type = other RNA
gccatcctgttcaacttcctcatggac

SEQ ID NO: 41091 - RNA, 27 nt, synthetic construct
  misc_feature 1..27: note = Protein arginine N-methyltransferase 5 (168-176)
  source 1..27: mol_type = other RNA
gccatcctgcccaccagcatcttcctc

SEQ ID NO: 41092 - RNA, 30 nt, synthetic construct
  misc_feature 1..30: note = Bifunctional glutamate/proline-tRNA ligase (215-224)
  source 1..30: mol_type = other RNA
gccaaggccgcgctgctcaaccagcactac

SEQ ID NO: 41093 - RNA, 30 nt, synthetic construct
  misc_feature 1..30: note = Exportin-5 (744-753)
  source 1..30: mol_type = other RNA
gccaaggccggcgggttcgtggtcggctac

SEQ ID NO: 41094 - RNA, 27 nt, synthetic construct
  misc_feature 1..27: note = DNA replication licensing factor MCM7 (470-478)
  source 1..27: mol_type = other RNA
gccaaggccggcatcctgaccaccctc

SEQ ID NO: 41095 - RNA, 27 nt, synthetic construct
  misc_feature 1..27: note = DNA replication licensing factor MCM5 (470-478)
  source 1..27: mol_type = other RNA
gccaaggccggcatcaccaccacgctg

SEQ ID NO: 41096 - RNA, 27 nt, synthetic construct
  misc_feature 1..27: note = Peptidase M20 domain-containing protein 2 (398-406)
  source 1..27: mol_type = other RNA
gccaaggccctggcgatgaccgccctc

SEQ ID NO: 41097 - RNA, 30 nt, synthetic construct
  misc_feature 1..30: note = Proteasome subunit beta type-2 (125-134)
  source 1..30: mol_type = other RNA
gccaaggcccccttcgcggcccacggctac

SEQ ID NO: 41098 - RNA, 27 nt, synthetic construct
  misc_feature 1..27: note = Drebrin (614-622)
  source 1..27: mol_type = other RNA
gccaaggcccccccgcccgtgttctac

SEQ ID NO: 41099 - RNA, 27 nt, synthetic construct
  misc_feature 1..27: note = CCAAT/enhancer-binding protein beta (241-249)
  source 1..27: mol_type = other RNA
gccaaggcccccccgaccgcgtgctac

SEQ ID NO: 41100 - RNA, 27 nt, synthetic construct
  misc_feature 1..27: note = Ragulator complex protein LAMTOR2 (106-114)
  source 1..27: mol_type = other RNA
gccaaggcccaggcgctggtgcagtac

SEQ ID NO: 41101 - RNA, 27 nt, synthetic construct
  misc_feature 1..27: note = Protein PRRC2C (2502-2510)
  source 1..27: mol_type = other RNA
gccaaggcccagagcggcctggcgttc

SEQ ID NO: 41102 - RNA, 27 nt, synthetic construct
  misc_feature 1..27: note = ATP-dependent RNA helicase A (181-189)
  source 1..27: mol_type = other RNA
gccaaggcccgcctgaaccagtacttc

SEQ ID NO: 41103 - RNA, 33 nt, synthetic construct
  misc_feature 1..33: note = Heterogeneous nuclear ribonucleoprotein L (247-257)
  source 1..33: mol_type = other RNA
gccaaggccagcctgaacggcgcggacatctac

SEQ ID NO: 41104 - RNA, 27 nt, synthetic construct
  misc_feature 1..27: note = NAD(P)H-hydrate epimerase (96-104)
  source 1..27: mol_type = other RNA
gccaaggcctaccccccgaccagcatg

SEQ ID NO: 41105 - RNA, 27 nt, synthetic construct
  misc_feature 1..27: note = 1-phosphatidylinositol 4,5-bisphosphate phosphodiesterase beta-1 (127-135)
  source 1..27: mol_type = other RNA
gccaaggagtggaccaacgaggtgttc

SEQ ID NO: 41106 - RNA, 30 nt, synthetic construct
  misc_feature 1..30: note = Cell division cycle-associated 7-like protein (291-300)
  source 1..30: mol_type = other RNA
gccaagttcgccgaggagttctacagcttc

SEQ ID NO: 41107 - RNA, 27 nt, synthetic construct
  misc_feature 1..27: note = Cathepsin D (193-201)
  source 1..27: mol_type = other RNA
gccaagttcgacggcatcctggggatg

SEQ ID NO: 41108 - RNA, 30 nt, synthetic construct
  misc_feature 1..30: note = Crooked neck-like protein 1 (420-429)
  source 1..30: mol_type = other RNA
gccaagttcgaggagaaccagaaggagttc

SEQ ID NO: 41109 - RNA, 27 nt, synthetic construct
  misc_feature 1..27: note = Staphylococcal nuclease domain-containing protein 1 (248-256)
  source 1..27: mol_type = other RNA
gccaagttcttcaccgagagccgcctg

SEQ ID NO: 41110 - RNA, 27 nt, synthetic construct
  misc_feature 1..27: note = Pre-mRNA-processing factor 19 (487-495)
  source 1..27: mol_type = other RNA
gccaagttcatcgccagcaccggcatg

SEQ ID NO: 41111 - RNA, 27 nt, synthetic construct
  misc_feature 1..27: note = Squalene monooxygenase (243-251)
  source 1..27: mol_type = other RNA
gccaagttcatcgagggcgtggtcctg

SEQ ID NO: 41112 - RNA, 27 nt, synthetic construct
  misc_feature 1..27: note = DCN1-like protein 2 (152-160)
  source 1..27: mol_type = other RNA
gccaagttcaaggacttctaccagttc

SEQ ID NO: 41113 - RNA, 30 nt, synthetic construct
  misc_feature 1..30: note = DnaJ homolog subfamily B member 9 (65-74)
  source 1..30: mol_type = other RNA
gccaagttccgcgagatcgccgaggcgtac

SEQ ID NO: 41114 - RNA, 27 nt, synthetic construct
  misc_feature 1..27: note = Nitrogen permease regulator 3-like protein (366-374)
  source 1..27: mol_type = other RNA
gccaagttcagcctgcccgtgtccctc

SEQ ID NO: 41115 - RNA, 33 nt, synthetic construct
  misc_feature 1..33: note = DNA-directed RNA polymerases I and III subunit RPAC1 (223-233)
  source 1..33: mol_type = other RNA
gccaagttcagccccgtggccaccgcgtcctac

SEQ ID NO: 41116 - RNA, 27 nt, synthetic construct
  misc_feature 1..27: note = Ubiquitin-like modifier-activating enzyme 1 (321-329)
  source 1..27: mol_type = other RNA
gccaagttcagccgccccgcccagctg

SEQ ID NO: 41117 - RNA, 27 nt, synthetic construct
  misc_feature 1..27: note = Staphylococcal nuclease domain-containing protein 1 (738-746)
  source 1..27: mol_type = other RNA
gccaagttcgtggacggcgagtggtac

SEQ ID NO: 41118 - RNA, 27 nt, synthetic construct
  misc_feature 1..27: note = 60S ribosomal protein L31 (74-82)
  source 1..27: mol_type = other RNA
gccaagggcatccgcaacgtgccctac

SEQ ID NO: 41119 - RNA, 27 nt, synthetic construct
  misc_feature 1..27: note = Cullin-1 (220-228)
  source 1..27: mol_type = other RNA
gccaagggccccaccctgaccgtgtac

SEQ ID NO: 41120 - RNA, 27 nt, synthetic construct
  misc_feature 1..27: note = NACHT, LRR and PYD domains-containing protein 7 (625-633)
  source 1..27: mol_type = other RNA
gccaagggcgtgttcctggagaactac

SEQ ID NO: 41121 - RNA, 27 nt, synthetic construct
  misc_feature 1..27: note = Cystatin-B (90-98)
  source 1..27: mol_type = other RNA
gccaagcacgacgagctgacctacttc

SEQ ID NO: 41122 - RNA, 36 nt, synthetic construct
  misc_feature 1..36: note = T-complex protein 1 subunit theta (19-30)
  source 1..36: mol_type = other RNA
gccaagcacttcagcggcctggaggaggccgtgtac

SEQ ID NO: 41123 - RNA, 27 nt, synthetic construct
  misc_feature 1..27: note = Unconventional myosin-Va (1821-1829)
  source 1..27: mol_type = other RNA
gccaagcacatcttccccgtgaccttc

SEQ ID NO: 41124 - RNA, 27 nt, synthetic construct
  misc_feature 1..27: note = Fatty aldehyde dehydrogenase (198-206)
  source 1..27: mol_type = other RNA
gccaagcacctgacccccgtgaccctc

SEQ ID NO: 41125 - RNA, 27 nt, synthetic construct
  misc_feature 1..27: note = AP-2 complex subunit sigma (44-52)
  source 1..27: mol_type = other RNA
gccaagcacaccaacttcgtggagttc

SEQ ID NO: 41126 - RNA, 27 nt, synthetic construct
  misc_feature 1..27: note = F-box DNA helicase 1 (835-843)
  source 1..27: mol_type = other RNA
gccaagatcgccgtggtcgagaagtac

SEQ ID NO: 41127 - RNA, 33 nt, synthetic construct
  misc_feature 1..33: note = Carnitine O-palmitoyltransferase 1, liver isoform (75-85)
  source 1..33: mol_type = other RNA
gccaagatcgaccccagcctgggcatcatcgcc

SEQ ID NO: 41128 - RNA, 27 nt, synthetic construct
  misc_feature 1..27: note = D(2) dopamine receptor (338-346)
  source 1..27: mol_type = other RNA
gccaagatcttcgagatccagaccatg

SEQ ID NO: 41129 - RNA, 27 nt, synthetic construct
  misc_feature 1..27: note = Poly(rC)-binding protein 2 (308-316)
  source 1..27: mol_type = other RNA
gccaagatcaacgagatccgccagatg

SEQ ID NO: 41130 - RNA, 27 nt, synthetic construct
  misc_feature 1..27: note = Reticulon-2 (522-530)
  source 1..27: mol_type = other RNA
gccaagatccccggcaccggggccctg

SEQ ID NO: 41131 - RNA, 33 nt, synthetic construct
  misc_feature 1..33: note = Protein SET (89-99)
  source 1..33: mol_type = other RNA
gccaagatccccaacttctgggtgaccaccttc

SEQ ID NO: 41132 - RNA, 33 nt, synthetic construct
  misc_feature 1..33: note = COBW domain-containing protein 6 (40-50)
  source 1..33: mol_type = other RNA
gccaagatccccgtgaccatcatcaccggctac

SEQ ID NO: 41133 - RNA, 33 nt, synthetic construct
  misc_feature 1..33: note Dolichyl-diphosphooligosaccharide-proteinosyltransferase subunit 1 (125-135)
  source 1..33: mol_type = other RNA
gccaagatcagcgtgatcgtcgagaccgtgtac

SEQ ID NO: 41134 - RNA, 27 nt, synthetic construct
  misc_feature 1..27: note = Nuclear fragile X mental retardation-interacting protein 2 (350-358)
  source 1..27: mol_type = other RNA
gccaagatcgtgcccaagatcagctac

SEQ ID NO: 41135 - RNA, 27 nt, synthetic construct
  misc_feature 1..27: note = Poly (ADP-ribose) polymerase 3 (121-129)
  source 1..27: mol_type = other RNA
gccaagaaggacttcgagaagaagttc

SEQ ID NO: 41136 - RNA, 27 nt, synthetic construct
  misc_feature 1..27: note = DnaJ homolog subfamily C member 7 (40-48)
  source 1..27: mol_type = other RNA
gccaagaaggactacaacgaggcctac

SEQ ID NO: 41137 - RNA, 27 nt, synthetic construct
  misc_feature 1..27: note = Double-stranded RNA-binding protein Staufen homolog 1 (297-305)
  source 1..27: mol_type = other RNA
gccaagaaggagaaggagcccgagtac

SEQ ID NO: 41138 - RNA, 27 nt, synthetic construct
  misc_feature 1..27: note = Translocation protein SEC62 (64-72)
  source 1..27: mol_type = other RNA
gccaagaagggcgaggaggccctgttc

SEQ ID NO: 41139 - RNA, 27 nt, synthetic construct
  misc_feature 1..27: note = SWI/SNF complex subunit SMARCC2 (316-324)
  source 1..27: mol_type = other RNA
gccaagaagggccccagcaccccgtac

SEQ ID NO: 41140 - RNA, 27 nt, synthetic construct
  misc_feature 1..27: note = Myosin light chain 1/3, skeletal muscle isoform (105-113)
  source 1..27: mol_type = other RNA
gccaagaagatcgagttcgagcagttc

SEQ ID NO: 41141 - RNA, 27 nt, synthetic construct
  misc_feature 1..27: note = Probable ATP-dependent RNA helicase DDX6 (351-359)
  source 1..27: mol_type = other RNA
gccaagaagatcagccagctgggctac

SEQ ID NO: 41142 - RNA, 27 nt, synthetic construct
  misc_feature 1..27: note = Poly (ADP-ribose) polymerase 8 (686-694)
  source 1..27: mol_type = other RNA
gccaagaagctgttcggcagcaccttc

SEQ ID NO: 41143 - RNA, 27 nt, synthetic construct
  misc_feature 1..27: note = Serine/threonine-protein phosphatase 2A 56 kDa regulatory subunit delta isoform (231-239)
  source 1..27: mol_type = other RNA
gccaagaagtacatcgaccagaagttc

SEQ ID NO: 41144 - RNA, 27 nt, synthetic construct
  misc_feature 1..27: note = Nucleolar RNA helicase 2 (386-394)
  source 1..27: mol_type = other RNA
gccaagaagtacatgaagagcacctac

SEQ ID NO: 41145 - RNA, 33 nt, synthetic construct
  misc_feature 1..33: note = Interferon-induced, double-stranded RNA-activated protein kinase (313-323)
  source 1..33: mol_type = other RNA
gccaagctggaccacgtgaacatcgtccactac

SEQ ID NO: 41146 - RNA, 27 nt, synthetic construct
  misc_feature 1..27: note = Golgin subfamily A member 4 (798-806)
  source 1..27: mol_type = other RNA
gccaagctggacgtgttccagagctac

SEQ ID NO: 41147 - RNA, 27 nt, synthetic construct
  misc_feature 1..27: note = Zinc finger Ran-binding domain-containing protein 2 (94-102)
  source 1..27: mol_type = other RNA
gccaagctggaggagcgcaccggctac

SEQ ID NO: 41148 - RNA, 27 nt, synthetic construct
  misc_feature 1..27: note = Pre-mRNA-splicing factor ATP-dependent RNA helicase PRP16 (1082-1090)
  source 1..27: mol_type = other RNA
gccaagctgaagggcatcggggagtac

SEQ ID NO: 41149 - RNA, 27 nt, synthetic construct
  misc_feature 1..27: note = DNA replication licensing factor MCM5 (557-565)
  source 1..27: mol_type = other RNA
gccaagctgaagaagttcatcgcctac

SEQ ID NO: 41150 - RNA, 30 nt, synthetic construct
  misc_feature 1..30: note = Transmembrane and coiled-coil domain-containing protein 1 (115-124)
  source 1..30: mol_type = other RNA
gccaagctgcccttcaccccgctcagctac

SEQ ID NO: 41151 - RNA, 27 nt, synthetic construct
  misc_feature 1..27: note = ATP-dependent RNA helicase A (856-864)
  source 1..27: mol_type = other RNA
gccaagctgcccatcgagccgcgcttc

SEQ ID NO: 41152 - RNA, 27 nt, synthetic construct
  misc_feature 1..27: note = Peptidyl-prolyl cis-trans isomerase FKBP1A (73-81)
  source 1..27: mol_type = other RNA
gccaagctgaccatcagccccgactac

SEQ ID NO: 41153 - RNA, 33 nt, synthetic construct
  misc_feature 1..33: note = Heterogeneous nuclear ribonucleoprotein U (422-432)
  source 1..33: mol_type = other RNA
gccaagaacggccaggacctgggggtggccttc

SEQ ID NO: 41154 - RNA, 27 nt, synthetic construct
  misc_feature 1..27: note = Pre-mRNA-processing-splicing factor 8 (1011-1019)
  source 1..27: mol_type = other RNA
gccaagaacaacgtggtcatcaactac

SEQ ID NO: 41155 - RNA, 27 nt, synthetic construct
  misc_feature 1..27: note = Immunoglobulin superfamily member 10 (2607-2615)
  source 1..27: mol_type = other RNA
gccaagaaccccctgggcagcgactac

SEQ ID NO: 41156 - RNA, 33 nt, synthetic construct
  misc_feature 1..33: note = ADP-ribosylation factor GTPase-activating protein 3 (30-40)
  source 1..33: mol_type = other RNA
gccaagaaccccagctgggcctccatcacctac

SEQ ID NO: 41157 - RNA, 30 nt, synthetic construct
  misc_feature 1..30: note = Transmembrane protein 214 (356-365)
  source 1..30: mol_type = other RNA
gccaagcccgacagcaccctgcacacctac

SEQ ID NO: 41158 - RNA, 30 nt, synthetic construct
  misc_feature 1..30: note = Nucleolar GTP-binding protein 2 (401-410)
  source 1..30: mol_type = other RNA
gccaagcccgagtacatcagcaagacctac

SEQ ID NO: 41159 - RNA, 27 nt, synthetic construct
  misc_feature 1..27: note = Vacuolar protein sorting-associated protein 41 homolog (804-812)
  source 1..27: mol_type = other RNA
gccaagcccttcagcgtggtcgtgttc

SEQ ID NO: 41160 - RNA, 27 nt, synthetic construct
  misc_feature 1..27: note = 116 kDa U5 small nuclear ribonucleoprotein component (445-453)
  source 1..27: mol_type = other RNA
gccaagcccaagatcgagcacacctac

SEQ ID NO: 41161 - RNA, 27 nt, synthetic construct
  misc_feature 1..27: note = Olfactomedin-like protein 2B (2-10)
  source 1..27: mol_type = other RNA
gccaagccccgcctgctcgtgctgtac

SEQ ID NO: 41162 - RNA, 30 nt, synthetic construct
  misc_feature 1..30: note = RNA-binding protein 38 (113-122)
  source 1..30: mol_type = other RNA
gccaagccccgcagcctgcagaccggcttc

SEQ ID NO: 41163 - RNA, 27 nt, synthetic construct
  misc_feature 1..27: note = 116 kDa U5 small nuclear ribonucleoprotein component (962-970)
  source 1..27: mol_type = other RNA
gccaagcaggacgtggtcctgaactac

SEQ ID NO: 41164 - RNA, 27 nt, synthetic construct
  misc_feature 1..27: note = Nuclear pore complex protein Nup153 (293-301)
  source 1..27: mol_type = other RNA
gccaagcagctgagcgcccagtcctac

SEQ ID NO: 41165 - RNA, 27 nt, synthetic construct
  misc_feature 1..27: note = Proteasome activator complex subunit 1 (189-197)
  source 1..27: mol_type = other RNA
gccaagcagccccacgtgggcgactac

SEQ ID NO: 41166 - RNA, 27 nt, synthetic construct
  misc_feature 1..27: note = Mitochondrial import receptor subunit TOM7 homolog (8-16)
  source 1..27: mol_type = other RNA
gccaagcagcgcctgcagcagctcttc

SEQ ID NO: 41167 - RNA, 27 nt, synthetic construct
  misc_feature 1..27: note = Protein disulfide-isomerase A4 (244-252)
  source 1..27: mol_type = other RNA
gccaagcgcttcgacgtgagcggctac

SEQ ID NO: 41168 - RNA, 27 nt, synthetic construct
  misc_feature 1..27: note = Serine/threonine-protein phosphatase PP1-beta catalytic subunit (258-266)
  source 1..27: mol_type = other RNA
gccaagcgccagctggtgaccctcttc

SEQ ID NO: 41169 - RNA, 24 nt, synthetic construct
  misc_feature 1..24: note = Putative uncharacterized protein C10orf113 (2-9)
  source 1..24: mol_type = other RNA
gccaagagcgagcgccggatctac

SEQ ID NO: 41170 - RNA, 27 nt, synthetic construct
  misc_feature 1..27: note = Serine/threonine-protein kinase/endoribonuclease IRE1 (276-284)
  source 1..27: mol_type = other RNA
gccaagagcaagctgacccccaccctc

SEQ ID NO: 41171 - RNA, 30 nt, synthetic construct
  misc_feature 1..30: note = Gamma-taxilin (369-378)
  source 1..30: mol_type = other RNA
gccaagagcaacgagctgttcaccaccttc

SEQ ID NO: 41172 - RNA, 27 nt, synthetic construct
  misc_feature 1..27: note = Cullin-1 (38-46)
  source 1..27: mol_type = other RNA
gccaagagccgctacatggagctgtac

SEQ ID NO: 41173 - RNA, 27 nt, synthetic construct
  misc_feature 1..27: note = Protein disulfide-isomerase TMX3 (363-371)
  source 1..27: mol_type = other RNA
gccaagagcaccatcgtgtccatcttc

SEQ ID NO: 41174 - RNA, 27 nt, synthetic construct
  misc_feature 1..27: note = Coiled-coil domain-containing protein 115 (51-59)
  source 1..27: mol_type = other RNA
gccaagagcgtgggccccctgcagtac

SEQ ID NO: 41175 - RNA, 27 nt, synthetic construct
  misc_feature 1..27: note = Cyclin-dependent kinase 14 (280-288)
  source 1..27: mol_type = other RNA
gccaagagcgtgccctcccacacctac

SEQ ID NO: 41176 - RNA, 27 nt, synthetic construct
  misc_feature 1..27: note = Nuclear nucleic acid-binding protein C1D (53-61)
  source 1..27: mol_type = other RNA
gccaaggtggacctggtcagcgcctac

SEQ ID NO: 41177 - RNA, 30 nt, synthetic construct
  misc_feature 1..30: note = Plastin-2 (19-28)
  source 1..30: mol_type = other RNA
gccaaggtggacaccgacggcaacgggtac

SEQ ID NO: 41178 - RNA, 27 nt, synthetic construct
  misc_feature 1..27: note = Transmembrane protein 14D (103-111)
  source 1..27: mol_type = other RNA
gccaaggtgggcgtccgcatgctgatg

SEQ ID NO: 41179 - RNA, 27 nt, synthetic construct
  misc_feature 1..27: note = 60S ribosomal protein L27 (114-122)
  source 1..27: mol_type = other RNA
gccaaggtgaagttcgaggagcgctac

SEQ ID NO: 41180 - RNA, 24 nt, synthetic construct
  misc_feature 1..24: note = Neuroblast differentiation-associated protein AHNAK (5180-5187)
  source 1..24: mol_type = other RNA
gccaaggtgaagacccccagcttc

SEQ ID NO: 41181 - RNA, 27 nt, synthetic construct
  misc_feature 1..27: note = Nck-associated protein 1-like (512-520)
  source 1..27: mol_type = other RNA
gccaaggtgatgaacctgatcgtcttc

SEQ ID NO: 41182 - RNA, 27 nt, synthetic construct
  misc_feature 1..27: note Dolichyl-diphosphooligosaccharide-proteinosyltransferase subunit STT3A (520-528)
  source 1..27: mol_type = other RNA
gccaaggtgatgagctggtgggactac

SEQ ID NO: 41183 - RNA, 27 nt, synthetic construct
  misc_feature 1..27: note = Eukaryotic translation initiation factor 3 subunit L (142-150)
  source 1..27: mol_type = other RNA
gccaaggtgagcggcgggccctccctg

SEQ ID NO: 41184 - RNA, 27 nt, synthetic construct
  misc_feature 1..27: note = Condensin-2 complex subunit D3 (362-370)
  source 1..27: mol_type = other RNA
gccaaggtggtcgacaagagcgagtac

SEQ ID NO: 41185 - RNA, 27 nt, synthetic construct
  misc_feature 1..27: note = Cytoskeleton-associated protein 5 (1205-1213)
  source 1..27: mol_type = other RNA
gccaagtggctgcaggacgagatgttc

SEQ ID NO: 41186 - RNA, 33 nt, synthetic construct
  misc_feature 1..33: note = DNA-directed RNA polymerase II subunit RPB3 (174-184)
  source 1..33: mol_type = other RNA
gccaagtggaaccccaccgccggcgtggcgttc

SEQ ID NO: 41187 - RNA, 27 nt, synthetic construct
  misc_feature 1..27: note = Enhancer of mRNA-decapping protein 4 (124-132)
  source 1..27: mol_type = other RNA
gccaagtacgactgggagcagaagtac

SEQ ID NO: 41188 - RNA, 27 nt, synthetic construct
  misc_feature 1..27: note = Myotubularin-related protein 6 (102-110)
  source 1..27: mol_type = other RNA
gccaagtacgaggacctgtacgccttc

SEQ ID NO: 41189 - RNA, 27 nt, synthetic construct
  misc_feature 1..27: note = CXXC-type zinc finger protein 1 (507-515)
  source 1..27: mol_type = other RNA
gccaagtacgagagccagacctccttc

SEQ ID NO: 41190 - RNA, 27 nt, synthetic construct
  misc_feature 1..27: note = Guanine nucleotide-binding protein G(s) subunit alpha isoforms XLas (980-988)
  source 1..27: mol_type = other RNA
gccaagtacttcatccgcgacgagttc

SEQ ID NO: 41191 - RNA, 27 nt, synthetic construct
  misc_feature 1..27: note = Integrator complex subunit 10 (304-312)
  source 1..27: mol_type = other RNA
gccaagtacaagaaccaggtggtctac

SEQ ID NO: 41192 - RNA, 33 nt, synthetic construct
  misc_feature 1..33: note = 40S ribosomal protein S5 (46-56)
  source 1..33: mol_type = other RNA
gccaagtacctgccccacagcgccggccgctac

SEQ ID NO: 41193 - RNA, 33 nt, synthetic construct
  misc_feature 1..33: note = Nucleolar protein 56 (319-329)
  source 1..33: mol_type = other RNA
gccaagtaccccgccagcaccgtgcagatcctg

SEQ ID NO: 41194 - RNA, 27 nt, synthetic construct
  misc_feature 1..27: note = Proteasome activator complex subunit 3 (194-202)
  source 1..27: mol_type = other RNA
gccaagtacccccacgtggaggactac

SEQ ID NO: 41195 - RNA, 27 nt, synthetic construct
  misc_feature 1..27: note = V-type proton ATPase subunit C 1 (110-118)
  source 1..27: mol_type = other RNA
gccaagtaccccatcaagcagagcctg

SEQ ID NO: 41196 - RNA, 27 nt, synthetic construct
  misc_feature 1..27: note = Probable ATP-dependent RNA helicase DDX10 (280-288)
  source 1..27: mol_type = other RNA
gccaagtacagcacccccgccaccctg

SEQ ID NO: 41197 - RNA, 27 nt, synthetic construct
  misc_feature 1..27: note = 26S proteasome non-ATPase regulatory subunit 12 (367-375)
  source 1..27: mol_type = other RNA
gccaagtactacacccgcatcaccatg

SEQ ID NO: 41198 - RNA, 30 nt, synthetic construct
  misc_feature 1..30: note = Serine/arginine repetitive matrix protein 2 (2360-2369)
  source 1..30: mol_type = other RNA
gccctggcccccgcgagcctcacctccgcc

SEQ ID NO: 41199 - RNA, 27 nt, synthetic construct
  misc_feature 1..27: note = Protein FAM217A (258-266)
  source 1..27: mol_type = other RNA
gccctggacctccacaacctggccctg

SEQ ID NO: 41200 - RNA, 27 nt, synthetic construct
  misc_feature 1..27: note = HAUS augmin-like complex subunit 8 (77-85)
  source 1..27: mol_type = other RNA
gccctggacaccacccgccacgagctc

SEQ ID NO: 41201 - RNA, 30 nt, synthetic construct
  misc_feature 1..30: note = Mesoderm development candidate 1 (248-257)
  source 1..30: mol_type = other RNA
gccctgttcagcggccccctcgtgcaggcc

SEQ ID NO: 41202 - RNA, 27 nt, synthetic construct
  misc_feature 1..27: note = Zinc finger protein 827 (563-571)
  source 1..27: mol_type = other RNA
gccctgttcagccaggacatctccgtg

SEQ ID NO: 41203 - RNA, 27 nt, synthetic construct
  misc_feature 1..27: note = DNA-directed RNA polymerase I subunit RPA49 (297-305)
  source 1..27: mol_type = other RNA
gccctgggccccggggtgccgcacatc

SEQ ID NO: 41204 - RNA, 30 nt, synthetic construct
  misc_feature 1..30: note = Fatty acid desaturase 2 (422-431)
  source 1..30: mol_type = other RNA
gccctgctcgacatcatccgcagcctgaag

SEQ ID NO: 41205 - RNA, 27 nt, synthetic construct
  misc_feature 1..27: note = Symplekin (780-788)
  source 1..27: mol_type = other RNA
gccctgctcccccagaaccacaagctg

SEQ ID NO: 41206 - RNA, 27 nt, synthetic construct
  misc_feature 1..27: note = Transmembrane protein 147 (135-143)
  source 1..27: mol_type = other RNA
gccctgagcaccctcgccctgtacgtg

SEQ ID NO: 41207 - RNA, 30 nt, synthetic construct
  misc_feature 1..30: note = Protein HIRA (789-798)
  source 1..30: mol_type = other RNA
gccctgaccgccgcggccaccctcagcgtg

SEQ ID NO: 41208 - RNA, 27 nt, synthetic construct
  misc_feature 1..27: note = ATP-binding cassette sub-family B member 8, mitochondrial (142-150)
  source 1..27: mol_type = other RNA
gccctggtgaacgtccagatccccctc

SEQ ID NO: 41209 - RNA, 27 nt, synthetic construct
  misc_feature 1..27: note = Serine/threonine-protein phosphatase 6 regulatory ankyrin repeat subunit A (155-163)
  source 1..27: mol_type = other RNA
gccctggtgcccctcctgagcaacgtc

SEQ ID NO: 41210 - RNA, 27 nt, synthetic construct
  misc_feature 1..27: note = Protein transport protein Sec61 subunit alpha isoform 2 (274-282)
  source 1..27: mol_type = other RNA
gccctggtgagcaacctctacgtcatc

SEQ ID NO: 41211 - RNA, 27 nt, synthetic construct
  misc_feature 1..27: note = E3 ubiquitin-protein ligase UBR4 (709-717)
  source 1..27: mol_type = other RNA
gccctgtaccacttcaaccacagcctc

SEQ ID NO: 41212 - RNA, 27 nt, synthetic construct
  misc_feature 1..27: note = Tetratricopeptide repeat protein 13 (724-732)
  source 1..27: mol_type = other RNA
gccctgtacaaggacctcaccgccaag

SEQ ID NO: 41213 - RNA, 27 nt, synthetic construct
  misc_feature 1..27: note = E3 ubiquitin-protein ligase UBR5 (376-384)
  source 1..27: mol_type = other RNA
gccctgtacagcgagctcctggccgtg

SEQ ID NO: 41214 - RNA, 27 nt, synthetic construct
  misc_feature 1..27: note = Protein spinster homolog 3 (269-277)
  source 1..27: mol_type = other RNA
gccatggccttcgtgaccggcgcgctg

SEQ ID NO: 41215 - RNA, 27 nt, synthetic construct
  misc_feature 1..27: note = 28S ribosomal protein S9, mitochondrial (347-355)
  source 1..27: mol_type = other RNA
gccatggccaaggcgctgtgcagcttc

SEQ ID NO: 41216 - RNA, 33 nt, synthetic construct
  misc_feature 1..33: note = Probable ribosome biogenesis protein RLP24 (92-102)
  source 1..33: mol_type = other RNA
gccatgaagcgcgtggaggagatcaagcagaag

SEQ ID NO: 41217 - RNA, 27 nt, synthetic construct
  misc_feature 1..27: note = Melanocyte-stimulating hormone receptor (198-206)
  source 1..27: mol_type = other RNA
gccatgctggtgctcatggccgtcctg

SEQ ID NO: 41218 - RNA, 27 nt, synthetic construct
  misc_feature 1..27: note = Enteropeptidase (878-886)
  source 1..27: mol_type = other RNA
gccatgatgcacctggagttcaaggtg

SEQ ID NO: 41219 - RNA, 27 nt, synthetic construct
  misc_feature 1..27: note = 60S ribosomal protein L11 (162-170)
  source 1..27: mol_type = other RNA
gccatgcgctggttccagcagaagtac

SEQ ID NO: 41220 - RNA, 27 nt, synthetic construct
  misc_feature 1..27: note = Multivesicular body subunit 12A (38-46)
  source 1..27: mol_type = other RNA
gcccccgccagcttcggcaagtccttc

SEQ ID NO: 41221 - RNA, 27 nt, synthetic construct
  misc_feature 1..27: note = Hypoxia-inducible factor 1-alpha (828-836)
  source 1..27: mol_type = other RNA
gcccccatccagggcagccgcaacctg

SEQ ID NO: 41222 - RNA, 27 nt, synthetic construct
  misc_feature 1..27: note = Transcriptional activator Myb (224-232)
  source 1..27: mol_type = other RNA
gcccaggcccccccgaccgcgcagctg

SEQ ID NO: 41223 - RNA, 27 nt, synthetic construct
  misc_feature 1..27: note = Serine/threonine-protein phosphatase 2B catalytic subunit beta isoform (292-300)
  source 1..27: mol_type = other RNA
gcccaggacgccggctaccgcatgtac

SEQ ID NO: 41224 - RNA, 24 nt, synthetic construct
  misc_feature 1..24: note = Transcription intermediary factor 1-beta (762-769)
  source 1..24: mol_type = other RNA
gcccaggacgtgggccgcatgttc

SEQ ID NO: 41225 - RNA, 27 nt, synthetic construct
  misc_feature 1..27: note = Poly(A) polymerase gamma (579-587)
  source 1..27: mol_type = other RNA
gcccagggcctgagcatccccgtgatc

SEQ ID NO: 41226 - RNA, 27 nt, synthetic construct
  misc_feature 1..27: note = Ribosomal RNA processing protein 1 homolog A (91-99)
  source 1..27: mol_type = other RNA
gcccagcacctgttcctccaggccttc

SEQ ID NO: 41227 - RNA, 27 nt, synthetic construct
  misc_feature 1..27: note = Very-long-chain enoyl-CoA reductase (83-91)
  source 1..27: mol_type = other RNA
gcccagatcagctgggtgaccgtcttc

SEQ ID NO: 41228 - RNA, 27 nt, synthetic construct
  misc_feature 1..27: note = Disintegrin and metalloproteinase domain-containing protein 15 (301-309)
  source 1..27: mol_type = other RNA
gcccagctggtgaccggcaccagcttc

SEQ ID NO: 41229 - RNA, 30 nt, synthetic construct
  misc_feature 1..30: note = Protein YIF1B (52-61)
  source 1..30: mol_type = other RNA
gcccagcgcgcccccggcgggctgagctac

SEQ ID NO: 41230 - RNA, 27 nt, synthetic construct
  misc_feature 1..27: note = Activator of basal transcription 1 (212-220)
  source 1..27: mol_type = other RNA
gcccagcgccccaccgagcaggagctg

SEQ ID NO: 41231 - RNA, 24 nt, synthetic construct
  misc_feature 1..24: note = UBX domain-containing protein 4 (350-357)
  source 1..24: mol_type = other RNA
gcccagaccgtgggcaacacctac

SEQ ID NO: 41232 - RNA, 27 nt, synthetic construct
  misc_feature 1..27: note = Uncharacterized protein C11orf24 (193-201)
  source 1..27: mol_type = other RNA
gcccaggtgcccaagagctccgccctg

SEQ ID NO: 41233 - RNA, 30 nt, synthetic construct
  misc_feature 1..30: note = Asparagine synthetase (glutamine-hydrolyzing) (277-286)
  source 1..30: mol_type = other RNA
gcccaggtgcagtaccccctgcagaccttc

SEQ ID NO: 41234 - RNA, 27 nt, synthetic construct
  misc_feature 1..27: note = Elongation factor 1-gamma (93-101)
  source 1..27: mol_type = other RNA
gcccaggtggtccagtgggtgagcttc

SEQ ID NO: 41235 - RNA, 27 nt, synthetic construct
  misc_feature 1..27: note = Transmembrane protein 147 (151-159)
  source 1..27: mol_type = other RNA
gcccaggtgtggatgatcacccgctac

SEQ ID NO: 41236 - RNA, 27 nt, synthetic construct
  misc_feature 1..27: note = Replication initiator 1 (187-195)
  source 1..27: mol_type = other RNA
gcccagtgggaccagctggtggcccac

SEQ ID NO: 41237 - RNA, 27 nt, synthetic construct
  misc_feature 1..27: note = Probable helicase with zinc finger domain (470-478)
  source 1..27: mol_type = other RNA
gcccagtacaaggagatcagcaagttc

SEQ ID NO: 41238 - RNA, 27 nt, synthetic construct
  misc_feature 1..27: note = Ribonuclease K6 (120-128)
  source 1..27: mol_type = other RNA
gcccagtacaagttcttcatcgtggcc

SEQ ID NO: 41239 - RNA, 27 nt, synthetic construct
  misc_feature 1..27: note = Centromere protein N (267-275)
  source 1..27: mol_type = other RNA
gcccagtacaagctggagaccaagttc

SEQ ID NO: 41240 - RNA, 30 nt, synthetic construct
  misc_feature 1..30: note = Periodic tryptophan protein 1 homolog (372-381)
  source 1..30: mol_type = other RNA
gcccgcagcgacaagcccatcttcaccctg

SEQ ID NO: 41241 - RNA, 27 nt, synthetic construct
  misc_feature 1..27: note = Olfactory receptor 5K3 (240-248)
  source 1..27: mol_type = other RNA
gccagccacttcctgtccgtgagcatc

SEQ ID NO: 41242 - RNA, 27 nt, synthetic construct
  misc_feature 1..27: note = N-acetyllactosaminide beta-1,6-N-acetylglucosaminyl-transferase, isoform A (153-161)
  source 1..27: mol_type = other RNA
gccagcaagaaggagtccgtggtctac

SEQ ID NO: 41243 - RNA, 27 nt, synthetic construct
  misc_feature 1..27: note = Cytoplasmic FMR1-interacting protein 1 (658-666)
  source 1..27: mol_type = other RNA
gccagcatgatggagtacgtgctgtac

SEQ ID NO: 41244 - RNA, 30 nt, synthetic construct
  misc_feature 1..30: note = Utrophin (3369-3378)
  source 1..30: mol_type = other RNA
gccagcccccagcactccgccctgagctac

SEQ ID NO: 41245 - RNA, 27 nt, synthetic construct
  misc_feature 1..27: note = RNA-binding protein NOB1 (403-411)
  source 1..27: mol_type = other RNA
gccagccgcaagaagttcgtgaagaag

SEQ ID NO: 41246 - RNA, 27 nt, synthetic construct
  misc_feature 1..27: note = Nodal modulator 2 (823-831)
  source 1..27: mol_type = other RNA
gccagctcccccctgatcaccgtgttc

SEQ ID NO: 41247 - RNA, 27 nt, synthetic construct
  misc_feature 1..27: note = Asparagine synthetase (glutamine-hydrolyzing) (544-552)
  source 1..27: mol_type = other RNA
gccaccgaccccagcgcccgcaccctg

SEQ ID NO: 41248 - RNA, 27 nt, synthetic construct
  misc_feature 1..27: note = Ribosomal RNA processing protein 1 homolog B (664-672)
  source 1..27: mol_type = other RNA
gccacccaccccccgggccccgccgtg

SEQ ID NO: 41249 - RNA, 27 nt, synthetic construct
  misc_feature 1..27: note = Polyadenylate-binding protein 1 (359-367)
  source 1..27: mol_type = other RNA
gccaccaagcccctgtacgtggccctc

SEQ ID NO: 41250 - RNA, 27 nt, synthetic construct
  misc_feature 1..27: note = ATP-dependent 6-phosphofructokinase, muscle type (150-158)
  source 1..27: mol_type = other RNA
gccaccaagagctcctacctgaacatc

SEQ ID NO: 41251 - RNA, 27 nt, synthetic construct
  misc_feature 1..27: note = Transmembrane protein 9B (2-10)
  source 1..27: mol_type = other RNA
gccaccctgtggggcgggctcctgcgc

SEQ ID NO: 41252 - RNA, 27 nt, synthetic construct
  misc_feature 1..27: note = Serine/threonine-protein phosphatase 6 regulatory subunit 1 (821-829)
  source 1..27: mol_type = other RNA
gccacccgcgaccccagcacctccgtg

SEQ ID NO: 41253 - RNA, 27 nt, synthetic construct
  misc_feature 1..27: note = Leukocyte-associated immunoglobulin-like receptor 1 (224-232)
  source 1..27: mol_type = other RNA
gccaccgtgaacggcctgcccgagaag

SEQ ID NO: 41254 - RNA, 27 nt, synthetic construct
  misc_feature 1..27: note = 40S ribosomal protein S5 (40-48)
  source 1..27: mol_type = other RNA
gccgtgaaggagaagtacgccaagtac

SEQ ID NO: 41255 - RNA, 27 nt, synthetic construct
  misc_feature 1..27: note = Oligoribonuclease, mitochondrial (109-117)
  source 1..27: mol_type = other RNA
gccgtgaaggagagcaccatcaccctg

SEQ ID NO: 41256 - RNA, 27 nt, synthetic construct
  misc_feature 1..27: note = 39S ribosomal protein L44, mitochondrial (114-122)
  source 1..27: mol_type = other RNA
gccgtgctgctcaacctgaagagcaac

SEQ ID NO: 41257 - RNA, 30 nt, synthetic construct
  misc_feature 1..30: note = Ig lambda-2 chain C regions (41-50)
  source 1..30: mol_type = other RNA
gcctggaaggccgacagctcccccgtgaag

SEQ ID NO: 41258 - RNA, 27 nt, synthetic construct
  misc_feature 1..27: note = Nucleolar transcription factor 1 (644-652)
  source 1..27: mol_type = other RNA
gcctacaaggagtacatcagcaacaag

SEQ ID NO: 41259 - RNA, 30 nt, synthetic construct
  misc_feature 1..30: note = Translocon-associated protein subunit gamma (76-85)
  source 1..30: mol_type = other RNA
gcctacaagaacgtgaagttcgtcctgaag

SEQ ID NO: 41260 - RNA, 27 nt, synthetic construct
  misc_feature 1..27: note = Serine-protein kinase ATM (740-748)
  source 1..27: mol_type = other RNA
gcctacaagagcgagctgttccagaag

SEQ ID NO: 41261 - RNA, 27 nt, synthetic construct
  misc_feature 1..27: note = Poly (ADP-ribose) polymerase (365-373)
  source 1..27: mol_type = other RNA
gcctaccccgagtacctgatcaccttc

SEQ ID NO: 41262 - RNA, 36 nt, synthetic construct
  misc_feature 1..36: note = Sialoadhesin (1671-1682)
  source 1..36: mol_type = other RNA
tgcaagcagagcatgggcgagaactccgtggagatg

SEQ ID NO: 41263 - RNA, 27 nt, synthetic construct
  misc_feature 1..27: note = Transmembrane inner ear expressed protein (21-29)
  source 1..27: mol_type = other RNA
tgcctggccggcgtggccgggcagctc

SEQ ID NO: 41264 - RNA, 27 nt, synthetic construct
  misc_feature 1..27: note = Tetraspanin-18 (82-90)
  source 1..27: mol_type = other RNA
tgcctgctcctgttcttcttcctgttc

SEQ ID NO: 41265 - RNA, 27 nt, synthetic construct
  misc_feature 1..27: note = Asparagine-tRNA ligase, cytoplasmic (537-545)
  source 1..27: mol_type = other RNA
tgcctgtacccccgcttcgtgcagcgg

SEQ ID NO: 41266 - RNA, 33 nt, synthetic construct
  misc_feature 1..33: note = Protein-glutamine gamma-glutamyltransferase 4 (213-223)
  source 1..33: mol_type = other RNA
tgccgcgccatgtgcgccatgatgagcttcgag

SEQ ID NO: 41267 - RNA, 30 nt, synthetic construct
  misc_feature 1..30: note = Pentatricopeptide repeat domain-containing protein 3, mitochondrial (34-43)
  source 1..30: mol_type = other RNA
tgccgcttctacagcggctccgccaccctg

SEQ ID NO: 41268 - RNA, 27 nt, synthetic construct
  misc_feature 1..27: note = Endothelin-1 receptor (88-96)
  source 1..27: mol_type = other RNA
tgcaccatcttcatcgtgggcatggtc

SEQ ID NO: 41269 - RNA, 27 nt, synthetic construct
  misc_feature 1..27: note = cAMP-dependent protein kinase type I-alpha regulatory subunit (109-117)
  source 1..27: mol_type = other RNA
gacgccgccagctacgtgcgcaaggtc

SEQ ID NO: 41270 - RNA, 27 nt, synthetic construct
  misc_feature 1..27: note = DnaJ homolog subfamily B member 9 (12-20)
  source 1..27: mol_type = other RNA
gacgccgaggccaagttccgcgagatc

SEQ ID NO: 41271 - RNA, 27 nt, synthetic construct
  misc_feature 1..27: note = Catenin beta-1 (145-153)
  source 1..27: mol_type = other RNA
gacgccgagctggccacccgcgcgatc

SEQ ID NO: 41272 - RNA, 27 nt, synthetic construct
  misc_feature 1..27: note = Protein disulfide-isomerase A5 (441-449)
  source 1..27: mol_type = other RNA
gacgccttcaaggacgaccgcaagatc

SEQ ID NO: 41273 - RNA, 24 nt, synthetic construct
  misc_feature 1..24: note = Asparagine synthetase (glutamine-hydrolyzing) (9-16)
  source 1..24: mol_type = other RNA
gacgccttccgcttcgagaacgtg

SEQ ID NO: 41274 - RNA, 27 nt, synthetic construct
  misc_feature 1..27: note = Protein FAM127A (61-69)
  source 1..27: mol_type = other RNA
gacgccctgaaggtgaccttcctcatc

SEQ ID NO: 41275 - RNA, 27 nt, synthetic construct
  misc_feature 1..27: note = Importin subunit beta-1 (627-635)
  source 1..27: mol_type = other RNA
gacgccctgatggccgtgagcaccctc

SEQ ID NO: 41276 - RNA, 24 nt, synthetic construct
  misc_feature 1..24: note = Eukaryotic translation initiation factor 3 subunit A (504-511)
  source 1..24: mol_type = other RNA
gacgcccccatcggcccgcacctg

SEQ ID NO: 41277 - RNA, 33 nt, synthetic construct
  misc_feature 1..33: note = Dermcidin (86-96)
  source 1..33: mol_type = other RNA
gacgccgtggaggacctggagagcgtcggcaag

SEQ ID NO: 41278 - RNA, 24 nt, synthetic construct
  misc_feature 1..24: note = DNA polymerase delta catalytic subunit (515-522)
  source 1..24: mol_type = other RNA
gacgcctacctgcccctccgcctg

SEQ ID NO: 41279 - RNA, 27 nt, synthetic construct
  misc_feature 1..27: note = Oral-facial-digital syndrome 1 protein (185-193)
  source 1..27: mol_type = other RNA
gacgcctacccccagcgcatcaagttc

SEQ ID NO: 41280 - RNA, 27 nt, synthetic construct
  misc_feature 1..27: note = Splicing factor, arginine/serine-rich 15 (540-548)
  source 1..27: mol_type = other RNA
gacgcctaccgcgccctgcagaagctc

SEQ ID NO: 41281 - RNA, 24 nt, synthetic construct
  misc_feature 1..24: note = Period circadian protein homolog 1 (771-778)
  source 1..24: mol_type = other RNA
gacgcctaccgccccgtgggcctg

SEQ ID NO: 41282 - RNA, 27 nt, synthetic construct
  misc_feature 1..27: note = Torsin-1A-interacting protein 2 (317-325)
  source 1..27: mol_type = other RNA
gacgcctacaccagctcccagaaggtg

SEQ ID NO: 41283 - RNA, 36 nt, synthetic construct
  misc_feature 1..36: note = Autism susceptibility gene 2 protein (283-294)
  source 1..36: mol_type = other RNA
gactgctgcaaggagcccatcttcgagccggtggtc

SEQ ID NO: 41284 - RNA, 30 nt, synthetic construct
  misc_feature 1..30: note = Voltage-dependent T-type calcium channel subunit alpha-1G (1640-1649)
  source 1..30: mol_type = other RNA
gacgaggccctgaagatctgcaactacatc

SEQ ID NO: 41285 - RNA, 27 nt, synthetic construct
  misc_feature 1..27: note = Signal peptidase complex subunit 2 (82-90)
  source 1..27: mol_type = other RNA
gacggccgcctgaccatctgcaccatc

SEQ ID NO: 41286 - RNA, 30 nt, synthetic construct
  misc_feature 1..30: note = Alanine-tRNA ligase, cytoplasmic (300-309)
  source 1..30: mol_type = other RNA
gaccacgcccgcaccatcaccgtggccctg

SEQ ID NO: 41287 - RNA, 27 nt, synthetic construct
  misc_feature 1..27: note = SRSF protein kinase 2 (597-605)
  source 1..27: mol_type = other RNA
gaccacatcgcccacatcatcgagctg

SEQ ID NO: 41288 - RNA, 24 nt, synthetic construct
  misc_feature 1..24: note = Laminin subunit beta-3 (1159-1166)
  source 1..24: mol_type = other RNA
gaccacatcaacggccgcgtgctg

SEQ ID NO: 41289 - RNA, 27 nt, synthetic construct
  misc_feature 1..27: note = Coatomer subunit gamma-1 (762-770)
  source 1..27: mol_type = other RNA
gaccacatccagaaggtgatgaagctg

SEQ ID NO: 41290 - RNA, 27 nt, synthetic construct
  misc_feature 1..27: note = Protein Hook homolog 2 (130-138)
  source 1..27: mol_type = other RNA
gaccacatccagcgcatcatgaccctg

SEQ ID NO: 41291 - RNA, 27 nt, synthetic construct
  misc_feature 1..27: note = V-type proton ATPase subunit S1 (458-466)
  source 1..27: mol_type = other RNA
gaccacaagggccccaccatcagcctg

SEQ ID NO: 41292 - RNA, 27 nt, synthetic construct
  misc_feature 1..27: note = Cyclin-Y-like protein 2 (84-92)
  source 1..27: mol_type = other RNA
gaccaccccaaggccagcaccatcttc

SEQ ID NO: 41293 - RNA, 27 nt, synthetic construct
  misc_feature 1..27: note = Calponin-2 (202-210)
  source 1..27: mol_type = other RNA
gaccacagcaccatctccctgcagatg

SEQ ID NO: 41294 - RNA, 24 nt, synthetic construct
  misc_feature 1..24: note = Integrin beta-7 (722-729)
  source 1..24: mol_type = other RNA
gaccacacccaggccatcgtgctg

SEQ ID NO: 41295 - RNA, 24 nt, synthetic construct
  misc_feature 1..24: note = Lipopolysaccharide-responsive and beige-like anchor protein (1946-1953)
  source 1..24: mol_type = other RNA
gaccacgtgaccgccacccagctg

SEQ ID NO: 41296 - RNA, 27 nt, synthetic construct
  misc_feature 1..27: note = BPI fold-containing family A member 2 (98-106)
  source 1..27: mol_type = other RNA
gacatcttcggcctgaagatcagcaac

SEQ ID NO: 41297 - RNA, 33 nt, synthetic construct
  misc_feature 1..33: note = BPI fold-containing family A member 2 (98-108)
  source 1..33: mol_type = other RNA
gacatcttcggcctgaagatcagcaactccctc

SEQ ID NO: 41298 - RNA, 30 nt, synthetic construct
  misc_feature 1..30: note = 60S ribosomal protein L4 (35-44)
  source 1..30: mol_type = other RNA
gacatcgtgaacttcgtccacaccaacctg

SEQ ID NO: 41299 - RNA, 27 nt, synthetic construct
  misc_feature 1..27: note = Solute carrier family 2, facilitated glucose transporter member 2 (4-12)
  source 1..27: mol_type = other RNA
gacaaggtgaccggcaccctggtcttc

SEQ ID NO: 41300 - RNA, 27 nt, synthetic construct
  misc_feature 1..27: note = 1,2-dihydroxy-3-keto-5-methylthiopentene dioxygenase (44-52)
  source 1..27: mol_type = other RNA
gacaagtacgagaacgaccccgagctg

SEQ ID NO: 41301 - RNA, 27 nt, synthetic construct
  misc_feature 1..27: note = Peroxidasin-like protein (813-821)
  source 1..27: mol_type = other RNA
gacctggaccacaccgtgcccgccctc

SEQ ID NO: 41302 - RNA, 27 nt, synthetic construct
  misc_feature 1..27: note = Mitochondrial import receptor subunit TOM6 homolog (66-74)
  source 1..27: mol_type = other RNA
gacctgatggccccccagccgggcgtg

SEQ ID NO: 41303 - RNA, 27 nt, synthetic construct
  misc_feature 1..27: note = Phosphorylase b kinase gamma catalytic chain, skeletal muscle/heart isoform (105-113)
  source 1..27: mol_type = other RNA
gacctgatgaagcgcggcgagctcttc

SEQ ID NO: 41304 - RNA, 27 nt, synthetic construct
  misc_feature 1..27: note = Inosine-5'-monophosphate dehydrogenase 1 (77-85)
  source 1..27: mol_type = other RNA
gacatggccatcgccatggcgctgatg

SEQ ID NO: 41305 - RNA, 36 nt, synthetic construct
  misc_feature 1..36: note = Type II inositol 1,4,5-trisphosphate 5-phosphatase (2-13)
  source 1..36: mol_type = other RNA
gaccagagcgtggccatccaggagaccctggccgag

SEQ ID NO: 41306 - RNA, 27 nt, synthetic construct
  misc_feature 1..27: note = Proline and serine-rich protein 3 (2-10)
  source 1..27: mol_type = other RNA
gaccgcagcctgcccgtgttctccatc

SEQ ID NO: 41307 - RNA, 27 nt, synthetic construct
  misc_feature 1..27: note = Nucleotide exchange factor SIL1 (410-418)
  source 1..27: mol_type = other RNA
gaccgctaccggcaggacccccagctg

SEQ ID NO: 41308 - RNA, 27 nt, synthetic construct
  misc_feature 1..27: note = Cyclin-Y-like protein 2 (130-138)
  source 1..27: mol_type = other RNA
gacagcatcgcctcccagccccacctg

SEQ ID NO: 41309 - RNA, 24 nt, synthetic construct
  misc_feature 1..24: note = Hexokinase-2 (815-822)
  source 1..24: mol_type = other RNA
gacagcatcatcgtgaaggaggtc

SEQ ID NO: 41310 - RNA, 24 nt, synthetic construct
  misc_feature 1..24: note = 60S ribosomal protein L6 (255-262)
  source 1..24: mol_type = other RNA
gacagccagatcctgcccaagatc

SEQ ID NO: 41311 - RNA, 27 nt, synthetic construct
  misc_feature 1..27: note = Small ubiquitin-related modifier 1 (30-38)
  source 1..27: mol_type = other RNA
gacagctccgagatccacttcaaggtg

SEQ ID NO: 41312 - RNA, 27 nt, synthetic construct
  misc_feature 1..27: note = Integrin beta-7 (374-382)
  source 1..27: mol_type = other RNA
gacagctccaacgtggtccagctgatc

SEQ ID NO: 41313 - RNA, 27 nt, synthetic construct
  misc_feature 1..27: note = Ig lambda-2 chain C regions (45-53)
  source 1..27: mol_type = other RNA
gacagctcccccgtgaaggccggcgtc

SEQ ID NO: 41314 - RNA, 27 nt, synthetic construct
  misc_feature 1..27: note = Sterol O-acyltransferase 1 (310-318)
  source 1..27: mol_type = other RNA
gacagctacccccgcaacccgaccgtg

SEQ ID NO: 41315 - RNA, 24 nt, synthetic construct
  misc_feature 1..24: note = Store-operated calcium entry-associated regulatory factor (74-81)
  source 1..24: mol_type = other RNA
gacagctacacccccaaggtgatc

SEQ ID NO: 41316 - RNA, 27 nt, synthetic construct
  misc_feature 1..27: note = Disintegrin and metalloproteinase domain-containing protein 15 (247-255)
  source 1..27: mol_type = other RNA
gacaccttcttccgccccctgaacgtg

SEQ ID NO: 41317 - RNA, 24 nt, synthetic construct
  misc_feature 1..24: note = Sialidase-1 (75-82)
  source 1..24: mol_type = other RNA
gacaccttccgcatccccctgatc

SEQ ID NO: 41318 - RNA, 27 nt, synthetic construct
  misc_feature 1..27: note = WD repeat-containing protein 54 (273-281)
  source 1..27: mol_type = other RNA
gacaccttcgtgcacatctggaagctg

SEQ ID NO: 41319 - RNA, 27 nt, synthetic construct
  misc_feature 1..27: note = Protein FAM117A (93-101)
  source 1..27: mol_type = other RNA
gacaccatcctgagctcctacctcctg

SEQ ID NO: 41320 - RNA, 30 nt, synthetic construct
  misc_feature 1..30: note = Ankyrin repeat and SOCS box protein 3 (420-429)
  source 1..30: mol_type = other RNA
gacaccctgatcttcaccctcgagttcacg

SEQ ID NO: 41321 - RNA, 27 nt, synthetic construct
  misc_feature 1..27: note = WD repeat-containing protein 26 (376-384)
  source 1..27: mol_type = other RNA
gacaccaccgtgatcatctggcaggtc

SEQ ID NO: 41322 - RNA, 27 nt, synthetic construct
  misc_feature 1..27: note = Signal recognition particle receptor subunit beta (154-162)
  source 1..27: mol_type = other RNA
gacgtggccgagttcctgtaccaggtc

SEQ ID NO: 41323 - RNA, 27 nt, synthetic construct
  misc_feature 1..27: note = 60S ribosomal protein L23a (120-128)
  source 1..27: mol_type = other RNA
gacgtggccaaggtcaacaccctgatc

SEQ ID NO: 41324 - RNA, 27 nt, synthetic construct
  misc_feature 1..27: note = G2/M phase-specific E3 ubiquitin-protein ligase (493-501)
  source 1..27: mol_type = other RNA
gacgtggcccagatcatcatccgcatc

SEQ ID NO: 41325 - RNA, 27 nt, synthetic construct
  misc_feature 1..27: note = Inorganic pyrophosphatase (42-50)
  source 1..27: mol_type = other RNA
gacgtgttccacatggtcgtggaggtg

SEQ ID NO: 41326 - RNA, 27 nt, synthetic construct
  misc_feature 1..27: note = Carboxylesterase 3 (415-423)
  source 1..27: mol_type = other RNA
gacgtgttcatcaacgtccccaccgtg

SEQ ID NO: 41327 - RNA, 27 nt, synthetic construct
  misc_feature 1..27: note = Bardet-Biedl syndrome 7 protein (53-61)
  source 1..27: mol_type = other RNA
gaggccgccgcggtgttcaagaccctg

SEQ ID NO: 41328 - RNA, 27 nt, synthetic construct
  misc_feature 1..27: note = Exocyst complex component 5 (158-166)
  source 1..27: mol_type = other RNA
gaggccgccgacatcatccagaagctg

SEQ ID NO: 41329 - RNA, 27 nt, synthetic construct
  misc_feature 1..27: note = Lysine-specific histone demethylase 1A (710-718)
  source 1..27: mol_type = other RNA
gaggccgccggcatcatggagaacatc

SEQ ID NO: 41330 - RNA, 33 nt, synthetic construct
  misc_feature 1..33: note = Probable phospholipid-transporting ATPase VA (700-710)
  source 1..33: mol_type = other RNA
gaggccgccctggtgtacgcggcccgcgcctac

SEQ ID NO: 41331 - RNA, 27 nt, synthetic construct
  misc_feature 1..27: note = Kelch-like protein 6 (450-458)
  source 1..27: mol_type = other RNA
gaggccgcccccctgctcgtgcacgtc

SEQ ID NO: 41332 - RNA, 27 nt, synthetic construct
  misc_feature 1..27: note = Coatomer subunit gamma-1 (269-277)
  source 1..27: mol_type = other RNA
gaggccgccagcgcgatcgtgaacctg

SEQ ID NO: 41333 - RNA, 27 nt, synthetic construct
  misc_feature 1..27: note = Nesprin-3 (176-184)
  source 1..27: mol_type = other RNA
gaggccgccagcctgttcaaccgcatc

SEQ ID NO: 41334 - RNA, 30 nt, synthetic construct
  misc_feature 1..30: note = snRNA-activating protein complex subunit 4 (237-246)
  source 1..30: mol_type = other RNA
gaggccgagaaggagatccaggacatcaac

SEQ ID NO: 41335 - RNA, 27 nt, synthetic construct
  misc_feature 1..27: note = L-xylulose reductase (98-106)
  source 1..27: mol_type = other RNA
gaggccttcgaccgcagcttcgaggtg

SEQ ID NO: 41336 - RNA, 30 nt, synthetic construct
  misc_feature 1..30: note = Protein flightless-1 homolog (516-525)
  source 1..30: mol_type = other RNA
gaggccttccacggcaagttctacgaggcc

SEQ ID NO: 41337 - RNA, 27 nt, synthetic construct
  misc_feature 1..27: note = Mortality factor 4-like protein 2 (113-121)
  source 1..27: mol_type = other RNA
gaggccttcaagaaccgcatggaggtg

SEQ ID NO: 41338 - RNA, 27 nt, synthetic construct
  misc_feature 1..27: note = Pre-B-cell leukemia transcription factor-interacting protein 1 (166-174)
  source 1..27: mol_type = other RNA
gaggccggccccccgcagcccatggtg

SEQ ID NO: 41339 - RNA, 27 nt, synthetic construct
  misc_feature 1..27: note = E3 ubiquitin-protein ligase UBR2 (256-264)
  source 1..27: mol_type = other RNA
gaggccatcggcttcgccaccaccgtg

SEQ ID NO: 41340 - RNA, 24 nt, synthetic construct
  misc_feature 1..24: note = 60S ribosomal protein L10 (63-70)
  source 1..24: mol_type = other RNA
gaggccctggaggccgcgcgcatc

SEQ ID NO: 41341 - RNA, 24 nt, synthetic construct
  misc_feature 1..24: note = Steroid hormone receptor ERR1 (353-360)
  source 1..24: mol_type = other RNA
gaggccctgcacgaggccctcctg

SEQ ID NO: 41342 - RNA, 27 nt, synthetic construct
  misc_feature 1..27: note = Very-long-chain (3R)-3-hydroxyacyl-CoA dehydratase 3 (293-301)
  source 1..27: mol_type = other RNA
gaggccgtgagcgtcatccagtccatc

SEQ ID NO: 41343 - RNA, 27 nt, synthetic construct
  misc_feature 1..27: note = Paired amphipathic helix protein Sin3a (1166-1174)
  source 1..27: mol_type = other RNA
gagtgccgcttcaagctgaacagctac

SEQ ID NO: 41344 - RNA, 36 nt, synthetic construct
  misc_feature 1..36: note = RNA polymerase I-specific transcription initiation factor RRN3 (604-615)
  source 1..36: mol_type = other RNA
gaggacgacgacttcctgaagggcgaggtgccccag

SEQ ID NO: 41345 - RNA, 27 nt, synthetic construct
  misc_feature 1..27: note = MICAL C-terminal-like protein (368-376)
  source 1..27: mol_type = other RNA
gaggacgtgcccaccctgctcgagaag

SEQ ID NO: 41346 - RNA, 27 nt, synthetic construct
  misc_feature 1..27: note = Protein transport protein Sec24C (408-416)
  source 1..27: mol_type = other RNA
gaggaggccagcccctacgtggtcgac

SEQ ID NO: 41347 - RNA, 33 nt, synthetic construct
  misc_feature 1..33: note = PHD finger protein 10 (446-456)
  source 1..33: mol_type = other RNA
gaggagatgatgttctgcgacatgtgcgaccgc

SEQ ID NO: 41348 - RNA, 27 nt, synthetic construct
  misc_feature 1..27: note = FERM domain-containing protein 6 (338-346)
  source 1..27: mol_type = other RNA
gaggagaacgaggagaagaagcagtac

SEQ ID NO: 41349 - RNA, 27 nt, synthetic construct
  misc_feature 1..27: note = Epiplakin (2700-2708)
  source 1..27: mol_type = other RNA
gaggagcgcctgagcaaggtgtccttc

SEQ ID NO: 41350 - RNA, 36 nt, synthetic construct
  misc_feature 1..36: note = Salivary acidic proline-rich phosphoprotein 1/2 (44-55)
  source 1..36: mol_type = other RNA
gaggagcgccagggccccccgctggggggccagcag

SEQ ID NO: 41351 - RNA, 27 nt, synthetic construct
  misc_feature 1..27: note = Inactive ubiquitin carboxyl-terminal hydrolase 17-like protein 4 (449-457)
  source 1..27: mol_type = other RNA
gagttcaacgtgcgcaaggtcgagggc

SEQ ID NO: 41352 - RNA, 27 nt, synthetic construct
  misc_feature 1..27: note = Kinesin heavy chain isoform 5A (583-591)
  source 1..27: mol_type = other RNA
gagttcaccgtggcccgcctgtacatc

SEQ ID NO: 41353 - RNA, 27 nt, synthetic construct
  misc_feature 1..27: note = Hyaluronan and proteoglycan link protein 2 (201-209)
  source 1..27: mol_type = other RNA
gagggcagcgtgcgctaccccgtcctg

SEQ ID NO: 41354 - RNA, 24 nt, synthetic construct
  misc_feature 1..24: note = Gem-associated protein 5 (589-596)
  source 1..24: mol_type = other RNA
gagcacggcagccagcccgagctg

SEQ ID NO: 41355 - RNA, 27 nt, synthetic construct
  misc_feature 1..27: note = Filamin-B (2269-2277)
  source 1..27: mol_type = other RNA
gagcacatccccgagagcccgtacctg

SEQ ID NO: 41356 - RNA, 27 nt, synthetic construct
  misc_feature 1..27: note = Protein Hook homolog 1 (136-144)
  source 1..27: mol_type = other RNA
gagcacatccagaacatcatgaccctg

SEQ ID NO: 41357 - RNA, 27 nt, synthetic construct
  misc_feature 1..27: note = 26S proteasome non-ATPase regulatory subunit 11 (348-356)
  source 1..27: mol_type = other RNA
gagcacatcagctccctgatcaagctc

SEQ ID NO: 41358 - RNA, 27 nt, synthetic construct
  misc_feature 1..27: note = Intraflagellar transport protein 46 homolog (70-78)
  source 1..27: mol_type = other RNA
gagcacctgcccgtgagcgccgagatc

SEQ ID NO: 41359 - RNA, 27 nt, synthetic construct
  misc_feature 1..27: note = Kinesin-like protein KIF21B (1412-1420)
  source 1..27: mol_type = other RNA
gagcaccagatcaaccagatcgccctg

SEQ ID NO: 41360 - RNA, 27 nt, synthetic construct
  misc_feature 1..27: note = Zinc finger and BTB domain-containing protein 38 (220-228)
  source 1..27: mol_type = other RNA
gagcacagctacgccgtgtccagcgtc

SEQ ID NO: 41361 - RNA, 27 nt, synthetic construct
  misc_feature 1..27: note = Fructose-bisphosphate aldolase A (156-164)
  source 1..27: mol_type = other RNA
gagcacacccccagcgccctggccatc

SEQ ID NO: 41362 - RNA, 27 nt, synthetic construct
  misc_feature 1..27: note = Ribosome-binding protein 1 (768-776)
  source 1..27: mol_type = other RNA
gagcacgtgaaggaggtccagcagctg

SEQ ID NO: 41363 - RNA, 27 nt, synthetic construct
  misc_feature 1..27: note = OTU domain-containing protein 6B (276-284)
  source 1..27: mol_type = other RNA
gagcactacaacagcgtgacccgcctg

SEQ ID NO: 41364 - RNA, 27 nt, synthetic construct
  misc_feature 1..27: note = E3 ubiquitin-protein ligase UBR4 (401-409)
  source 1..27: mol_type = other RNA
gagcactaccagaacttccagctgctc

SEQ ID NO: 41365 - RNA, 27 nt, synthetic construct
  misc_feature 1..27: note = 26S protease regulatory subunit 4 (130-138)
  source 1..27: mol_type = other RNA
gagcactacgtgagcatcctgtccttc

SEQ ID NO: 41366 - RNA, 27 nt, synthetic construct
  misc_feature 1..27: note = Epsin-2 (42-50)
  source 1..27: mol_type = other RNA
gagatcgccgacctgacctacaacgtg

SEQ ID NO: 41367 - RNA, 27 nt, synthetic construct
  misc_feature 1..27: note = Telomere-associated protein RIF1 (220-228)
  source 1..27: mol_type = other RNA
gagatcgccagcatcaccgagcagctg

SEQ ID NO: 41368 - RNA, 30 nt, synthetic construct
  misc_feature 1..30: note = General transcription factor II-I (577-586)
  source 1..30: mol_type = other RNA
gagatcttcaacctgaagttcgcccaggcc

SEQ ID NO: 41369 - RNA, 30 nt, synthetic construct
  misc_feature 1..30: note = Atlastin-3 (199-208)
  source 1..30: mol_type = other RNA
gagatcttccagaagcccttccagaccctg

SEQ ID NO: 41370 - RNA, 27 nt, synthetic construct
  misc_feature 1..27: note = DNA-directed RNA polymerase III subunit RPC5 (655-663)
  source 1..27: mol_type = other RNA
gagatcttcagcaagaactaccgcgtg

SEQ ID NO: 41371 - RNA, 30 nt, synthetic construct
  misc_feature 1..30: note = C-X-C motif chemokine 9 (62-71)
  source 1..30: mol_type = other RNA
gagatcatcgccaccctgaagaacggcgtg

SEQ ID NO: 41372 - RNA, 27 nt, synthetic construct
  misc_feature 1..27: note = Uncharacterized protein CXorf23 (474-482)
  source 1..27: mol_type = other RNA
gagatcatcaccatcatccaccaggtg

SEQ ID NO: 41373 - RNA, 27 nt, synthetic construct
  misc_feature 1..27: note = Serine/threonine-protein kinase TBK1 (497-505)
  source 1..27: mol_type = other RNA
gagatcagcgacatccacaccaagctg

SEQ ID NO: 41374 - RNA, 27 nt, synthetic construct
  misc_feature 1..27: note = Constitutive coactivator of peroxisome proliferator-activated receptor gamma (111-119)
  source 1..27: mol_type = other RNA
gagatcagccgcatcttccactacatc

SEQ ID NO: 41375 - RNA, 27 nt, synthetic construct
  misc_feature 1..27: note = Centrosomal protein of 170 kDa protein B (1491-1499)
  source 1..27: mol_type = other RNA
gagatcagctccatcctgaaggagctc

SEQ ID NO: 41376 - RNA, 27 nt, synthetic construct
  misc_feature 1..27: note = Testis-specific Y-encoded-like protein 2 (468-476)
  source 1..27: mol_type = other RNA
gagatcaccgacatcaacgagaacatc

SEQ ID NO: 41377 - RNA, 27 nt, synthetic construct
  misc_feature 1..27: note = Oxysterols receptor LXR-beta (280-288)
  source 1..27: mol_type = other RNA
gagatcgtggacttcgccaagcaggtc

SEQ ID NO: 41378 - RNA, 30 nt, synthetic construct
  misc_feature 1..30: note = Tubulin beta-4B chain (3-12)
  source 1..30: mol_type = other RNA
gagatcgtgcacctgcaggccggccagtgc

SEQ ID NO: 41379 - RNA, 27 nt, synthetic construct
  misc_feature 1..27: note = Activating transcription factor 7-interacting protein 2 (101-109)
  source 1..27: mol_type = other RNA
gagatcgtgcacagcgagaccaagctg

SEQ ID NO: 41380 - RNA, 27 nt, synthetic construct
  misc_feature 1..27: note = Ras GTPase-activating-like protein IQGAP2 (753-761)
  source 1..27: mol_type = other RNA
gagatcgtgaagatccagagcctgctc

SEQ ID NO: 41381 - RNA, 27 nt, synthetic construct
  misc_feature 1..27: note = Williams-Beuren syndrome chromosomal region 16 protein (214-222)
  source 1..27: mol_type = other RNA
gagatctacagcgagtcccaccgcgtg

SEQ ID NO: 41382 - RNA, 30 nt, synthetic construct
  misc_feature 1..30: note = Protein S100-A8 (6-15)
  source 1..30: mol_type = other RNA
gagaaggccctgaacagcatcatcgacgtg

SEQ ID NO: 41383 - RNA, 30 nt, synthetic construct
  misc_feature 1..30: note = Zinc finger protein 559 (97-106)
  source 1..30: mol_type = other RNA
gagaaggccctgagcgagcactcctgcctc

SEQ ID NO: 41384 - RNA, 27 nt, synthetic construct
  misc_feature 1..27: note = Replication protein A 32 kDa subunit (84-92)
  source 1..27: mol_type = other RNA
gagaaggcccccaccaacatcgtgtac

SEQ ID NO: 41385 - RNA, 27 nt, synthetic construct
  misc_feature 1..27: note = Pre-mRNA-processing factor 40 homolog A (475-483)
  source 1..27: mol_type = other RNA
gagaagatgaccagcaccacgcgctac

SEQ ID NO: 41386 - RNA, 30 nt, synthetic construct
  misc_feature 1..30: note = Transcriptional repressor p66-beta (434-443)
  source 1..30: mol_type = other RNA
gagaagaacggcaagatcctgtgcgagcag

SEQ ID NO: 41387 - RNA, 30 nt, synthetic construct
  misc_feature 1..30: note = Valine-tRNA ligase (271-280)
  source 1..30: mol_type = other RNA
gagaagcgcgaccccggcgtgatcacctac

SEQ ID NO: 41388 - RNA, 27 nt, synthetic construct
  misc_feature 1..27: note = Transcriptional regulator Kaiso (528-536)
  source 1..27: mol_type = other RNA
gagaaggtgttccccctggccgagtac

SEQ ID NO: 41389 - RNA, 27 nt, synthetic construct
  misc_feature 1..27: note = Tyrosine-tRNA ligase, cytoplasmic (281-289)
  source 1..27: mol_type = other RNA
gagaagtggggcgggaacaagacctac

SEQ ID NO: 41390 - RNA, 27 nt, synthetic construct
  misc_feature 1..27: note = E3 ubiquitin-protein ligase synoviolin (216-224)
  source 1..27: mol_type = other RNA
gagctgttcaccggcttcatcaaggtg

SEQ ID NO: 41391 - RNA, 30 nt, synthetic construct
  misc_feature 1..30: note = Cohesin subunit SA-2 (1209-1218)
  source 1..30: mol_type = other RNA
gagctgaagcccgacttcttcgacccggcc

SEQ ID NO: 41392 - RNA, 27 nt, synthetic construct
  misc_feature 1..27: note = Cytospin-A (413-421)
  source 1..27: mol_type = other RNA
gagctgcaggccaccctccaggagctg

SEQ ID NO: 41393 - RNA, 27 nt, synthetic construct
  misc_feature 1..27: note = E3 ubiquitin-protein ligase UBR4 (3813-3821)
  source 1..27: mol_type = other RNA
gagctgagcaagatcatccagaaggtg

SEQ ID NO: 41394 - RNA, 27 nt, synthetic construct
  misc_feature 1..27: note = 60S ribosomal protein L36 (89-97)
  source 1..27: mol_type = other RNA
gagctgagcaacgtgctcgccgccatg

SEQ ID NO: 41395 - RNA, 30 nt, synthetic construct
  misc_feature 1..30: note = Glutamate-rich protein 3 (1485-1494)
  source 1..30: mol_type = other RNA
gagctgagccccgagtccctccaggccatg

SEQ ID NO: 41396 - RNA, 27 nt, synthetic construct
  misc_feature 1..27: note = Mini-chromosome maintenance complex-binding protein (343-351)
  source 1..27: mol_type = other RNA
gagctgagccccgtgcgcgccgagctc

SEQ ID NO: 41397 - RNA, 36 nt, synthetic construct
  misc_feature 1..36: note = Dynamin-binding protein (804-815)
  source 1..36: mol_type = other RNA
gagatgtgcatcgagcgcatcatggtgcccatgcag

SEQ ID NO: 41398 - RNA, 30 nt, synthetic construct
  misc_feature 1..30: note = GLIPR1-like protein 2 (312-321)
  source 1..30: mol_type = other RNA
gagatggagatggagatcatggagatggag

SEQ ID NO: 41399 - RNA, 36 nt, synthetic construct
  misc_feature 1..36: note = Pleckstrin homology domain-containing family G member 3 (582-593)
  source 1..36: mol_type = other RNA
gagatgggcggggccgcccaggagcccgagagcctg

SEQ ID NO: 41400 - RNA, 27 nt, synthetic construct
  misc_feature 1..27: note = Contactin-1 (416-424)
  source 1..27: mol_type = other RNA
gagatgaaccccatgaagaagaagatc

SEQ ID NO: 41401 - RNA, 24 nt, synthetic construct
  misc_feature 1..24: note = Putative vomeronasal receptor-like protein 4 (2-9)
  source 1..24: mol_type = other RNA
gagatgaccaagctgttcagctac

SEQ ID NO: 41402 - RNA, 30 nt, synthetic construct
  misc_feature 1..30: note = Putative vomeronasal receptor-like protein 4 (2-11)
  source 1..30: mol_type = other RNA
gagatgaccaagctgttcagctacatcgtg

SEQ ID NO: 41403 - RNA, 27 nt, synthetic construct
  misc_feature 1..27: note = Cyclin-H (240-248)
  source 1..27: mol_type = other RNA
gagaaccgcacctgcctgagccagctc

SEQ ID NO: 41404 - RNA, 27 nt, synthetic construct
  misc_feature 1..27: note = 3-phosphoinositide-dependent protein kinase 1 (57-65)
  source 1..27: mol_type = other RNA
gagccccgcccgggcgccgggagcctg

SEQ ID NO: 41405 - RNA, 27 nt, synthetic construct
  misc_feature 1..27: note = Gamma-glutamyltransferase 6 (2-10)
  source 1..27: mol_type = other RNA
gagcgcgccgaggagcccgtggtctac

SEQ ID NO: 41406 - RNA, 27 nt, synthetic construct
  misc_feature 1..27: note = Integrin beta-7 (243-251)
  source 1..27: mol_type = other RNA
gagcgcgaggtgggccggcagagcgtc

SEQ ID NO: 41407 - RNA, 27 nt, synthetic construct
  misc_feature 1..27: note = Serine/threonine-protein kinase pim-3 (34-42)
  source 1..27: mol_type = other RNA
gagagcttcgagaaggcctaccaggtg

SEQ ID NO: 41408 - RNA, 27 nt, synthetic construct
  misc_feature 1..27: note = Endoplasmin (550-558)
  source 1..27: mol_type = other RNA
gagagctcccccttcgtggagcgcctg

SEQ ID NO: 41409 - RNA, 27 nt, synthetic construct
  misc_feature 1..27: note = Lamina-associated polypeptide 2, isoforms beta/gamma (277-285)
  source 1..27: mol_type = other RNA
gagagcacccccatcgccgagaccatc

SEQ ID NO: 41410 - RNA, 36 nt, synthetic construct
  misc_feature 1..36: note = Dermcidin (92-103)
  source 1..36: mol_type = other RNA
gagagcgtgggcaagggggccgtccacgacgtgaag

SEQ ID NO: 41411 - RNA, 27 nt, synthetic construct
  misc_feature 1..27: note = Elongation factor 2 (311-319)
  source 1..27: mol_type = other RNA
gagaccgccaagctgatcgagaagctc

SEQ ID NO: 41412 - RNA, 30 nt, synthetic construct
  misc_feature 1..30: note Dolichyl-diphosphooligosaccharide-proteinosyltransferase 48 kDa subunit (318-327)
  source 1..30: mol_type = other RNA
gagaccgcccccccgaacgcctacaccgtg

SEQ ID NO: 41413 - RNA, 27 nt, synthetic construct
  misc_feature 1..27: note = Heat shock protein HSP 90-beta (13-21)
  source 1..27: mol_type = other RNA
gagaccttcgccttccaggccgagatc

SEQ ID NO: 41414 - RNA, 27 nt, synthetic construct
  misc_feature 1..27: note = Cyclin-dependent kinase 6 (69-77)
  source 1..27: mol_type = other RNA
gagaccttcgagcaccccaacgtggtc

SEQ ID NO: 41415 - RNA, 27 nt, synthetic construct
  misc_feature 1..27: note = Serine/threonine-protein phosphatase 2A catalytic subunit beta isoform (226-234)
  source 1..27: mol_type = other RNA
gagaccttcaaccacgccaacggcctg

SEQ ID NO: 41416 - RNA, 36 nt, synthetic construct
  misc_feature 1..36: note = Protein diaphanous homolog 1 (1255-1266)
  source 1..36: mol_type = other RNA
gagaccttccccaccatcctggaggaggccaaggag

SEQ ID NO: 41417 - RNA, 27 nt, synthetic construct
  misc_feature 1..27: note = Serine/threonine-protein kinase 17B (257-265)
  source 1..27: mol_type = other RNA
gagaccttcagctccgtgagccagctg

SEQ ID NO: 41418 - RNA, 27 nt, synthetic construct
  misc_feature 1..27: note = Transcription elongation factor SPT6 (1159-1167)
  source 1..27: mol_type = other RNA
gagaccttctacatcggcaagctgatc

SEQ ID NO: 41419 - RNA, 27 nt, synthetic construct
  misc_feature 1..27: note = SWI/SNF-related matrix-associated actin-dependent regulator of chromatin subfamily D member 2 (442-450)
  source 1..27: mol_type = other RNA
gagaccatcgagagcatcaaccagctg

SEQ ID NO: 41420 - RNA, 30 nt, synthetic construct
  misc_feature 1..30: note = Ribonuclease H2 subunit C (135-144)
  source 1..30: mol_type = other RNA
gagaccatccccggcccggacgccaaggtg

SEQ ID NO: 41421 - RNA, 30 nt, synthetic construct
  misc_feature 1..30: note = MOB kinase activator 1A (129-138)
  source 1..30: mol_type = other RNA
gagaccctgttccccagcaagatcggcgtg

SEQ ID NO: 41422 - RNA, 27 nt, synthetic construct
  misc_feature 1..27: note = Cystatin-B (15-23)
  source 1..27: mol_type = other RNA
gagacccagcacatcgccgaccaggtg

SEQ ID NO: 41423 - RNA, 27 nt, synthetic construct
  misc_feature 1..27: note = Heat shock protein HSP 90-beta (478-486)
  source 1..27: mol_type = other RNA
gagacccagaagagcatctactacatc

SEQ ID NO: 41424 - RNA, 30 nt, synthetic construct
  misc_feature 1..30: note = Wiskott-Aldrich syndrome protein (285-294)
  source 1..30: mol_type = other RNA
gagaccagcaagctgatctacgacttcatc

SEQ ID NO: 41425 - RNA, 27 nt, synthetic construct
  misc_feature 1..27: note = Elongation factor 1-alpha 1 (81-89)
  source 1..27: mol_type = other RNA
gagaccagcaagtactacgtgaccatc

SEQ ID NO: 41426 - RNA, 27 nt, synthetic construct
  misc_feature 1..27: note = Protein virilizer homolog (61-69)
  source 1..27: mol_type = other RNA
gagaccagcccccacaccttccagctg

SEQ ID NO: 41427 - RNA, 27 nt, synthetic construct
  misc_feature 1..27: note = Splicing factor 3B subunit 1 (1221-1229)
  source 1..27: mol_type = other RNA
gagaccagcccccacgtgatccaggcc

SEQ ID NO: 41428 - RNA, 30 nt, synthetic construct
  misc_feature 1..30: note = G1/S-specific cyclin-D2 (114-123)
  source 1..30: mol_type = other RNA
gagaccagccccctgaccgccgagaagctc

SEQ ID NO: 41429 - RNA, 27 nt, synthetic construct
  misc_feature 1..27: note = Neurexin-3 (1375-1383)
  source 1..27: mol_type = other RNA
gagaccaccaaggacagcctgtccatg

SEQ ID NO: 41430 - RNA, 27 nt, synthetic construct
  misc_feature 1..27: note = Mucin-16 (2346-2354)
  source 1..27: mol_type = other RNA
gagaccaccgtgaagacgagcgacatc

SEQ ID NO: 41431 - RNA, 27 nt, synthetic construct
  misc_feature 1..27: note = Non-structural maintenance of chromosomes element 1 homolog (182-190)
  source 1..27: mol_type = other RNA
gagacctaccccgacgccgtgaagatc

SEQ ID NO: 41432 - RNA, 27 nt, synthetic construct
  misc_feature 1..27: note = Alanine-tRNA ligase, cytoplasmic (688-696)
  source 1..27: mol_type = other RNA
gagacctaccccgacccggtgcgcgtc

SEQ ID NO: 41433 - RNA, 30 nt, synthetic construct
  misc_feature 1..30: note = Actin-related protein 2 (129-138)
  source 1..30: mol_type = other RNA
gagacctaccagttcagcggcgtgtacgtc

SEQ ID NO: 41434 - RNA, 27 nt, synthetic construct
  misc_feature 1..27: note = Pre-mRNA-processing-splicing factor 8 (1844-1852)
  source 1..27: mol_type = other RNA
gaggtggccgccctgatccgcagcctc

SEQ ID NO: 41435 - RNA, 27 nt, synthetic construct
  misc_feature 1..27: note = Ankyrin repeat and KH domain-containing protein 1 (519-527)
  source 1..27: mol_type = other RNA
gaggtggccgacttcctgatcaaggcc

SEQ ID NO: 41436 - RNA, 27 nt, synthetic construct
  misc_feature 1..27: note = PRKCA-binding protein (85-93)
  source 1..27: mol_type = other RNA
gaggtggccaagatgatccaggaggtc

SEQ ID NO: 41437 - RNA, 27 nt, synthetic construct
  misc_feature 1..27: note = A-kinase anchor protein 9 (1455-1463)
  source 1..27: mol_type = other RNA
gaggtggccaaggtcatcgtgagcatg

SEQ ID NO: 41438 - RNA, 27 nt, synthetic construct
  misc_feature 1..27: note = Histone acetyltransferase KAT8 (250-258)
  source 1..27: mol_type = other RNA
gaggtggacggcaaggaccacaagatc

SEQ ID NO: 41439 - RNA, 33 nt, synthetic construct
  misc_feature 1..33: note = Nucleolin (411-421)
  source 1..33: mol_type = other RNA
gaggtgttcgaggacgccgccgagatccgcctg

SEQ ID NO: 41440 - RNA, 27 nt, synthetic construct
  misc_feature 1..27: note = Nucleolin (504-512)
  source 1..27: mol_type = other RNA
gaggtgttcgagaaggccaccttcatc

SEQ ID NO: 41441 - RNA, 27 nt, synthetic construct
  misc_feature 1..27: note = Desmoplakin (745-753)
  source 1..27: mol_type = other RNA
gaggtgttcggcctgttccagaagctc

SEQ ID NO: 41442 - RNA, 27 nt, synthetic construct
  misc_feature 1..27: note = Splicing factor 3B subunit 3 (57-65)
  source 1..27: mol_type = other RNA
gaggtgttcggcgtcatccgcagcctg

SEQ ID NO: 41443 - RNA, 27 nt, synthetic construct
  misc_feature 1..27: note = E2F-associated phosphoprotein (273-281)
  source 1..27: mol_type = other RNA
gaggtgttccacttcttcaacgtcctg

SEQ ID NO: 41444 - RNA, 27 nt, synthetic construct
  misc_feature 1..27: note = Vacuolar protein sorting-associated protein 8 homolog (935-943)
  source 1..27: mol_type = other RNA
gaggtgttcaactacatccacaacatc

SEQ ID NO: 41445 - RNA, 27 nt, synthetic construct
  misc_feature 1..27: note = Actin-binding LIM protein 1 (747-755)
  source 1..27: mol_type = other RNA
gaggtgttccgcgagatcttcggcatg

SEQ ID NO: 41446 - RNA, 30 nt, synthetic construct
  misc_feature 1..30: note = Replication protein A 32 kDa subunit (62-71)
  source 1..30: mol_type = other RNA
gaggtgttccgcatcggcaacgtcgagatc

SEQ ID NO: 41447 - RNA, 27 nt, synthetic construct
  misc_feature 1..27: note = Phenylalanine-tRNA ligase alpha subunit (418-426)
  source 1..27: mol_type = other RNA
gaggtgttcagctaccaccagggcctg

SEQ ID NO: 41448 - RNA, 27 nt, synthetic construct
  misc_feature 1..27: note = Non-canonical poly(A) RNA polymerase PAPD7 (185-193)
  source 1..27: mol_type = other RNA
gaggtgttcaccggcgggatcagctcc

SEQ ID NO: 41449 - RNA, 27 nt, synthetic construct
  misc_feature 1..27: note = Cytochrome b-245 heavy chain (203-211)
  source 1..27: mol_type = other RNA
gaggtgttctggtacacccaccacctg

SEQ ID NO: 41450 - RNA, 30 nt, synthetic construct
  misc_feature 1..30: note = Sigma non-opioid intracellular receptor 1 (144-153)
  source 1..30: mol_type = other RNA
gaggtgttctaccccggcgagaccgtcgtg

SEQ ID NO: 41451 - RNA, 27 nt, synthetic construct
  misc_feature 1..27: note = Phosphomannomutase 1 (68-76)
  source 1..27: mol_type = other RNA
gaggtgatcgagaagttcgactacgtc

SEQ ID NO: 41452 - RNA, 27 nt, synthetic construct
  misc_feature 1..27: note = Centromere/kinetochore protein zw10 homolog (663-671)
  source 1..27: mol_type = other RNA
gaggtgatcggcaagatcaccgccctg

SEQ ID NO: 41453 - RNA, 27 nt, synthetic construct
  misc_feature 1..27: note = Protein phosphatase 1G (109-117)
  source 1..27: mol_type = other RNA
gaggtgatcaaggagctggcccagatc

SEQ ID NO: 41454 - RNA, 27 nt, synthetic construct
  misc_feature 1..27: note = Importin-9 (267-275)
  source 1..27: mol_type = other RNA
gaggtgctgaaggccgtcaccgccctc

SEQ ID NO: 41455 - RNA, 27 nt, synthetic construct
  misc_feature 1..27: note = Nuclear receptor-binding factor 2 (2-10)
  source 1..27: mol_type = other RNA
gaggtgatggagggccccctgaacctc

SEQ ID NO: 41456 - RNA, 27 nt, synthetic construct
  misc_feature 1..27: note = Uncharacterized protein KIAA1143 (71-79)
  source 1..27: mol_type = other RNA
gaggtgatgaagatcaaggccgagatc

SEQ ID NO: 41457 - RNA, 27 nt, synthetic construct
  misc_feature 1..27: note = C-1-tetrahydrofolate synthase, cytoplasmic (80-88)
  source 1..27: mol_type = other RNA
gaggtgatgaagtacatcaccagcctg

SEQ ID NO: 41458 - RNA, 27 nt, synthetic construct
  misc_feature 1..27: note = Probable ubiquitin carboxyl-terminal hydrolase FAF-X (357-365)
  source 1..27: mol_type = other RNA
gaggtgaacaaggtcatcagctccgtg

SEQ ID NO: 41459 - RNA, 27 nt, synthetic construct
  misc_feature 1..27: note = Programmed cell death protein 4 (355-363)
  source 1..27: mol_type = other RNA
gaggtgccccacttccaccacgagctg

SEQ ID NO: 41460 - RNA, 27 nt, synthetic construct
  misc_feature 1..27: note = InaD-like protein (626-634)
  source 1..27: mol_type = other RNA
gaggtgcccccgcccttcaccctggtc

SEQ ID NO: 41461 - RNA, 27 nt, synthetic construct
  misc_feature 1..27: note = Gypsy retrotransposon integrase-like protein 1 (184-192)
  source 1..27: mol_type = other RNA
gaggtgagcaaggccatcatcaacatc

SEQ ID NO: 41462 - RNA, 27 nt, synthetic construct
  misc_feature 1..27: note = DNA-directed RNA polymerase III subunit RPC3 (143-151)
  source 1..27: mol_type = other RNA
gaggtgagcaacaccttcgtccgcctg

SEQ ID NO: 41463 - RNA, 27 nt, synthetic construct
  misc_feature 1..27: note = CAP-Gly domain-containing linker protein 1 (841-849)
  source 1..27: mol_type = other RNA
gaggtgagccaggtcaaggagaccctg

SEQ ID NO: 41464 - RNA, 30 nt, synthetic construct
  misc_feature 1..30: note = Double-stranded RNA-specific adenosine deaminase (806-815)
  source 1..30: mol_type = other RNA
gaggtgacccccgtcaccggcgccagcctg

SEQ ID NO: 41465 - RNA, 27 nt, synthetic construct
  misc_feature 1..27: note = Multiple C2 and transmembrane domain-containing protein 1 (410-418)
  source 1..27: mol_type = other RNA
gaggtggtcggcagctacttctccgtg

SEQ ID NO: 41466 - RNA, 30 nt, synthetic construct
  misc_feature 1..30: note = Monocarboxylate transporter 4 (456-465)
  source 1..30: mol_type = other RNA
gaggtggtccacacccccgagaccagcgtg

SEQ ID NO: 41467 - RNA, 27 nt, synthetic construct
  misc_feature 1..27: note = E3 ubiquitin-protein ligase RNF114 (34-42)
  source 1..27: mol_type = other RNA
gaggtgtacgagaagcccgtccaggtg

SEQ ID NO: 41468 - RNA, 33 nt, synthetic construct
  misc_feature 1..33: note = Sorting nexin-17 (460-470)
  source 1..33: mol_type = other RNA
ttcgccttcgagggcatcggggacgaggacctg

SEQ ID NO: 41469 - RNA, 30 nt, synthetic construct
  misc_feature 1..30: note = Coiled-coil domain-containing protein 60 (70-79)
  source 1..30: mol_type = other RNA
ttcgccatcctgcgcgaggagaccgccaag

SEQ ID NO: 41470 - RNA, 27 nt, synthetic construct
  misc_feature 1..27: note = Serpin B6 (11-19)
  source 1..27: mol_type = other RNA
ttcgccctgaacctcctgaagaccctg

SEQ ID NO: 41471 - RNA, 27 nt, synthetic construct
  misc_feature 1..27: note = Inactive phospholipase D5 (72-80)
  source 1..27: mol_type = other RNA
ttcgccctggtgtgctgcttcgccatc

SEQ ID NO: 41472 - RNA, 27 nt, synthetic construct
  misc_feature 1..27: note = Actin-like protein 6A (118-126)
  source 1..27: mol_type = other RNA
ttcgccaacggccgcagcaccgggctg

SEQ ID NO: 41473 - RNA, 27 nt, synthetic construct
  misc_feature 1..27: note = Fatty acid synthase (1720-1728)
  source 1..27: mol_type = other RNA
ttcgccaacagccgcgacacctccttc

SEQ ID NO: 41474 - RNA, 27 nt, synthetic construct
  misc_feature 1..27: note = DNA polymerase delta subunit 2 (24-32)
  source 1..27: mol_type = other RNA
ttcgcccgcgtgcccgtcgccacctac

SEQ ID NO: 41475 - RNA, 30 nt, synthetic construct
  misc_feature 1..30: note = Microtubule cross-linking factor 1 (1586-1595)
  source 1..30: mol_type = other RNA
ttcgccagccccctgcactccctcgagatg

SEQ ID NO: 41476 - RNA, 27 nt, synthetic construct
  misc_feature 1..27: note = ATP synthase subunit delta, mitochondrial (42-50)
  source 1..27: mol_type = other RNA
ttcgccagccccacccaggtgttcttc

SEQ ID NO: 41477 - RNA, 27 nt, synthetic construct
  misc_feature 1..27: note = Alanine-tRNA ligase, cytoplasmic (346-354)
  source 1..27: mol_type = other RNA
ttcgccaccctggtggacgtcgtggtg

SEQ ID NO: 41478 - RNA, 33 nt, synthetic construct
  misc_feature 1..33: note = G patch domain-containing protein 2 (148-158)
  source 1..33: mol_type = other RNA
ttcgccgtggacaacgtcggcaaccgcaccctg

SEQ ID NO: 41479 - RNA, 27 nt, synthetic construct
  misc_feature 1..27: note = Protein disulfide-isomerase A2 (456-464)
  source 1..27: mol_type = other RNA
ttcgccgtgcacggcttccccaccctg

SEQ ID NO: 41480 - RNA, 27 nt, synthetic construct
  misc_feature 1..27: note = Translocon-associated protein subunit gamma (75-83)
  source 1..27: mol_type = other RNA
ttcgcctacaagaacgtgaagttcgtc

SEQ ID NO: 41481 - RNA, 27 nt, synthetic construct
  misc_feature 1..27: note = Transmembrane protein 214 (326-334)
  source 1..27: mol_type = other RNA
ttcgcctacatgcccaacaacagcctg

SEQ ID NO: 41482 - RNA, 27 nt, synthetic construct
  misc_feature 1..27: note = 28S ribosomal protein S29, mitochondrial (117-125)
  source 1..27: mol_type = other RNA
ttcgcctaccccgccatccgctacctg

SEQ ID NO: 41483 - RNA, 27 nt, synthetic construct
  misc_feature 1..27: note = Protein furry homolog-like (828-836)
  source 1..27: mol_type = other RNA
ttcgcctacacccgcctgcagctcctg

SEQ ID NO: 41484 - RNA, 24 nt, synthetic construct
  misc_feature 1..24: note = Transmembrane and coiled-coil domain-containing protein 1 (109-116)
  source 1..24: mol_type = other RNA
ttcgacggccgcgtggtcgccaag

SEQ ID NO: 41485 - RNA, 27 nt, synthetic construct
  misc_feature 1..27: note = ATP-binding cassette sub-family A member 9 (420-428)
  source 1..27: mol_type = other RNA
ttcgacaagatcctgcccgccgagtac

SEQ ID NO: 41486 - RNA, 24 nt, synthetic construct
  misc_feature 1..24: note = Peroxidasin-like protein (1168-1175)
  source 1..24: mol_type = other RNA
ttcgaggacctgcagaacgagatc

SEQ ID NO: 41487 - RNA, 30 nt, synthetic construct
  misc_feature 1..30: note = Unconventional myosin-Ih (75-84)
  source 1..30: mol_type = other RNA
ttcgagctgcccccgcacgtgtacgccatc

SEQ ID NO: 41488 - RNA, 27 nt, synthetic construct
  misc_feature 1..27: note = Band 4.1-like protein 1 (692-700)
  source 1..27: mol_type = other RNA
ttcgagcccgtgaagaccgagaccatg

SEQ ID NO: 41489 - RNA, 36 nt, synthetic construct
  misc_feature 1..36: note = Gigaxonin (459-470)
  source 1..36: mol_type = other RNA
ttcggcgccgtggcctgcggggtcgcgatggagctg

SEQ ID NO: 41490 - RNA, 30 nt, synthetic construct
  misc_feature 1..30: note = Cysteine andine-rich protein 1 (180-189)
  source 1..30: mol_type = other RNA
ttcggcttcgggcagggcgccggggccctg

SEQ ID NO: 41491 - RNA, 27 nt, synthetic construct
  misc_feature 1..27: note = Protein FAM60A (2-10)
  source 1..27: mol_type = other RNA
ttcggcttccacaagcccaagatgtac

SEQ ID NO: 41492 - RNA, 27 nt, synthetic construct
  misc_feature 1..27: note = Acyl-CoA-binding domain-containing protein 6 (141-149)
  source 1..27: mol_type = other RNA
ttcggcgggcccgtgatcagctccctg

SEQ ID NO: 41493 - RNA, 27 nt, synthetic construct
  misc_feature 1..27: note = Hydroxyacyl-coenzyme A dehydrogenase, mitochondrial (302-310)
  source 1..27: mol_type = other RNA
ttcggcaagaagaccggggagggcttc

SEQ ID NO: 41494 - RNA, 27 nt, synthetic construct
  misc_feature 1..27: note = EH domain-containing protein 1 (42-50)
  source 1..27: mol_type = other RNA
ttccacgagttccacagccccgccctg

SEQ ID NO: 41495 - RNA, 27 nt, synthetic construct
  misc_feature 1..27: note = Forkhead box protein N2 (278-286)
  source 1..27: mol_type = other RNA
ttccaccaccccagcgccgtgcgcctg

SEQ ID NO: 41496 - RNA, 27 nt, synthetic construct
  misc_feature 1..27: note = B-lymphocyte antigen CD20 (62-70)
  source 1..27: mol_type = other RNA
ttccacatcgccctgggcgggctcctg

SEQ ID NO: 41497 - RNA, 27 nt, synthetic construct
  misc_feature 1..27: note = Endoplasmic reticulum-Golgi intermediate compartment protein 2 (185-193)
  source 1..27: mol_type = other RNA
ttccacatcaccgtgggcaaggccatc

SEQ ID NO: 41498 - RNA, 27 nt, synthetic construct
  misc_feature 1..27: note = Complement receptor type 2 (1016-1024)
  source 1..27: mol_type = other RNA
ttccacctggaggcccgcgaggtgtac

SEQ ID NO: 41499 - RNA, 27 nt, synthetic construct
  misc_feature 1..27: note = Eukaryotic elongation factor 2 kinase (553-561)
  source 1..27: mol_type = other RNA
ttccacctggagcacgccgccaacctc

SEQ ID NO: 41500 - RNA, 27 nt, synthetic construct
  misc_feature 1..27: note Dolichyl-diphosphooligosaccharide-proteinosyltransferase subunit 2 (579-587)
  source 1..27: mol_type = other RNA
ttccacctgggccacgccgccatgctc

SEQ ID NO: 41501 - RNA, 27 nt, synthetic construct
  misc_feature 1..27: note = Brain-specific angiogenesis inhibitor 1-associated protein 2 (97-105)
  source 1..27: mol_type = other RNA
ttccacaacgagctgctcacccagctg

SEQ ID NO: 41502 - RNA, 27 nt, synthetic construct
  misc_feature 1..27: note = Large subunit GTPase 1 homolog (597-605)
  source 1..27: mol_type = other RNA
ttccaccaggagaacgtgcgcgccctg

SEQ ID NO: 41503 - RNA, 27 nt, synthetic construct
  misc_feature 1..27: note = tRNA (uracil(54)-C(5))-methyltransferase homolog (396-404)
  source 1..27: mol_type = other RNA
ttccacaccggccaggccgagaagatc

SEQ ID NO: 41504 - RNA, 30 nt, synthetic construct
  misc_feature 1..30: note = E3 ubiquitin-protein ligase UHRF1 (36-45)
  source 1..30: mol_type = other RNA
ttccacgtggagcccggcctgcagcgcctc

SEQ ID NO: 41505 - RNA, 27 nt, synthetic construct
  misc_feature 1..27: note = Minor histocompatibility protein HA-1 (190-198)
  source 1..27: mol_type = other RNA
ttccactacgagagcaacaacgacctg

SEQ ID NO: 41506 - RNA, 27 nt, synthetic construct
  misc_feature 1..27: note = Gamma-adducin (307-315)
  source 1..27: mol_type = other RNA
ttccactacatcttcaacgtgcagctg

SEQ ID NO: 41507 - RNA, 27 nt, synthetic construct
  misc_feature 1..27: note = Protein RER1 (79-87)
  source 1..27: mol_type = other RNA
ttcatcgccttcctgagccccaaggtg

SEQ ID NO: 41508 - RNA, 27 nt, synthetic construct
  misc_feature 1..27: note = Mitochondrial import receptor subunit TOM5 homolog (43-51)
  source 1..27: mol_type = other RNA
ttcatcctgaagaagctcgacagcatc

SEQ ID NO: 41509 - RNA, 27 nt, synthetic construct
  misc_feature 1..27: note = Neutral amino acid transporter B(0) (175-183)
  source 1..27: mol_type = other RNA
ttcatcctgcccatcggcgccaccgtg

SEQ ID NO: 41510 - RNA, 27 nt, synthetic construct
  misc_feature 1..27: note = Nectin-1 (509-517)
  source 1..27: mol_type = other RNA
ttcatcagcaagaaggagtggtacgtg

SEQ ID NO: 41511 - RNA, 27 nt, synthetic construct
  misc_feature 1..27: note = Desmoplakin (2300-2308)
  source 1..27: mol_type = other RNA
ttcatcgtggaccccgtcagcaacctg

SEQ ID NO: 41512 - RNA, 27 nt, synthetic construct
  misc_feature 1..27: note = Zinc finger protein 460 (554-562)
  source 1..27: mol_type = other RNA
ttcatcgtggaggagaccctgcccctc

SEQ ID NO: 41513 - RNA, 27 nt, synthetic construct
  misc_feature 1..27: note = Elongation factor 1-gamma (16-24)
  source 1..27: mol_type = other RNA
ttcaaggccctgatcgccgcgcagtac

SEQ ID NO: 41514 - RNA, 27 nt, synthetic construct
  misc_feature 1..27: note = Ubiquilin-1 (61-69)
  source 1..27: mol_type = other RNA
ttcaaggaggagatcagcaagcgcttc

SEQ ID NO: 41515 - RNA, 27 nt, synthetic construct
  misc_feature 1..27: note = Nuclear pore complex protein Nup153 (924-932)
  source 1..27: mol_type = other RNA
ttcaagttcggcgaccaggggggcttc

SEQ ID NO: 41516 - RNA, 27 nt, synthetic construct
  misc_feature 1..27: note = Thioredoxin-interacting protein (370-378)
  source 1..27: mol_type = other RNA
ttcaagttcatgcccccgcccacctac

SEQ ID NO: 41517 - RNA, 27 nt, synthetic construct
  misc_feature 1..27: note = Protein SCAF11 (1115-1123)
  source 1..27: mol_type = other RNA
ttcaagttcgtggagcagcagagctac

SEQ ID NO: 41518 - RNA, 30 nt, synthetic construct
  misc_feature 1..30: note = Casein kinase II subunit alpha (197-206)
  source 1..30: mol_type = other RNA
ttcaagggccccgagctgctcgtggactac

SEQ ID NO: 41519 - RNA, 30 nt, synthetic construct
  misc_feature 1..30: note = Ras association domain-containing protein 2 (212-221)
  source 1..30: mol_type = other RNA
ttcaagatcgagaacagcgccgaggagttc

SEQ ID NO: 41520 - RNA, 27 nt, synthetic construct
  misc_feature 1..27: note = Septin-6 (197-205)
  source 1..27: mol_type = other RNA
ttcaagatcaagatcaccagcgagctg

SEQ ID NO: 41521 - RNA, 27 nt, synthetic construct
  misc_feature 1..27: note = Ubiquitin carboxyl-terminal hydrolase 33 (150-158)
  source 1..27: mol_type = other RNA
ttcaagatccccagcaacaccaccctg

SEQ ID NO: 41522 - RNA, 30 nt, synthetic construct
  misc_feature 1..30: note = SLIT-ROBO Rho GTPase-activating protein 3 (765-774)
  source 1..30: mol_type = other RNA
ttcaagaagggcgccagcctgctcctgtac

SEQ ID NO: 41523 - RNA, 30 nt, synthetic construct
  misc_feature 1..30: note = ETS domain-containing protein Elk-4 (163-172)
  source 1..30: mol_type = other RNA
ttcaagctgatcaagaccgagaaccccgcc

SEQ ID NO: 41524 - RNA, 27 nt, synthetic construct
  misc_feature 1..27: note = Nucleoporin-like protein 2 (303-311)
  source 1..27: mol_type = other RNA
ttcaagagccccgccgcctccagcttc

SEQ ID NO: 41525 - RNA, 30 nt, synthetic construct
  misc_feature 1..30: note = Mini-chromosome maintenance complex-binding protein (250-259)
  source 1..30: mol_type = other RNA
ttcaaggtgaacgacatcctggagctctac

SEQ ID NO: 41526 - RNA, 27 nt, synthetic construct
  misc_feature 1..27: note = U2 small nuclear ribonucleoprotein auxiliary factor 35 kDa subunit-related protein 2 (256-264)
  source 1..27: mol_type = other RNA
ttcaaggtgagctgcaacctggagccc

SEQ ID NO: 41527 - RNA, 27 nt, synthetic construct
  misc_feature 1..27: note = Ubiquitin-conjugating enzyme E2 T (132-140)
  source 1..27: mol_type = other RNA
ttcaagtacaacaagcccgccttcctg

SEQ ID NO: 41528 - RNA, 27 nt, synthetic construct
  misc_feature 1..27: note = Bestrophin-3 (595-603)
  source 1..27: mol_type = other RNA
ttcctgggcagctcccacaccagcctc

SEQ ID NO: 41529 - RNA, 30 nt, synthetic construct
  misc_feature 1..30: note = Heparan-alpha-glucosaminide N-acetyltransferase (512-521)
  source 1..30: mol_type = other RNA
ttcctgggcgtgcaggccgggaagatcctc

SEQ ID NO: 41530 - RNA, 27 nt, synthetic construct
  misc_feature 1..27: note = Acetyl-CoA carboxylase 1 (2174-2182)
  source 1..27: mol_type = other RNA
ttcctgatccccatctaccaccaggtg

SEQ ID NO: 41531 - RNA, 27 nt, synthetic construct
  misc_feature 1..27: note = Rho-associated protein kinase 1 (316-324)
  source 1..27: mol_type = other RNA
ttcctgaccgaccgcgaggtgcggctc

SEQ ID NO: 41532 - RNA, 27 nt, synthetic construct
  misc_feature 1..27: note = AP-2 complex subunit alpha-1 (812-820)
  source 1..27: mol_type = other RNA
ttcctgacccccccgctcctgagcgtg

SEQ ID NO: 41533 - RNA, 30 nt, synthetic construct
  misc_feature 1..30: note = Bardet-Biedl syndrome 1 protein (409-418)
  source 1..30: mol_type = other RNA
ttcctgtacaacgaggccctctacagcctg

SEQ ID NO: 41534 - RNA, 27 nt, synthetic construct
  misc_feature 1..27: note = Adiponectin receptor protein 1 (163-171)
  source 1..27: mol_type = other RNA
ttcatggcccccctgcaggagaaggtg

SEQ ID NO: 41535 - RNA, 27 nt, synthetic construct
  misc_feature 1..27: note = Protein SGT1 homolog (332-340)
  source 1..27: mol_type = other RNA
ttcatggagagcggcgggaccgtgctg

SEQ ID NO: 41536 - RNA, 27 nt, synthetic construct
  misc_feature 1..27: note = Cyclin-dependent kinase 13 (131-139)
  source 1..27: mol_type = other RNA
ttccccatcaccgccatccgcgagatc

SEQ ID NO: 41537 - RNA, 27 nt, synthetic construct
  misc_feature 1..27: note = Actin-like protein 6A (99-107)
  source 1..27: mol_type = other RNA
ttccaggccatcctggaccacacctac

SEQ ID NO: 41538 - RNA, 30 nt, synthetic construct
  misc_feature 1..30: note = Nuclear pore complex protein Nup153 (1395-1404)
  source 1..30: mol_type = other RNA
ttccagttcggcagctccaccaccaacttc

SEQ ID NO: 41539 - RNA, 27 nt, synthetic construct
  misc_feature 1..27: note = Choline-phosphate cytidylyltransferase B (242-250)
  source 1..27: mol_type = other RNA
ttccagaaccaggtggacaagatgaag

SEQ ID NO: 41540 - RNA, 27 nt, synthetic construct
  misc_feature 1..27: note = Fibrillin-3 (594-602)
  source 1..27: mol_type = other RNA
ttccgctgccagtgcctgggcgggctc

SEQ ID NO: 41541 - RNA, 27 nt, synthetic construct
  misc_feature 1..27: note = Polycystin-1 (3465-3473)
  source 1..27: mol_type = other RNA
ttcagcgcctccgacgaggacctgatc

SEQ ID NO: 41542 - RNA, 27 nt, synthetic construct
  misc_feature 1..27: note = Chromodomain-helicase-DNA-binding protein 4 (167-175)
  source 1..27: mol_type = other RNA
ttcagcgaggaggactaccgcaccctg

SEQ ID NO: 41543 - RNA, 27 nt, synthetic construct
  misc_feature 1..27: note = Integrin beta-7 (227-235)
  source 1..27: mol_type = other RNA
ttcagcttccaccacgtgctgtccctc

SEQ ID NO: 41544 - RNA, 30 nt, synthetic construct
  misc_feature 1..30: note = GPALPP motifs-containing protein 1 (331-340)
  source 1..30: mol_type = other RNA
ttcagccacggcaaggggaacatgttcctg

SEQ ID NO: 41545 - RNA, 27 nt, synthetic construct
  misc_feature 1..27: note = Transcription intermediary factor 1-beta (125-133)
  source 1..27: mol_type = other RNA
ttcagcaaggacatcgtggagaactac

SEQ ID NO: 41546 - RNA, 27 nt, synthetic construct
  misc_feature 1..27: note = Meiosis arrest female protein 1 (1734-1742)
  source 1..27: mol_type = other RNA
ttcagcctggcccccatcaccaagctc

SEQ ID NO: 41547 - RNA, 24 nt, synthetic construct
  misc_feature 1..24: note = Chromosome transmission fidelity protein 8 homolog isoform 2 (371-378)
  source 1..24: mol_type = other RNA
ttcagccagtccagcggcaccctg

SEQ ID NO: 41548 - RNA, 27 nt, synthetic construct
  misc_feature 1..27: note = Protein PRRC2A (165-173)
  source 1..27: mol_type = other RNA
ttcagccgcgaggagttccccaccctg

SEQ ID NO: 41549 - RNA, 27 nt, synthetic construct
  misc_feature 1..27: note = V-type proton ATPase subunit D (79-87)
  source 1..27: mol_type = other RNA
ttcagcaccaccgtgatccagaacgtc

SEQ ID NO: 41550 - RNA, 24 nt, synthetic construct
  misc_feature 1..24: note = Nodal modulator 2 (329-336)
  source 1..24: mol_type = other RNA
ttcagcgtgaccggccgcgtcctg

SEQ ID NO: 41551 - RNA, 27 nt, synthetic construct
  misc_feature 1..27: note = ETS domain-containing protein Elk-3 (331-339)
  source 1..27: mol_type = other RNA
ttcaccgcccagacccccaacggcctg

SEQ ID NO: 41552 - RNA, 30 nt, synthetic construct
  misc_feature 1..30: note = ATP synthase subunit delta, mitochondrial (40-49)
  source 1..30: mol_type = other RNA
ttcaccttcgccagccccacccaggtgttc

SEQ ID NO: 41553 - RNA, 33 nt, synthetic construct
  misc_feature 1..33: note = E3 SUMO-protein ligase RanBP2 (1132-1142)
  source 1..33: mol_type = other RNA
ttcaccttccacggccccgggaagagcgtgttc

SEQ ID NO: 41554 - RNA, 27 nt, synthetic construct
  misc_feature 1..27: note = Embigin (129-137)
  source 1..27: mol_type = other RNA
ttcaccatcatcaacagcaagcagatg

SEQ ID NO: 41555 - RNA, 27 nt, synthetic construct
  misc_feature 1..27: note = Protein transport protein Sec23B (392-400)
  source 1..27: mol_type = other RNA
ttcaccaaggacttcaacggcgacttc

SEQ ID NO: 41556 - RNA, 27 nt, synthetic construct
  misc_feature 1..27: note = Protein TFG (363-371)
  source 1..27: mol_type = other RNA
ttcaccagcctgcccggctccaccatg

SEQ ID NO: 41557 - RNA, 27 nt, synthetic construct
  misc_feature 1..27: note = Nuclear factor of activated T-cells, cytoplasmic 2 (454-462)
  source 1..27: mol_type = other RNA
ttcacctaccaccccgtgccggccatc

SEQ ID NO: 41558 - RNA, 27 nt, synthetic construct
  misc_feature 1..27: note = Phosphomannomutase 2 (157-165)
  source 1..27: mol_type = other RNA
ttcgtggccgacctgcgcaaggagttc

SEQ ID NO: 41559 - RNA, 27 nt, synthetic construct
  misc_feature 1..27: note = V-type proton ATPase subunit G 1 (102-110)
  source 1..27: mol_type = other RNA
ttcgtgtgcgacatccgccccgagatc

SEQ ID NO: 41560 - RNA, 27 nt, synthetic construct
  misc_feature 1..27: note = T-box transcription factor TBX20 (45-53)
  source 1..27: mol_type = other RNA
ttcgtggagaagagctcctgcgcccag

SEQ ID NO: 41561 - RNA, 27 nt, synthetic construct
  misc_feature 1..27: note = Dual specificity protein phosphatase 4 (364-372)
  source 1..27: mol_type = other RNA
ttcgtgttcagcttccccgtctccgtg

SEQ ID NO: 41562 - RNA, 27 nt, synthetic construct
  misc_feature 1..27: note = RNA-binding protein PNO1 (136-144)
  source 1..27: mol_type = other RNA
ttcgtgaaggccttcatcctgggcttc

SEQ ID NO: 41563 - RNA, 27 nt, synthetic construct
  misc_feature 1..27: note = Serine/threonine-protein kinase mTOR (725-733)
  source 1..27: mol_type = other RNA
ttcgtgatgcccttcctgcgcaagatg

SEQ ID NO: 41564 - RNA, 27 nt, synthetic construct
  misc_feature 1..27: note = 60S ribosomal protein L36 (39-47)
  source 1..27: mol_type = other RNA
ttcgtgcgcgacatgatccgggaggtc

SEQ ID NO: 41565 - RNA, 27 nt, synthetic construct
  misc_feature 1..27: note = Melanoma-associated antigen C2 (265-273)
  source 1..27: mol_type = other RNA
ttcgtgtacggcgagccccgcgagctg

SEQ ID NO: 41566 - RNA, 27 nt, synthetic construct
  misc_feature 1..27: note = Beta-1,3-galactosyltransferase 5 (36-44)
  source 1..27: mol_type = other RNA
ttcgtgtacaagaaggacggcaacttc

SEQ ID NO: 41567 - RNA, 27 nt, synthetic construct
  misc_feature 1..27: note = Olfactory receptor 12D2 (250-258)
  source 1..27: mol_type = other RNA
ttctacgcccccgtgctgttcacctac

SEQ ID NO: 41568 - RNA, 27 nt, synthetic construct
  misc_feature 1..27: note = Laminin subunit alpha-5 (1849-1857)
  source 1..27: mol_type = other RNA
ttctaccgcgacgtgaagggcctgttc

SEQ ID NO: 41569 - RNA, 27 nt, synthetic construct
  misc_feature 1..27: note = Erythrocyte band 7 integral membrane protein (75-83)
  source 1..27: mol_type = other RNA
ggcgccaaggggcccggcctgttcttc

SEQ ID NO: 41570 - RNA, 27 nt, synthetic construct
  misc_feature 1..27: note = Forkhead box protein O3 (542-550)
  source 1..27: mol_type = other RNA
ggcgccctggggggcagccgcgccctc

SEQ ID NO: 41571 - RNA, 27 nt, synthetic construct
  misc_feature 1..27: note = Tumor necrosis factor receptor superfamily member 18 (5-13)
  source 1..27: mol_type = other RNA
ggcgccatgggggccttccgcgcgctg

SEQ ID NO: 41572 - RNA, 27 nt, synthetic construct
  misc_feature 1..27: note = Leukocyte elastase inhibitor (309-317)
  source 1..27: mol_type = other RNA
ggcgcccgcgacatcttcatcagcaag

SEQ ID NO: 41573 - RNA, 27 nt, synthetic construct
  misc_feature 1..27: note = Solute carrier family 22 member 9 (444-452)
  source 1..27: mol_type = other RNA
ggcgccagcgccctggcgaacaccctc

SEQ ID NO: 41574 - RNA, 27 nt, synthetic construct
  misc_feature 1..27: note = Alpha-enolase (122-130)
  source 1..27: mol_type = other RNA
ggcgccgtggagaagggggtccccctg

SEQ ID NO: 41575 - RNA, 27 nt, synthetic construct
  misc_feature 1..27: note = Importin subunit alpha-5 (169-177)
  source 1..27: mol_type = other RNA
ggcgccgtgcccatcttcatcgagctg

SEQ ID NO: 41576 - RNA, 27 nt, synthetic construct
  misc_feature 1..27: note = 60S ribosomal protein L15 (2-10)
  source 1..27: mol_type = other RNA
ggcgcctacaagtacatccaggagctg

SEQ ID NO: 41577 - RNA, 30 nt, synthetic construct
  misc_feature 1..30: note = Nuclease EXOG, mitochondrial (105-114)
  source 1..30: mol_type = other RNA
ggcgacgccgaccgcaagcactgcaagttc

SEQ ID NO: 41578 - RNA, 27 nt, synthetic construct
  misc_feature 1..27: note = Lariat debranching enzyme (502-510)
  source 1..27: mol_type = other RNA
ggcgaggacctgaccaaggtgcccctc

SEQ ID NO: 41579 - RNA, 24 nt, synthetic construct
  misc_feature 1..24: note = Leucine-rich repeat LGI family member 4 (2-9)
  source 1..24: mol_type = other RNA
ggcggggccggcatcctgctcctg

SEQ ID NO: 41580 - RNA, 27 nt, synthetic construct
  misc_feature 1..27: note = Anosmin-1 (412-420)
  source 1..27: mol_type = other RNA
ggcgggatccagacccagctgcccttc

SEQ ID NO: 41581 - RNA, 27 nt, synthetic construct
  misc_feature 1..27: note = Cold-inducible RNA-binding protein (133-141)
  source 1..27: mol_type = other RNA
ggcgggtacggcgggagccgcgactac

SEQ ID NO: 41582 - RNA, 27 nt, synthetic construct
  misc_feature 1..27: note = Acetyl-CoA carboxylase 2 (352-360)
  source 1..27: mol_type = other RNA
ggccacgccagcgagaaccccaagctg

SEQ ID NO: 41583 - RNA, 27 nt, synthetic construct
  misc_feature 1..27: note = Guanine nucleotide-binding protein subunit beta-5 (365-373)
  source 1..27: mol_type = other RNA
ggccacgagaaccgcgtgagcaccctg

SEQ ID NO: 41584 - RNA, 33 nt, synthetic construct
  misc_feature 1..33: note = Rho guanine nucleotide exchange factor 2 (157-167)
  source 1..33: mol_type = other RNA
ggccacttcaacgacgagagccccctggggctc

SEQ ID NO: 41585 - RNA, 27 nt, synthetic construct
  misc_feature 1..27: note = DNA polymerase delta catalytic subunit (784-792)
  source 1..27: mol_type = other RNA
ggccacttccccagcccgatccgcctg

SEQ ID NO: 41586 - RNA, 27 nt, synthetic construct
  misc_feature 1..27: note = Factor VIII intron 22 protein (163-171)
  source 1..27: mol_type = other RNA
ggccacttccagcgcgccgcccagctg

SEQ ID NO: 41587 - RNA, 27 nt, synthetic construct
  misc_feature 1..27: note = Centrosomal protein of 152 kDa (1140-1148)
  source 1..27: mol_type = other RNA
ggccaccacgcccagcccctggccctc

SEQ ID NO: 41588 - RNA, 27 nt, synthetic construct
  misc_feature 1..27: note = Inosine-5'-monophosphate dehydrogenase 2 (371-379)
  source 1..27: mol_type = other RNA
ggccacatcgccaaggccctggcgctc

SEQ ID NO: 41589 - RNA, 30 nt, synthetic construct
  misc_feature 1..30: note = Selenocysteine-specific elongation factor (14-23)
  source 1..30: mol_type = other RNA
ggccacatcgacagcgggaagaccgccctg

SEQ ID NO: 41590 - RNA, 27 nt, synthetic construct
  misc_feature 1..27: note = Hairy/enhancer-of-split related with YRPW motif protein 1 (176-184)
  source 1..27: mol_type = other RNA
ggccacatcccctgggggaccgtgttc

SEQ ID NO: 41591 - RNA, 36 nt, synthetic construct
  misc_feature 1..36: note = Transcription factor AP-1 (86-97)
  source 1..36: mol_type = other RNA
ggccacatcaccaccacgcccaccccgacccagttc

SEQ ID NO: 41592 - RNA, 27 nt, synthetic construct
  misc_feature 1..27: note = U5 small nuclear ribonucleoprotein 40 kDa protein (107-115)
  source 1..27: mol_type = other RNA
ggccacagcggggccgtgatggagctg

SEQ ID NO: 41593 - RNA, 27 nt, synthetic construct
  misc_feature 1..27: note = Scaffold attachment factor B1 (858-866)
  source 1..27: mol_type = other RNA
ggccacagcgggcccggccacatgatg

SEQ ID NO: 41594 - RNA, 27 nt, synthetic construct
  misc_feature 1..27: note = Proteasome subunit beta type-4 (125-133)
  source 1..27: mol_type = other RNA
ggccacagctactccccccgcgccatc

SEQ ID NO: 41595 - RNA, 33 nt, synthetic construct
  misc_feature 1..33: note = Inactive tyrosine-protein kinase transmembrane receptor ROR1 (927-937)
  source 1..33: mol_type = other RNA
ggccacaccgagagcatgatctccgccgagctg

SEQ ID NO: 41596 - RNA, 27 nt, synthetic construct
  misc_feature 1..27: note = Cytochrome b-c1 complex subunit 2, mitochondrial (445-453)
  source 1..27: mol_type = other RNA
ggccacacccccttcgtggacgagctg

SEQ ID NO: 41597 - RNA, 27 nt, synthetic construct
  misc_feature 1..27: note = Tetratricopeptide repeat protein 8 (471-479)
  source 1..27: mol_type = other RNA
ggccacgtggagcaggcccgcgccctg

SEQ ID NO: 41598 - RNA, 27 nt, synthetic construct
  misc_feature 1..27: note = Centromere protein M (155-163)
  source 1..27: mol_type = other RNA
ggccacgtgcccggggtcagcgccctg

SEQ ID NO: 41599 - RNA, 27 nt, synthetic construct
  misc_feature 1..27: note = Inosine-5'-monophosphate dehydrogenase 1 (371-379)
  source 1..27: mol_type = other RNA
ggccacgtggtcaaggccctggccctc

SEQ ID NO: 41600 - RNA, 27 nt, synthetic construct
  misc_feature 1..27: note = Ubiquitin carboxyl-terminal hydrolase 1 (592-600)
  source 1..27: mol_type = other RNA
ggccactacaccgccagcgtgaaggtc

SEQ ID NO: 41601 - RNA, 27 nt, synthetic construct
  misc_feature 1..27: note = Tubulin beta-4B chain (104-112)
  source 1..27: mol_type = other RNA
ggccactacaccgagggggccgagctg

SEQ ID NO: 41602 - RNA, 27 nt, synthetic construct
  misc_feature 1..27: note = Ubiquitin-like-conjugating enzyme ATG3 (118-126)
  source 1..27: mol_type = other RNA
ggcatcaccgaggccgtgaaggagatc

SEQ ID NO: 41603 - RNA, 27 nt, synthetic construct
  misc_feature 1..27: note = Phospholipid phosphatase 5 (2-10)
  source 1..27: mol_type = other RNA
ggcaaggccgccgcggccgtggccttc

SEQ ID NO: 41604 - RNA, 30 nt, synthetic construct
  misc_feature 1..30: note = Sterol regulatory element-binding protein 2 (933-942)
  source 1..30: mol_type = other RNA
ggcaaggccgacgggcagcagagctccttc

SEQ ID NO: 41605 - RNA, 27 nt, synthetic construct
  misc_feature 1..27: note = Zinc finger protein 623 (381-389)
  source 1..27: mol_type = other RNA
ggcaaggccttcttcctgagctcctac

SEQ ID NO: 41606 - RNA, 27 nt, synthetic construct
  misc_feature 1..27: note = Zinc finger protein 791 (278-286)
  source 1..27: mol_type = other RNA
ggcaaggccttcatcttccccagcttc

SEQ ID NO: 41607 - RNA, 27 nt, synthetic construct
  misc_feature 1..27: note = Zinc finger protein with KRAB and SCAN domains 1 (495-503)
  source 1..27: mol_type = other RNA
ggcaaggccttcaaccgcaacagctac

SEQ ID NO: 41608 - RNA, 27 nt, synthetic construct
  misc_feature 1..27: note = Zinc finger protein 397 (375-383)
  source 1..27: mol_type = other RNA
ggcaaggccttcagccagtccagctac

SEQ ID NO: 41609 - RNA, 27 nt, synthetic construct
  misc_feature 1..27: note = Zinc finger protein 791 (362-370)
  source 1..27: mol_type = other RNA
ggcaaggccttcagccgcatctcctac

SEQ ID NO: 41610 - RNA, 30 nt, synthetic construct
  misc_feature 1..30: note = Zinc finger protein 460 (370-379)
  source 1..30: mol_type = other RNA
ggcaaggccttcacccactacagcacctac

SEQ ID NO: 41611 - RNA, 27 nt, synthetic construct
  misc_feature 1..27: note = Coatomer subunit delta (13-21)
  source 1..27: mol_type = other RNA
ggcaaggccatcgtgagccgccagttc

SEQ ID NO: 41612 - RNA, 27 nt, synthetic construct
  misc_feature 1..27: note = O-acetyl-ADP-ribose deacetylase MACROD1 (208-216)
  source 1..27: mol_type = other RNA
ggcaaggccaagatcaccgggggctac

SEQ ID NO: 41613 - RNA, 27 nt, synthetic construct
  misc_feature 1..27: note = 2',3'-cyclic-nucleotide 3'-phosphodiesterase (260-268)
  source 1..27: mol_type = other RNA
ggcaaggcccccggggccgaggagtac

SEQ ID NO: 41614 - RNA, 27 nt, synthetic construct
  misc_feature 1..27: note = Ig lambda chain V-II region BOH (43-51)
  source 1..27: mol_type = other RNA
ggcaaggcccccaagctgatcatctac

SEQ ID NO: 41615 - RNA, 27 nt, synthetic construct
  misc_feature 1..27: note = Ig kappa chain V-I region Walker (63-71)
  source 1..27: mol_type = other RNA
ggcaaggcccccaagctgctcatctac

SEQ ID NO: 41616 - RNA, 27 nt, synthetic construct
  misc_feature 1..27: note = Filamin-B (876-884)
  source 1..27: mol_type = other RNA
ggcaaggcccccctgaacgtgcagttc

SEQ ID NO: 41617 - RNA, 27 nt, synthetic construct
  misc_feature 1..27: note = SH2 domain-containing protein 3C (476-484)
  source 1..27: mol_type = other RNA
ggcaaggccagcccctccccgagcctg

SEQ ID NO: 41618 - RNA, 27 nt, synthetic construct
  misc_feature 1..27: note = Parafibromin (46-54)
  source 1..27: mol_type = other RNA
ggcaaggaggggcagccccgcgagtac

SEQ ID NO: 41619 - RNA, 27 nt, synthetic construct
  misc_feature 1..27: note = 40S ribosomal protein S11 (29-37)
  source 1..27: mol_type = other RNA
ggcaaggagaagctgccccgctactac

SEQ ID NO: 41620 - RNA, 30 nt, synthetic construct
  misc_feature 1..30: note = Transmembrane emp24 domain-containing protein 10 (93-102)
  source 1..30: mol_type = other RNA
ggcaagttcgccttcaccaccgaggactac

SEQ ID NO: 41621 - RNA, 27 nt, synthetic construct
  misc_feature 1..27: note = ER membrane protein complex subunit 1 (28-36)
  source 1..27: mol_type = other RNA
ggcaagttcgactggcgccagcagtac

SEQ ID NO: 41622 - RNA, 27 nt, synthetic construct
  misc_feature 1..27: note = Nucleolar protein 56 (40-48)
  source 1..27: mol_type = other RNA
ggcaagttccacagcatcgtgcgcctg

SEQ ID NO: 41623 - RNA, 30 nt, synthetic construct
  misc_feature 1..30: note = Putative ATP-dependent RNA helicase DHX30 (1039-1048)
  source 1..30: mol_type = other RNA
ggcaagttcaagcccaacagcgtgacctac

SEQ ID NO: 41624 - RNA, 30 nt, synthetic construct
  misc_feature 1..30: note = Kinesin light chain 1 (395-404)
  source 1..30: mol_type = other RNA
ggcaagttcaagcaggccgagaccctgtac

SEQ ID NO: 41625 - RNA, 30 nt, synthetic construct
  misc_feature 1..30: note = Transcription activator BRG1 (851-860)
  source 1..30: mol_type = other RNA
ggcaagttcaacgtgctgctcaccacctac

SEQ ID NO: 41626 - RNA, 27 nt, synthetic construct
  misc_feature 1..27: note = 60S ribosomal protein L10a (132-140)
  source 1..27: mol_type = other RNA
ggcaagttccccagcctgctcacccac

SEQ ID NO: 41627 - RNA, 27 nt, synthetic construct
  misc_feature 1..27: note = Microtubule-associated protein RP/EB family member 1 (99-107)
  source 1..27: mol_type = other RNA
ggcaagttccaggacaacttcgagttc

SEQ ID NO: 41628 - RNA, 36 nt, synthetic construct
  misc_feature 1..36: note = Glycogen phosphorylase, brain form (810-821)
  source 1..36: mol_type = other RNA
ggcaagttcagctccgaccgcaccatcaccgagtac

SEQ ID NO: 41629 - RNA, 27 nt, synthetic construct
  misc_feature 1..27: note = 60S ribosome subunit biogenesis protein NIP7 homolog (71-79)
  source 1..27: mol_type = other RNA
ggcaagttcaccaagacccacaagttc

SEQ ID NO: 41630 - RNA, 33 nt, synthetic construct
  misc_feature 1..33: note = ATP-dependent RNA helicase DDX19B (186-196)
  source 1..33: mol_type = other RNA
ggcaagttctaccccgagctgaagctcgcctac

SEQ ID NO: 41631 - RNA, 27 nt, synthetic construct
  misc_feature 1..27: note = Serine/threonine-protein kinase pim-2 (39-47)
  source 1..27: mol_type = other RNA
ggcaaggggggcttcgggaccgtgttc

SEQ ID NO: 41632 - RNA, 27 nt, synthetic construct
  misc_feature 1..27: note = Tyrosine-protein kinase Fer (570-578)
  source 1..27: mol_type = other RNA
ggcaaggggaacttcggcgaggtgtac

SEQ ID NO: 41633 - RNA, 27 nt, synthetic construct
  misc_feature 1..27: note = YTH domain-containing family protein 2 (451-459)
  source 1..27: mol_type = other RNA
ggcaaggggcccgtgtacctgctcttc

SEQ ID NO: 41634 - RNA, 30 nt, synthetic construct
  misc_feature 1..30: note = MYCBP-associated protein (359-368)
  source 1..30: mol_type = other RNA
ggcaaggggtggcccttcagcgccgtgacc

SEQ ID NO: 41635 - RNA, 33 nt, synthetic construct
  misc_feature 1..33: note = 60S ribosomal protein L36a (16-26)
  source 1..33: mol_type = other RNA
ggcaagcaccagccccacaaggtgacccagtac

SEQ ID NO: 41636 - RNA, 27 nt, synthetic construct
  misc_feature 1..27: note = SWI/SNF complex subunit SMARCC1 (93-101)
  source 1..27: mol_type = other RNA
ggcaagcacgtgaccaaccccgccttc

SEQ ID NO: 41637 - RNA, 27 nt, synthetic construct
  misc_feature 1..27: note = DNA damage-binding protein 1 (59-67)
  source 1..27: mol_type = other RNA
ggcaagatcgccgtgatggagctgttc

SEQ ID NO: 41638 - RNA, 30 nt, synthetic construct
  misc_feature 1..30: note = Acidic leucine-rich nuclear phosphoprotein 32 family member B (32-41)
  source 1..30: mol_type = other RNA
ggcaagatcgaggggctgaccgccgagttc

SEQ ID NO: 41639 - RNA, 27 nt, synthetic construct
  misc_feature 1..27: note = Endothelial differentiation-related factor 1 (122-130)
  source 1..27: mol_type = other RNA
ggcaagatcgagcgcgccatcgggctg

SEQ ID NO: 41640 - RNA, 27 nt, synthetic construct
  misc_feature 1..27: note = Heterogeneous nuclear ribonucleoprotein A3 (150-158)
  source 1..27: mol_type = other RNA
ggcaagatcgagaccatcgaggtgatg

SEQ ID NO: 41641 - RNA, 27 nt, synthetic construct
  misc_feature 1..27: note = Peptidyl-prolyl cis-trans isomerase B (203-211)
  source 1..27: mol_type = other RNA
ggcaagatcgaggtggagaagcccttc

SEQ ID NO: 41642 - RNA, 33 nt, synthetic construct
  misc_feature 1..33: note = Macrophage migration inhibitory factor (66-76)
  source 1..33: mol_type = other RNA
ggcaagatcgggggcgcccagaaccgcagctac

SEQ ID NO: 41643 - RNA, 27 nt, synthetic construct
  misc_feature 1..27: note = Phospholipase ABHD3 (231-239)
  source 1..27: mol_type = other RNA
ggcaagatcgggagcaagacccccctg

SEQ ID NO: 41644 - RNA, 27 nt, synthetic construct
  misc_feature 1..27: note = D-dopachrome decarboxylase (109-117)
  source 1..27: mol_type = other RNA
ggcaagatcgggaccgtgatgaccttc

SEQ ID NO: 41645 - RNA, 27 nt, synthetic construct
  misc_feature 1..27: note = Protein YIF1B (244-252)
  source 1..27: mol_type = other RNA
ggcaagatcgggtactacctggtgctc

SEQ ID NO: 41646 - RNA, 27 nt, synthetic construct
  misc_feature 1..27: note = Nucleolar GTP-binding protein 2 (54-62)
  source 1..27: mol_type = other RNA
ggcaagatcatcaagcccctgcagtac

SEQ ID NO: 41647 - RNA, 30 nt, synthetic construct
  misc_feature 1..30: note = Nucleolar protein 58 (195-204)
  source 1..30: mol_type = other RNA
ggcaagatcatcagcgacaacctgacctac

SEQ ID NO: 41648 - RNA, 27 nt, synthetic construct
  misc_feature 1..27: note = Nucleolar GTP-binding protein 2 (534-542)
  source 1..27: mol_type = other RNA
ggcaagatcaacgtggtcccccagttc

SEQ ID NO: 41649 - RNA, 27 nt, synthetic construct
  misc_feature 1..27: note = Protein YIPF5 (145-153)
  source 1..27: mol_type = other RNA
ggcaagatccagttcgggtacgtgtac

SEQ ID NO: 41650 - RNA, 30 nt, synthetic construct
  misc_feature 1..30: note = TBC1 domain family member 9 (117-126)
  source 1..30: mol_type = other RNA
ggcaagatccaggggatcatcgccgagtac

SEQ ID NO: 41651 - RNA, 27 nt, synthetic construct
  misc_feature 1..27: note = Nucleolysin TIAR (121-129)
  source 1..27: mol_type = other RNA
ggcaagatcagcgacgcccgcgtggtc

SEQ ID NO: 41652 - RNA, 27 nt, synthetic construct
  misc_feature 1..27: note = Ras GTPase-activating protein 1 (354-362)
  source 1..27: mol_type = other RNA
ggcaagatcagcaagcaggaggcctac

SEQ ID NO: 41653 - RNA, 24 nt, synthetic construct
  misc_feature 1..24: note = Solute carrier family 35 member E2B (319-326)
  source 1..24: mol_type = other RNA
ggcaagatcagccccgtgaccttc

SEQ ID NO: 41654 - RNA, 27 nt, synthetic construct
  misc_feature 1..27: note = 40S ribosomal protein S4, X isoform (167-175)
  source 1..27: mol_type = other RNA
ggcaagatcaccgacttcatcaagttc

SEQ ID NO: 41655 - RNA, 27 nt, synthetic construct
  misc_feature 1..27: note = Calcium channel flower homolog (141-149)
  source 1..27: mol_type = other RNA
ggcaagaagggggacgccatcagctac

SEQ ID NO: 41656 - RNA, 27 nt, synthetic construct
  misc_feature 1..27: note = Signal recognition particle receptor subunit beta (226-234)
  source 1..27: mol_type = other RNA
ggcaagaaggggaaggagttcgagttc

SEQ ID NO: 41657 - RNA, 27 nt, synthetic construct
  misc_feature 1..27: note = Sodium-coupled neutral amino acid transporter 2 (58-66)
  source 1..27: mol_type = other RNA
ggcaagaagaagtacgagaccgagttc

SEQ ID NO: 41658 - RNA, 27 nt, synthetic construct
  misc_feature 1..27: note = Barrier-to-autointegration factor (31-39)
  source 1..27: mol_type = other RNA
ggcaagaagctggaggagcgcgggttc

SEQ ID NO: 41659 - RNA, 27 nt, synthetic construct
  misc_feature 1..27: note = Amyloid protein-binding protein 2 (502-510)
  source 1..27: mol_type = other RNA
ggcaagaagctgttcggggagggctac

SEQ ID NO: 41660 - RNA, 27 nt, synthetic construct
  misc_feature 1..27: note = C-1-tetrahydrofolate synthase, cytoplasmic (332-340)
  source 1..27: mol_type = other RNA
ggcaagctggcccgcgagatcgggctc

SEQ ID NO: 41661 - RNA, 27 nt, synthetic construct
  misc_feature 1..27: note = Sterol regulatory element-binding protein 2 (730-738)
  source 1..27: mol_type = other RNA
ggcaagctggggttcctcgccagctac

SEQ ID NO: 41662 - RNA, 30 nt, synthetic construct
  misc_feature 1..30: note = T-cell-specific surfaceoprotein CD28 (88-97)
  source 1..30: mol_type = other RNA
ggcaagctggggaacgagagcgtgaccttc

SEQ ID NO: 41663 - RNA, 33 nt, synthetic construct
  misc_feature 1..33: note = T-cell-specific surfaceoprotein CD28 (88-98)
  source 1..33: mol_type = other RNA
ggcaagctggggaacgagagcgtgaccttctac

SEQ ID NO: 41664 - RNA, 27 nt, synthetic construct
  misc_feature 1..27: note = Guanine nucleotide-binding protein G(I)/G(S)/G(T) subunit beta-1 (77-85)
  source 1..27: mol_type = other RNA
ggcaagctgatcatctgggacagctac

SEQ ID NO: 41665 - RNA, 24 nt, synthetic construct
  misc_feature 1..24: note = Sterile alpha motif domain-containing protein 9-like (1531-1538)
  source 1..24: mol_type = other RNA
ggcaagctgatcagcgtggagtac

SEQ ID NO: 41666 - RNA, 27 nt, synthetic construct
  misc_feature 1..27: note = RNA-binding protein FUS (331-339)
  source 1..27: mol_type = other RNA
ggcaagctgaagggggaggccaccgtg

SEQ ID NO: 41667 - RNA, 27 nt, synthetic construct
  misc_feature 1..27: note = Hydroxysteroid dehydrogenase-like protein 2 (382-390)
  source 1..27: mol_type = other RNA
ggcaagctgaagcccaccatggccttc

SEQ ID NO: 41668 - RNA, 27 nt, synthetic construct
  misc_feature 1..27: note = Endoplasmic reticulum-Golgi intermediate compartment protein 3 (5-13)
  source 1..27: mol_type = other RNA
ggcaagctgaagcagttcgacgcctac

SEQ ID NO: 41669 - RNA, 27 nt, synthetic construct
  misc_feature 1..27: note = Tripartite motif-containing protein 26 (302-310)
  source 1..27: mol_type = other RNA
ggcaagctgctccgcgacctggagtac

SEQ ID NO: 41670 - RNA, 30 nt, synthetic construct
  misc_feature 1..30: note = Protein PRRC2A (1913-1922)
  source 1..30: mol_type = other RNA
ggcaagctgcccgccgggggcgtgctctac

SEQ ID NO: 41671 - RNA, 27 nt, synthetic construct
  misc_feature 1..27: note = RRP12-like protein (5-13)
  source 1..27: mol_type = other RNA
ggcaagctgcccagcggggtgtccgcc

SEQ ID NO: 41672 - RNA, 24 nt, synthetic construct
  misc_feature 1..24: note = Proteasome subunit alpha type-2 (17-24)
  source 1..24: mol_type = other RNA
ggcaagctggtgcagatcgagtac

SEQ ID NO: 41673 - RNA, 27 nt, synthetic construct
  misc_feature 1..27: note = Pre-mRNA-processing-splicing factor 8 (1462-1470)
  source 1..27: mol_type = other RNA
ggcaagctgtggaacctcaacaactac

SEQ ID NO: 41674 - RNA, 27 nt, synthetic construct
  misc_feature 1..27: note = Non-specific lipid-transfer protein (510-518)
  source 1..27: mol_type = other RNA
ggcaagatgaacccccagagcgccttc

SEQ ID NO: 41675 - RNA, 27 nt, synthetic construct
  misc_feature 1..27: note = Vitamin D 25-hydroxylase (287-295)
  source 1..27: mol_type = other RNA
ggcaagaacgaccccagctccaccttc

SEQ ID NO: 41676 - RNA, 27 nt, synthetic construct
  misc_feature 1..27: note = FACT complex subunit SSRP1 (142-150)
  source 1..27: mol_type = other RNA
ggcaagaacgaggtgaccctggagttc

SEQ ID NO: 41677 - RNA, 27 nt, synthetic construct
  misc_feature 1..27: note = Protein disulfide-isomerase A2 (395-403)
  source 1..27: mol_type = other RNA
ggcaagaacttcgagcaggtggccttc

SEQ ID NO: 41678 - RNA, 27 nt, synthetic construct
  misc_feature 1..27: note = Embigin (163-171)
  source 1..27: mol_type = other RNA
ggcaagaacaagcccctgatcagctac

SEQ ID NO: 41679 - RNA, 27 nt, synthetic construct
  misc_feature 1..27: note = Pre-mRNA-splicing factor SLU7 (301-309)
  source 1..27: mol_type = other RNA
ggcaagaaccccgacgaggtgagctac

SEQ ID NO: 41680 - RNA, 30 nt, synthetic construct
  misc_feature 1..30: note = Cell cycle control protein 50A (320-329)
  source 1..30: mol_type = other RNA
ggcaagaaccccttcctggggatcgcctac

SEQ ID NO: 41681 - RNA, 27 nt, synthetic construct
  misc_feature 1..27: note = WD repeat-containing protein 75 (353-361)
  source 1..27: mol_type = other RNA
ggcaagcccgggcacctgcagttctac

SEQ ID NO: 41682 - RNA, 30 nt, synthetic construct
  misc_feature 1..30: note = Aurora kinase A (325-334)
  source 1..30: mol_type = other RNA
ggcaagcccccgttcgaggccaacacctac

SEQ ID NO: 41683 - RNA, 27 nt, synthetic construct
  misc_feature 1..27: note = Filamin-B (863-871)
  source 1..27: mol_type = other RNA
ggcaagcccacccacttcaccgtgtac

SEQ ID NO: 41684 - RNA, 27 nt, synthetic construct
  misc_feature 1..27: note = Dual specificity protein phosphatase 5 (162-170)
  source 1..27: mol_type = other RNA
ggcaagcccgtggtcaacgtgagctac

SEQ ID NO: 41685 - RNA, 27 nt, synthetic construct
  misc_feature 1..27: note = Actin-like protein 6A (61-69)
  source 1..27: mol_type = other RNA
ggcaagcaggggggccccacctactac

SEQ ID NO: 41686 - RNA, 30 nt, synthetic construct
  misc_feature 1..30: note = F-box only protein 21 (396-405)
  source 1..30: mol_type = other RNA
ggcaagcgcgaggggatcgaccagagctac

SEQ ID NO: 41687 - RNA, 27 nt, synthetic construct
  misc_feature 1..27: note = Probable ATP-dependent RNA helicase DDX5 (500-508)
  source 1..27: mol_type = other RNA
ggcaagcgcgggggcttcaacaccttc

SEQ ID NO: 41688 - RNA, 27 nt, synthetic construct
  misc_feature 1..27: note = Hydroxymethylglutaryl-CoA synthase, cytoplasmic (367-375)
  source 1..27: mol_type = other RNA
ggcaagcgcatcggggtgttcagctac

SEQ ID NO: 41689 - RNA, 27 nt, synthetic construct
  misc_feature 1..27: note = Protein S100-A4 (47-55)
  source 1..27: mol_type = other RNA
ggcaagcgcaccgacgaggccgccttc

SEQ ID NO: 41690 - RNA, 27 nt, synthetic construct
  misc_feature 1..27: note = Cell cycle progression protein 1 (410-418)
  source 1..27: mol_type = other RNA
ggcaagagcgactcccccaacgtgtac

SEQ ID NO: 41691 - RNA, 27 nt, synthetic construct
  misc_feature 1..27: note = C-myc promoter-binding protein (1422-1430)
  source 1..27: mol_type = other RNA
ggcaagagcgaggtgacctccagcttc

SEQ ID NO: 41692 - RNA, 27 nt, synthetic construct
  misc_feature 1..27: note = Zinc finger protein 213 (379-387)
  source 1..27: mol_type = other RNA
ggcaagagcttctcccgcagcgcctac

SEQ ID NO: 41693 - RNA, 27 nt, synthetic construct
  misc_feature 1..27: note = Zinc finger protein 557 (403-411)
  source 1..27: mol_type = other RNA
ggcaagagcttcacctccaacagctac

SEQ ID NO: 41694 - RNA, 27 nt, synthetic construct
  misc_feature 1..27: note = Nuclear receptor corepressor 1 (1214-1222)
  source 1..27: mol_type = other RNA
ggcaagagcgggcacatcctgtcctac

SEQ ID NO: 41695 - RNA, 33 nt, synthetic construct
  misc_feature 1..33: note = Polyadenylate-binding protein 1 (228-238)
  source 1..33: mol_type = other RNA
ggcaagagcaaggggttcggcttcgtgtccttc

SEQ ID NO: 41696 - RNA, 27 nt, synthetic construct
  misc_feature 1..27: note = Constitutive coactivator of PPAR-gamma-like protein 1 (209-217)
  source 1..27: mol_type = other RNA
ggcaagagcctgaccacctcccagtac

SEQ ID NO: 41697 - RNA, 30 nt, synthetic construct
  misc_feature 1..30: note = Heterogeneous nuclear ribonucleoprotein U (185-194)
  source 1..30: mol_type = other RNA
ggcaagagctccgggcccaccagcctgttc

SEQ ID NO: 41698 - RNA, 33 nt, synthetic construct
  misc_feature 1..33: note = Elongation factor 1-alpha 1 (19-29)
  source 1..33: mol_type = other RNA
ggcaagagcaccaccacggggcacctgatctac

SEQ ID NO: 41699 - RNA, 27 nt, synthetic construct
  misc_feature 1..27: note = Zinc finger protein 845 (333-341)
  source 1..27: mol_type = other RNA
ggcaagaccttcagccagacctcctac

SEQ ID NO: 41700 - RNA, 30 nt, synthetic construct
  misc_feature 1..30: note = Sodium-coupled neutral amino acid transporter 5 (46-55)
  source 1..30: mol_type = other RNA
ggcaagaccagcttcgggatgtccgtgttc

SEQ ID NO: 41701 - RNA, 27 nt, synthetic construct
  misc_feature 1..27: note = Ras-related protein Rab-6A (25-33)
  source 1..27: mol_type = other RNA
ggcaagaccagcctgatcacccgcttc

SEQ ID NO: 41702 - RNA, 27 nt, synthetic construct
  misc_feature 1..27: note = ATP-dependent RNA helicase DHX8 (593-601)
  source 1..27: mol_type = other RNA
ggcaagaccacccagatcacgcagtac

SEQ ID NO: 41703 - RNA, 27 nt, synthetic construct
  misc_feature 1..27: note = Pre-mRNA-splicing factor ATP-dependent RNA helicase PRP16 (560-568)
  source 1..27: mol_type = other RNA
ggcaagaccacccagctgacgcagtac

SEQ ID NO: 41704 - RNA, 27 nt, synthetic construct
  misc_feature 1..27: note = ATP-dependent RNA helicase DHX36 (235-243)
  source 1..27: mol_type = other RNA
ggcaagaccacccaggtgacgcagttc

SEQ ID NO: 41705 - RNA, 27 nt, synthetic construct
  misc_feature 1..27: note = Adenosylhomocysteinase (213-221)
  source 1..27: mol_type = other RNA
ggcaaggtggccgtcgtggccgggtac

SEQ ID NO: 41706 - RNA, 27 nt, synthetic construct
  misc_feature 1..27: note = Major facilitator superfamily domain-containing protein 1 (287-295)
  source 1..27: mol_type = other RNA
ggcaaggtgttcttcaccgagaagttc

SEQ ID NO: 41707 - RNA, 27 nt, synthetic construct
  misc_feature 1..27: note = Zinc finger protein 264 (349-357)
  source 1..27: mol_type = other RNA
ggcaaggtgttcaagcaccgcagctac

SEQ ID NO: 41708 - RNA, 27 nt, synthetic construct
  misc_feature 1..27: note = DNA polymerase delta catalytic subunit (997-1005)
  source 1..27: mol_type = other RNA
ggcaaggtggggggcctgctcgccttc

SEQ ID NO: 41709 - RNA, 33 nt, synthetic construct
  misc_feature 1..33: note = Estradiol 17-beta-dehydrogenase 8 (159-169)
  source 1..33: mol_type = other RNA
ggcaaggtggggaacgtcggccagaccaactac

SEQ ID NO: 41710 - RNA, 30 nt, synthetic construct
  misc_feature 1..30: note = WD repeat domain phosphoinositide-interacting protein 4 (281-290)
  source 1..30: mol_type = other RNA
ggcaaggtggggcccatgatcggccagtac

SEQ ID NO: 41711 - RNA, 27 nt, synthetic construct
  misc_feature 1..27: note = Dual specificity protein phosphatase 16 (647-655)
  source 1..27: mol_type = other RNA
ggcaaggtggggagccagtccagcttc

SEQ ID NO: 41712 - RNA, 27 nt, synthetic construct
  misc_feature 1..27: note = Protein lin-7 homolog C (165-173)
  source 1..27: mol_type = other RNA
ggcaaggtgaagctggtcgtgcgctac

SEQ ID NO: 41713 - RNA, 27 nt, synthetic construct
  misc_feature 1..27: note = Apoptosis-associated speck-like protein containing a CARD (138-146)
  source 1..27: mol_type = other RNA
ggcaaggtgctgaccgacgagcagtac

SEQ ID NO: 41714 - RNA, 27 nt, synthetic construct
  misc_feature 1..27: note = E3 ubiquitin-protein ligase synoviolin (58-66)
  source 1..27: mol_type = other RNA
ggcaaggtgatggggaaggtcttcttc

SEQ ID NO: 41715 - RNA, 27 nt, synthetic construct
  misc_feature 1..27: note = Poly (ADP-ribose) polymerase 1 (46-54)
  source 1..27: mol_type = other RNA
ggcaaggtgccccactggtaccacttc

SEQ ID NO: 41716 - RNA, 27 nt, synthetic construct
  misc_feature 1..27: note = DNA-directed RNA polymerase II subunit RPB1 (572-580)
  source 1..27: mol_type = other RNA
ggcaaggtgccccagccggccatcctg

SEQ ID NO: 41717 - RNA, 27 nt, synthetic construct
  misc_feature 1..27: note = Nucleolar complex protein 2 homolog (575-583)
  source 1..27: mol_type = other RNA
ggcaaggtgcaggagaacagcgcctac

SEQ ID NO: 41718 - RNA, 33 nt, synthetic construct
  misc_feature 1..33: note = Major vault protein (396-406)
  source 1..33: mol_type = other RNA
ggcaaggtgcgcgccgtcatcgggagcacctac

SEQ ID NO: 41719 - RNA, 27 nt, synthetic construct
  misc_feature 1..27: note = 40S ribosomal protein S4, X isoform (74-82)
  source 1..27: mol_type = other RNA
ggcaaggtgcgcaccgacatcacctac

SEQ ID NO: 41720 - RNA, 27 nt, synthetic construct
  misc_feature 1..27: note = 40S ribosomal protein S4, Y isoform 1 (74-82)
  source 1..27: mol_type = other RNA
ggcaaggtgcgcgtcgacgtgacctac

SEQ ID NO: 41721 - RNA, 27 nt, synthetic construct
  misc_feature 1..27: note = ATP-dependent RNA helicase DHX8 (270-278)
  source 1..27: mol_type = other RNA
ggcaaggtgaccagcatcatgcagttc

SEQ ID NO: 41722 - RNA, 27 nt, synthetic construct
  misc_feature 1..27: note = G2/mitotic-specific cyclin-B2 (323-331)
  source 1..27: mol_type = other RNA
ggcaagtggaacctgaagcagcagtac

SEQ ID NO: 41723 - RNA, 27 nt, synthetic construct
  misc_feature 1..27: note = Transcription initiation factor IIE subunit beta (135-143)
  source 1..27: mol_type = other RNA
ggcaagtacgccttcaagcccaagtac

SEQ ID NO: 41724 - RNA, 27 nt, synthetic construct
  misc_feature 1..27: note = Interferon-induced protein 44 (72-80)
  source 1..27: mol_type = other RNA
ggcaagtacgccagcatcatcctgttc

SEQ ID NO: 41725 - RNA, 27 nt, synthetic construct
  misc_feature 1..27: note = WD repeat-containing protein 44 (704-712)
  source 1..27: mol_type = other RNA
ggcaagtacgccgtgatcgggacctac

SEQ ID NO: 41726 - RNA, 27 nt, synthetic construct
  misc_feature 1..27: note = Kinesin light chain 1 (353-361)
  source 1..27: mol_type = other RNA
ggcaagtacgaggaggtggagtactac

SEQ ID NO: 41727 - RNA, 27 nt, synthetic construct
  misc_feature 1..27: note = Transketolase (139-147)
  source 1..27: mol_type = other RNA
ggcaagtacttcgacaaggccagctac

SEQ ID NO: 41728 - RNA, 27 nt, synthetic construct
  misc_feature 1..27: note = Golgi pH regulator A (283-291)
  source 1..27: mol_type = other RNA
ggcaagtacttcaacttcctggggtac

SEQ ID NO: 41729 - RNA, 33 nt, synthetic construct
  misc_feature 1..33: note = Ethanolamine kinase 1 (257-267)
  source 1..33: mol_type = other RNA
ggcaagtacttcagcctgatccccaccgggttc

SEQ ID NO: 41730 - RNA, 36 nt, synthetic construct
  misc_feature 1..36: note = Solute carrier family 35 member B1 (38-49)
  source 1..36: mol_type = other RNA
ggcaagtacggggagggcgccaagcaggagaccttc

SEQ ID NO: 41731 - RNA, 33 nt, synthetic construct
  misc_feature 1..33: note = Phosphatidylinositol 3-kinase regulatory subunit alpha (388-398)
  source 1..33: mol_type = other RNA
ggcaagtacgggttcagcgaccccctgaccttc

SEQ ID NO: 41732 - RNA, 27 nt, synthetic construct
  misc_feature 1..27: note = DNA-directed RNA polymerase II subunit RPB7 (40-48)
  source 1..27: mol_type = other RNA
ggcaagtacgggttcgtgatcgccgtc

SEQ ID NO: 41733 - RNA, 27 nt, synthetic construct
  misc_feature 1..27: note = Neutral amino acid transporter A (295-303)
  source 1..27: mol_type = other RNA
ggcaagtacatcttcgccagcatcctg

SEQ ID NO: 41734 - RNA, 27 nt, synthetic construct
  misc_feature 1..27: note = ER membrane protein complex subunit 3 (65-73)
  source 1..27: mol_type = other RNA
ggcaagtacatccccaagcagagcttc

SEQ ID NO: 41735 - RNA, 30 nt, synthetic construct
  misc_feature 1..30: note = Protein phosphatase 1K, mitochondrial (350-359)
  source 1..30: mol_type = other RNA
ggcaagtacaagaacagcgagatcaacttc

SEQ ID NO: 41736 - RNA, 30 nt, synthetic construct
  misc_feature 1..30: note = Peptidyl-prolyl cis-trans isomerase FKBP4 (284-293)
  source 1..30: mol_type = other RNA
ggcaagtacaagcaggccctgctccagtac

SEQ ID NO: 41737 - RNA, 27 nt, synthetic construct
  misc_feature 1..27: note = Protein transport protein Sec31A (487-495)
  source 1..27: mol_type = other RNA
ggcaagtacctggagctcctggggtac

SEQ ID NO: 41738 - RNA, 27 nt, synthetic construct
  misc_feature 1..27: note = Catalase (272-280)
  source 1..27: mol_type = other RNA
ggcaagtaccccagctggaccttctac

SEQ ID NO: 41739 - RNA, 27 nt, synthetic construct
  misc_feature 1..27: note = Transmembrane protein 222 (176-184)
  source 1..27: mol_type = other RNA
ggcaagtacgtgagcgtcggggccttc

SEQ ID NO: 41740 - RNA, 27 nt, synthetic construct
  misc_feature 1..27: note = 5'-nucleotidase domain-containing protein 1 (122-130)
  source 1..27: mol_type = other RNA
ggcaagtactacttctacgacaactac

SEQ ID NO: 41741 - RNA, 24 nt, synthetic construct
  misc_feature 1..24: note = Plasmalemma vesicle-associated protein (2-9)
  source 1..24: mol_type = other RNA
ggcctggccatggagcacgggggc

SEQ ID NO: 41742 - RNA, 27 nt, synthetic construct
  misc_feature 1..27: note = DC-STAMP domain-containing protein 2 (243-251)
  source 1..27: mol_type = other RNA
ggcctggccagcctcgtgcaggtcttc

SEQ ID NO: 41743 - RNA, 24 nt, synthetic construct
  misc_feature 1..24: note = Protein sel-1 homolog 3 (550-557)
  source 1..24: mol_type = other RNA
ggcctgcaccagatcagctccatc

SEQ ID NO: 41744 - RNA, 27 nt, synthetic construct
  misc_feature 1..27: note = 40S ribosomal protein S3a (61-69)
  source 1..27: mol_type = other RNA
ggcctgaaggggcgcgtgttcgaggtc

SEQ ID NO: 41745 - RNA, 27 nt, synthetic construct
  misc_feature 1..27: note = Integrin beta-7 (317-325)
  source 1..27: mol_type = other RNA
ggcctgtacagccgctccaccgagttc

SEQ ID NO: 41746 - RNA, 33 nt, synthetic construct
  misc_feature 1..33: note = Solute carrier family 25 member 46 (162-172)
  source 1..33: mol_type = other RNA
ggcatggggagcaccttcatcgtgcagggcgtc

SEQ ID NO: 41747 - RNA, 27 nt, synthetic construct
  misc_feature 1..27: note = DNA damage-binding protein 1 (56-64)
  source 1..27: mol_type = other RNA
ggcatgtacgggaagatcgccgtgatg

SEQ ID NO: 41748 - RNA, 27 nt, synthetic construct
  misc_feature 1..27: note = 60S ribosomal protein L8 (131-139)
  source 1..27: mol_type = other RNA
ggcaactacgccaccgtgatcagccac

SEQ ID NO: 41749 - RNA, 27 nt, synthetic construct
  misc_feature 1..27: note = Huntingtin (77-85)
  source 1..27: mol_type = other RNA
ggccccgccgtggccgaggagccgctg

SEQ ID NO: 41750 - RNA, 27 nt, synthetic construct
  misc_feature 1..27: note = Salivary acidic proline-rich phosphoprotein 1/2 (83-91)
  source 1..27: mol_type = other RNA
ggccccccgcccccccaggggaagccc

SEQ ID NO: 41751 - RNA, 33 nt, synthetic construct
  misc_feature 1..33: note = Basic salivary proline-rich protein 2 (59-69)
  source 1..33: mol_type = other RNA
ggccccccgccccaggggggcaaccagccccag

SEQ ID NO: 41752 - RNA, 33 nt, synthetic construct
  misc_feature 1..33: note = Basic salivary proline-rich protein 4 (248-258)
  source 1..33: mol_type = other RNA
ggccccccgcagcaggaggggaacaagccccag

SEQ ID NO: 41753 - RNA, 33 nt, synthetic construct
  misc_feature 1..33: note = Basic salivary proline-rich protein 2 (368-378)
  source 1..33: mol_type = other RNA
ggccccccgcagcaggaggggaacaacccccag

SEQ ID NO: 41754 - RNA, 27 nt, synthetic construct
  misc_feature 1..27: note = Ig kappa chain V-I region WAT (41-49)
  source 1..27: mol_type = other RNA
ggccaggcccccaaggtgctgatctac

SEQ ID NO: 41755 - RNA, 30 nt, synthetic construct
  misc_feature 1..30: note = Thioredoxin domain-containing protein 5 (57-66)
  source 1..30: mol_type = other RNA
ggccaggacccccacagcaagcacctgtac

SEQ ID NO: 41756 - RNA, 27 nt, synthetic construct
  misc_feature 1..27: note = Protein FAM179B (288-296)
  source 1..27: mol_type = other RNA
ggccaggaccgcttccagagctacatc

SEQ ID NO: 41757 - RNA, 27 nt, synthetic construct
  misc_feature 1..27: note = Nucleosome-remodeling factor subunit BPTF (843-851)
  source 1..27: mol_type = other RNA
ggccaggaggggaagtaccgcgtgtac

SEQ ID NO: 41758 - RNA, 27 nt, synthetic construct
  misc_feature 1..27: note = Rho GTPase-activating protein 1 (183-191)
  source 1..27: mol_type = other RNA
ggccagaagatcttctacgtgaactac

SEQ ID NO: 41759 - RNA, 27 nt, synthetic construct
  misc_feature 1..27: note = Endoplasmic reticulum lectin 1 (141-149)
  source 1..27: mol_type = other RNA
ggccagaagatcaacatccacgagtac

SEQ ID NO: 41760 - RNA, 27 nt, synthetic construct
  misc_feature 1..27: note = Chromodomain-helicase-DNA-binding protein 2 (905-913)
  source 1..27: mol_type = other RNA
ggccagaagaagcaggtgaacatctac

SEQ ID NO: 41761 - RNA, 27 nt, synthetic construct
  misc_feature 1..27: note = Immunoglobulin superfamily member 10 (2429-2437)
  source 1..27: mol_type = other RNA
ggccagaagcccgtgatcctgacctac

SEQ ID NO: 41762 - RNA, 27 nt, synthetic construct
  misc_feature 1..27: note = Fibronectin (679-687)
  source 1..27: mol_type = other RNA
ggccagctgatcagcatccagcagtac

SEQ ID NO: 41763 - RNA, 27 nt, synthetic construct
  misc_feature 1..27: note = Lysine-specific demethylase 4B (78-86)
  source 1..27: mol_type = other RNA
ggccagagcgggctgttcacccagtac

SEQ ID NO: 41764 - RNA, 27 nt, synthetic construct
  misc_feature 1..27: note = FERM domain-containing protein 3 (200-208)
  source 1..27: mol_type = other RNA
ggccagagccccccggtggccgagttc

SEQ ID NO: 41765 - RNA, 27 nt, synthetic construct
  misc_feature 1..27: note = RNA-binding protein EWS (62-70)
  source 1..27: mol_type = other RNA
ggccagaccgcctacgccaccagctac

SEQ ID NO: 41766 - RNA, 24 nt, synthetic construct
  misc_feature 1..24: note = Guanine nucleotide-binding protein subunit beta-2-like 1 (295-302)
  source 1..24: mol_type = other RNA
ggccagaccctgttcgccgggtac

SEQ ID NO: 41767 - RNA, 27 nt, synthetic construct
  misc_feature 1..27: note = Protein ELYS (807-815)
  source 1..27: mol_type = other RNA
ggccaggtgaagctgatccaggggttc

SEQ ID NO: 41768 - RNA, 27 nt, synthetic construct
  misc_feature 1..27: note = Zinc finger protein 507 (577-585)
  source 1..27: mol_type = other RNA
ggccaggtgaagaccgggatcagcatg

SEQ ID NO: 41769 - RNA, 30 nt, synthetic construct
  misc_feature 1..30: note = Probable ATP-dependent RNA helicase DDX17 (631-640)
  source 1..30: mol_type = other RNA
ggccagtacacctacgggcagggcacctac

SEQ ID NO: 41770 - RNA, 27 nt, synthetic construct
  misc_feature 1..27: note = LanC-like protein 1 (154-162)
  source 1..27: mol_type = other RNA
ggccgcatcgggtacatctacgccctg

SEQ ID NO: 41771 - RNA, 27 nt, synthetic construct
  misc_feature 1..27: note = Gamma-interferon-inducible protein 16 (464-472)
  source 1..27: mol_type = other RNA
ggcagccacttccccgggccgttcatg

SEQ ID NO: 41772 - RNA, 27 nt, synthetic construct
  misc_feature 1..27: note = NADH dehydrogenase (ubiquinone) 1 alpha subcomplex subunit 8 (164-172)
  source 1..27: mol_type = other RNA
ggcagccgcttctacttctggaccaag

SEQ ID NO: 41773 - RNA, 27 nt, synthetic construct
  misc_feature 1..27: note = Proteasome subunit beta type-4 (73-81)
  source 1..27: mol_type = other RNA
ggcagctacgggtccctggcccgcttc

SEQ ID NO: 41774 - RNA, 30 nt, synthetic construct
  misc_feature 1..30: note = Egl nine homolog 2 (272-281)
  source 1..30: mol_type = other RNA
ggcagctacgtgatcaacgggcgcaccaag

SEQ ID NO: 41775 - RNA, 27 nt, synthetic construct
  misc_feature 1..27: note = Olfactory receptor 8I2 (193-201)
  source 1..27: mol_type = other RNA
ggcaccgagatggtgagcttcgtcctg

SEQ ID NO: 41776 - RNA, 27 nt, synthetic construct
  misc_feature 1..27: note = Dual adapter for phosphotyrosine and 3-phosphotyrosine and 3-phosphoinositide (165-173)
  source 1..27: mol_type = other RNA
ggcaccaaggaggggtacctgaccaag

SEQ ID NO: 41777 - RNA, 27 nt, synthetic construct
  misc_feature 1..27: note = Large proline-rich protein BAG6 (391-399)
  source 1..27: mol_type = other RNA
ggcacccgccccccgcccacccccaac

SEQ ID NO: 41778 - RNA, 27 nt, synthetic construct
  misc_feature 1..27: note = Splicing factor 3A subunit 2 (300-308)
  source 1..27: mol_type = other RNA
ggcgtgcaccccccggcccccggggtc

SEQ ID NO: 41779 - RNA, 27 nt, synthetic construct
  misc_feature 1..27: note = Centrosomal protein of 76 kDa (224-232)
  source 1..27: mol_type = other RNA
ggcgtgaccagcctgaccgtcgagctc

SEQ ID NO: 41780 - RNA, 27 nt, synthetic construct
  misc_feature 1..27: note = Programmed cell death 6-interacting protein (279-287)
  source 1..27: mol_type = other RNA
cacgccgccgagctgatcaagaccgtg

SEQ ID NO: 41781 - RNA, 27 nt, synthetic construct
  misc_feature 1..27: note = UDP-glucose:glycoprotein glucosyltransferase 1 (566-574)
  source 1..27: mol_type = other RNA
cacgccttccagaccctgacccacatc

SEQ ID NO: 41782 - RNA, 27 nt, synthetic construct
  misc_feature 1..27: note = Methionine synthase (601-609)
  source 1..27: mol_type = other RNA
cacgccatcaagagcggcatggacatg

SEQ ID NO: 41783 - RNA, 27 nt, synthetic construct
  misc_feature 1..27: note = KH domain-containing, RNA-binding, signal transduction-associated protein 1 (246-254)
  source 1..27: mol_type = other RNA
cacgccatggaggaggtgaagaagttc

SEQ ID NO: 41784 - RNA, 27 nt, synthetic construct
  misc_feature 1..27: note = Dynein heavy chain 6, axonemal (1387-1395)
  source 1..27: mol_type = other RNA
cacgcccgcgacatcgtgaccgagctg

SEQ ID NO: 41785 - RNA, 24 nt, synthetic construct
  misc_feature 1..24: note = Putative sodium-coupled neutral amino acid transporter 10 (698-705)
  source 1..24: mol_type = other RNA
cacgccgtgctgctccaggtcatc

SEQ ID NO: 41786 - RNA, 33 nt, synthetic construct
  misc_feature 1..33: note = HLA class I histocompatibility antigen, A-30 alpha chain (140-150)
  source 1..33: mol_type = other RNA
cacgcctacgacggcaaggactacatcgccctg

SEQ ID NO: 41787 - RNA, 24 nt, synthetic construct
  misc_feature 1..24: note = Tryptophan 2,3-dioxygenase (67-74)
  source 1..24: mol_type = other RNA
cacgacgagcacctgttcatcatc

SEQ ID NO: 41788 - RNA, 24 nt, synthetic construct
  misc_feature 1..24: note = G1/S-specific cyclin-D2 (157-164)
  source 1..24: mol_type = other RNA
cacgacttcatcgagcacatcctg

SEQ ID NO: 41789 - RNA, 27 nt, synthetic construct
  misc_feature 1..27: note = Splicing factor, proline- and glutamine-rich (29-37)
  source 1..27: mol_type = other RNA
cacgacttccgcagccccccgcccggc

SEQ ID NO: 41790 - RNA, 27 nt, synthetic construct
  misc_feature 1..27: note = MKL/myocardin-like protein 1 (831-839)
  source 1..27: mol_type = other RNA
cacgacggccccgagccgctgagcctc

SEQ ID NO: 41791 - RNA, 27 nt, synthetic construct
  misc_feature 1..27: note = Rho guanine nucleotide exchange factor 5 (1170-1178)
  source 1..27: mol_type = other RNA
cacgaggaccagaagctgcaggaggtg

SEQ ID NO: 41792 - RNA, 33 nt, synthetic construct
  misc_feature 1..33: note = Dedicator of cytokinesis protein 9 (933-943)
  source 1..33: mol_type = other RNA
cacgaggagctgaccaagagcatgaccacgatc

SEQ ID NO: 41793 - RNA, 27 nt, synthetic construct
  misc_feature 1..27: note = Protein phosphatase 2C-like domain-containing protein 1 (71-79)
  source 1..27: mol_type = other RNA
cacgagatcgacctgaccggcatcttc

SEQ ID NO: 41794 - RNA, 30 nt, synthetic construct
  misc_feature 1..30: note = Histatin-3 (34-43)
  source 1..30: mol_type = other RNA
cacgagaagcaccacagccaccgcggctac

SEQ ID NO: 41795 - RNA, 27 nt, synthetic construct
  misc_feature 1..27: note = Protocadherin-9 (1071-1079)
  source 1..27: mol_type = other RNA
cacgagcccgtgggcagcgggaccctg

SEQ ID NO: 41796 - RNA, 27 nt, synthetic construct
  misc_feature 1..27: note = 60S ribosomal protein L36a-like (90-98)
  source 1..27: mol_type = other RNA
cacttcgagctgggcggggacaagaag

SEQ ID NO: 41797 - RNA, 33 nt, synthetic construct
  misc_feature 1..33: note = Cancer/testis antigen 47A (120-130)
  source 1..33: mol_type = other RNA
cacttcgtgctgctcgacatggtccacagcctg

SEQ ID NO: 41798 - RNA, 30 nt, synthetic construct
  misc_feature 1..30: note = Neuroblast differentiation-associated protein AHNAK (5535-5544)
  source 1..30: mol_type = other RNA
cacggcgccgcccccgacatcagcgtgaag

SEQ ID NO: 41799 - RNA, 24 nt, synthetic construct
  misc_feature 1..24: note = Centrosomal protein of 97 kDa (154-161)
  source 1..24: mol_type = other RNA
cacggcaacatcatcaccagcctg

SEQ ID NO: 41800 - RNA, 27 nt, synthetic construct
  misc_feature 1..27: note = Ubiquitin carboxyl-terminal hydrolase 19 (562-570)
  source 1..27: mol_type = other RNA
caccacgccttccagcccagcaagctg

SEQ ID NO: 41801 - RNA, 24 nt, synthetic construct
  misc_feature 1..24: note = E3 SUMO-protein ligase CBX4 (399-406)
  source 1..24: mol_type = other RNA
caccacgccgtgggcctgaacctc

SEQ ID NO: 41802 - RNA, 30 nt, synthetic construct
  misc_feature 1..30: note = Thyroid hormone receptor-associated protein 3 (641-650)
  source 1..30: mol_type = other RNA
caccacttcggcagctccgggatgaccctg

SEQ ID NO: 41803 - RNA, 27 nt, synthetic construct
  misc_feature 1..27: note = Beta-galactoside alpha-2,6-sialyltransferase 2 (354-362)
  source 1..27: mol_type = other RNA
caccacttcatcgacagctccctgtac

SEQ ID NO: 41804 - RNA, 27 nt, synthetic construct
  misc_feature 1..27: note = Protein virilizer homolog (679-687)
  source 1..27: mol_type = other RNA
caccacttcctggagctcgtgaccctg

SEQ ID NO: 41805 - RNA, 24 nt, synthetic construct
  misc_feature 1..24: note = L-aminoadipate-semialdehyde dehydrogenase-phosphopantetheinyl transferase (238-245)
  source 1..24: mol_type = other RNA
caccacttcgtggccgtcgccctg

SEQ ID NO: 41806 - RNA, 27 nt, synthetic construct
  misc_feature 1..27: note = PCNA-interacting partner (385-393)
  source 1..27: mol_type = other RNA
caccacggcaccagcatcctgaccctc

SEQ ID NO: 41807 - RNA, 27 nt, synthetic construct
  misc_feature 1..27: note = E3 SUMO-protein ligase CBX4 (398-406)
  source 1..27: mol_type = other RNA
caccaccacgccgtgggcctgaacctc

SEQ ID NO: 41808 - RNA, 27 nt, synthetic construct
  misc_feature 1..27: note = Transcriptional repressor protein YY1 (76-84)
  source 1..27: mol_type = other RNA
caccaccaccaccaccccccgatgatc

SEQ ID NO: 41809 - RNA, 30 nt, synthetic construct
  misc_feature 1..30: note = Histone deacetylase complex subunit SAP130 (202-211)
  source 1..30: mol_type = other RNA
caccacatcatgaccaccaacgtgcagatg

SEQ ID NO: 41810 - RNA, 30 nt, synthetic construct
  misc_feature 1..30: note = Vacuolar protein sorting-associated protein 11 homolog (554-563)
  source 1..30: mol_type = other RNA
caccacatccccgagcagaccacccagctg

SEQ ID NO: 41811 - RNA, 24 nt, synthetic construct
  misc_feature 1..24: note = Drebrin-like protein (362-369)
  source 1..24: mol_type = other RNA
caccacatccagggccaggggctg

SEQ ID NO: 41812 - RNA, 27 nt, synthetic construct
  misc_feature 1..27: note = Protein PRRC2B (1834-1842)
  source 1..27: mol_type = other RNA
caccacatccagcgcgccatcggcctg

SEQ ID NO: 41813 - RNA, 27 nt, synthetic construct
  misc_feature 1..27: note = Fructose-bisphosphate aldolase A (220-228)
  source 1..27: mol_type = other RNA
caccacatctacctggagggcaccctc

SEQ ID NO: 41814 - RNA, 27 nt, synthetic construct
  misc_feature 1..27: note = Queuine tRNA-ribosyltransferase subunit QTRTD1 (365-373)
  source 1..27: mol_type = other RNA
caccacctgctcgtgaccaacgagctg

SEQ ID NO: 41815 - RNA, 27 nt, synthetic construct
  misc_feature 1..27: note = MMS19 nucleotide excision repair protein homolog (102-110)
  source 1..27: mol_type = other RNA
caccacctggtgatccccagcgtcctc

SEQ ID NO: 41816 - RNA, 27 nt, synthetic construct
  misc_feature 1..27: note = Transcription factor ETV6 (170-178)
  source 1..27: mol_type = other RNA
caccacaaccccccgaccatcgagctg

SEQ ID NO: 41817 - RNA, 27 nt, synthetic construct
  misc_feature 1..27: note = Eukaryotic translation initiation factor 2-alpha kinase 1 (119-127)
  source 1..27: mol_type = other RNA
caccacaaccgcgccatcacccacctg

SEQ ID NO: 41818 - RNA, 27 nt, synthetic construct
  misc_feature 1..27: note = Fas apoptotic inhibitory molecule 3 (176-184)
  source 1..27: mol_type = other RNA
caccacagctcccccaccacccagatc

SEQ ID NO: 41819 - RNA, 27 nt, synthetic construct
  misc_feature 1..27: note = Gamma-glutamyltranspeptidase 1 (532-540)
  source 1..27: mol_type = other RNA
caccacacccagatcgccagcaccttc

SEQ ID NO: 41820 - RNA, 27 nt, synthetic construct
  misc_feature 1..27: note = Zinc transporter 6 (356-364)
  source 1..27: mol_type = other RNA
caccacgtgatccccatgccgctgctc

SEQ ID NO: 41821 - RNA, 33 nt, synthetic construct
  misc_feature 1..33: note = GLTSCR1-like protein (415-425)
  source 1..33: mol_type = other RNA
caccacgtgcagaccatcaacggccagctgctc

SEQ ID NO: 41822 - RNA, 27 nt, synthetic construct
  misc_feature 1..27: note = Nucleolar RNA helicase 2 (218-226)
  source 1..27: mol_type = other RNA
caccacgtgtacagcggcaaggacctg

SEQ ID NO: 41823 - RNA, 27 nt, synthetic construct
  misc_feature 1..27: note = GMP synthase (glutamine-hydrolyzing) (22-30)
  source 1..27: mol_type = other RNA
caccactacgagggcgccgtggtcatc

SEQ ID NO: 41824 - RNA, 30 nt, synthetic construct
  misc_feature 1..30: note = GMP synthase (glutamine-hydrolyzing) (22-31)
  source 1..30: mol_type = other RNA
caccactacgagggcgccgtggtcatcctg

SEQ ID NO: 41825 - RNA, 27 nt, synthetic construct
  misc_feature 1..27: note = Membralin (447-455)
  source 1..27: mol_type = other RNA
caccactacgagctgcccgccatcctc

SEQ ID NO: 41826 - RNA, 30 nt, synthetic construct
  misc_feature 1..30: note = G/T mismatch-specific thymine DNAosylase (150-159)
  source 1..30: mol_type = other RNA
caccactaccccggcccggggaaccacttc

SEQ ID NO: 41827 - RNA, 27 nt, synthetic construct
  misc_feature 1..27: note = Suppression of tumorigenicity 18 protein (571-579)
  source 1..27: mol_type = other RNA
cacatcgccgccgcggccgccatcctg

SEQ ID NO: 41828 - RNA, 27 nt, synthetic construct
  misc_feature 1..27: note = Cytochrome b-c1 complex subunit 9 (55-63)
  source 1..27: mol_type = other RNA
cacatcaagcacaagtacgagaacaag

SEQ ID NO: 41829 - RNA, 27 nt, synthetic construct
  misc_feature 1..27: note = Phosphofurin acidic cluster sorting protein 1 (734-742)
  source 1..27: mol_type = other RNA
cacaagttccccgacgaggacagctac

SEQ ID NO: 41830 - RNA, 27 nt, synthetic construct
  misc_feature 1..27: note = Heterogeneous nuclear ribonucleoproteins C1/C2 (49-57)
  source 1..27: mol_type = other RNA
cacaagggcttcgccttcgtgcagtac

SEQ ID NO: 41831 - RNA, 27 nt, synthetic construct
  misc_feature 1..27: note = 60S ribosomal protein L31 (30-38)
  source 1..27: mol_type = other RNA
cacaagcgcatccacggcgtggggttc

SEQ ID NO: 41832 - RNA, 27 nt, synthetic construct
  misc_feature 1..27: note = Mitotic checkpoint serine/threonine-protein kinase BUB1 (430-438)
  source 1..27: mol_type = other RNA
cacaaggtggccaacaccagctccttc

SEQ ID NO: 41833 - RNA, 30 nt, synthetic construct
  misc_feature 1..30: note = JmjC domain-containing protein 8 (176-185)
  source 1..30: mol_type = other RNA
cacaaggtggacctgcccttccaggagtac

SEQ ID NO: 41834 - RNA, 30 nt, synthetic construct
  misc_feature 1..30: note = 40S ribosomal protein S7 (168-177)
  source 1..30: mol_type = other RNA
cacaaggtggagaccttcagcggcgtctac

SEQ ID NO: 41835 - RNA, 30 nt, synthetic construct
  misc_feature 1..30: note = Histone-lysine N-methyltransferase SETD2 (1284-1293)
  source 1..30: mol_type = other RNA
cacaagtaccagcagaacgccgagcagtac

SEQ ID NO: 41836 - RNA, 33 nt, synthetic construct
  misc_feature 1..33: note = Protein S100-A4 (17-27)
  source 1..33: mol_type = other RNA
cacaagtacagcggcaaggagggggacaagttc

SEQ ID NO: 41837 - RNA, 27 nt, synthetic construct
  misc_feature 1..27: note = Calpain-12 (697-705)
  source 1..27: mol_type = other RNA
cacctggacggcggggagggcgtgatc

SEQ ID NO: 41838 - RNA, 36 nt, synthetic construct
  misc_feature 1..36: note = Tyrosine-protein kinase BAZ1B (365-376)
  source 1..36: mol_type = other RNA
cacctggaggagatgatgaagatgatgagccccaac

SEQ ID NO: 41839 - RNA, 33 nt, synthetic construct
  misc_feature 1..33: note = Catalase (466-476)
  source 1..33: mol_type = other RNA
cacctgaaggacgcccagatcttcatccagaag

SEQ ID NO: 41840 - RNA, 27 nt, synthetic construct
  misc_feature 1..27: note = Neuropeptide FF receptor 1 (270-278)
  source 1..27: mol_type = other RNA
cacatgctggtgatggtcgccctcttc

SEQ ID NO: 41841 - RNA, 30 nt, synthetic construct
  misc_feature 1..30: note = AP-1 complex subunit gamma-like 2 (576-585)
  source 1..30: mol_type = other RNA
cacatgcgcgccgccatcctggagaagatg

SEQ ID NO: 41842 - RNA, 27 nt, synthetic construct
  misc_feature 1..27: note = Uncharacterized protein C2orf16 (1260-1268)
  source 1..27: mol_type = other RNA
cacaacctgcccgagagcgactccgag

SEQ ID NO: 41843 - RNA, 27 nt, synthetic construct
  misc_feature 1..27: note = E3 ubiquitin-protein ligase CBL (213-221)
  source 1..27: mol_type = other RNA
caccccatcagctccggcctggaggcc

SEQ ID NO: 41844 - RNA, 27 nt, synthetic construct
  misc_feature 1..27: note = Ubiquitin-conjugating enzyme E2 variant 3 (119-127)
  source 1..27: mol_type = other RNA
caccccaagagcgtgatcgtcggcctg

SEQ ID NO: 41845 - RNA, 30 nt, synthetic construct
  misc_feature 1..30: note = Microtubule-associated protein 4 (1128-1137)
  source 1..30: mol_type = other RNA
caccccaccctgagcggcgggggcgaccag

SEQ ID NO: 41846 - RNA, 27 nt, synthetic construct
  misc_feature 1..27: note = Ataxin-2-like protein (896-904)
  source 1..27: mol_type = other RNA
caccaggccggccaggccccccacctg

SEQ ID NO: 41847 - RNA, 27 nt, synthetic construct
  misc_feature 1..27: note = Programmed cell death protein 10 (162-170)
  source 1..27: mol_type = other RNA
caccagaagaaggagttcgtgaagtac

SEQ ID NO: 41848 - RNA, 30 nt, synthetic construct
  misc_feature 1..30: note = Transcription activator BRG1 (178-187)
  source 1..30: mol_type = other RNA
caccagctgcgcgcccagatcatggcctac

SEQ ID NO: 41849 - RNA, 27 nt, synthetic construct
  misc_feature 1..27: note = RNA polymerase-associated protein CTR9 homolog (714-722)
  source 1..27: mol_type = other RNA
caccagaacaccgaggtggtcctgtac

SEQ ID NO: 41850 - RNA, 30 nt, synthetic construct
  misc_feature 1..30: note = Ubiquitin-conjugating enzyme E2 J1 (238-247)
  source 1..30: mol_type = other RNA
caccagcccacccagccggtggccaagaac

SEQ ID NO: 41851 - RNA, 33 nt, synthetic construct
  misc_feature 1..33: note = 40S ribosomal protein S29 (3-13)
  source 1..33: mol_type = other RNA
caccagcagctgtactggagccacccccgcaag

SEQ ID NO: 41852 - RNA, 36 nt, synthetic construct
  misc_feature 1..36: note = MORC family CW-type zinc finger protein 3 (528-539)
  source 1..36: mol_type = other RNA
caccaggtgcccccgcagagcgagcccgagtccaac

SEQ ID NO: 41853 - RNA, 27 nt, synthetic construct
  misc_feature 1..27: note = TBC1 domain family member 2B (111-119)
  source 1..27: mol_type = other RNA
cacagcgccggcgccgtgaccgtcctg

SEQ ID NO: 41854 - RNA, 27 nt, synthetic construct
  misc_feature 1..27: note = Serine palmitoyltransferase 2 (403-411)
  source 1..27: mol_type = other RNA
cacagcgccgtgtacgccacctccctg

SEQ ID NO: 41855 - RNA, 27 nt, synthetic construct
  misc_feature 1..27: note = Protein virilizer homolog (1566-1574)
  source 1..27: mol_type = other RNA
cacagcgagctggagcgctccttcctc

SEQ ID NO: 41856 - RNA, 24 nt, synthetic construct
  misc_feature 1..24: note = Hematopoietic SH2 domain-containing protein (62-69)
  source 1..24: mol_type = other RNA
cacagccacgtgggctacaccctg

SEQ ID NO: 41857 - RNA, 27 nt, synthetic construct
  misc_feature 1..27: note = Thrombospondin type-1 domain-containing protein 7B (289-297)
  source 1..27: mol_type = other RNA
cacagcaagtcctgggccatcgagatc

SEQ ID NO: 41858 - RNA, 27 nt, synthetic construct
  misc_feature 1..27: note = Paired box protein Pax-9 (196-204)
  source 1..27: mol_type = other RNA
cacagcgtgaccgacatcctgggcatc

SEQ ID NO: 41859 - RNA, 27 nt, synthetic construct
  misc_feature 1..27: note = Proteasome subunit beta type-4 (134-142)
  source 1..27: mol_type = other RNA
cacagctggctgacccgcgccatgtac

SEQ ID NO: 41860 - RNA, 27 nt, synthetic construct
  misc_feature 1..27: note = E3 SUMO-protein ligase RanBP2 (3152-3160)
  source 1..27: mol_type = other RNA
cacaccggccccgggctgctcagcatg

SEQ ID NO: 41861 - RNA, 27 nt, synthetic construct
  misc_feature 1..27: note = Cytochrome b-245 heavy chain (115-123)
  source 1..27: mol_type = other RNA
cacaccatcgcccacctgttcaacgtg

SEQ ID NO: 41862 - RNA, 30 nt, synthetic construct
  misc_feature 1..30: note = Heterogeneous nuclear ribonucleoproteins A2/B1 (163-172)
  source 1..30: mol_type = other RNA
cacaccatcaacggccacaacgccgaggtg

SEQ ID NO: 41863 - RNA, 30 nt, synthetic construct
  misc_feature 1..30: note = Heterogeneous nuclear ribonucleoprotein A3 (189-198)
  source 1..30: mol_type = other RNA
cacaccatcaacggccacaactgcgaggtg

SEQ ID NO: 41864 - RNA, 27 nt, synthetic construct
  misc_feature 1..27: note = Mucin-3A (1830-1838)
  source 1..27: mol_type = other RNA
cacaccctgacccccagcacggccctc

SEQ ID NO: 41865 - RNA, 27 nt, synthetic construct
  misc_feature 1..27: note = Eukaryotic translation initiation factor 4 gamma 1 (354-362)
  source 1..27: mol_type = other RNA
cacaccgtggagatccacgagcccaac

SEQ ID NO: 41866 - RNA, 27 nt, synthetic construct
  misc_feature 1..27: note = Nucleoporin NUP188 homolog (1451-1459)
  source 1..27: mol_type = other RNA
cacaccgtgggcttcatcctgcagctc

SEQ ID NO: 41867 - RNA, 27 nt, synthetic construct
  misc_feature 1..27: note = 5-phosphohydroxy-L-lysine phospho-lyase (166-174)
  source 1..27: mol_type = other RNA
cacgtggcccccctgccggacacctac

SEQ ID NO: 41868 - RNA, 30 nt, synthetic construct
  misc_feature 1..30: note = Extracellular matrix protein FRAS1 (3372-3381)
  source 1..30: mol_type = other RNA
cacgtgtgcagcaacctggtcaccacctac

SEQ ID NO: 41869 - RNA, 30 nt, synthetic construct
  misc_feature 1..30: note = Cystatin-B (58-67)
  source 1..30: mol_type = other RNA
cacgtgggcgacgaggacttcgtccacctg

SEQ ID NO: 41870 - RNA, 36 nt, synthetic construct
  misc_feature 1..36: note = Microtubule-associated protein 4 (1016-1027)
  source 1..36: mol_type = other RNA
cacgtgcccggcgggggcaacgtccagatccagaac

SEQ ID NO: 41871 - RNA, 27 nt, synthetic construct
  misc_feature 1..27: note = Transmembrane protein 201 (96-104)
  source 1..27: mol_type = other RNA
cacgtggtcagctccgcccccagcctg

SEQ ID NO: 41872 - RNA, 33 nt, synthetic construct
  misc_feature 1..33: note = Cholinesterase (154-164)
  source 1..33: mol_type = other RNA
cacgtgtacgacggcaagttcctggcccgcgtc

SEQ ID NO: 41873 - RNA, 27 nt, synthetic construct
  misc_feature 1..27: note = 60S ribosomal protein L26 (61-69)
  source 1..27: mol_type = other RNA
cactacaagggccagcagatcgggaag

SEQ ID NO: 41874 - RNA, 27 nt, synthetic construct
  misc_feature 1..27: note = HEAT repeat-containing protein 1 (578-586)
  source 1..27: mol_type = other RNA
atcgccgccgacatcctgatcaaggag

SEQ ID NO: 41875 - RNA, 30 nt, synthetic construct
  misc_feature 1..30: note = Protein PRRC2C (2676-2685)
  source 1..30: mol_type = other RNA
atcgccggccgcagcaccacccccacgtcc

SEQ ID NO: 41876 - RNA, 27 nt, synthetic construct
  misc_feature 1..27: note = Endoplasmic reticulum lectin 1 (311-319)
  source 1..27: mol_type = other RNA
atcgccatcggcagccagcccgtgctg

SEQ ID NO: 41877 - RNA, 27 nt, synthetic construct
  misc_feature 1..27: note = Monoacylglycerol lipase ABHD12 (84-92)
  source 1..27: mol_type = other RNA
atcgccatccccttcctgatcaagctc

SEQ ID NO: 41878 - RNA, 27 nt, synthetic construct
  misc_feature 1..27: note = Endoplasmin (166-174)
  source 1..27: mol_type = other RNA
atcgccaagagcggcacctccgagttc

SEQ ID NO: 41879 - RNA, 27 nt, synthetic construct
  misc_feature 1..27: note = Msx2-interacting protein (613-621)
  source 1..27: mol_type = other RNA
atcgcccccaagatcaccagcgtgatc

SEQ ID NO: 41880 - RNA, 27 nt, synthetic construct
  misc_feature 1..27: note = Mitotic checkpoint serine/threonine-protein kinase BUB1 (382-390)
  source 1..27: mol_type = other RNA
atcgcccccccggtgcccctgaaggcc

SEQ ID NO: 41881 - RNA, 27 nt, synthetic construct
  misc_feature 1..27: note = Large proline-rich protein BAG6 (504-512)
  source 1..27: mol_type = other RNA
atcgcccgccccaccccgccccaggcc

SEQ ID NO: 41882 - RNA, 27 nt, synthetic construct
  misc_feature 1..27: note = Low-density lipoprotein receptor-related protein 1B (2001-2009)
  source 1..27: mol_type = other RNA
atcgccgtgcaccccgagaagggcctg

SEQ ID NO: 41883 - RNA, 30 nt, synthetic construct
  misc_feature 1..30: note = Signal transducing adapter molecule 2 (292-301)
  source 1..30: mol_type = other RNA
atcgacgaggacaagatggaccgcgccctg

SEQ ID NO: 41884 - RNA, 27 nt, synthetic construct
  misc_feature 1..27: note = Omega-amidase NIT2 (246-254)
  source 1..27: mol_type = other RNA
atcgacctgaagaagctcgccgagatc

SEQ ID NO: 41885 - RNA, 27 nt, synthetic construct
  misc_feature 1..27: note = DENN domain-containing protein 1A (78-86)
  source 1..27: mol_type = other RNA
atcgacagcaagcagcgcttcggcttc

SEQ ID NO: 41886 - RNA, 27 nt, synthetic construct
  misc_feature 1..27: note = Histone-lysine N-methyltransferase EHMT1 (1232-1240)
  source 1..27: mol_type = other RNA
atcgaggccggcgagcagctggggttc

SEQ ID NO: 41887 - RNA, 24 nt, synthetic construct
  misc_feature 1..24: note = Basic helix-loop-helix domain-containing protein KIAA2018 (1140-1147)
  source 1..24: mol_type = other RNA
atcttcgaccaggagaacctggag

SEQ ID NO: 41888 - RNA, 27 nt, synthetic construct
  misc_feature 1..27: note = Neutral cholesterol ester hydrolase 1 (382-390)
  source 1..27: mol_type = other RNA
atcttcaccagctggcccaccaacttc

SEQ ID NO: 41889 - RNA, 27 nt, synthetic construct
  misc_feature 1..27: note = Olfactory receptor 5H15 (106-114)
  source 1..27: mol_type = other RNA
atcggcgtgaccaccgagtgcttcctg

SEQ ID NO: 41890 - RNA, 27 nt, synthetic construct
  misc_feature 1..27: note = Heterogeneous nuclear ribonucleoprotein U (749-757)
  source 1..27: mol_type = other RNA
atcggctacccctacccgcgcgccccc

SEQ ID NO: 41891 - RNA, 27 nt, synthetic construct
  misc_feature 1..27: note = BolA-like protein 2 (67-75)
  source 1..27: mol_type = other RNA
atccacgccttcgagcagaagaccctg

SEQ ID NO: 41892 - RNA, 27 nt, synthetic construct
  misc_feature 1..27: note = Histone H3.1 (113-121)
  source 1..27: mol_type = other RNA
atccacgccaagcgcgtgaccatcatg

SEQ ID NO: 41893 - RNA, 27 nt, synthetic construct
  misc_feature 1..27: note = Two pore calcium channel protein 1 (44-52)
  source 1..27: mol_type = other RNA
atccacgacagccaggccccctccctg

SEQ ID NO: 41894 - RNA, 27 nt, synthetic construct
  misc_feature 1..27: note = Probable ATP-dependent RNA helicase DDX41 (201-209)
  source 1..27: mol_type = other RNA
atccaccaccccaccccgatccagatc

SEQ ID NO: 41895 - RNA, 27 nt, synthetic construct
  misc_feature 1..27: note = T-complex protein 1 subunit eta (281-289)
  source 1..27: mol_type = other RNA
atccaccacagcggcgccaaggtggtc

SEQ ID NO: 41896 - RNA, 30 nt, synthetic construct
  misc_feature 1..30: note = T-complex protein 1 subunit eta (281-290)
  source 1..30: mol_type = other RNA
atccaccacagcggcgccaaggtggtcctg

SEQ ID NO: 41897 - RNA, 27 nt, synthetic construct
  misc_feature 1..27: note = Leucine-rich repeat-containing protein 16A (481-489)
  source 1..27: mol_type = other RNA
atccacaacatcaccagcctggacatc

SEQ ID NO: 41898 - RNA, 27 nt, synthetic construct
  misc_feature 1..27: note = UDP-N-acetylglucosamine-peptide N-acetylglucosaminyltransferase 110 kDa subunit (628-636)
  source 1..27: mol_type = other RNA
atccaccaggacggcatccacatcctg

SEQ ID NO: 41899 - RNA, 27 nt, synthetic construct
  misc_feature 1..27: note = Calcium/calmodulin-dependent protein kinase type 1 (286-294)
  source 1..27: mol_type = other RNA
atccaccagagcgtgtccgagcagatc

SEQ ID NO: 41900 - RNA, 30 nt, synthetic construct
  misc_feature 1..30: note = G-protein coupled receptor 98 (3507-3516)
  source 1..30: mol_type = other RNA
atccacagcttcacccccgcctccggcatc

SEQ ID NO: 41901 - RNA, 27 nt, synthetic construct
  misc_feature 1..27: note = Wee1-like protein kinase (417-425)
  source 1..27: mol_type = other RNA
atccacagcatgtccctggtgcacatg

SEQ ID NO: 41902 - RNA, 27 nt, synthetic construct
  misc_feature 1..27: note = Toll-like receptor 9 (587-595)
  source 1..27: mol_type = other RNA
atccacagccaggtgtcccagcagctg

SEQ ID NO: 41903 - RNA, 27 nt, synthetic construct
  misc_feature 1..27: note = Tumor suppressor candidate 2 (99-107)
  source 1..27: mol_type = other RNA
atccacgtggacttccccgtcatcctg

SEQ ID NO: 41904 - RNA, 27 nt, synthetic construct
  misc_feature 1..27: note = DNA replication licensing factor MCM5 (694-702)
  source 1..27: mol_type = other RNA
atcatcaaggacttcaccaagcagaag

SEQ ID NO: 41905 - RNA, 30 nt, synthetic construct
  misc_feature 1..30: note = Kelch-like protein 6 (114-123)
  source 1..30: mol_type = other RNA
atcatcaagggcgtggacgccgagaccatg

SEQ ID NO: 41906 - RNA, 30 nt, synthetic construct
  misc_feature 1..30: note = Transcription factor Sp2 (277-286)
  source 1..30: mol_type = other RNA
atcatccaggccggcaacaacctgctcatc

SEQ ID NO: 41907 - RNA, 27 nt, synthetic construct
  misc_feature 1..27: note = Stress-associated endoplasmic reticulum protein 1 (58-66)
  source 1..27: mol_type = other RNA
atcatccagagcatccgcatgggcatg

SEQ ID NO: 41908 - RNA, 27 nt, synthetic construct
  misc_feature 1..27: note = HEAT repeat-containing protein 5B (1006-1014)
  source 1..27: mol_type = other RNA
atcatcaccaccgtgggccccgagctg

SEQ ID NO: 41909 - RNA, 27 nt, synthetic construct
  misc_feature 1..27: note = Annexin A7 (223-231)
  source 1..27: mol_type = other RNA
atcaaggccgccttcaagaccagctac

SEQ ID NO: 41910 - RNA, 30 nt, synthetic construct
  misc_feature 1..30: note = Tetraspanin-8 (198-207)
  source 1..30: mol_type = other RNA
atcaaggacttcctggccaagaacctcatc

SEQ ID NO: 41911 - RNA, 27 nt, synthetic construct
  misc_feature 1..27: note = Copine-3 (135-143)
  source 1..27: mol_type = other RNA
atcaaggacaaccgcgtggtcctgttc

SEQ ID NO: 41912 - RNA, 27 nt, synthetic construct
  misc_feature 1..27: note = AP-3 complex subunit mu-1 (102-110)
  source 1..27: mol_type = other RNA
atcaaggacaacgtggtcatcgtgtac

SEQ ID NO: 41913 - RNA, 27 nt, synthetic construct
  misc_feature 1..27: note = Geminin (90-98)
  source 1..27: mol_type = other RNA
atcaaggagaaccccagctcccagtac

SEQ ID NO: 41914 - RNA, 27 nt, synthetic construct
  misc_feature 1..27: note = X-ray repair cross-complementing protein 5 (647-655)
  source 1..27: mol_type = other RNA
atcaagttcagcgaggagcagcgcttc

SEQ ID NO: 41915 - RNA, 27 nt, synthetic construct
  misc_feature 1..27: note = Serine/threonine-protein kinase TAO1 (83-91)
  source 1..27: mol_type = other RNA
atcaagcaccccaacagcatcgagtac

SEQ ID NO: 41916 - RNA, 27 nt, synthetic construct
  misc_feature 1..27: note = 60S ribosomal protein L12 (98-106)
  source 1..27: mol_type = other RNA
atcaagcacagcggcaacatcaccttc

SEQ ID NO: 41917 - RNA, 27 nt, synthetic construct
  misc_feature 1..27: note = Alkyldihydroxyacetonephosphate synthase, peroxisomal (379-387)
  source 1..27: mol_type = other RNA
atcaagatccgccccgtgccggagtac

SEQ ID NO: 41918 - RNA, 27 nt, synthetic construct
  misc_feature 1..27: note = Probable ATP-dependent RNA helicase DDX52 (255-263)
  source 1..27: mol_type = other RNA
atcaagatcagcgagggcaccgggttc

SEQ ID NO: 41919 - RNA, 27 nt, synthetic construct
  misc_feature 1..27: note = Nucleolar and spindle-associated protein 1 (108-116)
  source 1..27: mol_type = other RNA
atcaagatcagcaaccccaccgagttc

SEQ ID NO: 41920 - RNA, 27 nt, synthetic construct
  misc_feature 1..27: note = Serine/threonine-protein kinase 17A (79-87)
  source 1..27: mol_type = other RNA
atcaagaaggacagcggcaaggagttc

SEQ ID NO: 41921 - RNA, 27 nt, synthetic construct
  misc_feature 1..27: note = Dynein light chain 1, cytoplasmic (42-50)
  source 1..27: mol_type = other RNA
atcaagaaggagttcgacaagaagtac

SEQ ID NO: 41922 - RNA, 27 nt, synthetic construct
  misc_feature 1..27: note = Endoplasmin (472-480)
  source 1..27: mol_type = other RNA
atcaagaagatcgccgacgacaagtac

SEQ ID NO: 41923 - RNA, 30 nt, synthetic construct
  misc_feature 1..30: note = Elongation factor 2 (570-579)
  source 1..30: mol_type = other RNA
atcaagaagagcgaccccgtggtctcctac

SEQ ID NO: 41924 - RNA, 27 nt, synthetic construct
  misc_feature 1..27: note = DNA ligase 1 (608-616)
  source 1..27: mol_type = other RNA
atcaagctgcccagcgtgacctccttc

SEQ ID NO: 41925 - RNA, 27 nt, synthetic construct
  misc_feature 1..27: note = Acetyl-coenzyme A transporter 1 (305-313)
  source 1..27: mol_type = other RNA
atcaagatgcccgccgtgctgaccttc

SEQ ID NO: 41926 - RNA, 27 nt, synthetic construct
  misc_feature 1..27: note = Ribulose-phosphate 3-epimerase (119-127)
  source 1..27: mol_type = other RNA
atcaagcccggcaccagcgtggagtac

SEQ ID NO: 41927 - RNA, 24 nt, synthetic construct
  misc_feature 1..24: note = Serine/threonine-protein kinase tousled-like 1 (482-489)
  source 1..24: mol_type = other RNA
atcaagcccccgatcatccactac

SEQ ID NO: 41928 - RNA, 30 nt, synthetic construct
  misc_feature 1..30: note = Eukaryotic translation initiation factor 5B (366-375)
  source 1..30: mol_type = other RNA
atcaagcgcctggaggagctcgaggccaag

SEQ ID NO: 41929 - RNA, 27 nt, synthetic construct
  misc_feature 1..27: note = F-box only protein 11 (714-722)
  source 1..27: mol_type = other RNA
atcaagaccgacagcaaccccaccctg

SEQ ID NO: 41930 - RNA, 30 nt, synthetic construct
  misc_feature 1..30: note = 60S ribosomal protein L11 (117-126)
  source 1..30: mol_type = other RNA
atcaagtacgaccccagcatcggcatctac

SEQ ID NO: 41931 - RNA, 27 nt, synthetic construct
  misc_feature 1..27: note = Ubiquitin carboxyl-terminal hydrolase 40 (723-731)
  source 1..27: mol_type = other RNA
atcctgatccaggacagccacgacgac

SEQ ID NO: 41932 - RNA, 27 nt, synthetic construct
  misc_feature 1..27: note = E3 ubiquitin-protein ligase UBR4 (654-662)
  source 1..27: mol_type = other RNA
atcctgaacttcatcaccagctccatg

SEQ ID NO: 41933 - RNA, 27 nt, synthetic construct
  misc_feature 1..27: note = ATP-dependent RNA helicase DDX18 (529-537)
  source 1..27: mol_type = other RNA
atcctgcgccccgaggagctcggcttc

SEQ ID NO: 41934 - RNA, 33 nt, synthetic construct
  misc_feature 1..33: note = Trace amine-associated receptor 6 (212-222)
  source 1..33: mol_type = other RNA
atcatgatcatcctgtacggcaacatcttcctc

SEQ ID NO: 41935 - RNA, 27 nt, synthetic construct
  misc_feature 1..27: note = DNA polymerase delta subunit 2 (258-266)
  source 1..27: mol_type = other RNA
atcaacaaggccaagtacctgaccaag

SEQ ID NO: 41936 - RNA, 27 nt, synthetic construct
  misc_feature 1..27: note = 40S ribosomal protein S18 (5-13)
  source 1..27: mol_type = other RNA
atccccgagaagttccagcacatcctg

SEQ ID NO: 41937 - RNA, 27 nt, synthetic construct
  misc_feature 1..27: note = Nuclear factor of activated T-cells, cytoplasmic 2 (331-339)
  source 1..27: mol_type = other RNA
atccccgagagctccggccgcatcgtg

SEQ ID NO: 41938 - RNA, 24 nt, synthetic construct
  misc_feature 1..24: note = Nuclear factor erythroid 2-related factor 2 (443-450)
  source 1..24: mol_type = other RNA
atccccttcccggtggagaagatc

SEQ ID NO: 41939 - RNA, 27 nt, synthetic construct
  misc_feature 1..27: note = Tetra-peptide repeat homeobox protein 1 (109-117)
  source 1..27: mol_type = other RNA
atccccggcccgctgcccgggagcatc

SEQ ID NO: 41940 - RNA, 27 nt, synthetic construct
  misc_feature 1..27: note = DNA replication licensing factor MCM6 (79-87)
  source 1..27: mol_type = other RNA
atccaggaggagttctaccgcgtgtac

SEQ ID NO: 41941 - RNA, 33 nt, synthetic construct
  misc_feature 1..33: note = Poly (ADP-ribose) polymerase 8 (10-20)
  source 1..33: mol_type = other RNA
atccagaaggacatcgacgtggtcatccagaag

SEQ ID NO: 41942 - RNA, 27 nt, synthetic construct
  misc_feature 1..27: note = DNA-directed RNA polymerase II subunit RPB4 (134-142)
  source 1..27: mol_type = other RNA
atccagaccaagcgcagcttccagtac

SEQ ID NO: 41943 - RNA, 27 nt, synthetic construct
  misc_feature 1..27: note = Serine/threonine-protein phosphatase 4 regulatory subunit 2 (40-48)
  source 1..27: mol_type = other RNA
atccagtggagccagttcaagggctac

SEQ ID NO: 41944 - RNA, 27 nt, synthetic construct
  misc_feature 1..27: note = Maestro heat-like repeat-containing protein family member 1 (525-533)
  source 1..27: mol_type = other RNA
atccagtacgacgcccacgccagcctg

SEQ ID NO: 41945 - RNA, 27 nt, synthetic construct
  misc_feature 1..27: note = Protein capicua homolog (862-870)
  source 1..27: mol_type = other RNA
atccgcttcaccctgcccccgggcacc

SEQ ID NO: 41946 - RNA, 30 nt, synthetic construct
  misc_feature 1..30: note = Inactive serine/threonine-protein kinase VRK3 (422-431)
  source 1..30: mol_type = other RNA
atccgccccagcgagaccctgcagaagtac

SEQ ID NO: 41947 - RNA, 27 nt, synthetic construct
  misc_feature 1..27: note = Sphingomyelin phosphodiesterase 3 (179-187)
  source 1..27: mol_type = other RNA
atcagcgccgcctccttcagctccctg

SEQ ID NO: 41948 - RNA, 27 nt, synthetic construct
  misc_feature 1..27: note = Sodium channel protein type 5 subunit alpha (1758-1766)
  source 1..27: mol_type = other RNA
atcagcttcctgatcgtggtcaacatg

SEQ ID NO: 41949 - RNA, 27 nt, synthetic construct
  misc_feature 1..27: note = Calsyntenin-1 (783-791)
  source 1..27: mol_type = other RNA
atcagcaacgagttcaaggtggaggtc

SEQ ID NO: 41950 - RNA, 30 nt, synthetic construct
  misc_feature 1..30: note = Calcineurin subunit B type 2 (107-116)
  source 1..30: mol_type = other RNA
atcagcaacggcgagctgttccaggtgctc

SEQ ID NO: 41951 - RNA, 27 nt, synthetic construct
  misc_feature 1..27: note = AT-rich interactive domain-containing protein 2 (1322-1330)
  source 1..27: mol_type = other RNA
atcagcaacggcccctccctggagctc

SEQ ID NO: 41952 - RNA, 27 nt, synthetic construct
  misc_feature 1..27: note = THUMP domain-containing protein 3 (77-85)
  source 1..27: mol_type = other RNA
atcagcgtggagtccctggcccaggtc

SEQ ID NO: 41953 - RNA, 27 nt, synthetic construct
  misc_feature 1..27: note = Methylcrotonoyl-CoA carboxylase subunit alpha, mitochondrial (547-555)
  source 1..27: mol_type = other RNA
atcagctacacccgcaacatgaccctg

SEQ ID NO: 41954 - RNA, 27 nt, synthetic construct
  misc_feature 1..27: note = Kelch repeat and BTB domain-containing protein 12 (77-85)
  source 1..27: mol_type = other RNA
atcaccgccgagagcgtgtccgtcctg

SEQ ID NO: 41955 - RNA, 27 nt, synthetic construct
  misc_feature 1..27: note = Titin (15022-15030)
  source 1..27: mol_type = other RNA
atcaccaagaacaccgccgacctgaag

SEQ ID NO: 41956 - RNA, 33 nt, synthetic construct
  misc_feature 1..33: note = Elongation factor 1-alpha 1 (170-180)
  source 1..33: mol_type = other RNA
atcgtgaaggaggtcagcacctacatcaagaag

SEQ ID NO: 41957 - RNA, 27 nt, synthetic construct
  misc_feature 1..27: note = Nucleolar protein 58 (41-49)
  source 1..27: mol_type = other RNA
atcgtgaagctgaagcacttcgagaag

SEQ ID NO: 41958 - RNA, 27 nt, synthetic construct
  misc_feature 1..27: note = NADH dehydrogenase (ubiquinone) 1 beta subcomplex subunit 1 (7-15)
  source 1..27: mol_type = other RNA
atcgtgcgcgaccactgggtccacgtg

SEQ ID NO: 41959 - RNA, 27 nt, synthetic construct
  misc_feature 1..27: note = Serine/threonine-protein kinase RIO1 (209-217)
  source 1..27: mol_type = other RNA
atctacaagaccagcatcctggtgttc

SEQ ID NO: 41960 - RNA, 27 nt, synthetic construct
  misc_feature 1..27: note = 60S ribosomal protein L4 (269-277)
  source 1..27: mol_type = other RNA
aaggccgccagcctgaagtccaactac

SEQ ID NO: 41961 - RNA, 27 nt, synthetic construct
  misc_feature 1..27: note = Pre-mRNA-splicing factor SYF2 (221-229)
  source 1..27: mol_type = other RNA
aaggccgagcgcttctacggcaagtac

SEQ ID NO: 41962 - RNA, 27 nt, synthetic construct
  misc_feature 1..27: note = Zinc finger protein 215 (386-394)
  source 1..27: mol_type = other RNA
aaggccttctgccgcagctccagcctg

SEQ ID NO: 41963 - RNA, 27 nt, synthetic construct
  misc_feature 1..27: note = Integrin alpha-4 (236-244)
  source 1..27: mol_type = other RNA
aaggccttcctggacaagcagaaccag

SEQ ID NO: 41964 - RNA, 27 nt, synthetic construct
  misc_feature 1..27: note = Spermatid perinuclear RNA-binding protein (384-392)
  source 1..27: mol_type = other RNA
aaggccatcgacctgatgaacgccctc

SEQ ID NO: 41965 - RNA, 27 nt, synthetic construct
  misc_feature 1..27: note = Collagen alpha-6(VI) chain (501-509)
  source 1..27: mol_type = other RNA
aaggccatcgagaacatccgccagatg

SEQ ID NO: 41966 - RNA, 27 nt, synthetic construct
  misc_feature 1..27: note = T-complex protein 1 subunit gamma (163-171)
  source 1..27: mol_type = other RNA
aaggccatcagccgctggtccagcctg

SEQ ID NO: 41967 - RNA, 27 nt, synthetic construct
  misc_feature 1..27: note = 60S ribosomal protein L7 (53-61)
  source 1..27: mol_type = other RNA
aaggccaagcactaccacaaggagtac

SEQ ID NO: 41968 - RNA, 27 nt, synthetic construct
  misc_feature 1..27: note = N(G),N(G)-dimethylarginine dimethylaminohydrolase 1 (196-204)
  source 1..27: mol_type = other RNA
aaggccctgaagatcatgcagcagatg

SEQ ID NO: 41969 - RNA, 27 nt, synthetic construct
  misc_feature 1..27: note = Zinc finger protein 491 (250-258)
  source 1..27: mol_type = other RNA
aaggccctgagccgcctcatctccttc

SEQ ID NO: 41970 - RNA, 27 nt, synthetic construct
  misc_feature 1..27: note = Inositol 1,4,5-trisphosphate receptor type 3 (2312-2320)
  source 1..27: mol_type = other RNA
aaggccatggtgatggacatggagttc

SEQ ID NO: 41971 - RNA, 30 nt, synthetic construct
  misc_feature 1..30: note = Mid1-interacting protein 1 (164-173)
  source 1..30: mol_type = other RNA
aaggccaacatcctgaccaaccgctacaag

SEQ ID NO: 41972 - RNA, 27 nt, synthetic construct
  misc_feature 1..27: note = Phosphoenolpyruvate carboxykinase, cytosolic (GTP) (547-555)
  source 1..27: mol_type = other RNA
aaggccagcaccaagctgacccccatc

SEQ ID NO: 41973 - RNA, 27 nt, synthetic construct
  misc_feature 1..27: note = Zinc finger protein 726 (174-182)
  source 1..27: mol_type = other RNA
aagtgcaagaactgcgtgaagagcttc

SEQ ID NO: 41974 - RNA, 27 nt, synthetic construct
  misc_feature 1..27: note = PDZ domain-containing protein 8 (559-567)
  source 1..27: mol_type = other RNA
aaggacggcaacaagcccccgcccctg

SEQ ID NO: 41975 - RNA, 27 nt, synthetic construct
  misc_feature 1..27: note = Zinc finger protein 470 (79-87)
  source 1..27: mol_type = other RNA
aaggacccctgggtgatcaagggcggg

SEQ ID NO: 41976 - RNA, 27 nt, synthetic construct
  misc_feature 1..27: note = HIV Tat-specific factor 1 (234-242)
  source 1..27: mol_type = other RNA
aaggactacaagaagaagctgagcatg

SEQ ID NO: 41977 - RNA, 27 nt, synthetic construct
  misc_feature 1..27: note = Glucose-6-phosphate translocase (212-220)
  source 1..27: mol_type = other RNA
aaggaggagagcaccctgcaggagctc

SEQ ID NO: 41978 - RNA, 27 nt, synthetic construct
  misc_feature 1..27: note = Protein bassoon (2970-2978)
  source 1..27: mol_type = other RNA
aaggagatcgacgccaagctgaagtac

SEQ ID NO: 41979 - RNA, 27 nt, synthetic construct
  misc_feature 1..27: note = Nuclear fragile X mental retardation-interacting protein 2 (667-675)
  source 1..27: mol_type = other RNA
aaggagatggagagcatctggaacctg

SEQ ID NO: 41980 - RNA, 27 nt, synthetic construct
  misc_feature 1..27: note = Desmoplakin (423-431)
  source 1..27: mol_type = other RNA
aaggagcgcgagaagatcctggagtac

SEQ ID NO: 41981 - RNA, 27 nt, synthetic construct
  misc_feature 1..27: note = Protein FAM91A1 (752-760)
  source 1..27: mol_type = other RNA
aaggagagcctgcagaacctcctgcac

SEQ ID NO: 41982 - RNA, 27 nt, synthetic construct
  misc_feature 1..27: note = Complement C4-A (189-197)
  source 1..27: mol_type = other RNA
aaggaggtgtacatgcccagctccatc

SEQ ID NO: 41983 - RNA, 30 nt, synthetic construct
  misc_feature 1..30: note = Heterogeneous nuclear ribonucleoprotein U (565-574)
  source 1..30: mol_type = other RNA
aagttcatcgagatcgccgcccgcaagaag

SEQ ID NO: 41984 - RNA, 27 nt, synthetic construct
  misc_feature 1..27: note = Ciliogenesis-associated TTC17-interacting protein (302-310)
  source 1..27: mol_type = other RNA
aagttcctggaccgcaaggaggagctc

SEQ ID NO: 41985 - RNA, 30 nt, synthetic construct
  misc_feature 1..30: note = Heparan-sulfate 6-O-sulfotransferase 2 (519-528)
  source 1..30: mol_type = other RNA
aagttcctgaagggccgcctcctgcagacc

SEQ ID NO: 41986 - RNA, 30 nt, synthetic construct
  misc_feature 1..30: note = 78 kDa glucose-regulated protein (113-122)
  source 1..30: mol_type = other RNA
aagttcctgcccttcaaggtggtcgagaag

SEQ ID NO: 41987 - RNA, 27 nt, synthetic construct
  misc_feature 1..27: note = Protein SON (16-24)
  source 1..27: mol_type = other RNA
aagttccgcgagatccagcaggagctg

SEQ ID NO: 41988 - RNA, 30 nt, synthetic construct
  misc_feature 1..30: note = Mothers against decapentaplegic homolog 9 (159-168)
  source 1..30: mol_type = other RNA
aagttccgcagcgcctccctgcacagcgag

SEQ ID NO: 41989 - RNA, 33 nt, synthetic construct
  misc_feature 1..33: note = Stabilin-2 (1755-1765)
  source 1..33: mol_type = other RNA
aagttcagcaacctgatccaggactccggcctc

SEQ ID NO: 41990 - RNA, 27 nt, synthetic construct
  misc_feature 1..27: note = Desmoglein-2 (639-647)
  source 1..27: mol_type = other RNA
aagggcgccaaggggttcacccccatc

SEQ ID NO: 41991 - RNA, 27 nt, synthetic construct
  misc_feature 1..27: note = Tumor necrosis factor ligand superfamily member 11 (257-265)
  source 1..27: mol_type = other RNA
aagggcgggagcaccaagtactggtcc

SEQ ID NO: 41992 - RNA, 33 nt, synthetic construct
  misc_feature 1..33: note = Arginase-1 (153-163)
  source 1..33: mol_type = other RNA
aagggcaagatccccgacgtgccggggttcagc

SEQ ID NO: 41993 - RNA, 30 nt, synthetic construct
  misc_feature 1..30: note = Casein kinase I isoform delta (242-251)
  source 1..30: mol_type = other RNA
aagggctaccccagcgagttcgccacctac

SEQ ID NO: 41994 - RNA, 33 nt, synthetic construct
  misc_feature 1..33: note = 40S ribosomal protein S17 (49-59)
  source 1..33: mol_type = other RNA
aagatcgccggctacgtgacccacctgatgaag

SEQ ID NO: 41995 - RNA, 27 nt, synthetic construct
  misc_feature 1..27: note = Repetin (489-497)
  source 1..27: mol_type = other RNA
aagatcgaccgccaggaccagagctac

SEQ ID NO: 41996 - RNA, 27 nt, synthetic construct
  misc_feature 1..27: note = T-complex protein 1 subunit eta (135-143)
  source 1..27: mol_type = other RNA
aagatcaaggagatcgccgtgaccgtc

SEQ ID NO: 41997 - RNA, 27 nt, synthetic construct
  misc_feature 1..27: note = V-type proton ATPase catalytic subunit A (596-604)
  source 1..27: mol_type = other RNA
aagatcaagagcgactacgcccagctg

SEQ ID NO: 41998 - RNA, 27 nt, synthetic construct
  misc_feature 1..27: note = Potassium-transporting ATPase alpha chain 1 (737-745)
  source 1..27: mol_type = other RNA
aagaaggccgacatcggcgtggccatg

SEQ ID NO: 41999 - RNA, 27 nt, synthetic construct
  misc_feature 1..27: note = Histone H1.4 (63-71)
  source 1..27: mol_type = other RNA
aagaaggccctggccgcggccggctac

SEQ ID NO: 42000 - RNA, 27 nt, synthetic construct
  misc_feature 1..27: note = Ezrin (262-270)
  source 1..27: mol_type = other RNA
aagaaggcccccgacttcgtgttctac

SEQ ID NO: 42001 - RNA, 27 nt, synthetic construct
  misc_feature 1..27: note = C1GALT1-specific chaperone 1 (160-168)
  source 1..27: mol_type = other RNA
aagaaggaccccagccagccgttctac

SEQ ID NO: 42002 - RNA, 27 nt, synthetic construct
  misc_feature 1..27: note = Cofilin-1 (95-103)
  source 1..27: mol_type = other RNA
aagaaggaggacctggtgttcatcttc

SEQ ID NO: 42003 - RNA, 30 nt, synthetic construct
  misc_feature 1..30: note = 116 kDa U5 small nuclear ribonucleoprotein component (421-430)
  source 1..30: mol_type = other RNA
aagaagttcttcggcgagttcaccgggttc

SEQ ID NO: 42004 - RNA, 27 nt, synthetic construct
  misc_feature 1..27: note = Squalene monooxygenase (15-23)
  source 1..27: mol_type = other RNA
aagaagttcggcgacttcatcaccctg

SEQ ID NO: 42005 - RNA, 27 nt, synthetic construct
  misc_feature 1..27: note = UPF0729 protein C18orf32 (17-25)
  source 1..27: mol_type = other RNA
aagaagttcctggagccctacatctac

SEQ ID NO: 42006 - RNA, 27 nt, synthetic construct
  misc_feature 1..27: note = Cholesterol 24-hydroxylase (94-102)
  source 1..27: mol_type = other RNA
aagaagttcctgatgagcaccaagtac

SEQ ID NO: 42007 - RNA, 33 nt, synthetic construct
  misc_feature 1..33: note = Spermidine synthase (134-144)
  source 1..33: mol_type = other RNA
aagaagttcctgcccggcatggccatcgggtac

SEQ ID NO: 42008 - RNA, 30 nt, synthetic construct
  misc_feature 1..30: note = Probable global transcription activator SNF2L2 (1110-1119)
  source 1..30: mol_type = other RNA
aagaagttcaacgagcccggcagccagtac

SEQ ID NO: 42009 - RNA, 30 nt, synthetic construct
  misc_feature 1..30: note = TRAF-interacting protein with FHA domain-containing protein A (76-85)
  source 1..30: mol_type = other RNA
aagaagttcaacagctccgtgctgagcttc

SEQ ID NO: 42010 - RNA, 36 nt, synthetic construct
  misc_feature 1..36: note = Nicotinamide phosphoribosyltransferase (330-341)
  source 1..36: mol_type = other RNA
aagaagttccccgtgaccgagaacagcaagggctac

SEQ ID NO: 42011 - RNA, 33 nt, synthetic construct
  misc_feature 1..33: note = Cell cycle progression protein 1 (523-533)
  source 1..33: mol_type = other RNA
aagaagttcagcgactccgtgaagagcaccttc

SEQ ID NO: 42012 - RNA, 30 nt, synthetic construct
  misc_feature 1..30: note = 40S ribosomal protein S7 (85-94)
  source 1..30: mol_type = other RNA
aagaagttcagcggcaagcacgtggtcttc

SEQ ID NO: 42013 - RNA, 33 nt, synthetic construct
  misc_feature 1..33: note = Lupus La protein (165-175)
  source 1..33: mol_type = other RNA
aagaagttcgtggagacccccggccagaagtac

SEQ ID NO: 42014 - RNA, 27 nt, synthetic construct
  misc_feature 1..27: note = Zinc finger protein 451 (219-227)
  source 1..27: mol_type = other RNA
aagaagttcgtgacccagcagcagtac

SEQ ID NO: 42015 - RNA, 27 nt, synthetic construct
  misc_feature 1..27: note = Melanoma inhibitory activity protein 3 (67-75)
  source 1..27: mol_type = other RNA
aagaagggcgaccccgtgtacgtctac

SEQ ID NO: 42016 - RNA, 27 nt, synthetic construct
  misc_feature 1..27: note = Protein FAM173B (108-116)
  source 1..27: mol_type = other RNA
aagaagggcttcaccgccgtggggtac

SEQ ID NO: 42017 - RNA, 27 nt, synthetic construct
  misc_feature 1..27: note = SEC14-like protein 1 (157-165)
  source 1..27: mol_type = other RNA
aagaagggcaaggagatcatcgagtac

SEQ ID NO: 42018 - RNA, 27 nt, synthetic construct
  misc_feature 1..27: note = Na(+)/H(+) exchange regulatory cofactor NHE-RF1 (158-166)
  source 1..27: mol_type = other RNA
aagaagggccccagcgggtacggcttc

SEQ ID NO: 42019 - RNA, 27 nt, synthetic construct
  misc_feature 1..27: note = Serine/threonine-protein kinase RIO3 (353-361)
  source 1..27: mol_type = other RNA
aagaagcacatcctggtgatgagcttc

SEQ ID NO: 42020 - RNA, 27 nt, synthetic construct
  misc_feature 1..27: note = Heat shock protein HSP 90-beta (203-211)
  source 1..27: mol_type = other RNA
aagaagcacagccagttcatcggctac

SEQ ID NO: 42021 - RNA, 27 nt, synthetic construct
  misc_feature 1..27: note = Dynactin subunit 3 (59-67)
  source 1..27: mol_type = other RNA
aagaagatcgaggacctgatcaagtac

SEQ ID NO: 42022 - RNA, 27 nt, synthetic construct
  misc_feature 1..27: note = 60S ribosomal protein L23a (88-96)
  source 1..27: mol_type = other RNA
aagaagatcgaggacaacaacaccctg

SEQ ID NO: 42023 - RNA, 30 nt, synthetic construct
  misc_feature 1..30: note = Nardilysin (992-1001)
  source 1..30: mol_type = other RNA
aagaagatcgaggagttcctgagctccttc

SEQ ID NO: 42024 - RNA, 27 nt, synthetic construct
  misc_feature 1..27: note = Leydig cell tumor 10 kDa protein homolog (59-67)
  source 1..27: mol_type = other RNA
aagaagatcgagcacgacgtggtcatg

SEQ ID NO: 42025 - RNA, 27 nt, synthetic construct
  misc_feature 1..27: note = Brain-specific angiogenesis inhibitor 1-associated protein 2-like protein 1 (106-114)
  source 1..27: mol_type = other RNA
aagaagatcgagctggacgtgaagtac

SEQ ID NO: 42026 - RNA, 30 nt, synthetic construct
  misc_feature 1..30: note = General transcription factor 3C polypeptide 4 (563-572)
  source 1..30: mol_type = other RNA
aagaagatcgagagctccggcgtgacctac

SEQ ID NO: 42027 - RNA, 30 nt, synthetic construct
  misc_feature 1..30: note = T-complex protein 1 subunit gamma (353-362)
  source 1..30: mol_type = other RNA
aagaagatcggcgacgagtacttcaccttc

SEQ ID NO: 42028 - RNA, 27 nt, synthetic construct
  misc_feature 1..27: note = Gamma-interferon-inducible protein 16 (256-264)
  source 1..27: mol_type = other RNA
aagaagatcatcatcatcagcgactac

SEQ ID NO: 42029 - RNA, 27 nt, synthetic construct
  misc_feature 1..27: note = Synaptojanin-2 (121-129)
  source 1..27: mol_type = other RNA
aagaagatcctgagctccggcgtgttc

SEQ ID NO: 42030 - RNA, 27 nt, synthetic construct
  misc_feature 1..27: note = Golgin-45 (320-328)
  source 1..27: mol_type = other RNA
aagaagatccccagcaccgtggagttc

SEQ ID NO: 42031 - RNA, 27 nt, synthetic construct
  misc_feature 1..27: note = RNA exonuclease 4 (342-350)
  source 1..27: mol_type = other RNA
aagaagatccgcgacacccagaagtac

SEQ ID NO: 42032 - RNA, 27 nt, synthetic construct
  misc_feature 1..27: note = 60S ribosomal protein L23a (38-46)
  source 1..27: mol_type = other RNA
aagaagatccgcaccagccccaccttc

SEQ ID NO: 42033 - RNA, 27 nt, synthetic construct
  misc_feature 1..27: note = Stress-induced-phosphoprotein 1 (237-245)
  source 1..27: mol_type = other RNA
aagaagaaggacttcgacaccgccctg

SEQ ID NO: 42034 - RNA, 30 nt, synthetic construct
  misc_feature 1..30: note = Protein DEK (143-152)
  source 1..30: mol_type = other RNA
aagaagaaggaggagatgctgaagaagttc

SEQ ID NO: 42035 - RNA, 27 nt, synthetic construct
  misc_feature 1..27: note = Protein KIAA2022 (1378-1386)
  source 1..27: mol_type = other RNA
aagaagaagatcaacagcggctcccag

SEQ ID NO: 42036 - RNA, 27 nt, synthetic construct
  misc_feature 1..27: note = Regulatory factor X-associated protein (175-183)
  source 1..27: mol_type = other RNA
aagaagaagaagagcgaccaggccctg

SEQ ID NO: 42037 - RNA, 27 nt, synthetic construct
  misc_feature 1..27: note = UBX domain-containing protein 4 (377-385)
  source 1..27: mol_type = other RNA
aagaagaagctgctcgacctggagctg

SEQ ID NO: 42038 - RNA, 30 nt, synthetic construct
  misc_feature 1..30: note = Prefoldin subunit 3 (51-60)
  source 1..30: mol_type = other RNA
aagaagctggacgagcagtaccagaagtac

SEQ ID NO: 42039 - RNA, 30 nt, synthetic construct
  misc_feature 1..30: note = Non-specific lipid-transfer protein (442-451)
  source 1..30: mol_type = other RNA
aagaagctggaggaggagggcgagcagttc

SEQ ID NO: 42040 - RNA, 30 nt, synthetic construct
  misc_feature 1..30: note = Alpha-taxilin (423-432)
  source 1..30: mol_type = other RNA
aagaagctggagaaggagaccaccatgtac

SEQ ID NO: 42041 - RNA, 27 nt, synthetic construct
  misc_feature 1..27: note = Mitogen-activated protein kinase kinase kinase 1 (792-800)
  source 1..27: mol_type = other RNA
aagaagctgctcagcctgctgaccttc

SEQ ID NO: 42042 - RNA, 30 nt, synthetic construct
  misc_feature 1..30: note = Cold shock domain-containing protein E1 (411-420)
  source 1..30: mol_type = other RNA
aagaagctgcccaagggcaccgtgagcttc

SEQ ID NO: 42043 - RNA, 27 nt, synthetic construct
  misc_feature 1..27: note = Hexokinase-2 (146-154)
  source 1..27: mol_type = other RNA
aagaagctgcccctcggcttcaccttc

SEQ ID NO: 42044 - RNA, 27 nt, synthetic construct
  misc_feature 1..27: note = 14-3-3 protein theta (74-82)
  source 1..27: mol_type = other RNA
aagaagctgcagctcatcaaggactac

SEQ ID NO: 42045 - RNA, 27 nt, synthetic construct
  misc_feature 1..27: note = Nibrin (236-244)
  source 1..27: mol_type = other RNA
aagaagctgagctccgccgtggtcttc

SEQ ID NO: 42046 - RNA, 30 nt, synthetic construct
  misc_feature 1..30: note = Clustered mitochondria protein homolog (294-303)
  source 1..30: mol_type = other RNA
aagaagaacttcgccgtgctgcagaagaag

SEQ ID NO: 42047 - RNA, 27 nt, synthetic construct
  misc_feature 1..27: note = General transcription factor II-I (644-652)
  source 1..27: mol_type = other RNA
aagaagcccgagctggtgatcagctac

SEQ ID NO: 42048 - RNA, 30 nt, synthetic construct
  misc_feature 1..30: note = SUMO-activating enzyme subunit 1 (117-126)
  source 1..30: mol_type = other RNA
aagaagcccgagagcttcttcacccagttc

SEQ ID NO: 42049 - RNA, 27 nt, synthetic construct
  misc_feature 1..27: note = Poly(ADP-ribose)ohydrolase (689-697)
  source 1..27: mol_type = other RNA
aagaagcccaccggcctggtgaccttc

SEQ ID NO: 42050 - RNA, 27 nt, synthetic construct
  misc_feature 1..27: note = DnaJ homolog subfamily C member 3 (406-414)
  source 1..27: mol_type = other RNA
aagaagcaggagatcatcaaggcctac

SEQ ID NO: 42051 - RNA, 30 nt, synthetic construct
  misc_feature 1..30: note = Ankyrin repeat domain-containing protein 17 (1650-1659)
  source 1..30: mol_type = other RNA
aagaagcagcccagcgtgctggtcaccttc

SEQ ID NO: 42052 - RNA, 27 nt, synthetic construct
  misc_feature 1..27: note = Transmembrane emp24 domain-containing protein 3 (82-90)
  source 1..27: mol_type = other RNA
aagaagcagtacgacagcttcacctac

SEQ ID NO: 42053 - RNA, 30 nt, synthetic construct
  misc_feature 1..30: note = Heterogeneous nuclear ribonucleoproteins A2/B1 (151-160)
  source 1..30: mol_type = other RNA
aagaagcgcggcttcgggttcgtgaccttc

SEQ ID NO: 42054 - RNA, 27 nt, synthetic construct
  misc_feature 1..27: note = Heterogeneous nuclear ribonucleoproteins C1/C2 (29-37)
  source 1..27: mol_type = other RNA
aagaagagcgacgtggaggccatcttc

SEQ ID NO: 42055 - RNA, 27 nt, synthetic construct
  misc_feature 1..27: note = RNA-binding protein Raly (34-42)
  source 1..27: mol_type = other RNA
aagaagagcgacgtggagaccatcttc

SEQ ID NO: 42056 - RNA, 27 nt, synthetic construct
  misc_feature 1..27: note = Endoplasmin (404-412)
  source 1..27: mol_type = other RNA
aagaagagcgactacatcaagctgtac

SEQ ID NO: 42057 - RNA, 27 nt, synthetic construct
  misc_feature 1..27: note = Exocyst complex component 2 (196-204)
  source 1..27: mol_type = other RNA
aagaagagcgagggctccctggcctac

SEQ ID NO: 42058 - RNA, 24 nt, synthetic construct
  misc_feature 1..24: note = ATPase family AAA domain-containing protein 5 (1559-1566)
  source 1..24: mol_type = other RNA
aagaagagccagaagaagaagcag

SEQ ID NO: 42059 - RNA, 27 nt, synthetic construct
  misc_feature 1..27: note = 60S ribosomal protein L18a (55-63)
  source 1..27: mol_type = other RNA
aagaagagctccggcgagatcgtgtac

SEQ ID NO: 42060 - RNA, 27 nt, synthetic construct
  misc_feature 1..27: note = Copper transport protein ATOX1 (56-64)
  source 1..27: mol_type = other RNA
aagaagaccggcaagaccgtgagctac

SEQ ID NO: 42061 - RNA, 27 nt, synthetic construct
  misc_feature 1..27: note = Melanoma-associated antigen 1 (104-112)
  source 1..27: mol_type = other RNA
aagaaggtggccgacctggtcggcttc

SEQ ID NO: 42062 - RNA, 27 nt, synthetic construct
  misc_feature 1..27: note = ATP-dependent RNA helicase DDX18 (647-655)
  source 1..27: mol_type = other RNA
aagaaggtggagaagagcaagatcttc

SEQ ID NO: 42063 - RNA, 27 nt, synthetic construct
  misc_feature 1..27: note = Polyadenylate-binding protein 1 (268-276)
  source 1..27: mol_type = other RNA
aagaaggtggagcgccagaccgagctg

SEQ ID NO: 42064 - RNA, 30 nt, synthetic construct
  misc_feature 1..30: note = Asparagine synthetase (glutamine-hydrolyzing) (131-140)
  source 1..30: mol_type = other RNA
aagaaggtgttcctgggccgcgacacctac

SEQ ID NO: 42065 - RNA, 27 nt, synthetic construct
  misc_feature 1..27: note = 60S ribosomal protein L37a (6-14)
  source 1..27: mol_type = other RNA
aagaaggtgggcatcgtcgggaagtac

SEQ ID NO: 42066 - RNA, 27 nt, synthetic construct
  misc_feature 1..27: note = 60S ribosomal protein L23 (74-82)
  source 1..27: mol_type = other RNA
aagaaggtgcaccccgccgtcgtgatc

SEQ ID NO: 42067 - RNA, 27 nt, synthetic construct
  misc_feature 1..27: note = Acyl-CoA desaturase (337-345)
  source 1..27: mol_type = other RNA
aagaaggtgagcaaggccgccatcctg

SEQ ID NO: 42068 - RNA, 27 nt, synthetic construct
  misc_feature 1..27: note = Condensin-2 complex subunit G2 (421-429)
  source 1..27: mol_type = other RNA
aagaaggtgaccggcgagctggccttc

SEQ ID NO: 42069 - RNA, 27 nt, synthetic construct
  misc_feature 1..27: note = Sorting nexin-29 (261-269)
  source 1..27: mol_type = other RNA
aagaaggtgaccaacatcatcagcttc

SEQ ID NO: 42070 - RNA, 30 nt, synthetic construct
  misc_feature 1..30: note = 3-hydroxyisobutyryl-CoA hydrolase, mitochondrial (73-82)
  source 1..30: mol_type = other RNA
aagaagtgggagcaggaccccgagaccttc

SEQ ID NO: 42071 - RNA, 30 nt, synthetic construct
  misc_feature 1..30: note = Rho-related GTP-binding protein RhoE (115-124)
  source 1..30: mol_type = other RNA
aagaagtggaagggcgagatccaggagttc

SEQ ID NO: 42072 - RNA, 27 nt, synthetic construct
  misc_feature 1..27: note = Conserved oligomeric Golgi complex subunit 2 (378-386)
  source 1..27: mol_type = other RNA
aagaagtggaacctgcccgtgtacttc

SEQ ID NO: 42073 - RNA, 27 nt, synthetic construct
  misc_feature 1..27: note = Oxysterol-binding protein 1 (288-296)
  source 1..27: mol_type = other RNA
aagaagtggcagaagagcctgcagtac

SEQ ID NO: 42074 - RNA, 30 nt, synthetic construct
  misc_feature 1..30: note = Cytosolic phospholipase A2 (379-388)
  source 1..30: mol_type = other RNA
aagaagtacgaggagaaccccctgcacttc

SEQ ID NO: 42075 - RNA, 27 nt, synthetic construct
  misc_feature 1..27: note = F-BAR and double SH3 domains protein 2 (153-161)
  source 1..27: mol_type = other RNA
aagaagtacttcgagaccgagcagatg

SEQ ID NO: 42076 - RNA, 30 nt, synthetic construct
  misc_feature 1..30: note = Cysteine andine-rich protein 1 (64-73)
  source 1..30: mol_type = other RNA
aagaagtacggccccaaggggtacggctac

SEQ ID NO: 42077 - RNA, 30 nt, synthetic construct
  misc_feature 1..30: note = WD repeat-containing protein 82 (62-71)
  source 1..30: mol_type = other RNA
aagaagtacggcgtggacctgatccgctac

SEQ ID NO: 42078 - RNA, 27 nt, synthetic construct
  misc_feature 1..27: note = Gamma-interferon-inducible protein 16 (3-11)
  source 1..27: mol_type = other RNA
aagaagtacaagaacatcgtgctgctc

SEQ ID NO: 42079 - RNA, 30 nt, synthetic construct
  misc_feature 1..30: note = AT-rich interactive domain-containing protein 4B (387-396)
  source 1..30: mol_type = other RNA
aagaagtacctgtacggcttcgaggagtac

SEQ ID NO: 42080 - RNA, 33 nt, synthetic construct
  misc_feature 1..33: note = 116 kDa U5 small nuclear ribonucleoprotein component (63-73)
  source 1..33: mol_type = other RNA
aagaagtactaccccaccgccgaggaggtgtac

SEQ ID NO: 42081 - RNA, 27 nt, synthetic construct
  misc_feature 1..27: note = Astrocytic phosphoprotein PEA-15 (122-130)
  source 1..27: mol_type = other RNA
aagctggcccccccgcccaagaaggcc

SEQ ID NO: 42082 - RNA, 27 nt, synthetic construct
  misc_feature 1..27: note = Remodeling and spacing factor 1 (587-595)
  source 1..27: mol_type = other RNA
aagctggagaagagcaagaagaccttc

SEQ ID NO: 42083 - RNA, 36 nt, synthetic construct
  misc_feature 1..36: note = Zymogen granule protein 16 homolog B (100-111)
  source 1..36: mol_type = other RNA
aagctgggcgccctcgggggcaacacccaggaggtg

SEQ ID NO: 42084 - RNA, 24 nt, synthetic construct
  misc_feature 1..24: note = Ubiquitin carboxyl-terminal hydrolase 3 (107-114)
  source 1..24: mol_type = other RNA
aagctgggcctcgtgcagaaggtc

SEQ ID NO: 42085 - RNA, 27 nt, synthetic construct
  misc_feature 1..27: note = Sister chromatid cohesion protein PDS5 homolog A (112-120)
  source 1..27: mol_type = other RNA
aagctgaaggacatcttcctcttcatc

SEQ ID NO: 42086 - RNA, 27 nt, synthetic construct
  misc_feature 1..27: note = DDB1- and CUL4-associated factor 13 (376-384)
  source 1..27: mol_type = other RNA
aagctgaaggagaagttccagcactac

SEQ ID NO: 42087 - RNA, 33 nt, synthetic construct
  misc_feature 1..33: note = Heterogeneous nuclear ribonucleoproteins C1/C2 (187-197)
  source 1..33: mol_type = other RNA
aagctgaagggcgacgacctccaggccatcaag

SEQ ID NO: 42088 - RNA, 27 nt, synthetic construct
  misc_feature 1..27: note = Rap guanine nucleotide exchange factor 2 (828-836)
  source 1..27: mol_type = other RNA
aagctgcccaacaagtacgagaagctc

SEQ ID NO: 42089 - RNA, 27 nt, synthetic construct
  misc_feature 1..27: note = Dynein heavy chain 1, axonemal (2025-2033)
  source 1..27: mol_type = other RNA
aagctgcccccgctcctgaagccctac

SEQ ID NO: 42090 - RNA, 30 nt, synthetic construct
  misc_feature 1..30: note = Signal peptidase complex subunit 2 (173-182)
  source 1..30: mol_type = other RNA
aagctgaccttcatcagcggccgcaccaag

SEQ ID NO: 42091 - RNA, 30 nt, synthetic construct
  misc_feature 1..30: note = Heterogeneous nuclear ribonucleoprotein U-like protein 2 (521-530)
  source 1..30: mol_type = other RNA
aagctggtgcagatcgccagccgcaccaag

SEQ ID NO: 42092 - RNA, 30 nt, synthetic construct
  misc_feature 1..30: note = Dedicator of cytokinesis protein 3 (182-191)
  source 1..30: mol_type = other RNA
aagatgcacctgagctcccgccagagcgtg

SEQ ID NO: 42093 - RNA, 27 nt, synthetic construct
  misc_feature 1..27: note = Neuroblast differentiation-associated protein AHNAK (5087-5095)
  source 1..27: mol_type = other RNA
aagatgtacttccccgacgtggagttc

SEQ ID NO: 42094 - RNA, 27 nt, synthetic construct
  misc_feature 1..27: note = A-kinase anchor protein 9 (1420-1428)
  source 1..27: mol_type = other RNA
aagaacatcgacggcaccatcgagttc

SEQ ID NO: 42095 - RNA, 24 nt, synthetic construct
  misc_feature 1..24: note = Nucleoporin p58/p45 (71-78)
  source 1..24: mol_type = other RNA
aagcccgccaccggcttcaccctg

SEQ ID NO: 42096 - RNA, 24 nt, synthetic construct
  misc_feature 1..24: note = MARCKS-related protein (96-103)
  source 1..24: mol_type = other RNA
aagcccttcaagctgagcggcctc

SEQ ID NO: 42097 - RNA, 27 nt, synthetic construct
  misc_feature 1..27: note = Zinc finger and BTB domain-containing protein 38 (175-183)
  source 1..27: mol_type = other RNA
aagcagttccagagcccctccaccctg

SEQ ID NO: 42098 - RNA, 30 nt, synthetic construct
  misc_feature 1..30: note = ADP-sugar pyrophosphatase (81-90)
  source 1..30: mol_type = other RNA
aagcagttccgccccccgatgggcgggtac

SEQ ID NO: 42099 - RNA, 27 nt, synthetic construct
  misc_feature 1..27: note = 26S protease regulatory subunit 8 (30-38)
  source 1..27: mol_type = other RNA
aagcagatcaaggagatcaaggaggtg

SEQ ID NO: 42100 - RNA, 27 nt, synthetic construct
  misc_feature 1..27: note = Ubiquitin-40S ribosomal protein S27a (48-56)
  source 1..27: mol_type = other RNA
aagcagctggaggacggccgcaccctc

SEQ ID NO: 42101 - RNA, 27 nt, synthetic construct
  misc_feature 1..27: note = tRNA selenocysteine 1-associated protein 1 (88-96)
  source 1..27: mol_type = other RNA
aagcagcccgacaacagcccggagtac

SEQ ID NO: 42102 - RNA, 27 nt, synthetic construct
  misc_feature 1..27: note = MARVEL domain-containing protein 2 (540-548)
  source 1..27: mol_type = other RNA
aagcagcgcatccaggagtacgacaag

SEQ ID NO: 42103 - RNA, 27 nt, synthetic construct
  misc_feature 1..27: note = Heat shock 70 kDa protein 1B (423-431)
  source 1..27: mol_type = other RNA
aagcagacccagatcttcaccacgtac

SEQ ID NO: 42104 - RNA, 27 nt, synthetic construct
  misc_feature 1..27: note = Mortality factor 4-like protein 1 (38-46)
  source 1..27: mol_type = other RNA
aagcaggtgaagtacttcatccactac

SEQ ID NO: 42105 - RNA, 30 nt, synthetic construct
  misc_feature 1..30: note = ADP-ribosylation factor-binding protein GGA2 (311-320)
  source 1..30: mol_type = other RNA
aagcaggtgatggagggccgcgtcaccttc

SEQ ID NO: 42106 - RNA, 36 nt, synthetic construct
  misc_feature 1..36: note = 60S ribosomal protein L17 (74-85)
  source 1..36: mol_type = other RNA
aagcagtggggctggacccaggggcgctggcccaag

SEQ ID NO: 42107 - RNA, 27 nt, synthetic construct
  misc_feature 1..27: note = ATP-dependent RNA helicase DDX3X (264-272)
  source 1..27: mol_type = other RNA
aagcagtaccccatcagcctggtgctc

SEQ ID NO: 42108 - RNA, 27 nt, synthetic construct
  misc_feature 1..27: note = Cancer-related nucleoside-triphosphatase (73-81)
  source 1..27: mol_type = other RNA
aagcgcgagtgccgggtgggccagtac

SEQ ID NO: 42109 - RNA, 30 nt, synthetic construct
  misc_feature 1..30: note = Unconventional myosin-VIIb (624-633)
  source 1..30: mol_type = other RNA
aagcgccccagcaccctgggctcccagttc

SEQ ID NO: 42110 - RNA, 33 nt, synthetic construct
  misc_feature 1..33: note = Vigilin (550-560)
  source 1..33: mol_type = other RNA
aagagcgacatcgtgcagctgcgcggccccaag

SEQ ID NO: 42111 - RNA, 30 nt, synthetic construct
  misc_feature 1..30: note = Cyclin-dependent kinase-like 5 (680-689)
  source 1..30: mol_type = other RNA
aagagcgagggcggggtgtaccacgacccc

SEQ ID NO: 42112 - RNA, 27 nt, synthetic construct
  misc_feature 1..27: note = Clathrin heavy chain 1 (706-714)
  source 1..27: mol_type = other RNA
aagagcttcgagggcctgttctacttc

SEQ ID NO: 42113 - RNA, 27 nt, synthetic construct
  misc_feature 1..27: note = General transcription factor 3C polypeptide 2 (146-154)
  source 1..27: mol_type = other RNA
aagagcaaggccgagctgctcctgctg

SEQ ID NO: 42114 - RNA, 33 nt, synthetic construct
  misc_feature 1..33: note = Calcyclin-binding protein (33-43)
  source 1..33: mol_type = other RNA
aagagcaagatcgagaccgagatcaagaacaag

SEQ ID NO: 42115 - RNA, 27 nt, synthetic construct
  misc_feature 1..27: note = Dol-P-Glc:Glc(2)Man(9)GlcNAc(2)-PP-Dol alpha-1,2-glucosyltransferase (389-397)
  source 1..27: mol_type = other RNA
aagagcaagtccatcttctggaacctg

SEQ ID NO: 42116 - RNA, 27 nt, synthetic construct
  misc_feature 1..27: note = Leucine-rich repeat-containing protein 40 (210-218)
  source 1..27: mol_type = other RNA
aagagcctgcccgccgagatcaaccgc

SEQ ID NO: 42117 - RNA, 27 nt, synthetic construct
  misc_feature 1..27: note = Solute carrier family 7 member 13 (416-424)
  source 1..27: mol_type = other RNA
aagagccccaacgtgcactacgtctac

SEQ ID NO: 42118 - RNA, 27 nt, synthetic construct
  misc_feature 1..27: note = Aromatase (99-107)
  source 1..27: mol_type = other RNA
aagagctccagcatgttccacatcatg

SEQ ID NO: 42119 - RNA, 27 nt, synthetic construct
  misc_feature 1..27: note = Thromboxane-A synthase (118-126)
  source 1..27: mol_type = other RNA
aagagcgtggccgactccgtcctgttc

SEQ ID NO: 42120 - RNA, 33 nt, synthetic construct
  misc_feature 1..33: note = Hypoxia up-regulated protein 1 (249-259)
  source 1..33: mol_type = other RNA
aagaccaaggaggccggcatgcagccccagctg

SEQ ID NO: 42121 - RNA, 30 nt, synthetic construct
  misc_feature 1..30: note = Translin (76-85)
  source 1..30: mol_type = other RNA
aagaccaagttccccgccgagcagtactac

SEQ ID NO: 42122 - RNA, 27 nt, synthetic construct
  misc_feature 1..27: note = RNA-binding protein PNO1 (189-197)
  source 1..27: mol_type = other RNA
aagaccaagttcaccatcgagaacgtg

SEQ ID NO: 42123 - RNA, 27 nt, synthetic construct
  misc_feature 1..27: note = DNA damage-binding protein 1 (915-923)
  source 1..27: mol_type = other RNA
aagaccaagggcgacttcatcctggtg

SEQ ID NO: 42124 - RNA, 27 nt, synthetic construct
  misc_feature 1..27: note = N-acetylgalactosamine kinase (102-110)
  source 1..27: mol_type = other RNA
aagaccaagcccctgtggcacaactac

SEQ ID NO: 42125 - RNA, 27 nt, synthetic construct
  misc_feature 1..27: note = Splicing factor 3B subunit 3 (294-302)
  source 1..27: mol_type = other RNA
aagaccaagagcatgttcttcttcctg

SEQ ID NO: 42126 - RNA, 36 nt, synthetic construct
  misc_feature 1..36: note = Heterogeneous nuclear ribonucleoproteins A2/B1 (3-14)
  source 1..36: mol_type = other RNA
aagaccctggagaccgtgcccctcgagcgcaagaag

SEQ ID NO: 42127 - RNA, 27 nt, synthetic construct
  misc_feature 1..27: note = ADP-ribosylation factor-like protein 11 (25-33)
  source 1..27: mol_type = other RNA
aagaccaccctgctctacaagctgaag

SEQ ID NO: 42128 - RNA, 27 nt, synthetic construct
  misc_feature 1..27: note = Catenin alpha-2 (794-802)
  source 1..27: mol_type = other RNA
aaggtgaaggccgaggtccagaacctg

SEQ ID NO: 42129 - RNA, 27 nt, synthetic construct
  misc_feature 1..27: note = Serine/threonine-protein phosphatase 2A 65 kDa regulatory subunit A alpha isoform (305-313)
  source 1..27: mol_type = other RNA
aaggtgaaggagttctgcgagaacctg

SEQ ID NO: 42130 - RNA, 27 nt, synthetic construct
  misc_feature 1..27: note = Septin-7 (364-372)
  source 1..27: mol_type = other RNA
aaggtgaaggagaaggtccagaagctg

SEQ ID NO: 42131 - RNA, 27 nt, synthetic construct
  misc_feature 1..27: note = Kelch-like protein 24 (128-136)
  source 1..27: mol_type = other RNA
aaggtgaagatcaccaccgagaacgtc

SEQ ID NO: 42132 - RNA, 33 nt, synthetic construct
  misc_feature 1..33: note = Ubiquitin-40S ribosomal protein S27a (97-107)
  source 1..33: mol_type = other RNA
aaggtgaagctggccgtcctcaagtactacaag

SEQ ID NO: 42133 - RNA, 30 nt, synthetic construct
  misc_feature 1..30: note = Thioredoxin-like protein 4A (51-60)
  source 1..30: mol_type = other RNA
aaggtgaagaacttcgccgtcatctacctg

SEQ ID NO: 42134 - RNA, 27 nt, synthetic construct
  misc_feature 1..27: note = FACT complex subunit SPT16 (424-432)
  source 1..27: mol_type = other RNA
aaggtgaagaacgtcggcatcttcctg

SEQ ID NO: 42135 - RNA, 30 nt, synthetic construct
  misc_feature 1..30: note = Peptidylprolyl isomerase domain and WD repeat-containing protein 1 (65-74)
  source 1..30: mol_type = other RNA
aaggtgctggagttcgagcgcgtctacctc

SEQ ID NO: 42136 - RNA, 30 nt, synthetic construct
  misc_feature 1..30: note = Exocyst complex component 4 (568-577)
  source 1..30: mol_type = other RNA
aaggtgctgggcgtccagcgccccctcctg

SEQ ID NO: 42137 - RNA, 30 nt, synthetic construct
  misc_feature 1..30: note = 60S ribosomal protein L15 (5-14)
  source 1..30: mol_type = other RNA
aagtacatccaggagctgtggcgcaagaag

SEQ ID NO: 42138 - RNA, 27 nt, synthetic construct
  misc_feature 1..27: note = Proto-oncogene vav (272-280)
  source 1..27: mol_type = other RNA
aagtacaaggagcgcttcctggtgtac

SEQ ID NO: 42139 - RNA, 30 nt, synthetic construct
  misc_feature 1..30: note = 60S ribosomal protein L35 (77-86)
  source 1..30: mol_type = other RNA
aagtacaagcccctggacctccgcccgaag

SEQ ID NO: 42140 - RNA, 36 nt, synthetic construct
  misc_feature 1..36: note = Protein mab-21-like 3 (2-13)
  source 1..36: mol_type = other RNA
aagtacctgaccgtgggcgacctcgaggactgcctg

SEQ ID NO: 42141 - RNA, 27 nt, synthetic construct
  misc_feature 1..27: note = Protein archease (35-43)
  source 1..27: mol_type = other RNA
aagtaccccccggtgaaccgcaagtac

SEQ ID NO: 42142 - RNA, 27 nt, synthetic construct
  misc_feature 1..27: note = RNA-binding protein 42 (445-453)
  source 1..27: mol_type = other RNA
aagtacgtgggcagccgccccatcaag

SEQ ID NO: 42143 - RNA, 27 nt, synthetic construct
  misc_feature 1..27: note = Suppressor of tumorigenicity 7 protein-like (66-74)
  source 1..27: mol_type = other RNA
ctggccgccgtgaccgtcttcctcaac

SEQ ID NO: 42144 - RNA, 27 nt, synthetic construct
  misc_feature 1..27: note = Cytochrome c oxidase assembly protein COX14 (7-15)
  source 1..27: mol_type = other RNA
ctggccgacatcggctacaagaccttc

SEQ ID NO: 42145 - RNA, 30 nt, synthetic construct
  misc_feature 1..30: note = Serine/arginine repetitive matrix protein 2 (2256-2265)
  source 1..30: mol_type = other RNA
ctggccgacagccgcacccccgccgcggcc

SEQ ID NO: 42146 - RNA, 27 nt, synthetic construct
  misc_feature 1..27: note = Neutral amino acid transporter A (75-83)
  source 1..27: mol_type = other RNA
ctggccttccccggcgagatgctcctg

SEQ ID NO: 42147 - RNA, 27 nt, synthetic construct
  misc_feature 1..27: note = Apolipoprotein B receptor (1069-1077)
  source 1..27: mol_type = other RNA
ctggcccaccccggcatgatgcaggag

SEQ ID NO: 42148 - RNA, 30 nt, synthetic construct
  misc_feature 1..30: note = Dystrophin-related protein 2 (299-308)
  source 1..30: mol_type = other RNA
ctggccatcagcgacgtgcacctctccatg

SEQ ID NO: 42149 - RNA, 27 nt, synthetic construct
  misc_feature 1..27: note = Microtubule-associated protein 4 (558-566)
  source 1..27: mol_type = other RNA
ctggccaaggacggcgtgctcaccctg

SEQ ID NO: 42150 - RNA, 27 nt, synthetic construct
  misc_feature 1..27: note = Renin receptor (203-211)
  source 1..27: mol_type = other RNA
ctggccaaggaccacagccccgacctc

SEQ ID NO: 42151 - RNA, 27 nt, synthetic construct
  misc_feature 1..27: note = Minor histocompatibility antigen H13 (335-343)
  source 1..27: mol_type = other RNA
ctggccaagggcgaggtgaccgagatg

SEQ ID NO: 42152 - RNA, 27 nt, synthetic construct
  misc_feature 1..27: note = Nectin-1 (16-24)
  source 1..27: mol_type = other RNA
ctggccctcggcctgaccgccttcttc

SEQ ID NO: 42153 - RNA, 33 nt, synthetic construct
  misc_feature 1..33: note = Heterogeneous nuclear ribonucleoprotein M (609-619)
  source 1..33: mol_type = other RNA
ctggccatgggcgggggcgggggcgccagcttc

SEQ ID NO: 42154 - RNA, 30 nt, synthetic construct
  misc_feature 1..30: note = Golgin subfamily A member 3 (204-213)
  source 1..30: mol_type = other RNA
ctggccatgaccaaggagtacagcttcctc

SEQ ID NO: 42155 - RNA, 27 nt, synthetic construct
  misc_feature 1..27: note = Thioredoxin-interacting protein (222-230)
  source 1..27: mol_type = other RNA
ctggccaacggccagaccaaggtgctc

SEQ ID NO: 42156 - RNA, 33 nt, synthetic construct
  misc_feature 1..33: note = Orexin receptor type 1 (225-235)
  source 1..33: mol_type = other RNA
ctggcccccctcggcctgatggccatggcgtac

SEQ ID NO: 42157 - RNA, 27 nt, synthetic construct
  misc_feature 1..27: note = Dynein heavy chain 6, axonemal (1621-1629)
  source 1..27: mol_type = other RNA
ctggcccgcaagatgacccagatgtac

SEQ ID NO: 42158 - RNA, 27 nt, synthetic construct
  misc_feature 1..27: note = Nucleolar protein 16 (58-66)
  source 1..27: mol_type = other RNA
ctggccgtggaccccaaccgcgccgtc

SEQ ID NO: 42159 - RNA, 27 nt, synthetic construct
  misc_feature 1..27: note = Ectonucleoside triphosphate diphosphohydrolase 1 (33-41)
  source 1..27: mol_type = other RNA
ctggccgtgggcctcacccagaacaag

SEQ ID NO: 42160 - RNA, 27 nt, synthetic construct
  misc_feature 1..27: note = 60S ribosomal protein L29 (96-104)
  source 1..27: mol_type = other RNA
ctggcctacatcgcccaccccaagctc

SEQ ID NO: 42161 - RNA, 27 nt, synthetic construct
  misc_feature 1..27: note = Potassium-transporting ATPase alpha chain 2 (598-606)
  source 1..27: mol_type = other RNA
ctgtgcttcgtgggcctcctgagcatg

SEQ ID NO: 42162 - RNA, 30 nt, synthetic construct
  misc_feature 1..30: note = Eukaryotic translation initiation factor 3 subunit C-like protein (635-644)
  source 1..30: mol_type = other RNA
ctggacatccagagctccggccgcgccaag

SEQ ID NO: 42163 - RNA, 27 nt, synthetic construct
  misc_feature 1..27: note = Cullin-7 (163-171)
  source 1..27: mol_type = other RNA
ctggacctcctgatgcacatgctgagc

SEQ ID NO: 42164 - RNA, 27 nt, synthetic construct
  misc_feature 1..27: note = Sodium-driven chloride bicarbonate exchanger (854-862)
  source 1..27: mol_type = other RNA
ctggacctcctgatggtggccgtcatg

SEQ ID NO: 42165 - RNA, 27 nt, synthetic construct
  misc_feature 1..27: note = Fibrillin-3 (2702-2710)
  source 1..27: mol_type = other RNA
ctggacagcgaggccctcctgaccctg

SEQ ID NO: 42166 - RNA, 27 nt, synthetic construct
  misc_feature 1..27: note = Uncharacterized protein C9orf171 (285-293)
  source 1..27: mol_type = other RNA
ctggacaccttccccaccgaggccgac

SEQ ID NO: 42167 - RNA, 30 nt, synthetic construct
  misc_feature 1..30: note = Ankyrin repeat and LEM domain-containing protein 1 (184-193)
  source 1..30: mol_type = other RNA
ctggaggccgaccccggcccgcccagcctc

SEQ ID NO: 42168 - RNA, 24 nt, synthetic construct
  misc_feature 1..24: note = Core histone macro-H2A.1 (61-68)
  source 1..24: mol_type = other RNA
ctggagctcgccggcaacgccgcg

SEQ ID NO: 42169 - RNA, 27 nt, synthetic construct
  misc_feature 1..27: note = Alpha-mannosidase 2x (1106-1114)
  source 1..27: mol_type = other RNA
ctgttccacggcctcgacgtggtcttc

SEQ ID NO: 42170 - RNA, 27 nt, synthetic construct
  misc_feature 1..27: note = Vasohibin-2 (48-56)
  source 1..27: mol_type = other RNA
ctgttccacgtgaacaagagcggcttc

SEQ ID NO: 42171 - RNA, 27 nt, synthetic construct
  misc_feature 1..27: note = Pre-mRNA-processing factor 17 (418-426)
  source 1..27: mol_type = other RNA
ctgggcgccgtgaacaccatcgtcttc

SEQ ID NO: 42172 - RNA, 27 nt, synthetic construct
  misc_feature 1..27: note = Pumilio homolog 1 (673-681)
  source 1..27: mol_type = other RNA
ctgggcttcgggagctccagctccctc

SEQ ID NO: 42173 - RNA, 27 nt, synthetic construct
  misc_feature 1..27: note = Putative nuclease HARBI1 (77-85)
  source 1..27: mol_type = other RNA
ctgggcttctacaccagcgggtccttc

SEQ ID NO: 42174 - RNA, 30 nt, synthetic construct
  misc_feature 1..30: note = Hyaluronidase-4 (205-214)
  source 1..30: mol_type = other RNA
ctgggcatcaagagccgccccaaggggctc

SEQ ID NO: 42175 - RNA, 30 nt, synthetic construct
  misc_feature 1..30: note = NF-kappa-B-repressing factor (591-600)
  source 1..30: mol_type = other RNA
ctgggcctcgacgtggagcgcgtcaacaag

SEQ ID NO: 42176 - RNA, 27 nt, synthetic construct
  misc_feature 1..27: note = G-protein coupled receptor family C group 6 member A (447-455)
  source 1..27: mol_type = other RNA
ctgggcgtgctcaagaacgtcaccttc

SEQ ID NO: 42177 - RNA, 27 nt, synthetic construct
  misc_feature 1..27: note = L-xylulose reductase (27-35)
  source 1..27: mol_type = other RNA
ctgcacgccaccggcgcccgcgtggtc

SEQ ID NO: 42178 - RNA, 27 nt, synthetic construct
  misc_feature 1..27: note = Sterol regulatory element-binding protein 1 (1037-1045)
  source 1..27: mol_type = other RNA
ctgcacgaggccaccgcccgcctcatg

SEQ ID NO: 42179 - RNA, 27 nt, synthetic construct
  misc_feature 1..27: note = U3 small nucleolar ribonucleoprotein protein MPP10 (405-413)
  source 1..27: mol_type = other RNA
ctgcacttcgaccacgccgtgcgcatg

SEQ ID NO: 42180 - RNA, 27 nt, synthetic construct
  misc_feature 1..27: note = Nucleoporin Nup43 (101-109)
  source 1..27: mol_type = other RNA
ctgcaccaccccaacaaccagaccctc

SEQ ID NO: 42181 - RNA, 27 nt, synthetic construct
  misc_feature 1..27: note = Delta(14)-sterol reductase (279-287)
  source 1..27: mol_type = other RNA
ctgcaccacccccagccgctcggcctg

SEQ ID NO: 42182 - RNA, 27 nt, synthetic construct
  misc_feature 1..27: note = Phospholipid-transporting ATPase ID (589-597)
  source 1..27: mol_type = other RNA
ctgcaccacagcacccaggagctcctg

SEQ ID NO: 42183 - RNA, 30 nt, synthetic construct
  misc_feature 1..30: note = Neuron navigator 3 (2128-2137)
  source 1..30: mol_type = other RNA
ctgcaccacgtgggcagcctctccgacatc

SEQ ID NO: 42184 - RNA, 27 nt, synthetic construct
  misc_feature 1..27: note = GTP-binding protein 1 (551-559)
  source 1..27: mol_type = other RNA
ctgcacatcgaccagcgcctcgtgttc

SEQ ID NO: 42185 - RNA, 27 nt, synthetic construct
  misc_feature 1..27: note = Cyclin-I (151-159)
  source 1..27: mol_type = other RNA
ctgcacatcttccacgccatcgccgtg

SEQ ID NO: 42186 - RNA, 27 nt, synthetic construct
  misc_feature 1..27: note = Thioredoxin domain-containing protein 9 (138-146)
  source 1..27: mol_type = other RNA
ctgcacatcaaggtgatccccaccctc

SEQ ID NO: 42187 - RNA, 27 nt, synthetic construct
  misc_feature 1..27: note = Myb-binding protein 1A (438-446)
  source 1..27: mol_type = other RNA
ctgcacatgcccgagcgcgccgtgttc

SEQ ID NO: 42188 - RNA, 27 nt, synthetic construct
  misc_feature 1..27: note = Probable ATP-dependent RNA helicase DDX56 (212-220)
  source 1..27: mol_type = other RNA
ctgcacaaccccgtgaccctcaagctg

SEQ ID NO: 42189 - RNA, 27 nt, synthetic construct
  misc_feature 1..27: note = Gem-associated protein 5 (107-115)
  source 1..27: mol_type = other RNA
ctgcaccagcacaccatcagcaccctc

SEQ ID NO: 42190 - RNA, 27 nt, synthetic construct
  misc_feature 1..27: note = G patch domain-containing protein 8 (828-836)
  source 1..27: mol_type = other RNA
ctgcaccagaagagcccctcccagtac

SEQ ID NO: 42191 - RNA, 27 nt, synthetic construct
  misc_feature 1..27: note = Actin-binding LIM protein 1 (664-672)
  source 1..27: mol_type = other RNA
ctgcaccgccccgtgagcaccgacttc

SEQ ID NO: 42192 - RNA, 27 nt, synthetic construct
  misc_feature 1..27: note = Cytochrome c oxidase subunit 2 (160-168)
  source 1..27: mol_type = other RNA
ctgcacagctgggccgtgcccaccctc

SEQ ID NO: 42193 - RNA, 27 nt, synthetic construct
  misc_feature 1..27: note = IQ motif and SEC7 domain-containing protein 1 (263-271)
  source 1..27: mol_type = other RNA
ctgcacaccgaggaggcccccgccctc

SEQ ID NO: 42194 - RNA, 27 nt, synthetic construct
  misc_feature 1..27: note = Selenoprotein S (22-30)
  source 1..27: mol_type = other RNA
ctgcacaccaccgtgggcagcctcctg

SEQ ID NO: 42195 - RNA, 27 nt, synthetic construct
  misc_feature 1..27: note = Plectin (1023-1031)
  source 1..27: mol_type = other RNA
ctgcacgtggacatgaagagcctcctg

SEQ ID NO: 42196 - RNA, 27 nt, synthetic construct
  misc_feature 1..27: note = Unconventional myosin-Ih (186-194)
  source 1..27: mol_type = other RNA
ctgatcgagaagagccgcgtggtctac

SEQ ID NO: 42197 - RNA, 33 nt, synthetic construct
  misc_feature 1..33: note = Heat shock 70 kDa protein 1-like (198-208)
  source 1..33: mol_type = other RNA
ctgatcttcgacctcggcgggggcaccttcgac

SEQ ID NO: 42198 - RNA, 27 nt, synthetic construct
  misc_feature 1..27: note = DnaJ homolog subfamily C member 13 (1046-1054)
  source 1..27: mol_type = other RNA
ctgatcctcaacatgctgatcaccatg

SEQ ID NO: 42199 - RNA, 27 nt, synthetic construct
  misc_feature 1..27: note = Probable ATP-dependent RNA helicase DDX59 (275-283)
  source 1..27: mol_type = other RNA
ctgatcctcacccccacccgcgagctg

SEQ ID NO: 42200 - RNA, 27 nt, synthetic construct
  misc_feature 1..27: note = Integrin beta-7 (381-389)
  source 1..27: mol_type = other RNA
ctgatcatggacgcctacaacagcctc

SEQ ID NO: 42201 - RNA, 27 nt, synthetic construct
  misc_feature 1..27: note = Leucine-rich repeat and fibronectin type-III domain-containing protein 4 (447-455)
  source 1..27: mol_type = other RNA
ctgatctaccgcatcgtgcccgccagc

SEQ ID NO: 42202 - RNA, 27 nt, synthetic construct
  misc_feature 1..27: note = Protein disulfide-isomerase A2 (328-336)
  source 1..27: mol_type = other RNA
ctgaaggccgaggccgcgcccaccctc

SEQ ID NO: 42203 - RNA, 27 nt, synthetic construct
  misc_feature 1..27: note = Mini-chromosome maintenance complex-binding protein (430-438)
  source 1..27: mol_type = other RNA
ctgaagttcatcccccacaaggactac

SEQ ID NO: 42204 - RNA, 27 nt, synthetic construct
  misc_feature 1..27: note = RNA-binding protein 8A (113-121)
  source 1..27: mol_type = other RNA
ctgaagggctacaccctcgtggagtac

SEQ ID NO: 42205 - RNA, 27 nt, synthetic construct
  misc_feature 1..27: note = Mannosyl-oligosaccharide glucosidase (326-334)
  source 1..27: mol_type = other RNA
ctgaagatccccatcagcatcgagttc

SEQ ID NO: 42206 - RNA, 27 nt, synthetic construct
  misc_feature 1..27: note = ER membrane protein complex subunit 1 (411-419)
  source 1..27: mol_type = other RNA
ctgaagaaggacgacagcgtgggctac

SEQ ID NO: 42207 - RNA, 33 nt, synthetic construct
  misc_feature 1..33: note = DENN domain-containing protein 4C (704-714)
  source 1..33: mol_type = other RNA
ctgaagctcttcgaccgcccccaggagctgaag

SEQ ID NO: 42208 - RNA, 27 nt, synthetic construct
  misc_feature 1..27: note = Eukaryotic translation initiation factor 3 subunit D (447-455)
  source 1..27: mol_type = other RNA
ctgaagctcggctacgtgagccgctac

SEQ ID NO: 42209 - RNA, 27 nt, synthetic construct
  misc_feature 1..27: note = Serine/threonine-protein kinase PAK 2 (301-309)
  source 1..27: mol_type = other RNA
ctgaagaaccccaacatcgtgaacttc

SEQ ID NO: 42210 - RNA, 27 nt, synthetic construct
  misc_feature 1..27: note = Elongation factor 1-alpha 1 (272-280)
  source 1..27: mol_type = other RNA
ctgaagcccggcatggtggtcaccttc

SEQ ID NO: 42211 - RNA, 27 nt, synthetic construct
  misc_feature 1..27: note = X-ray repair cross-complementing protein 6 (281-289)
  source 1..27: mol_type = other RNA
ctgaagcccccgcccatcaagctctac

SEQ ID NO: 42212 - RNA, 27 nt, synthetic construct
  misc_feature 1..27: note = Choline/ethanolaminephosphotransferase 1 (48-56)
  source 1..27: mol_type = other RNA
ctgaagcgcctcgaggagcaccggtac

SEQ ID NO: 42213 - RNA, 27 nt, synthetic construct
  misc_feature 1..27: note = Renin receptor (22-30)
  source 1..27: mol_type = other RNA
ctgaagagccccggctccgtggtcttc

SEQ ID NO: 42214 - RNA, 27 nt, synthetic construct
  misc_feature 1..27: note = Nucleolin (323-331)
  source 1..27: mol_type = other RNA
ctgaagaccggcatcagcgacgtgttc

SEQ ID NO: 42215 - RNA, 27 nt, synthetic construct
  misc_feature 1..27: note = 26S protease regulatory subunit 7 (33-41)
  source 1..27: mol_type = other RNA
ctgaagacctacggccagagcacctac

SEQ ID NO: 42216 - RNA, 24 nt, synthetic construct
  misc_feature 1..24: note = 60S ribosomal protein L19 (125-132)
  source 1..24: mol_type = other RNA
ctgaaggtgaagggcaacgtcttc

SEQ ID NO: 42217 - RNA, 27 nt, synthetic construct
  misc_feature 1..27: note = Forkhead box protein O3 (93-101)
  source 1..27: mol_type = other RNA
ctgctcgaggacagcgcccgcgtgctg

SEQ ID NO: 42218 - RNA, 27 nt, synthetic construct
  misc_feature 1..27: note = Dynein heavy chain 9, axonemal (368-376)
  source 1..27: mol_type = other RNA
ctgctcatccagcaggccagcaactac

SEQ ID NO: 42219 - RNA, 33 nt, synthetic construct
  misc_feature 1..33: note = Dynein heavy chain 10, axonemal (1334-1344)
  source 1..33: mol_type = other RNA
ctgctcctggacctgaagaacgaggccctccgc

SEQ ID NO: 42220 - RNA, 27 nt, synthetic construct
  misc_feature 1..27: note = ER membrane protein complex subunit 3 (6-14)
  source 1..27: mol_type = other RNA
ctgctcctggacagcaacatccgcctg

SEQ ID NO: 42221 - RNA, 27 nt, synthetic construct
  misc_feature 1..27: note = Echinoderm microtubule-associated protein-like 4 (278-286)
  source 1..27: mol_type = other RNA
ctgctccccaccggcaagatcgtgtac

SEQ ID NO: 42222 - RNA, 27 nt, synthetic construct
  misc_feature 1..27: note = Chromodomain-helicase-DNA-binding protein 2 (628-636)
  source 1..27: mol_type = other RNA
ctgctctacaagaccctgatcgacttc

SEQ ID NO: 42223 - RNA, 27 nt, synthetic construct
  misc_feature 1..27: note = Integrator complex subunit 10 (519-527)
  source 1..27: mol_type = other RNA
ctgatgtgctacatggtgctccccatc

SEQ ID NO: 42224 - RNA, 33 nt, synthetic construct
  misc_feature 1..33: note = Melatonin receptor type 1A (106-116)
  source 1..33: mol_type = other RNA
ctgatgggcctcagcgtgatcgggtccatcttc

SEQ ID NO: 42225 - RNA, 27 nt, synthetic construct
  misc_feature 1..27: note = DNA-dependent protein kinase catalytic subunit (2219-2227)
  source 1..27: mol_type = other RNA
ctgatgaagcacgtgttccaccccaag

SEQ ID NO: 42226 - RNA, 33 nt, synthetic construct
  misc_feature 1..33: note = Eukaryotic translation initiation factor 3 subunit H (211-221)
  source 1..33: mol_type = other RNA
ctgatgtgggagctcgagaagaagagcgccgtg

SEQ ID NO: 42227 - RNA, 27 nt, synthetic construct
  misc_feature 1..27: note = CTP synthase 2 (334-342)
  source 1..27: mol_type = other RNA
ctgatgtacatcgacagcatcgacctc

SEQ ID NO: 42228 - RNA, 27 nt, synthetic construct
  misc_feature 1..27: note = Ubiquitin-like modifier-activating enzyme ATG7 (128-136)
  source 1..27: mol_type = other RNA
ctgaacaagttcctcctgctgaccttc

SEQ ID NO: 42229 - RNA, 30 nt, synthetic construct
  misc_feature 1..30: note = Carboxy-terminal domain RNA polymerase II polypeptide A small phosphatase 1 (54-63)
  source 1..30: mol_type = other RNA
ctgcccgcccacagcggcgccccgctcctg

SEQ ID NO: 42230 - RNA, 27 nt, synthetic construct
  misc_feature 1..27: note = Neutrophil cytosol factor 4 (89-97)
  source 1..27: mol_type = other RNA
ctgcccgccaaggtgtacgtcggcgtg

SEQ ID NO: 42231 - RNA, 27 nt, synthetic construct
  misc_feature 1..27: note = GPI transamidase component PIG-T (430-438)
  source 1..27: mol_type = other RNA
ctgcccgccaacagcgtgaccaaggtc

SEQ ID NO: 42232 - RNA, 27 nt, synthetic construct
  misc_feature 1..27: note = Tyrosine-protein phosphatase non-receptor type 12 (677-685)
  source 1..27: mol_type = other RNA
ctgcccgagcgcaccccggagagcttc

SEQ ID NO: 42233 - RNA, 27 nt, synthetic construct
  misc_feature 1..27: note = Collagen alpha-2(IV) chain (385-393)
  source 1..27: mol_type = other RNA
ctgcccggcccgcccgggctcagcatc

SEQ ID NO: 42234 - RNA, 27 nt, synthetic construct
  misc_feature 1..27: note = DDB1- and CUL4-associated factor 13 (548-556)
  source 1..27: mol_type = other RNA
ctgcccaagagcatctactcccagatc

SEQ ID NO: 42235 - RNA, 27 nt, synthetic construct
  misc_feature 1..27: note = Interferon regulatory factor 2-binding protein-like (271-279)
  source 1..27: mol_type = other RNA
ctgcccccgccccccccccacgccctc

SEQ ID NO: 42236 - RNA, 27 nt, synthetic construct
  misc_feature 1..27: note = Neutral amino acid transporter A (142-150)
  source 1..27: mol_type = other RNA
ctgcccacccacgacctcccgctgatc

SEQ ID NO: 42237 - RNA, 24 nt, synthetic construct
  misc_feature 1..24: note = General transcription factor 3C polypeptide 2 (665-672)
  source 1..24: mol_type = other RNA
ctgccctacaacggcgtgaccgtc

SEQ ID NO: 42238 - RNA, 27 nt, synthetic construct
  misc_feature 1..27: note = Signal peptidase complex catalytic subunit SEC11C (158-166)
  source 1..27: mol_type = other RNA
ctgccctacgtgggcatggtcaccatc

SEQ ID NO: 42239 - RNA, 27 nt, synthetic construct
  misc_feature 1..27: note = WD repeat-containing protein 34 (423-431)
  source 1..27: mol_type = other RNA
ctgcaggcccccccgctcaccagcctg

SEQ ID NO: 42240 - RNA, 27 nt, synthetic construct
  misc_feature 1..27: note = Protein unc-13 homolog C (117-125)
  source 1..27: mol_type = other RNA
ctgcaggagctcagctccatcgagagc

SEQ ID NO: 42241 - RNA, 27 nt, synthetic construct
  misc_feature 1..27: note = TBC1 domain family member 4 (1186-1194)
  source 1..27: mol_type = other RNA
ctgcaggagagctcctacagctgcgag

SEQ ID NO: 42242 - RNA, 30 nt, synthetic construct
  misc_feature 1..30: note = WD repeat-containing protein 82 (288-297)
  source 1..30: mol_type = other RNA
ctgcagttcaaccccaagttcatgaccttc

SEQ ID NO: 42243 - RNA, 33 nt, synthetic construct
  misc_feature 1..33: note = Serine/threonine-protein kinase RIO2 (521-531)
  source 1..33: mol_type = other RNA
ctgcagaagggcgaggccaacatcttcaccaag

SEQ ID NO: 42244 - RNA, 30 nt, synthetic construct
  misc_feature 1..30: note = WAS protein family homolog 1 (40-49)
  source 1..30: mol_type = other RNA
ctgcagaaggtgagcggcgacatcttctcc

SEQ ID NO: 42245 - RNA, 27 nt, synthetic construct
  misc_feature 1..27: note = Tubulin beta chain (42-50)
  source 1..27: mol_type = other RNA
ctgcagctcgaccgcatcagcgtgtac

SEQ ID NO: 42246 - RNA, 27 nt, synthetic construct
  misc_feature 1..27: note = Tubulin beta-4B chain (42-50)
  source 1..27: mol_type = other RNA
ctgcagctcgagcgcatcaacgtgtac

SEQ ID NO: 42247 - RNA, 27 nt, synthetic construct
  misc_feature 1..27: note = Acyl-coenzyme A synthetase ACSM5, mitochondrial (112-120)
  source 1..27: mol_type = other RNA
ctgcagcccggcgaccgcatgatgctc

SEQ ID NO: 42248 - RNA, 27 nt, synthetic construct
  misc_feature 1..27: note = GPI transamidase component PIG-T (58-66)
  source 1..27: mol_type = other RNA
ctgcagcgcgagggcgtgagccactac

SEQ ID NO: 42249 - RNA, 27 nt, synthetic construct
  misc_feature 1..27: note = Splicing factor 1 (254-262)
  source 1..27: mol_type = other RNA
ctgcgcgaggacgacaaccggatcctc

SEQ ID NO: 42250 - RNA, 27 nt, synthetic construct
  misc_feature 1..27: note = FH1/FH2 domain-containing protein 1 (1156-1164)
  source 1..27: mol_type = other RNA
ctgagcaagggccccgggctcgaggtg

SEQ ID NO: 42251 - RNA, 30 nt, synthetic construct
  misc_feature 1..30: note = Phosphatidylethanolamine-binding protein 1 (5-14)
  source 1..30: mol_type = other RNA
ctgagcaagtggtccggccccctcagcctg

SEQ ID NO: 42252 - RNA, 24 nt, synthetic construct
  misc_feature 1..24: note = FYVE, RhoGEF and PH domain-containing protein 5 (524-531)
  source 1..24: mol_type = other RNA
ctgagcctcgagggcaagcccctg

SEQ ID NO: 42253 - RNA, 27 nt, synthetic construct
  misc_feature 1..27: note = Cilia- and flagella-associated protein 54 (689-697)
  source 1..27: mol_type = other RNA
ctgagcatgctcaagtccatgctgctg

SEQ ID NO: 42254 - RNA, 27 nt, synthetic construct
  misc_feature 1..27: note = Alpha-ketoglutarate-dependent dioxygenase alkB homolog 7, mitochondrial (104-112)
  source 1..27: mol_type = other RNA
ctgagctccgtgcacgtcctcgacctg

SEQ ID NO: 42255 - RNA, 27 nt, synthetic construct
  misc_feature 1..27: note = WD repeat-containing protein 7 (683-691)
  source 1..27: mol_type = other RNA
ctgaccgaccccgacatccacgtgctc

SEQ ID NO: 42256 - RNA, 27 nt, synthetic construct
  misc_feature 1..27: note = Transcription factor SOX-30 (235-243)
  source 1..27: mol_type = other RNA
ctggtgcacggcagcgccgaggtcatc

SEQ ID NO: 42257 - RNA, 27 nt, synthetic construct
  misc_feature 1..27: note = 60S ribosomal protein L32 (7-15)
  source 1..27: mol_type = other RNA
ctggtgaagcccaagatcgtcaagaag

SEQ ID NO: 42258 - RNA, 27 nt, synthetic construct
  misc_feature 1..27: note = Probable ATP-dependent RNA helicase DDX41 (390-398)
  source 1..27: mol_type = other RNA
ctggtgaagcccgtcaccatcaacgtg

SEQ ID NO: 42259 - RNA, 27 nt, synthetic construct
  misc_feature 1..27: note = Cationic amino acid transporter 3 (165-173)
  source 1..27: mol_type = other RNA
ctggtgctcatcgtcggcttcaccttc

SEQ ID NO: 42260 - RNA, 27 nt, synthetic construct
  misc_feature 1..27: note = Mitogen-activated protein kinase kinase kinase 10 (901-909)
  source 1..27: mol_type = other RNA
ctggtgagcttcggccgcaccctcacc

SEQ ID NO: 42261 - RNA, 27 nt, synthetic construct
  misc_feature 1..27: note = Glypican-4 (385-393)
  source 1..27: mol_type = other RNA
ctggtgaccgacgtcaaggagaagctc

SEQ ID NO: 42262 - RNA, 27 nt, synthetic construct
  misc_feature 1..27: note = Transmembrane protein with metallophosphoesterase domain (414-422)
  source 1..27: mol_type = other RNA
ctgtaccaggtggcccaggccaccttc

SEQ ID NO: 42263 - RNA, 27 nt, synthetic construct
  misc_feature 1..27: note = Transcription factor SOX-6 (312-320)
  source 1..27: mol_type = other RNA
atggccgccgcggccgccagcggcctg

SEQ ID NO: 42264 - RNA, 27 nt, synthetic construct
  misc_feature 1..27: note = 28S ribosomal protein S14, mitochondrial (1-9)
  source 1..27: mol_type = other RNA
atggccgccttcatgctgggcagcctc

SEQ ID NO: 42265 - RNA, 27 nt, synthetic construct
  misc_feature 1..27: note = Steroid 21-hydroxylase (283-291)
  source 1..27: mol_type = other RNA
atggccgccgtggacctgctcatcggc

SEQ ID NO: 42266 - RNA, 27 nt, synthetic construct
  misc_feature 1..27: note = XK-related protein 5 (595-603)
  source 1..27: mol_type = other RNA
atggccgacatcagccccatcctgggc

SEQ ID NO: 42267 - RNA, 24 nt, synthetic construct
  misc_feature 1..24: note = Histone-binding protein RBBP4 (1-8)
  source 1..24: mol_type = other RNA
atggccgacaaggaggccgcgttc

SEQ ID NO: 42268 - RNA, 27 nt, synthetic construct
  misc_feature 1..27: note = N-acetylated-alpha-linked acidic dipeptidase 2 (1-9)
  source 1..27: mol_type = other RNA
atggccgagagccgcggccggctgtac

SEQ ID NO: 42269 - RNA, 27 nt, synthetic construct
  misc_feature 1..27: note = Mucin-17 (161-169)
  source 1..27: mol_type = other RNA
atggccttcgtgagcaccgcccccctg

SEQ ID NO: 42270 - RNA, 27 nt, synthetic construct
  misc_feature 1..27: note = Butyrophilin-like protein 8 (1-9)
  source 1..27: mol_type = other RNA
atggccctgatgctcagcctggtgctg

SEQ ID NO: 42271 - RNA, 30 nt, synthetic construct
  misc_feature 1..30: note = Zinc finger protein 28 (1-10)
  source 1..30: mol_type = other RNA
atggccctgccccagggcctcctgaccttc

SEQ ID NO: 42272 - RNA, 30 nt, synthetic construct
  misc_feature 1..30: note = Major facilitator superfamily domain-containing protein 9 (295-304)
  source 1..30: mol_type = other RNA
atggccatggccgtgatgctgtactacagc

SEQ ID NO: 42273 - RNA, 27 nt, synthetic construct
  misc_feature 1..27: note = Splicing factor 3A subunit 1 (775-783)
  source 1..27: mol_type = other RNA
atggccaacggcgccgtgatccacctg

SEQ ID NO: 42274 - RNA, 27 nt, synthetic construct
  misc_feature 1..27: note = Small nuclear ribonucleoprotein-associated protein N (189-197)
  source 1..27: mol_type = other RNA
atggcccccccgcccggcatgcgcccc

SEQ ID NO: 42275 - RNA, 24 nt, synthetic construct
  misc_feature 1..24: note = HLA class I histocompatibility antigen, Cw-7 alpha chain (4-11)
  source 1..24: mol_type = other RNA
atggccccccgcgccctgctcctg

SEQ ID NO: 42276 - RNA, 27 nt, synthetic construct
  misc_feature 1..27: note = Coiled-coil domain-containing protein 42A (261-269)
  source 1..27: mol_type = other RNA
atggccaccctgaacctcttccagatc

SEQ ID NO: 42277 - RNA, 27 nt, synthetic construct
  misc_feature 1..27: note = Frizzled-4 (474-482)
  source 1..27: mol_type = other RNA
atggccgtggagatgctgaagatcttc

SEQ ID NO: 42278 - RNA, 27 nt, synthetic construct
  misc_feature 1..27: note = Interferon alpha-inducible protein 6 (45-53)
  source 1..27: mol_type = other RNA
atggccgtgggcgggggcctggccgtc

SEQ ID NO: 42279 - RNA, 33 nt, synthetic construct
  misc_feature 1..33: note = Thyroid adenoma-associated protein (70-80)
  source 1..33: mol_type = other RNA
atgtgcgaccccaccatccagagctgcctggac

SEQ ID NO: 42280 - RNA, 27 nt, synthetic construct
  misc_feature 1..27: note = Putative tripartite motif-containing protein 49B (236-244)
  source 1..27: mol_type = other RNA
atgtgccacaagcccgacgtggagctg

SEQ ID NO: 42281 - RNA, 27 nt, synthetic construct
  misc_feature 1..27: note = C-C chemokine receptor type 9 (118-126)
  source 1..27: mol_type = other RNA
atgtgcaaggtggtcaacagcatgtac

SEQ ID NO: 42282 - RNA, 27 nt, synthetic construct
  misc_feature 1..27: note = Centrosomal protein of 72 kDa (190-198)
  source 1..27: mol_type = other RNA
atggacgccgacgacgaggccgtgctg

SEQ ID NO: 42283 - RNA, 30 nt, synthetic construct
  misc_feature 1..30: note = Rho guanine nucleotide exchange factor 12 (1356-1365)
  source 1..30: mol_type = other RNA
atggaccacatgatcatgacccccgagatg

SEQ ID NO: 42284 - RNA, 27 nt, synthetic construct
  misc_feature 1..27: note = Adenosine receptor A2b (219-227)
  source 1..27: mol_type = other RNA
atggaccacagccgcaccaccctgcag

SEQ ID NO: 42285 - RNA, 27 nt, synthetic construct
  misc_feature 1..27: note = Protein CREG1 (164-172)
  source 1..27: mol_type = other RNA
atggacatcgccaagcacagcctgttc

SEQ ID NO: 42286 - RNA, 27 nt, synthetic construct
  misc_feature 1..27: note = P2X purinoceptor 7 (140-148)
  source 1..27: mol_type = other RNA
atggacccccagagcaagggcatccag

SEQ ID NO: 42287 - RNA, 30 nt, synthetic construct
  misc_feature 1..30: note = 40S ribosomal protein S28 (1-10)
  source 1..30: mol_type = other RNA
atggacaccagccgcgtgcagcccatcaag

SEQ ID NO: 42288 - RNA, 27 nt, synthetic construct
  misc_feature 1..27: note = F-box only protein 44 (151-159)
  source 1..27: mol_type = other RNA
atggacaccacccgccccgacatcgag

SEQ ID NO: 42289 - RNA, 36 nt, synthetic construct
  misc_feature 1..36: note = BEN domain-containing protein 7 (1-12)
  source 1..36: mol_type = other RNA
atggagttcagcgagcgcaagcggtcccgcaagagc

SEQ ID NO: 42290 - RNA, 30 nt, synthetic construct
  misc_feature 1..30: note = Rho guanine nucleotide exchange factor 11 (1442-1451)
  source 1..30: mol_type = other RNA
atggagctggcccaccgcgagctcctgaag

SEQ ID NO: 42291 - RNA, 36 nt, synthetic construct
  misc_feature 1..36: note = Nitric oxide synthase, endothelial (1137-1148)
  source 1..36: mol_type = other RNA
atggagctggacgaggccggcgacgtgatcggggtc

SEQ ID NO: 42292 - RNA, 24 nt, synthetic construct
  misc_feature 1..24: note = Pseudouridylate synthase 7 homolog (1-8)
  source 1..24: mol_type = other RNA
atggagatgaccgagatgaccggc

SEQ ID NO: 42293 - RNA, 27 nt, synthetic construct
  misc_feature 1..27: note = Lethal(3)malignant brain tumor-like protein 3 (52-60)
  source 1..27: mol_type = other RNA
atggagaacgtgaagaaggccaccgcc

SEQ ID NO: 42294 - RNA, 36 nt, synthetic construct
  misc_feature 1..36: note = Heme oxygenase 1 (1-12)
  source 1..36: mol_type = other RNA
atggagcgcccccagccggacagcatgccccaggac

SEQ ID NO: 42295 - RNA, 27 nt, synthetic construct
  misc_feature 1..27: note = Metalloreductase STEAP2 (1-9)
  source 1..27: mol_type = other RNA
atggagagcatctccatgatgggcagc

SEQ ID NO: 42296 - RNA, 27 nt, synthetic construct
  misc_feature 1..27: note = CD97 antigen (1-9)
  source 1..27: mol_type = other RNA
atgggcgggcgcgtgttcctggccttc

SEQ ID NO: 42297 - RNA, 30 nt, synthetic construct
  misc_feature 1..30: note = Putative uncharacterized protein ENSP00000381562 (1-10)
  source 1..30: mol_type = other RNA
atgggcagcatcccctccaagccgtgcaac

SEQ ID NO: 42298 - RNA, 27 nt, synthetic construct
  misc_feature 1..27: note = Ubiquitin carboxyl-terminal hydrolase isozyme L3 (111-119)
  source 1..27: mol_type = other RNA
atgcacttcgagagcggctccaccctg

SEQ ID NO: 42299 - RNA, 27 nt, synthetic construct
  misc_feature 1..27: note = Complex I assembly factor TMEM126B, mitochondrial (35-43)
  source 1..27: mol_type = other RNA
atgcacggccagcccagcccgtccctg

SEQ ID NO: 42300 - RNA, 27 nt, synthetic construct
  misc_feature 1..27: note = Transmembrane protein 114 (102-110)
  source 1..27: mol_type = other RNA
atgcacggcaccttcgtgatcctgctc

SEQ ID NO: 42301 - RNA, 30 nt, synthetic construct
  misc_feature 1..30: note = Leucine-twenty homeobox (1-10)
  source 1..30: mol_type = other RNA
atgcaccccagcctggccaccatgggcaag

SEQ ID NO: 42302 - RNA, 27 nt, synthetic construct
  misc_feature 1..27: note = Protein Tob1 (226-234)
  source 1..27: mol_type = other RNA
atgcacagcctgtacggcctcgggctg

SEQ ID NO: 42303 - RNA, 27 nt, synthetic construct
  misc_feature 1..27: note = Deoxyribonuclease-1-like 1 (1-9)
  source 1..27: mol_type = other RNA
atgcactaccccaccgccctgctcttc

SEQ ID NO: 42304 - RNA, 27 nt, synthetic construct
  misc_feature 1..27: note = Neuronal acetylcholine receptor subunit alpha-4 (314-322)
  source 1..27: mol_type = other RNA
atgatcttcgtgaccctgagcatcgtc

SEQ ID NO: 42305 - RNA, 27 nt, synthetic construct
  misc_feature 1..27: note = Eukaryotic translation initiation factor 3 subunit L (359-367)
  source 1..27: mol_type = other RNA
atgatcaacaagcagaacgagcagatg

SEQ ID NO: 42306 - RNA, 30 nt, synthetic construct
  misc_feature 1..30: note = Lysosomal protective protein (1-10)
  source 1..30: mol_type = other RNA
atgatccgcgccgcccccccgcccctgttc

SEQ ID NO: 42307 - RNA, 30 nt, synthetic construct
  misc_feature 1..30: note = 60S ribosomal protein L18a (1-10)
  source 1..30: mol_type = other RNA
atgaaggccagcggcaccctgcgcgagtac

SEQ ID NO: 42308 - RNA, 27 nt, synthetic construct
  misc_feature 1..27: note = Lymphocyte antigen 86 (1-9)
  source 1..27: mol_type = other RNA
atgaagggcttcaccgccaccctgttc

SEQ ID NO: 42309 - RNA, 27 nt, synthetic construct
  misc_feature 1..27: note = Sodium-coupled neutral amino acid transporter 5 (188-196)
  source 1..27: mol_type = other RNA
atgaagcacctgggctacctcgggtac

SEQ ID NO: 42310 - RNA, 27 nt, synthetic construct
  misc_feature 1..27: note = Neurexin-3 (694-702)
  source 1..27: mol_type = other RNA
atgaagatcatcatgcccatggtgatg

SEQ ID NO: 42311 - RNA, 27 nt, synthetic construct
  misc_feature 1..27: note = Dentin matrix acidic phosphoprotein 1 (1-9)
  source 1..27: mol_type = other RNA
atgaagatcagcatcctgctcatgttc

SEQ ID NO: 42312 - RNA, 27 nt, synthetic construct
  misc_feature 1..27: note = Sarcoplasmic/endoplasmic reticulum calcium ATPase 2 (479-487)
  source 1..27: mol_type = other RNA
atgaagaaggagttcaccctggagttc

SEQ ID NO: 42313 - RNA, 30 nt, synthetic construct
  misc_feature 1..30: note = 60S ribosomal protein L18a (54-63)
  source 1..30: mol_type = other RNA
atgaagaagagctccggcgagatcgtgtac

SEQ ID NO: 42314 - RNA, 27 nt, synthetic construct
  misc_feature 1..27: note = Lysine-tRNA ligase (406-414)
  source 1..27: mol_type = other RNA
atgaagctgcccgagaccaacctcttc

SEQ ID NO: 42315 - RNA, 30 nt, synthetic construct
  misc_feature 1..30: note = Glucose-fructose oxidoreductase domain-containing protein 2 (1-10)
  source 1..30: mol_type = other RNA
atgaagatgctgcccggcgtgggggtcttc

SEQ ID NO: 42316 - RNA, 27 nt, synthetic construct
  misc_feature 1..27: note = Striatin-interacting protein 1 (733-741)
  source 1..27: mol_type = other RNA
atgaagaccatgagcgccatctaccag

SEQ ID NO: 42317 - RNA, 27 nt, synthetic construct
  misc_feature 1..27: note = Zinc finger protein 425 (38-46)
  source 1..27: mol_type = other RNA
atgaagaccaactacgagaccctggac

SEQ ID NO: 42318 - RNA, 27 nt, synthetic construct
  misc_feature 1..27: note = Peptidyl-prolyl cis-trans isomerase B (9-17)
  source 1..27: mol_type = other RNA
atgaaggtgctgctcgccgccgcgctg

SEQ ID NO: 42319 - RNA, 27 nt, synthetic construct
  misc_feature 1..27: note = Protein tyrosine phosphatase type IVA 1 (124-132)
  source 1..27: mol_type = other RNA
atgaagtacgaggacgccgtgcagttc

SEQ ID NO: 42320 - RNA, 33 nt, synthetic construct
  misc_feature 1..33: note = Transmembrane protein 50A (102-112)
  source 1..33: mol_type = other RNA
atgctggccttcggcagcctcatcgcctccatg

SEQ ID NO: 42321 - RNA, 33 nt, synthetic construct
  misc_feature 1..33: note = Inactive phospholipase C-like protein 1 (259-269)
  source 1..33: mol_type = other RNA
atgctggaggacaccagcgtggagctcatcaag

SEQ ID NO: 42322 - RNA, 30 nt, synthetic construct
  misc_feature 1..30: note = Tyrosine-protein phosphatase non-receptor type 2 (134-143)
  source 1..30: mol_type = other RNA
atgctgttcaaggagaccggcttcagcgtg

SEQ ID NO: 42323 - RNA, 36 nt, synthetic construct
  misc_feature 1..36: note = SPARC-related modular calcium-binding protein 1 (1-12)
  source 1..36: mol_type = other RNA
atgctgcccgcccgctgcgcccggctcctgaccccg

SEQ ID NO: 42324 - RNA, 27 nt, synthetic construct
  misc_feature 1..27: note = E3 ubiquitin-protein ligase TRIM22 (248-256)
  source 1..27: mol_type = other RNA
atgctgcaggacgtgatcgacgtcatg

SEQ ID NO: 42325 - RNA, 27 nt, synthetic construct
  misc_feature 1..27: note = Condensin complex subunit 1 (56-64)
  source 1..27: mol_type = other RNA
atgctgcagcacttcgacaccatctac

SEQ ID NO: 42326 - RNA, 27 nt, synthetic construct
  misc_feature 1..27: note = Fibronectin (1-9)
  source 1..27: mol_type = other RNA
atgctgcgcggccccgggccgggcctc

SEQ ID NO: 42327 - RNA, 27 nt, synthetic construct
  misc_feature 1..27: note = Protein S100-A8 (1-9)
  source 1..27: mol_type = other RNA
atgctgaccgagctcgagaaggccctg

SEQ ID NO: 42328 - RNA, 30 nt, synthetic construct
  misc_feature 1..30: note = NACHT, LRR and PYD domains-containing protein 4 (169-178)
  source 1..30: mol_type = other RNA
atgatggcctggagcgacaacaagatcttc

SEQ ID NO: 42329 - RNA, 27 nt, synthetic construct
  misc_feature 1..27: note = Eukaryotic translation initiation factor 4 gamma 1 (88-96)
  source 1..27: mol_type = other RNA
atgatgatccccagccagatctcctac

SEQ ID NO: 42330 - RNA, 27 nt, synthetic construct
  misc_feature 1..27: note = Olfactory receptor 4K1 (112-120)
  source 1..27: mol_type = other RNA
atgatgctgctcgtggccatggcctac

SEQ ID NO: 42331 - RNA, 30 nt, synthetic construct
  misc_feature 1..30: note = BUB3-interacting and GLEBS motif-containing protein ZNF207 (185-194)
  source 1..30: mol_type = other RNA
atgatgcccatgggcgggatgatgccgccc

SEQ ID NO: 42332 - RNA, 24 nt, synthetic construct
  misc_feature 1..24: note = C-myc promoter-binding protein (618-625)
  source 1..24: mol_type = other RNA
atgatgaccaagacccagatgttc

SEQ ID NO: 42333 - RNA, 24 nt, synthetic construct
  misc_feature 1..24: note = Protein SSX4 (1-8)
  source 1..24: mol_type = other RNA
atgaacggcgacgacgccttcgcc

SEQ ID NO: 42334 - RNA, 24 nt, synthetic construct
  misc_feature 1..24: note = Putative uncharacterized protein ENSP00000383407 (1-8)
  source 1..24: mol_type = other RNA
atgaacctgttctgcatcagcctc

SEQ ID NO: 42335 - RNA, 33 nt, synthetic construct
  misc_feature 1..33: note = Coiled-coil domain-containing protein 127 (1-11)
  source 1..33: mol_type = other RNA
atgaacaacctgaacgaccccccgaactggaac

SEQ ID NO: 42336 - RNA, 27 nt, synthetic construct
  misc_feature 1..27: note = General transcription factor IIF subunit 1 (417-425)
  source 1..27: mol_type = other RNA
atgcccgccgccaagcgcctgcggctc

SEQ ID NO: 42337 - RNA, 27 nt, synthetic construct
  misc_feature 1..27: note = Actin-related protein 2/3 complex subunit 3 (1-9)
  source 1..27: mol_type = other RNA
atgcccgcctaccacagctccctgatg

SEQ ID NO: 42338 - RNA, 27 nt, synthetic construct
  misc_feature 1..27: note = Kelch domain-containing protein 10 (360-368)
  source 1..27: mol_type = other RNA
atgcccgagccggtgtacttccactgc

SEQ ID NO: 42339 - RNA, 30 nt, synthetic construct
  misc_feature 1..30: note = von Willebrand factor A domain-containing protein 5B2 (1-10)
  source 1..30: mol_type = other RNA
atgcccggcctgtactgcccgagctcctgg

SEQ ID NO: 42340 - RNA, 27 nt, synthetic construct
  misc_feature 1..27: note = Acid ceramidase (1-9)
  source 1..27: mol_type = other RNA
atgcccggccgcagctgcgtggccctg

SEQ ID NO: 42341 - RNA, 24 nt, synthetic construct
  misc_feature 1..24: note = Eukaryotic translation initiation factor 2 subunit 1 (223-230)
  source 1..24: mol_type = other RNA
atgcccatcaagatcaacctgatc

SEQ ID NO: 42342 - RNA, 36 nt, synthetic construct
  misc_feature 1..36: note = Cytochrome c oxidase subunit 8C, mitochondrial (1-12)
  source 1..36: mol_type = other RNA
atgcccctgctccgcggccggtgcccggcccgccgg

SEQ ID NO: 42343 - RNA, 36 nt, synthetic construct
  misc_feature 1..36: note = Retrotransposon gag domain-containing protein 1 (964-975)
  source 1..36: mol_type = other RNA
atgcccctgatgagcgccatggcctccggcgagatg

SEQ ID NO: 42344 - RNA, 36 nt, synthetic construct
  misc_feature 1..36: note = BUB3-interacting and GLEBS motif-containing protein ZNF207 (181-192)
  source 1..36: mol_type = other RNA
atgcccccgggcatgatgcccatggggggcatgatg

SEQ ID NO: 42345 - RNA, 27 nt, synthetic construct
  misc_feature 1..27: note = Pre-mRNA-processing-splicing factor 8 (108-116)
  source 1..27: mol_type = other RNA
atgccctgggagcagatccgcgacgtg

SEQ ID NO: 42346 - RNA, 27 nt, synthetic construct
  misc_feature 1..27: note = Protein diaphanous homolog 2 (733-741)
  source 1..27: mol_type = other RNA
atgccctacgaggacatccgcaacgtg

SEQ ID NO: 42347 - RNA, 27 nt, synthetic construct
  misc_feature 1..27: note = Nuclear receptor coactivator 2 (1151-1159)
  source 1..27: mol_type = other RNA
atgcaggaccccaacttccacaccatg

SEQ ID NO: 42348 - RNA, 27 nt, synthetic construct
  misc_feature 1..27: note = Heterogeneous nuclear ribonucleoprotein H (352-360)
  source 1..27: mol_type = other RNA
atgcagcaccgctacgtggagctgttc

SEQ ID NO: 42349 - RNA, 27 nt, synthetic construct
  misc_feature 1..27: note = Myosin-7 (77-85)
  source 1..27: mol_type = other RNA
atgcagcagaaccccccgaagttcgac

SEQ ID NO: 42350 - RNA, 27 nt, synthetic construct
  misc_feature 1..27: note = Laminin subunit alpha-2 (1349-1357)
  source 1..27: mol_type = other RNA
atgcgccagagccggatctccgagatc

SEQ ID NO: 42351 - RNA, 30 nt, synthetic construct
  misc_feature 1..30: note = Toll-like receptor 3 (1-10)
  source 1..30: mol_type = other RNA
atgcgccagaccctgccctgcatctacttc

SEQ ID NO: 42352 - RNA, 24 nt, synthetic construct
  misc_feature 1..24: note = Transmembrane channel-like protein 2 (170-177)
  source 1..24: mol_type = other RNA
atgcgcagcaagccctggccgatg

SEQ ID NO: 42353 - RNA, 27 nt, synthetic construct
  misc_feature 1..27: note = Clathrin coat assembly protein AP180 (156-164)
  source 1..27: mol_type = other RNA
atgcgcaccatggcccccgagaagctg

SEQ ID NO: 42354 - RNA, 27 nt, synthetic construct
  misc_feature 1..27: note = Glucose-6-phosphate translocase (266-274)
  source 1..27: mol_type = other RNA
atgagcgccctggaggtgggcgggctc

SEQ ID NO: 42355 - RNA, 24 nt, synthetic construct
  misc_feature 1..24: note = RING finger protein 148 (1-8)
  source 1..24: mol_type = other RNA
atgagcttcctgcgcatcaccccc

SEQ ID NO: 42356 - RNA, 27 nt, synthetic construct
  misc_feature 1..27: note = Nesprin-1 (4697-4705)
  source 1..27: mol_type = other RNA
atgagcaaggtgcccaccgacctggcc

SEQ ID NO: 42357 - RNA, 24 nt, synthetic construct
  misc_feature 1..24: note = Zinc finger protein ZFPM2 (1-8)
  source 1..24: mol_type = other RNA
atgagccgccggaagcagtccaag

SEQ ID NO: 42358 - RNA, 27 nt, synthetic construct
  misc_feature 1..27: note = Cerebral dopamine neurotrophic factor (103-111)
  source 1..27: mol_type = other RNA
atgagcgtgcacatgcccgccatgaag

SEQ ID NO: 42359 - RNA, 27 nt, synthetic construct
  misc_feature 1..27: note = Heat shock protein 105 kDa (1-9)
  source 1..27: mol_type = other RNA
atgagcgtggtcggcctggacgtgggg

SEQ ID NO: 42360 - RNA, 27 nt, synthetic construct
  misc_feature 1..27: note = Solute carrier family 35 member E2B (144-152)
  source 1..27: mol_type = other RNA
atgaccatgctgttcgtgggcctcatg

SEQ ID NO: 42361 - RNA, 27 nt, synthetic construct
  misc_feature 1..27: note = Integrin beta-7 (1-9)
  source 1..27: mol_type = other RNA
atggtggccctgcccatggtcctcgtg

SEQ ID NO: 42362 - RNA, 30 nt, synthetic construct
  misc_feature 1..30: note = Testis- and ovary-specific PAZ domain-containing protein 1 (583-592)
  source 1..30: mol_type = other RNA
atggtgatcaaggagcccatcatcaaggac

SEQ ID NO: 42363 - RNA, 24 nt, synthetic construct
  misc_feature 1..24: note = Transmembrane and coiled-coil domain-containing protein 1 (85-92)
  source 1..24: mol_type = other RNA
atggtgcgcatgaagagcatgttc

SEQ ID NO: 42364 - RNA, 24 nt, synthetic construct
  misc_feature 1..24: note = Vomeronasal type-1 receptor 3 (279-286)
  source 1..24: mol_type = other RNA
atggtgagccccttcgtcctgatg

SEQ ID NO: 42365 - RNA, 27 nt, synthetic construct
  misc_feature 1..27: note = Receptor expression-enhancing protein 2 (1-9)
  source 1..27: mol_type = other RNA
atggtgagctggatcatctcccgcctg

SEQ ID NO: 42366 - RNA, 27 nt, synthetic construct
  misc_feature 1..27: note = Secretogranin-1 (32-40)
  source 1..27: mol_type = other RNA
atggtgacccgctgcatcatcgaggtc

SEQ ID NO: 42367 - RNA, 30 nt, synthetic construct
  misc_feature 1..30: note = Protocadherin-19 (125-134)
  source 1..30: mol_type = other RNA
aacgcccccagcttcccggccgcgcagatc

SEQ ID NO: 42368 - RNA, 27 nt, synthetic construct
  misc_feature 1..27: note = Exportin-6 (750-758)
  source 1..27: mol_type = other RNA
aaccacgccagcctgatctccgccctc

SEQ ID NO: 42369 - RNA, 27 nt, synthetic construct
  misc_feature 1..27: note = Olfactomedin-like protein 2B (387-395)
  source 1..27: mol_type = other RNA
aaccacgccagcgtgggccccaccctg

SEQ ID NO: 42370 - RNA, 27 nt, synthetic construct
  misc_feature 1..27: note = Serine-protein kinase ATM (1801-1809)
  source 1..27: mol_type = other RNA
aaccacgacatctggatcaagaccctg

SEQ ID NO: 42371 - RNA, 36 nt, synthetic construct
  misc_feature 1..36: note = Histone-binding protein RBBP4 (122-133)
  source 1..36: mol_type = other RNA
aaccacgagggcgaggtgaaccgcgcccggtacatg

SEQ ID NO: 42372 - RNA, 27 nt, synthetic construct
  misc_feature 1..27: note = WD repeat-containing protein 6 (772-780)
  source 1..27: mol_type = other RNA
aaccacatcagctccgtgcgcgccgtc

SEQ ID NO: 42373 - RNA, 27 nt, synthetic construct
  misc_feature 1..27: note = Integrator complex subunit 3 (462-470)
  source 1..27: mol_type = other RNA
aaccacatcgtggagaagcgcgtcctg

SEQ ID NO: 42374 - RNA, 27 nt, synthetic construct
  misc_feature 1..27: note = Protein RMD5 homolog A (226-234)
  source 1..27: mol_type = other RNA
aaccaccagaaggacatccaggtgctg

SEQ ID NO: 42375 - RNA, 27 nt, synthetic construct
  misc_feature 1..27: note = Protein dopey-2 (223-231)
  source 1..27: mol_type = other RNA
aaccaccagctgaccgtgaagagcctc

SEQ ID NO: 42376 - RNA, 27 nt, synthetic construct
  misc_feature 1..27: note = Protein FAM193A (991-999)
  source 1..27: mol_type = other RNA
aaccacagcgagccccgcccgggcctg

SEQ ID NO: 42377 - RNA, 27 nt, synthetic construct
  misc_feature 1..27: note = Myb-binding protein 1A (554-562)
  source 1..27: mol_type = other RNA
aaccacagccacaacgtgaccaccgtc

SEQ ID NO: 42378 - RNA, 27 nt, synthetic construct
  misc_feature 1..27: note = E3 ubiquitin-protein ligase RNF19A (822-830)
  source 1..27: mol_type = other RNA
aaccacagccaccagaccatggagctg

SEQ ID NO: 42379 - RNA, 33 nt, synthetic construct
  misc_feature 1..33: note = Vesicle transport protein SFT2B (73-83)
  source 1..33: mol_type = other RNA
aacatcgccagcatcggctccaccatcttcctg

SEQ ID NO: 42380 - RNA, 27 nt, synthetic construct
  misc_feature 1..27: note = Bardet-Biedl syndrome 4 protein (82-90)
  source 1..27: mol_type = other RNA
aacatccaggagagcctggagctcttc

SEQ ID NO: 42381 - RNA, 27 nt, synthetic construct
  misc_feature 1..27: note = V-type proton ATPase 116 kDa subunit a isoform 3 (810-818)
  source 1..27: mol_type = other RNA
aacaagttctacagcggcaccgggtac

SEQ ID NO: 42382 - RNA, 27 nt, synthetic construct
  misc_feature 1..27: note = WD repeat-containing protein 82 (83-91)
  source 1..27: mol_type = other RNA
aacaagatcgacgacaccatccgctac

SEQ ID NO: 42383 - RNA, 27 nt, synthetic construct
  misc_feature 1..27: note = C-X-C chemokine receptor type 4 (37-45)
  source 1..27: mol_type = other RNA
aacaagatcttcctgcccaccatctac

SEQ ID NO: 42384 - RNA, 36 nt, synthetic construct
  misc_feature 1..36: note = Sialic acid-binding Ig-like lectin 9 (225-236)
  source 1..36: mol_type = other RNA
aacaagaccgtgcacctgaacgtcagctaccccccg

SEQ ID NO: 42385 - RNA, 27 nt, synthetic construct
  misc_feature 1..27: note = Zinc finger and BTB domain-containing protein 38 (494-502)
  source 1..27: mol_type = other RNA
aacaaggtgttcgccctggccgagtac

SEQ ID NO: 42386 - RNA, 27 nt, synthetic construct
  misc_feature 1..27: note = Probable ubiquitin carboxyl-terminal hydrolase FAF-X (359-367)
  source 1..27: mol_type = other RNA
aacaaggtgatcagctccgtcagctac

SEQ ID NO: 42387 - RNA, 27 nt, synthetic construct
  misc_feature 1..27: note = Monocarboxylate transporter 1 (81-89)
  source 1..27: mol_type = other RNA
aacaagtacggcagccgcatcgtgatg

SEQ ID NO: 42388 - RNA, 27 nt, synthetic construct
  misc_feature 1..27: note = Bifunctional glutamate/proline-tRNA ligase (369-377)
  source 1..27: mol_type = other RNA
aacaagtacaacgtgtaccccacctac

SEQ ID NO: 42389 - RNA, 33 nt, synthetic construct
  misc_feature 1..33: note = 60S ribosomal protein L7 (146-156)
  source 1..33: mol_type = other RNA
aacctgaagagcgtgaacgagctcatctacaag

SEQ ID NO: 42390 - RNA, 27 nt, synthetic construct
  misc_feature 1..27: note = Protein MMS22-like (862-870)
  source 1..27: mol_type = other RNA
aacctgagcgaggtgaagtccatcttc

SEQ ID NO: 42391 - RNA, 30 nt, synthetic construct
  misc_feature 1..30: note = Leucine-rich repeat and calponin homology domain-containing protein 2 (140-149)
  source 1..30: mol_type = other RNA
aacctgtaccacaactgcatcaagaccatc

SEQ ID NO: 42392 - RNA, 27 nt, synthetic construct
  misc_feature 1..27: note = Lysine-specific histone demethylase 1A (492-500)
  source 1..27: mol_type = other RNA
aacctgtacaaggcccccatcctcctg

SEQ ID NO: 42393 - RNA, 24 nt, synthetic construct
  misc_feature 1..24: note = Dynein regulatory complex protein 1 (2-9)
  source 1..24: mol_type = other RNA
aaccccccgggcagcctggaggcc

SEQ ID NO: 42394 - RNA, 27 nt, synthetic construct
  misc_feature 1..27: note = F-box only protein 8 (11-19)
  source 1..27: mol_type = other RNA
aaccagcagctgcagcaggagggctac

SEQ ID NO: 42395 - RNA, 27 nt, synthetic construct
  misc_feature 1..27: note = Serine/arginine repetitive matrix protein 2 (1399-1407)
  source 1..27: mol_type = other RNA
aaccagagcatctccagccccgtgctg

SEQ ID NO: 42396 - RNA, 27 nt, synthetic construct
  misc_feature 1..27: note = COP9 signalosome complex subunit 2 (34-42)
  source 1..27: mol_type = other RNA
aaccagtactacaacagcaaggccctg

SEQ ID NO: 42397 - RNA, 30 nt, synthetic construct
  misc_feature 1..30: note = Gamma-aminobutyric acid receptor subunit delta (246-255)
  source 1..30: mol_type = other RNA
aaccgcggcgtgtacatcatccagagctac

SEQ ID NO: 42398 - RNA, 33 nt, synthetic construct
  misc_feature 1..33: note = Anaphase-promoting complex subunit CDC26 (75-85)
  source 1..33: mol_type = other RNA
aaccgcagctcccagttcggcagcctggagttc

SEQ ID NO: 42399 - RNA, 27 nt, synthetic construct
  misc_feature 1..27: note = Ubiquitin-like modifier-activating enzyme 1 (449-457)
  source 1..27: mol_type = other RNA
aaccgctacgacggccaggtggccgtc

SEQ ID NO: 42400 - RNA, 27 nt, synthetic construct
  misc_feature 1..27: note = Small G protein signaling modulator 3 (329-337)
  source 1..27: mol_type = other RNA
aacagcgcctccatcttcaacaccctg

SEQ ID NO: 42401 - RNA, 24 nt, synthetic construct
  misc_feature 1..24: note = Nuclear transcription factor Y subunit alpha (232-239)
  source 1..24: mol_type = other RNA
aacagcggcgggatggtgatgatg

SEQ ID NO: 42402 - RNA, 27 nt, synthetic construct
  misc_feature 1..27: note = Unconventional myosin-XV (3472-3480)
  source 1..27: mol_type = other RNA
aacagctcctacccctacgtggagatc

SEQ ID NO: 42403 - RNA, 27 nt, synthetic construct
  misc_feature 1..27: note = Junction plakoglobin (584-592)
  source 1..27: mol_type = other RNA
aacaccatccccctgttcgtgcagctc

SEQ ID NO: 42404 - RNA, 27 nt, synthetic construct
  misc_feature 1..27: note = Olfactory receptor 5D18 (7-15)
  source 1..27: mol_type = other RNA
aacaccagcggcaccacgttcaccctg

SEQ ID NO: 42405 - RNA, 27 nt, synthetic construct
  misc_feature 1..27: note = Kinetochore protein Nuf2 (10-18)
  source 1..27: mol_type = other RNA
aacgtggccgagatcgtcatccacatc

SEQ ID NO: 42406 - RNA, 30 nt, synthetic construct
  misc_feature 1..30: note = Sodium- and chloride-dependentine transporter 2 (288-297)
  source 1..30: mol_type = other RNA
aacgtgatcatctgctacaccctgttctac

SEQ ID NO: 42407 - RNA, 36 nt, synthetic construct
  misc_feature 1..36: note = Alpha-enolase (118-129)
  source 1..36: mol_type = other RNA
aacgtgatcaacggcgggagccacgccggcaacaag

SEQ ID NO: 42408 - RNA, 27 nt, synthetic construct
  misc_feature 1..27: note = Clustered mitochondria protein homolog (96-104)
  source 1..27: mol_type = other RNA
aacgtgctggaccacttcagcgagctc

SEQ ID NO: 42409 - RNA, 30 nt, synthetic construct
  misc_feature 1..30: note = Myosin regulatory light chain 12B (155-164)
  source 1..30: mol_type = other RNA
aactacatcgagttcacccgcatcctgaag

SEQ ID NO: 42410 - RNA, 24 nt, synthetic construct
  misc_feature 1..24: note = Protein LYRIC (498-505)
  source 1..24: mol_type = other RNA
cccgccgaggtgctggtcaagaac

SEQ ID NO: 42411 - RNA, 30 nt, synthetic construct
  misc_feature 1..30: note = Peroxiredoxin-4 (260-269)
  source 1..30: mol_type = other RNA
cccgccggcaagctgaagtacttcgacaag

SEQ ID NO: 42412 - RNA, 27 nt, synthetic construct
  misc_feature 1..27: note = Leucine-rich repeat-containing protein 26 (63-71)
  source 1..27: mol_type = other RNA
cccgccgtgccgcccggcctgagcctc

SEQ ID NO: 42413 - RNA, 27 nt, synthetic construct
  misc_feature 1..27: note = StAR-related lipid transfer protein 13 (243-251)
  source 1..27: mol_type = other RNA
cccttccacccgaagaacgagaagccc

SEQ ID NO: 42414 - RNA, 30 nt, synthetic construct
  misc_feature 1..30: note = Dystrophia myotonica WD repeat-containing protein (517-526)
  source 1..30: mol_type = other RNA
cccttcagcatcggccgcttcgccaccctg

SEQ ID NO: 42415 - RNA, 30 nt, synthetic construct
  misc_feature 1..30: note = B-lymphocyte antigen CD19 (99-108)
  source 1..30: mol_type = other RNA
cccggcccgcccagcgagaaggcctggcag

SEQ ID NO: 42416 - RNA, 27 nt, synthetic construct
  misc_feature 1..27: note = Zinc finger protein 853 (438-446)
  source 1..27: mol_type = other RNA
cccggctacgtggtcgtgcaggagctg

SEQ ID NO: 42417 - RNA, 36 nt, synthetic construct
  misc_feature 1..36: note = DNA replication licensing factor MCM6 (505-516)
  source 1..36: mol_type = other RNA
cccatcagcggccactacgaccgctccaagagcctg

SEQ ID NO: 42418 - RNA, 30 nt, synthetic construct
  misc_feature 1..30: note = UPF0428 protein CXorf56 (2-11)
  source 1..30: mol_type = other RNA
cccaaggtggtcagccgctccgtggtgtgc

SEQ ID NO: 42419 - RNA, 27 nt, synthetic construct
  misc_feature 1..27: note = Integrin beta-6 (709-717)
  source 1..27: mol_type = other RNA
cccatgatcatgctgggcgtgagcctc

SEQ ID NO: 42420 - RNA, 30 nt, synthetic construct
  misc_feature 1..30: note = AF4/FMR2 family member 2 (271-280)
  source 1..30: mol_type = other RNA
cccccgggcctgtactgcaagaccagcatg

SEQ ID NO: 42421 - RNA, 27 nt, synthetic construct
  misc_feature 1..27: note = Basic salivary proline-rich protein 4 (50-58)
  source 1..27: mol_type = other RNA
cccccgcccccccccggcaagccgcag

SEQ ID NO: 42422 - RNA, 27 nt, synthetic construct
  misc_feature 1..27: note = RAS guanyl-releasing protein 2 (400-408)
  source 1..27: mol_type = other RNA
cccccgccccgcccccccgtgctggag

SEQ ID NO: 42423 - RNA, 27 nt, synthetic construct
  misc_feature 1..27: note = Coiled-coil domain-containing protein 8 (89-97)
  source 1..27: mol_type = other RNA
cccccgcgcctggtggtcggcacctac

SEQ ID NO: 42424 - RNA, 36 nt, synthetic construct
  misc_feature 1..36: note = RNA-binding protein FUS (344-355)
  source 1..36: mol_type = other RNA
cccccgagcgccaaggccgcgatcgactggttcgac

SEQ ID NO: 42425 - RNA, 24 nt, synthetic construct
  misc_feature 1..24: note = Cornulin (2-9)
  source 1..24: mol_type = other RNA
ccccagctgctccagaacatcaac

SEQ ID NO: 42426 - RNA, 27 nt, synthetic construct
  misc_feature 1..27: note = Sialate O-acetylesterase (378-386)
  source 1..27: mol_type = other RNA
ccccgcgacaagcagaccgtggcctac

SEQ ID NO: 42427 - RNA, 27 nt, synthetic construct
  misc_feature 1..27: note = Metastasis-associated in colon cancer protein 1 (382-390)
  source 1..27: mol_type = other RNA
cccagcttcaccgtggtcctgaccgtg

SEQ ID NO: 42428 - RNA, 33 nt, synthetic construct
  misc_feature 1..33: note = ATP synthase F(0) complex subunit B1, mitochondrial (43-53)
  source 1..33: mol_type = other RNA
cccgtgccgcccctgcccgagtacggcgggaag

SEQ ID NO: 42429 - RNA, 27 nt, synthetic construct
  misc_feature 1..27: note = MAP7 domain-containing protein 3 (645-653)
  source 1..27: mol_type = other RNA
caggccgaggaccacctgaagctcaag

SEQ ID NO: 42430 - RNA, 27 nt, synthetic construct
  misc_feature 1..27: note = 26S proteasome non-ATPase regulatory subunit 12 (265-273)
  source 1..27: mol_type = other RNA
caggccctgaagagcgtggtcctctac

SEQ ID NO: 42431 - RNA, 27 nt, synthetic construct
  misc_feature 1..27: note = Bromodomain-containing protein 8 (465-473)
  source 1..27: mol_type = other RNA
caggagcgcgacaagcccgtgccgctg

SEQ ID NO: 42432 - RNA, 30 nt, synthetic construct
  misc_feature 1..30: note = Prolyl endopeptidase (268-277)
  source 1..30: mol_type = other RNA
caggagagctccggcatcgccgggatcctg

SEQ ID NO: 42433 - RNA, 27 nt, synthetic construct
  misc_feature 1..27: note = Mitochondrial import inner membrane translocase subunit Tim17-B (140-148)
  source 1..27: mol_type = other RNA
cagttccgcaacgcccccccgttcctg

SEQ ID NO: 42434 - RNA, 27 nt, synthetic construct
  misc_feature 1..27: note = 60S acidic ribosomal protein P2 (57-65)
  source 1..27: mol_type = other RNA
cagggcatcgggaagctggccagcgtg

SEQ ID NO: 42435 - RNA, 33 nt, synthetic construct
  misc_feature 1..33: note = Salivary acidic proline-rich phosphoprotein 1/2 (82-92)
  source 1..33: mol_type = other RNA
cagggccccccgcccccccaggggaagccccag

SEQ ID NO: 42436 - RNA, 27 nt, synthetic construct
  misc_feature 1..27: note = Protocadherin Fat 4 (557-565)
  source 1..27: mol_type = other RNA
cagggcgtgcaccccaaggtcagctac

SEQ ID NO: 42437 - RNA, 27 nt, synthetic construct
  misc_feature 1..27: note = Transmembrane protein 205 (75-83)
  source 1..27: mol_type = other RNA
cagcacgcctgggcccagctgaccttc

SEQ ID NO: 42438 - RNA, 27 nt, synthetic construct
  misc_feature 1..27: note = MICOS complex subunit MIC10 (59-67)
  source 1..27: mol_type = other RNA
cagcacgacttccaggccccctacctg

SEQ ID NO: 42439 - RNA, 24 nt, synthetic construct
  misc_feature 1..24: note = CX3C chemokine receptor 1 (144-151)
  source 1..24: mol_type = other RNA
cagcacggcgtgaccatcagcctg

SEQ ID NO: 42440 - RNA, 27 nt, synthetic construct
  misc_feature 1..27: note = 60S ribosomal protein L8 (217-225)
  source 1..27: mol_type = other RNA
cagcacatcggcaagcccagcaccatc

SEQ ID NO: 42441 - RNA, 27 nt, synthetic construct
  misc_feature 1..27: note = Inositol polyphosphate 5-phosphatase K (105-113)
  source 1..27: mol_type = other RNA
cagcacctgccctacatccagatcctc

SEQ ID NO: 42442 - RNA, 27 nt, synthetic construct
  misc_feature 1..27: note = Torsin-3A (137-145)
  source 1..27: mol_type = other RNA
cagcacctggtgcagcagctcgtcctg

SEQ ID NO: 42443 - RNA, 33 nt, synthetic construct
  misc_feature 1..33: note = Forkhead box protein J3 (593-603)
  source 1..33: mol_type = other RNA
cagcacatgatgcccagccaggccttccagatg

SEQ ID NO: 42444 - RNA, 27 nt, synthetic construct
  misc_feature 1..27: note = PAX-interacting protein 1 (506-514)
  source 1..27: mol_type = other RNA
cagcaccagctgcagcagcagcagctc

SEQ ID NO: 42445 - RNA, 27 nt, synthetic construct
  misc_feature 1..27: note = Dual specificity tyrosine-phosphorylation-regulated kinase 1A (475-483)
  source 1..27: mol_type = other RNA
cagcacagcttcttcaagaagaccgcc

SEQ ID NO: 42446 - RNA, 27 nt, synthetic construct
  misc_feature 1..27: note = G protein-regulated inducer of neurite outgrowth 3 (749-757)
  source 1..27: mol_type = other RNA
cagcacagcgtgttccagtccatgctg

SEQ ID NO: 42447 - RNA, 27 nt, synthetic construct
  misc_feature 1..27: note = Histone-lysine N-methyltransferase 2E (207-215)
  source 1..27: mol_type = other RNA
cagcacacccccaccagcatcacgctg

SEQ ID NO: 42448 - RNA, 27 nt, synthetic construct
  misc_feature 1..27: note = Class A basic helix-loop-helix protein 15 (151-159)
  source 1..27: mol_type = other RNA
cagcactaccagcagcagcagcaggtg

SEQ ID NO: 42449 - RNA, 27 nt, synthetic construct
  misc_feature 1..27: note = Glutathione peroxidase 7 (62-70)
  source 1..27: mol_type = other RNA
cagcactaccgcgccctgcagcagctc

SEQ ID NO: 42450 - RNA, 27 nt, synthetic construct
  misc_feature 1..27: note = N-terminal EF-hand calcium-binding protein 2 (176-184)
  source 1..27: mol_type = other RNA
cagatccagagcctgctctccagcgtg

SEQ ID NO: 42451 - RNA, 30 nt, synthetic construct
  misc_feature 1..30: note = Ig heavy chain V-II region MCE (1-10)
  source 1..30: mol_type = other RNA
cagatcaccctgaaggagagcggccccacc

SEQ ID NO: 42452 - RNA, 27 nt, synthetic construct
  misc_feature 1..27: note = CDGSH iron-sulfur domain-containing protein 3, mitochondrial (119-127)
  source 1..27: mol_type = other RNA
cagaaggccgaggtgggcagccccctg

SEQ ID NO: 42453 - RNA, 27 nt, synthetic construct
  misc_feature 1..27: note = Splicing factor 3B subunit 3 (1087-1095)
  source 1..27: mol_type = other RNA
cagaaggccgaggtgatcatgaactac

SEQ ID NO: 42454 - RNA, 27 nt, synthetic construct
  misc_feature 1..27: note = Apolipoprotein L6 (219-227)
  source 1..27: mol_type = other RNA
cagaaggccttcgccggcaccaccctg

SEQ ID NO: 42455 - RNA, 30 nt, synthetic construct
  misc_feature 1..30: note = Synapsin-2 (317-326)
  source 1..30: mol_type = other RNA
cagaagatcggcaacaactacaaggcctac

SEQ ID NO: 42456 - RNA, 27 nt, synthetic construct
  misc_feature 1..27: note = E3 ubiquitin-protein ligase DTX3L (683-691)
  source 1..27: mol_type = other RNA
cagaagctgatcttcaccgtgggctac

SEQ ID NO: 42457 - RNA, 36 nt, synthetic construct
  misc_feature 1..36: note = Very-long-chain enoyl-CoA reductase (66-77)
  source 1..36: mol_type = other RNA
cagaagctgcccgtgggcaccaccgccacgctctac

SEQ ID NO: 42458 - RNA, 27 nt, synthetic construct
  misc_feature 1..27: note = ATP-dependent DNA helicase Q1 (438-446)
  source 1..27: mol_type = other RNA
cagaagctgtacgagatggtgagctac

SEQ ID NO: 42459 - RNA, 30 nt, synthetic construct
  misc_feature 1..30: note = Melanoma inhibitory activity protein 3 (1518-1527)
  source 1..30: mol_type = other RNA
cagaaggtggagatcctgaacgagctctac

SEQ ID NO: 42460 - RNA, 27 nt, synthetic construct
  misc_feature 1..27: note = Clathrin interactor 1 (130-138)
  source 1..27: mol_type = other RNA
cagaaggtgaaggagctggtcgagttc

SEQ ID NO: 42461 - RNA, 27 nt, synthetic construct
  misc_feature 1..27: note = Cell growth-regulating nucleolar protein (56-64)
  source 1..27: mol_type = other RNA
cagaagtacggcgggaagggctacgag

SEQ ID NO: 42462 - RNA, 33 nt, synthetic construct
  misc_feature 1..33: note = Pre-mRNA-processing-splicing factor 8 (573-583)
  source 1..33: mol_type = other RNA
cagctggccgacggcctccagtacatcttcgcc

SEQ ID NO: 42463 - RNA, 27 nt, synthetic construct
  misc_feature 1..27: note = Chloride transport protein 6 (651-659)
  source 1..27: mol_type = other RNA
cagctgatcagcaacaacatcaagttc

SEQ ID NO: 42464 - RNA, 27 nt, synthetic construct
  misc_feature 1..27: note = Probable helicase senataxin (307-315)
  source 1..27: mol_type = other RNA
cagctgatggaccccatcgtggccttc

SEQ ID NO: 42465 - RNA, 27 nt, synthetic construct
  misc_feature 1..27: note = BRCA1-associated protein (505-513)
  source 1..27: mol_type = other RNA
cagaacaagctgaaggaggaggagcgc

SEQ ID NO: 42466 - RNA, 27 nt, synthetic construct
  misc_feature 1..27: note = dCTP pyrophosphatase 1 (52-60)
  source 1..27: mol_type = other RNA
cagccccgcaacctgctcctggccctg

SEQ ID NO: 42467 - RNA, 27 nt, synthetic construct
  misc_feature 1..27: note = E3 ubiquitin-protein ligase TRIM37 (638-646)
  source 1..27: mol_type = other RNA
cagccccgcccgcccgccagcctgctc

SEQ ID NO: 42468 - RNA, 36 nt, synthetic construct
  misc_feature 1..36: note = Salivary acidic proline-rich phosphoprotein 1/2 (81-92)
  source 1..36: mol_type = other RNA
cagcagggccccccgcccccccaggggaagccccag

SEQ ID NO: 42469 - RNA, 27 nt, synthetic construct
  misc_feature 1..27: note = GTP-binding protein 1 (587-595)
  source 1..27: mol_type = other RNA
cagcagatcaagatgcagagcaccaag

SEQ ID NO: 42470 - RNA, 27 nt, synthetic construct
  misc_feature 1..27: note = Titin (1700-1708)
  source 1..27: mol_type = other RNA
cagcagaagcccttcttcaagaagaag

SEQ ID NO: 42471 - RNA, 27 nt, synthetic construct
  misc_feature 1..27: note = Histamine H1 receptor (130-138)
  source 1..27: mol_type = other RNA
cagcagcccctgcgctacctcaagtac

SEQ ID NO: 42472 - RNA, 27 nt, synthetic construct
  misc_feature 1..27: note = 5-oxoprolinase (164-172)
  source 1..27: mol_type = other RNA
cagcagcccgtggacctgggcgccctc

SEQ ID NO: 42473 - RNA, 27 nt, synthetic construct
  misc_feature 1..27: note = Protein sel-1 homolog 3 (692-700)
  source 1..27: mol_type = other RNA
cagcagcgcctggcccagatgctcttc

SEQ ID NO: 42474 - RNA, 27 nt, synthetic construct
  misc_feature 1..27: note = 60S ribosomal protein L3 (203-211)
  source 1..27: mol_type = other RNA
cagcaggtgcccgtcaaccaggtgttc

SEQ ID NO: 42475 - RNA, 27 nt, synthetic construct
  misc_feature 1..27: note = Pyruvate dehydrogenase protein X component, mitochondrial (463-471)
  source 1..27: mol_type = other RNA
cagcgccagctgatcaccgtgaccatg

SEQ ID NO: 42476 - RNA, 27 nt, synthetic construct
  misc_feature 1..27: note = E3 ubiquitin-protein ligase RBBP6 (887-895)
  source 1..27: mol_type = other RNA
cagagccaccgctcccggaacatcggc

SEQ ID NO: 42477 - RNA, 27 nt, synthetic construct
  misc_feature 1..27: note = Mismatch repair endonuclease PMS2 (237-245)
  source 1..27: mol_type = other RNA
cagagcctgatccccttcgtgcagctc

SEQ ID NO: 42478 - RNA, 27 nt, synthetic construct
  misc_feature 1..27: note = Myosin-7 (419-427)
  source 1..27: mol_type = other RNA
caggtgatctacgccaccggcgccctg

SEQ ID NO: 42479 - RNA, 30 nt, synthetic construct
  misc_feature 1..30: note = CD160 antigen (101-110)
  source 1..30: mol_type = other RNA
caggtgacccccctgcacagcggcacctac

SEQ ID NO: 42480 - RNA, 27 nt, synthetic construct
  misc_feature 1..27: note = tRNA (adenine(58)-N(1))-methyltransferase non-catalytic subunit TRM6 (198-206)
  source 1..27: mol_type = other RNA
cgcgccggcaacaagatgatcgtgatg

SEQ ID NO: 42481 - RNA, 27 nt, synthetic construct
  misc_feature 1..27: note = Nucleolar GTP-binding protein 2 (400-408)
  source 1..27: mol_type = other RNA
cgcgccaagcccgagtacatcagcaag

SEQ ID NO: 42482 - RNA, 30 nt, synthetic construct
  misc_feature 1..30: note = Solute carrier family 15 member 3 (102-111)
  source 1..30: mol_type = other RNA
cgcgccgtggccctgagcctcctgctgtac

SEQ ID NO: 42483 - RNA, 27 nt, synthetic construct
  misc_feature 1..27: note = tRNA dimethylallyltransferase, mitochondrial (8-16)
  source 1..27: mol_type = other RNA
cgcgccgtgcccgtcggcagcgggctg

SEQ ID NO: 42484 - RNA, 30 nt, synthetic construct
  misc_feature 1..30: note = Translocating chain-associated membrane protein 1 (154-163)
  source 1..30: mol_type = other RNA
cgcgcctacccccacaacctgatgaccttc

SEQ ID NO: 42485 - RNA, 33 nt, synthetic construct
  misc_feature 1..33: note = Phosphoribosyl pyrophosphate synthase-associated protein 1 (68-78)
  source 1..33: mol_type = other RNA
cgcgacgtgaacaccgccgtcatggagctgctc

SEQ ID NO: 42486 - RNA, 27 nt, synthetic construct
  misc_feature 1..27: note = Voltage-dependent L-type calcium channel subunit alpha-1D (1825-1833)
  source 1..27: mol_type = other RNA
cgcgaggaccccgagatccacggctac

SEQ ID NO: 42487 - RNA, 30 nt, synthetic construct
  misc_feature 1..30: note = Inner nuclear membrane protein Man1 (459-468)
  source 1..30: mol_type = other RNA
cgcgaggaggtgagccccaccggctccttc

SEQ ID NO: 42488 - RNA, 27 nt, synthetic construct
  misc_feature 1..27: note = Gamma-glutamyltranspeptidase 1 (107-115)
  source 1..27: mol_type = other RNA
cgcgaggtggccccccggctggccttc

SEQ ID NO: 42489 - RNA, 27 nt, synthetic construct
  misc_feature 1..27: note = Ras-related protein Rab-30 (70-78)
  source 1..27: mol_type = other RNA
cgcttccggagcatcacccagtcctac

SEQ ID NO: 42490 - RNA, 27 nt, synthetic construct
  misc_feature 1..27: note = UHRF1-binding protein 1-like (15-23)
  source 1..27: mol_type = other RNA
cgcttcaccaagaacctgagccccgac

SEQ ID NO: 42491 - RNA, 27 nt, synthetic construct
  misc_feature 1..27: note = DNA-directed RNA polymerase I subunit RPA2 (766-774)
  source 1..27: mol_type = other RNA
cgcggcttcgcccacgggagcgtgtac

SEQ ID NO: 42492 - RNA, 33 nt, synthetic construct
  misc_feature 1..33: note = Endothelial differentiation-related factor 1 (133-143)
  source 1..33: mol_type = other RNA
cgcggcaaggacatcgggaagcccatcgagaag

SEQ ID NO: 42493 - RNA, 27 nt, synthetic construct
  misc_feature 1..27: note = NADH dehydrogenase (ubiquinone) iron-sulfur protein 2, mitochondrial (118-126)
  source 1..27: mol_type = other RNA
cgcggcaccgagaagctgatcgagtac

SEQ ID NO: 42494 - RNA, 27 nt, synthetic construct
  misc_feature 1..27: note = Membrane-associated tyrosine- and threonine-specific cdc2-inhibitory kinase (33-41)
  source 1..27: mol_type = other RNA
cgccacgccgagcccggcttcagcctg

SEQ ID NO: 42495 - RNA, 27 nt, synthetic construct
  misc_feature 1..27: note = Colorectal mutant cancer protein (800-808)
  source 1..27: mol_type = other RNA
cgccacgagacccaggtgcggatgctg

SEQ ID NO: 42496 - RNA, 30 nt, synthetic construct
  misc_feature 1..30: note = Beta-1,4-galactosyltransferase 6 (247-256)
  source 1..30: mol_type = other RNA
cgccacttcgccgccaagctggacaagtac

SEQ ID NO: 42497 - RNA, 27 nt, synthetic construct
  misc_feature 1..27: note = Exophilin-5 (1818-1826)
  source 1..27: mol_type = other RNA
cgccacttcagcgagtccaccagcatc

SEQ ID NO: 42498 - RNA, 27 nt, synthetic construct
  misc_feature 1..27: note = PDZ domain-containing protein GIPC1 (190-198)
  source 1..27: mol_type = other RNA
cgccactacgaggtggcccggctgctc

SEQ ID NO: 42499 - RNA, 30 nt, synthetic construct
  misc_feature 1..30: note = 26S proteasome non-ATPase regulatory subunit 14 (198-207)
  source 1..30: mol_type = other RNA
cgccactactacagcatcaccatcaactac

SEQ ID NO: 42500 - RNA, 27 nt, synthetic construct
  misc_feature 1..27: note = Ubiquitin carboxyl-terminal hydrolase 40 (780-788)
  source 1..27: mol_type = other RNA
cgcatcaaggccatcaaggagctgaag

SEQ ID NO: 42501 - RNA, 30 nt, synthetic construct
  misc_feature 1..30: note = ADP-ribosylation factor-like protein 2-binding protein (84-93)
  source 1..30: mol_type = other RNA
cgcatccccgagttcaacatggccgccttc

SEQ ID NO: 42502 - RNA, 27 nt, synthetic construct
  misc_feature 1..27: note = U5 small nuclear ribonucleoprotein 200 kDa helicase (234-242)
  source 1..27: mol_type = other RNA
cgcatccagagcaagctgtaccgggcc

SEQ ID NO: 42503 - RNA, 30 nt, synthetic construct
  misc_feature 1..30: note = 60S ribosomal protein L4 (268-277)
  source 1..30: mol_type = other RNA
cgcaaggccgccagcctgaagtccaactac

SEQ ID NO: 42504 - RNA, 27 nt, synthetic construct
  misc_feature 1..27: note = Selenoprotein H (8-16)
  source 1..27: mol_type = other RNA
cgcaaggccgaggccgcggtggtcgcc

SEQ ID NO: 42505 - RNA, 27 nt, synthetic construct
  misc_feature 1..27: note = Polyadenylate-binding protein 4 (374-382)
  source 1..27: mol_type = other RNA
cgcaaggcccacctgaccaaccagtac

SEQ ID NO: 42506 - RNA, 27 nt, synthetic construct
  misc_feature 1..27: note = Sterol regulatory element-binding protein 2 (371-379)
  source 1..27: mol_type = other RNA
cgcaaggccatcgactacatcaagtac

SEQ ID NO: 42507 - RNA, 27 nt, synthetic construct
  misc_feature 1..27: note = DNA-directed RNA polymerase II subunit RPB1 (1375-1383)
  source 1..27: mol_type = other RNA
cgcaaggccctggagcgggagctctac

SEQ ID NO: 42508 - RNA, 30 nt, synthetic construct
  misc_feature 1..30: note = Mid1-interacting protein 1 (163-172)
  source 1..30: mol_type = other RNA
cgcaaggccaacatcctgaccaaccggtac

SEQ ID NO: 42509 - RNA, 33 nt, synthetic construct
  misc_feature 1..33: note = 26S proteasome non-ATPase regulatory subunit 3 (314-324)
  source 1..33: mol_type = other RNA
cgcaaggccccccagcacaccgccgtgggcttc

SEQ ID NO: 42510 - RNA, 27 nt, synthetic construct
  misc_feature 1..27: note = 60S ribosomal protein L23 (90-98)
  source 1..27: mol_type = other RNA
cgcaaggacggcgtgttcctgtacttc

SEQ ID NO: 42511 - RNA, 27 nt, synthetic construct
  misc_feature 1..27: note = Eukaryotic translation initiation factor 5B (376-384)
  source 1..27: mol_type = other RNA
cgcaaggaggaggagcggctggagcag

SEQ ID NO: 42512 - RNA, 27 nt, synthetic construct
  misc_feature 1..27: note = Uridine-cytidine kinase 2 (119-127)
  source 1..27: mol_type = other RNA
cgcaaggaggagaccgtgaccgtctac

SEQ ID NO: 42513 - RNA, 30 nt, synthetic construct
  misc_feature 1..30: note = Histone H2B type 1-K (34-43)
  source 1..30: mol_type = other RNA
cgcaaggagagctactccgtgtacgtctac

SEQ ID NO: 42514 - RNA, 30 nt, synthetic construct
  misc_feature 1..30: note = MOB kinase activator 3A (20-29)
  source 1..30: mol_type = other RNA
cgcaagttcgagcccggcacccagcggttc

SEQ ID NO: 42515 - RNA, 27 nt, synthetic construct
  misc_feature 1..27: note = Group XV phospholipase A2 (296-304)
  source 1..27: mol_type = other RNA
cgcaagttcttccaggacatcggcttc

SEQ ID NO: 42516 - RNA, 33 nt, synthetic construct
  misc_feature 1..33: note = General transcription factor II-I (878-888)
  source 1..33: mol_type = other RNA
cgcaagttcggcgaggccatcgggatgggcttc

SEQ ID NO: 42517 - RNA, 27 nt, synthetic construct
  misc_feature 1..27: note = Ribosome biogenesis protein TSR3 homolog (186-194)
  source 1..27: mol_type = other RNA
cgcaagttcaagtggggcaaggggttc

SEQ ID NO: 42518 - RNA, 33 nt, synthetic construct
  misc_feature 1..33: note = Elongation factor 1-gamma (51-61)
  source 1..33: mol_type = other RNA
cgcaagttccccgccggcaaggtgccggccttc

SEQ ID NO: 42519 - RNA, 27 nt, synthetic construct
  misc_feature 1..27: note = Actin filament-associated protein 1-like 2 (481-489)
  source 1..27: mol_type = other RNA
cgcaagttcagcgagcccaacacctac

SEQ ID NO: 42520 - RNA, 27 nt, synthetic construct
  misc_feature 1..27: note = Casein kinase I isoform delta (98-106)
  source 1..27: mol_type = other RNA
cgcaagttcagcctgaagaccgtgctc

SEQ ID NO: 42521 - RNA, 27 nt, synthetic construct
  misc_feature 1..27: note = 60S ribosomal protein L35 (70-78)
  source 1..27: mol_type = other RNA
cgcaagttctacaagggcaagaagtac

SEQ ID NO: 42522 - RNA, 27 nt, synthetic construct
  misc_feature 1..27: note = Eukaryotic peptide chain release factor GTP-binding subunit ERF3B (315-323)
  source 1..27: mol_type = other RNA
cgcaagggcgagttcgagaccgggttc

SEQ ID NO: 42523 - RNA, 30 nt, synthetic construct
  misc_feature 1..30: note = Cytochrome c oxidase subunit 5A, mitochondrial (71-80)
  source 1..30: mol_type = other RNA
cgcaagggcatcaacaccctggtgacctac

SEQ ID NO: 42524 - RNA, 27 nt, synthetic construct
  misc_feature 1..27: note = Heat shock protein HSP 90-alpha (512-520)
  source 1..27: mol_type = other RNA
cgcaagcacggcctggaggtgatctac

SEQ ID NO: 42525 - RNA, 30 nt, synthetic construct
  misc_feature 1..30: note = Nardilysin (545-554)
  source 1..30: mol_type = other RNA
cgcaagatcgaggacaacgagttccactac

SEQ ID NO: 42526 - RNA, 30 nt, synthetic construct
  misc_feature 1..30: note = Lamin-B1 (473-482)
  source 1..30: mol_type = other RNA
cgcaagatcggcgacaccagcgtgtcctac

SEQ ID NO: 42527 - RNA, 27 nt, synthetic construct
  misc_feature 1..27: note = Mediator of RNA polymerase II transcription subunit 23 (123-131)
  source 1..27: mol_type = other RNA
cgcaagatcatcggcggggtggactac

SEQ ID NO: 42528 - RNA, 27 nt, synthetic construct
  misc_feature 1..27: note = Immunoglobulin superfamily member 10 (1201-1209)
  source 1..27: mol_type = other RNA
cgcaagatcccctggcagcagaacttc

SEQ ID NO: 42529 - RNA, 27 nt, synthetic construct
  misc_feature 1..27: note = Ubiquitin carboxyl-terminal hydrolase 22 (420-428)
  source 1..27: mol_type = other RNA
cgcaagatcaccacctacgtgagcttc

SEQ ID NO: 42530 - RNA, 27 nt, synthetic construct
  misc_feature 1..27: note = 60S ribosomal protein L10 (38-46)
  source 1..27: mol_type = other RNA
cgcaagaaggccaaggtggacgagttc

SEQ ID NO: 42531 - RNA, 27 nt, synthetic construct
  misc_feature 1..27: note = Cytochrome c oxidase subunit 6C (45-53)
  source 1..27: mol_type = other RNA
cgcaagaaggcctacgccgacttctac

SEQ ID NO: 42532 - RNA, 27 nt, synthetic construct
  misc_feature 1..27: note = Protein ENL (20-28)
  source 1..27: mol_type = other RNA
cgcaagaagcccaccaccgagggcttc

SEQ ID NO: 42533 - RNA, 30 nt, synthetic construct
  misc_feature 1..30: note = 60S ribosomal protein L15 (12-21)
  source 1..30: mol_type = other RNA
cgcaagaagcagagcgacgtgatgcggttc

SEQ ID NO: 42534 - RNA, 27 nt, synthetic construct
  misc_feature 1..27: note = Cytochrome c1, heme protein, mitochondrial (317-325)
  source 1..27: mol_type = other RNA
cgcaagctggcctaccggcccccgaag

SEQ ID NO: 42535 - RNA, 33 nt, synthetic construct
  misc_feature 1..33: note = CD2 antigen cytoplasmic tail-binding protein 2 (320-330)
  source 1..33: mol_type = other RNA
cgcaagctggaccccccgggcgggcagttctac

SEQ ID NO: 42536 - RNA, 27 nt, synthetic construct
  misc_feature 1..27: note = Protein O-GlcNAcase (156-164)
  source 1..27: mol_type = other RNA
cgcaagctggaccaggtgagccagttc

SEQ ID NO: 42537 - RNA, 27 nt, synthetic construct
  misc_feature 1..27: note = Neurabin-2 (179-187)
  source 1..27: mol_type = other RNA
cgcaagctggacgtggtcgtgcggttc

SEQ ID NO: 42538 - RNA, 33 nt, synthetic construct
  misc_feature 1..33: note = Prohibitin (239-249)
  source 1..33: mol_type = other RNA
cgcaagctggaggccgccgaggacatcgcgtac

SEQ ID NO: 42539 - RNA, 27 nt, synthetic construct
  misc_feature 1..27: note = Thyroid transcription factor 1-associated protein 26 (59-67)
  source 1..27: mol_type = other RNA
cgcaagctgaagatccagcagagctac

SEQ ID NO: 42540 - RNA, 27 nt, synthetic construct
  misc_feature 1..27: note = Pre-mRNA-processing factor 19 (422-430)
  source 1..27: mol_type = other RNA
cgcaagctgaagaacttcaagaccctc

SEQ ID NO: 42541 - RNA, 27 nt, synthetic construct
  misc_feature 1..27: note = Toll-like receptor 9 (337-345)
  source 1..27: mol_type = other RNA
cgcaagctgaacctcagcttcaactac

SEQ ID NO: 42542 - RNA, 30 nt, synthetic construct
  misc_feature 1..30: note = von Willebrand factor A domain-containing protein 9 (424-433)
  source 1..30: mol_type = other RNA
cgcaagctgcccgagaagacccagaccttc

SEQ ID NO: 42543 - RNA, 27 nt, synthetic construct
  misc_feature 1..27: note = UAP56-interacting factor (165-173)
  source 1..27: mol_type = other RNA
cgcaagaacaacatccccgccaacttc

SEQ ID NO: 42544 - RNA, 30 nt, synthetic construct
  misc_feature 1..30: note = Activating signal cointegrator 1 complex subunit 1 (17-26)
  source 1..30: mol_type = other RNA
cgcaagaaccccgtgcaggagcagacctac

SEQ ID NO: 42545 - RNA, 27 nt, synthetic construct
  misc_feature 1..27: note = 5'-AMP-activated protein kinase catalytic subunit alpha-1 (447-455)
  source 1..27: mol_type = other RNA
cgcaagaaccccgtgaccagcacctac

SEQ ID NO: 42546 - RNA, 30 nt, synthetic construct
  misc_feature 1..30: note = Nuclear pore complex protein Nup98-Nup96 (1206-1215)
  source 1..30: mol_type = other RNA
cgcaagcccgacgaggacatgaagctgtac

SEQ ID NO: 42547 - RNA, 30 nt, synthetic construct
  misc_feature 1..30: note = Ubiquitin carboxyl-terminal hydrolase 47 (700-709)
  source 1..30: mol_type = other RNA
cgcaagcccgaccaggtgttccagagctac

SEQ ID NO: 42548 - RNA, 27 nt, synthetic construct
  misc_feature 1..27: note = Transcriptional regulator ATRX (81-89)
  source 1..27: mol_type = other RNA
cgcaagcccagcatcgtgaccaagtac

SEQ ID NO: 42549 - RNA, 27 nt, synthetic construct
  misc_feature 1..27: note = Bifunctional polynucleotide phosphatase/kinase (483-491)
  source 1..27: mol_type = other RNA
cgcaagcagttcgaggcccccaccctg

SEQ ID NO: 42550 - RNA, 27 nt, synthetic construct
  misc_feature 1..27: note = DNA-dependent protein kinase catalytic subunit (70-78)
  source 1..27: mol_type = other RNA
cgcaagagcctgaactccatcgagttc

SEQ ID NO: 42551 - RNA, 27 nt, synthetic construct
  misc_feature 1..27: note = Serine/threonine-protein phosphatase 6 regulatory subunit 1 (134-142)
  source 1..27: mol_type = other RNA
cgcaagaccgaccagctggtgagcttc

SEQ ID NO: 42552 - RNA, 33 nt, synthetic construct
  misc_feature 1..33: note = Histone H4 (79-89)
  source 1..33: mol_type = other RNA
cgcaagaccgtgaccgccatggacgtcgtgtac

SEQ ID NO: 42553 - RNA, 27 nt, synthetic construct
  misc_feature 1..27: note = Flap endonuclease 1 (29-37)
  source 1..27: mol_type = other RNA
cgcaaggtggccatcgacgccagcatg

SEQ ID NO: 42554 - RNA, 33 nt, synthetic construct
  misc_feature 1..33: note = 60S ribosome subunit biogenesis protein NIP7 homolog (154-164)
  source 1..33: mol_type = other RNA
cgcaaggtggaccccatggccatcgtcgtgttc

SEQ ID NO: 42555 - RNA, 30 nt, synthetic construct
  misc_feature 1..30: note = E3 ubiquitin/ISG15 ligase TRIM25 (236-245)
  source 1..30: mol_type = other RNA
cgcaaggtggagcagctgcagcaggagtac

SEQ ID NO: 42556 - RNA, 27 nt, synthetic construct
  misc_feature 1..27: note = Mitochondrial carrier homolog 2 (287-295)
  source 1..27: mol_type = other RNA
cgcaaggtgcccttcggcaagacctac

SEQ ID NO: 42557 - RNA, 27 nt, synthetic construct
  misc_feature 1..27: note = Fatty acid desaturase 1 (40-48)
  source 1..27: mol_type = other RNA
cgcaaggtgtacaacatcagcgagttc

SEQ ID NO: 42558 - RNA, 27 nt, synthetic construct
  misc_feature 1..27: note = Glucose-6-phosphate translocase (126-134)
  source 1..27: mol_type = other RNA
cgcaagtggttcgagcccagccagttc

SEQ ID NO: 42559 - RNA, 36 nt, synthetic construct
  misc_feature 1..36: note = Heterogeneous nuclear ribonucleoprotein R (145-156)
  source 1..36: mol_type = other RNA
cgcaagtacggcgggcccccgcccgacagcgtgtac

SEQ ID NO: 42560 - RNA, 27 nt, synthetic construct
  misc_feature 1..27: note = Serine/threonine-protein phosphatase 4 catalytic subunit (132-140)
  source 1..27: mol_type = other RNA
cgcaagtacggcagcgtgaccgtctgg

SEQ ID NO: 42561 - RNA, 27 nt, synthetic construct
  misc_feature 1..27: note = Vigilin (87-95)
  source 1..27: mol_type = other RNA
cgcaagtacaaggacatgaaccagttc

SEQ ID NO: 42562 - RNA, 27 nt, synthetic construct
  misc_feature 1..27: note = Lysine-specific demethylase 5A (773-781)
  source 1..27: mol_type = other RNA
cgcaagtaccccgagaacgacctgttc

SEQ ID NO: 42563 - RNA, 27 nt, synthetic construct
  misc_feature 1..27: note = Pre-mRNA-processing-splicing factor 8 (217-225)
  source 1..27: mol_type = other RNA
cgcaagtacgtgaacggcagcacctac

SEQ ID NO: 42564 - RNA, 27 nt, synthetic construct
  misc_feature 1..27: note = Max-binding protein MNT (295-303)
  source 1..27: mol_type = other RNA
cgcctggccgagctcaagcacgagctg

SEQ ID NO: 42565 - RNA, 27 nt, synthetic construct
  misc_feature 1..27: note = Protein unc-93 homolog B1 (374-382)
  source 1..27: mol_type = other RNA
cgcctggcctacctcctggtggcctac

SEQ ID NO: 42566 - RNA, 27 nt, synthetic construct
  misc_feature 1..27: note = Nuclear pore complex protein Nup85 (162-170)
  source 1..27: mol_type = other RNA
cgcctggacgaggcccggcagatgctc

SEQ ID NO: 42567 - RNA, 27 nt, synthetic construct
  misc_feature 1..27: note = Acetyl-CoA carboxylase 2 (765-773)
  source 1..27: mol_type = other RNA
cgcctgggcgggatccccgtgggcgtc

SEQ ID NO: 42568 - RNA, 27 nt, synthetic construct
  misc_feature 1..27: note = X-ray repair cross-complementing protein 6 (517-525)
  source 1..27: mol_type = other RNA
cgcctgggcagcctcgtggacgagttc

SEQ ID NO: 42569 - RNA, 27 nt, synthetic construct
  misc_feature 1..27: note = N-alpha-acetyltransferase 35, NatC auxiliary subunit (331-339)
  source 1..27: mol_type = other RNA
cgcctgatcgaccggatcaagaccgtg

SEQ ID NO: 42570 - RNA, 30 nt, synthetic construct
  misc_feature 1..30: note = Cyclic GMP-AMP synthase (353-362)
  source 1..30: mol_type = other RNA
cgcctgaagcccttctacctcgtgccgaag

SEQ ID NO: 42571 - RNA, 27 nt, synthetic construct
  misc_feature 1..27: note = Myosin light chain kinase 2, skeletal/cardiac muscle (553-561)
  source 1..27: mol_type = other RNA
cgcctgaagagccagatcctcctgaag

SEQ ID NO: 42572 - RNA, 27 nt, synthetic construct
  misc_feature 1..27: note = tRNA wybutosine-synthesizing protein 4 (311-319)
  source 1..27: mol_type = other RNA
cgcctgagccccgtgtccccggccctc

SEQ ID NO: 42573 - RNA, 27 nt, synthetic construct
  misc_feature 1..27: note = DnaJ homolog subfamily C member 8 (45-53)
  source 1..27: mol_type = other RNA
cgcctgacccggcccggcagctcctac

SEQ ID NO: 42574 - RNA, 27 nt, synthetic construct
  misc_feature 1..27: note = C-type lectin domain family 4 member F (36-44)
  source 1..27: mol_type = other RNA
cgcctggtgcaggccacccccgccttc

SEQ ID NO: 42575 - RNA, 27 nt, synthetic construct
  misc_feature 1..27: note = Proteasome assembly chaperone 4 (20-28)
  source 1..27: mol_type = other RNA
cgcctgtgggagcagctcgtgcacttc

SEQ ID NO: 42576 - RNA, 30 nt, synthetic construct
  misc_feature 1..30: note = Laminin subunit beta-3 (1125-1134)
  source 1..30: mol_type = other RNA
cgcatgaaggacatggagctggagctcctg

SEQ ID NO: 42577 - RNA, 27 nt, synthetic construct
  misc_feature 1..27: note = Cytochrome c oxidase assembly protein COX15 homolog (153-161)
  source 1..27: mol_type = other RNA
cgcatgtggggccggctggtggggctc

SEQ ID NO: 42578 - RNA, 27 nt, synthetic construct
  misc_feature 1..27: note = Histone deacetylase complex subunit SAP18 (117-125)
  source 1..27: mol_type = other RNA
cgccccggctaccgggtgaaggagatc

SEQ ID NO: 42579 - RNA, 30 nt, synthetic construct
  misc_feature 1..30: note = R3H domain-containing protein 2 (2-11)
  source 1..30: mol_type = other RNA
cgccccccggtgaccaaggccagctccttc

SEQ ID NO: 42580 - RNA, 27 nt, synthetic construct
  misc_feature 1..27: note = Short transient receptor potential channel 4-associated protein (31-39)
  source 1..27: mol_type = other RNA
cgcccccggccgggcaacatcctgctc

SEQ ID NO: 42581 - RNA, 27 nt, synthetic construct
  misc_feature 1..27: note = Glycogen synthase kinase-3 beta (306-314)
  source 1..27: mol_type = other RNA
cgcccccggaccccgcccgaggccatc

SEQ ID NO: 42582 - RNA, 27 nt, synthetic construct
  misc_feature 1..27: note = Transcription initiation factor IIB (169-177)
  source 1..27: mol_type = other RNA
cgccaggagggcgtgccccggaccttc

SEQ ID NO: 42583 - RNA, 30 nt, synthetic construct
  misc_feature 1..30: note = Protein FAM46A (224-233)
  source 1..30: mol_type = other RNA
cgccagttcgagttcagcgtggactccttc

SEQ ID NO: 42584 - RNA, 27 nt, synthetic construct
  misc_feature 1..27: note = Pre-rRNA-processing protein TSR1 homolog (574-582)
  source 1..27: mol_type = other RNA
cgccagggcacccccctgatcgccttc

SEQ ID NO: 42585 - RNA, 27 nt, synthetic construct
  misc_feature 1..27: note = NADH dehydrogenase (ubiquinone) 1 subunit C2 (59-67)
  source 1..27: mol_type = other RNA
cgccagctgctctacatcaccgccttc

SEQ ID NO: 42586 - RNA, 27 nt, synthetic construct
  misc_feature 1..27: note = Cytochrome b-245 heavy chain (147-155)
  source 1..27: mol_type = other RNA
cgccagaacgagagctacctgaacttc

SEQ ID NO: 42587 - RNA, 27 nt, synthetic construct
  misc_feature 1..27: note = Rho GTPase-activating protein 4 (492-500)
  source 1..27: mol_type = other RNA
cgccagccccggccgagctcccagtac

SEQ ID NO: 42588 - RNA, 30 nt, synthetic construct
  misc_feature 1..30: note = Protein strawberry notch homolog 1 (79-88)
  source 1..30: mol_type = other RNA
cgccagcagcccccgagcaccaccacgttc

SEQ ID NO: 42589 - RNA, 27 nt, synthetic construct
  misc_feature 1..27: note = Large proline-rich protein BAG6 (780-788)
  source 1..27: mol_type = other RNA
cgcagcttcttccaccagcactacctg

SEQ ID NO: 42590 - RNA, 27 nt, synthetic construct
  misc_feature 1..27: note = DnaJ homolog subfamily C member 10 (220-228)
  source 1..27: mol_type = other RNA
cgcagcaaggagtccctggtgagcttc

SEQ ID NO: 42591 - RNA, 27 nt, synthetic construct
  misc_feature 1..27: note = DNA-dependent protein kinase catalytic subunit (3046-3054)
  source 1..27: mol_type = other RNA
cgcagcaagctgaagctcctgctgcag

SEQ ID NO: 42592 - RNA, 30 nt, synthetic construct
  misc_feature 1..30: note = Protein SON (1072-1081)
  source 1..30: mol_type = other RNA
cgcagcatgatgtcccccatggccgaccgg

SEQ ID NO: 42593 - RNA, 27 nt, synthetic construct
  misc_feature 1..27: note = Small nuclear ribonucleoprotein E (28-36)
  source 1..27: mol_type = other RNA
cgcagccagatccaggtgtggctgtac

SEQ ID NO: 42594 - RNA, 30 nt, synthetic construct
  misc_feature 1..30: note = PHD finger protein 3 (815-824)
  source 1..30: mol_type = other RNA
cgcaccaagtacatcgacgacaccgtgaag

SEQ ID NO: 42595 - RNA, 27 nt, synthetic construct
  misc_feature 1..27: note = 60S ribosomal protein L34 (24-32)
  source 1..27: mol_type = other RNA
cgcacccccggcaaccggatcgtgtac

SEQ ID NO: 42596 - RNA, 27 nt, synthetic construct
  misc_feature 1..27: note = Androglobin (1138-1146)
  source 1..27: mol_type = other RNA
cgcaccagcaagcccgacgccttcatc

SEQ ID NO: 42597 - RNA, 27 nt, synthetic construct
  misc_feature 1..27: note = Eukaryotic translation initiation factor 2 subunit 2 (182-190)
  source 1..27: mol_type = other RNA
cgcgtgttcaacatcatgcgggagaag

SEQ ID NO: 42598 - RNA, 27 nt, synthetic construct
  misc_feature 1..27: note = Ankyrin repeat domain-containing protein 13C (353-361)
  source 1..27: mol_type = other RNA
cgcgtgggcaacttcctggccgacttc

SEQ ID NO: 42599 - RNA, 27 nt, synthetic construct
  misc_feature 1..27: note = Eyes absent homolog 1 (440-448)
  source 1..27: mol_type = other RNA
cgcgtgaaggagatctacaacacctac

SEQ ID NO: 42600 - RNA, 27 nt, synthetic construct
  misc_feature 1..27: note = NADH dehydrogenase (ubiquinone) 1 beta subcomplex subunit 5, mitochondrial (150-158)
  source 1..27: mol_type = other RNA
cgcgtgaaggagctggaggtccggaag

SEQ ID NO: 42601 - RNA, 27 nt, synthetic construct
  misc_feature 1..27: note = Histone-lysine N-methyltransferase EZH2 (18-26)
  source 1..27: mol_type = other RNA
cgcgtgaagagcgagtacatgcggctg

SEQ ID NO: 42602 - RNA, 27 nt, synthetic construct
  misc_feature 1..27: note = Bystin (257-265)
  source 1..27: mol_type = other RNA
cgcgtgcgggacgacgtcgccgagtac

SEQ ID NO: 42603 - RNA, 27 nt, synthetic construct
  misc_feature 1..27: note = Ribonucleoside-diphosphate reductase subunit M2 (288-296)
  source 1..27: mol_type = other RNA
cgcgtgcgggagatcatcatcaacgcc

SEQ ID NO: 42604 - RNA, 27 nt, synthetic construct
  misc_feature 1..27: note = Leydig cell tumor 10 kDa protein homolog (42-50)
  source 1..27: mol_type = other RNA
cgcgtggtccagcagcagaagctgaag

SEQ ID NO: 42605 - RNA, 30 nt, synthetic construct
  misc_feature 1..30: note = Thioredoxin-related transmembrane protein 2 (198-207)
  source 1..30: mol_type = other RNA
cgctacaccgacgtgagcacccggtacaag

SEQ ID NO: 42606 - RNA, 27 nt, synthetic construct
  misc_feature 1..27: note = Dipeptidyl peptidase 3 (692-700)
  source 1..27: mol_type = other RNA
agcgccgccggcctgatccgctccttc

SEQ ID NO: 42607 - RNA, 27 nt, synthetic construct
  misc_feature 1..27: note = Cyclin-dependent kinase 11B (785-793)
  source 1..27: mol_type = other RNA
agcgccgccggccccgggttctccctg

SEQ ID NO: 42608 - RNA, 27 nt, synthetic construct
  misc_feature 1..27: note = Fanconi anemia group M protein (1313-1321)
  source 1..27: mol_type = other RNA
agcgccgccaagaacgaggagctgctc

SEQ ID NO: 42609 - RNA, 27 nt, synthetic construct
  misc_feature 1..27: note = Integrin beta-7 (338-346)
  source 1..27: mol_type = other RNA
agcgccgccaacatccagcccatcttc

SEQ ID NO: 42610 - RNA, 27 nt, synthetic construct
  misc_feature 1..27: note = Deleted in malignant brain tumors 1 protein (202-210)
  source 1..27: mol_type = other RNA
agcgccgcccagccccagtccaccctg

SEQ ID NO: 42611 - RNA, 27 nt, synthetic construct
  misc_feature 1..27: note = Cell division cycle and apoptosis regulator protein 1 (253-261)
  source 1..27: mol_type = other RNA
agcgccgcctccatcacccccctgctc

SEQ ID NO: 42612 - RNA, 27 nt, synthetic construct
  misc_feature 1..27: note = Magnesium transporter protein 1 (108-116)
  source 1..27: mol_type = other RNA
agcgccttcaccaaccgcatcttcttc

SEQ ID NO: 42613 - RNA, 27 nt, synthetic construct
  misc_feature 1..27: note = Rho guanine nucleotide exchange factor 2 (122-130)
  source 1..27: mol_type = other RNA
agcgccatctacccctccgacagcttc

SEQ ID NO: 42614 - RNA, 27 nt, synthetic construct
  misc_feature 1..27: note = Pleckstrin homology domain-containing family B member 1 (11-19)
  source 1..27: mol_type = other RNA
agcgccctggagtcccccttcgaggag

SEQ ID NO: 42615 - RNA, 27 nt, synthetic construct
  misc_feature 1..27: note = 14-3-3 protein eta (25-33)
  source 1..27: mol_type = other RNA
agcgccatgaaggccgtgaccgagctg

SEQ ID NO: 42616 - RNA, 33 nt, synthetic construct
  misc_feature 1..33: note = Nuclease-sensitive element-binding protein 1 (314-324)
  source 1..33: mol_type = other RNA
agcgcccccgaggccgagcagggcggggcggag

SEQ ID NO: 42617 - RNA, 27 nt, synthetic construct
  misc_feature 1..27: note = Peroxisomal multifunctional enzyme type 2 (151-159)
  source 1..27: mol_type = other RNA
agcgcctccggcatctacgggaacttc

SEQ ID NO: 42618 - RNA, 27 nt, synthetic construct
  misc_feature 1..27: note = Multidrug resistance-associated protein 4 (326-334)
  source 1..27: mol_type = other RNA
agcgcctccaagatcatcgtgttcgtc

SEQ ID NO: 42619 - RNA, 27 nt, synthetic construct
  misc_feature 1..27: note = CapZ-interacting protein (15-23)
  source 1..27: mol_type = other RNA
agcgcctcccccagcgtggcccagctg

SEQ ID NO: 42620 - RNA, 27 nt, synthetic construct
  misc_feature 1..27: note = Mucin-20 (558-566)
  source 1..27: mol_type = other RNA
agcgccgtgggcaagaccacctccttc

SEQ ID NO: 42621 - RNA, 27 nt, synthetic construct
  misc_feature 1..27: note = ADP-dependent glucokinase (7-15)
  source 1..27: mol_type = other RNA
agcgcctacgccggcttcctggcgctc

SEQ ID NO: 42622 - RNA, 27 nt, synthetic construct
  misc_feature 1..27: note = AFG3-like protein 2 (656-664)
  source 1..27: mol_type = other RNA
agcgcctacgcccagatcgtgcagttc

SEQ ID NO: 42623 - RNA, 33 nt, synthetic construct
  misc_feature 1..33: note = HLA class I histocompatibility antigen, Cw-7 alpha chain (115-125)
  source 1..33: mol_type = other RNA
agcgcctacgacggcaaggactacatcgccctg

SEQ ID NO: 42624 - RNA, 27 nt, synthetic construct
  misc_feature 1..27: note = Heterogeneous nuclear ribonucleoprotein D-like (363-371)
  source 1..27: mol_type = other RNA
agcgcctacggcggggaccagaactac

SEQ ID NO: 42625 - RNA, 27 nt, synthetic construct
  misc_feature 1..27: note = Cyclic AMP-responsive element-binding protein 1 (143-151)
  source 1..27: mol_type = other RNA
agcgacgcccccggcgtgccgcgcatc

SEQ ID NO: 42626 - RNA, 27 nt, synthetic construct
  misc_feature 1..27: note = Obscurin (2339-2347)
  source 1..27: mol_type = other RNA
agcgacggcctgtaccgcaagctcatc

SEQ ID NO: 42627 - RNA, 30 nt, synthetic construct
  misc_feature 1..30: note = Transgelin-2 (163-172)
  source 1..30: mol_type = other RNA
agcgacaaccagctgcaggagggcaagaac

SEQ ID NO: 42628 - RNA, 33 nt, synthetic construct
  misc_feature 1..33: note = Histone H2B type 1-K (113-123)
  source 1..33: mol_type = other RNA
agcgagggcaccaaggccgtgaccaagtacacg

SEQ ID NO: 42629 - RNA, 30 nt, synthetic construct
  misc_feature 1..30: note = Tumor protein D54 (166-175)
  source 1..30: mol_type = other RNA
agcttcgaggaccgcgtgggcaccatcaag

SEQ ID NO: 42630 - RNA, 36 nt, synthetic construct
  misc_feature 1..36: note = Ubiquitin-conjugating enzyme E2 J1 (236-247)
  source 1..36: mol_type = other RNA
agcttccaccagcccacccagccggtggccaagaac

SEQ ID NO: 42631 - RNA, 27 nt, synthetic construct
  misc_feature 1..27: note = Lipase member J (205-213)
  source 1..27: mol_type = other RNA
agcttcaagaagttcatcggctccaag

SEQ ID NO: 42632 - RNA, 30 nt, synthetic construct
  misc_feature 1..30: note = DNA damage-binding protein 1 (1096-1105)
  source 1..30: mol_type = other RNA
agcttcctggacatctcccgccccaagatg

SEQ ID NO: 42633 - RNA, 30 nt, synthetic construct
  misc_feature 1..30: note = Dynein heavy chain 14, axonemal (3238-3247)
  source 1..30: mol_type = other RNA
agcttcctgaacatgcgcgtgcccaccctc

SEQ ID NO: 42634 - RNA, 27 nt, synthetic construct
  misc_feature 1..27: note = Actin-related protein 3 (170-178)
  source 1..27: mol_type = other RNA
agcggcgacggggtgacccacgtcatc

SEQ ID NO: 42635 - RNA, 27 nt, synthetic construct
  misc_feature 1..27: note = Protein phosphatase 1 regulatory subunit 14B (21-29)
  source 1..27: mol_type = other RNA
agcggcgggcccggcccgcgcgtgtac

SEQ ID NO: 42636 - RNA, 30 nt, synthetic construct
  misc_feature 1..30: note Dolichyl-diphosphooligosaccharide-proteinosyltransferase subunit 1 (272-281)
  source 1..30: mol_type = other RNA
agcggcatctccagcatccgctccttcaag

SEQ ID NO: 42637 - RNA, 27 nt, synthetic construct
  misc_feature 1..27: note = Kinesin-like protein KIFC2 (600-608)
  source 1..27: mol_type = other RNA
agccacgccctggtgaccctcaccctg

SEQ ID NO: 42638 - RNA, 27 nt, synthetic construct
  misc_feature 1..27: note = Sorting nexin-19 (151-159)
  source 1..27: mol_type = other RNA
agccacgccgtggcccagtccgtcctg

SEQ ID NO: 42639 - RNA, 27 nt, synthetic construct
  misc_feature 1..27: note = Probable E3 ubiquitin-protein ligase HERC4 (280-288)
  source 1..27: mol_type = other RNA
agccacgagatcaacccccgcaaggtg

SEQ ID NO: 42640 - RNA, 36 nt, synthetic construct
  misc_feature 1..36: note = Mucin-7 (41-52)
  source 1..36: mol_type = other RNA
agccacttcgagctgccccactacccgggcctcctg

SEQ ID NO: 42641 - RNA, 27 nt, synthetic construct
  misc_feature 1..27: note = Histone-lysine N-methyltransferase 2D (2564-2572)
  source 1..27: mol_type = other RNA
agccacttcggccccgggccgaccctg

SEQ ID NO: 42642 - RNA, 24 nt, synthetic construct
  misc_feature 1..24: note = Putative uncharacterized protein FLJ37218 (158-165)
  source 1..24: mol_type = other RNA
agccacttcaccgaccaggagctg

SEQ ID NO: 42643 - RNA, 27 nt, synthetic construct
  misc_feature 1..27: note = Tapasin (318-326)
  source 1..27: mol_type = other RNA
agccacttctacccctccggcgggctg

SEQ ID NO: 42644 - RNA, 27 nt, synthetic construct
  misc_feature 1..27: note = Translational activator GCN1 (674-682)
  source 1..27: mol_type = other RNA
agccaccacccctccctggtggccgtc

SEQ ID NO: 42645 - RNA, 27 nt, synthetic construct
  misc_feature 1..27: note = Transcriptional repressor p66-beta (322-330)
  source 1..27: mol_type = other RNA
agccacatccagcccggcaccgtgaac

SEQ ID NO: 42646 - RNA, 27 nt, synthetic construct
  misc_feature 1..27: note = Disintegrin and metalloproteinase domain-containing protein 10 (377-385)
  source 1..27: mol_type = other RNA
agccacatcaccttcgcccacgaggtg

SEQ ID NO: 42647 - RNA, 27 nt, synthetic construct
  misc_feature 1..27: note = Niemann-Pick C1 protein (1169-1177)
  source 1..27: mol_type = other RNA
agccacatcacccgcgccttcaccgtg

SEQ ID NO: 42648 - RNA, 27 nt, synthetic construct
  misc_feature 1..27: note = Endothelial PAS domain-containing protein 1 (49-57)
  source 1..27: mol_type = other RNA
agccacctggacaaggcctccatcatg

SEQ ID NO: 42649 - RNA, 27 nt, synthetic construct
  misc_feature 1..27: note = Retrotransposon-derived protein PEG10 (219-227)
  source 1..27: mol_type = other RNA
agccacctggaggtggccaagtccctc

SEQ ID NO: 42650 - RNA, 27 nt, synthetic construct
  misc_feature 1..27: note Dolichyl-diphosphooligosaccharide-proteinosyltransferase subunit 2 (169-177)
  source 1..27: mol_type = other RNA
agccacctgtcccagcaggccgacctc

SEQ ID NO: 42651 - RNA, 27 nt, synthetic construct
  misc_feature 1..27: note = Protein FAM78A (95-103)
  source 1..27: mol_type = other RNA
agccacatggagttctacaaccagtac

SEQ ID NO: 42652 - RNA, 27 nt, synthetic construct
  misc_feature 1..27: note = THO complex subunit 5 homolog (470-478)
  source 1..27: mol_type = other RNA
agccacatggagaccaccatgaagctg

SEQ ID NO: 42653 - RNA, 27 nt, synthetic construct
  misc_feature 1..27: note = Nicastrin (219-227)
  source 1..27: mol_type = other RNA
agccacatgcacgccgtgatctccacc

SEQ ID NO: 42654 - RNA, 27 nt, synthetic construct
  misc_feature 1..27: note = Regulation of nuclear pre-mRNA domain-containing protein 2 (503-511)
  source 1..27: mol_type = other RNA
agccacaaccccctggccaacatcctc

SEQ ID NO: 42655 - RNA, 27 nt, synthetic construct
  misc_feature 1..27: note = Myotubularin-related protein 6 (41-49)
  source 1..27: mol_type = other RNA
agccaccagaaggagacctggatcctg

SEQ ID NO: 42656 - RNA, 36 nt, synthetic construct
  misc_feature 1..36: note = Cytochrome c oxidase subunit 7B, mitochondrial (25-36)
  source 1..36: mol_type = other RNA
agccaccagaagcgcacccccgacttccacgacaag

SEQ ID NO: 42657 - RNA, 27 nt, synthetic construct
  misc_feature 1..27: note = Transmembrane protein 201 (295-303)
  source 1..27: mol_type = other RNA
agccaccagaccggcgtggtcgccctg

SEQ ID NO: 42658 - RNA, 27 nt, synthetic construct
  misc_feature 1..27: note = Squalene monooxygenase (461-469)
  source 1..27: mol_type = other RNA
agccactccttcgtggtcaacatcctg

SEQ ID NO: 42659 - RNA, 27 nt, synthetic construct
  misc_feature 1..27: note = Zinc transporter ZIP6 (388-396)
  source 1..27: mol_type = other RNA
agccactcccacgaggagcccgccatg

SEQ ID NO: 42660 - RNA, 27 nt, synthetic construct
  misc_feature 1..27: note = Transmembrane protein 214 (503-511)
  source 1..27: mol_type = other RNA
agccactccagcttccaggcctccctg

SEQ ID NO: 42661 - RNA, 27 nt, synthetic construct
  misc_feature 1..27: note = 39S ribosomal protein L17, mitochondrial (167-175)
  source 1..27: mol_type = other RNA
agccacaccgcccagacccccggcatc

SEQ ID NO: 42662 - RNA, 27 nt, synthetic construct
  misc_feature 1..27: note = CLOCK-interacting pacemaker (249-257)
  source 1..27: mol_type = other RNA
agccacgtggccaaggccccctccctg

SEQ ID NO: 42663 - RNA, 27 nt, synthetic construct
  misc_feature 1..27: note = Pre-mRNA-processing-splicing factor 8 (2254-2262)
  source 1..27: mol_type = other RNA
agccactacgagcgcgtgcagatgctg

SEQ ID NO: 42664 - RNA, 27 nt, synthetic construct
  misc_feature 1..27: note = DNA-binding protein RFX7 (154-162)
  source 1..27: mol_type = other RNA
agccactacatcggcaccaagtccatg

SEQ ID NO: 42665 - RNA, 27 nt, synthetic construct
  misc_feature 1..27: note = Dual specificity protein kinase CLK1 (54-62)
  source 1..27: mol_type = other RNA
agccactacctggagtcccgcagcatc

SEQ ID NO: 42666 - RNA, 27 nt, synthetic construct
  misc_feature 1..27: note = Protein EVI2B (202-210)
  source 1..27: mol_type = other RNA
agcatcgccgccatcctgatcggcgtg

SEQ ID NO: 42667 - RNA, 27 nt, synthetic construct
  misc_feature 1..27: note = DNA-directed RNA polymerase II subunit RPB2 (468-476)
  source 1..27: mol_type = other RNA
agcatcgccccccgcatgatgtccgtg

SEQ ID NO: 42668 - RNA, 27 nt, synthetic construct
  misc_feature 1..27: note = E3 ubiquitin-protein ligase RNF19A (93-101)
  source 1..27: mol_type = other RNA
agcatcgagtccatccacagcgagatg

SEQ ID NO: 42669 - RNA, 27 nt, synthetic construct
  misc_feature 1..27: note = Translocon-associated protein subunit delta (126-134)
  source 1..27: mol_type = other RNA
agcatcatccccccgctgttcaccgtg

SEQ ID NO: 42670 - RNA, 36 nt, synthetic construct
  misc_feature 1..36: note = Alpha-enolase (2-13)
  source 1..36: mol_type = other RNA
agcatcctgaagatccacgcccgcgagatcttcgac

SEQ ID NO: 42671 - RNA, 27 nt, synthetic construct
  misc_feature 1..27: note = Copper-transporting ATPase 2 (876-884)
  source 1..27: mol_type = other RNA
agcatcaacgcccacggctccgtgctg

SEQ ID NO: 42672 - RNA, 27 nt, synthetic construct
  misc_feature 1..27: note = Protein Smaug homolog 2 (352-360)
  source 1..27: mol_type = other RNA
agcatccagaagctgcgcgagcggcag

SEQ ID NO: 42673 - RNA, 27 nt, synthetic construct
  misc_feature 1..27: note = CCR4-NOT transcription complex subunit 1 (312-320)
  source 1..27: mol_type = other RNA
agcatctccgcccccggcagcgggatc

SEQ ID NO: 42674 - RNA, 27 nt, synthetic construct
  misc_feature 1..27: note = AP-5 complex subunit mu-1 (477-485)
  source 1..27: mol_type = other RNA
agcaaggcccccgccccggtgacctac

SEQ ID NO: 42675 - RNA, 27 nt, synthetic construct
  misc_feature 1..27: note = Ubiquitin carboxyl-terminal hydrolase 19 (576-584)
  source 1..27: mol_type = other RNA
agcaaggcctcccagttcaccggctac

SEQ ID NO: 42676 - RNA, 27 nt, synthetic construct
  misc_feature 1..27: note = Putative tRNA (cytidine(32)/guanosine(34)-2'-O)-methyltransferase (5-13)
  source 1..27: mol_type = other RNA
agcaaggacaagcgcgacgtgtactac

SEQ ID NO: 42677 - RNA, 27 nt, synthetic construct
  misc_feature 1..27: note = 40S ribosomal protein S6 (148-156)
  source 1..27: mol_type = other RNA
agcaaggaggacgacgtgcgccagtac

SEQ ID NO: 42678 - RNA, 27 nt, synthetic construct
  misc_feature 1..27: note = 60S ribosomal protein L11 (158-166)
  source 1..27: mol_type = other RNA
agcaaggaggaggccatgcgctggttc

SEQ ID NO: 42679 - RNA, 27 nt, synthetic construct
  misc_feature 1..27: note = Gamma-glutamyltranspeptidase 1 (30-38)
  source 1..27: mol_type = other RNA
agcaaggagcccgacaaccacgtgtac

SEQ ID NO: 42680 - RNA, 27 nt, synthetic construct
  misc_feature 1..27: note = NADH dehydrogenase (ubiquinone) 1 beta subcomplex subunit 8, mitochondrial (175-183)
  source 1..27: mol_type = other RNA
agcaaggagcccgagcgcgtggtccac

SEQ ID NO: 42681 - RNA, 27 nt, synthetic construct
  misc_feature 1..27: note = Neuroblast differentiation-associated protein AHNAK (5611-5619)
  source 1..27: mol_type = other RNA
agcaagttcgccggcgggctgcacttc

SEQ ID NO: 42682 - RNA, 27 nt, synthetic construct
  misc_feature 1..27: note = Core-binding factor subunit beta (10-18)
  source 1..27: mol_type = other RNA
agcaagttcgagaacgaggagttcttc

SEQ ID NO: 42683 - RNA, 30 nt, synthetic construct
  misc_feature 1..30: note = Proteasomal ATPase-associated factor 1 (78-87)
  source 1..30: mol_type = other RNA
agcaagttcctggccccctacaccaccttc

SEQ ID NO: 42684 - RNA, 33 nt, synthetic construct
  misc_feature 1..33: note = CWF19-like protein 2 (623-633)
  source 1..33: mol_type = other RNA
agcaagttcatgggcaagaccgacggggactac

SEQ ID NO: 42685 - RNA, 27 nt, synthetic construct
  misc_feature 1..27: note = Transcription intermediary factor 1-alpha (457-465)
  source 1..27: mol_type = other RNA
agcaagttccccacccagatctccctg

SEQ ID NO: 42686 - RNA, 27 nt, synthetic construct
  misc_feature 1..27: note = 40S ribosomal protein S25 (101-109)
  source 1..27: mol_type = other RNA
agcaagcaccgcgcccaggtgatctac

SEQ ID NO: 42687 - RNA, 33 nt, synthetic construct
  misc_feature 1..33: note = Proteasome subunit beta type-7 (75-85)
  source 1..33: mol_type = other RNA
agcaagatccacttcatctcccccaacatctac

SEQ ID NO: 42688 - RNA, 27 nt, synthetic construct
  misc_feature 1..27: note = 60S ribosomal protein L18a (148-156)
  source 1..27: mol_type = other RNA
agcaagatcaagttccccctgccgcac

SEQ ID NO: 42689 - RNA, 27 nt, synthetic construct
  misc_feature 1..27: note = Serine/threonine-protein phosphatase 4 regulatory subunit 3B (54-62)
  source 1..27: mol_type = other RNA
agcaagatcaaccccaacaccgcctac

SEQ ID NO: 42690 - RNA, 27 nt, synthetic construct
  misc_feature 1..27: note = Signal recognition particle receptor subunit alpha (128-136)
  source 1..27: mol_type = other RNA
agcaagatccgcgcccccaccaccatg

SEQ ID NO: 42691 - RNA, 27 nt, synthetic construct
  misc_feature 1..27: note = NUAK family SNF1-like kinase 2 (123-131)
  source 1..27: mol_type = other RNA
agcaagatcgtgatcgtcatggagtac

SEQ ID NO: 42692 - RNA, 30 nt, synthetic construct
  misc_feature 1..30: note = E3 ubiquitin-protein ligase RING1 (108-117)
  source 1..30: mol_type = other RNA
agcaagatctacccctcccgcgaggagtac

SEQ ID NO: 42693 - RNA, 27 nt, synthetic construct
  misc_feature 1..27: note = 60S ribosomal protein L19 (112-120)
  source 1..27: mol_type = other RNA
agcaagaagatcgaccgccacatgtac

SEQ ID NO: 42694 - RNA, 27 nt, synthetic construct
  misc_feature 1..27: note = HAUS augmin-like complex subunit 8 (124-132)
  source 1..27: mol_type = other RNA
agcaagaagcccgagtccaccagcttc

SEQ ID NO: 42695 - RNA, 27 nt, synthetic construct
  misc_feature 1..27: note = 60S ribosomal protein L10 (168-176)
  source 1..27: mol_type = other RNA
agcaagaagtggggcttcaccaagttc

SEQ ID NO: 42696 - RNA, 30 nt, synthetic construct
  misc_feature 1..30: note = Golgi-associated PDZ and coiled-coil motif-containing protein (448-457)
  source 1..30: mol_type = other RNA
agcaagctggacgacctccacaccctgtac

SEQ ID NO: 42697 - RNA, 27 nt, synthetic construct
  misc_feature 1..27: note = Protein yippee-like 5 (78-86)
  source 1..27: mol_type = other RNA
agcaagctgggctggatctacgagttc

SEQ ID NO: 42698 - RNA, 33 nt, synthetic construct
  misc_feature 1..33: note = Eukaryotic translation initiation factor 2A (459-469)
  source 1..33: mol_type = other RNA
agcaagctgcacgaggaggagcccccgcagaac

SEQ ID NO: 42699 - RNA, 36 nt, synthetic construct
  misc_feature 1..36: note = T-complex protein 1 subunit eta (291-302)
  source 1..36: mol_type = other RNA
agcaagctgcccatcggcgacgtggccacccagtac

SEQ ID NO: 42700 - RNA, 27 nt, synthetic construct
  misc_feature 1..27: note = Ubiquitin-protein ligase E3C (217-225)
  source 1..27: mol_type = other RNA
agcaagctgccctccagcatcgagtac

SEQ ID NO: 42701 - RNA, 27 nt, synthetic construct
  misc_feature 1..27: note = Laminin subunit alpha-5 (3479-3487)
  source 1..27: mol_type = other RNA
agcaagctgcccgtgaccgtcggcttc

SEQ ID NO: 42702 - RNA, 27 nt, synthetic construct
  misc_feature 1..27: note = Anaphase-promoting complex subunit 5 (144-152)
  source 1..27: mol_type = other RNA
agcaagctgtccttcagccaggtgttc

SEQ ID NO: 42703 - RNA, 27 nt, synthetic construct
  misc_feature 1..27: note = Protein Red (280-288)
  source 1..27: mol_type = other RNA
agcaagctgacccagatcctctcctac

SEQ ID NO: 42704 - RNA, 27 nt, synthetic construct
  misc_feature 1..27: note = GPN-loop GTPase 2 (178-186)
  source 1..27: mol_type = other RNA
agcaagatggacctgatcgagcactac

SEQ ID NO: 42705 - RNA, 30 nt, synthetic construct
  misc_feature 1..30: note = Hsp90 co-chaperone Cdc37 (322-331)
  source 1..30: mol_type = other RNA
agcaagatggaccccaccgacgccaagtac

SEQ ID NO: 42706 - RNA, 27 nt, synthetic construct
  misc_feature 1..27: note = Ubiquitin-conjugating enzyme E2 A (74-82)
  source 1..27: mol_type = other RNA
agcaagatgttccaccccaacgtgtac

SEQ ID NO: 42707 - RNA, 27 nt, synthetic construct
  misc_feature 1..27: note = Deoxyribonuclease-2-alpha (168-176)
  source 1..27: mol_type = other RNA
agcaagatgggcaagcagctgacctac

SEQ ID NO: 42708 - RNA, 27 nt, synthetic construct
  misc_feature 1..27: note = Small nuclear ribonucleoprotein-associated protein N (7-15)
  source 1..27: mol_type = other RNA
agcaagatgctgcagcacatcgactac

SEQ ID NO: 42709 - RNA, 27 nt, synthetic construct
  misc_feature 1..27: note = A-kinase anchor protein 9 (893-901)
  source 1..27: mol_type = other RNA
agcaagaacaagcaggagctggagtac

SEQ ID NO: 42710 - RNA, 27 nt, synthetic construct
  misc_feature 1..27: note = Intraflagellar transport protein 80 homolog (558-566)
  source 1..27: mol_type = other RNA
agcaagaacccccacatcgtgtccttc

SEQ ID NO: 42711 - RNA, 27 nt, synthetic construct
  misc_feature 1..27: note = E3 SUMO-protein ligase RanBP2 (1103-1111)
  source 1..27: mol_type = other RNA
agcaagaacgtgtccggcatcagcttc

SEQ ID NO: 42712 - RNA, 27 nt, synthetic construct
  misc_feature 1..27: note = Protein yippee-like 3 (5-13)
  source 1..27: mol_type = other RNA
agcaagcccaagaccttccaggcctac

SEQ ID NO: 42713 - RNA, 27 nt, synthetic construct
  misc_feature 1..27: note = Coatomer subunit alpha (279-287)
  source 1..27: mol_type = other RNA
agcaagcgcaccggcgtgcagaccttc

SEQ ID NO: 42714 - RNA, 27 nt, synthetic construct
  misc_feature 1..27: note = Calcium-dependent secretion activator 1 (390-398)
  source 1..27: mol_type = other RNA
agcaagtccgacgtggtcctgagcttc

SEQ ID NO: 42715 - RNA, 27 nt, synthetic construct
  misc_feature 1..27: note = S-adenosylmethionine synthase isoform type-2 (180-188)
  source 1..27: mol_type = other RNA
agcaagacccaggtgaccgtccagtac

SEQ ID NO: 42716 - RNA, 27 nt, synthetic construct
  misc_feature 1..27: note = Protein YIPF1 (188-196)
  source 1..27: mol_type = other RNA
agcaaggtgatgaacatcgtctcctac

SEQ ID NO: 42717 - RNA, 27 nt, synthetic construct
  misc_feature 1..27: note = Nucleolar complex protein 4 homolog (137-145)
  source 1..27: mol_type = other RNA
agcaagtgggagggcaactacctgttc

SEQ ID NO: 42718 - RNA, 27 nt, synthetic construct
  misc_feature 1..27: note = EBNA1-binding protein 2 (257-265)
  source 1..27: mol_type = other RNA
agcaagtggaacacccgcgagtcctac

SEQ ID NO: 42719 - RNA, 30 nt, synthetic construct
  misc_feature 1..30: note = Nuclease-sensitive element-binding protein 1 (136-145)
  source 1..30: mol_type = other RNA
agcaagtacgccgccgaccgcaaccactac

SEQ ID NO: 42720 - RNA, 27 nt, synthetic construct
  misc_feature 1..27: note = Transcription factor MafG (109-117)
  source 1..27: mol_type = other RNA
agcaagtacgaggccctgcagaccttc

SEQ ID NO: 42721 - RNA, 30 nt, synthetic construct
  misc_feature 1..30: note = 7-dehydrocholesterol reductase (453-462)
  source 1..30: mol_type = other RNA
agcaagtacggccgcgactgggagcggtac

SEQ ID NO: 42722 - RNA, 27 nt, synthetic construct
  misc_feature 1..27: note = Gamma-tubulin complex component 6 (1622-1630)
  source 1..27: mol_type = other RNA
agcaagtactccggcgtgttcagcttc

SEQ ID NO: 42723 - RNA, 33 nt, synthetic construct
  misc_feature 1..33: note = V-type proton ATPase catalytic subunit A (264-274)
  source 1..33: mol_type = other RNA
agcaagtactccaacagcgacgtgatcatctac

SEQ ID NO: 42724 - RNA, 27 nt, synthetic construct
  misc_feature 1..27: note = DNA polymerase delta catalytic subunit (737-745)
  source 1..27: mol_type = other RNA
agcaagtacaccgtggagaacggctac

SEQ ID NO: 42725 - RNA, 33 nt, synthetic construct
  misc_feature 1..33: note = Fatty acid synthase (1747-1757)
  source 1..33: mol_type = other RNA
agcctggccgaggagaagctccaggcctccgtg

SEQ ID NO: 42726 - RNA, 36 nt, synthetic construct
  misc_feature 1..36: note = Intraflagellar transport protein 140 homolog (561-572)
  source 1..36: mol_type = other RNA
agcctggccgagctcgtgcccggcgtcgggggcatc

SEQ ID NO: 42727 - RNA, 27 nt, synthetic construct
  misc_feature 1..27: note = DNA topoisomerase 3-beta-1 (12-20)
  source 1..27: mol_type = other RNA
agcctggcccagtccatcgccaagatc

SEQ ID NO: 42728 - RNA, 27 nt, synthetic construct
  misc_feature 1..27: note = PMS1 protein homolog 1 (605-613)
  source 1..27: mol_type = other RNA
agcctgttcaacggctcccactacctc

SEQ ID NO: 42729 - RNA, 27 nt, synthetic construct
  misc_feature 1..27: note = Nuclear pore membraneoprotein 210-like (625-633)
  source 1..27: mol_type = other RNA
agcctgggccacaccctcgtgaccgtc

SEQ ID NO: 42730 - RNA, 27 nt, synthetic construct
  misc_feature 1..27: note = Bifunctional glutamate/proline-tRNA ligase (786-794)
  source 1..27: mol_type = other RNA
agcctgaaggccgagtacaaggagaag

SEQ ID NO: 42731 - RNA, 27 nt, synthetic construct
  misc_feature 1..27: note = Bifunctional glutamate/proline-tRNA ligase (859-867)
  source 1..27: mol_type = other RNA
agcctgaaggcccagtacaaggagaag

SEQ ID NO: 42732 - RNA, 27 nt, synthetic construct
  misc_feature 1..27: note = Heterogeneous nuclear ribonucleoprotein M (86-94)
  source 1..27: mol_type = other RNA
agcctgaaggacctcgtgaaggagaag

SEQ ID NO: 42733 - RNA, 24 nt, synthetic construct
  misc_feature 1..24: note = Serine/threonine-protein phosphatase 2A 65 kDa regulatory subunit A alpha isoform (403-410)
  source 1..24: mol_type = other RNA
agcctgctccccgccatcgtggag

SEQ ID NO: 42734 - RNA, 30 nt, synthetic construct
  misc_feature 1..30: note = Protein transport protein Sec23B (156-165)
  source 1..30: mol_type = other RNA
agcctgctccccccggacgccctggtgggc

SEQ ID NO: 42735 - RNA, 27 nt, synthetic construct
  misc_feature 1..27: note = Nesprin-1 (5397-5405)
  source 1..27: mol_type = other RNA
agcctgcagctcgccgaggtggccctg

SEQ ID NO: 42736 - RNA, 27 nt, synthetic construct
  misc_feature 1..27: note = Tetratricopeptide repeat protein 28 (1301-1309)
  source 1..27: mol_type = other RNA
agcctgtggcccgtgccggtcgccgcc

SEQ ID NO: 42737 - RNA, 27 nt, synthetic construct
  misc_feature 1..27: note = Probable E3 ubiquitin-protein ligase HECTD4 (1660-1668)
  source 1..27: mol_type = other RNA
agcatggccgccgaggtgatcgcgctg

SEQ ID NO: 42738 - RNA, 27 nt, synthetic construct
  misc_feature 1..27: note = Ribonuclease 3 (661-669)
  source 1..27: mol_type = other RNA
agcatgcaccagatcctgctctacctg

SEQ ID NO: 42739 - RNA, 36 nt, synthetic construct
  misc_feature 1..36: note = B-cell CLL/lymphoma 9-like protein (1201-1212)
  source 1..36: mol_type = other RNA
agcatgatgatggcccccggcgggccggactccctg

SEQ ID NO: 42740 - RNA, 30 nt, synthetic construct
  misc_feature 1..30: note = Titin (34201-34210)
  source 1..30: mol_type = other RNA
agcatgaccgagatgaagttcgcctccatg

SEQ ID NO: 42741 - RNA, 36 nt, synthetic construct
  misc_feature 1..36: note = Protein S100-A7 (2-13)
  source 1..36: mol_type = other RNA
agcaacacccaggccgagcgctccatcatcggcatg

SEQ ID NO: 42742 - RNA, 36 nt, synthetic construct
  misc_feature 1..36: note = Basic salivary proline-rich protein 4 (241-252)
  source 1..36: mol_type = other RNA
agccccccgggcaagccccaggggcccccccagcag

SEQ ID NO: 42743 - RNA, 24 nt, synthetic construct
  misc_feature 1..24: note = Protein kinase C-binding protein 1 (698-705)
  source 1..24: mol_type = other RNA
agccccaccgtgcacctgggcctc

SEQ ID NO: 42744 - RNA, 27 nt, synthetic construct
  misc_feature 1..27: note = Protein AF-17 (915-923)
  source 1..27: mol_type = other RNA
agccaggccggcggggcccccaccctg

SEQ ID NO: 42745 - RNA, 27 nt, synthetic construct
  misc_feature 1..27: note = 4F2 cell-surface antigen heavy chain (436-444)
  source 1..27: mol_type = other RNA
agccaggcccgcctgctcacctccttc

SEQ ID NO: 42746 - RNA, 27 nt, synthetic construct
  misc_feature 1..27: note Dolichyl-diphosphooligosaccharide-proteinosyltransferase subunit 1 (210-218)
  source 1..27: mol_type = other RNA
agccaggacaccttcaaggtgcactac

SEQ ID NO: 42747 - RNA, 27 nt, synthetic construct
  misc_feature 1..27: note = Arf-GAP with SH3 domain, ANK repeat and PH domain-containing protein 2 (285-293)
  source 1..27: mol_type = other RNA
agccagatccgccagtccaccgcctac

SEQ ID NO: 42748 - RNA, 27 nt, synthetic construct
  misc_feature 1..27: note = DNA mismatch repair protein Msh2 (717-725)
  source 1..27: mol_type = other RNA
agccagctgaagggcgtgtccaccttc

SEQ ID NO: 42749 - RNA, 30 nt, synthetic construct
  misc_feature 1..30: note = Fanconi anemia group E protein (322-331)
  source 1..30: mol_type = other RNA
agccagatggacctgctctgcgcccagctg

SEQ ID NO: 42750 - RNA, 27 nt, synthetic construct
  misc_feature 1..27: note = Multidrug resistance-associated protein 4 (661-669)
  source 1..27: mol_type = other RNA
agccagcagtccagccgcccctccctg

SEQ ID NO: 42751 - RNA, 27 nt, synthetic construct
  misc_feature 1..27: note = Heat shock protein 105 kDa (552-560)
  source 1..27: mol_type = other RNA
agccagtcccccccgagccccgagctg

SEQ ID NO: 42752 - RNA, 27 nt, synthetic construct
  misc_feature 1..27: note = Cystatin-B (45-53)
  source 1..27: mol_type = other RNA
agccaggtggtcgccggcaccaactac

SEQ ID NO: 42753 - RNA, 30 nt, synthetic construct
  misc_feature 1..30: note = NEDD8-activating enzyme E1 catalytic subunit (290-299)
  source 1..30: mol_type = other RNA
agccagtacaacatccgcggcgtgacctac

SEQ ID NO: 42754 - RNA, 27 nt, synthetic construct
  misc_feature 1..27: note = WD repeat-containing protein 97 (311-319)
  source 1..27: mol_type = other RNA
agccgcgactccaccgtgaaggtctgg

SEQ ID NO: 42755 - RNA, 36 nt, synthetic construct
  misc_feature 1..36: note = Nuclease-sensitive element-binding protein 1 (309-320)
  source 1..36: mol_type = other RNA
agctccgcccccgaggccgagcagggcggggcggag

SEQ ID NO: 42756 - RNA, 30 nt, synthetic construct
  misc_feature 1..30: note = Hematological and neurological expressed 1 protein (91-100)
  source 1..30: mol_type = other RNA
agctccggcgacttcctggacctcaagggg

SEQ ID NO: 42757 - RNA, 30 nt, synthetic construct
  misc_feature 1..30: note = Synaptotagmin-like protein 2 (602-611)
  source 1..30: mol_type = other RNA
agctccggcatgaccagcctgtccagcgtg

SEQ ID NO: 42758 - RNA, 27 nt, synthetic construct
  misc_feature 1..27: note = HLA class I histocompatibility antigen, alpha chain G (301-309)
  source 1..27: mol_type = other RNA
agctccctgcccaccatcccgatcatg

SEQ ID NO: 42759 - RNA, 27 nt, synthetic construct
  misc_feature 1..27: note = Mucin-1 (130-138)
  source 1..27: mol_type = other RNA
agcaccgcccccccggcccacggcgtg

SEQ ID NO: 42760 - RNA, 27 nt, synthetic construct
  misc_feature 1..27: note = Sperm-associated antigen 5 (305-313)
  source 1..27: mol_type = other RNA
agcacctgcctgacccccaacctcgtg

SEQ ID NO: 42761 - RNA, 27 nt, synthetic construct
  misc_feature 1..27: note = V-type proton ATPase catalytic subunit A (16-24)
  source 1..27: mol_type = other RNA
agcaccttcggctacgtgcacggggtc

SEQ ID NO: 42762 - RNA, 27 nt, synthetic construct
  misc_feature 1..27: note = Uncharacterized protein C20orf195 (2-10)
  source 1..27: mol_type = other RNA
agcacccacgtggccggcctggggctc

SEQ ID NO: 42763 - RNA, 30 nt, synthetic construct
  misc_feature 1..30: note = Ubiquitin carboxyl-terminal hydrolase 3 (394-403)
  source 1..30: mol_type = other RNA
agcaccaagaagttctggatccagaagctg

SEQ ID NO: 42764 - RNA, 27 nt, synthetic construct
  misc_feature 1..27: note = Heat shock cognate 71 kDa protein (340-348)
  source 1..27: mol_type = other RNA
agcacccgcatccccaagatccagaag

SEQ ID NO: 42765 - RNA, 27 nt, synthetic construct
  misc_feature 1..27: note = Putativeosylation-dependent cell adhesion molecule 1 (14-22)
  source 1..27: mol_type = other RNA
agcacctccctggccatcctcgacgtg

SEQ ID NO: 42766 - RNA, 30 nt, synthetic construct
  misc_feature 1..30: note = Microtubule-actin cross-linking factor 1, isoforms 1/2/3/5 (844-853)
  source 1..30: mol_type = other RNA
agcgtggcctccctggtcggccgcagcaag

SEQ ID NO: 42767 - RNA, 30 nt, synthetic construct
  misc_feature 1..30: note = Zinc finger protein 638 (1228-1237)
  source 1..30: mol_type = other RNA
agcgtgttcgccgaggagcgcaacctgaag

SEQ ID NO: 42768 - RNA, 27 nt, synthetic construct
  misc_feature 1..27: note = Heat shock protein HSP 90-alpha (658-666)
  source 1..27: mol_type = other RNA
agcgtgaaggacctggtcatcctcctg

SEQ ID NO: 42769 - RNA, 27 nt, synthetic construct
  misc_feature 1..27: note = Eukaryotic translation initiation factor 3 subunit E (27-35)
  source 1..27: mol_type = other RNA
agcgtgaaggagatctacaacgagaag

SEQ ID NO: 42770 - RNA, 36 nt, synthetic construct
  misc_feature 1..36: note = Cytoskeleton-associated protein 2 (388-399)
  source 1..36: mol_type = other RNA
agcgtggtcacccagcacgagcccgccggccagaac

SEQ ID NO: 42771 - RNA, 30 nt, synthetic construct
  misc_feature 1..30: note = Echinoderm microtubule-associated protein-like 4 (184-193)
  source 1..30: mol_type = other RNA
agctgggagaactccgacgacagccgcaac

SEQ ID NO: 42772 - RNA, 30 nt, synthetic construct
  misc_feature 1..30: note = Cold-inducible RNA-binding protein (163-172)
  source 1..30: mol_type = other RNA
agctacgactcctacgccacccacaacgag

SEQ ID NO: 42773 - RNA, 33 nt, synthetic construct
  misc_feature 1..33: note = 14-3-3 protein theta (210-220)
  source 1..33: mol_type = other RNA
agctacaaggactccaccctgatcatgcagctc

SEQ ID NO: 42774 - RNA, 27 nt, synthetic construct
  misc_feature 1..27: note = Nucleolar and coiled-body phosphoprotein 1 (681-689)
  source 1..27: mol_type = other RNA
agctaccgcggcgggtccatcagcgtg

SEQ ID NO: 42775 - RNA, 24 nt, synthetic construct
  misc_feature 1..24: note = Asparagine synthetase (glutamine-hydrolyzing) (409-416)
  source 1..24: mol_type = other RNA
accgccgcccacggcctggagctc

SEQ ID NO: 42776 - RNA, 30 nt, synthetic construct
  misc_feature 1..30: note = Ribosome biogenesis protein BOP1 (10-19)
  source 1..30: mol_type = other RNA
accgccgcccccagcgtgcgcccggagaag

SEQ ID NO: 42777 - RNA, 30 nt, synthetic construct
  misc_feature 1..30: note = Poly(rC)-binding protein 2 (91-100)
  source 1..30: mol_type = other RNA
accgccgccagccgccccccggtgaccctg

SEQ ID NO: 42778 - RNA, 27 nt, synthetic construct
  misc_feature 1..27: note = Elongation factor 2 (73-81)
  source 1..27: mol_type = other RNA
accgccatcagcctgttctacgagctc

SEQ ID NO: 42779 - RNA, 30 nt, synthetic construct
  misc_feature 1..30: note = Ubiquitin-associated protein 2-like (322-331)
  source 1..30: mol_type = other RNA
accgccatcagccagcccgcctccggcaac

SEQ ID NO: 42780 - RNA, 36 nt, synthetic construct
  misc_feature 1..36: note = Intraflagellar transport protein 88 homolog (62-73)
  source 1..36: mol_type = other RNA
accgccaagatcagctccaccgccgtgacgcgcccc

SEQ ID NO: 42781 - RNA, 24 nt, synthetic construct
  misc_feature 1..24: note = Max-like protein X (152-159)
  source 1..24: mol_type = other RNA
accgccctgaagatcatgaaggtg

SEQ ID NO: 42782 - RNA, 27 nt, synthetic construct
  misc_feature 1..27: note = Nuclear pore membraneoprotein 210 (1573-1581)
  source 1..27: mol_type = other RNA
accgccagcaaggtgatcgtcgccgtg

SEQ ID NO: 42783 - RNA, 36 nt, synthetic construct
  misc_feature 1..36: note = Syndecan-1 (220-231)
  source 1..36: mol_type = other RNA
accgccgtggtcgccgtggagcccgaccgccggaac

SEQ ID NO: 42784 - RNA, 27 nt, synthetic construct
  misc_feature 1..27: note = Probable C-mannosyltransferase DPY19L3 (463-471)
  source 1..27: mol_type = other RNA
accgcctacaacctgatccacaccatc

SEQ ID NO: 42785 - RNA, 27 nt, synthetic construct
  misc_feature 1..27: note = XK-related protein 9 (255-263)
  source 1..27: mol_type = other RNA
acctgcatcagcatggagttcctgtac

SEQ ID NO: 42786 - RNA, 33 nt, synthetic construct
  misc_feature 1..33: note = Uncharacterized protein C9orf78 (274-284)
  source 1..33: mol_type = other RNA
accgacgactaccactacgagaagttcaagaag

SEQ ID NO: 42787 - RNA, 24 nt, synthetic construct
  misc_feature 1..24: note = Bcl-2-associated transcription factor 1 (341-348)
  source 1..24: mol_type = other RNA
accgacgaggagagccgcgtgttc

SEQ ID NO: 42788 - RNA, 30 nt, synthetic construct
  misc_feature 1..30: note = Bcl-2-associated transcription factor 1 (341-350)
  source 1..30: mol_type = other RNA
accgacgaggagagccgcgtgttcctgctc

SEQ ID NO: 42789 - RNA, 36 nt, synthetic construct
  misc_feature 1..36: note = Pleiotropic regulator 1 (74-85)
  source 1..36: mol_type = other RNA
accgacagctacgtgcacaagcagtaccccgccaac

SEQ ID NO: 42790 - RNA, 27 nt, synthetic construct
  misc_feature 1..27: note = PRA1 family protein 3 (180-188)
  source 1..27: mol_type = other RNA
accgactacatcagcaaggtgaaggag

SEQ ID NO: 42791 - RNA, 27 nt, synthetic construct
  misc_feature 1..27: note = Testis-expressed sequence 10 protein (733-741)
  source 1..27: mol_type = other RNA
accgaggccgtgttccacagcctgctc

SEQ ID NO: 42792 - RNA, 33 nt, synthetic construct
  misc_feature 1..33: note = Pre-mRNA cleavage complex 2 protein Pcf11 (561-571)
  source 1..33: mol_type = other RNA
accgaggaggagcgcccccaggagaccacgaac

SEQ ID NO: 42793 - RNA, 30 nt, synthetic construct
  misc_feature 1..30: note = cTAGE family member 5 (795-804)
  source 1..30: mol_type = other RNA
accgagcaccccgagccgcagcaggagacc

SEQ ID NO: 42794 - RNA, 36 nt, synthetic construct
  misc_feature 1..36: note = Tumor protein D52 (213-224)
  source 1..36: mol_type = other RNA
accgagcccctgccggagaagacccaggagagcctc

SEQ ID NO: 42795 - RNA, 36 nt, synthetic construct
  misc_feature 1..36: note = BAG family molecular chaperone regulator 4 (167-178)
  source 1..36: mol_type = other RNA
accgaggtgcccagcacctaccgctccagcggcaac

SEQ ID NO: 42796 - RNA, 33 nt, synthetic construct
  misc_feature 1..33: note = Non-POU domain-containing octamer-binding protein (6-16)
  source 1..33: mol_type = other RNA
accttcaacctggagaagcagaaccacaccccc

SEQ ID NO: 42797 - RNA, 36 nt, synthetic construct
  misc_feature 1..36: note = Non-POU domain-containing octamer-binding protein (6-17)
  source 1..36: mol_type = other RNA
accttcaacctggagaagcagaaccacaccccccgc

SEQ ID NO: 42798 - RNA, 30 nt, synthetic construct
  misc_feature 1..30: note = U2 snRNP-associated SURP motif-containing protein (134-143)
  source 1..30: mol_type = other RNA
accttcgtgcgcggcggggtcgtgaacgcc

SEQ ID NO: 42799 - RNA, 36 nt, synthetic construct
  misc_feature 1..36: note = Ubiquitin-associated protein 2-like (225-236)
  source 1..36: mol_type = other RNA
accggccacttcgagcccgacgacgggaccagcgcc

SEQ ID NO: 42800 - RNA, 36 nt, synthetic construct
  misc_feature 1..36: note = E3 ubiquitin-protein ligase HUWE1 (2557-2568)
  source 1..36: mol_type = other RNA
accggccacaccatccacgtgcactaccccgggaac

SEQ ID NO: 42801 - RNA, 30 nt, synthetic construct
  misc_feature 1..30: note = Transcriptional repressor p66-beta (558-567)
  source 1..30: mol_type = other RNA
accggcatcgggggccacaaggggcccagc

SEQ ID NO: 42802 - RNA, 36 nt, synthetic construct
  misc_feature 1..36: note = Peptidyl-prolyl cis-trans isomerase FKBP1A (28-39)
  source 1..36: mol_type = other RNA
accggcatgctggaggacgggaagaagttcgacagc

SEQ ID NO: 42803 - RNA, 33 nt, synthetic construct
  misc_feature 1..33: note = Probable ATP-dependent RNA helicase DDX5 (560-570)
  source 1..33: mol_type = other RNA
accggcaaccccaccgggacgtaccagaacggc

SEQ ID NO: 42804 - RNA, 24 nt, synthetic construct
  misc_feature 1..24: note = 60S ribosomal protein L13 (151-158)
  source 1..24: mol_type = other RNA
accggccccgtgatgccggtccgc

SEQ ID NO: 42805 - RNA, 36 nt, synthetic construct
  misc_feature 1..36: note = AT-rich interactive domain-containing protein 1A (1514-1525)
  source 1..36: mol_type = other RNA
accggcagcgccccccaggggccggcctaccacggc

SEQ ID NO: 42806 - RNA, 36 nt, synthetic construct
  misc_feature 1..36: note = Nuclear pore complex protein Nup153 (406-417)
  source 1..36: mol_type = other RNA
accggctacgagaagaacatgacccccgggcagaac

SEQ ID NO: 42807 - RNA, 27 nt, synthetic construct
  misc_feature 1..27: note = Pumilio homolog 3 (361-369)
  source 1..27: mol_type = other RNA
acccacgacggcgcccgcgtggccatg

SEQ ID NO: 42808 - RNA, 27 nt, synthetic construct
  misc_feature 1..27: note = Glutaryl-CoA dehydrogenase, mitochondrial (416-424)
  source 1..27: mol_type = other RNA
acccacgacatccacgccctgatcctc

SEQ ID NO: 42809 - RNA, 27 nt, synthetic construct
  misc_feature 1..27: note = Nuclear pore complex protein Nup88 (408-416)
  source 1..27: mol_type = other RNA
acccacgaggccggcgtgcacagcgtc

SEQ ID NO: 42810 - RNA, 27 nt, synthetic construct
  misc_feature 1..27: note = Endonuclease G, mitochondrial (227-235)
  source 1..27: mol_type = other RNA
acccacttcttcaaggtgctgatcctc

SEQ ID NO: 42811 - RNA, 27 nt, synthetic construct
  misc_feature 1..27: note = Bax inhibitor 1 (51-59)
  source 1..27: mol_type = other RNA
acccacttcatccaggccggcctgctc

SEQ ID NO: 42812 - RNA, 27 nt, synthetic construct
  misc_feature 1..27: note = BMP/retinoic acid-inducible neural-specific protein 2 (144-152)
  source 1..27: mol_type = other RNA
acccacttcctgctcagcgccaccctg

SEQ ID NO: 42813 - RNA, 27 nt, synthetic construct
  misc_feature 1..27: note = HEAT repeat-containing protein 1 (721-729)
  source 1..27: mol_type = other RNA
acccacttccccttcgccatccgcgtg

SEQ ID NO: 42814 - RNA, 27 nt, synthetic construct
  misc_feature 1..27: note = Transitional endoplasmic reticulum ATPase (403-411)
  source 1..27: mol_type = other RNA
acccacggccacgtgggggccgacctg

SEQ ID NO: 42815 - RNA, 27 nt, synthetic construct
  misc_feature 1..27: note = Zinc finger protein 638 (449-457)
  source 1..27: mol_type = other RNA
acccacatcgagagctgccgccagctg

SEQ ID NO: 42816 - RNA, 24 nt, synthetic construct
  misc_feature 1..24: note = Leucine-rich PPR motif-containing protein, mitochondrial (1095-1102)
  source 1..24: mol_type = other RNA
acccacatcaagggcttcaccctg

SEQ ID NO: 42817 - RNA, 27 nt, synthetic construct
  misc_feature 1..27: note = Probable C-mannosyltransferase DPY19L1 (228-236)
  source 1..27: mol_type = other RNA
acccacatcctgcgcgccaccaagctc

SEQ ID NO: 42818 - RNA, 30 nt, synthetic construct
  misc_feature 1..30: note = Guanine nucleotide-binding protein-like 3-like protein (251-260)
  source 1..30: mol_type = other RNA
acccacatccgcgtgggcgtcgtggggctg

SEQ ID NO: 42819 - RNA, 36 nt, synthetic construct
  misc_feature 1..36: note = Neuroblast differentiation-associated protein AHNAK (1576-1587)
  source 1..36: mol_type = other RNA
acccacaagatcagcatgcccgacgtgggcctgaac

SEQ ID NO: 42820 - RNA, 27 nt, synthetic construct
  misc_feature 1..27: note = Homeodomain-interacting protein kinase 3 (1110-1118)
  source 1..27: mol_type = other RNA
acccacctgggcgggcagcccaccctc

SEQ ID NO: 42821 - RNA, 27 nt, synthetic construct
  misc_feature 1..27: note = Nck-associated protein 1-like (1054-1062)
  source 1..27: mol_type = other RNA
acccacctgaaggagttcctcgtggtc

SEQ ID NO: 42822 - RNA, 24 nt, synthetic construct
  misc_feature 1..24: note = Bone marrow stromal antigen 2 (67-74)
  source 1..24: mol_type = other RNA
acccacctgctccagcaggagctg

SEQ ID NO: 42823 - RNA, 27 nt, synthetic construct
  misc_feature 1..27: note = Dol-P-Man:Man(5)GlcNAc(2)-PP-Dol alpha-1,3-mannosyltransferase (381-389)
  source 1..27: mol_type = other RNA
acccacctgctccgcctgctggtgctc

SEQ ID NO: 42824 - RNA, 27 nt, synthetic construct
  misc_feature 1..27: note = Myocyte-specific enhancer factor 2C (372-380)
  source 1..27: mol_type = other RNA
acccacctgagccagtccagcaacctc

SEQ ID NO: 42825 - RNA, 27 nt, synthetic construct
  misc_feature 1..27: note Dolichyl-diphosphooligosaccharide-proteinosyltransferase 48 kDa subunit (400-408)
  source 1..27: mol_type = other RNA
acccacctgtacagctccacccaggtg

SEQ ID NO: 42826 - RNA, 27 nt, synthetic construct
  misc_feature 1..27: note = Bifunctional glutamate/proline-tRNA ligase (1422-1430)
  source 1..27: mol_type = other RNA
acccacatggtggtcgccaacaccatg

SEQ ID NO: 42827 - RNA, 27 nt, synthetic construct
  misc_feature 1..27: note = C-myc promoter-binding protein (1300-1308)
  source 1..27: mol_type = other RNA
acccacagctcccccagcttcaacctg

SEQ ID NO: 42828 - RNA, 27 nt, synthetic construct
  misc_feature 1..27: note = Heterogeneous nuclear ribonucleoprotein R (25-33)
  source 1..27: mol_type = other RNA
acccacaccgagcactacaagacgctg

SEQ ID NO: 42829 - RNA, 27 nt, synthetic construct
  misc_feature 1..27: note = Stromal cell-derived factor 2 (95-103)
  source 1..27: mol_type = other RNA
acccacgtgaacaccggccgcaacctg

SEQ ID NO: 42830 - RNA, 27 nt, synthetic construct
  misc_feature 1..27: note Dolichyl-diphosphooligosaccharide-proteinosyltransferase subunit 2 (26-34)
  source 1..27: mol_type = other RNA
acccactacctgaccaagcacgacgtg

SEQ ID NO: 42831 - RNA, 33 nt, synthetic construct
  misc_feature 1..33: note = Lymphoid-restricted membrane protein (375-385)
  source 1..33: mol_type = other RNA
accatcgccagcctgccccgcaacatcggcaac

SEQ ID NO: 42832 - RNA, 36 nt, synthetic construct
  misc_feature 1..36: note = Myosin-binding protein H-like (137-148)
  source 1..36: mol_type = other RNA
accatcgacatcctggtgatcgagcgccccggcccg

SEQ ID NO: 42833 - RNA, 27 nt, synthetic construct
  misc_feature 1..27: note = Glycerol-3-phosphate dehydrogenase 1-like protein (285-293)
  source 1..27: mol_type = other RNA
accatcgaggagctggagaaggagatg

SEQ ID NO: 42834 - RNA, 36 nt, synthetic construct
  misc_feature 1..36: note = BPI fold-containing family A member 2 (157-168)
  source 1..36: mol_type = other RNA
accatcgagaccgacccccagacgcaccagccggtg

SEQ ID NO: 42835 - RNA, 27 nt, synthetic construct
  misc_feature 1..27: note = MOB kinase activator 1A (192-200)
  source 1..27: mol_type = other RNA
accatcctgaagcgcctcttccgggtg

SEQ ID NO: 42836 - RNA, 27 nt, synthetic construct
  misc_feature 1..27: note = Protein sel-1 homolog 1 (219-227)
  source 1..27: mol_type = other RNA
accaaggccctggagcgcgtgagctac

SEQ ID NO: 42837 - RNA, 27 nt, synthetic construct
  misc_feature 1..27: note = WD repeat-containing protein 5 (45-53)
  source 1..27: mol_type = other RNA
accaaggccgtgagctccgtcaagttc

SEQ ID NO: 42838 - RNA, 27 nt, synthetic construct
  misc_feature 1..27: note = Transforming protein RhoA (163-171)
  source 1..27: mol_type = other RNA
accaaggacggcgtgcgcgaggtcttc

SEQ ID NO: 42839 - RNA, 27 nt, synthetic construct
  misc_feature 1..27: note = Disintegrin and metalloproteinase domain-containing protein 17 (159-167)
  source 1..27: mol_type = other RNA
accaaggacaagcgcatgctggtgtac

SEQ ID NO: 42840 - RNA, 27 nt, synthetic construct
  misc_feature 1..27: note = Ras GTPase-activating-like protein IQGAP2 (912-920)
  source 1..27: mol_type = other RNA
accaagttcatggacaccgtgatcttc

SEQ ID NO: 42841 - RNA, 27 nt, synthetic construct
  misc_feature 1..27: note = Vigilin (613-621)
  source 1..27: mol_type = other RNA
accaagatcgacctgcccgccgagaac

SEQ ID NO: 42842 - RNA, 33 nt, synthetic construct
  misc_feature 1..33: note = Vigilin (613-623)
  source 1..33: mol_type = other RNA
accaagatcgacctgcccgccgagaacagcaac

SEQ ID NO: 42843 - RNA, 27 nt, synthetic construct
  misc_feature 1..27: note = Vesicular integral-membrane protein VIP36 (290-298)
  source 1..27: mol_type = other RNA
accaagatcgagcccagcgtgaacttc

SEQ ID NO: 42844 - RNA, 27 nt, synthetic construct
  misc_feature 1..27: note = Ubiquitin carboxyl-terminal hydrolase 33 (627-635)
  source 1..27: mol_type = other RNA
accaagatcagcacccacgtgtccttc

SEQ ID NO: 42845 - RNA, 27 nt, synthetic construct
  misc_feature 1..27: note = Nucleoprotein TPR (712-720)
  source 1..27: mol_type = other RNA
accaagatcagcacccagctggacttc

SEQ ID NO: 42846 - RNA, 36 nt, synthetic construct
  misc_feature 1..36: note = Eukaryotic translation initiation factor 4 gamma 1 (1070-1081)
  source 1..36: mol_type = other RNA
accaagatcaccaagcccggcagcatcgactccaac

SEQ ID NO: 42847 - RNA, 27 nt, synthetic construct
  misc_feature 1..27: note = Pre-mRNA-processing factor 19 (264-272)
  source 1..27: mol_type = other RNA
accaagaaggtgaccagcgtcgtgttc

SEQ ID NO: 42848 - RNA, 27 nt, synthetic construct
  misc_feature 1..27: note = Serine/threonine-protein kinase 24 (105-113)
  source 1..27: mol_type = other RNA
accaagctgtggatcatcatggagtac

SEQ ID NO: 42849 - RNA, 27 nt, synthetic construct
  misc_feature 1..27: note = Parafibromin (282-290)
  source 1..27: mol_type = other RNA
accaagcagcccatcccggccgcctac

SEQ ID NO: 42850 - RNA, 27 nt, synthetic construct
  misc_feature 1..27: note = Cerebral cavernous malformations 2 protein (253-261)
  source 1..27: mol_type = other RNA
accaaggtggacatcaaggagacctac

SEQ ID NO: 42851 - RNA, 27 nt, synthetic construct
  misc_feature 1..27: note = S-adenosylmethionine synthase isoform type-2 (288-296)
  source 1..27: mol_type = other RNA
accaaggtggaccgcagcgccgcctac

SEQ ID NO: 42852 - RNA, 27 nt, synthetic construct
  misc_feature 1..27: note = ER membrane protein complex subunit 3 (138-146)
  source 1..27: mol_type = other RNA
accaaggtgcccttcccgctgaccctc

SEQ ID NO: 42853 - RNA, 30 nt, synthetic construct
  misc_feature 1..30: note = ATP-binding cassette sub-family F member 2 (592-601)
  source 1..30: mol_type = other RNA
accaagtggcccggcgacatcctggcctac

SEQ ID NO: 42854 - RNA, 27 nt, synthetic construct
  misc_feature 1..27: note = 60S ribosomal protein L17 (45-53)
  source 1..27: mol_type = other RNA
accaagtacctgaaggacgtgaccctc

SEQ ID NO: 42855 - RNA, 24 nt, synthetic construct
  misc_feature 1..24: note = DNA dC-dU-editing enzyme APOBEC-3C (84-91)
  source 1..24: mol_type = other RNA
accaagtaccaggtgacctggtac

SEQ ID NO: 42856 - RNA, 30 nt, synthetic construct
  misc_feature 1..30: note = Tetratricopeptide repeat protein 27 (205-214)
  source 1..30: mol_type = other RNA
accctggccgagaactgcatcgaccaggtg

SEQ ID NO: 42857 - RNA, 27 nt, synthetic construct
  misc_feature 1..27: note = Proliferation-associated protein 2G4 (386-394)
  source 1..27: mol_type = other RNA
accctggaggagaacgaggccggcgac

SEQ ID NO: 42858 - RNA, 27 nt, synthetic construct
  misc_feature 1..27: note = Protein FAM185A (259-267)
  source 1..27: mol_type = other RNA
accctgggcagcgtgcacgggaacatc

SEQ ID NO: 42859 - RNA, 36 nt, synthetic construct
  misc_feature 1..36: note = 60S ribosomal protein L23a (126-137)
  source 1..36: mol_type = other RNA
accctgatccgccccgacggcgagaagaaggcctac

SEQ ID NO: 42860 - RNA, 27 nt, synthetic construct
  misc_feature 1..27: note = Transcription elongation factor SPT6 (835-843)
  source 1..27: mol_type = other RNA
accctgaagaagttcctcctgaacaag

SEQ ID NO: 42861 - RNA, 27 nt, synthetic construct
  misc_feature 1..27: note = AP-5 complex subunit mu-1 (115-123)
  source 1..27: mol_type = other RNA
accctgagcccccgcccgcccctcatc

SEQ ID NO: 42862 - RNA, 27 nt, synthetic construct
  misc_feature 1..27: note = 40S ribosomal protein S7 (121-129)
  source 1..27: mol_type = other RNA
accctgaccgccgtgcacgacgccatc

SEQ ID NO: 42863 - RNA, 33 nt, synthetic construct
  misc_feature 1..33: note = 40S ribosomal protein S7 (121-131)
  source 1..33: mol_type = other RNA
accctgaccgccgtgcacgacgccatcctcgag

SEQ ID NO: 42864 - RNA, 36 nt, synthetic construct
  misc_feature 1..36: note = Translocating chain-associated membrane protein 1 (357-368)
  source 1..36: mol_type = other RNA
accctgaccagcaacgtggccgactccccccgcaac

SEQ ID NO: 42865 - RNA, 36 nt, synthetic construct
  misc_feature 1..36: note = Peptidyl-prolyl cis-trans isomerase FKBP1A (97-108)
  source 1..36: mol_type = other RNA
accctggtgttcgacgtcgagctcctgaagctggag

SEQ ID NO: 42866 - RNA, 27 nt, synthetic construct
  misc_feature 1..27: note = Serine/threonine-protein kinase RIO2 (243-251)
  source 1..27: mol_type = other RNA
accatgatcgacttcccccagatggtg

SEQ ID NO: 42867 - RNA, 30 nt, synthetic construct
  misc_feature 1..30: note = CDC42 small effector protein 1 (26-35)
  source 1..30: mol_type = other RNA
accatgatcggcgagcccatgaacttcgtg

SEQ ID NO: 42868 - RNA, 36 nt, synthetic construct
  misc_feature 1..36: note = Far upstream element-binding protein 2 (277-288)
  source 1..36: mol_type = other RNA
accaacgtggacaagcccctgcgcatcatcggcgac

SEQ ID NO: 42869 - RNA, 36 nt, synthetic construct
  misc_feature 1..36: note = Cell division cycle 5-like protein (373-384)
  source 1..36: mol_type = other RNA
accaacgtggacacccccctgaagggcgggctcaac

SEQ ID NO: 42870 - RNA, 30 nt, synthetic construct
  misc_feature 1..30: note = Vacuolar protein sorting-associated protein VTA1 homolog (224-233)
  source 1..30: mol_type = other RNA
acccccgccgaggtgccgcacagcaccggc

SEQ ID NO: 42871 - RNA, 36 nt, synthetic construct
  misc_feature 1..36: note = Vacuolar protein sorting-associated protein VTA1 homolog (224-235)
  source 1..36: mol_type = other RNA
acccccgccgaggtgccgcacagcaccggcgtcgcc

SEQ ID NO: 42872 - RNA, 30 nt, synthetic construct
  misc_feature 1..30: note = Polyadenylate-binding protein 1 (502-511)
  source 1..30: mol_type = other RNA
acccccgccgtgcgcaccgtcccgcagtac

SEQ ID NO: 42873 - RNA, 24 nt, synthetic construct
  misc_feature 1..24: note = Ubiquitin-associated protein 2-like (952-959)
  source 1..24: mol_type = other RNA
acccccttccagcagccgagcggc

SEQ ID NO: 42874 - RNA, 27 nt, synthetic construct
  misc_feature 1..27: note = IST1 homolog (241-249)
  source 1..27: mol_type = other RNA
acccccttcagctacccgctgcccaag

SEQ ID NO: 42875 - RNA, 33 nt, synthetic construct
  misc_feature 1..33: note = IST1 homolog (241-251)
  source 1..33: mol_type = other RNA
acccccttcagctacccgctgcccaagggcccc

SEQ ID NO: 42876 - RNA, 36 nt, synthetic construct
  misc_feature 1..36: note = TBC1 domain family member 30 (869-880)
  source 1..36: mol_type = other RNA
acccccatcttcagcccgttcccctccgtgaagccc

SEQ ID NO: 42877 - RNA, 24 nt, synthetic construct
  misc_feature 1..24: note = Eukaryotic translation initiation factor 4 gamma 1 (647-654)
  source 1..24: mol_type = other RNA
acccccctgcgcccgctcgacccc

SEQ ID NO: 42878 - RNA, 27 nt, synthetic construct
  misc_feature 1..27: note = Eukaryotic translation initiation factor 4 gamma 1 (647-655)
  source 1..27: mol_type = other RNA
acccccctgcgcccgctcgaccccacc

SEQ ID NO: 42879 - RNA, 30 nt, synthetic construct
  misc_feature 1..30: note = Eukaryotic translation initiation factor 4 gamma 1 (647-656)
  source 1..30: mol_type = other RNA
acccccctgcgcccgctcgaccccacccgg

SEQ ID NO: 42880 - RNA, 33 nt, synthetic construct
  misc_feature 1..33: note = Eukaryotic translation initiation factor 4 gamma 1 (647-657)
  source 1..33: mol_type = other RNA
acccccctgcgcccgctcgaccccacccggctg

SEQ ID NO: 42881 - RNA, 36 nt, synthetic construct
  misc_feature 1..36: note = Intercellular adhesion molecule 1 (521-532)
  source 1..36: mol_type = other RNA
acccccatgaagccgaacacccaggccacgcccccc

SEQ ID NO: 42882 - RNA, 36 nt, synthetic construct
  misc_feature 1..36: note = Vesicular, overexpressed in cancer, prosurvival protein 1 (160-171)
  source 1..36: mol_type = other RNA
acccccccgcccccctacgagcaggtggtcaaggcc

SEQ ID NO: 42883 - RNA, 36 nt, synthetic construct
  misc_feature 1..36: note = GTPase-activating protein and VPS9 domain-containing protein 1 (462-473)
  source 1..36: mol_type = other RNA
accccccagctgagcccggccaccacgcccgccaac

SEQ ID NO: 42884 - RNA, 27 nt, synthetic construct
  misc_feature 1..27: note = Translocating chain-associated membrane protein 2 (334-342)
  source 1..27: mol_type = other RNA
accccccgcctgccggcccggctcatc

SEQ ID NO: 42885 - RNA, 27 nt, synthetic construct
  misc_feature 1..27: note = Target of Nesh-SH3 (160-168)
  source 1..27: mol_type = other RNA
accccccgcccgaccggcacgcccctg

SEQ ID NO: 42886 - RNA, 36 nt, synthetic construct
  misc_feature 1..36: note = Acidic leucine-rich nuclear phosphoprotein 32 family member A (15-26)
  source 1..36: mol_type = other RNA
acccccagcgacgtgaaggagctggtcctcgacaac

SEQ ID NO: 42887 - RNA, 33 nt, synthetic construct
  misc_feature 1..33: note = ATP-dependent RNA helicase A (18-28)
  source 1..33: mol_type = other RNA
acccccagctacgagatccgcgccgtgggcaac

SEQ ID NO: 42888 - RNA, 27 nt, synthetic construct
  misc_feature 1..27: note = Protein DENND6A (343-351)
  source 1..27: mol_type = other RNA
acccaggcccccccgagcgtgatcctg

SEQ ID NO: 42889 - RNA, 27 nt, synthetic construct
  misc_feature 1..27: note = Gamma-glutamyltranspeptidase 1 (475-483)
  source 1..27: mol_type = other RNA
acccagatcaccacggccaccgccctg

SEQ ID NO: 42890 - RNA, 27 nt, synthetic construct
  misc_feature 1..27: note = Disks large homolog 5 (356-364)
  source 1..27: mol_type = other RNA
acccagcagcgcgacaccgccatccag

SEQ ID NO: 42891 - RNA, 27 nt, synthetic construct
  misc_feature 1..27: note = U3 small nucleolar RNA-associated protein 14 homolog A (567-575)
  source 1..27: mol_type = other RNA
acccagagcccctccgtgaagagcctg

SEQ ID NO: 42892 - RNA, 27 nt, synthetic construct
  misc_feature 1..27: note = Splicing factor 1 (362-370)
  source 1..27: mol_type = other RNA
acccagagccgccccccgtggatgaac

SEQ ID NO: 42893 - RNA, 33 nt, synthetic construct
  misc_feature 1..33: note = Serine/threonine-protein kinase VRK1 (378-388)
  source 1..33: mol_type = other RNA
acccagaccgaggaggccatccagacgcgcagc

SEQ ID NO: 42894 - RNA, 24 nt, synthetic construct
  misc_feature 1..24: note = Elongation factor 1-gamma (409-416)
  source 1..24: mol_type = other RNA
acccagaccctggtgcgcgagtac

SEQ ID NO: 42895 - RNA, 27 nt, synthetic construct
  misc_feature 1..27: note = Nucleolar protein 58 (259-267)
  source 1..27: mol_type = other RNA
acccaggtgatcgagatcagcgagtac

SEQ ID NO: 42896 - RNA, 27 nt, synthetic construct
  misc_feature 1..27: note = Lon protease homolog 2, peroxisomal (556-564)
  source 1..27: mol_type = other RNA
acccgcgaggccggcgtgcggagcctg

SEQ ID NO: 42897 - RNA, 33 nt, synthetic construct
  misc_feature 1..33: note = Fibronectin type III domain-containing protein 3B (182-192)
  source 1..33: mol_type = other RNA
acccgcgaggaccagtacagcaagcccccgcac

SEQ ID NO: 42898 - RNA, 27 nt, synthetic construct
  misc_feature 1..27: note = Myotubularin-related protein 10 (495-503)
  source 1..27: mol_type = other RNA
acccgcatcagcctgttcggcaccttc

SEQ ID NO: 42899 - RNA, 27 nt, synthetic construct
  misc_feature 1..27: note = Uncharacterized protein DKFZp434B061 (517-525)
  source 1..27: mol_type = other RNA
acccgcagccccccgaccgcctccctg

SEQ ID NO: 42900 - RNA, 27 nt, synthetic construct
  misc_feature 1..27: note = Putative coiled-coil-helix-coiled-coil-helix domain-containing protein CHCHD2P9, mitochondrial (9-17)
  source 1..27: mol_type = other RNA
accagccgcatggcccccccggcctcc

SEQ ID NO: 42901 - RNA, 30 nt, synthetic construct
  misc_feature 1..30: note = Splicing factor 1 (361-370)
  source 1..30: mol_type = other RNA
accacccagagccgccccccgtggatgaac

SEQ ID NO: 42902 - RNA, 27 nt, synthetic construct
  misc_feature 1..27: note = Ubiquitin carboxyl-terminal hydrolase 22 (424-432)
  source 1..27: mol_type = other RNA
acctacgtgagcttccccctggagctc

SEQ ID NO: 42903 - RNA, 27 nt, synthetic construct
  misc_feature 1..27: note = Ataxin-7 (448-456)
  source 1..27: mol_type = other RNA
gtggagaagcacctgaacgcccagctc

SEQ ID NO: 42904 - RNA, 27 nt, synthetic construct
  misc_feature 1..27: note = X-ray repair cross-complementing protein 6 (231-239)
  source 1..27: mol_type = other RNA
gtgcacttcgaggagagctccaagctg

SEQ ID NO: 42905 - RNA, 27 nt, synthetic construct
  misc_feature 1..27: note = Sorting nexin-19 (246-254)
  source 1..27: mol_type = other RNA
gtgatcctgcccctcatcagccgcctg

SEQ ID NO: 42906 - RNA, 27 nt, synthetic construct
  misc_feature 1..27: note = Eukaryotic translation initiation factor 3 subunit G (59-67)
  source 1..27: mol_type = other RNA
gtgatcaacggcaacatcaagaccgtc

SEQ ID NO: 42907 - RNA, 27 nt, synthetic construct
  misc_feature 1..27: note = Inositol-tetrakisphosphate 1-kinase (261-269)
  source 1..27: mol_type = other RNA
gtgatccgcgagctgagccgggccctc

SEQ ID NO: 42908 - RNA, 27 nt, synthetic construct
  misc_feature 1..27: note = Serine/threonine-protein phosphatase 2A 65 kDa regulatory subunit A beta isoform (174-182)
  source 1..27: mol_type = other RNA
gtgaaggccgagatccgccagcagttc

SEQ ID NO: 42909 - RNA, 27 nt, synthetic construct
  misc_feature 1..27: note = T-complex protein 1 subunit theta (234-242)
  source 1..27: mol_type = other RNA
gtgaaggacgccaagatcgccgtctac

SEQ ID NO: 42910 - RNA, 27 nt, synthetic construct
  misc_feature 1..27: note = Nodal modulator 2 (43-51)
  source 1..27: mol_type = other RNA
gtgaagagcgacgtcgagatcaactac

SEQ ID NO: 42911 - RNA, 27 nt, synthetic construct
  misc_feature 1..27: note = Elongation factor 2 (480-488)
  source 1..27: mol_type = other RNA
gtgaagaccggcaccatcacgaccttc

SEQ ID NO: 42912 - RNA, 27 nt, synthetic construct
  misc_feature 1..27: note = Alpha/beta hydrolase domain-containing protein 14B (150-158)
  source 1..27: mol_type = other RNA
gtgaagacccccgccctgatcgtctac

SEQ ID NO: 42913 - RNA, 27 nt, synthetic construct
  misc_feature 1..27: note = Eukaryotic translation initiation factor 3 subunit E (278-286)
  source 1..27: mol_type = other RNA
gtgaaggtcatccagcaggagagctac

SEQ ID NO: 42914 - RNA, 27 nt, synthetic construct
  misc_feature 1..27: note = Exocyst complex component 3 (40-48)
  source 1..27: mol_type = other RNA
gtgctgcagcgcagcctcgtcaccgtg

SEQ ID NO: 42915 - RNA, 27 nt, synthetic construct
  misc_feature 1..27: note = HLA class II histocompatibility antigen, DRB1-11 beta chain (21-29)
  source 1..27: mol_type = other RNA
gtgctgagctcccccctcgccctggcc

SEQ ID NO: 42916 - RNA, 27 nt, synthetic construct
  misc_feature 1..27: note = Cytoplasmic dynein 1 heavy chain 1 (1684-1692)
  source 1..27: mol_type = other RNA
gtgatgttcaagacccccgtcagcatc

SEQ ID NO: 42917 - RNA, 27 nt, synthetic construct
  misc_feature 1..27: note = HEAT repeat-containing protein 1 (171-179)
  source 1..27: mol_type = other RNA
gtgcccctggccaagggcaccctcatc

SEQ ID NO: 42918 - RNA, 27 nt, synthetic construct
  misc_feature 1..27: note = DNA-(apurinic or apyrimidinic site) lyase (172-180)
  source 1..27: mol_type = other RNA
gtgcccaacgccggccgcgggctggtc

SEQ ID NO: 42919 - RNA, 27 nt, synthetic construct
  misc_feature 1..27: note = DDB1- and CUL4-associated factor 13 (189-197)
  source 1..27: mol_type = other RNA
gtgccccgcgagtacatccgggccctg

SEQ ID NO: 42920 - RNA, 30 nt, synthetic construct
  misc_feature 1..30: note = Transketolase (505-514)
  source 1..30: mol_type = other RNA
gtgccccgcagcggcaagccggccgagctg

SEQ ID NO: 42921 - RNA, 27 nt, synthetic construct
  misc_feature 1..27: note = Calcineurin-binding protein cabin-1 (1016-1024)
  source 1..27: mol_type = other RNA
gtgccccgcaccgagcggccggccctg

SEQ ID NO: 42922 - RNA, 27 nt, synthetic construct
  misc_feature 1..27: note = ATP-dependent RNA helicase DDX24 (664-672)
  source 1..27: mol_type = other RNA
gtgccccgcaccagcgagatctacgtc

SEQ ID NO: 42923 - RNA, 27 nt, synthetic construct
  misc_feature 1..27: note = Transient receptor potential cation channel subfamily V member 2 (284-292)
  source 1..27: mol_type = other RNA
gtgcagctggaggacatccgcaacctc

SEQ ID NO: 42924 - RNA, 27 nt, synthetic construct
  misc_feature 1..27: note = Putative eukaryotic translation initiation factor 2 subunit 3-like protein (234-242)
  source 1..27: mol_type = other RNA
gtggtctgcgagtacatcgtgaagaag

SEQ ID NO: 42925 - RNA, 27 nt, synthetic construct
  misc_feature 1..27: note = ATP-citrate synthase (56-64)
  source 1..27: mol_type = other RNA
gtggtcaagcccgaccagctgatcaag

SEQ ID NO: 42926 - RNA, 27 nt, synthetic construct
  misc_feature 1..27: note = U4/U6 small nuclear ribonucleoprotein Prp31 (433-441)
  source 1..27: mol_type = other RNA
gtggtctacggcgggaagagcaccatc

SEQ ID NO: 42927 - RNA, 27 nt, synthetic construct
  misc_feature 1..27: note = Integrin beta-7 (770-778)
  source 1..27: mol_type = other RNA
tggaagcaggacagcaaccccctgtac

SEQ ID NO: 42928 - RNA, 24 nt, synthetic construct
  misc_feature 1..24: note = Heterogeneous nuclear ribonucleoprotein U (421-428)
  source 1..24: mol_type = other RNA
tacgccaagaacggccaggacctg

SEQ ID NO: 42929 - RNA, 27 nt, synthetic construct
  misc_feature 1..27: note = Eukaryotic translation initiation factor 2 subunit 3 (83-91)
  source 1..27: mol_type = other RNA
tacgccaacgccaagatctacaagctg

SEQ ID NO: 42930 - RNA, 27 nt, synthetic construct
  misc_feature 1..27: note = Pyruvate kinase PKM (83-91)
  source 1..27: mol_type = other RNA
taccacgccgagaccatcaagaacgtg

SEQ ID NO: 42931 - RNA, 27 nt, synthetic construct
  misc_feature 1..27: note = Interferon-induced GTP-binding protein Mx1 (584-592)
  source 1..27: mol_type = other RNA
taccaccaggaggccagcaagcgcatc

SEQ ID NO: 42932 - RNA, 30 nt, synthetic construct
  misc_feature 1..30: note = 60S ribosomal protein L15 (53-62)
  source 1..30: mol_type = other RNA
tacaaggccaagcagggctacgtgatctac

SEQ ID NO: 42933 - RNA, 27 nt, synthetic construct
  misc_feature 1..27: note = Bifunctional glutamate/proline-tRNA ligase (791-799)
  source 1..27: mol_type = other RNA
tacaaggagaagaccggccaggagtac

SEQ ID NO: 42934 - RNA, 30 nt, synthetic construct
  misc_feature 1..30: note = Eukaryotic translation initiation factor 3 subunit G (70-79)
  source 1..30: mol_type = other RNA
tacaagatcgacgaggacggcaagaagttc

SEQ ID NO: 42935 - RNA, 27 nt, synthetic construct
  misc_feature 1..27: note = Elongation factor 1-alpha 1 (254-262)
  source 1..27: mol_type = other RNA
tacaagatcggcgggatcggcaccgtg

SEQ ID NO: 42936 - RNA, 24 nt, synthetic construct
  misc_feature 1..24: note = Coatomer subunit alpha (73-80)
  source 1..24: mol_type = other RNA
tacaagatcaaggtgtggaactac

SEQ ID NO: 42937 - RNA, 24 nt, synthetic construct
  misc_feature 1..24: note = 60S ribosomal protein L5 (219-226)
  source 1..24: mol_type = other RNA
tacaagaagcagttcagccagtac

SEQ ID NO: 42938 - RNA, 27 nt, synthetic construct
  misc_feature 1..27: note = Eukaryotic translation initiation factor 3 subunit B (253-261)
  source 1..27: mol_type = other RNA
tacaagctggacaagcagcacaccttc

SEQ ID NO: 42939 - RNA, 27 nt, synthetic construct
  misc_feature 1..27: note = Cathepsin B (219-227)
  source 1..27: mol_type = other RNA
tacaagcaggacaagcactacggctac

SEQ ID NO: 42940 - RNA, 36 nt, synthetic construct
  misc_feature 1..36: note = Peroxisomal carnitine O-octanoyltransferase (254-265)
  source 1..36: mol_type = other RNA
tacctgatcggcctcgaccccgagaacctggccctg

SEQ ID NO: 42941 - RNA, 27 nt, synthetic construct
  misc_feature 1..27: note = Putative ATP-dependent RNA helicase DDX11-like protein 8 (448-456)
  source 1..27: mol_type = other RNA
tacctgctcgagaagttcgtggccgtc

SEQ ID NO: 42942 - RNA, 30 nt, synthetic construct
  misc_feature 1..30: note = G1/S-specific cyclin-E1 (243-252)
  source 1..30: mol_type = other RNA
tacctgaacgacctccacgaggtgctgctg

SEQ ID NO: 42943 - RNA, 27 nt, synthetic construct
  misc_feature 1..27: note = DNA replication complex GINS protein PSF1 (79-87)
  source 1..27: mol_type = other RNA
tacctgtacgaccgcctcctgcggatc

SEQ ID NO: 42944 - RNA, 27 nt, synthetic construct
  misc_feature 1..27: note = Adenomatous polyposis coli protein (899-907)
  source 1..27: mol_type = other RNA
taccccgccgacctggcccacaagatc

SEQ ID NO: 42945 - RNA, 27 nt, synthetic construct
  misc_feature 1..27: note = Cathepsin D (203-211)
  source 1..27: mol_type = other RNA
tacccccgcatcagcgtgaacaacgtc

SEQ ID NO: 42946 - RNA, 27 nt, synthetic construct
  misc_feature 1..27: note Dolichyl-diphosphooligosaccharide-proteinosyltransferase subunit 2 (53-61)
  source 1..27: mol_type = other RNA
tacagcatcgtgggcctgtccagcctc

SEQ ID NO: 42947 - RNA, 27 nt, synthetic construct
  misc_feature 1..27: note = Staphylococcal nuclease domain-containing protein 1 (178-186)
  source 1..27: mol_type = other RNA
tacaccatcgagaacccccgccacttc

SEQ ID NO: 42948 - RNA, 27 nt, synthetic construct
  misc_feature 1..27: note = Glycogen synthase kinase-3 beta (134-142)
  source 1..27: mol_type = other RNA
tacgtgcccgagaccgtctaccgcgtg

SEQ ID NO: 42949 - RNA, 27 nt, synthetic construct
  misc_feature 1..27: note = Titin (24337-24345)
  source 1..27: mol_type = other RNA
gagagcgaccccatcgtggcccagtac

SEQ ID NO: 42950 - RNA, 24 nt, synthetic construct
  misc_feature 1..24: note = Thymidylate synthase (255-262)
  source 1..24: mol_type = other RNA
gcccacatctacctgaaccacatc

SEQ ID NO: 42951 - RNA, 24 nt, synthetic construct
  misc_feature 1..24: note = Store-operated calcium entry-associated regulatory factor (104-111)
  source 1..24: mol_type = other RNA
gcctacaagttcggcaagaccgtg

SEQ ID NO: 42952 - RNA, 27 nt, synthetic construct
  misc_feature 1..27: note = Junction plakoglobin (136-144)
  source 1..27: mol_type = other RNA
gacgccgagctggccacccgcgcgctc

SEQ ID NO: 42953 - RNA, 24 nt, synthetic construct
  misc_feature 1..24: note = U1 small nuclear ribonucleoprotein 70 kDa (100-107)
  source 1..24: mol_type = other RNA
gacgccttcaagaccctgttcgtg

SEQ ID NO: 42954 - RNA, 24 nt, synthetic construct
  misc_feature 1..24: note = Interferon-induced helicase C domain-containing protein 1 (514-521)
  source 1..24: mol_type = other RNA
gacgccttcaccatcaagaccgtg

SEQ ID NO: 42955 - RNA, 24 nt, synthetic construct
  misc_feature 1..24: note = Gamma-interferon-inducible protein 16 (59-66)
  source 1..24: mol_type = other RNA
gacgccggcctggggaagctcatc

SEQ ID NO: 42956 - RNA, 27 nt, synthetic construct
  misc_feature 1..27: note = Ubiquitin carboxyl-terminal hydrolase 30 (44-52)
  source 1..27: mol_type = other RNA
gacgcccacgagctgttccacgtgatc

SEQ ID NO: 42957 - RNA, 27 nt, synthetic construct
  misc_feature 1..27: note = Ubiquitin carboxyl-terminal hydrolase 51 (682-690)
  source 1..27: mol_type = other RNA
gacgccatcatcaccaaggccaccatc

SEQ ID NO: 42958 - RNA, 27 nt, synthetic construct
  misc_feature 1..27: note = ATP-dependent RNA helicase DDX50 (215-223)
  source 1..27: mol_type = other RNA
gacgccatccgcagcctggcctccgtg

SEQ ID NO: 42959 - RNA, 27 nt, synthetic construct
  misc_feature 1..27: note = WD repeat-containing protein 11 (348-356)
  source 1..27: mol_type = other RNA
gacgccatccgcgtgaccaagaccgtc

SEQ ID NO: 42960 - RNA, 27 nt, synthetic construct
  misc_feature 1..27: note = Protein disulfide-isomerase TMX3 (362-370)
  source 1..27: mol_type = other RNA
gacgccaagagcaccatcgtgtccatc

SEQ ID NO: 42961 - RNA, 27 nt, synthetic construct
  misc_feature 1..27: note = Cell division cycle protein 16 homolog (426-434)
  source 1..27: mol_type = other RNA
gacgccctggagaagatcaaggccatc

SEQ ID NO: 42962 - RNA, 24 nt, synthetic construct
  misc_feature 1..24: note = Protein FAM127A (61-68)
  source 1..24: mol_type = other RNA
gacgccctgaaggtgaccttcctc

SEQ ID NO: 42963 - RNA, 27 nt, synthetic construct
  misc_feature 1..27: note = Glucosamine-6-phosphate isomerase 2 (125-133)
  source 1..27: mol_type = other RNA
gacgcccgcgaggtgatgatcctgatc

SEQ ID NO: 42964 - RNA, 27 nt, synthetic construct
  misc_feature 1..27: note = Little elongation complex subunit 2 (170-178)
  source 1..27: mol_type = other RNA
gacgcccgcctgttcaccgagaagatc

SEQ ID NO: 42965 - RNA, 30 nt, synthetic construct
  misc_feature 1..30: note = Myotubularin (299-308)
  source 1..30: mol_type = other RNA
gacgcctaccacaacgccgagctgttcttc

SEQ ID NO: 42966 - RNA, 27 nt, synthetic construct
  misc_feature 1..27: note = C-Jun-amino-terminal kinase-interacting protein 4 (932-940)
  source 1..27: mol_type = other RNA
gacgcctacaaggaccagatcagcgtg

SEQ ID NO: 42967 - RNA, 27 nt, synthetic construct
  misc_feature 1..27: note = Interleukin-1 receptor accessory protein-like 1 (406-414)
  source 1..27: mol_type = other RNA
gacgcctacctgagctacaccaaggtg

SEQ ID NO: 42968 - RNA, 24 nt, synthetic construct
  misc_feature 1..24: note = T-complex protein 1 subunit eta (49-56)
  source 1..24: mol_type = other RNA
gacggcgccaccatcctgaagctc

SEQ ID NO: 42969 - RNA, 24 nt, synthetic construct
  misc_feature 1..24: note = Non-specific lipid-transfer protein (348-355)
  source 1..24: mol_type = other RNA
gacggcttcaaggccaacctggtg

SEQ ID NO: 42970 - RNA, 24 nt, synthetic construct
  misc_feature 1..24: note = Ankyrin-1 (176-183)
  source 1..24: mol_type = other RNA
gacggcttcacccccctggccgtg

SEQ ID NO: 42971 - RNA, 24 nt, synthetic construct
  misc_feature 1..24: note = Transmembrane protein 106C (116-123)
  source 1..24: mol_type = other RNA
gacggcatcaaggtggtcaaggtg

SEQ ID NO: 42972 - RNA, 24 nt, synthetic construct
  misc_feature 1..24: note = Retrotransposon-derived protein PEG10 (644-651)
  source 1..24: mol_type = other RNA
gacggcctgatcacccccaccatc

SEQ ID NO: 42973 - RNA, 27 nt, synthetic construct
  misc_feature 1..27: note = Phosphatidate phosphatase LPIN1 (456-464)
  source 1..27: mol_type = other RNA
gacggcctgcgcgacctccccagcatc

SEQ ID NO: 42974 - RNA, 24 nt, synthetic construct
  misc_feature 1..24: note = Phosphatidylinositol transfer protein alpha isoform (159-166)
  source 1..24: mol_type = other RNA
gaccccgccaagttcaagagcatc

SEQ ID NO: 42975 - RNA, 27 nt, synthetic construct
  misc_feature 1..27: note = Structural maintenance of chromosomes protein 3 (21-29)
  source 1..27: mol_type = other RNA
gaccccttcagctccaagcacaacgtg

SEQ ID NO: 42976 - RNA, 24 nt, synthetic construct
  misc_feature 1..24: note = Interferon regulatory factor 4 (120-127)
  source 1..24: mol_type = other RNA
gacccctacaaggtgtaccgcatc

SEQ ID NO: 42977 - RNA, 27 nt, synthetic construct
  misc_feature 1..27: note = Interferon regulatory factor 4 (120-128)
  source 1..27: mol_type = other RNA
gacccctacaaggtgtaccgcatcgtc

SEQ ID NO: 42978 - RNA, 24 nt, synthetic construct
  misc_feature 1..24: note = Plectin (4002-4009)
  source 1..24: mol_type = other RNA
gacccctacagcggcaagctgatc

SEQ ID NO: 42979 - RNA, 27 nt, synthetic construct
  misc_feature 1..27: note = All-trans-retinol 13,14-reductase (23-31)
  source 1..27: mol_type = other RNA
atcgccttccacaccatccccgtgatc

SEQ ID NO: 42980 - RNA, 27 nt, synthetic construct
  misc_feature 1..27: note = Putative pre-mRNA-splicing factor ATP-dependent RNA helicase DHX16 (412-420)
  source 1..27: mol_type = other RNA
atcgccaaccaccaggtgctgatcatc

SEQ ID NO: 42981 - RNA, 27 nt, synthetic construct
  misc_feature 1..27: note = RNA-binding protein 12 (28-36)
  source 1..27: mol_type = other RNA
atccccgacggcggggtgcacatcgtc

SEQ ID NO: 42982 - RNA, 27 nt, synthetic construct
  misc_feature 1..27: note = Integrator complex subunit 4 (508-516)
  source 1..27: mol_type = other RNA
atccccttcagcaagccggtgaaggtc

SEQ ID NO: 42983 - RNA, 33 nt, synthetic construct
  misc_feature 1..33: note = 14-3-3 protein zeta/delta (126-136)
  source 1..33: mol_type = other RNA
atccccaacgccagccaggccgagtccaaggtg

SEQ ID NO: 42984 - RNA, 24 nt, synthetic construct
  misc_feature 1..24: note = U5 small nuclear ribonucleoprotein 200 kDa helicase (821-828)
  source 1..24: mol_type = other RNA
ctgcccgcccacaccgtgatcatc

SEQ ID NO: 42985 - RNA, 24 nt, synthetic construct
  misc_feature 1..24: note = Transportin-2 (392-399)
  source 1..24: mol_type = other RNA
ctgccccacctcctgccgctgctc

SEQ ID NO: 42986 - RNA, 27 nt, synthetic construct
  misc_feature 1..27: note = Histone-lysine N-methyltransferase SETD1A (1210-1218)
  source 1..27: mol_type = other RNA
ctgcccctcgaccacgccagcctggtg

SEQ ID NO: 42987 - RNA, 27 nt, synthetic construct
  misc_feature 1..27: note = Polyhomeotic-like protein 3 (456-464)
  source 1..27: mol_type = other RNA
ctgcccctcccggccagccccgtggtc

SEQ ID NO: 42988 - RNA, 24 nt, synthetic construct
  misc_feature 1..24: note = Microphthalmia-associated transcription factor (107-114)
  source 1..24: mol_type = other RNA
ctgcccccgcccggcctcaccatc

SEQ ID NO: 42989 - RNA, 24 nt, synthetic construct
  misc_feature 1..24: note = Flotillin-2 (345-352)
  source 1..24: mol_type = other RNA
ctgccccagatcgccgccaagatc

SEQ ID NO: 42990 - RNA, 27 nt, synthetic construct
  misc_feature 1..27: note = G1/S-specific cyclin-D3 (98-106)
  source 1..27: mol_type = other RNA
ctgccccgcgaccggcaggccctcgtg

SEQ ID NO: 42991 - RNA, 27 nt, synthetic construct
  misc_feature 1..27: note = Cyclic AMP-dependent transcription factor ATF-6 beta (296-304)
  source 1..27: mol_type = other RNA
ctgccccgcccggagcggaagagcatc

SEQ ID NO: 42992 - RNA, 33 nt, synthetic construct
  misc_feature 1..33: note = Charged multivesicular body protein 2b (147-157)
  source 1..33: mol_type = other RNA
ctgcccagcgcctccaccagcaaggccaccatc

SEQ ID NO: 42993 - RNA, 24 nt, synthetic construct
  misc_feature 1..24: note = Msx2-interacting protein (1295-1302)
  source 1..24: mol_type = other RNA
ctgccctacagcaacatcaccgtg

SEQ ID NO: 42994 - RNA, 24 nt, synthetic construct
  misc_feature 1..24: note = LIM domain kinase 2 (146-153)
  source 1..24: mol_type = other RNA
ctgccctacagcgtgaccctcatc

SEQ ID NO: 42995 - RNA, 27 nt, synthetic construct
  misc_feature 1..27: note = Isoleucine-tRNA ligase, cytoplasmic (986-994)
  source 1..27: mol_type = other RNA
atggcccgcgaggtgatcaaccggatc

SEQ ID NO: 42996 - RNA, 24 nt, synthetic construct
  misc_feature 1..24: note = Probable ATP-dependent RNA helicase DHX37 (780-787)
  source 1..24: mol_type = other RNA
aacgcctacaagacccccctgctc

SEQ ID NO: 42997 - RNA, 27 nt, synthetic construct
  misc_feature 1..27: note = Ubiquitin D (25-33)
  source 1..27: mol_type = other RNA
aacccctacgacagcgtgaagaagatc

SEQ ID NO: 42998 - RNA, 30 nt, synthetic construct
  misc_feature 1..30: note = Host cell factor 1 (1378-1387)
  source 1..30: mol_type = other RNA
cccgacgccaccagctcccaccgcaccgtg

SEQ ID NO: 42999 - RNA, 24 nt, synthetic construct
  misc_feature 1..24: note = Queuine tRNA-ribosyltransferase subunit QTRTD1 (121-128)
  source 1..24: mol_type = other RNA
cccgaggacaagccgcgcctgatc

SEQ ID NO: 43000 - RNA, 27 nt, synthetic construct
  misc_feature 1..27: note = Zinc finger and BTB domain-containing protein 7B (219-227)
  source 1..27: mol_type = other RNA
cccctgccgcccccccccccgcccccc

SEQ ID NO: 43001 - RNA, 24 nt, synthetic construct
  misc_feature 1..24: note = E3 ubiquitin-protein ligase UBR5 (666-673)
  source 1..24: mol_type = other RNA
cccgtgggcaaggtcctgaaggtg

SEQ ID NO: 43002 - RNA, 27 nt, synthetic construct
  misc_feature 1..27: note = Probable ATP-dependent RNA helicase DDX5 (308-316)
  source 1..27: mol_type = other RNA
agcgccaaccacaacatcctgcagatc

SEQ ID NO: 43003 - RNA, 24 nt, synthetic construct
  misc_feature 1..24: note = Lys-63-specific deubiquitinase BRCC36 (236-243)
  source 1..24: mol_type = other RNA
agcgccgtggagctgcccaagatc

SEQ ID NO: 43004 - RNA, 27 nt, synthetic construct
  misc_feature 1..27: note = A-kinase anchor protein 9 (740-748)
  source 1..27: mol_type = other RNA
agcgacgcctaccagacccgcgagatc

SEQ ID NO: 43005 - RNA, 27 nt, synthetic construct
  misc_feature 1..27: note = WD repeat-containing protein 35 (500-508)
  source 1..27: mol_type = other RNA
accgccagcgacaagatcctgatcgtg

SEQ ID NO: 43006 - RNA, 24 nt, synthetic construct
  misc_feature 1..24: note = Ubiquitin carboxyl-terminal hydrolase 36 (521-528)
  source 1..24: mol_type = other RNA
acccccacccacatgccgacgatc

SEQ ID NO: 43007 - RNA, 27 nt, synthetic construct
  misc_feature 1..27: note = DNA damage-binding protein 1 (463-471)
  source 1..27: mol_type = other RNA
gtggcccaccagcagctgatccagatc

SEQ ID NO: 43008 - RNA, 27 nt, synthetic construct
  misc_feature 1..27: note = Something about silencing protein 10 (290-298)
  source 1..27: mol_type = other RNA
gtgcccgcccacggccacccggtcatc

SEQ ID NO: 43009 - RNA, 27 nt, synthetic construct
  misc_feature 1..27: note = RING finger protein unkempt homolog (549-557)
  source 1..27: mol_type = other RNA
gtgccccacccgggcagcatcaccatc

SEQ ID NO: 43010 - RNA, 27 nt, synthetic construct
  misc_feature 1..27: note = Ecto-NOX disulfide-thiol exchanger 1 (100-108)
  source 1..27: mol_type = other RNA
gtgcccccgcccccccccaccgaggtc

SEQ ID NO: 43011 - RNA, 27 nt, synthetic construct
  misc_feature 1..27: note = Epidermal growth factor receptor kinase substrate 8 (711-719)
  source 1..27: mol_type = other RNA
gtgccccgccagaacgtcccggtgatc

SEQ ID NO: 43012 - RNA, 24 nt, synthetic construct
  misc_feature 1..24: note = NEDD8-conjugating enzyme Ubc12 (86-93)
  source 1..24: mol_type = other RNA
tacccccacgacccgcccaaggtg

SEQ ID NO: 43013 - RNA, 24 nt, synthetic construct
  misc_feature 1..24: note = Protein SMG7 (359-366)
  source 1..24: mol_type = other RNA
taccccctgccggccgtgaaggtc

SEQ ID NO: 43014 - RNA, 24 nt, synthetic construct
  misc_feature 1..24: note = Nicotinamide phosphoribosyltransferase (26-33)
  source 1..24: mol_type = other RNA
taccccccgaacaccagcaaggtg

SEQ ID NO: 43015 - RNA, 27 nt, synthetic construct
  misc_feature 1..27: note = E3 ubiquitin-protein ligase RNF144A (27-35)
  source 1..27: mol_type = other RNA
taccccgtggagcagatgaccaccatc

SEQ ID NO: 43016 - RNA, 24 nt, synthetic construct
  misc_feature 1..24: note = Elongation of very long chain fatty acids protein 1 (202-209)
  source 1..24: mol_type = other RNA
taccccgtgatcatccacctgatc

SEQ ID NO: 43017 - RNA, 27 nt, synthetic construct
  misc_feature 1..27: note = Mediator of RNA polymerase II transcription subunit 15 (438-446)
  source 1..27: mol_type = other RNA
gcccgcaccccccagaacttcagcgtg

SEQ ID NO: 43018 - RNA, 30 nt, synthetic construct
  misc_feature 1..30: note = Tubulin beta chain (335-344)
  source 1..30: mol_type = other RNA
gccgtgttccgcggccggatgagcatgaag

SEQ ID NO: 43019 - RNA, 48 nt, synthetic construct
  misc_feature 1..48: note = Myosin regulatory light chain 12A (110-125)
  source 1..48: mol_type = other RNA
gacgaggaggccaccggcaccatccaggaggactacctgcgcgagctc

SEQ ID NO: 43020 - RNA, 48 nt, synthetic construct
  misc_feature 1..48: note = MARCKS-related protein (153-168)
  source 1..48: mol_type = other RNA
gagccccaggccaagggcgccgaggcgagcgccgcctccgaggaggag

SEQ ID NO: 43021 - RNA, 27 nt, synthetic construct
  misc_feature 1..27: note = Cytochrome c oxidase subunit 7C, mitochondrial (49-57)
  source 1..27: mol_type = other RNA
ttcgccacccccttcctggtggtccgc

SEQ ID NO: 43022 - RNA, 57 nt, synthetic construct
  misc_feature 1..57: note = Cytochrome c oxidase subunit 8A, mitochondrial (26-44)
  source 1..57: mol_type = other RNA
ttcctgctccccgccggctggatcctgagccacctggagacctaccgccggccggag

SEQ ID NO: 43023 - RNA, 45 nt, synthetic construct
  misc_feature 1..45: note = Disintegrin and metalloproteinase domain-containing protein 10 (292-306)
  source 1..45: mol_type = other RNA
ttccccaacatcggcgtggagaagttcctggagctcaacagcgag

SEQ ID NO: 43024 - RNA, 27 nt, synthetic construct
  misc_feature 1..27: note = Hermansky-Pudlak syndrome 5 protein (380-388)
  source 1..27: mol_type = other RNA
ttccagaacagcgtgatcgcctcccgc

SEQ ID NO: 43025 - RNA, 30 nt, synthetic construct
  misc_feature 1..30: note = NADH dehydrogenase (ubiquinone) flavoprotein 3, mitochondrial (107-116)
  source 1..30: mol_type = other RNA
ttcaccgacgagggcgtgcccaagttcctg

SEQ ID NO: 43026 - RNA, 48 nt, synthetic construct
  misc_feature 1..48: note = Myristoylated alanine-rich C-kinase substrate (191-206)
  source 1..48: mol_type = other RNA
ggcgggaaggacgaggccgccggcggggcggccgccgccgccgcggag

SEQ ID NO: 43027 - RNA, 39 nt, synthetic construct
  misc_feature 1..39: note = Heat shock cognate 71 kDa protein (484-496)
  source 1..39: mol_type = other RNA
ggcatcctgaacgtgagcgccgtcgacaagtccaccggg

SEQ ID NO: 43028 - RNA, 48 nt, synthetic construct
  misc_feature 1..48: note = Heat shock cognate 71 kDa protein (484-499)
  source 1..48: mol_type = other RNA
ggcatcctgaacgtgagcgccgtcgacaagtccaccgggaaggagaac

SEQ ID NO: 43029 - RNA, 45 nt, synthetic construct
  misc_feature 1..45: note = Myristoylated alanine-rich C-kinase substrate (192-206)
  source 1..45: mol_type = other RNA
ggcaaggacgaggccgccgggggcgcggccgccgccgccgcggag

SEQ ID NO: 43030 - RNA, 48 nt, synthetic construct
  misc_feature 1..48: note = Gamma-secretase C-terminal fragment 59 (185-200)
  source 1..48: mol_type = other RNA
ggcagcgaggacaaggtggtcgaggtggccgaggaggaggaggtggcc

SEQ ID NO: 43031 - RNA, 24 nt, synthetic construct
  misc_feature 1..24: note = 26S proteasome non-ATPase regulatory subunit 12 (115-122)
  source 1..24: mol_type = other RNA
atcaccgacctgcccatcaagctc

SEQ ID NO: 43032 - RNA, 42 nt, synthetic construct
  misc_feature 1..42: note = Myristoylated alanine-rich C-kinase substrate (193-206)
  source 1..42: mol_type = other RNA
aaggacgaggccgccggcggggcggccgccgccgccgcggag

SEQ ID NO: 43033 - RNA, 51 nt, synthetic construct
  misc_feature 1..51: note = NEDD4 family-interacting protein 1 (63-79)
  source 1..51: mol_type = other RNA
aagcccccgagctacaacgtggccaccaccctgccctcctacgacgaggcc

SEQ ID NO: 43034 - RNA, 42 nt, synthetic construct
  misc_feature 1..42: note = HLA class I histocompatibility antigen, A-24 alpha chain (143-156)
  source 1..42: mol_type = other RNA
aagcgcaagtgggaggccgcccacgtggcggagcagcagcgg

SEQ ID NO: 43035 - RNA, 39 nt, synthetic construct
  misc_feature 1..39: note = Glyceraldehyde-3-phosphate dehydrogenase (27-39)
  source 1..39: mol_type = other RNA
aaggtggacatcgtcgccatcaacgaccccttcatcgac

SEQ ID NO: 43036 - RNA, 54 nt, synthetic construct
  misc_feature 1..54: note = Cytochrome c oxidase subunit 8A, mitochondrial (27-44)
  source 1..54: mol_type = other RNA
ctgctccccgccggctggatcctgagccacctggagacctaccgccggccggag

SEQ ID NO: 43037 - RNA, 42 nt, synthetic construct
  misc_feature 1..42: note = HLA class I histocompatibility antigen, Cw-7 alpha chain (154-167)
  source 1..42: mol_type = other RNA
ctgcgcagctggaccgccgccgacaccgcggcccagatcacg

SEQ ID NO: 43038 - RNA, 48 nt, synthetic construct
  misc_feature 1..48: note = HLA class I histocompatibility antigen, B-15 alpha chain (239-254)
  source 1..48: mol_type = other RNA
ctgacctggcagcgcgacggcgaggaccagacccaggacacggagctc

SEQ ID NO: 43039 - RNA, 54 nt, synthetic construct
  misc_feature 1..54: note = HLA class I histocompatibility antigen, B-15 alpha chain (239-256)
  source 1..54: mol_type = other RNA
ctgacctggcagcgcgacggcgaggaccagacccaggacacggagctcgtggag

SEQ ID NO: 43040 - RNA, 69 nt, synthetic construct
  misc_feature 1..69: note = NADH dehydrogenase (ubiquinone) 1 alpha subcomplex subunit 8 (150-172)
  source 1..69: mol_type = other RNA
cccagcccggagatcgagggcgacctgcagcccgccacccacgggtcccgcttctacttctggaccaag

SEQ ID NO: 43041 - RNA, 27 nt, synthetic construct
  misc_feature 1..27: note = Probable ATP-dependent RNA helicase DDX47 (371-379)
  source 1..27: mol_type = other RNA
cagcgcatcgagcacctgatcggcaag

SEQ ID NO: 43042 - RNA, 30 nt, synthetic construct
  misc_feature 1..30: note = Ras GTPase-activating-like protein IQGAP3 (482-491)
  source 1..30: mol_type = other RNA
cagcgctacttcgacgccctgctcaagctg

SEQ ID NO: 43043 - RNA, 27 nt, synthetic construct
  misc_feature 1..27: note = Prelamin-A/C (213-221)
  source 1..27: mol_type = other RNA
cagagccgcatccggatcgactccctg

SEQ ID NO: 43044 - RNA, 27 nt, synthetic construct
  misc_feature 1..27: note = Proteasome subunit beta type-2 (170-178)
  source 1..27: mol_type = other RNA
cgcttcatcctgaacctccccaccttc

SEQ ID NO: 43045 - RNA, 30 nt, synthetic construct
  misc_feature 1..30: note = Unconventional myosin-IXa (1043-1052)
  source 1..30: mol_type = other RNA
cgccaggccagcgtgatcatccagcggttc

SEQ ID NO: 43046 - RNA, 36 nt, synthetic construct
  misc_feature 1..36: note = DNA polymerase delta subunit 3 (416-427)
  source 1..36: mol_type = other RNA
cgccaggtgagcatcaccggcttcttccagcggaag

SEQ ID NO: 43047 - RNA, 30 nt, synthetic construct
  misc_feature 1..30: note = Calcipressin-1 (161-170)
  source 1..30: mol_type = other RNA
cgccggcccgagtacaccccgatccacctg

SEQ ID NO: 43048 - RNA, 45 nt, synthetic construct
  misc_feature 1..45: note = Glyceraldehyde-3-phosphate dehydrogenase (25-39)
  source 1..45: mol_type = other RNA
agcggcaaggtggacatcgtcgccatcaacgaccccttcatcgac

SEQ ID NO: 43049 - RNA, 27 nt, synthetic construct
  misc_feature 1..27: note = Mitotic checkpoint serine/threonine-protein kinase BUB1 beta (486-494)
  source 1..27: mol_type = other RNA
agccagaagatccccggcatgaccctg

SEQ ID NO: 43050 - RNA, 45 nt, synthetic construct
  misc_feature 1..45: note = HLA class I histocompatibility antigen, B-15 alpha chain (155-169)
  source 1..45: mol_type = other RNA
agctcctggaccgccgccgacaccgcggcccagatcacgcagcgc

SEQ ID NO: 43051 - RNA, 33 nt, synthetic construct
  misc_feature 1..33: note = L-lactate dehydrogenase A chain (255-265)
  source 1..33: mol_type = other RNA
agcgtggccgacctggccgagtccatcatgaag

SEQ ID NO: 43052 - RNA, 45 nt, synthetic construct
  misc_feature 1..45: note = IST1 homolog (278-292)
  source 1..45: mol_type = other RNA
acccccccgagctacgagtccgtggacgacatcaacgccgacaag

SEQ ID NO: 43053 - RNA, 48 nt, synthetic construct
  misc_feature 1..48: note = IST1 homolog (278-293)
  source 1..48: mol_type = other RNA
acccccccgagctacgagtccgtggacgacatcaacgccgacaagaac

SEQ ID NO: 43054 - RNA, 27 nt, synthetic construct
  misc_feature 1..27: note = Palladin (534-542)
  source 1..27: mol_type = other RNA
gtggccgacggctaccccgtccgcctg

SEQ ID NO: 43055 - RNA, 30 nt, synthetic construct
  misc_feature 1..30: note = Interferon-induced transmembrane protein 2 (89-98)
  source 1..30: mol_type = other RNA
gtgggcgacgtcaccggggcccaggcctac

SEQ ID NO: 43056 - RNA, 60 nt, synthetic construct
  misc_feature 1..60: note = 78 kDa glucose-regulated protein (425-444)
  source 1..60: mol_type = other RNA
gtgcccaccaagaagagccagatcttctccaccgccagcgacaaccagccgacggtcacc

SEQ ID NO: 43057 - RNA, 63 nt, synthetic construct
  misc_feature 1..63: note = Cytochrome c oxidase subunit 8A, mitochondrial (24-44)
  source 1..63: mol_type = other RNA
gtgaccttcctgctccccgccggctggatcctgagccacctggagacctaccgccggccggag

SEQ ID NO: 43058 - RNA, 42 nt, synthetic construct
  misc_feature 1..42: note = Alpha-enolase (70-83)
  source 1..42: mol_type = other RNA
gtggtcatcggcatggacgtggccgccagcgagttcttccgc

SEQ ID NO: 43059 - RNA, 48 nt, synthetic construct
  misc_feature 1..48: note = HLA class I histocompatibility antigen, B-15 alpha chain (241-256)
  source 1..48: mol_type = other RNA
tggcagcgcgacggcgaggaccagacccaggacaccgagctggtggag

SEQ ID NO: 43060 - RNA, 42 nt, synthetic construct
  misc_feature 1..42: note = Vesicle-fusing ATPase (118-131)
  source 1..42: mol_type = other RNA
gccgccgagttcatccagcagttcaacaaccaggcgttcagc

SEQ ID NO: 43061 - RNA, 45 nt, synthetic construct
  misc_feature 1..45: note = Moesin (14-28)
  source 1..45: mol_type = other RNA
gccgagctggagttcgccatccagcccaacaccaccggcaagcag

SEQ ID NO: 43062 - RNA, 48 nt, synthetic construct
  misc_feature 1..48: note = Moesin (13-28)
  source 1..48: mol_type = other RNA
gacgccgagctggagttcgccatccagcccaacaccaccggcaagcag

SEQ ID NO: 43063 - RNA, 45 nt, synthetic construct
  misc_feature 1..45: note = Dihydropyrimidinase-related protein 2 (340-354)
  source 1..45: mol_type = other RNA
gacgagaaccagttcgtggccgtcaccagcaccaacgccgcgaag

SEQ ID NO: 43064 - RNA, 48 nt, synthetic construct
  misc_feature 1..48: note = Dihydropyrimidinase-related protein 2 (340-355)
  source 1..48: mol_type = other RNA
gacgagaaccagttcgtggccgtcaccagcaccaacgccgcgaaggtg

SEQ ID NO: 43065 - RNA, 33 nt, synthetic construct
  misc_feature 1..33: note = Putative ATP-dependent RNA helicase DHX33 (87-97)
  source 1..33: mol_type = other RNA
gaggccatcagcgactccctgctccgcaagtac

SEQ ID NO: 43066 - RNA, 27 nt, synthetic construct
  misc_feature 1..27: note = Ubiquitin-associated protein 2-like (88-96)
  source 1..27: mol_type = other RNA
gagggcaaccccgacacccacagctgg

SEQ ID NO: 43067 - RNA, 42 nt, synthetic construct
  misc_feature 1..42: note = Moesin (15-28)
  source 1..42: mol_type = other RNA
gagctggagttcgccatccagcccaacaccaccggcaagcag

SEQ ID NO: 43068 - RNA, 48 nt, synthetic construct
  misc_feature 1..48: note = Acylamino-acid-releasing enzyme (440-455)
  source 1..48: mol_type = other RNA
ggccaggacagcatcctgtccctccccgggaacgtgggccaccaggac

SEQ ID NO: 43069 - RNA, 45 nt, synthetic construct
  misc_feature 1..45: note = Serine/threonine-protein phosphatase 2A 65 kDa regulatory subunit A alpha isoform (202-216)
  source 1..45: mol_type = other RNA
aagagcgagatcatccccatgttctccaacctggccagcgacgag

SEQ ID NO: 43070 - RNA, 27 nt, synthetic construct
  misc_feature 1..27: note = 60 kDa heat shock protein, mitochondrial (397-405)
  source 1..27: mol_type = other RNA
ctgagcgacggcgtggccgtcctcaag

SEQ ID NO: 43071 - RNA, 42 nt, synthetic construct
  misc_feature 1..42: note = Disintegrin and metalloproteinase domain-containing protein 10 (83-96)
  source 1..42: mol_type = other RNA
agcgacgagttcaaggtggagacctccaacaaggtcctggac

SEQ ID NO: 43072 - RNA, 45 nt, synthetic construct
  misc_feature 1..45: note = Peptidyl-prolyl cis-trans isomerase A (77-91)
  source 1..45: mol_type = other RNA
agcatctacggcgagaagttcgaggacgagaacttcatcctgaag

SEQ ID NO: 43073 - RNA, 48 nt, synthetic construct
  misc_feature 1..48: note = Serine/threonine-protein phosphatase 2A 65 kDa regulatory subunit A alpha isoform (201-216)
  source 1..48: mol_type = other RNA
gtgaagagcgagatcatccccatgttctccaacctggccagcgacgag

SEQ ID NO: 43074 - RNA, 51 nt, synthetic construct
  misc_feature 1..51: note = Serine/threonine-protein phosphatase 2A 65 kDa regulatory subunit A alpha isoform (201-217)
  source 1..51: mol_type = other RNA
gtgaagagcgagatcatccccatgttctccaacctggccagcgacgagcag

SEQ ID NO: 43075 - RNA, 42 nt, synthetic construct
  misc_feature 1..42: note = Solute carrier family 2, facilitated glucose transporter member 1 (140-153)
  source 1..42: mol_type = other RNA
gtgcccatgtacgtcggcgaggtgagcccgaccgccctgcgc

SEQ ID NO: 43076 - RNA, 45 nt, synthetic construct
  misc_feature 1..45: note = Glyceraldehyde-3-phosphate dehydrogenase (116-130)
  source 1..45: mol_type = other RNA
gccaagcgcgtgatcatcagcgccccctccgcggacgccccgatg

SEQ ID NO: 43077 - RNA, 45 nt, synthetic construct
  misc_feature 1..45: note = Glyceraldehyde-3-phosphate dehydrogenase (202-216)
  source 1..45: mol_type = other RNA
gccctgcagaacatcatccccgccagcaccggcgcggccaaggcc

SEQ ID NO: 43078 - RNA, 45 nt, synthetic construct
  misc_feature 1..45: note = 60 kDa heat shock protein, mitochondrial (35-49)
  source 1..45: mol_type = other RNA
gacgcccgcgccctgatgctccagggcgtggacctgctggcggac

SEQ ID NO: 43079 - RNA, 45 nt, synthetic construct
  misc_feature 1..45: note = Tubulin beta-4B chain (22-36)
  source 1..45: mol_type = other RNA
gaggtgatcagcgacgagcacggcatcgaccccaccgggacctac

SEQ ID NO: 43080 - RNA, 45 nt, synthetic construct
  misc_feature 1..45: note = Glyceraldehyde-3-phosphate dehydrogenase (269-283)
  source 1..45: mol_type = other RNA
atcagctggtacgacaacgagttcggctactccaaccgcgtggtc

SEQ ID NO: 43081 - RNA, 24 nt, synthetic construct
  misc_feature 1..24: note = RNA cytidine acetyltransferase (478-485)
  source 1..24: mol_type = other RNA
gacgcccccgcccaccacctgttc

SEQ ID NO: 43082 - RNA, 87 nt, synthetic construct
  misc_feature 1..87: note = Alpha-synuclein (103-131)
  source 1..87: mol_type = other RNA
aacgaggagggcgccccccaggaggggatcctggaggacatgccggtggaccccgacaacgaggcctacgagatgcccagcgaggag

SEQ ID NO: 43083 - RNA, 15 nt, synthetic construct
  misc_feature 1..15: note = Carbonic anhydrase 2 (85-89)
  source 1..15: mol_type = other RNA
gacggcacctaccgc

SEQ ID NO: 43084 - RNA, 15 nt, synthetic construct
  misc_feature 1..15: note = Carbonic anhydrase 2 (155-159)
  source 1..15: mol_type = other RNA
ggcctgcagaaggtg

SEQ ID NO: 43085 - RNA, 15 nt, synthetic construct
  misc_feature 1..15: note = Carbonic anhydrase 2 (22-26)
  source 1..15: mol_type = other RNA
atcgccaagggcgag

SEQ ID NO: 43086 - RNA, 15 nt, synthetic construct
  misc_feature 1..15: note = Carbonic anhydrase 2 (253-257)
  source 1..15: mol_type = other RNA
cgccagatcaaggcc

SEQ ID NO: 43087 - RNA, 15 nt, synthetic construct
  misc_feature 1..15: note = Carbonic anhydrase 2 (218-222)
  source 1..15: mol_type = other RNA
agctccgagcaggtg

SEQ ID NO: 43088 - RNA, 45 nt, synthetic construct
  misc_feature 1..45: note = Complement factor H (1110-1124)
  source 1..45: mol_type = other RNA
ggccccccgccccccatcgacaacggggacatcaccagcttcccc

SEQ ID NO: 43089 - RNA, 33 nt, synthetic construct
  misc_feature 1..33: note = Complement factor H (1112-1122)
  source 1..33: mol_type = other RNA
cccccgcccatcgacaacggcgacatcaccagc

SEQ ID NO: 43090 - RNA, 30 nt, synthetic construct
  misc_feature 1..30: note = Glutathione peroxidase 1 (7-16)
  source 1..30: mol_type = other RNA
gccgccgcggccgccgcccagagcgtgtac

SEQ ID NO: 43091 - RNA, 36 nt, synthetic construct
  misc_feature 1..36: note = RalBP1-associated Eps domain-containing protein 2 (13-24)
  source 1..36: mol_type = other RNA
gccgccgcggccgccggcgggggctgcgggagcggc

SEQ ID NO: 43092 - RNA, 75 nt, synthetic construct
  misc_feature 1..75: note = Pre-mRNA-processing factor 40 homolog A (251-275)
  source 1..75: mol_type = other RNA
gccgccgcggccgtggtcgccgccgccgcggccgccgccgcggccgccgccgccgcgaacgccaacgccagcacc

SEQ ID NO: 43093 - RNA, 33 nt, synthetic construct
  misc_feature 1..33: note = Cytochrome b-c1 complex subunit 9 (2-12)
  source 1..33: mol_type = other RNA
gccgccgcgaccctgaccagcaagctctactcc

SEQ ID NO: 43094 - RNA, 186 nt, synthetic construct
  misc_feature 1..186: note = Cytochrome b-c1 complex subunit 9 (2-63)
  source 1..186: mol_type = other RNA
gccgccgcgaccctgaccagcaagctctactccctgctgttccgccggacgagcaccttcgccctcaccatcatcgtgggcgtcatgttcttcgagcgcgccttcgaccagggggccgacgccatctacgaccacatcaacgagggcaagctgtggaagcacatcaagcacaagtacgagaacaag

SEQ ID NO: 43095 - RNA, 27 nt, synthetic construct
  misc_feature 1..27: note = Semaphorin-3A (191-199)
  source 1..27: mol_type = other RNA
gccgccgacttcatgggccgcgacttc

SEQ ID NO: 43096 - RNA, 27 nt, synthetic construct
  misc_feature 1..27: note = 60S ribosomal protein L28 (54-62)
  source 1..27: mol_type = other RNA
gccgccgacggcaagggggtggtcgtg

SEQ ID NO: 43097 - RNA, 27 nt, synthetic construct
  misc_feature 1..27: note = Glia-derived nexin (209-217)
  source 1..27: mol_type = other RNA
gccgccgacggcaagagctaccaggtg

SEQ ID NO: 43098 - RNA, 27 nt, synthetic construct
  misc_feature 1..27: note = AF4/FMR2 family member 4 (993-1001)
  source 1..27: mol_type = other RNA
gccgccgacaagcgcctgaccgtgctc

SEQ ID NO: 43099 - RNA, 27 nt, synthetic construct
  misc_feature 1..27: note = Enhancer of mRNA-decapping protein 4 (854-862)
  source 1..27: mol_type = other RNA
gccgccgacctgaacctcgtgctgtac

SEQ ID NO: 43100 - RNA, 42 nt, synthetic construct
  misc_feature 1..42: note = Core histone macro-H2A.2 (57-70)
  source 1..42: mol_type = other RNA
gccgccgagatcctggagctcgcgggcaacgccgcccgcgac

SEQ ID NO: 43101 - RNA, 45 nt, synthetic construct
  misc_feature 1..45: note = Melanotransferrin (591-605)
  source 1..45: mol_type = other RNA
gccgccgagctgcgcagcgaggactacgagctcctgtgccccaac

SEQ ID NO: 43102 - RNA, 30 nt, synthetic construct
  misc_feature 1..30: note = Cholinesterase (211-220)
  source 1..30: mol_type = other RNA
gccgccttcggcgggaaccccaagagcgtg

SEQ ID NO: 43103 - RNA, 27 nt, synthetic construct
  misc_feature 1..27: note = Phospholipid transfer protein (155-163)
  source 1..27: mol_type = other RNA
gccgccttcggcgggaccttcaagaag

SEQ ID NO: 43104 - RNA, 27 nt, synthetic construct
  misc_feature 1..27: note = Bax inhibitor 1 (88-96)
  source 1..27: mol_type = other RNA
gccgccggcgcgtacgtgcacatggtc

SEQ ID NO: 43105 - RNA, 39 nt, synthetic construct
  misc_feature 1..39: note = Ran-binding protein 9 (182-194)
  source 1..39: mol_type = other RNA
gccgccggccccgggccggcgggcggggcccccaccccc

SEQ ID NO: 43106 - RNA, 45 nt, synthetic construct
  misc_feature 1..45: note = SKI family transcriptional corepressor 2 (519-533)
  source 1..45: mol_type = other RNA
gccgccggcagcgcggaggccgcccccccgcccgggcagcccccc

SEQ ID NO: 43107 - RNA, 42 nt, synthetic construct
  misc_feature 1..42: note = Fatty acid synthase (859-872)
  source 1..42: mol_type = other RNA
gccgccatctacaacatcgacaccagctccgagagccccgac

SEQ ID NO: 43108 - RNA, 45 nt, synthetic construct
  misc_feature 1..45: note = Fatty acid synthase (859-873)
  source 1..45: mol_type = other RNA
gccgccatctacaacatcgacaccagctccgagagccccgaccac

SEQ ID NO: 43109 - RNA, 48 nt, synthetic construct
  misc_feature 1..48: note = Fatty acid synthase (859-874)
  source 1..48: mol_type = other RNA
gccgccatctacaacatcgacaccagctccgagagccccgaccactac

SEQ ID NO: 43110 - RNA, 24 nt, synthetic construct
  misc_feature 1..24: note = Spectrin beta chain, non-erythrocytic 4 (2141-2148)
  source 1..24: mol_type = other RNA
gccgccaaggcggcccccctgctc

SEQ ID NO: 43111 - RNA, 45 nt, synthetic construct
  misc_feature 1..45: note = Talin-1 (859-873)
  source 1..45: mol_type = other RNA
gccgccaagatcctggcggacgccaccgccaagatggtggaggcc

SEQ ID NO: 43112 - RNA, 36 nt, synthetic construct
  misc_feature 1..36: note = Prohibitin (2-13)
  source 1..36: mol_type = other RNA
gccgccaaggtgttcgagagcatcggcaagttcggg

SEQ ID NO: 43113 - RNA, 42 nt, synthetic construct
  misc_feature 1..42: note = Prohibitin (2-15)
  source 1..42: mol_type = other RNA
gccgccaaggtgttcgagagcatcggcaagttcgggctggcg

SEQ ID NO: 43114 - RNA, 45 nt, synthetic construct
  misc_feature 1..45: note = Beta-secretase 2 (74-88)
  source 1..45: mol_type = other RNA
gccgccaacttcctggcgatggtggacaacctccagggcgacagc

SEQ ID NO: 43115 - RNA, 27 nt, synthetic construct
  misc_feature 1..27: note = Rho guanine nucleotide exchange factor 2 (516-524)
  source 1..27: mol_type = other RNA
gccgcccccccggagatgtacgaggtg

SEQ ID NO: 43116 - RNA, 27 nt, synthetic construct
  misc_feature 1..27: note = Collagen alpha-1(VI) chain (3-11)
  source 1..27: mol_type = other RNA
gccgcccgcgcgctgctccccctgctg

SEQ ID NO: 43117 - RNA, 27 nt, synthetic construct
  misc_feature 1..27: note = U2 small nuclear ribonucleoprotein B'' (202-210)
  source 1..27: mol_type = other RNA
gccgcccgcgacgcgctgcagggcttc

SEQ ID NO: 43118 - RNA, 39 nt, synthetic construct
  misc_feature 1..39: note = Transport and Golgi organization protein 6 homolog (2-14)
  source 1..39: mol_type = other RNA
gccgcccgccaggcggtgggcagcggggcccaggagacc

SEQ ID NO: 43119 - RNA, 24 nt, synthetic construct
  misc_feature 1..24: note = Protein AATF (31-38)
  source 1..24: mol_type = other RNA
gccgcccgcgtgatcgaccggttc

SEQ ID NO: 43120 - RNA, 48 nt, synthetic construct
  misc_feature 1..48: note = Dachshund homolog 1 (110-125)
  source 1..48: mol_type = other RNA
gccgccagcaacggctccgggggcgggggcgggggcatcagcgcgggc

SEQ ID NO: 43121 - RNA, 57 nt, synthetic construct
  misc_feature 1..57: note = HLA class I histocompatibility antigen, A-23 alpha chain (347-365)
  source 1..57: mol_type = other RNA
gccgccagctccgacagcgcgcagggctccgacgtgagcctgaccgcctgcaaggtc

SEQ ID NO: 43122 - RNA, 27 nt, synthetic construct
  misc_feature 1..27: note = Talin-1 (2432-2440)
  source 1..27: mol_type = other RNA
gccgccagcaccgcgcagctgctcgtg

SEQ ID NO: 43123 - RNA, 27 nt, synthetic construct
  misc_feature 1..27: note = Amyloid-like protein 2 (10-18)
  source 1..27: mol_type = other RNA
gccgccaccggccgcctgctcctgctg

SEQ ID NO: 43124 - RNA, 27 nt, synthetic construct
  misc_feature 1..27: note = Protein BTG1 (17-25)
  source 1..27: mol_type = other RNA
gccgccgtgagcttcatctccaagttc

SEQ ID NO: 43125 - RNA, 27 nt, synthetic construct
  misc_feature 1..27: note = Basement membrane-specific heparan sulfate proteoglycan core protein (1409-1417)
  source 1..27: mol_type = other RNA
gccgcctacggcgggaagctgcgctac

SEQ ID NO: 43126 - RNA, 27 nt, synthetic construct
  misc_feature 1..27: note = Glycogen phosphorylase, muscle form (154-162)
  source 1..27: mol_type = other RNA
gccgcctacggctacgggatccgctac

SEQ ID NO: 43127 - RNA, 30 nt, synthetic construct
  misc_feature 1..30: note = Tyrosine-tRNA ligase, cytoplasmic (339-348)
  source 1..30: mol_type = other RNA
gccgcctaccccgacccgagcaagcagaag

SEQ ID NO: 43128 - RNA, 30 nt, synthetic construct
  misc_feature 1..30: note = SPRY domain-containing SOCS box protein 1 (218-227)
  source 1..30: mol_type = other RNA
gccgacgcccccctgcacagcgtgggctac

SEQ ID NO: 43129 - RNA, 27 nt, synthetic construct
  misc_feature 1..27: note = Ataxin-10 (381-389)
  source 1..27: mol_type = other RNA
gccgacgccagcctgctcaagaaggtg

SEQ ID NO: 43130 - RNA, 39 nt, synthetic construct
  misc_feature 1..39: note = Histidine triad nucleotide-binding protein 1 (2-14)
  source 1..39: mol_type = other RNA
gccgacgagatcgccaaggcgcaggtggcccgccccggc

SEQ ID NO: 43131 - RNA, 27 nt, synthetic construct
  misc_feature 1..27: note = Eukaryotic initiation factor 4A-II (185-193)
  source 1..27: mol_type = other RNA
gccgacgagatgctgagccgcggcttc

SEQ ID NO: 43132 - RNA, 27 nt, synthetic construct
  misc_feature 1..27: note = Cyclin-dependent kinase 4 (83-91)
  source 1..27: mol_type = other RNA
gccgacttcggcctggcccgcatctac

SEQ ID NO: 43133 - RNA, 27 nt, synthetic construct
  misc_feature 1..27: note = Cyclin-dependent kinase 13 (240-248)
  source 1..27: mol_type = other RNA
gccgacttcggcctggcccgcctctac

SEQ ID NO: 43134 - RNA, 21 nt, synthetic construct
  misc_feature 1..21: note = Coatomer subunit gamma-1 (761-767)
  source 1..21: mol_type = other RNA
gccgaccacatccagaaggtg

SEQ ID NO: 43135 - RNA, 21 nt, synthetic construct
  misc_feature 1..21: note = Eukaryotic translation initiation factor 3 subunit H (222-228)
  source 1..21: mol_type = other RNA
gccgacaagcacgagctgctc

SEQ ID NO: 43136 - RNA, 21 nt, synthetic construct
  misc_feature 1..21: note = Dual specificity protein phosphatase 14 (94-100)
  source 1..21: mol_type = other RNA
gccgacaagatccacagcgtg

SEQ ID NO: 43137 - RNA, 21 nt, synthetic construct
  misc_feature 1..21: note = Transformation/transcription domain-associated protein (380-386)
  source 1..21: mol_type = other RNA
gccgacctggtgcaccacgtc

SEQ ID NO: 43138 - RNA, 27 nt, synthetic construct
  misc_feature 1..27: note = Threonine-tRNA ligase, cytoplasmic (147-155)
  source 1..27: mol_type = other RNA
gccgacaacaccgtgatcgccaaggtc

SEQ ID NO: 43139 - RNA, 51 nt, synthetic construct
  misc_feature 1..51: note = H(+)/Cl(-) exchange transporter 7 (526-542)
  source 1..51: mol_type = other RNA
gccgaccccggcaagtacgccctgatgggggcggccgcccagctcggcggg

SEQ ID NO: 43140 - RNA, 27 nt, synthetic construct
  misc_feature 1..27: note = Cyclin-dependent kinase 18 (414-422)
  source 1..27: mol_type = other RNA
gccgaggccgcgctgagccactcctac

SEQ ID NO: 43141 - RNA, 27 nt, synthetic construct
  misc_feature 1..27: note = Actin-binding protein anillin (758-766)
  source 1..27: mol_type = other RNA
gccgaggccgagcgcctgctcctgatc

SEQ ID NO: 43142 - RNA, 36 nt, synthetic construct
  misc_feature 1..36: note = T-box transcription factor TBX2 (61-72)
  source 1..36: mol_type = other RNA
gccgaggccggcctgcacgtgagcgcgctcgggccc

SEQ ID NO: 43143 - RNA, 30 nt, synthetic construct
  misc_feature 1..30: note = Synemin (1056-1065)
  source 1..30: mol_type = other RNA
gccgaggcccccgcggccggcatccgcttc

SEQ ID NO: 43144 - RNA, 30 nt, synthetic construct
  misc_feature 1..30: note = IgGFc-binding protein (407-416)
  source 1..30: mol_type = other RNA
gccgaggccaccaccaacctgggcctcctg

SEQ ID NO: 43145 - RNA, 36 nt, synthetic construct
  misc_feature 1..36: note = Probable methyltransferase TARBP1 (184-195)
  source 1..36: mol_type = other RNA
gccgaggacgccgcggccctggtggccggccgcctc

SEQ ID NO: 43146 - RNA, 27 nt, synthetic construct
  misc_feature 1..27: note = Filamin-B (9-17)
  source 1..27: mol_type = other RNA
gccgaggacgccccctggaagaagatc

SEQ ID NO: 43147 - RNA, 30 nt, synthetic construct
  misc_feature 1..30: note = Cytochrome c oxidase subunit 6B1 (2-11)
  source 1..30: mol_type = other RNA
gccgaggacatggagaccaagatcaagaac

SEQ ID NO: 43148 - RNA, 30 nt, synthetic construct
  misc_feature 1..30: note = Voltage-dependent L-type calcium channel subunit alpha-1C (919-928)
  source 1..30: mol_type = other RNA
gccgaggaccccgtgcagcacaccagcttc

SEQ ID NO: 43149 - RNA, 30 nt, synthetic construct
  misc_feature 1..30: note = F-box/WD repeat-containing protein 8 (326-335)
  source 1..30: mol_type = other RNA
gccgaggacagcgcccgcaccctgctctac

SEQ ID NO: 43150 - RNA, 33 nt, synthetic construct
  misc_feature 1..33: note = ATP-binding cassette sub-family B member 8, mitochondrial (351-361)
  source 1..33: mol_type = other RNA
gccgaggagctgggccgcgggatcgccctcttc

SEQ ID NO: 43151 - RNA, 27 nt, synthetic construct
  misc_feature 1..27: note = Vimentin (287-295)
  source 1..27: mol_type = other RNA
gccgaggagtggtacaagagcaagttc

SEQ ID NO: 43152 - RNA, 63 nt, synthetic construct
  misc_feature 1..63: note = Proliferation-associated protein 2G4 (162-182)
  source 1..63: mol_type = other RNA
gccgagttcgaggtgcacgaggtctacgccgtggacgtgctggtcagctccggcgaggggaag

SEQ ID NO: 43153 - RNA, 36 nt, synthetic construct
  misc_feature 1..36: note = Gamma-secretase C-terminal fragment 59 (563-574)
  source 1..36: mol_type = other RNA
gccgagttccgccacgacagcggctacgaggtgcac

SEQ ID NO: 43154 - RNA, 39 nt, synthetic construct
  misc_feature 1..39: note = Gamma-secretase C-terminal fragment 59 (563-575)
  source 1..39: mol_type = other RNA
gccgagttccgccacgacagcggctacgaggtgcaccac

SEQ ID NO: 43155 - RNA, 42 nt, synthetic construct
  misc_feature 1..42: note = Gamma-secretase C-terminal fragment 59 (563-576)
  source 1..42: mol_type = other RNA
gccgagttccgccacgacagcggctacgaggtgcaccaccag

SEQ ID NO: 43156 - RNA, 45 nt, synthetic construct
  misc_feature 1..45: note = Gamma-secretase C-terminal fragment 59 (563-577)
  source 1..45: mol_type = other RNA
gccgagttccgccacgacagcggctacgaggtgcaccaccagaag

SEQ ID NO: 43157 - RNA, 36 nt, synthetic construct
  misc_feature 1..36: note = Ataxin-10 (295-306)
  source 1..36: mol_type = other RNA
gccgagggcgacatcagcaacgtggccaacgggttc

SEQ ID NO: 43158 - RNA, 21 nt, synthetic construct
  misc_feature 1..21: note = Baculoviral IAP repeat-containing protein 6 (1093-1099)
  source 1..21: mol_type = other RNA
gccgagggcatccacaacttc

SEQ ID NO: 43159 - RNA, 30 nt, synthetic construct
  misc_feature 1..30: note = Zinc finger protein 516 (373-382)
  source 1..30: mol_type = other RNA
gccgagggccccagcgacaccaagcagttc

SEQ ID NO: 43160 - RNA, 33 nt, synthetic construct
  misc_feature 1..33: note = Synemin (327-337)
  source 1..33: mol_type = other RNA
gccgagcacgtggagaacatgcccagcgagttc

SEQ ID NO: 43161 - RNA, 27 nt, synthetic construct
  misc_feature 1..27: note = Intraflagellar transport protein 81 homolog (43-51)
  source 1..27: mol_type = other RNA
gccgagatcgaccccaagcagctggtg

SEQ ID NO: 43162 - RNA, 33 nt, synthetic construct
  misc_feature 1..33: note = Nucleolar pre-ribosomal-associated protein 1 (403-413)
  source 1..33: mol_type = other RNA
gccgagatcatcggcggggagcgcagcgtgttc

SEQ ID NO: 43163 - RNA, 21 nt, synthetic construct
  misc_feature 1..21: note = Poly (ADP-ribose) polymerase 1 (811-817)
  source 1..21: mol_type = other RNA
gccgagatcatccgcaagtac

SEQ ID NO: 43164 - RNA, 36 nt, synthetic construct
  misc_feature 1..36: note = Sorting nexin-18 (397-408)
  source 1..36: mol_type = other RNA
gccgagaaggacgagatggtgggcgccaacttcttc

SEQ ID NO: 43165 - RNA, 36 nt, synthetic construct
  misc_feature 1..36: note = Actin-binding protein anillin (451-462)
  source 1..36: mol_type = other RNA
gccgagaagggcgggaacagcaagtccaagcagctg

SEQ ID NO: 43166 - RNA, 27 nt, synthetic construct
  misc_feature 1..27: note = A-kinase anchor protein 9 (834-842)
  source 1..27: mol_type = other RNA
gccgagaagaacttcgaggtgaactac

SEQ ID NO: 43167 - RNA, 27 nt, synthetic construct
  misc_feature 1..27: note = Ribosomal protein S6 kinase alpha-5 (41-49)
  source 1..27: mol_type = other RNA
gccgagaaggtgggcatcgagaacttc

SEQ ID NO: 43168 - RNA, 24 nt, synthetic construct
  misc_feature 1..24: note = Guanine nucleotide-binding protein G(olf) subunit alpha (78-85)
  source 1..24: mol_type = other RNA
gccgagaaggtgctggccggcaag

SEQ ID NO: 43169 - RNA, 36 nt, synthetic construct
  misc_feature 1..36: note = Myosin-10 (1603-1614)
  source 1..36: mol_type = other RNA
gccgagctggaggacgagcgcaagcagcgggccctc

SEQ ID NO: 43170 - RNA, 30 nt, synthetic construct
  misc_feature 1..30: note = Synemin (111-120)
  source 1..30: mol_type = other RNA
gccgagctgggcgcccagcagcgcgagctc

SEQ ID NO: 43171 - RNA, 27 nt, synthetic construct
  misc_feature 1..27: note = YTH domain-containing family protein 3 (480-488)
  source 1..27: mol_type = other RNA
gccgagatgaagagcgtggtcgactac

SEQ ID NO: 43172 - RNA, 36 nt, synthetic construct
  misc_feature 1..36: note = YTH domain-containing family protein 3 (480-491)
  source 1..36: mol_type = other RNA
gccgagatgaagagcgtggtcgactacaacgcctac

SEQ ID NO: 43173 - RNA, 33 nt, synthetic construct
  misc_feature 1..33: note = Melanoma-associated antigen 4 (134-144)
  source 1..33: mol_type = other RNA
gccgagatgctggagcgcgtgatcaagaactac

SEQ ID NO: 43174 - RNA, 33 nt, synthetic construct
  misc_feature 1..33: note = Melanoma-associated antigen 9 (132-142)
  source 1..33: mol_type = other RNA
gccgagatgctggagagcgtgatcaagaactac

SEQ ID NO: 43175 - RNA, 21 nt, synthetic construct
  misc_feature 1..21: note = Probable ATP-dependent RNA helicase DHX37 (108-114)
  source 1..21: mol_type = other RNA
gccgagatgcgcctgttctac

SEQ ID NO: 43176 - RNA, 33 nt, synthetic construct
  misc_feature 1..33: note = Synemin (1391-1401)
  source 1..33: mol_type = other RNA
gccgagatgaccagcggcgtgtcccgcagcttc

SEQ ID NO: 43177 - RNA, 27 nt, synthetic construct
  misc_feature 1..27: note = Obscurin (5874-5882)
  source 1..27: mol_type = other RNA
gccgagaacaagctgcacgtgagcctc

SEQ ID NO: 43178 - RNA, 27 nt, synthetic construct
  misc_feature 1..27: note = Plexin-B2 (399-407)
  source 1..27: mol_type = other RNA
gccgagaacaaccacaccgtggccttc

SEQ ID NO: 43179 - RNA, 30 nt, synthetic construct
  misc_feature 1..30: note = Heterogeneous nuclear ribonucleoprotein U (399-408)
  source 1..30: mol_type = other RNA
gccgagaaccccggcaagtacaacatcctg

SEQ ID NO: 43180 - RNA, 27 nt, synthetic construct
  misc_feature 1..27: note = Protocadherin gamma-B2 (110-118)
  source 1..27: mol_type = other RNA
gccgagaaccccctgaacatcttctac

SEQ ID NO: 43181 - RNA, 27 nt, synthetic construct
  misc_feature 1..27: note Dolichyl-diphosphooligosaccharide-proteinosyltransferase subunit 2 (312-320)
  source 1..27: mol_type = other RNA
gccgagcccgacaacaagaacgtgtac

SEQ ID NO: 43182 - RNA, 30 nt, synthetic construct
  misc_feature 1..30: note = RING finger protein 112 (134-143)
  source 1..30: mol_type = other RNA
gccgagcccctgctcctggtgcgcatcaac

SEQ ID NO: 43183 - RNA, 33 nt, synthetic construct
  misc_feature 1..33: note = Plectin (1676-1686)
  source 1..33: mol_type = other RNA
gccgagcaggagctggagaagcagcgccagctc

SEQ ID NO: 43184 - RNA, 30 nt, synthetic construct
  misc_feature 1..30: note = Intraflagellar transport protein 81 homolog (40-49)
  source 1..30: mol_type = other RNA
gccgagcaggagaacctgggcaagaagctc

SEQ ID NO: 43185 - RNA, 39 nt, synthetic construct
  misc_feature 1..39: note = Transcription factor SOX-10 (195-207)
  source 1..39: mol_type = other RNA
gccgagcagggcgggaccgccgcgatccaggcccactac

SEQ ID NO: 43186 - RNA, 30 nt, synthetic construct
  misc_feature 1..30: note = Vacuolar protein sorting-associated protein 13D (998-1007)
  source 1..30: mol_type = other RNA
gccgagcagggcgggacccccatccgctac

SEQ ID NO: 43187 - RNA, 27 nt, synthetic construct
  misc_feature 1..27: note = Tetratricopeptide repeat protein 19, mitochondrial (155-163)
  source 1..27: mol_type = other RNA
gccgagcagctgttcaaggccaccatg

SEQ ID NO: 43188 - RNA, 30 nt, synthetic construct
  misc_feature 1..30: note = Vacuolar protein sorting-associated protein 18 homolog (210-219)
  source 1..30: mol_type = other RNA
gccgagcgcggccccgacgggcggagcttc

SEQ ID NO: 43189 - RNA, 27 nt, synthetic construct
  misc_feature 1..27: note = COP9 signalosome complex subunit 7a (56-64)
  source 1..27: mol_type = other RNA
gccgagagcgacttcgcctccaccttc

SEQ ID NO: 43190 - RNA, 27 nt, synthetic construct
  misc_feature 1..27: note = Tumor suppressor candidate 3 (279-287)
  source 1..27: mol_type = other RNA
gccgagagccacatcatcctggtgctc

SEQ ID NO: 43191 - RNA, 27 nt, synthetic construct
  misc_feature 1..27: note = Melanoma-associated antigen 4 (102-110)
  source 1..27: mol_type = other RNA
gccgagagcctgttccgcgaggccctc

SEQ ID NO: 43192 - RNA, 30 nt, synthetic construct
  misc_feature 1..30: note = Peroxisome assembly protein 12 (45-54)
  source 1..30: mol_type = other RNA
gccgagagcaaccccacccactacggcttc

SEQ ID NO: 43193 - RNA, 30 nt, synthetic construct
  misc_feature 1..30: note = Collagen alpha-1(XI) chain (281-290)
  source 1..30: mol_type = other RNA
gccgagagcgtgaccgagggccccaccgtc

SEQ ID NO: 43194 - RNA, 27 nt, synthetic construct
  misc_feature 1..27: note = Procollagen-lysine,2-oxoglutarate 5-dioxygenase 3 (47-55)
  source 1..27: mol_type = other RNA
gccgagaccgagggctacctgcgcttc

SEQ ID NO: 43195 - RNA, 30 nt, synthetic construct
  misc_feature 1..30: note = Procollagen-lysine,2-oxoglutarate 5-dioxygenase 3 (47-56)
  source 1..30: mol_type = other RNA
gccgagaccgagggctacctgcgcttcctc

SEQ ID NO: 43196 - RNA, 27 nt, synthetic construct
  misc_feature 1..27: note = Melanoma-associated antigen 4 (280-288)
  source 1..27: mol_type = other RNA
gccgagaccagctacgtgaaggtcctg

SEQ ID NO: 43197 - RNA, 33 nt, synthetic construct
  misc_feature 1..33: note = Melanoma-associated antigen 1 (272-282)
  source 1..33: mol_type = other RNA
gccgagaccagctacgtgaaggtcctggagtac

SEQ ID NO: 43198 - RNA, 36 nt, synthetic construct
  misc_feature 1..36: note = THO complex subunit 5 homolog (41-52)
  source 1..36: mol_type = other RNA
gccgaggtggacctgcgcgaccccggccgggactac

SEQ ID NO: 43199 - RNA, 33 nt, synthetic construct
  misc_feature 1..33: note = Peptidase M20 domain-containing protein 2 (78-88)
  source 1..33: mol_type = other RNA
gccgaggtgggcgccgcggccgccctgggggtc

SEQ ID NO: 43200 - RNA, 21 nt, synthetic construct
  misc_feature 1..21: note = Probable cation-transporting ATPase 13A2 (443-449)
  source 1..21: mol_type = other RNA
gccttcctgcccctcgtgccg

SEQ ID NO: 43201 - RNA, 93 nt, synthetic construct
  misc_feature 1..93: note = Heat shock protein HSP 90-beta (38-68)
  source 1..93: mol_type = other RNA
gccttcatggaggccctgcaggcgggcgccgacatcagcatgatcgggcagttcggcgtggggttctactccgcctacctcgtcgccgagaag

SEQ ID NO: 43202 - RNA, 33 nt, synthetic construct
  misc_feature 1..33: note = Integrin alpha-7 (107-117)
  source 1..33: mol_type = other RNA
gccttcagccccgactcccactacctgctcttc

SEQ ID NO: 43203 - RNA, 21 nt, synthetic construct
  misc_feature 1..21: note = Clustered mitochondria protein homolog (332-338)
  source 1..21: mol_type = other RNA
gccttcgtggagcaccgctac

SEQ ID NO: 43204 - RNA, 27 nt, synthetic construct
  misc_feature 1..27: note = DnaJ homolog subfamily C member 3 (224-232)
  source 1..27: mol_type = other RNA
gccttctacaagatcagcaccctgtac

SEQ ID NO: 43205 - RNA, 33 nt, synthetic construct
  misc_feature 1..33: note = SKI family transcriptional corepressor 2 (437-447)
  source 1..33: mol_type = other RNA
gccggcgccgggggcgcgggggccgcccccaag

SEQ ID NO: 43206 - RNA, 27 nt, synthetic construct
  misc_feature 1..27: note = Actin, gamma-enteric smooth muscle (23-31)
  source 1..27: mol_type = other RNA
gccggcgacgacgccccccgcgcggtg

SEQ ID NO: 43207 - RNA, 48 nt, synthetic construct
  misc_feature 1..48: note = Tripartite motif-containing protein 67 (85-100)
  source 1..48: mol_type = other RNA
gccggcgggctgggcgggggcgccgggggcggcggggaccacgcggac

SEQ ID NO: 43208 - RNA, 24 nt, synthetic construct
  misc_feature 1..24: note = Cytochrome c oxidase subunit 6C (68-75)
  source 1..24: mol_type = other RNA
gccggcatcttccagagcgtgaag

SEQ ID NO: 43209 - RNA, 69 nt, synthetic construct
  misc_feature 1..69: note = Histone-lysine N-methyltransferase EHMT1 (702-724)
  source 1..69: mol_type = other RNA
gccggcctggggcgccccaccccgggcctcagccaggggcccggcaaggagaccctggagtccgccctg

SEQ ID NO: 43210 - RNA, 78 nt, synthetic construct
  misc_feature 1..78: note = Trifunctional enzyme subunit beta, mitochondrial (344-369)
  source 1..78: mol_type = other RNA
gccggcctgaccatgaacgacatcgacgccttcgagttccacgaggcgttcagcgggcagatcctcgccaacttcaag

SEQ ID NO: 43211 - RNA, 36 nt, synthetic construct
  misc_feature 1..36: note = Collagen alpha-2(IV) chain (15-26)
  source 1..36: mol_type = other RNA
gccggccccccggggatcaccggcttccccgggttc

SEQ ID NO: 43212 - RNA, 30 nt, synthetic construct
  misc_feature 1..30: note = HLA class I histocompatibility antigen, B-8 alpha chain (89-98)
  source 1..30: mol_type = other RNA
gccggcagccacaccctgcagtccatgtac

SEQ ID NO: 43213 - RNA, 24 nt, synthetic construct
  misc_feature 1..24: note = Actin-related protein 2/3 complex subunit 5 (75-82)
  source 1..24: mol_type = other RNA
gccggcagcatcgtgctgaaggtc

SEQ ID NO: 43214 - RNA, 27 nt, synthetic construct
  misc_feature 1..27: note = Glucosylceramidase (22-30)
  source 1..27: mol_type = other RNA
gccggcagcctgaccgggctcctgctg

SEQ ID NO: 43215 - RNA, 39 nt, synthetic construct
  misc_feature 1..39: note = CD44 antigen (31-43)
  source 1..39: mol_type = other RNA
gccggcgtgttccacgtcgagaagaacgggcgctacagc

SEQ ID NO: 43216 - RNA, 36 nt, synthetic construct
  misc_feature 1..36: note = Cytochrome c oxidase subunit 5B, mitochondrial (118-129)
  source 1..36: mol_type = other RNA
gcccactacaagctggtgccccagcagctcgcccac

SEQ ID NO: 43217 - RNA, 27 nt, synthetic construct
  misc_feature 1..27: note = H(+)/Cl(-) exchange transporter 5 (533-541)
  source 1..27: mol_type = other RNA
gccatcgccggccgcctgctcggggtg

SEQ ID NO: 43218 - RNA, 27 nt, synthetic construct
  misc_feature 1..27: note = HEAT repeat-containing protein 2 (474-482)
  source 1..27: mol_type = other RNA
gccatcgccaccgagctggcgcaggcc

SEQ ID NO: 43219 - RNA, 27 nt, synthetic construct
  misc_feature 1..27: note = Tetratricopeptide repeat protein 28 (1994-2002)
  source 1..27: mol_type = other RNA
gccatcgacgagaaggtgcaggccgtc

SEQ ID NO: 43220 - RNA, 27 nt, synthetic construct
  misc_feature 1..27: note = Prolow-density lipoprotein receptor-related protein 1 (1748-1756)
  source 1..27: mol_type = other RNA
gccatcgacttccccgagagcaagctg

SEQ ID NO: 43221 - RNA, 24 nt, synthetic construct
  misc_feature 1..24: note = L-dopachrome tautomerase (63-70)
  source 1..24: mol_type = other RNA
gccatcgacctgcccgtgagcgtc

SEQ ID NO: 43222 - RNA, 24 nt, synthetic construct
  misc_feature 1..24: note = CCR4-NOT transcription complex subunit 1 (94-101)
  source 1..24: mol_type = other RNA
gccatcgacaaccccctgcactac

SEQ ID NO: 43223 - RNA, 27 nt, synthetic construct
  misc_feature 1..27: note = Leucine-rich repeat-containing protein 1 (516-524)
  source 1..27: mol_type = other RNA
gccatcgaccgcgtgaccaccagcgtc

SEQ ID NO: 43224 - RNA, 42 nt, synthetic construct
  misc_feature 1..42: note = Clathrin heavy chain 1 (1124-1137)
  source 1..42: mol_type = other RNA
gccatcgacagctacatcaaggccgacgacccctccagctac

SEQ ID NO: 43225 - RNA, 45 nt, synthetic construct
  misc_feature 1..45: note = Clathrin heavy chain 1 (1124-1138)
  source 1..45: mol_type = other RNA
gccatcgacagctacatcaaggccgacgacccctccagctacatg

SEQ ID NO: 43226 - RNA, 24 nt, synthetic construct
  misc_feature 1..24: note = Eukaryotic translation initiation factor 4 gamma 1 (748-755)
  source 1..24: mol_type = other RNA
gccatcgacaccgaggagcgcctg

SEQ ID NO: 43227 - RNA, 27 nt, synthetic construct
  misc_feature 1..27: note = Probable phospholipid-transporting ATPase VB (1005-1013)
  source 1..27: mol_type = other RNA
gccatcttccagggcaagctggagaag

SEQ ID NO: 43228 - RNA, 30 nt, synthetic construct
  misc_feature 1..30: note = Tubulin beta-2A chain (315-324)
  source 1..30: mol_type = other RNA
gccatcttccgcggccggatgagcatgaag

SEQ ID NO: 43229 - RNA, 66 nt, synthetic construct
  misc_feature 1..66: note = Aldose reductase (156-177)
  source 1..66: mol_type = other RNA
gccatcggcatcagcaacttcaaccacctgcaggtggagatgatcctcaacaagcccgggctgaag

SEQ ID NO: 43230 - RNA, 27 nt, synthetic construct
  misc_feature 1..27: note = General transcription factor 3C polypeptide 1 (642-650)
  source 1..27: mol_type = other RNA
gccatcatcgccaccggctgcttcggg

SEQ ID NO: 43231 - RNA, 27 nt, synthetic construct
  misc_feature 1..27: note = Receptor-type tyrosine-protein phosphatase zeta (195-203)
  source 1..27: mol_type = other RNA
gccatcatcgacggcgtggagagcgtc

SEQ ID NO: 43232 - RNA, 27 nt, synthetic construct
  misc_feature 1..27: note = Protein TANC1 (414-422)
  source 1..27: mol_type = other RNA
gccatcatcagcaagctggtggccctc

SEQ ID NO: 43233 - RNA, 27 nt, synthetic construct
  misc_feature 1..27: note = Putative endoplasmin-like protein (265-273)
  source 1..27: mol_type = other RNA
gccatcaaggacaagatcgagaaggcc

SEQ ID NO: 43234 - RNA, 27 nt, synthetic construct
  misc_feature 1..27: note = Kinesin-like protein KIF2A (638-646)
  source 1..27: mol_type = other RNA
gccatcctggagcagaagatcgacatc

SEQ ID NO: 43235 - RNA, 27 nt, synthetic construct
  misc_feature 1..27: note = CLIP-associating protein 2 (795-803)
  source 1..27: mol_type = other RNA
gccatcctgaagtacatcgagaccctc

SEQ ID NO: 43236 - RNA, 27 nt, synthetic construct
  misc_feature 1..27: note = Heat shock 70 kDa protein 4 (381-389)
  source 1..27: mol_type = other RNA
gccatcctgagccccgccttcaaggtg

SEQ ID NO: 43237 - RNA, 27 nt, synthetic construct
  misc_feature 1..27: note = Arginyl-tRNA-protein transferase 1 (382-390)
  source 1..27: mol_type = other RNA
gccatcatgccctacggcgtgtacaag

SEQ ID NO: 43238 - RNA, 27 nt, synthetic construct
  misc_feature 1..27: note = Probable ATP-dependent RNA helicase DDX17 (464-472)
  source 1..27: mol_type = other RNA
gccatcaaccccaagctgatgcagctc

SEQ ID NO: 43239 - RNA, 30 nt, synthetic construct
  misc_feature 1..30: note = Polypyrimidine tract-binding protein 1 (346-355)
  source 1..30: mol_type = other RNA
gccatccccggcctggccggggcgggcaac

SEQ ID NO: 43240 - RNA, 33 nt, synthetic construct
  misc_feature 1..33: note = Moesin (19-29)
  source 1..33: mol_type = other RNA
gccatccagcccaacaccaccggcaagcagctg

SEQ ID NO: 43241 - RNA, 39 nt, synthetic construct
  misc_feature 1..39: note = Moesin (19-31)
  source 1..39: mol_type = other RNA
gccatccagcccaacaccaccggcaagcagctgttcgac

SEQ ID NO: 43242 - RNA, 27 nt, synthetic construct
  misc_feature 1..27: note = EH domain-containing protein 2 (17-25)
  source 1..27: mol_type = other RNA
gccatccgcaccgtgaccagcgccctg

SEQ ID NO: 43243 - RNA, 30 nt, synthetic construct
  misc_feature 1..30: note = DNA-dependent protein kinase catalytic subunit (460-469)
  source 1..30: mol_type = other RNA
gccatcgtgaaggtcttcctggccctcgcg

SEQ ID NO: 43244 - RNA, 36 nt, synthetic construct
  misc_feature 1..36: note = Solute carrier family 23 member 2 (58-69)
  source 1..36: mol_type = other RNA
gccatctacaccaccgagaacggcatcgccgagaag

SEQ ID NO: 43245 - RNA, 24 nt, synthetic construct
  misc_feature 1..24: note = Nuclear factor of activated T-cells 5 (154-161)
  source 1..24: mol_type = other RNA
gccaaggccccccactacgtgctg

SEQ ID NO: 43246 - RNA, 96 nt, synthetic construct
  misc_feature 1..96: note = ATP synthase subunit epsilon, mitochondrial (20-51)
  source 1..96: mol_type = other RNA
gccaaggccgtgcgcgacgcgctgaagaccgagttcaaggccaacgccgagaagaccagcggctccaacgtcaagatcgtgaaggtgaagaaggag

SEQ ID NO: 43247 - RNA, 42 nt, synthetic construct
  misc_feature 1..42: note = Alpha-protein kinase 2 (1992-2005)
  source 1..42: mol_type = other RNA
gccaagatctacgccgcggaggcccagcccctggagggcttc

SEQ ID NO: 43248 - RNA, 27 nt, synthetic construct
  misc_feature 1..27: note = Choline-phosphate cytidylyltransferase A (99-107)
  source 1..27: mol_type = other RNA
gccaagaacctgttccccaacacctac

SEQ ID NO: 43249 - RNA, 27 nt, synthetic construct
  misc_feature 1..27: note = Putative hexokinase HKDC1 (389-397)
  source 1..27: mol_type = other RNA
gccctggccgcgatcctcacccgcctg

SEQ ID NO: 43250 - RNA, 39 nt, synthetic construct
  misc_feature 1..39: note = AT-rich interactive domain-containing protein 1B (2130-2142)
  source 1..39: mol_type = other RNA
gccctggccgcgcgcgccatcgccgtgcagaagggcagc

SEQ ID NO: 43251 - RNA, 27 nt, synthetic construct
  misc_feature 1..27: note = Lamin-B receptor (330-338)
  source 1..27: mol_type = other RNA
gccctggccgcgaccgtgttctgcgtc

SEQ ID NO: 43252 - RNA, 42 nt, synthetic construct
  misc_feature 1..42: note = Chondroitin sulfate proteoglycan 4 (1294-1307)
  source 1..42: mol_type = other RNA
gccctggccgacgagcccccgagcctcgaccccgtgcagtcc

SEQ ID NO: 43253 - RNA, 33 nt, synthetic construct
  misc_feature 1..33: note = Metastasis-associated protein MTA1 (57-67)
  source 1..33: mol_type = other RNA
gccctggccgacaagcacgcgaccctcagcgtg

SEQ ID NO: 43254 - RNA, 33 nt, synthetic construct
  misc_feature 1..33: note = Probable ATP-dependent RNA helicase DDX27 (69-79)
  source 1..33: mol_type = other RNA
gccctggccgacgtgatgagccagctcaagaag

SEQ ID NO: 43255 - RNA, 27 nt, synthetic construct
  misc_feature 1..27: note = Seizure 6-like protein 2 (50-58)
  source 1..27: mol_type = other RNA
gccctggccgagctcctgcacggcgcg

SEQ ID NO: 43256 - RNA, 27 nt, synthetic construct
  misc_feature 1..27: note = Helicase SKI2W (784-792)
  source 1..27: mol_type = other RNA
gccctggccgagctcaccaagcgcctg

SEQ ID NO: 43257 - RNA, 30 nt, synthetic construct
  misc_feature 1..30: note = Chloride channel protein 2 (506-515)
  source 1..30: mol_type = other RNA
gccctggccggcgcggtgacccacaccgtc

SEQ ID NO: 43258 - RNA, 27 nt, synthetic construct
  misc_feature 1..27: note = RNA 3'-terminal phosphate cyclase (317-325)
  source 1..27: mol_type = other RNA
gccctggccaacggcgtgagccgcatc

SEQ ID NO: 43259 - RNA, 27 nt, synthetic construct
  misc_feature 1..27: note = La-related protein 1 (672-680)
  source 1..27: mol_type = other RNA
gccctggccaacaagctcttcggcgcg

SEQ ID NO: 43260 - RNA, 27 nt, synthetic construct
  misc_feature 1..27: note = Beclin-1 (316-324)
  source 1..27: mol_type = other RNA
gccctggccaacaagatgggcctcaag

SEQ ID NO: 43261 - RNA, 30 nt, synthetic construct
  misc_feature 1..30: note = Nicastrin (550-559)
  source 1..30: mol_type = other RNA
gccctggccaacctcaccggcaccgtggtc

SEQ ID NO: 43262 - RNA, 27 nt, synthetic construct
  misc_feature 1..27: note = Poly(rC)-binding protein 4 (256-264)
  source 1..27: mol_type = other RNA
gccctggcccagtacctcatcaccgcg

SEQ ID NO: 43263 - RNA, 27 nt, synthetic construct
  misc_feature 1..27: note = Oxidation resistance protein 1 (776-784)
  source 1..27: mol_type = other RNA
gccctggccagcgagcccctcaaggtg

SEQ ID NO: 43264 - RNA, 27 nt, synthetic construct
  misc_feature 1..27: note = Kinesin light chain 4 (108-116)
  source 1..27: mol_type = other RNA
gccctggccagccacctctccaccgtg

SEQ ID NO: 43265 - RNA, 27 nt, synthetic construct
  misc_feature 1..27: note = E3 ubiquitin-protein ligase TRIM33 (830-838)
  source 1..27: mol_type = other RNA
gccctggccagcctcgagaaccacgtg

SEQ ID NO: 43266 - RNA, 30 nt, synthetic construct
  misc_feature 1..30: note = Ataxin-10 (300-309)
  source 1..30: mol_type = other RNA
gccctggccaccatccgcctcctggacgtg

SEQ ID NO: 43267 - RNA, 27 nt, synthetic construct
  misc_feature 1..27: note = Catenin alpha-1 (336-344)
  source 1..27: mol_type = other RNA
gccctgtgcccccaggtgatcaacgcc

SEQ ID NO: 43268 - RNA, 27 nt, synthetic construct
  misc_feature 1..27: note = Pre-mRNA-processing factor 40 homolog B (616-624)
  source 1..27: mol_type = other RNA
gccctggacgccggcaacatcaagctc

SEQ ID NO: 43269 - RNA, 27 nt, synthetic construct
  misc_feature 1..27: note = Coiled-coil domain-containing protein 14 (192-200)
  source 1..27: mol_type = other RNA
gccctggacgccaacatcgcgcgcctc

SEQ ID NO: 43270 - RNA, 27 nt, synthetic construct
  misc_feature 1..27: note = Hyccin (259-267)
  source 1..27: mol_type = other RNA
gccctggacgacatcatctaccgcgcc

SEQ ID NO: 43271 - RNA, 27 nt, synthetic construct
  misc_feature 1..27: note = Protein transport protein Sec16A (815-823)
  source 1..27: mol_type = other RNA
gccctggacttcaccctcagccgcacc

SEQ ID NO: 43272 - RNA, 27 nt, synthetic construct
  misc_feature 1..27: note = Rho GTPase-activating protein 5 (624-632)
  source 1..27: mol_type = other RNA
gccctggacggcaagatctacgagctc

SEQ ID NO: 43273 - RNA, 24 nt, synthetic construct
  misc_feature 1..24: note = Endoplasmin (90-97)
  source 1..24: mol_type = other RNA
gccctggacaagatccgcctcatc

SEQ ID NO: 43274 - RNA, 21 nt, synthetic construct
  misc_feature 1..21: note = Heat shock protein HSP 90-beta (1-7)
  source 1..21: mol_type = other RNA
gccctggacaagatccgctac

SEQ ID NO: 43275 - RNA, 30 nt, synthetic construct
  misc_feature 1..30: note = Puromycin-sensitive aminopeptidase-like protein (412-421)
  source 1..30: mol_type = other RNA
gccctggacaacagccaccccatcgaggtg

SEQ ID NO: 43276 - RNA, 33 nt, synthetic construct
  misc_feature 1..33: note = Ubiquitin-like modifier-activating enzyme 1 (574-584)
  source 1..33: mol_type = other RNA
gccctggacaacgtggacgcccgcatgtacatg

SEQ ID NO: 43277 - RNA, 27 nt, synthetic construct
  misc_feature 1..27: note = Receptor-type tyrosine-protein phosphatase gamma (213-221)
  source 1..27: mol_type = other RNA
gccctggaccccatcatccacggcctc

SEQ ID NO: 43278 - RNA, 27 nt, synthetic construct
  misc_feature 1..27: note = Chromobox protein homolog 8 (299-307)
  source 1..27: mol_type = other RNA
gccctggaccccaacggcacccgcgtg

SEQ ID NO: 43279 - RNA, 27 nt, synthetic construct
  misc_feature 1..27: note = Microtubule-associated protein 1A (1498-1506)
  source 1..27: mol_type = other RNA
gccctggaccagaaggtgcgcagcgtc

SEQ ID NO: 43280 - RNA, 27 nt, synthetic construct
  misc_feature 1..27: note = Cathepsin F (223-231)
  source 1..27: mol_type = other RNA
gccctggaccgcggcaccgcccagtac

SEQ ID NO: 43281 - RNA, 27 nt, synthetic construct
  misc_feature 1..27: note = Probable helicase with zinc finger domain (1495-1503)
  source 1..27: mol_type = other RNA
gccctggaccgcatccacggcagcgtg

SEQ ID NO: 43282 - RNA, 27 nt, synthetic construct
  misc_feature 1..27: note = Integrin beta-8 (291-299)
  source 1..27: mol_type = other RNA
gccctggacagcaagctcgccggcatc

SEQ ID NO: 43283 - RNA, 27 nt, synthetic construct
  misc_feature 1..27: note = C-type lectin domain family 11 member A (131-139)
  source 1..27: mol_type = other RNA
gccctggacacccgcgtggtcgagctc

SEQ ID NO: 43284 - RNA, 27 nt, synthetic construct
  misc_feature 1..27: note = Keratin, type I cytoskeletal 27 (352-360)
  source 1..27: mol_type = other RNA
gccctggaggagcagctccaccaggtg

SEQ ID NO: 43285 - RNA, 27 nt, synthetic construct
  misc_feature 1..27: note = Serine-protein kinase ATM (1512-1520)
  source 1..27: mol_type = other RNA
gccctggagaaccacctccacgtgatc

SEQ ID NO: 43286 - RNA, 27 nt, synthetic construct
  misc_feature 1..27: note = Tetratricopeptide repeat protein 28 (936-944)
  source 1..27: mol_type = other RNA
gccctggagcagcacatcgccagcgtg

SEQ ID NO: 43287 - RNA, 27 nt, synthetic construct
  misc_feature 1..27: note = DNA-dependent protein kinase catalytic subunit (315-323)
  source 1..27: mol_type = other RNA
gccctggagagcttcctcaagcaggtg

SEQ ID NO: 43288 - RNA, 27 nt, synthetic construct
  misc_feature 1..27: note = Uridine phosphorylase 1 (48-56)
  source 1..27: mol_type = other RNA
gccctgttcggcgacgtgaagttcgtc

SEQ ID NO: 43289 - RNA, 27 nt, synthetic construct
  misc_feature 1..27: note = Ankyrin repeat and SAM domain-containing protein 1A (255-263)
  source 1..27: mol_type = other RNA
gccctgttcggcaagaccgacgtggtc

SEQ ID NO: 43290 - RNA, 33 nt, synthetic construct
  misc_feature 1..33: note = Eukaryotic translation initiation factor 2-alpha kinase 4 (1102-1112)
  source 1..33: mol_type = other RNA
gccctgttcatggaccacagcggcatgctcgtg

SEQ ID NO: 43291 - RNA, 27 nt, synthetic construct
  misc_feature 1..27: note = Protein transport protein Sec61 subunit alpha isoform 2 (88-96)
  source 1..27: mol_type = other RNA
gccctgttcaacggcgcccagaagctc

SEQ ID NO: 43292 - RNA, 30 nt, synthetic construct
  misc_feature 1..30: note = Transforming growth factor-beta-induced protein ig-h3 (2-11)
  source 1..30: mol_type = other RNA
gccctgttcgtgcgcctcctggccctggcg

SEQ ID NO: 43293 - RNA, 24 nt, synthetic construct
  misc_feature 1..24: note = Jerky protein homolog (486-493)
  source 1..24: mol_type = other RNA
gccctgggcgccgtggtcaaggtg

SEQ ID NO: 43294 - RNA, 30 nt, synthetic construct
  misc_feature 1..30: note = GTP-binding protein 2 (438-447)
  source 1..30: mol_type = other RNA
gccctgggcgacttcgaccgcgccctcctg

SEQ ID NO: 43295 - RNA, 24 nt, synthetic construct
  misc_feature 1..24: note = Ankyrin repeat domain-containing protein 40 (19-26)
  source 1..24: mol_type = other RNA
gccctgggcgacatccgcgaggtg

SEQ ID NO: 43296 - RNA, 27 nt, synthetic construct
  misc_feature 1..27: note = Integrin alpha-11 (344-352)
  source 1..27: mol_type = other RNA
gccctgggcgaccgcatcttcagcctc

SEQ ID NO: 43297 - RNA, 78 nt, synthetic construct
  misc_feature 1..78: note = Collagen alpha-3(VI) chain (105-130)
  source 1..78: mol_type = other RNA
gccctgggcttcgccgggggcgagctcgcgaacatcgggctggccctggacttcgtggtcgagaaccacttcacccgc

SEQ ID NO: 43298 - RNA, 24 nt, synthetic construct
  misc_feature 1..24: note = Fucose-1-phosphate guanylyltransferase (126-133)
  source 1..24: mol_type = other RNA
gccctgggcaagatcttcaccgcc

SEQ ID NO: 43299 - RNA, 36 nt, synthetic construct
  misc_feature 1..36: note = NAD(P) transhydrogenase, mitochondrial (649-660)
  source 1..36: mol_type = other RNA
gccctgggcatgatcggggtggccggcgggctcgcg

SEQ ID NO: 43300 - RNA, 30 nt, synthetic construct
  misc_feature 1..30: note = ATP-binding cassette sub-family A member 13 (1237-1246)
  source 1..30: mol_type = other RNA
gccctgggcaacgccctcgtgagcgtcaag

SEQ ID NO: 43301 - RNA, 24 nt, synthetic construct
  misc_feature 1..24: note = ATP-binding cassette sub-family B member 8, mitochondrial (320-327)
  source 1..24: mol_type = other RNA
gccctgggcaacgtgcgcaccgtc

SEQ ID NO: 43302 - RNA, 27 nt, synthetic construct
  misc_feature 1..27: note = T-box transcription factor TBX2 (69-77)
  source 1..27: mol_type = other RNA
gccctgggcccccacccgcccgccgcg

SEQ ID NO: 43303 - RNA, 27 nt, synthetic construct
  misc_feature 1..27: note = Dolichol-phosphate mannosyltransferase subunit 3 (74-82)
  source 1..27: mol_type = other RNA
gccctgggcaccgtggggtaccgcgtc

SEQ ID NO: 43304 - RNA, 27 nt, synthetic construct
  misc_feature 1..27: note = Methionine-tRNA ligase, cytoplasmic (168-176)
  source 1..27: mol_type = other RNA
gccctgcacagctggttccagaccctc

SEQ ID NO: 43305 - RNA, 27 nt, synthetic construct
  misc_feature 1..27: note = X-ray repair cross-complementing protein 5 (456-464)
  source 1..27: mol_type = other RNA
gccctgatcgacagcatgtccctcgcc

SEQ ID NO: 43306 - RNA, 30 nt, synthetic construct
  misc_feature 1..30: note = Gamma-tubulin complex component 2 (186-195)
  source 1..30: mol_type = other RNA
gccctgatcggcgacttcctcatcggggcc

SEQ ID NO: 43307 - RNA, 30 nt, synthetic construct
  misc_feature 1..30: note = Sodium-dependent phosphate transporter 2 (216-225)
  source 1..30: mol_type = other RNA
gccctgatcagcttcggcgtggccctcctg

SEQ ID NO: 43308 - RNA, 27 nt, synthetic construct
  misc_feature 1..27: note = Outer dense fiber protein 2-like (357-365)
  source 1..27: mol_type = other RNA
gccctgaaggacgaggtggtcagcgtg

SEQ ID NO: 43309 - RNA, 27 nt, synthetic construct
  misc_feature 1..27: note = Lysine-specific demethylase 5B (1044-1052)
  source 1..27: mol_type = other RNA
gccctgaaggacagcgtgcagcgcgcc

SEQ ID NO: 43310 - RNA, 21 nt, synthetic construct
  misc_feature 1..21: note = Max-like protein X (153-159)
  source 1..21: mol_type = other RNA
gccctgaagatcatgaaggtg

SEQ ID NO: 43311 - RNA, 27 nt, synthetic construct
  misc_feature 1..27: note = Poly (ADP-ribose) polymerase 1 (194-202)
  source 1..27: mol_type = other RNA
gccctgaagaagcagctccccggcgtg

SEQ ID NO: 43312 - RNA, 27 nt, synthetic construct
  misc_feature 1..27: note = Chondroitin sulfate proteoglycan 4 (2314-2322)
  source 1..27: mol_type = other RNA
gccctgaagaacggccagtactgggtg

SEQ ID NO: 43313 - RNA, 78 nt, synthetic construct
  misc_feature 1..78: note = ATP synthase subunit epsilon, mitochondrial (26-51)
  source 1..78: mol_type = other RNA
gccctgaagaccgagttcaaggccaacgcggagaagaccagcggctccaacgtgaagatcgtcaaggtgaagaaggag

SEQ ID NO: 43314 - RNA, 27 nt, synthetic construct
  misc_feature 1..27: note = Ubiquitin thioesterase OTUB1 (103-111)
  source 1..27: mol_type = other RNA
gccctgctcgacgacagcaaggagctg

SEQ ID NO: 43315 - RNA, 33 nt, synthetic construct
  misc_feature 1..33: note = Eukaryotic translation initiation factor 3 subunit C-like protein (633-643)
  source 1..33: mol_type = other RNA
gccctgctcgacatccagagctccggccgcgcc

SEQ ID NO: 43316 - RNA, 27 nt, synthetic construct
  misc_feature 1..27: note = Dystonin (5774-5782)
  source 1..27: mol_type = other RNA
gccctgctcgacagcctgaacgaggtg

SEQ ID NO: 43317 - RNA, 30 nt, synthetic construct
  misc_feature 1..30: note = G1/S-specific cyclin-D1 (253-262)
  source 1..30: mol_type = other RNA
gccctgctcgagagctccctgcgccaggcc

SEQ ID NO: 43318 - RNA, 33 nt, synthetic construct
  misc_feature 1..33: note = Phosphatidylinositol 3-kinase catalytic subunit type 3 (575-585)
  source 1..33: mol_type = other RNA
gccctgctcggcgacaacgagaagatgaacctg

SEQ ID NO: 43319 - RNA, 27 nt, synthetic construct
  misc_feature 1..27: note = WD repeat and FYVE domain-containing protein 3 (1152-1160)
  source 1..27: mol_type = other RNA
gccctgctcggccacaccgacaccgtg

SEQ ID NO: 43320 - RNA, 36 nt, synthetic construct
  misc_feature 1..36: note = ATP-binding cassette sub-family A member 13 (940-951)
  source 1..36: mol_type = other RNA
gccctgctcggcaccaacggggccggcaagaccacg

SEQ ID NO: 43321 - RNA, 27 nt, synthetic construct
  misc_feature 1..27: note = Immunity-related GTPase family Q protein (318-326)
  source 1..27: mol_type = other RNA
gccctgctcctgcccgacgccccgctg

SEQ ID NO: 43322 - RNA, 27 nt, synthetic construct
  misc_feature 1..27: note = Ubiquitin-like modifier-activating enzyme 6 (782-790)
  source 1..27: mol_type = other RNA
gccctgctcaacatcctgagcgaggtg

SEQ ID NO: 43323 - RNA, 27 nt, synthetic construct
  misc_feature 1..27: note = Transmembrane O-methyltransferase (232-240)
  source 1..27: mol_type = other RNA
gccctgctccccgccggcgcgaccgtg

SEQ ID NO: 43324 - RNA, 33 nt, synthetic construct
  misc_feature 1..33: note = Insulin receptor substrate 2 (417-427)
  source 1..33: mol_type = other RNA
gccctgctccccgccggcggggcgctgcagcac

SEQ ID NO: 43325 - RNA, 27 nt, synthetic construct
  misc_feature 1..27: note = General vesicular transport factor p115 (852-860)
  source 1..27: mol_type = other RNA
gccctgctccaggagaccaaggagctg

SEQ ID NO: 43326 - RNA, 30 nt, synthetic construct
  misc_feature 1..30: note = Sulfate transporter (251-260)
  source 1..30: mol_type = other RNA
gccctgctcagcggcttcgtgaccggggcc

SEQ ID NO: 43327 - RNA, 27 nt, synthetic construct
  misc_feature 1..27: note = Protein eva-1 homolog A (15-23)
  source 1..27: mol_type = other RNA
gccctgctcagcaacatcctggccgcg

SEQ ID NO: 43328 - RNA, 27 nt, synthetic construct
  misc_feature 1..27: note = Putative tyrosine-protein phosphatase auxilin (822-830)
  source 1..27: mol_type = other RNA
gccctgctcagcaccatgcacaccgtg

SEQ ID NO: 43329 - RNA, 30 nt, synthetic construct
  misc_feature 1..30: note = Ankyrin repeat and SOCS box protein 11 (33-42)
  source 1..30: mol_type = other RNA
gccctgctcacccacttctacatcgtgaag

SEQ ID NO: 43330 - RNA, 27 nt, synthetic construct
  misc_feature 1..27: note = Multiple epidermal growth factor-like domains protein 8 (1267-1275)
  source 1..27: mol_type = other RNA
gccctgctcaccaacgtgagctccgtc

SEQ ID NO: 43331 - RNA, 33 nt, synthetic construct
  misc_feature 1..33: note = Protein TANC2 (1001-1011)
  source 1..33: mol_type = other RNA
gccctgatggacaaggagggcctcaccgccctg

SEQ ID NO: 43332 - RNA, 33 nt, synthetic construct
  misc_feature 1..33: note = Calpain-3 (37-47)
  source 1..33: mol_type = other RNA
gccctgatggacaccgacggcagcgggaagctc

SEQ ID NO: 43333 - RNA, 39 nt, synthetic construct
  misc_feature 1..39: note = Calpain-3 (37-49)
  source 1..39: mol_type = other RNA
gccctgatggacaccgacggcagcgggaagctcaacctg

SEQ ID NO: 43334 - RNA, 27 nt, synthetic construct
  misc_feature 1..27: note = Protein cordon-bleu (1169-1177)
  source 1..27: mol_type = other RNA
gccctgatggaggccatccacagcgcg

SEQ ID NO: 43335 - RNA, 33 nt, synthetic construct
  misc_feature 1..33: note = Bestrophin-1 (462-472)
  source 1..33: mol_type = other RNA
gccctgatggagcaccccgaggtgagccaggtc

SEQ ID NO: 43336 - RNA, 27 nt, synthetic construct
  misc_feature 1..27: note = Integrin beta-8 (662-670)
  source 1..27: mol_type = other RNA
gccctgatggagcagcagcactacgtg

SEQ ID NO: 43337 - RNA, 63 nt, synthetic construct
  misc_feature 1..63: note = 60 kDa heat shock protein, mitochondrial (38-58)
  source 1..63: mol_type = other RNA
gccctgatgctccagggcgtggacctgctggccgacgcggtcgccgtgaccatggggcccaag

SEQ ID NO: 43338 - RNA, 27 nt, synthetic construct
  misc_feature 1..27: note = HLA class II histocompatibility antigen, DQ beta 1 chain (103-111)
  source 1..27: mol_type = other RNA
gccctgaaccaccacaacctcctggtg

SEQ ID NO: 43339 - RNA, 27 nt, synthetic construct
  misc_feature 1..27: note = Putative ribosome-binding factor A, mitochondrial (243-251)
  source 1..27: mol_type = other RNA
gccctgaacaagcagatcatggagtac

SEQ ID NO: 43340 - RNA, 30 nt, synthetic construct
  misc_feature 1..30: note = Protocadherin gamma-A2 (171-180)
  source 1..30: mol_type = other RNA
gccctgaaccccaacgaccacttcagcctc

SEQ ID NO: 43341 - RNA, 33 nt, synthetic construct
  misc_feature 1..33: note = RELT-like protein 1 (5-15)
  source 1..33: mol_type = other RNA
gccctgcccggcagcgccgtgctcgcggccgcc

SEQ ID NO: 43342 - RNA, 27 nt, synthetic construct
  misc_feature 1..27: note = Formin-1 (867-875)
  source 1..27: mol_type = other RNA
gccctgcccccgccccccgccagcatc

SEQ ID NO: 43343 - RNA, 27 nt, synthetic construct
  misc_feature 1..27: note = E3 ubiquitin/ISG15 ligase TRIM25 (398-406)
  source 1..27: mol_type = other RNA
gccctgcccagcaagctcccgaccttc

SEQ ID NO: 43344 - RNA, 33 nt, synthetic construct
  misc_feature 1..33: note = Epsin-2 (283-293)
  source 1..33: mol_type = other RNA
gccctgcccagctccggcccggccgcgcagaag

SEQ ID NO: 43345 - RNA, 30 nt, synthetic construct
  misc_feature 1..30: note = Transcription factor SOX-10 (341-350)
  source 1..30: mol_type = other RNA
gccctgcccaccgtgagcccgcccggcgtc

SEQ ID NO: 43346 - RNA, 27 nt, synthetic construct
  misc_feature 1..27: note = Nuclear receptor subfamily 1 group D member 2 (527-535)
  source 1..27: mol_type = other RNA
gccctgcaggagaccctcatccgcgcc

SEQ ID NO: 43347 - RNA, 27 nt, synthetic construct
  misc_feature 1..27: note = Interleukin-17 receptor D (642-650)
  source 1..27: mol_type = other RNA
gccctgcagcccctcctgcacaccgtg

SEQ ID NO: 43348 - RNA, 27 nt, synthetic construct
  misc_feature 1..27: note = Golgin subfamily A member 3 (542-550)
  source 1..27: mol_type = other RNA
gccctgcagagccagctccagcaggtg

SEQ ID NO: 43349 - RNA, 27 nt, synthetic construct
  misc_feature 1..27: note = V-type proton ATPase subunit C 1 (264-272)
  source 1..27: mol_type = other RNA
gccctgcgcgtgttcgtcgagagcgtg

SEQ ID NO: 43350 - RNA, 27 nt, synthetic construct
  misc_feature 1..27: note = Rootletin (252-260)
  source 1..27: mol_type = other RNA
gccctgagcgaggacatccgcaaggtg

SEQ ID NO: 43351 - RNA, 33 nt, synthetic construct
  misc_feature 1..33: note = Catenin alpha-1 (773-783)
  source 1..33: mol_type = other RNA
gccctgagcgagttcaaggccatggactccatc

SEQ ID NO: 43352 - RNA, 27 nt, synthetic construct
  misc_feature 1..27: note = Staphylococcal nuclease domain-containing protein 1 (626-634)
  source 1..27: mol_type = other RNA
gccctgagcaaggtgcacttcaccgcc

SEQ ID NO: 43353 - RNA, 33 nt, synthetic construct
  misc_feature 1..33: note = Ubiquitin carboxyl-terminal hydrolase isozyme L5 (129-139)
  source 1..33: mol_type = other RNA
gccctgagcaactccgacgtgatccgccaggtc

SEQ ID NO: 43354 - RNA, 27 nt, synthetic construct
  misc_feature 1..27: note = Serine incorporator 5 (278-286)
  source 1..27: mol_type = other RNA
gccctgagctccaagcccgccgaggtg

SEQ ID NO: 43355 - RNA, 27 nt, synthetic construct
  misc_feature 1..27: note = NudC domain-containing protein 3 (153-161)
  source 1..27: mol_type = other RNA
gccctgagctccagctccatccgcgtg

SEQ ID NO: 43356 - RNA, 27 nt, synthetic construct
  misc_feature 1..27: note = Piezo-type mechanosensitive ion channel component 1 (218-226)
  source 1..27: mol_type = other RNA
gccctgagctccgtgtacctcctgctg

SEQ ID NO: 43357 - RNA, 30 nt, synthetic construct
  misc_feature 1..30: note = Glutamate receptor ionotropic, kainate 3 (632-641)
  source 1..30: mol_type = other RNA
gccctgagcacccgcatcatcggcgggatc

SEQ ID NO: 43358 - RNA, 27 nt, synthetic construct
  misc_feature 1..27: note = A-kinase anchor protein 9 (1723-1731)
  source 1..27: mol_type = other RNA
gccctgaccgactacatcacccgcctc

SEQ ID NO: 43359 - RNA, 27 nt, synthetic construct
  misc_feature 1..27: note = Transmembraneoprotein NMB (477-485)
  source 1..27: mol_type = other RNA
gccctgaccagcaccctcatctccgtg

SEQ ID NO: 43360 - RNA, 27 nt, synthetic construct
  misc_feature 1..27: note = Glutamine-tRNA ligase (715-723)
  source 1..27: mol_type = other RNA
gccctggtggactgcagcgtcgccctc

SEQ ID NO: 43361 - RNA, 27 nt, synthetic construct
  misc_feature 1..27: note = (4658-4666)
  source 1..27: mol_type = other RNA
gccctggtggactggctctacaaggtc

SEQ ID NO: 43362 - RNA, 33 nt, synthetic construct
  misc_feature 1..33: note = Ribosome biogenesis protein BRX1 homolog (228-238)
  source 1..33: mol_type = other RNA
gccctggtggagatcggcccccgcttcgtcctc

SEQ ID NO: 43363 - RNA, 39 nt, synthetic construct
  misc_feature 1..39: note = Kinesin-like protein KIF1A (397-409)
  source 1..39: mol_type = other RNA
gccctggtgggcatgagcccctccagctccctcagcgcc

SEQ ID NO: 43364 - RNA, 30 nt, synthetic construct
  misc_feature 1..30: note = Plexin-A2 (475-484)
  source 1..30: mol_type = other RNA
gccctggtgggcaccaccagcgggcccgtc

SEQ ID NO: 43365 - RNA, 30 nt, synthetic construct
  misc_feature 1..30: note = E3 ubiquitin-protein ligase TRIP12 (1669-1678)
  source 1..30: mol_type = other RNA
gccctggtgagccaggagctccagcgcgcc

SEQ ID NO: 43366 - RNA, 27 nt, synthetic construct
  misc_feature 1..27: note = Diphthamide biosynthesis protein 1 (172-180)
  source 1..27: mol_type = other RNA
gccctggtgagcaccatccagttcgtc

SEQ ID NO: 43367 - RNA, 30 nt, synthetic construct
  misc_feature 1..30: note = ER membrane protein complex subunit 7 (4-13)
  source 1..30: mol_type = other RNA
gccctgtggggcttcttccccgtgctcctg

SEQ ID NO: 43368 - RNA, 30 nt, synthetic construct
  misc_feature 1..30: note = Transmembrane protein 234 (16-25)
  source 1..30: mol_type = other RNA
gccctgtggggcgggacccagcccctcctg

SEQ ID NO: 43369 - RNA, 30 nt, synthetic construct
  misc_feature 1..30: note = tRNA (uracil-5-)-methyltransferase homolog A (132-141)
  source 1..30: mol_type = other RNA
gccctgtggaagggccgccccctcagcgtg

SEQ ID NO: 43370 - RNA, 30 nt, synthetic construct
  misc_feature 1..30: note = WD repeat-containing protein 60 (1057-1066)
  source 1..30: mol_type = other RNA
gccctgtggcccgagggcaagctccacaag

SEQ ID NO: 43371 - RNA, 27 nt, synthetic construct
  misc_feature 1..27: note = Beta-hexosaminidase subunit beta (43-51)
  source 1..27: mol_type = other RNA
gccctgtggcccctcccgctgagcgtg

SEQ ID NO: 43372 - RNA, 45 nt, synthetic construct
  misc_feature 1..45: note = Phosphatidate phosphatase LPIN1 (411-425)
  source 1..45: mol_type = other RNA
gccctgtacttccccaagaacggcgacccgagcgggctcgccaag

SEQ ID NO: 43373 - RNA, 27 nt, synthetic construct
  misc_feature 1..27: note = Caskin-2 (229-237)
  source 1..27: mol_type = other RNA
gccctgtacggcaagaccgaggtggtc

SEQ ID NO: 43374 - RNA, 27 nt, synthetic construct
  misc_feature 1..27: note = Ankyrin repeat and SAM domain-containing protein 1A (190-198)
  source 1..27: mol_type = other RNA
gccctgtacggccgcctcgaggtggtc

SEQ ID NO: 43375 - RNA, 30 nt, synthetic construct
  misc_feature 1..30: note = Hemicentin-1 (1594-1603)
  source 1..30: mol_type = other RNA
gccctgtacatcgacaagggccagtacctc

SEQ ID NO: 43376 - RNA, 36 nt, synthetic construct
  misc_feature 1..36: note = Cytoplasmic dynein 1 heavy chain 1 (3101-3112)
  source 1..36: mol_type = other RNA
gccctgtaccaggtgggcaaggagttcaccagcaag

SEQ ID NO: 43377 - RNA, 36 nt, synthetic construct
  misc_feature 1..36: note = Type II inositol 3,4-bisphosphate 4-phosphatase (472-483)
  source 1..36: mol_type = other RNA
gccctgtacaccgcccgccccggcgggatcctcaag

SEQ ID NO: 43378 - RNA, 39 nt, synthetic construct
  misc_feature 1..39: note = Type II inositol 3,4-bisphosphate 4-phosphatase (472-484)
  source 1..39: mol_type = other RNA
gccctgtacaccgcccgccccggcgggatcctcaagaag

SEQ ID NO: 43379 - RNA, 27 nt, synthetic construct
  misc_feature 1..27: note = Dedicator of cytokinesis protein 7 (712-720)
  source 1..27: mol_type = other RNA
gccatggccagcatcatcaaccgcctg

SEQ ID NO: 43380 - RNA, 27 nt, synthetic construct
  misc_feature 1..27: note = Protein transport protein Sec31A (697-705)
  source 1..27: mol_type = other RNA
gccatggacaccagcaccgtgggcgtc

SEQ ID NO: 43381 - RNA, 24 nt, synthetic construct
  misc_feature 1..24: note = Synemin (36-43)
  source 1..24: mol_type = other RNA
gccatgttcgacaagaaggtgcag

SEQ ID NO: 43382 - RNA, 33 nt, synthetic construct
  misc_feature 1..33: note = Exportin-4 (248-258)
  source 1..33: mol_type = other RNA
gccatgttcgagagctcccagaacgtgctgctc

SEQ ID NO: 43383 - RNA, 33 nt, synthetic construct
  misc_feature 1..33: note = NAD(P)H dehydrogenase (quinone) 1 (21-31)
  source 1..33: mol_type = other RNA
gccatgaaggaggccgcggccgccgccctgaag

SEQ ID NO: 43384 - RNA, 30 nt, synthetic construct
  misc_feature 1..30: note = Tryptophan-tRNA ligase, cytoplasmic (424-433)
  source 1..30: mol_type = other RNA
gccatgctgaccggcgagctcaagaaggcc

SEQ ID NO: 43385 - RNA, 27 nt, synthetic construct
  misc_feature 1..27: note = Nucleoporin p58/p45 (376-384)
  source 1..27: mol_type = other RNA
gccatgcagaagatctaccagaccttc

SEQ ID NO: 43386 - RNA, 27 nt, synthetic construct
  misc_feature 1..27: note = Tenascin (3-11)
  source 1..27: mol_type = other RNA
gccatgacccagctgctcgccggcgtg

SEQ ID NO: 43387 - RNA, 27 nt, synthetic construct
  misc_feature 1..27: note = S-adenosylmethionine synthase isoform type-1 (75-83)
  source 1..27: mol_type = other RNA
gccatggtggactaccagcgcgtcgtg

SEQ ID NO: 43388 - RNA, 30 nt, synthetic construct
  misc_feature 1..30: note = Zinc finger protein 697 (233-242)
  source 1..30: mol_type = other RNA
gccatggtgggcatgatgggggtcggcgtg

SEQ ID NO: 43389 - RNA, 33 nt, synthetic construct
  misc_feature 1..33: note = Leucine zipper putative tumor suppressor 1 (529-539)
  source 1..33: mol_type = other RNA
gccatgtaccagcgcaaccagcggctggagaag

SEQ ID NO: 43390 - RNA, 24 nt, synthetic construct
  misc_feature 1..24: note = Eukaryotic translation initiation factor 2 subunit 3 (84-91)
  source 1..24: mol_type = other RNA
gccaacgccaagatctacaagctg

SEQ ID NO: 43391 - RNA, 42 nt, synthetic construct
  misc_feature 1..42: note = Beta-secretase 2 (75-88)
  source 1..42: mol_type = other RNA
gccaacttcctggccatggtggacaacctccagggcgacagc

SEQ ID NO: 43392 - RNA, 21 nt, synthetic construct
  misc_feature 1..21: note = EH domain-containing protein 1 (504-510)
  source 1..21: mol_type = other RNA
gccaaccacctgatcaaggtg

SEQ ID NO: 43393 - RNA, 24 nt, synthetic construct
  misc_feature 1..24: note = Galectin-3 (142-149)
  source 1..24: mol_type = other RNA
gccaaccgcatcgccctggacttc

SEQ ID NO: 43394 - RNA, 27 nt, synthetic construct
  misc_feature 1..27: note = Spectrin alpha chain, non-erythrocytic 1 (94-102)
  source 1..27: mol_type = other RNA
gccaacagcggcgccatcgtgaagctg

SEQ ID NO: 43395 - RNA, 27 nt, synthetic construct
  misc_feature 1..27: note = AT-rich interactive domain-containing protein 2 (940-948)
  source 1..27: mol_type = other RNA
gcccccgccatccaccagatcgtgctg

SEQ ID NO: 43396 - RNA, 33 nt, synthetic construct
  misc_feature 1..33: note = E3 ubiquitin-protein ligase MIB2 (408-418)
  source 1..33: mol_type = other RNA
gcccccgccctgggccgcgtggggaaggtcgtg

SEQ ID NO: 43397 - RNA, 30 nt, synthetic construct
  misc_feature 1..30: note = Biogenesis of lysosome-related organelles complex 1 subunit 3 (99-108)
  source 1..30: mol_type = other RNA
gcccccgccccggcgcccgcccgcagcctg

SEQ ID NO: 43398 - RNA, 27 nt, synthetic construct
  misc_feature 1..27: note = Protein capicua homolog (1681-1689)
  source 1..27: mol_type = other RNA
gcccccgccccgcccgcggtgcagttc

SEQ ID NO: 43399 - RNA, 30 nt, synthetic construct
  misc_feature 1..30: note = Cathepsin F (20-29)
  source 1..30: mol_type = other RNA
gcccccgcccagccgcgcgcggccagcttc

SEQ ID NO: 43400 - RNA, 27 nt, synthetic construct
  misc_feature 1..27: note = Serum paraoxonase/arylesterase 2 (78-86)
  source 1..27: mol_type = other RNA
gcccccgacaagccgggcgggatcctg

SEQ ID NO: 43401 - RNA, 54 nt, synthetic construct
  misc_feature 1..54: note = Fructose-bisphosphate aldolase A (79-96)
  source 1..54: mol_type = other RNA
gcccccggcaaggggatcctggccgcggacgagagcaccggctccatcgccaag

SEQ ID NO: 43402 - RNA, 30 nt, synthetic construct
  misc_feature 1..30: note = Lysosome-associated membraneoprotein 1 (3-12)
  source 1..30: mol_type = other RNA
gcccccggcagcgcccgccggccgctgctc

SEQ ID NO: 43403 - RNA, 36 nt, synthetic construct
  misc_feature 1..36: note = Dynein heavy chain domain-containing protein 1 (4690-4701)
  source 1..36: mol_type = other RNA
gcccccggcaccagcgacctgccggcccccgcggac

SEQ ID NO: 43404 - RNA, 27 nt, synthetic construct
  misc_feature 1..27: note = Protein SEC13 homolog (98-106)
  source 1..27: mol_type = other RNA
gccccccacgactacggcctgatcctc

SEQ ID NO: 43405 - RNA, 27 nt, synthetic construct
  misc_feature 1..27: note = Chondroitin sulfate proteoglycan 4 (1875-1883)
  source 1..27: mol_type = other RNA
gccccccacaacggcttcctgagcctc

SEQ ID NO: 43406 - RNA, 30 nt, synthetic construct
  misc_feature 1..30: note = Hypoxia-inducible factor 1-alpha (828-837)
  source 1..30: mol_type = other RNA
gcccccatccagggcagccgcaacctgctc

SEQ ID NO: 43407 - RNA, 24 nt, synthetic construct
  misc_feature 1..24: note = TRAF2 and NCK-interacting protein kinase (326-333)
  source 1..24: mol_type = other RNA
gcccccaagccgtaccacaagttc

SEQ ID NO: 43408 - RNA, 30 nt, synthetic construct
  misc_feature 1..30: note = Ankyrin repeat and SOCS box protein 11 (248-257)
  source 1..30: mol_type = other RNA
gcccccaagagctccgtggagcaggccctg

SEQ ID NO: 43409 - RNA, 27 nt, synthetic construct
  misc_feature 1..27: note = Cancer/testis antigen 2 (114-122)
  source 1..27: mol_type = other RNA
gcccccctgccgcgccccggcgccgtg

SEQ ID NO: 43410 - RNA, 48 nt, synthetic construct
  misc_feature 1..48: note = GTP-binding nuclear protein Ran (203-218)
  source 1..48: mol_type = other RNA
gcccccccggaggtggtcatggaccccgccctggcggcccagtacgag

SEQ ID NO: 43411 - RNA, 51 nt, synthetic construct
  misc_feature 1..51: note = GTP-binding nuclear protein Ran (203-219)
  source 1..51: mol_type = other RNA
gcccccccggaggtggtcatggaccccgccctggcggcccagtacgagcac

SEQ ID NO: 43412 - RNA, 30 nt, synthetic construct
  misc_feature 1..30: note = DNA-binding protein inhibitor ID-4 (131-140)
  source 1..30: mol_type = other RNA
gcccccccgcgcacccccctgaccgccctc

SEQ ID NO: 43413 - RNA, 39 nt, synthetic construct
  misc_feature 1..39: note = Heat shock cognate 71 kDa protein (630-642)
  source 1..39: mol_type = other RNA
gcccccccgagcggcggggcctccagcggccccaccatc

SEQ ID NO: 43414 - RNA, 33 nt, synthetic construct
  misc_feature 1..33: note = Uncharacterized protein C17orf51 (66-76)
  source 1..33: mol_type = other RNA
gcccccccgacccgccgggcccaggcggccctg

SEQ ID NO: 43415 - RNA, 36 nt, synthetic construct
  misc_feature 1..36: note = UPF0669 protein C6orf120 (3-14)
  source 1..36: mol_type = other RNA
gccccccgcggccgggccgcgccgtggaccaccgcc

SEQ ID NO: 43416 - RNA, 24 nt, synthetic construct
  misc_feature 1..24: note = Procollagen-lysine,2-oxoglutarate 5-dioxygenase 1 (691-698)
  source 1..24: mol_type = other RNA
gccccccgcaagggctggaccctg

SEQ ID NO: 43417 - RNA, 27 nt, synthetic construct
  misc_feature 1..27: note = La-related protein 7 (193-201)
  source 1..27: mol_type = other RNA
gccccccgcaagccgggcatcttcccc

SEQ ID NO: 43418 - RNA, 123 nt, synthetic construct
  misc_feature 1..123: note = DNA-binding protein RFX5 (352-392)
  source 1..123: mol_type = other RNA
gccccccgcctgagctccggcgccctcaaggtggcgaccctgccgctgagctcccgggccggggccccccccgccgccgtccccatcatcaacatgatcctcccgaccgtgcccgcgctgccc

SEQ ID NO: 43419 - RNA, 30 nt, synthetic construct
  misc_feature 1..30: note = RNA-binding protein 33 (702-711)
  source 1..30: mol_type = other RNA
gccccccgcaacagcaacctgcgggagctc

SEQ ID NO: 43420 - RNA, 27 nt, synthetic construct
  misc_feature 1..27: note = Alpha-2-macroglobulin receptor-associated protein (2-10)
  source 1..27: mol_type = other RNA
gccccccgccgggtgcgcagcttcctg

SEQ ID NO: 43421 - RNA, 27 nt, synthetic construct
  misc_feature 1..27: note = Alpha-1-syntrophin (7-15)
  source 1..27: mol_type = other RNA
gccccccgcaccggcctgctcgagctg

SEQ ID NO: 43422 - RNA, 36 nt, synthetic construct
  misc_feature 1..36: note = Nance-Horan syndrome protein (1306-1317)
  source 1..36: mol_type = other RNA
gcccccagcgccggcctggaggaggtggcgcagccg

SEQ ID NO: 43423 - RNA, 27 nt, synthetic construct
  misc_feature 1..27: note = Eukaryotic translation initiation factor 3 subunit C-like protein (203-211)
  source 1..27: mol_type = other RNA
gcccccagcggcgagtcccgcaagttc

SEQ ID NO: 43424 - RNA, 27 nt, synthetic construct
  misc_feature 1..27: note = Rho GTPase-activating protein 7 (241-249)
  source 1..27: mol_type = other RNA
gcccccagcaagctgggcctcatcatc

SEQ ID NO: 43425 - RNA, 27 nt, synthetic construct
  misc_feature 1..27: note = Dickkopf-related protein 3 (30-38)
  source 1..27: mol_type = other RNA
gcccccgtgaagccgggccccgccctg

SEQ ID NO: 43426 - RNA, 27 nt, synthetic construct
  misc_feature 1..27: note = Hemicentin-1 (1702-1710)
  source 1..27: mol_type = other RNA
gcccaggagatcgaccgcggccagtac

SEQ ID NO: 43427 - RNA, 33 nt, synthetic construct
  misc_feature 1..33: note = Coatomer subunit alpha (141-151)
  source 1..33: mol_type = other RNA
gcccagttccaccccaccgaggacctggtggtc

SEQ ID NO: 43428 - RNA, 30 nt, synthetic construct
  misc_feature 1..30: note = Voltage-dependent T-type calcium channel subunit alpha-1H (1841-1850)
  source 1..30: mol_type = other RNA
gcccagttcgtgctggtcaacgtggtggtc

SEQ ID NO: 43429 - RNA, 24 nt, synthetic construct
  misc_feature 1..24: note = Ran GTPase-activating protein 1 (175-182)
  source 1..24: mol_type = other RNA
gcccagggcaagcccctggccctc

SEQ ID NO: 43430 - RNA, 36 nt, synthetic construct
  misc_feature 1..36: note = Heat shock 70 kDa protein 1B (623-634)
  source 1..36: mol_type = other RNA
gcccagggccccaaggggggcagcgggtccggcccg

SEQ ID NO: 43431 - RNA, 39 nt, synthetic construct
  misc_feature 1..39: note = HLA class I histocompatibility antigen, A-69 alpha chain (234-246)
  source 1..39: mol_type = other RNA
gcccagggcagcgacgtgtccctgaccgcctgcaaggtc

SEQ ID NO: 43432 - RNA, 51 nt, synthetic construct
  misc_feature 1..51: note = T-complex protein 1 subunit zeta (291-307)
  source 1..51: mol_type = other RNA
gcccagctgggcgtgcaggccttcgcggacgccctcctgatcatccccaag

SEQ ID NO: 43433 - RNA, 27 nt, synthetic construct
  misc_feature 1..27: note = Retrotransposon-derived protein PEG10 (460-468)
  source 1..27: mol_type = other RNA
gcccagaacggcatccccctgcgcatc

SEQ ID NO: 43434 - RNA, 33 nt, synthetic construct
  misc_feature 1..33: note = F-box/LRR-repeat protein 18 (437-447)
  source 1..33: mol_type = other RNA
gcccagcccgccatgcacgcggtgccgcgcggc

SEQ ID NO: 43435 - RNA, 30 nt, synthetic construct
  misc_feature 1..30: note = Actin, aortic smooth muscle (60-69)
  source 1..30: mol_type = other RNA
gcccagagcaagcgcggcatcctgaccctc

SEQ ID NO: 43436 - RNA, 30 nt, synthetic construct
  misc_feature 1..30: note = Histone-lysine N-methyltransferase NSD3 (366-375)
  source 1..30: mol_type = other RNA
gcccagtgggacatcggcatcgcccacgcg

SEQ ID NO: 43437 - RNA, 27 nt, synthetic construct
  misc_feature 1..27: note = Arrestin domain-containing protein 1 (236-244)
  source 1..27: mol_type = other RNA
gcccagtggcacgagcagatcctggtg

SEQ ID NO: 43438 - RNA, 27 nt, synthetic construct
  misc_feature 1..27: note = Glycogen phosphorylase, liver form (247-255)
  source 1..27: mol_type = other RNA
gcccgcgcccccaacgacttcaacctg

SEQ ID NO: 43439 - RNA, 27 nt, synthetic construct
  misc_feature 1..27: note = Myosin-10 (1639-1647)
  source 1..27: mol_type = other RNA
gcccgcgacgaggtgatcaagcagctg

SEQ ID NO: 43440 - RNA, 27 nt, synthetic construct
  misc_feature 1..27: note = Apoptosis-inducing factor 1, mitochondrial (148-156)
  source 1..27: mol_type = other RNA
gcccgcgaccccggcgcccgggtgctg

SEQ ID NO: 43441 - RNA, 30 nt, synthetic construct
  misc_feature 1..30: note = HLA class II histocompatibility antigen, DQ beta 1 chain (33-42)
  source 1..30: mol_type = other RNA
gcccgcttcgacagcgacgtgggcgtctac

SEQ ID NO: 43442 - RNA, 33 nt, synthetic construct
  misc_feature 1..33: note = HLA class II histocompatibility antigen, DQ beta 1 chain (33-43)
  source 1..33: mol_type = other RNA
gcccgcttcgacagcgacgtgggcgtctaccgg

SEQ ID NO: 43443 - RNA, 30 nt, synthetic construct
  misc_feature 1..30: note = H/ACA ribonucleoprotein complex subunit 3 (33-42)
  source 1..30: mol_type = other RNA
gcccgcttcagccccgacgacaagtactcc

SEQ ID NO: 43444 - RNA, 24 nt, synthetic construct
  misc_feature 1..24: note = ATP-dependent RNA helicase DDX24 (411-418)
  source 1..24: mol_type = other RNA
gcccgcttcaccggcatcaagacc

SEQ ID NO: 43445 - RNA, 27 nt, synthetic construct
  misc_feature 1..27: note = 60S ribosomal protein L7 (75-83)
  source 1..27: mol_type = other RNA
gcccgcaaggccggcaacttctacgtg

SEQ ID NO: 43446 - RNA, 27 nt, synthetic construct
  misc_feature 1..27: note = Phospholipid transfer protein (319-327)
  source 1..27: mol_type = other RNA
gcccgcctgagcgccaagatggcgctc

SEQ ID NO: 43447 - RNA, 27 nt, synthetic construct
  misc_feature 1..27: note = V-type proton ATPase subunit S1 (217-225)
  source 1..27: mol_type = other RNA
gcccgcctgagcctcacctacgagcgg

SEQ ID NO: 43448 - RNA, 27 nt, synthetic construct
  misc_feature 1..27: note = Peroxisomal acyl-coenzyme A oxidase 1 (492-500)
  source 1..27: mol_type = other RNA
gcccgcctggtggagatcgccgcgaag

SEQ ID NO: 43449 - RNA, 33 nt, synthetic construct
  misc_feature 1..33: note = Membrane-associated guanylate kinase, WW and PDZ domain-containing protein 2 (849-859)
  source 1..33: mol_type = other RNA
gcccgcaacggccaggtgaacctgaccgtccgg

SEQ ID NO: 43450 - RNA, 33 nt, synthetic construct
  misc_feature 1..33: note = Melanotransferrin (274-284)
  source 1..33: mol_type = other RNA
gcccgcgtgcccgcccacgcggtcgtggtgcgg

SEQ ID NO: 43451 - RNA, 36 nt, synthetic construct
  misc_feature 1..36: note = Syntenin-1 (35-46)
  source 1..36: mol_type = other RNA
gccagcgcccccatcccgcacgacggcaacctgtac

SEQ ID NO: 43452 - RNA, 39 nt, synthetic construct
  misc_feature 1..39: note = Receptor-type tyrosine-protein phosphatase mu (849-861)
  source 1..39: mol_type = other RNA
gccagcgacacctccagcctggtgcagtcccacacctac

SEQ ID NO: 43453 - RNA, 27 nt, synthetic construct
  misc_feature 1..27: note = Heterogeneous nuclear ribonucleoprotein M (578-586)
  source 1..27: mol_type = other RNA
gccagcttcgaccgcgccatcgagatg

SEQ ID NO: 43454 - RNA, 24 nt, synthetic construct
  misc_feature 1..24: note = Cytochrome c oxidase subunit 7A2, mitochondrial (76-83)
  source 1..24: mol_type = other RNA
gccagcttccccaagaagcaggag

SEQ ID NO: 43455 - RNA, 87 nt, synthetic construct
  misc_feature 1..87: note = Cytochrome c oxidase subunit 5B, mitochondrial (32-60)
  source 1..87: mol_type = other RNA
gccagcggcgggggcgtgcccaccgacgaggagcaggccaccgggctggagcgcgagatcatgctcgcggccaagaagggcctggac

SEQ ID NO: 43456 - RNA, 24 nt, synthetic construct
  misc_feature 1..24: note = Chromodomain-helicase-DNA-binding protein 4 (1045-1052)
  source 1..24: mol_type = other RNA
gccagcggcaagctgctcctgctg

SEQ ID NO: 43457 - RNA, 24 nt, synthetic construct
  misc_feature 1..24: note = Thioredoxin domain-containing protein 12 (52-59)
  source 1..24: mol_type = other RNA
gccagcggcctgcccctcatggtg

SEQ ID NO: 43458 - RNA, 24 nt, synthetic construct
  misc_feature 1..24: note = Histone deacetylase 6 (38-45)
  source 1..24: mol_type = other RNA
gccagcggctccgtgctgcgcctc

SEQ ID NO: 43459 - RNA, 27 nt, synthetic construct
  misc_feature 1..27: note = DNA damage-binding protein 1 (882-890)
  source 1..27: mol_type = other RNA
gccagcatcaactccaccgtgcgcctg

SEQ ID NO: 43460 - RNA, 24 nt, synthetic construct
  misc_feature 1..24: note = Alpha-actinin-3 (115-122)
  source 1..24: mol_type = other RNA
gccagcaagggcgtgaagctggtc

SEQ ID NO: 43461 - RNA, 27 nt, synthetic construct
  misc_feature 1..27: note = Adhesion G protein-coupled receptor A3 (756-764)
  source 1..27: mol_type = other RNA
gccagcctgctccaccccgtggtctac

SEQ ID NO: 43462 - RNA, 27 nt, synthetic construct
  misc_feature 1..27: note = Dynein light chain roadblock-type 1 (43-51)
  source 1..27: mol_type = other RNA
gccagcctgatgcactccttcatcctc

SEQ ID NO: 43463 - RNA, 27 nt, synthetic construct
  misc_feature 1..27: note = Proline synthase co-transcribed bacterial homolog protein (77-85)
  source 1..27: mol_type = other RNA
gccagcaaccccaagatcctgtccctc

SEQ ID NO: 43464 - RNA, 30 nt, synthetic construct
  misc_feature 1..30: note = Solute carrier family 52, riboflavin transporter, member 2 (127-136)
  source 1..30: mol_type = other RNA
gccagcaacgtgaccttcctgcccttcctc

SEQ ID NO: 43465 - RNA, 27 nt, synthetic construct
  misc_feature 1..27: note = Alanine-tRNA ligase, cytoplasmic (341-349)
  source 1..27: mol_type = other RNA
gccagccgcggcttcttcgccaccctg

SEQ ID NO: 43466 - RNA, 21 nt, synthetic construct
  misc_feature 1..21: note = Histone H2B type 2-F (78-84)
  source 1..21: mol_type = other RNA
gccagccgcctggcccactac

SEQ ID NO: 43467 - RNA, 54 nt, synthetic construct
  misc_feature 1..54: note = HLA class I histocompatibility antigen, A-23 alpha chain (348-365)
  source 1..54: mol_type = other RNA
gccagctccgacagcgcccagggctccgacgtgagcctgaccgcgtgcaaggtc

SEQ ID NO: 43468 - RNA, 27 nt, synthetic construct
  misc_feature 1..27: note = OTU domain-containing protein 5 (237-245)
  source 1..27: mol_type = other RNA
gccagctcccccgagcacccggagctg

SEQ ID NO: 43469 - RNA, 27 nt, synthetic construct
  misc_feature 1..27: note = 40S ribosomal protein S19 (58-66)
  source 1..27: mol_type = other RNA
gccagcaccgcccgccacctgtacctc

SEQ ID NO: 43470 - RNA, 30 nt, synthetic construct
  misc_feature 1..30: note = Cullin-1 (195-204)
  source 1..30: mol_type = other RNA
gccagcaccttccagatggccatcctgctc

SEQ ID NO: 43471 - RNA, 27 nt, synthetic construct
  misc_feature 1..27: note Dolichyl-diphosphooligosaccharide-proteinosyltransferase subunit DAD1 (100-108)
  source 1..27: mol_type = other RNA
gccagcaccatcctgcacctcgtggtc

SEQ ID NO: 43472 - RNA, 30 nt, synthetic construct
  misc_feature 1..30: note = Thyroid adenoma-associated protein (153-162)
  source 1..30: mol_type = other RNA
gccagcgtgaacaacctgctcaagaacgtc

SEQ ID NO: 43473 - RNA, 24 nt, synthetic construct
  misc_feature 1..24: note = Cystic fibrosis transmembrane conductance regulator (9-16)
  source 1..24: mol_type = other RNA
gccagcgtggtctccaagctgttc

SEQ ID NO: 43474 - RNA, 27 nt, synthetic construct
  misc_feature 1..27: note = ATP-citrate synthase (223-231)
  source 1..27: mol_type = other RNA
gccaccgccgactacatctgcaaggtg

SEQ ID NO: 43475 - RNA, 27 nt, synthetic construct
  misc_feature 1..27: note = Leucine-rich repeat-containing protein 47 (393-401)
  source 1..27: mol_type = other RNA
gccaccgcccccccgcacgtgaccgtc

SEQ ID NO: 43476 - RNA, 30 nt, synthetic construct
  misc_feature 1..30: note = Hermansky-Pudlak syndrome 1 protein (7-16)
  source 1..30: mol_type = other RNA
gccaccgagggcgccgaggtgctgttctac

SEQ ID NO: 43477 - RNA, 27 nt, synthetic construct
  misc_feature 1..27: note = Kinesin-like protein KIF3C (506-514)
  source 1..27: mol_type = other RNA
gccaccgagctgctcgccgcgaagtac

SEQ ID NO: 43478 - RNA, 27 nt, synthetic construct
  misc_feature 1..27: note = EF-hand calcium-binding domain-containing protein 4B isoform a (677-685)
  source 1..27: mol_type = other RNA
gccaccgagaacaacctgatcttctac

SEQ ID NO: 43479 - RNA, 27 nt, synthetic construct
  misc_feature 1..27: note = Bestrophin-1 (573-581)
  source 1..27: mol_type = other RNA
gccaccttcaccggcatcctggggaag

SEQ ID NO: 43480 - RNA, 27 nt, synthetic construct
  misc_feature 1..27: note = Apoptosis inhibitor 5 (19-27)
  source 1..27: mol_type = other RNA
gccaccggcgagaacctgccccgcgtg

SEQ ID NO: 43481 - RNA, 24 nt, synthetic construct
  misc_feature 1..24: note = (11-18)
  source 1..24: mol_type = other RNA
gccaccggccgcctgctcctgctg

SEQ ID NO: 43482 - RNA, 33 nt, synthetic construct
  misc_feature 1..33: note = 40S ribosomal protein S15 (135-145)
  source 1..33: mol_type = other RNA
gccacccacagctcccgcttcatccccctgaag

SEQ ID NO: 43483 - RNA, 27 nt, synthetic construct
  misc_feature 1..27: note = Poly(rC)-binding protein 4 (135-143)
  source 1..27: mol_type = other RNA
gccaccatcccctaccacccgagcctg

SEQ ID NO: 43484 - RNA, 30 nt, synthetic construct
  misc_feature 1..30: note = Phosphatidylinositol 4-kinase alpha (169-178)
  source 1..30: mol_type = other RNA
gccaccatccgcaacgtgctgcgggagaag

SEQ ID NO: 43485 - RNA, 27 nt, synthetic construct
  misc_feature 1..27: note = Cathepsin D (182-190)
  source 1..27: mol_type = other RNA
gccaccaagcagcccggcatcaccttc

SEQ ID NO: 43486 - RNA, 36 nt, synthetic construct
  misc_feature 1..36: note = Protein FAM171B (413-424)
  source 1..36: mol_type = other RNA
gccaccctgccccgcaagggccagctcgtgtacggg

SEQ ID NO: 43487 - RNA, 27 nt, synthetic construct
  misc_feature 1..27: note = Nuclear fragile X mental retardation-interacting protein 2 (116-124)
  source 1..27: mol_type = other RNA
gccaccaaccccatcagccgcgtgctg

SEQ ID NO: 43488 - RNA, 39 nt, synthetic construct
  misc_feature 1..39: note = UPF0606 protein KIAA1549L (947-959)
  source 1..39: mol_type = other RNA
gccaccaccctgggcagctacacggtgcagatggtcaag

SEQ ID NO: 43489 - RNA, 27 nt, synthetic construct
  misc_feature 1..27: note = PH domain leucine-rich repeat-containing protein phosphatase 1 (7-15)
  source 1..27: mol_type = other RNA
gccaccgtgcagcgcctgcccgagctc

SEQ ID NO: 43490 - RNA, 27 nt, synthetic construct
  misc_feature 1..27: note = Myelin proteolipid protein (206-214)
  source 1..27: mol_type = other RNA
gccacctacaacttcgccgtgctgaag

SEQ ID NO: 43491 - RNA, 30 nt, synthetic construct
  misc_feature 1..30: note = Eyes absent homolog 1 (124-133)
  source 1..30: mol_type = other RNA
gccacctacccccagccgggccagccctac

SEQ ID NO: 43492 - RNA, 27 nt, synthetic construct
  misc_feature 1..27: note = Sigma non-opioid intracellular receptor 1 (17-25)
  source 1..27: mol_type = other RNA
gccgtggccgcggtcctgacccaggtg

SEQ ID NO: 43493 - RNA, 27 nt, synthetic construct
  misc_feature 1..27: note = Unconventional myosin-Ic (83-91)
  source 1..27: mol_type = other RNA
gccgtggccgacaccgtctaccgcgcg

SEQ ID NO: 43494 - RNA, 27 nt, synthetic construct
  misc_feature 1..27: note = Membrane-associated guanylate kinase, WW and PDZ domain-containing protein 2 (1428-1436)
  source 1..27: mol_type = other RNA
gccgtggcccccggcccgtggaaggtc

SEQ ID NO: 43495 - RNA, 27 nt, synthetic construct
  misc_feature 1..27: note = Endothelin B receptor (291-299)
  source 1..27: mol_type = other RNA
gccgtggccagctggtcccgcatcaag

SEQ ID NO: 43496 - RNA, 27 nt, synthetic construct
  misc_feature 1..27: note = Sideroflexin-3 (161-169)
  source 1..27: mol_type = other RNA
gccgtggccaccgcgctgggcctcaag

SEQ ID NO: 43497 - RNA, 27 nt, synthetic construct
  misc_feature 1..27: note = Ubiquitin-like modifier-activating enzyme 1 (786-794)
  source 1..27: mol_type = other RNA
gccgtggccaccttcctgcagagcgtc

SEQ ID NO: 43498 - RNA, 51 nt, synthetic construct
  misc_feature 1..51: note = Tubulin alpha-3E chain (374-390)
  source 1..51: mol_type = other RNA
gccgtgtgcatgctgagcaacaccaccgccatcgcggaggcctgggcccgc

SEQ ID NO: 43499 - RNA, 30 nt, synthetic construct
  misc_feature 1..30: note = SH3 domain-containing RING finger protein 3 (442-451)
  source 1..30: mol_type = other RNA
gccgtggacgccctgctccagggcgcggtc

SEQ ID NO: 43500 - RNA, 27 nt, synthetic construct
  misc_feature 1..27: note = Ribosome biogenesis protein WDR12 (196-204)
  source 1..27: mol_type = other RNA
gccgtggacggcagcgggaccaagttc

SEQ ID NO: 43501 - RNA, 27 nt, synthetic construct
  misc_feature 1..27: note = Protein fem-1 homolog A (542-550)
  source 1..27: mol_type = other RNA
gccgtggacaaggacaccaccaacgtc

SEQ ID NO: 43502 - RNA, 45 nt, synthetic construct
  misc_feature 1..45: note = Transmembraneoprotein NMB (550-564)
  source 1..45: mol_type = other RNA
gccgtgttcttccccggcaaccaggagaaggacccgctgctcaag

SEQ ID NO: 43503 - RNA, 30 nt, synthetic construct
  misc_feature 1..30: note = GTP-binding protein Di-Ras2 (11-20)
  source 1..30: mol_type = other RNA
gccgtgttcggcgccgggggcgtcgggaag

SEQ ID NO: 43504 - RNA, 30 nt, synthetic construct
  misc_feature 1..30: note = Ankyrin-2 (1172-1181)
  source 1..30: mol_type = other RNA
gccgtgttccccgagggcgccctgaccaag

SEQ ID NO: 43505 - RNA, 24 nt, synthetic construct
  misc_feature 1..24: note = Mitochondrial coenzyme A transporter SLC25A42 (298-305)
  source 1..24: mol_type = other RNA
gccgtgggcatcagcttcaccacc

SEQ ID NO: 43506 - RNA, 27 nt, synthetic construct
  misc_feature 1..27: note = Low-density lipoprotein receptor-related protein 2 (1967-1975)
  source 1..27: mol_type = other RNA
gccgtgcacgacagcttcctgtactac

SEQ ID NO: 43507 - RNA, 27 nt, synthetic construct
  misc_feature 1..27: note = Exosome complex exonuclease RRP44 (286-294)
  source 1..27: mol_type = other RNA
gccgtgcacgaggacatcgtcgccgtg

SEQ ID NO: 43508 - RNA, 36 nt, synthetic construct
  misc_feature 1..36: note = Structural maintenance of chromosomes flexible hinge domain-containing protein 1 (181-192)
  source 1..36: mol_type = other RNA
gccgtgatcgacaacggccgcgggatgaccagcaag

SEQ ID NO: 43509 - RNA, 33 nt, synthetic construct
  misc_feature 1..33: note = Pirin (150-160)
  source 1..33: mol_type = other RNA
gccgtgatcagcggcgaggccctggggatcaag

SEQ ID NO: 43510 - RNA, 33 nt, synthetic construct
  misc_feature 1..33: note = Protein disulfide-isomerase (199-209)
  source 1..33: mol_type = other RNA
gccgtgaaggtccacagcttccccaccctgaag

SEQ ID NO: 43511 - RNA, 27 nt, synthetic construct
  misc_feature 1..27: note = Influenza virus NS1A-binding protein (306-314)
  source 1..27: mol_type = other RNA
gccgtgctggacggcatcttctgcgtc

SEQ ID NO: 43512 - RNA, 27 nt, synthetic construct
  misc_feature 1..27: note = HLA class I histocompatibility antigen, Cw-5 alpha chain (322-330)
  source 1..27: mol_type = other RNA
gccgtgctgggcgccgtcatggcggtg

SEQ ID NO: 43513 - RNA, 27 nt, synthetic construct
  misc_feature 1..27: note = HLA class I histocompatibility antigen, Cw-3 alpha chain (322-330)
  source 1..27: mol_type = other RNA
gccgtgctgggcgccgtcgtggcggtg

SEQ ID NO: 43514 - RNA, 27 nt, synthetic construct
  misc_feature 1..27: note = Kelch-like protein 21 (508-516)
  source 1..27: mol_type = other RNA
gccgtgctgggcgggaagctctacgtc

SEQ ID NO: 43515 - RNA, 27 nt, synthetic construct
  misc_feature 1..27: note = Transmembrane protein 147 (17-25)
  source 1..27: mol_type = other RNA
gccgtgctgggccacttcctcagccac

SEQ ID NO: 43516 - RNA, 24 nt, synthetic construct
  misc_feature 1..24: note = ER membrane protein complex subunit 1 (144-151)
  source 1..24: mol_type = other RNA
gccgtgctgaagaagaccaccctc

SEQ ID NO: 43517 - RNA, 27 nt, synthetic construct
  misc_feature 1..27: note = Coronin-1B (42-50)
  source 1..27: mol_type = other RNA
gccgtgaaccccaagttcctggccgtc

SEQ ID NO: 43518 - RNA, 36 nt, synthetic construct
  misc_feature 1..36: note = Trinucleotide repeat-containing gene 6C protein (287-298)
  source 1..36: mol_type = other RNA
gccgtgcagaaggagggcagcgggggcaacgcctgg

SEQ ID NO: 43519 - RNA, 27 nt, synthetic construct
  misc_feature 1..27: note = Constitutive coactivator of peroxisome proliferator-activated receptor gamma (278-286)
  source 1..27: mol_type = other RNA
gccgtgagcgaccacatctccaaggtc

SEQ ID NO: 43520 - RNA, 51 nt, synthetic construct
  misc_feature 1..51: note = Histone H2B type 2-F (111-127)
  source 1..51: mol_type = other RNA
gccgtgagcgagggcaccaaggccgtcaccaagtacacgtccagcaagctg

SEQ ID NO: 43521 - RNA, 30 nt, synthetic construct
  misc_feature 1..30: note = Unconventional myosin-Ib (273-282)
  source 1..30: mol_type = other RNA
gccgtggtcgccgcggtgctgaagctcggc

SEQ ID NO: 43522 - RNA, 39 nt, synthetic construct
  misc_feature 1..39: note = HLA class I histocompatibility antigen, Cw-7 alpha chain (270-282)
  source 1..39: mol_type = other RNA
gccgtggtcgtgcccagcggccaggagcagcgctacacc

SEQ ID NO: 43523 - RNA, 54 nt, synthetic construct
  misc_feature 1..54: note = Transketolase (84-101)
  source 1..54: mol_type = other RNA
gccgtgtgggccgaggcgggcttcctggccgaggccgagctcctgaacctgcgc

SEQ ID NO: 43524 - RNA, 27 nt, synthetic construct
  misc_feature 1..27: note = Fanconi anemia group B protein (310-318)
  source 1..27: mol_type = other RNA
gccgtgtggaaggagagcttccaggtc

SEQ ID NO: 43525 - RNA, 27 nt, synthetic construct
  misc_feature 1..27: note = Glia-derived nexin (198-206)
  source 1..27: mol_type = other RNA
gccgtgtacttcaagggcctgtggaag

SEQ ID NO: 43526 - RNA, 30 nt, synthetic construct
  misc_feature 1..30: note = Ras GTPase-activating protein-binding protein 1 (54-63)
  source 1..30: mol_type = other RNA
gccgtgtacggccagaaggagatccaccgc

SEQ ID NO: 43527 - RNA, 27 nt, synthetic construct
  misc_feature 1..27: note = Probable helicase with zinc finger domain (533-541)
  source 1..27: mol_type = other RNA
gccgtgtacctgctccccgtcccgaag

SEQ ID NO: 43528 - RNA, 27 nt, synthetic construct
  misc_feature 1..27: note = Coagulation factor VIII (1262-1270)
  source 1..27: mol_type = other RNA
gcctacgcccccgtgctgcaggacttc

SEQ ID NO: 43529 - RNA, 30 nt, synthetic construct
  misc_feature 1..30: note = E3 ubiquitin-protein ligase TTC3 (578-587)
  source 1..30: mol_type = other RNA
gcctactgcggcatcgggaaggtgtacctg

SEQ ID NO: 43530 - RNA, 27 nt, synthetic construct
  misc_feature 1..27: note = Serine/threonine-protein kinase SIK3 (371-379)
  source 1..27: mol_type = other RNA
gcctacgaccactacagcgccatctac

SEQ ID NO: 43531 - RNA, 27 nt, synthetic construct
  misc_feature 1..27: note = E3 ubiquitin-protein ligase TRIM13 (217-225)
  source 1..27: mol_type = other RNA
gcctacgaccccgagatcaacaagctg

SEQ ID NO: 43532 - RNA, 27 nt, synthetic construct
  misc_feature 1..27: note = Lysophosphatidic acid receptor 1 (291-299)
  source 1..27: mol_type = other RNA
gcctacgagaagttcttcctgctcctg

SEQ ID NO: 43533 - RNA, 24 nt, synthetic construct
  misc_feature 1..24: note = Annexin A5 (93-100)
  source 1..24: mol_type = other RNA
gcctacgagctgaagcacgccctc

SEQ ID NO: 43534 - RNA, 24 nt, synthetic construct
  misc_feature 1..24: note = Collagen alpha-1(VI) chain (997-1004)
  source 1..24: mol_type = other RNA
gcctacggcgagagccacctgttc

SEQ ID NO: 43535 - RNA, 24 nt, synthetic construct
  misc_feature 1..24: note = Ribosomal protein S6 kinase alpha-4 (27-34)
  source 1..24: mol_type = other RNA
gcctacggcaaggtgttcctggtc

SEQ ID NO: 43536 - RNA, 24 nt, synthetic construct
  misc_feature 1..24: note = Lipase maturation factor 2 (303-310)
  source 1..24: mol_type = other RNA
gcctacggcaccgtgcactacttc

SEQ ID NO: 43537 - RNA, 27 nt, synthetic construct
  misc_feature 1..27: note = Transportin-1 (520-528)
  source 1..27: mol_type = other RNA
gcctacatcctggacaccctcgtgttc

SEQ ID NO: 43538 - RNA, 27 nt, synthetic construct
  misc_feature 1..27: note = Poly(A)-specific ribonuclease PARN (337-345)
  source 1..27: mol_type = other RNA
gcctacatcaccggcctgtgcttcatc

SEQ ID NO: 43539 - RNA, 27 nt, synthetic construct
  misc_feature 1..27: note = Collagen alpha-1(XXII) chain (141-149)
  source 1..27: mol_type = other RNA
gcctacaagcaggtggccatcctgctc

SEQ ID NO: 43540 - RNA, 27 nt, synthetic construct
  misc_feature 1..27: note = Nuclear receptor subfamily 2 group C member 2 (493-501)
  source 1..27: mol_type = other RNA
gcctacctgaaggccatcgtgctcttc

SEQ ID NO: 43541 - RNA, 27 nt, synthetic construct
  misc_feature 1..27: note = Low affinity sodium-glucose cotransporter (318-326)
  source 1..27: mol_type = other RNA
gcctacctgaagctcctgcccatgttc

SEQ ID NO: 43542 - RNA, 27 nt, synthetic construct
  misc_feature 1..27: note = Phosphatidylinositide phosphatase SAC2 (390-398)
  source 1..27: mol_type = other RNA
gcctacctgaagcaggtgctcctgttc

SEQ ID NO: 43543 - RNA, 30 nt, synthetic construct
  misc_feature 1..30: note = TRPM8 channel-associated factor 1 (477-486)
  source 1..30: mol_type = other RNA
gcctacctgcccgagtggaaggagaacatc

SEQ ID NO: 43544 - RNA, 27 nt, synthetic construct
  misc_feature 1..27: note = Catenin alpha-2 (811-819)
  source 1..27: mol_type = other RNA
gcctacctgcagcgcatcgccctctac

SEQ ID NO: 43545 - RNA, 27 nt, synthetic construct
  misc_feature 1..27: note = Signal recognition particle subunit SRP68 (191-199)
  source 1..27: mol_type = other RNA
gcctacctgagcggcatgctccgcttc

SEQ ID NO: 43546 - RNA, 27 nt, synthetic construct
  misc_feature 1..27: note = Transmembraneoprotein NMB (36-44)
  source 1..27: mol_type = other RNA
gcctacatgcgcgagcacaaccagctg

SEQ ID NO: 43547 - RNA, 30 nt, synthetic construct
  misc_feature 1..30: note = Serine/threonine-protein kinase mTOR (1308-1317)
  source 1..30: mol_type = other RNA
gcctacaaccccatggcccgcgacctgttc

SEQ ID NO: 43548 - RNA, 27 nt, synthetic construct
  misc_feature 1..27: note = Eukaryotic translation initiation factor 2-alpha kinase 4 (919-927)
  source 1..27: mol_type = other RNA
gcctacaaccagaaggtggacctgttc

SEQ ID NO: 43549 - RNA, 27 nt, synthetic construct
  misc_feature 1..27: note = Regulation of nuclear pre-mRNA domain-containing protein 2 (70-78)
  source 1..27: mol_type = other RNA
gcctacccccaccgcctgaacctcttc

SEQ ID NO: 43550 - RNA, 27 nt, synthetic construct
  misc_feature 1..27: note = Alpha-mannosidase 2C1 (924-932)
  source 1..27: mol_type = other RNA
gcctacagcctgaacttccccctcctg

SEQ ID NO: 43551 - RNA, 27 nt, synthetic construct
  misc_feature 1..27: note = Glutamine-fructose-6-phosphate aminotransferase (isomerizing) 1 (477-485)
  source 1..27: mol_type = other RNA
gcctacaccagccagttcgtgtccctg

SEQ ID NO: 43552 - RNA, 24 nt, synthetic construct
  misc_feature 1..24: note = Bax inhibitor 1 (91-98)
  source 1..24: mol_type = other RNA
gcctacgtgcacatggtcacccac

SEQ ID NO: 43553 - RNA, 147 nt, synthetic construct
  misc_feature 1..147: note = ATP synthase subunit epsilon, mitochondrial (3-51)
  source 1..147: mol_type = other RNA
gcctactggcgccaggccggcctgagctacatccggtactcccagatctgcgcgaaggccgtgcgcgacgccctcaagaccgagttcaaggccaacgccgagaagaccagcgggtccaacgtcaagatcgtgaaggtgaagaaggag

SEQ ID NO: 43554 - RNA, 27 nt, synthetic construct
  misc_feature 1..27: note = Serum albumin (500-508)
  source 1..27: mol_type = other RNA
tgctgcaccgagagcctggtgaaccgc

SEQ ID NO: 43555 - RNA, 27 nt, synthetic construct
  misc_feature 1..27: note = Phosphoglycerate kinase 1 (50-58)
  source 1..27: mol_type = other RNA
tgcctggacaacggcgccaagagcgtg

SEQ ID NO: 43556 - RNA, 27 nt, synthetic construct
  misc_feature 1..27: note = Sodium/potassium-transporting ATPase subunit alpha-3 (359-367)
  source 1..27: mol_type = other RNA
tgcctggtgaagaacctcgaggccgtc

SEQ ID NO: 43557 - RNA, 24 nt, synthetic construct
  misc_feature 1..24: note = Unconventional myosin-Id (243-250)
  source 1..24: mol_type = other RNA
gacgccgccgagttccgcgtggtc

SEQ ID NO: 43558 - RNA, 27 nt, synthetic construct
  misc_feature 1..27: note = Dual serine/threonine and tyrosine protein kinase (357-365)
  source 1..27: mol_type = other RNA
gacgccgccaaggcgctgaacctcgtg

SEQ ID NO: 43559 - RNA, 27 nt, synthetic construct
  misc_feature 1..27: note = Dynactin subunit 1 (411-419)
  source 1..27: mol_type = other RNA
gacgccgccctgggcgcggaggagatg

SEQ ID NO: 43560 - RNA, 27 nt, synthetic construct
  misc_feature 1..27: note = Cytoplasmic dynein 2 heavy chain 1 (311-319)
  source 1..27: mol_type = other RNA
gacgccgccctgcagatgatcaccgtg

SEQ ID NO: 43561 - RNA, 24 nt, synthetic construct
  misc_feature 1..24: note = Unconventional myosin-Ib (247-254)
  source 1..24: mol_type = other RNA
gacgccgccaacttccgcaccgtg

SEQ ID NO: 43562 - RNA, 24 nt, synthetic construct
  misc_feature 1..24: note = HLA class I histocompatibility antigen, alpha chain E (60-67)
  source 1..24: mol_type = other RNA
gacgccgccagcccccgcatggtg

SEQ ID NO: 43563 - RNA, 30 nt, synthetic construct
  misc_feature 1..30: note = Density-regulated protein (69-78)
  source 1..30: mol_type = other RNA
gacgccgactaccccctgcgcgtgctctac

SEQ ID NO: 43564 - RNA, 42 nt, synthetic construct
  misc_feature 1..42: note = Gamma-secretase C-terminal fragment 59 (562-575)
  source 1..42: mol_type = other RNA
gacgccgagttccgccacgacagcggctacgaggtgcaccac

SEQ ID NO: 43565 - RNA, 27 nt, synthetic construct
  misc_feature 1..27: note = Uncharacterized protein C15orf52 (63-71)
  source 1..27: mol_type = other RNA
gacgccgagctggaccgccggatcgtg

SEQ ID NO: 43566 - RNA, 24 nt, synthetic construct
  misc_feature 1..24: note = Zinc finger SWIM domain-containing protein 6 (875-882)
  source 1..24: mol_type = other RNA
gacgccttcaagatcgccaccctg

SEQ ID NO: 43567 - RNA, 27 nt, synthetic construct
  misc_feature 1..27: note = Fructosamine-3-kinase (34-42)
  source 1..27: mol_type = other RNA
gacgccggccccgtgttcgtcaaggtg

SEQ ID NO: 43568 - RNA, 27 nt, synthetic construct
  misc_feature 1..27: note = WD repeat-containing protein 81 (428-436)
  source 1..27: mol_type = other RNA
gacgcccacttccacttccaccagatc

SEQ ID NO: 43569 - RNA, 27 nt, synthetic construct
  misc_feature 1..27: note = Farnesyl pyrophosphate synthase (33-41)
  source 1..27: mol_type = other RNA
gacgccatcgcccgcctgaaggaggtg

SEQ ID NO: 43570 - RNA, 27 nt, synthetic construct
  misc_feature 1..27: note Dolichyl-diphosphooligosaccharide-proteinosyltransferase subunit 2 (67-75)
  source 1..27: mol_type = other RNA
gacgccaagaaggcctgcacctacatc

SEQ ID NO: 43571 - RNA, 27 nt, synthetic construct
  misc_feature 1..27: note = Heat shock 70 kDa protein 1B (323-331)
  source 1..27: mol_type = other RNA
gacgccaagctggacaaggcccagatc

SEQ ID NO: 43572 - RNA, 27 nt, synthetic construct
  misc_feature 1..27: note = FERM, RhoGEF and pleckstrin domain-containing protein 2 (711-719)
  source 1..27: mol_type = other RNA
gacgccctgaaggccatcaccgaggtg

SEQ ID NO: 43573 - RNA, 27 nt, synthetic construct
  misc_feature 1..27: note = Protocadherin gamma-A12 (636-644)
  source 1..27: mol_type = other RNA
gacgccctgaagcagagcctcgtggtc

SEQ ID NO: 43574 - RNA, 27 nt, synthetic construct
  misc_feature 1..27: note = Short-chain dehydrogenase/reductase 3 (138-146)
  source 1..27: mol_type = other RNA
gacgccctgctcaagagccagcacatc

SEQ ID NO: 43575 - RNA, 27 nt, synthetic construct
  misc_feature 1..27: note = Importin subunit alpha-3 (326-334)
  source 1..27: mol_type = other RNA
gacgccctgagccacttccccgccctc

SEQ ID NO: 43576 - RNA, 27 nt, synthetic construct
  misc_feature 1..27: note = Rab GDP dissociation inhibitor beta (233-241)
  source 1..27: mol_type = other RNA
gacgccaacagctgccagatcatcatc

SEQ ID NO: 43577 - RNA, 24 nt, synthetic construct
  misc_feature 1..24: note = Cubilin (2289-2296)
  source 1..24: mol_type = other RNA
gacgcccccatcctgagcaagttc

SEQ ID NO: 43578 - RNA, 24 nt, synthetic construct
  misc_feature 1..24: note = Fibronectin isoform 11 (1163-1170)
  source 1..24: mol_type = other RNA
gacgcccccatcgtgaacaaggtc

SEQ ID NO: 43579 - RNA, 27 nt, synthetic construct
  misc_feature 1..27: note = Fibronectin isoform 11 (1163-1171)
  source 1..27: mol_type = other RNA
gacgcccccatcgtgaacaaggtcgtg

SEQ ID NO: 43580 - RNA, 24 nt, synthetic construct
  misc_feature 1..24: note = Transcription activator BRG1 (696-703)
  source 1..24: mol_type = other RNA
gacgcccccaaggccggccagctg

SEQ ID NO: 43581 - RNA, 27 nt, synthetic construct
  misc_feature 1..27: note = Protein scribble homolog (439-447)
  source 1..27: mol_type = other RNA
gacgcccccccgagccgcgtgtccgtc

SEQ ID NO: 43582 - RNA, 27 nt, synthetic construct
  misc_feature 1..27: note = Protocadherin gamma-C3 (256-264)
  source 1..27: mol_type = other RNA
gacgcccccagcggcacccgcgtggtc

SEQ ID NO: 43583 - RNA, 27 nt, synthetic construct
  misc_feature 1..27: note = Fc receptor-like A (54-62)
  source 1..27: mol_type = other RNA
gacgcccgcgaggccggcttccaggtg

SEQ ID NO: 43584 - RNA, 24 nt, synthetic construct
  misc_feature 1..24: note = Polymerase delta-interacting protein 3 (116-123)
  source 1..24: mol_type = other RNA
gacgcccgcgagaagatcagcctg

SEQ ID NO: 43585 - RNA, 24 nt, synthetic construct
  misc_feature 1..24: note = Forkhead-associated domain-containing protein 1 (180-187)
  source 1..24: mol_type = other RNA
gacgcccgcaagcccccggtgatc

SEQ ID NO: 43586 - RNA, 24 nt, synthetic construct
  misc_feature 1..24: note = Polymerase delta-interacting protein 3 (55-62)
  source 1..24: mol_type = other RNA
gacgcccgccagaagatcggcctg

SEQ ID NO: 43587 - RNA, 39 nt, synthetic construct
  misc_feature 1..39: note = Filamin-A (1614-1626)
  source 1..39: mol_type = other RNA
gacgccagcaagtgcaccgtgaccggcgccgggatcggc

SEQ ID NO: 43588 - RNA, 24 nt, synthetic construct
  misc_feature 1..24: note = Ataxin-10 (382-389)
  source 1..24: mol_type = other RNA
gacgccagcctgctcaagaaggtg

SEQ ID NO: 43589 - RNA, 30 nt, synthetic construct
  misc_feature 1..30: note = Rootletin (478-487)
  source 1..30: mol_type = other RNA
gacgccagcaacggctccctgcgcgggctc

SEQ ID NO: 43590 - RNA, 27 nt, synthetic construct
  misc_feature 1..27: note = Basement membrane-specific heparan sulfate proteoglycan core protein (2026-2034)
  source 1..27: mol_type = other RNA
gacgccagccccccgcccgtgaagatc

SEQ ID NO: 43591 - RNA, 27 nt, synthetic construct
  misc_feature 1..27: note = Poly(A)-specific ribonuclease PARN (220-228)
  source 1..27: mol_type = other RNA
gacgccgtgggcttcagccgcgtcatc

SEQ ID NO: 43592 - RNA, 24 nt, synthetic construct
  misc_feature 1..24: note = Uncharacterized protein KIAA1522 (204-211)
  source 1..24: mol_type = other RNA
gacgccgtgcgcatccccaccgtc

SEQ ID NO: 43593 - RNA, 24 nt, synthetic construct
  misc_feature 1..24: note = Peptidylprolyl isomerase domain and WD repeat-containing protein 1 (214-221)
  source 1..24: mol_type = other RNA
gacgccgtgcgcctgatcaacatc

SEQ ID NO: 43594 - RNA, 24 nt, synthetic construct
  misc_feature 1..24: note = GCN1 general control of amino-acid synthesis 1-like 1 (1074-1081)
  source 1..24: mol_type = other RNA
gacgccgtgcgccagagcgtcgtg

SEQ ID NO: 43595 - RNA, 27 nt, synthetic construct
  misc_feature 1..27: note = Putative segment polarity protein dishevelled homolog DVL1P1 (316-324)
  source 1..27: mol_type = other RNA
gacgccgtgcgcgtcctgcgggagatc

SEQ ID NO: 43596 - RNA, 24 nt, synthetic construct
  misc_feature 1..24: note = WD repeat-containing protein 60 (576-583)
  source 1..24: mol_type = other RNA
gacgccgtggtcatgcccaagatc

SEQ ID NO: 43597 - RNA, 27 nt, synthetic construct
  misc_feature 1..27: note = Acyl-coenzyme A thioesterase 1 isoform X1 (280-288)
  source 1..27: mol_type = other RNA
gacgcctggaagcagctgcagaccttc

SEQ ID NO: 43598 - RNA, 24 nt, synthetic construct
  misc_feature 1..24: note = Nuclear factor erythroid 2-related factor 3 (109-116)
  source 1..24: mol_type = other RNA
gacgcctggctggtgcacagcgtc

SEQ ID NO: 43599 - RNA, 27 nt, synthetic construct
  misc_feature 1..27: note = Zinc finger protein 148 (493-501)
  source 1..27: mol_type = other RNA
gacgcctacctgaacagcccctccctc

SEQ ID NO: 43600 - RNA, 24 nt, synthetic construct
  misc_feature 1..24: note = Phosphatidylinositide phosphatase SAC2 (555-562)
  source 1..24: mol_type = other RNA
gacgcctaccgccaggccgtgatc

SEQ ID NO: 43601 - RNA, 27 nt, synthetic construct
  misc_feature 1..27: note = Type II inositol 3,4-bisphosphate 4-phosphatase (589-597)
  source 1..27: mol_type = other RNA
gactgcatgggcgaggtggtcaaccgc

SEQ ID NO: 43602 - RNA, 54 nt, synthetic construct
  misc_feature 1..54: note = Prolow-density lipoprotein receptor-related protein 1 (2270-2287)
  source 1..54: mol_type = other RNA
gacgacggcagccgccggatcaccatcgtggagaacgtcgggtccgtggagggc

SEQ ID NO: 43603 - RNA, 48 nt, synthetic construct
  misc_feature 1..48: note = HLA class I histocompatibility antigen, alpha chain E (50-65)
  source 1..48: mol_type = other RNA
gacgacacccagttcgtgcgcttcgacaacgacgccgccagcccccgg

SEQ ID NO: 43604 - RNA, 39 nt, synthetic construct
  misc_feature 1..39: note = HLA class I histocompatibility antigen, B-15 alpha chain (53-65)
  source 1..39: mol_type = other RNA
gacgacacccagttcgtgcgcttcgacagcgacgccgcc

SEQ ID NO: 43605 - RNA, 24 nt, synthetic construct
  misc_feature 1..24: note = Serum paraoxonase/arylesterase 2 (123-130)
  source 1..24: mol_type = other RNA
gacgacaccgtgtacctgttcgtc

SEQ ID NO: 43606 - RNA, 30 nt, synthetic construct
  misc_feature 1..30: note = Prohibitin (166-175)
  source 1..30: mol_type = other RNA
gacgacgtgagcctgacccacctcaccttc

SEQ ID NO: 43607 - RNA, 33 nt, synthetic construct
  misc_feature 1..33: note = Eukaryotic initiation factor 4A-II (183-193)
  source 1..33: mol_type = other RNA
gacgaggccgacgagatgctgagccgcggcttc

SEQ ID NO: 43608 - RNA, 30 nt, synthetic construct
  misc_feature 1..30: note = Protein Red (199-208)
  source 1..30: mol_type = other RNA
gacgaggaccccgagaacaagatcgagttc

SEQ ID NO: 43609 - RNA, 30 nt, synthetic construct
  misc_feature 1..30: note = Nuclear pore complex protein Nup98-Nup96 (633-642)
  source 1..30: mol_type = other RNA
gacgaggacagcctggtgtcccacttctac

SEQ ID NO: 43610 - RNA, 24 nt, synthetic construct
  misc_feature 1..24: note = Caseinolytic peptidase B protein homolog (340-347)
  source 1..24: mol_type = other RNA
gacgaggagcaccccctggtgttc

SEQ ID NO: 43611 - RNA, 30 nt, synthetic construct
  misc_feature 1..30: note = Splicing factor, proline- and glutamine-rich (311-320)
  source 1..30: mol_type = other RNA
gacgagttcaagcgcctgttcgccaagtac

SEQ ID NO: 43612 - RNA, 27 nt, synthetic construct
  misc_feature 1..27: note = ER membrane protein complex subunit 1 (527-535)
  source 1..27: mol_type = other RNA
gacgagttcaacctgcagaagatgatg

SEQ ID NO: 43613 - RNA, 27 nt, synthetic construct
  misc_feature 1..27: note = Aggrecan core protein (225-233)
  source 1..27: mol_type = other RNA
gacgagttccccggcgtgcgcacctac

SEQ ID NO: 43614 - RNA, 27 nt, synthetic construct
  misc_feature 1..27: note = Alpha-actinin-3 (248-256)
  source 1..27: mol_type = other RNA
gacgagaaggccatcatgacctacgtg

SEQ ID NO: 43615 - RNA, 21 nt, synthetic construct
  misc_feature 1..21: note = Probable ATP-dependent RNA helicase DDX27 (87-93)
  source 1..21: mol_type = other RNA
gacgagaagatcgagaaggtg

SEQ ID NO: 43616 - RNA, 27 nt, synthetic construct
  misc_feature 1..27: note = Heterogeneous nuclear ribonucleoprotein U (281-289)
  source 1..27: mol_type = other RNA
gacgagaacgacgtgatcacctgcttc

SEQ ID NO: 43617 - RNA, 30 nt, synthetic construct
  misc_feature 1..30: note = SURP and G-patch domain-containing protein 2 (569-578)
  source 1..30: mol_type = other RNA
gacgagaacagcctggagtacaagtactac

SEQ ID NO: 43618 - RNA, 27 nt, synthetic construct
  misc_feature 1..27: note = Serine/threonine-protein phosphatase 2A 65 kDa regulatory subunit A beta isoform (227-235)
  source 1..27: mol_type = other RNA
gacgagcaggacagcgtgcgcctgctc

SEQ ID NO: 43619 - RNA, 39 nt, synthetic construct
  misc_feature 1..39: note = Cytochrome c oxidase subunit 6B1 (5-17)
  source 1..39: mol_type = other RNA
gacgagcagcgcgccgagggcaccttccccgggaagatc

SEQ ID NO: 43620 - RNA, 27 nt, synthetic construct
  misc_feature 1..27: note = Glycine-tRNA ligase (545-553)
  source 1..27: mol_type = other RNA
gacgagcagcgcaccttcttcagcttc

SEQ ID NO: 43621 - RNA, 48 nt, synthetic construct
  misc_feature 1..48: note = Prohibitin-2 (246-261)
  source 1..48: mol_type = other RNA
gacgagagcttcacccgcggctccgacagcctgatcaaggggaagaag

SEQ ID NO: 43622 - RNA, 45 nt, synthetic construct
  misc_feature 1..45: note = Annexin A2 (52-66)
  source 1..45: mol_type = other RNA
gacgaggtgaccatcgtcaacatcctgaccaaccgcagcaacgcc

SEQ ID NO: 43623 - RNA, 72 nt, synthetic construct
  misc_feature 1..72: note = Beta-2-microglobulin (75-98)
  source 1..72: mol_type = other RNA
gacgagtacgcctgccgcgtgaaccacgtcaccctgagccagcccaagatcgtgaagtgggaccgggacatg

SEQ ID NO: 43624 - RNA, 27 nt, synthetic construct
  misc_feature 1..27: note = Rho GTPase-activating protein 33 (76-84)
  source 1..27: mol_type = other RNA
gacttcggccacatccagctgctcctg

SEQ ID NO: 43625 - RNA, 21 nt, synthetic construct
  misc_feature 1..21: note = Exocyst complex component 1 (516-522)
  source 1..21: mol_type = other RNA
gacttcatcagcaagttcttc

SEQ ID NO: 43626 - RNA, 30 nt, synthetic construct
  misc_feature 1..30: note = Chromodomain-helicase-DNA-binding protein 4 (1081-1090)
  source 1..30: mol_type = other RNA
gacttcctggagcacgagggctacaagtac

SEQ ID NO: 43627 - RNA, 21 nt, synthetic construct
  misc_feature 1..21: note = Prelamin-A/C (56-62)
  source 1..21: mol_type = other RNA
gacttccagaagaacatctac

SEQ ID NO: 43628 - RNA, 30 nt, synthetic construct
  misc_feature 1..30: note = Vacuolar protein sorting-associated protein 51 homolog (75-84)
  source 1..30: mol_type = other RNA
gacttcagcgcccgcatctccgccaccctg

SEQ ID NO: 43629 - RNA, 54 nt, synthetic construct
  misc_feature 1..54: note = Prohibitin-2 (174-191)
  source 1..54: mol_type = other RNA
gacttcagcctgatcctcgacgacgtggccatcaccgagctgtccttcagccgc

SEQ ID NO: 43630 - RNA, 75 nt, synthetic construct
  misc_feature 1..75: note = Cytochrome c oxidase subunit 6C (51-75)
  source 1..75: mol_type = other RNA
gacttctaccgcaactacgacgtgatgaaggacttcgaggagatgcggaaggccggcatcttccagagcgtcaag

SEQ ID NO: 43631 - RNA, 24 nt, synthetic construct
  misc_feature 1..24: note = Histone-lysine N-methyltransferase 2C (1502-1509)
  source 1..24: mol_type = other RNA
gacggcgccatcctggggaagctc

SEQ ID NO: 43632 - RNA, 24 nt, synthetic construct
  misc_feature 1..24: note = Melanocyte protein PMEL (233-240)
  source 1..24: mol_type = other RNA
gacggcgggaacaagcacttcctg

SEQ ID NO: 43633 - RNA, 66 nt, synthetic construct
  misc_feature 1..66: note = Cytochrome c oxidase subunit 6A1, mitochondrial (65-86)
  source 1..66: mol_type = other RNA
gacggcaaccacaccctgttccacaacccccacgtgaacccgctccccaccgggtacgaggacgag

SEQ ID NO: 43634 - RNA, 27 nt, synthetic construct
  misc_feature 1..27: note = E3 ubiquitin-protein ligase UBR4 (503-511)
  source 1..27: mol_type = other RNA
gacggccccccggccgccctgagcatc

SEQ ID NO: 43635 - RNA, 24 nt, synthetic construct
  misc_feature 1..24: note = Signal transducer and activator of transcription 2 (570-577)
  source 1..24: mol_type = other RNA
gacggccgcatcatggggttcgtg

SEQ ID NO: 43636 - RNA, 27 nt, synthetic construct
  misc_feature 1..27: note = Protein transport protein Sec31A (325-333)
  source 1..27: mol_type = other RNA
gacggccgcatcagcgtgtactccatc

SEQ ID NO: 43637 - RNA, 48 nt, synthetic construct
  misc_feature 1..48: note = Roundabout homolog 1 (1436-1451)
  source 1..48: mol_type = other RNA
gacggccgccaggtggtcgacatgcggaccaaccccggggacccgcgc

SEQ ID NO: 43638 - RNA, 24 nt, synthetic construct
  misc_feature 1..24: note = Ubiquitin-60S ribosomal protein L40 (57-64)
  source 1..24: mol_type = other RNA
gacggccgcaccctgagcgactac

SEQ ID NO: 43639 - RNA, 27 nt, synthetic construct
  misc_feature 1..27: note = Low-density lipoprotein receptor-related protein 2 (857-865)
  source 1..27: mol_type = other RNA
gacggcagccacctgctccccgtgatc

SEQ ID NO: 43640 - RNA, 45 nt, synthetic construct
  misc_feature 1..45: note = Annexin A2 (182-196)
  source 1..45: mol_type = other RNA
gacggcagcgtgatcgactacgagctgatcgaccaggacgcccgc

SEQ ID NO: 43641 - RNA, 24 nt, synthetic construct
  misc_feature 1..24: note = Neuroblast differentiation-associated protein AHNAK (730-737)
  source 1..24: mol_type = other RNA
gacggcgtgaaggtccccgggatc

SEQ ID NO: 43642 - RNA, 60 nt, synthetic construct
  misc_feature 1..60: note = Glia-derived nexin (187-206)
  source 1..60: mol_type = other RNA
gacggcgtgctgacccgcctcgtcctggtgaacgccgtgtacttcaaggggctgtggaag

SEQ ID NO: 43643 - RNA, 27 nt, synthetic construct
  misc_feature 1..27: note = Myotubularin-related protein 3 (99-107)
  source 1..27: mol_type = other RNA
gacggctgggaccgcaccccccagatc

SEQ ID NO: 43644 - RNA, 27 nt, synthetic construct
  misc_feature 1..27: note = Phosphorylase b kinase regulatory subunit alpha, skeletal muscle isoform (591-599)
  source 1..27: mol_type = other RNA
gacggctacttcgggggcgcccgcgtg

SEQ ID NO: 43645 - RNA, 24 nt, synthetic construct
  misc_feature 1..24: note = Molybdenum cofactor sulfurase (53-60)
  source 1..24: mol_type = other RNA
gaccacgccggcgccaccctgttc

SEQ ID NO: 43646 - RNA, 36 nt, synthetic construct
  misc_feature 1..36: note = Trifunctional enzyme subunit alpha, mitochondrial (752-763)
  source 1..36: mol_type = other RNA
gaccacgccaacagccccaacaagaagttctaccag

SEQ ID NO: 43647 - RNA, 21 nt, synthetic construct
  misc_feature 1..21: note = tRNA-splicing ligase RtcB homolog (149-155)
  source 1..21: mol_type = other RNA
gaccacatccccgtgggcgtc

SEQ ID NO: 43648 - RNA, 24 nt, synthetic construct
  misc_feature 1..24: note = T-complex protein 1 subunit beta (336-343)
  source 1..24: mol_type = other RNA
gaccaccccgagctggtgaagctc

SEQ ID NO: 43649 - RNA, 21 nt, synthetic construct
  misc_feature 1..21: note = Syntenin-1 (292-298)
  source 1..21: mol_type = other RNA
gaccacaccatccccgaggtg

SEQ ID NO: 43650 - RNA, 21 nt, synthetic construct
  misc_feature 1..21: note = GPI transamidase component PIG-T (163-169)
  source 1..21: mol_type = other RNA
gaccactacttcctgcgctac

SEQ ID NO: 43651 - RNA, 21 nt, synthetic construct
  misc_feature 1..21: note = Probable helicase with zinc finger domain (343-349)
  source 1..21: mol_type = other RNA
gaccactacgtgtacaaggtc

SEQ ID NO: 43652 - RNA, 27 nt, synthetic construct
  misc_feature 1..27: note = Probable helicase with zinc finger domain (343-351)
  source 1..27: mol_type = other RNA
gaccactacgtgtacaaggtcggcatc

SEQ ID NO: 43653 - RNA, 27 nt, synthetic construct
  misc_feature 1..27: note = Putative Polycomb group protein ASXL1 (616-624)
  source 1..27: mol_type = other RNA
gacatcaaggcccgcgccctgcaggtg

SEQ ID NO: 43654 - RNA, 27 nt, synthetic construct
  misc_feature 1..27: note = Protein zyg-11 homolog B (263-271)
  source 1..27: mol_type = other RNA
gacatcctgcccaacctcgtgagcctg

SEQ ID NO: 43655 - RNA, 42 nt, synthetic construct
  misc_feature 1..42: note = Collagen alpha-1(XI) chain (219-232)
  source 1..42: mol_type = other RNA
gacatccagcagttcctgatcaccggcgaccccaaggccgcc

SEQ ID NO: 43656 - RNA, 48 nt, synthetic construct
  misc_feature 1..48: note = Collagen alpha-1(XI) chain (219-234)
  source 1..48: mol_type = other RNA
gacatccagcagttcctgatcaccggcgaccccaaggccgcctacgac

SEQ ID NO: 43657 - RNA, 27 nt, synthetic construct
  misc_feature 1..27: note = Eukaryotic translation initiation factor 3 subunit C-like protein (636-644)
  source 1..27: mol_type = other RNA
gacatccagagctccggccgcgccaag

SEQ ID NO: 43658 - RNA, 42 nt, synthetic construct
  misc_feature 1..42: note = Protocadherin Fat 1 (2630-2643)
  source 1..42: mol_type = other RNA
gacatcacctacgccatcgaggccgacagcgagtccgtgaag

SEQ ID NO: 43659 - RNA, 45 nt, synthetic construct
  misc_feature 1..45: note = Glia-derived nexin (118-132)
  source 1..45: mol_type = other RNA
gacatcgtgaccgtcgccaacgccgtgttcgtgaagaacgcgagc

SEQ ID NO: 43660 - RNA, 24 nt, synthetic construct
  misc_feature 1..24: note = SWI/SNF complex subunit SMARCC1 (603-610)
  source 1..24: mol_type = other RNA
gacatctacagcaagaagaccctg

SEQ ID NO: 43661 - RNA, 36 nt, synthetic construct
  misc_feature 1..36: note = Spectrin alpha chain, non-erythrocytic 1 (662-673)
  source 1..36: mol_type = other RNA
gacaagggcgacagcctggactccgtggaggccctc

SEQ ID NO: 43662 - RNA, 21 nt, synthetic construct
  misc_feature 1..21: note = V-type proton ATPase catalytic subunit A (466-472)
  source 1..21: mol_type = other RNA
gacaagcacttcaccgagttc

SEQ ID NO: 43663 - RNA, 21 nt, synthetic construct
  misc_feature 1..21: note = Heat shock protein HSP 90-beta (498-504)
  source 1..21: mol_type = other RNA
gacaagaaggtggagaaggtc

SEQ ID NO: 43664 - RNA, 21 nt, synthetic construct
  misc_feature 1..21: note = Protein O-GlcNAcase (831-837)
  source 1..21: mol_type = other RNA
gacaagcgcatcctggagttc

SEQ ID NO: 43665 - RNA, 42 nt, synthetic construct
  misc_feature 1..42: note = Beta-enolase (195-208)
  source 1..42: mol_type = other RNA
gacaaggtggtcatcggcatggacgtggccgccagcgagttc

SEQ ID NO: 43666 - RNA, 45 nt, synthetic construct
  misc_feature 1..45: note = L-lactate dehydrogenase A chain (43-57)
  source 1..45: mol_type = other RNA
gacctggccgacgagctcgccctggtggacgtcatcgaggacaag

SEQ ID NO: 43667 - RNA, 69 nt, synthetic construct
  misc_feature 1..69: note = Neutral alpha-glucosidase AB (213-235)
  source 1..69: mol_type = other RNA
gacctgggcatcttctggctcaacgccgccgagacctgggtggacatcagctccaacaccgcggggaag

SEQ ID NO: 43668 - RNA, 57 nt, synthetic construct
  misc_feature 1..57: note = Biotin-protein ligase (615-633)
  source 1..57: mol_type = other RNA
gacctgatcaccgagtacaacaagcagcacaaggccgagctcaagcccctgcgcgcc

SEQ ID NO: 43669 - RNA, 24 nt, synthetic construct
  misc_feature 1..24: note = 1-phosphatidylinositol 4,5-bisphosphate phosphodiesterase beta-4 (280-287)
  source 1..24: mol_type = other RNA
gacctgaagaagaagggcctcatc

SEQ ID NO: 43670 - RNA, 27 nt, synthetic construct
  misc_feature 1..27: note = Protein AHNAK2 (2044-2052)
  source 1..27: mol_type = other RNA
gacctgaaggtgcagaccggccaggtc

SEQ ID NO: 43671 - RNA, 48 nt, synthetic construct
  misc_feature 1..48: note = Inosine triphosphate pyrophosphatase (41-56)
  source 1..48: mol_type = other RNA
gacctgcccgagtaccagggcgagccggacgagatcagcatccagaag

SEQ ID NO: 43672 - RNA, 81 nt, synthetic construct
  misc_feature 1..81: note = Heat shock protein HSP 90-alpha (477-503)
  source 1..81: mol_type = other RNA
gacctggtgatcctcctgtacgagaccgccctgctcagctccggcttcagcctggaggacccccagacccacgccaaccgc

SEQ ID NO: 43673 - RNA, 24 nt, synthetic construct
  misc_feature 1..24: note = Melanocyte protein PMEL (9-16)
  source 1..24: mol_type = other RNA
gacctggtgctcaagcgctgcctg

SEQ ID NO: 43674 - RNA, 81 nt, synthetic construct
  misc_feature 1..81: note = Heat shock protein HSP 90-beta (579-605)
  source 1..81: mol_type = other RNA
gacctggtggtcctcctgttcgagaccgccctgctcagctccggcttcagcctggaggacccccagacccactccaaccgc

SEQ ID NO: 43675 - RNA, 33 nt, synthetic construct
  misc_feature 1..33: note = Fibronectin isoform 6 (1235-1245)
  source 1..33: mol_type = other RNA
gacaacctgagccccggcctcgagtacaacgtg

SEQ ID NO: 43676 - RNA, 57 nt, synthetic construct
  misc_feature 1..57: note = Serine/threonine-protein phosphatase 2A 65 kDa regulatory subunit A alpha isoform (199-217)
  source 1..57: mol_type = other RNA
gacaacgtgaagagcgagatcatccccatgttctccaacctggccagcgacgagcag

SEQ ID NO: 43677 - RNA, 24 nt, synthetic construct
  misc_feature 1..24: note = GPN-loop GTPase 2 (151-158)
  source 1..24: mol_type = other RNA
gaccccgccaagttcatcagcgtg

SEQ ID NO: 43678 - RNA, 48 nt, synthetic construct
  misc_feature 1..48: note = Cadherin-2 (380-395)
  source 1..48: mol_type = other RNA
gaccccgccaactggctgaagatcgacccggtgaacggccagatcacc

SEQ ID NO: 43679 - RNA, 27 nt, synthetic construct
  misc_feature 1..27: note = DNA helicase MCM9 (298-306)
  source 1..27: mol_type = other RNA
gaccccttcgccggccgcaacgtgatc

SEQ ID NO: 43680 - RNA, 24 nt, synthetic construct
  misc_feature 1..24: note = Putative signal peptidase complex catalytic subunit SEC11B (62-69)
  source 1..24: mol_type = other RNA
gaccccatccgcgtgggcgagatc

SEQ ID NO: 43681 - RNA, 30 nt, synthetic construct
  misc_feature 1..30: note = Maestro heat-like repeat-containing protein family member 6 (652-661)
  source 1..30: mol_type = other RNA
gaccccaagccggccgtggccgcggccgcc

SEQ ID NO: 43682 - RNA, 27 nt, synthetic construct
  misc_feature 1..27: note = Prolyl 4-hydroxylase subunit alpha-2 (368-376)
  source 1..27: mol_type = other RNA
gaccccaagaccggcgtgctgaccgtc

SEQ ID NO: 43683 - RNA, 24 nt, synthetic construct
  misc_feature 1..24: note = Sulfate transporter (642-649)
  source 1..24: mol_type = other RNA
gaccccctggagctccacaccatc

SEQ ID NO: 43684 - RNA, 24 nt, synthetic construct
  misc_feature 1..24: note = Signal recognition particle 9 kDa protein (21-28)
  source 1..24: mol_type = other RNA
gaccccatgaaggcccgcgtggtc

SEQ ID NO: 43685 - RNA, 27 nt, synthetic construct
  misc_feature 1..27: note = Titin (17217-17225)
  source 1..27: mol_type = other RNA
gaccccccgggcacccccgagcccatc

SEQ ID NO: 43686 - RNA, 27 nt, synthetic construct
  misc_feature 1..27: note = Titin (16908-16916)
  source 1..27: mol_type = other RNA
gacccccgcagcctggccgtgccgatc

SEQ ID NO: 43687 - RNA, 27 nt, synthetic construct
  misc_feature 1..27: note = Dedicator of cytokinesis protein 7 (1087-1095)
  source 1..27: mol_type = other RNA
gacccccgctacagcgacccgcagatc

SEQ ID NO: 43688 - RNA, 30 nt, synthetic construct
  misc_feature 1..30: note = Integral membrane protein DGCR2/IDD (52-61)
  source 1..30: mol_type = other RNA
gaccccagccacttccacgccgtgaacgtc

SEQ ID NO: 43689 - RNA, 45 nt, synthetic construct
  misc_feature 1..45: note = Cadherin-2 (267-281)
  source 1..45: mol_type = other RNA
gaccccaccggccgcttcgccatccagaccgacccgaacagcaac

SEQ ID NO: 43690 - RNA, 48 nt, synthetic construct
  misc_feature 1..48: note = Cadherin-2 (267-282)
  source 1..48: mol_type = other RNA
gaccccaccggccgcttcgccatccagaccgacccgaacagcaacgac

SEQ ID NO: 43691 - RNA, 51 nt, synthetic construct
  misc_feature 1..51: note = Cadherin-2 (267-283)
  source 1..51: mol_type = other RNA
gaccccaccggccgcttcgccatccagaccgacccgaacagcaacgacggg

SEQ ID NO: 43692 - RNA, 27 nt, synthetic construct
  misc_feature 1..27: note = Zinc finger protein 469 (3286-3294)
  source 1..27: mol_type = other RNA
gacccctgggccggcggggagccgctg

SEQ ID NO: 43693 - RNA, 24 nt, synthetic construct
  misc_feature 1..24: note = Poly (ADP-ribose) polymerase 12 (148-155)
  source 1..24: mol_type = other RNA
gacccctggctgctcccggagatc

SEQ ID NO: 43694 - RNA, 78 nt, synthetic construct
  misc_feature 1..78: note = Protein S100-A6 (65-90)
  source 1..78: mol_type = other RNA
gaccaggaggtgaacttccaggagtacgtcaccttcctgggcgccctcgccctgatctacaacgaggcgctgaagggg

SEQ ID NO: 43695 - RNA, 72 nt, synthetic construct
  misc_feature 1..72: note = CREB-binding protein (539-562)
  source 1..72: mol_type = other RNA
gaccagcagcccccgaacctgatcagcgagtccgccctccccaccagcctgggcgccaccaaccccctgatg

SEQ ID NO: 43696 - RNA, 21 nt, synthetic construct
  misc_feature 1..21: note = Paired amphipathic helix protein Sin3a (131-137)
  source 1..21: mol_type = other RNA
gaccaggtgaagctgcagttc

SEQ ID NO: 43697 - RNA, 21 nt, synthetic construct
  misc_feature 1..21: note = Cyclin-I (74-80)
  source 1..21: mol_type = other RNA
gaccgcttcctggccaccgtg

SEQ ID NO: 43698 - RNA, 24 nt, synthetic construct
  misc_feature 1..24: note = SUN domain-containing protein 2 (41-48)
  source 1..24: mol_type = other RNA
gaccgcatcggcctggccgactac

SEQ ID NO: 43699 - RNA, 63 nt, synthetic construct
  misc_feature 1..63: note = Heterogeneous nuclear ribonucleoprotein U (184-204)
  source 1..63: mol_type = other RNA
gaccgcctgagcgcctccagcctcaccatggagtccttcgccttcctgtgggcgggcgggcgg

SEQ ID NO: 43700 - RNA, 45 nt, synthetic construct
  misc_feature 1..45: note = HLA class I histocompatibility antigen, A-23 alpha chain (351-365)
  source 1..45: mol_type = other RNA
gacagcgcccagggctccgacgtgagcctgaccgcctgcaaggtc

SEQ ID NO: 43701 - RNA, 33 nt, synthetic construct
  misc_feature 1..33: note = HLA class I histocompatibility antigen, alpha chain E (338-348)
  source 1..33: mol_type = other RNA
gacagcgcccagggctccgagagccactccctg

SEQ ID NO: 43702 - RNA, 33 nt, synthetic construct
  misc_feature 1..33: note = DNA-directed RNA polymerase I subunit RPA1 (1009-1019)
  source 1..33: mol_type = other RNA
gacagcgacggctccgtggtccagttcctgtac

SEQ ID NO: 43703 - RNA, 33 nt, synthetic construct
  misc_feature 1..33: note = ATP-dependent RNA helicase DHX29 (1132-1142)
  source 1..33: mol_type = other RNA
gacagcgaccacctgaccatctacaacgcctac

SEQ ID NO: 43704 - RNA, 27 nt, synthetic construct
  misc_feature 1..27: note = Sorbin and SH3 domain-containing protein 1 (255-263)
  source 1..27: mol_type = other RNA
gacagcgacctgtactccccccgctac

SEQ ID NO: 43705 - RNA, 30 nt, synthetic construct
  misc_feature 1..30: note = Tyrosinase (454-463)
  source 1..30: mol_type = other RNA
gacagcgaccccgactccttccaggactac

SEQ ID NO: 43706 - RNA, 21 nt, synthetic construct
  misc_feature 1..21: note = Cullin-4B (365-371)
  source 1..21: mol_type = other RNA
gacagcttcgagcagcgcttc

SEQ ID NO: 43707 - RNA, 48 nt, synthetic construct
  misc_feature 1..48: note = Alpha-endosulfine (66-81)
  source 1..48: mol_type = other RNA
gacagcggcgactacaacatggccaaggccaagatgaagaacaagcag

SEQ ID NO: 43708 - RNA, 30 nt, synthetic construct
  misc_feature 1..30: note = Ral GTPase-activating protein subunit alpha-1 (921-930)
  source 1..30: mol_type = other RNA
gacagccactccgacagcttctccgccttc

SEQ ID NO: 43709 - RNA, 42 nt, synthetic construct
  misc_feature 1..42: note = Acylamino-acid-releasing enzyme (442-455)
  source 1..42: mol_type = other RNA
gacagcatcctgtccctccccggcaacgtggggcaccaggac

SEQ ID NO: 43710 - RNA, 39 nt, synthetic construct
  misc_feature 1..39: note = Endoplasmin (205-217)
  source 1..39: mol_type = other RNA
gacagcaacgagttctccgtgatcgccgacccccgcggc

SEQ ID NO: 43711 - RNA, 42 nt, synthetic construct
  misc_feature 1..42: note = Endoplasmin (205-218)
  source 1..42: mol_type = other RNA
gacagcaacgagttctccgtgatcgccgacccccgcggcaac

SEQ ID NO: 43712 - RNA, 45 nt, synthetic construct
  misc_feature 1..45: note = Endoplasmin (205-219)
  source 1..45: mol_type = other RNA
gacagcaacgagttctccgtgatcgccgacccccgcggcaacacc

SEQ ID NO: 43713 - RNA, 48 nt, synthetic construct
  misc_feature 1..48: note = Endoplasmin (205-220)
  source 1..48: mol_type = other RNA
gacagcaacgagttctccgtgatcgccgacccccgcggcaacaccctg

SEQ ID NO: 43714 - RNA, 51 nt, synthetic construct
  misc_feature 1..51: note = Endoplasmin (205-221)
  source 1..51: mol_type = other RNA
gacagcaacgagttctccgtgatcgccgacccccgcggcaacaccctgggg

SEQ ID NO: 43715 - RNA, 24 nt, synthetic construct
  misc_feature 1..24: note = Serine/threonine-protein phosphatase 2A 65 kDa regulatory subunit A beta isoform isoform e (103-110)
  source 1..24: mol_type = other RNA
gacagcgtgcgcctgctcgccgtc

SEQ ID NO: 43716 - RNA, 30 nt, synthetic construct
  misc_feature 1..30: note = Calpain-3 (40-49)
  source 1..30: mol_type = other RNA
gacaccgacggcagcgggaagctgaacctc

SEQ ID NO: 43717 - RNA, 57 nt, synthetic construct
  misc_feature 1..57: note = Beta-secretase 2 (110-128)
  source 1..57: mol_type = other RNA
gacaccggcagctccaacttcgccgtggccgggaccccccacagctacatcgacacg

SEQ ID NO: 43718 - RNA, 33 nt, synthetic construct
  misc_feature 1..33: note = Fibronectin isoform 6 (1261-1271)
  source 1..33: mol_type = other RNA
gacaccatcatccccgccgtgccgccccccacc

SEQ ID NO: 43719 - RNA, 36 nt, synthetic construct
  misc_feature 1..36: note = IST1 homolog (333-344)
  source 1..36: mol_type = other RNA
gacaccctgcccaccgccagcgccggcgcgtccacg

SEQ ID NO: 43720 - RNA, 27 nt, synthetic construct
  misc_feature 1..27: note = Pre-mRNA-processing-splicing factor 8 (1782-1790)
  source 1..27: mol_type = other RNA
gacaccaacgtgtaccgcgtcaccatc

SEQ ID NO: 43721 - RNA, 48 nt, synthetic construct
  misc_feature 1..48: note = Glutamate receptor ionotropic, kainate 2 (79-94)
  source 1..48: mol_type = other RNA
gacacccagaagatcaacctgtacgacagcttcgaggcctccaagaag

SEQ ID NO: 43722 - RNA, 21 nt, synthetic construct
  misc_feature 1..21: note = Zinc finger MYM-type protein 2 (612-618)
  source 1..21: mol_type = other RNA
gacacctggcgcaccgagtac

SEQ ID NO: 43723 - RNA, 27 nt, synthetic construct
  misc_feature 1..27: note = V-type proton ATPase subunit S1 (142-150)
  source 1..27: mol_type = other RNA
gacgtggccgtcgtggccggcgggctg

SEQ ID NO: 43724 - RNA, 27 nt, synthetic construct
  misc_feature 1..27: note = Coatomer subunit epsilon (49-57)
  source 1..27: mol_type = other RNA
gacgtggagcgcgacgtcttcctgtac

SEQ ID NO: 43725 - RNA, 24 nt, synthetic construct
  misc_feature 1..24: note = Endothelial differentiation-related factor 1 (37-44)
  source 1..24: mol_type = other RNA
gacgtggagaccagcaagaagtgg

SEQ ID NO: 43726 - RNA, 30 nt, synthetic construct
  misc_feature 1..30: note = Inhibitor of nuclear factor kappa-B kinase subunit alpha (123-132)
  source 1..30: mol_type = other RNA
gacgtgggcgggaagatcatccacaagatc

SEQ ID NO: 43727 - RNA, 36 nt, synthetic construct
  misc_feature 1..36: note = Gamma-secretase C-terminal fragment 59 (584-595)
  source 1..36: mol_type = other RNA
gacgtgggcagcaacaagggggccatcatcggcctg

SEQ ID NO: 43728 - RNA, 54 nt, synthetic construct
  misc_feature 1..54: note = Gamma-secretase C-terminal fragment 59 (584-601)
  source 1..54: mol_type = other RNA
gacgtgggcagcaacaagggggccatcatcggcctgatggtcgggggcgtggtg

SEQ ID NO: 43729 - RNA, 21 nt, synthetic construct
  misc_feature 1..21: note = 40S ribosomal protein S13 (21-27)
  source 1..21: mol_type = other RNA
gacgtgaaggagcagatctac

SEQ ID NO: 43730 - RNA, 48 nt, synthetic construct
  misc_feature 1..48: note = Laminin subunit alpha-4 (1287-1302)
  source 1..48: mol_type = other RNA
gacgtgaagggcatcaaggtccagagcgtggacaagcagtacaacgac

SEQ ID NO: 43731 - RNA, 51 nt, synthetic construct
  misc_feature 1..51: note = Laminin subunit alpha-4 (1287-1303)
  source 1..51: mol_type = other RNA
gacgtgaagggcatcaaggtccagagcgtggacaagcagtacaacgacggg

SEQ ID NO: 43732 - RNA, 24 nt, synthetic construct
  misc_feature 1..24: note = N6-adenosine-methyltransferase 70 kDa subunit (382-389)
  source 1..24: mol_type = other RNA
gacgtgagcatcctgggcaagttc

SEQ ID NO: 43733 - RNA, 27 nt, synthetic construct
  misc_feature 1..27: note = HLA class I histocompatibility antigen, A-23 alpha chain (357-365)
  source 1..27: mol_type = other RNA
gacgtgagcctgaccgcctgcaaggtc

SEQ ID NO: 43734 - RNA, 36 nt, synthetic construct
  misc_feature 1..36: note = Ubiquitin carboxyl-terminal hydrolase 36 (576-587)
  source 1..36: mol_type = other RNA
gacgtggtcctgagcacctcccccaagctcctggcc

SEQ ID NO: 43735 - RNA, 18 nt, synthetic construct
  misc_feature 1..18: note = U5 small nuclear ribonucleoprotein 200 kDa helicase (1392-1397)
  source 1..18: mol_type = other RNA
gactggtacgagaagttc

SEQ ID NO: 43736 - RNA, 27 nt, synthetic construct
  misc_feature 1..27: note = Growth arrest-specific protein 7 (285-293)
  source 1..27: mol_type = other RNA
gactacgccaagaacctggccaagctc

SEQ ID NO: 43737 - RNA, 27 nt, synthetic construct
  misc_feature 1..27: note = ER membrane protein complex subunit 1 (634-642)
  source 1..27: mol_type = other RNA
gactacgccaaggtgctgctcctgatc

SEQ ID NO: 43738 - RNA, 27 nt, synthetic construct
  misc_feature 1..27: note = Multidrug resistance-associated protein 5 (776-784)
  source 1..27: mol_type = other RNA
gactacgccaccatcttcaacaacctg

SEQ ID NO: 43739 - RNA, 27 nt, synthetic construct
  misc_feature 1..27: note = Protein Niban (485-493)
  source 1..27: mol_type = other RNA
gactacgacagctccaccatccgcaag

SEQ ID NO: 43740 - RNA, 21 nt, synthetic construct
  misc_feature 1..21: note = Plastin-3 (34-40)
  source 1..21: mol_type = other RNA
gactacgagctgcacgagctc

SEQ ID NO: 43741 - RNA, 27 nt, synthetic construct
  misc_feature 1..27: note = 14-3-3 protein epsilon (127-135)
  source 1..27: mol_type = other RNA
gactaccaccgctacctggccgagttc

SEQ ID NO: 43742 - RNA, 27 nt, synthetic construct
  misc_feature 1..27: note = Cyclic AMP-dependent transcription factor ATF-4 (36-44)
  source 1..27: mol_type = other RNA
gactacctggaggtggccaagcacttc

SEQ ID NO: 43743 - RNA, 27 nt, synthetic construct
  misc_feature 1..27: note = Lysosomal-trafficking regulator (2228-2236)
  source 1..27: mol_type = other RNA
gactacctgaagggcctcgccagcttc

SEQ ID NO: 43744 - RNA, 27 nt, synthetic construct
  misc_feature 1..27: note = Importin-7 (93-101)
  source 1..27: mol_type = other RNA
gactaccccagccgctggaccgccatc

SEQ ID NO: 43745 - RNA, 27 nt, synthetic construct
  misc_feature 1..27: note = L-dopachrome tautomerase (155-163)
  source 1..27: mol_type = other RNA
gactacgtgatcaccacccagcactgg

SEQ ID NO: 43746 - RNA, 27 nt, synthetic construct
  misc_feature 1..27: note = Down syndrome critical region protein 3 (203-211)
  source 1..27: mol_type = other RNA
gaggccgccatccgcagcgtggagctg

SEQ ID NO: 43747 - RNA, 30 nt, synthetic construct
  misc_feature 1..30: note = V-set and immunoglobulin domain-containing protein 10-like (447-456)
  source 1..30: mol_type = other RNA
gaggccgccgtgcccgcgggcagccgcctg

SEQ ID NO: 43748 - RNA, 24 nt, synthetic construct
  misc_feature 1..24: note = Laminin subunit gamma-1 (1193-1200)
  source 1..24: mol_type = other RNA
gaggccgacgacatcgtgcgcgtc

SEQ ID NO: 43749 - RNA, 24 nt, synthetic construct
  misc_feature 1..24: note = Poly (ADP-ribose) polymerase 1 (810-817)
  source 1..24: mol_type = other RNA
gaggccgagatcatccgcaagtac

SEQ ID NO: 43750 - RNA, 30 nt, synthetic construct
  misc_feature 1..30: note = Poly (ADP-ribose) polymerase 14 (805-814)
  source 1..30: mol_type = other RNA
gaggccttcgccgaggcggtgaagaccgtc

SEQ ID NO: 43751 - RNA, 24 nt, synthetic construct
  misc_feature 1..24: note = Alpha-mannosidase 2x (749-756)
  source 1..24: mol_type = other RNA
gaggccttccccctgcgcgtgatc

SEQ ID NO: 43752 - RNA, 36 nt, synthetic construct
  misc_feature 1..36: note = Coronin-6 (123-134)
  source 1..36: mol_type = other RNA
gaggccggcgggggcggggccttcatcgtgctgccc

SEQ ID NO: 43753 - RNA, 24 nt, synthetic construct
  misc_feature 1..24: note = Leucine-tRNA ligase, cytoplasmic (462-469)
  source 1..24: mol_type = other RNA
gaggccaaggagaagatctacctg

SEQ ID NO: 43754 - RNA, 27 nt, synthetic construct
  misc_feature 1..27: note = Guanine nucleotide-binding protein G(s) subunit alpha isoforms short (258-266)
  source 1..27: mol_type = other RNA
gaggccctgaacctcttcaagagcatc

SEQ ID NO: 43755 - RNA, 27 nt, synthetic construct
  misc_feature 1..27: note = 60 kDa heat shock protein, mitochondrial (165-173)
  source 1..27: mol_type = other RNA
gaggccctgagcaccctcgtgctgaac

SEQ ID NO: 43756 - RNA, 24 nt, synthetic construct
  misc_feature 1..24: note = Sulfhydryl oxidase 1 (224-231)
  source 1..24: mol_type = other RNA
gaggccaacgtggtccgcaagttc

SEQ ID NO: 43757 - RNA, 30 nt, synthetic construct
  misc_feature 1..30: note = General transcription factor IIF subunit 1 (356-365)
  source 1..30: mol_type = other RNA
gaggccagctccgccctgttcatggcgaag

SEQ ID NO: 43758 - RNA, 27 nt, synthetic construct
  misc_feature 1..27: note = Spectrin beta chain, non-erythrocytic 2 (1585-1593)
  source 1..27: mol_type = other RNA
gaggacgccctgcgcgcccagcagttc

SEQ ID NO: 43759 - RNA, 24 nt, synthetic construct
  misc_feature 1..24: note = Tyrosine-protein kinase BAZ1B (275-282)
  source 1..24: mol_type = other RNA
gaggacgagctggtgaagaagtac

SEQ ID NO: 43760 - RNA, 27 nt, synthetic construct
  misc_feature 1..27: note = ATP-dependent RNA helicase DDX50 (3-11)
  source 1..27: mol_type = other RNA
gaggacaacccccagaccctgctcttc

SEQ ID NO: 43761 - RNA, 27 nt, synthetic construct
  misc_feature 1..27: note = Kinesin-like protein KIF13B (775-783)
  source 1..27: mol_type = other RNA
gaggacaaccccgtgatccgcagctac

SEQ ID NO: 43762 - RNA, 24 nt, synthetic construct
  misc_feature 1..24: note = F-box only protein 32 (101-108)
  source 1..24: mol_type = other RNA
gaggaccagcagaacatccgcctg

SEQ ID NO: 43763 - RNA, 27 nt, synthetic construct
  misc_feature 1..27: note = Peptidyl-prolyl cis-trans isomerase FKBP9 (198-206)
  source 1..27: mol_type = other RNA
gaggaccaggtgcagatccacacctac

SEQ ID NO: 43764 - RNA, 24 nt, synthetic construct
  misc_feature 1..24: note = Eukaryotic translation initiation factor 3 subunit A (755-762)
  source 1..24: mol_type = other RNA
gaggaccgcgacctgttcgtgatg

SEQ ID NO: 43765 - RNA, 27 nt, synthetic construct
  misc_feature 1..27: note = Cullin-4B (405-413)
  source 1..27: mol_type = other RNA
gaggaggccgaccgcctgatcacctac

SEQ ID NO: 43766 - RNA, 30 nt, synthetic construct
  misc_feature 1..30: note = Proteasome activator complex subunit 3 (93-102)
  source 1..30: mol_type = other RNA
gaggaggccttccagggcaccaaggtgttc

SEQ ID NO: 43767 - RNA, 30 nt, synthetic construct
  misc_feature 1..30: note = Heterogeneous nuclear ribonucleoprotein U (540-549)
  source 1..30: mol_type = other RNA
gaggaggcccagaagctgctcgagcagtac

SEQ ID NO: 43768 - RNA, 30 nt, synthetic construct
  misc_feature 1..30: note = Staphylococcal nuclease domain-containing protein 1 (554-563)
  source 1..30: mol_type = other RNA
gaggaggccaccctgttcaccaaggagctc

SEQ ID NO: 43769 - RNA, 27 nt, synthetic construct
  misc_feature 1..27: note = Tribbles homolog 2 (149-157)
  source 1..27: mol_type = other RNA
gaggaggaggccgcccgcctgttctac

SEQ ID NO: 43770 - RNA, 30 nt, synthetic construct
  misc_feature 1..30: note = Cullin-4B (404-413)
  source 1..30: mol_type = other RNA
gaggaggaggccgaccgcctgatcacctac

SEQ ID NO: 43771 - RNA, 27 nt, synthetic construct
  misc_feature 1..27: note = Negative elongation factor E (11-19)
  source 1..27: mol_type = other RNA
gaggaggaggccctgcagaagaagttc

SEQ ID NO: 43772 - RNA, 30 nt, synthetic construct
  misc_feature 1..30: note = Synemin (68-77)
  source 1..30: mol_type = other RNA
gaggaggaggagaacgacggccactggttc

SEQ ID NO: 43773 - RNA, 33 nt, synthetic construct
  misc_feature 1..33: note = Nestin (503-513)
  source 1..33: mol_type = other RNA
gaggaggagggcagcgccctgaagacctcctgg

SEQ ID NO: 43774 - RNA, 30 nt, synthetic construct
  misc_feature 1..30: note = Angiomotin-like protein 1 (596-605)
  source 1..30: mol_type = other RNA
gaggaggagctgcgcgagaagcaggcctac

SEQ ID NO: 43775 - RNA, 30 nt, synthetic construct
  misc_feature 1..30: note = Nestin (316-325)
  source 1..30: mol_type = other RNA
gaggaggagaacctgggcaagggggagtac

SEQ ID NO: 43776 - RNA, 27 nt, synthetic construct
  misc_feature 1..27: note = SHC-transforming protein 1 (341-349)
  source 1..27: mol_type = other RNA
gaggaggagcccccggaccaccagtac

SEQ ID NO: 43777 - RNA, 30 nt, synthetic construct
  misc_feature 1..30: note = Synemin (856-865)
  source 1..30: mol_type = other RNA
gaggaggagagcaccatccgctactcctgg

SEQ ID NO: 43778 - RNA, 27 nt, synthetic construct
  misc_feature 1..27: note = (1052-1060)
  source 1..27: mol_type = other RNA
gaggagttcgagaccctgaaggagttc

SEQ ID NO: 43779 - RNA, 39 nt, synthetic construct
  misc_feature 1..39: note = HLA class II histocompatibility antigen, DR alpha chain (41-53)
  source 1..39: mol_type = other RNA
gaggagttcggccgcttcgccagcttcgaggcccagggg

SEQ ID NO: 43780 - RNA, 21 nt, synthetic construct
  misc_feature 1..21: note = cAMP-dependent protein kinase type I-beta regulatory subunit (247-253)
  source 1..21: mol_type = other RNA
gaggagttcctgagcaaggtg

SEQ ID NO: 43781 - RNA, 27 nt, synthetic construct
  misc_feature 1..27: note = Erlin-2 (50-58)
  source 1..27: mol_type = other RNA
gaggagggccacatcggggtgtactac

SEQ ID NO: 43782 - RNA, 27 nt, synthetic construct
  misc_feature 1..27: note = STAM-binding protein (50-58)
  source 1..27: mol_type = other RNA
gaggagggcaacatcgagcacgccttc

SEQ ID NO: 43783 - RNA, 27 nt, synthetic construct
  misc_feature 1..27: note = Rho guanine nucleotide exchange factor 11 (801-809)
  source 1..27: mol_type = other RNA
gaggagggccccatcatcaaggagatc

SEQ ID NO: 43784 - RNA, 30 nt, synthetic construct
  misc_feature 1..30: note = Nestin (504-513)
  source 1..30: mol_type = other RNA
gaggagggcagcgccctgaagacctcctgg

SEQ ID NO: 43785 - RNA, 24 nt, synthetic construct
  misc_feature 1..24: note = Cytochrome c oxidase subunit 6A1, mitochondrial (8-15)
  source 1..24: mol_type = other RNA
gaggagggcagcgcccgcatgtgg

SEQ ID NO: 43786 - RNA, 27 nt, synthetic construct
  misc_feature 1..27: note = Phosphopantothenate-cysteine ligase (283-291)
  source 1..27: mol_type = other RNA
gaggagatcgagaagggcgtggagatc

SEQ ID NO: 43787 - RNA, 30 nt, synthetic construct
  misc_feature 1..30: note = A-kinase anchor protein 9 (822-831)
  source 1..30: mol_type = other RNA
gaggagatcgagaagcagcgcaacaccttc

SEQ ID NO: 43788 - RNA, 30 nt, synthetic construct
  misc_feature 1..30: note = Vimentin (240-249)
  source 1..30: mol_type = other RNA
gaggagatccaggagctgcaggcccagatc

SEQ ID NO: 43789 - RNA, 27 nt, synthetic construct
  misc_feature 1..27: note = Zinc finger E-box-binding homeobox 2 (457-465)
  source 1..27: mol_type = other RNA
gaggagatcagcaagctgaagggctac

SEQ ID NO: 43790 - RNA, 27 nt, synthetic construct
  misc_feature 1..27: note = Nuclear pore complex protein Nup205 (77-85)
  source 1..27: mol_type = other RNA
gaggagatcagcaccgtgctgcagtac

SEQ ID NO: 43791 - RNA, 27 nt, synthetic construct
  misc_feature 1..27: note = Cadherin-2 (138-146)
  source 1..27: mol_type = other RNA
gaggagatcgtgttcccccgccagttc

SEQ ID NO: 43792 - RNA, 27 nt, synthetic construct
  misc_feature 1..27: note = Leucine zipper putative tumor suppressor 1 (511-519)
  source 1..27: mol_type = other RNA
gaggagaaggagaaggtgatccagtac

SEQ ID NO: 43793 - RNA, 33 nt, synthetic construct
  misc_feature 1..33: note = Intraflagellar transport protein 81 homolog (450-460)
  source 1..33: mol_type = other RNA
gaggagaagaagggcatcagcgggtactcctac

SEQ ID NO: 43794 - RNA, 27 nt, synthetic construct
  misc_feature 1..27: note = FERM domain-containing protein 5 (259-267)
  source 1..27: mol_type = other RNA
gaggagaagaagatcatcctgacctac

SEQ ID NO: 43795 - RNA, 27 nt, synthetic construct
  misc_feature 1..27: note = Receptor-type tyrosine-protein phosphatase zeta (1495-1503)
  source 1..27: mol_type = other RNA
gaggagaagctgatcatccaggacttc

SEQ ID NO: 43796 - RNA, 33 nt, synthetic construct
  misc_feature 1..33: note = Cyclic AMP-responsive element-binding protein 3-like protein 2 (268-278)
  source 1..33: mol_type = other RNA
gaggagaagcgcaccctgatcgccgagggctac

SEQ ID NO: 43797 - RNA, 33 nt, synthetic construct
  misc_feature 1..33: note = Nestin (176-186)
  source 1..33: mol_type = other RNA
gaggagctggcccgccggctcggcgaggcctgg

SEQ ID NO: 43798 - RNA, 42 nt, synthetic construct
  misc_feature 1..42: note = L-dopachrome tautomerase (49-62)
  source 1..42: mol_type = other RNA
gaggagctgttcctcaccagcgaccagctgggctactcctac

SEQ ID NO: 43799 - RNA, 36 nt, synthetic construct
  misc_feature 1..36: note = Glia-derived nexin (40-51)
  source 1..36: mol_type = other RNA
gaggagctgggcagcaacaccgggatccaggtgttc

SEQ ID NO: 43800 - RNA, 30 nt, synthetic construct
  misc_feature 1..30: note = Myotubularin-related protein 6 (290-299)
  source 1..30: mol_type = other RNA
gaggagctgaagctcaaggagaagacctac

SEQ ID NO: 43801 - RNA, 27 nt, synthetic construct
  misc_feature 1..27: note = HEAT repeat-containing protein 1 (773-781)
  source 1..27: mol_type = other RNA
gaggagctgaacagcacccagcgcgtg

SEQ ID NO: 43802 - RNA, 24 nt, synthetic construct
  misc_feature 1..24: note = E3 ubiquitin-protein ligase RNF213 (1762-1769)
  source 1..24: mol_type = other RNA
gaggagctgcccctcatgctgctg

SEQ ID NO: 43803 - RNA, 30 nt, synthetic construct
  misc_feature 1..30: note = Protein KRI1 homolog (27-36)
  source 1..30: mol_type = other RNA
gaggagctgcagcgcctcaaggaccggtac

SEQ ID NO: 43804 - RNA, 27 nt, synthetic construct
  misc_feature 1..27: note = Angiomotin-like protein 1 (597-605)
  source 1..27: mol_type = other RNA
gaggagctgcgcgagaagcaggcctac

SEQ ID NO: 43805 - RNA, 30 nt, synthetic construct
  misc_feature 1..30: note = Serpin H1 (373-382)
  source 1..30: mol_type = other RNA
gaggagctgcgcagccccaagctcttctac

SEQ ID NO: 43806 - RNA, 30 nt, synthetic construct
  misc_feature 1..30: note = Vimentin (374-383)
  source 1..30: mol_type = other RNA
gaggagatggcccgccacctgcgggagtac

SEQ ID NO: 43807 - RNA, 30 nt, synthetic construct
  misc_feature 1..30: note = RANBP2-like and GRIP domain-containing protein 1 (1180-1189)
  source 1..30: mol_type = other RNA
gaggagatgaagagcggcctgaaggacttc

SEQ ID NO: 43808 - RNA, 30 nt, synthetic construct
  misc_feature 1..30: note = Non-POU domain-containing octamer-binding protein (88-97)
  source 1..30: mol_type = other RNA
gaggagatgcgcaagctgttcgagaagtac

SEQ ID NO: 43809 - RNA, 27 nt, synthetic construct
  misc_feature 1..27: note = NudC domain-containing protein 3 (165-173)
  source 1..27: mol_type = other RNA
gaggagaacggcgagcgcgtgctgatg

SEQ ID NO: 43810 - RNA, 30 nt, synthetic construct
  misc_feature 1..30: note = cGMP-inhibited 3',5'-cyclic phosphodiesterase B (605-614)
  source 1..30: mol_type = other RNA
gaggagaacatcttcagcaaggagtccttc

SEQ ID NO: 43811 - RNA, 33 nt, synthetic construct
  misc_feature 1..33: note = Pituitary tumor-transforming gene 1 protein-interacting protein (169-179)
  source 1..33: mol_type = other RNA
gaggagaacccctacgcccgcttcgagaacaac

SEQ ID NO: 43812 - RNA, 30 nt, synthetic construct
  misc_feature 1..30: note = Nestin (283-292)
  source 1..30: mol_type = other RNA
gaggagaaccaggagagcctgcgctccctc

SEQ ID NO: 43813 - RNA, 27 nt, synthetic construct
  misc_feature 1..27: note = Tropomodulin-2 (273-281)
  source 1..27: mol_type = other RNA
gaggagaacagccgcatcctgaagttc

SEQ ID NO: 43814 - RNA, 30 nt, synthetic construct
  misc_feature 1..30: note = Syndecan-3 (422-431)
  source 1..30: mol_type = other RNA
gaggagcccaagcaggccagcgtgacctac

SEQ ID NO: 43815 - RNA, 27 nt, synthetic construct
  misc_feature 1..27: note = Lymphoid enhancer-binding factor 1 (247-255)
  source 1..27: mol_type = other RNA
gaggagcaggccaagtactacgagctg

SEQ ID NO: 43816 - RNA, 27 nt, synthetic construct
  misc_feature 1..27: note = Receptor-type tyrosine-protein phosphatase gamma (1261-1269)
  source 1..27: mol_type = other RNA
gaggagcagatcatcatccacgacttc

SEQ ID NO: 43817 - RNA, 27 nt, synthetic construct
  misc_feature 1..27: note = Eukaryotic translation initiation factor 4 gamma 2 (197-205)
  source 1..27: mol_type = other RNA
gaggagcagcgcgccatcgccaagatc

SEQ ID NO: 43818 - RNA, 30 nt, synthetic construct
  misc_feature 1..30: note = General receptor for phosphoinositides 1-associated scaffold protein (125-134)
  source 1..30: mol_type = other RNA
gaggagcagcgcgtggagatggtcaccttc

SEQ ID NO: 43819 - RNA, 30 nt, synthetic construct
  misc_feature 1..30: note = 14-3-3 protein beta/alpha (41-50)
  source 1..30: mol_type = other RNA
gaggagcgcaacctgctcagcgtggcctac

SEQ ID NO: 43820 - RNA, 27 nt, synthetic construct
  misc_feature 1..27: note = Unconventional myosin-Va (255-263)
  source 1..27: mol_type = other RNA
gaggagcgcaactaccacatcttctac

SEQ ID NO: 43821 - RNA, 27 nt, synthetic construct
  misc_feature 1..27: note = Protein RTF2 homolog (273-281)
  source 1..27: mol_type = other RNA
gaggagagcgaggcctacaagtccctg

SEQ ID NO: 43822 - RNA, 30 nt, synthetic construct
  misc_feature 1..30: note = Protein RTF2 homolog (273-282)
  source 1..30: mol_type = other RNA
gaggagagcgaggcctacaagtccctgttc

SEQ ID NO: 43823 - RNA, 30 nt, synthetic construct
  misc_feature 1..30: note = Rho-associated protein kinase 2 (440-449)
  source 1..30: mol_type = other RNA
gaggagagccaggagatccagaagaagctg

SEQ ID NO: 43824 - RNA, 33 nt, synthetic construct
  misc_feature 1..33: note = Rho-associated protein kinase 2 (440-450)
  source 1..33: mol_type = other RNA
gaggagagccaggagatccagaagaagctgtac

SEQ ID NO: 43825 - RNA, 27 nt, synthetic construct
  misc_feature 1..27: note = Spectrin beta chain, non-erythrocytic 1 (635-643)
  source 1..27: mol_type = other RNA
gaggagagccgccggctgtggaagttc

SEQ ID NO: 43826 - RNA, 27 nt, synthetic construct
  misc_feature 1..27: note = Synemin (857-865)
  source 1..27: mol_type = other RNA
gaggagagcaccatccgctactcctgg

SEQ ID NO: 43827 - RNA, 30 nt, synthetic construct
  misc_feature 1..30: note = Caldesmon (163-172)
  source 1..30: mol_type = other RNA
gaggagaccgagaccgtgacgaagagctac

SEQ ID NO: 43828 - RNA, 27 nt, synthetic construct
  misc_feature 1..27: note = Putative segment polarity protein dishevelled homolog DVL1P1 (13-21)
  source 1..27: mol_type = other RNA
gaggagaccccctacctggtgaagctc

SEQ ID NO: 43829 - RNA, 27 nt, synthetic construct
  misc_feature 1..27: note = Trinucleotide repeat-containing gene 18 protein (2863-2871)
  source 1..27: mol_type = other RNA
gaggagaccagccccggcaagcagttc

SEQ ID NO: 43830 - RNA, 24 nt, synthetic construct
  misc_feature 1..24: note = Dedicator of cytokinesis protein 10 (2044-2051)
  source 1..24: mol_type = other RNA
gaggaggtggacatgatccgcctg

SEQ ID NO: 43831 - RNA, 30 nt, synthetic construct
  misc_feature 1..30: note = ATR-interacting protein (133-142)
  source 1..30: mol_type = other RNA
gaggaggtgctgatcaagaacggcgagatc

SEQ ID NO: 43832 - RNA, 27 nt, synthetic construct
  misc_feature 1..27: note = V-type proton ATPase subunit B, kidney isoform (273-281)
  source 1..27: mol_type = other RNA
gaggaggtgcccggccgccgggggttc

SEQ ID NO: 43833 - RNA, 24 nt, synthetic construct
  misc_feature 1..24: note = Protein ITFG3 (235-242)
  source 1..24: mol_type = other RNA
gaggaggtgagcggccacctgtac

SEQ ID NO: 43834 - RNA, 27 nt, synthetic construct
  misc_feature 1..27: note = Tyrosinase (280-288)
  source 1..27: mol_type = other RNA
gaggagtacaacagccaccagtccctg

SEQ ID NO: 43835 - RNA, 30 nt, synthetic construct
  misc_feature 1..30: note = Hom s 1 (51-60)
  source 1..30: mol_type = other RNA
gaggagtaccgcggcttcacccaggacttc

SEQ ID NO: 43836 - RNA, 36 nt, synthetic construct
  misc_feature 1..36: note = Moesin (17-28)
  source 1..36: mol_type = other RNA
gagttcgccatccagcccaacaccaccggcaagcag

SEQ ID NO: 43837 - RNA, 39 nt, synthetic construct
  misc_feature 1..39: note = Moesin (17-29)
  source 1..39: mol_type = other RNA
gagttcgccatccagcccaacaccaccggcaagcagctg

SEQ ID NO: 43838 - RNA, 30 nt, synthetic construct
  misc_feature 1..30: note = Lamin-B receptor (208-217)
  source 1..30: mol_type = other RNA
gagttcggcggggtgcccggcgtcttcctg

SEQ ID NO: 43839 - RNA, 27 nt, synthetic construct
  misc_feature 1..27: note = Nuclear factor erythroid 2-related factor 1 (312-320)
  source 1..27: mol_type = other RNA
gagttcaacgagctgctcagcaagtac

SEQ ID NO: 43840 - RNA, 30 nt, synthetic construct
  misc_feature 1..30: note = Maltase-glucoamylase (594-603)
  source 1..30: mol_type = other RNA
gagttcaacctgttcggcatccccatggtg

SEQ ID NO: 43841 - RNA, 27 nt, synthetic construct
  misc_feature 1..27: note = Signal peptidase complex subunit 2 (188-196)
  source 1..27: mol_type = other RNA
gagttcaccaagagcatcgccaagttc

SEQ ID NO: 43842 - RNA, 24 nt, synthetic construct
  misc_feature 1..24: note = Inositol 1,4,5-trisphosphate receptor type 3 (835-842)
  source 1..24: mol_type = other RNA
gagttcgtggaggactacctgaac

SEQ ID NO: 43843 - RNA, 21 nt, synthetic construct
  misc_feature 1..21: note = Melanoma-associated antigen D1 (610-616)
  source 1..21: mol_type = other RNA
gagttcgtgaagcagaagtac

SEQ ID NO: 43844 - RNA, 27 nt, synthetic construct
  misc_feature 1..27: note = Vimentin (405-413)
  source 1..27: mol_type = other RNA
gagggcgaggagagccgcatctccctg

SEQ ID NO: 43845 - RNA, 36 nt, synthetic construct
  misc_feature 1..36: note = Disintegrin and metalloproteinase domain-containing protein 10 (17-28)
  source 1..36: mol_type = other RNA
gagggcttcatccagacccgcgggggcaccttctac

SEQ ID NO: 43846 - RNA, 24 nt, synthetic construct
  misc_feature 1..24: note = Coiled-coil-helix-coiled-coil-helix domain-containing protein 2 (135-142)
  source 1..24: mol_type = other RNA
gagggcttcaacgaggtgctgaag

SEQ ID NO: 43847 - RNA, 21 nt, synthetic construct
  misc_feature 1..21: note = Dual specificity protein phosphatase 6 (133-139)
  source 1..21: mol_type = other RNA
gagggcgggttcagcaagttc

SEQ ID NO: 43848 - RNA, 27 nt, synthetic construct
  misc_feature 1..27: note = Heat shock protein beta-8 (131-139)
  source 1..27: mol_type = other RNA
gagggcgggatcgtgagcaagaacttc

SEQ ID NO: 43849 - RNA, 27 nt, synthetic construct
  misc_feature 1..27: note = Chondroitin sulfate proteoglycan 4 (257-265)
  source 1..27: mol_type = other RNA
gagggccacctgcgcgccgtggtcgag

SEQ ID NO: 43850 - RNA, 24 nt, synthetic construct
  misc_feature 1..24: note = Zinc finger protein 106 (925-932)
  source 1..24: mol_type = other RNA
gagggccacagcaagaccatcctg

SEQ ID NO: 43851 - RNA, 21 nt, synthetic construct
  misc_feature 1..21: note = Activator of 90 kDa heat shock protein ATPase homolog 1 (249-255)
  source 1..21: mol_type = other RNA
gagggcatcaagcagaccttc

SEQ ID NO: 43852 - RNA, 21 nt, synthetic construct
  misc_feature 1..21: note = Kremen protein 2 (107-113)
  source 1..21: mol_type = other RNA
gagggcatctactggcgctac

SEQ ID NO: 43853 - RNA, 27 nt, synthetic construct
  misc_feature 1..27: note = Secretory phospholipase A2 receptor (1283-1291)
  source 1..27: mol_type = other RNA
gagggcagcaacctgctcaccatcaag

SEQ ID NO: 43854 - RNA, 18 nt, synthetic construct
  misc_feature 1..18: note = Leucine-tRNA ligase, cytoplasmic (177-182)
  source 1..18: mol_type = other RNA
gagcacatctggaccctg

SEQ ID NO: 43855 - RNA, 30 nt, synthetic construct
  misc_feature 1..30: note = Protein DBF4 homolog A (541-550)
  source 1..30: mol_type = other RNA
gagcacctgaccgtgcaggccaaggccccc

SEQ ID NO: 43856 - RNA, 24 nt, synthetic construct
  misc_feature 1..24: note = Bestrophin-1 (465-472)
  source 1..24: mol_type = other RNA
gagcaccccgaggtgagccaggtc

SEQ ID NO: 43857 - RNA, 18 nt, synthetic construct
  misc_feature 1..18: note = Glycine-tRNA ligase (536-541)
  source 1..18: mol_type = other RNA
gagcacaccttccacgtg

SEQ ID NO: 43858 - RNA, 24 nt, synthetic construct
  misc_feature 1..24: note = Fibronectin 1 (1541-1548)
  source 1..24: mol_type = other RNA
gagatcgacaagcccagccagatg

SEQ ID NO: 43859 - RNA, 39 nt, synthetic construct
  misc_feature 1..39: note = 39S ribosomal protein L37, mitochondrial (51-63)
  source 1..39: mol_type = other RNA
gagatccccggcctggagccgatcaccttcgccgggaag

SEQ ID NO: 43860 - RNA, 21 nt, synthetic construct
  misc_feature 1..21: note = ATP-dependent RNA helicase DDX24 (574-580)
  source 1..21: mol_type = other RNA
gagaaggacttctacctgtac

SEQ ID NO: 43861 - RNA, 24 nt, synthetic construct
  misc_feature 1..24: note = Tyrosinase (517-524)
  source 1..24: mol_type = other RNA
gagaaggaggactaccacagcctg

SEQ ID NO: 43862 - RNA, 33 nt, synthetic construct
  misc_feature 1..33: note = Nuclear autoantigenic sperm protein (365-375)
  source 1..33: mol_type = other RNA
gagaagcccggccaggaggccccggtgctgccc

SEQ ID NO: 43863 - RNA, 27 nt, synthetic construct
  misc_feature 1..27: note = Exocyst complex component 3 (32-40)
  source 1..27: mol_type = other RNA
gagctggccaagcagctctggatggtg

SEQ ID NO: 43864 - RNA, 27 nt, synthetic construct
  misc_feature 1..27: note = Eukaryotic initiation factor 4A-II (112-120)
  source 1..27: mol_type = other RNA
gagctggcccagcagatccagaaggtg

SEQ ID NO: 43865 - RNA, 27 nt, synthetic construct
  misc_feature 1..27: note = Probable ATP-dependent RNA helicase DDX5 (178-186)
  source 1..27: mol_type = other RNA
gagctggcccagcaggtgcagcaggtc

SEQ ID NO: 43866 - RNA, 27 nt, synthetic construct
  misc_feature 1..27: note = Splicing factor 3B subunit 3 (1196-1204)
  source 1..27: mol_type = other RNA
gagctggaccgcacccccccggaggtg

SEQ ID NO: 43867 - RNA, 27 nt, synthetic construct
  misc_feature 1..27: note = Microtubule cross-linking factor 1 (532-540)
  source 1..27: mol_type = other RNA
gagctggagcaggagctccagaagtac

SEQ ID NO: 43868 - RNA, 21 nt, synthetic construct
  misc_feature 1..21: note = Clathrin heavy chain 1 (362-368)
  source 1..21: mol_type = other RNA
gagctgttcgcccgcaagttc

SEQ ID NO: 43869 - RNA, 66 nt, synthetic construct
  misc_feature 1..66: note = HEAT repeat-containing protein 5B (423-444)
  source 1..66: mol_type = other RNA
gagctgggcagcctcgtgcagtccctgaacgccaccgccagccccctgatccaggaggcgtccatc

SEQ ID NO: 43870 - RNA, 24 nt, synthetic construct
  misc_feature 1..24: note = Leucine-rich repeat flightless-interacting protein 2 (198-205)
  source 1..24: mol_type = other RNA
gagctgatcgagaagcacggcctc

SEQ ID NO: 43871 - RNA, 27 nt, synthetic construct
  misc_feature 1..27: note = Golgin subfamily B member 1 (2901-2909)
  source 1..27: mol_type = other RNA
gagctgaagaacctccagcagcagtac

SEQ ID NO: 43872 - RNA, 21 nt, synthetic construct
  misc_feature 1..21: note = Eukaryotic translation initiation factor 3 subunit C-like protein (84-90)
  source 1..21: mol_type = other RNA
gagctgctcggcaaggcctac

SEQ ID NO: 43873 - RNA, 27 nt, synthetic construct
  misc_feature 1..27: note = RHO/RAC effector protein (236-244)
  source 1..27: mol_type = other RNA
gagctgaacaaccagaacttctacctc

SEQ ID NO: 43874 - RNA, 24 nt, synthetic construct
  misc_feature 1..24: note = Presenilin-1 (3-10)
  source 1..24: mol_type = other RNA
gagctgcccgccccgctcagctac

SEQ ID NO: 43875 - RNA, 18 nt, synthetic construct
  misc_feature 1..18: note = FERM domain-containing protein 4A (927-932)
  source 1..18: mol_type = other RNA
gagctgcgccagtggtac

SEQ ID NO: 43876 - RNA, 27 nt, synthetic construct
  misc_feature 1..27: note = Proteasome maturation protein (49-57)
  source 1..27: mol_type = other RNA
gagctgagcgagaagaacttccagctc

SEQ ID NO: 43877 - RNA, 24 nt, synthetic construct
  misc_feature 1..24: note = FACT complex subunit SSRP1 (312-319)
  source 1..24: mol_type = other RNA
gagatggtgagccgcgtcatgaag

SEQ ID NO: 43878 - RNA, 30 nt, synthetic construct
  misc_feature 1..30: note = Ras GTPase-activating-like protein IQGAP2 (450-459)
  source 1..30: mol_type = other RNA
gagaacgaccgcgtggtcgccgtgggctac

SEQ ID NO: 43879 - RNA, 21 nt, synthetic construct
  misc_feature 1..21: note = Eukaryotic translation initiation factor 3 subunit L (295-301)
  source 1..21: mol_type = other RNA
gagaacatcgagctgaacaag

SEQ ID NO: 43880 - RNA, 102 nt, synthetic construct
  misc_feature 1..102: note = Glia-derived nexin (343-376)
  source 1..102: mol_type = other RNA
gagaacctgcacgtgagccacatcctccagaaggccaagatcgaggtctccgaggacggcaccaaggccagcgcggccaccacggccatcctgatcgcccgc

SEQ ID NO: 43881 - RNA, 105 nt, synthetic construct
  misc_feature 1..105: note = Proteasome activator complex subunit 4 (1077-1111)
  source 1..105: mol_type = other RNA
gagaacctgaaccacgacgccatcgtggtccgcaagatggccatcagcgcggtggccggcatcctcaagcagctgaagcggacccacaagaagctgaccatcaac

SEQ ID NO: 43882 - RNA, 33 nt, synthetic construct
  misc_feature 1..33: note = FYVE, RhoGEF and PH domain-containing protein 6 (143-153)
  source 1..33: mol_type = other RNA
gagaacagcaagatcgacgagaccctgaccatc

SEQ ID NO: 43883 - RNA, 27 nt, synthetic construct
  misc_feature 1..27: note = Ankyrin repeat domain-containing protein SOWAHB (248-256)
  source 1..27: mol_type = other RNA
gagcccgccccggtgcccgccgtcgcg

SEQ ID NO: 43884 - RNA, 33 nt, synthetic construct
  misc_feature 1..33: note = 39S ribosomal protein L3, mitochondrial (91-101)
  source 1..33: mol_type = other RNA
gagcccggcagcttccgcgtggggctgatcgcc

SEQ ID NO: 43885 - RNA, 27 nt, synthetic construct
  misc_feature 1..27: note = Nurim (116-124)
  source 1..27: mol_type = other RNA
gagcccatcccgaagggccccgtgctg

SEQ ID NO: 43886 - RNA, 30 nt, synthetic construct
  misc_feature 1..30: note = Ryanodine receptor 1 (370-379)
  source 1..30: mol_type = other RNA
gagcccccgacccccgagggcagccccatc

SEQ ID NO: 43887 - RNA, 27 nt, synthetic construct
  misc_feature 1..27: note = WD repeat-containing protein 18 (350-358)
  source 1..27: mol_type = other RNA
gagccccgccacggcgggctgaccctc

SEQ ID NO: 43888 - RNA, 33 nt, synthetic construct
  misc_feature 1..33: note = Gamma-secretase C-terminal fragment 59 (473-483)
  source 1..33: mol_type = other RNA
gagccccgcatcagctacggcaacgacgccctg

SEQ ID NO: 43889 - RNA, 54 nt, synthetic construct
  misc_feature 1..54: note = Integral membrane protein GPR137C (19-36)
  source 1..54: mol_type = other RNA
gagcccagcaccccgggcgggggctccgggggcgggggcgccgtggccgcggcc

SEQ ID NO: 43890 - RNA, 123 nt, synthetic construct
  misc_feature 1..123: note = Ubiquitin-associated protein 2-like (364-404)
  source 1..123: mol_type = other RNA
gagcagttcaagaccgcccaggccctggcgcagctcgccgcccagcacagccagtccggcagcaccacgacctccagctgggacatggggtccaccacccagagcccctccctggtgcagtac

SEQ ID NO: 43891 - RNA, 30 nt, synthetic construct
  misc_feature 1..30: note = Keratin, type II cytoskeletal 1b (186-195)
  source 1..30: mol_type = other RNA
gagcagcagaaccaggtgctgcagaccaag

SEQ ID NO: 43892 - RNA, 30 nt, synthetic construct
  misc_feature 1..30: note = Histone-lysine N-methyltransferase 2D (2989-2998)
  source 1..30: mol_type = other RNA
gagcagcagagcaagatccagaagcagctg

SEQ ID NO: 43893 - RNA, 24 nt, synthetic construct
  misc_feature 1..24: note = Hsp90 co-chaperone Cdc37 (207-214)
  source 1..24: mol_type = other RNA
gagcaggtggcccaccagaccatc

SEQ ID NO: 43894 - RNA, 24 nt, synthetic construct
  misc_feature 1..24: note = Mucin-16 (582-589)
  source 1..24: mol_type = other RNA
gagcaggtgttcctggacaagacc

SEQ ID NO: 43895 - RNA, 21 nt, synthetic construct
  misc_feature 1..21: note = Serine/arginine-rich splicing factor 3 (27-33)
  source 1..21: mol_type = other RNA
gagcgcgccttcggctactac

SEQ ID NO: 43896 - RNA, 27 nt, synthetic construct
  misc_feature 1..27: note = Kinectin (367-375)
  source 1..27: mol_type = other RNA
gagcgcagcaacgtggtcatcacccgg

SEQ ID NO: 43897 - RNA, 21 nt, synthetic construct
  misc_feature 1..21: note = RAB6A-GEF complex partner protein 2 (263-269)
  source 1..21: mol_type = other RNA
gagcgcgtgcagcccgagtac

SEQ ID NO: 43898 - RNA, 18 nt, synthetic construct
  misc_feature 1..18: note = Vacuolar protein sorting-associated protein 18 homolog (309-314)
  source 1..18: mol_type = other RNA
gagcgcgtgtgggagtac

SEQ ID NO: 43899 - RNA, 33 nt, synthetic construct
  misc_feature 1..33: note = Pre-mRNA-splicing factor ATP-dependent RNA helicase PRP16 (1005-1015)
  source 1..33: mol_type = other RNA
gagagcgaccacctgacctacctcaacgtgtac

SEQ ID NO: 43900 - RNA, 57 nt, synthetic construct
  misc_feature 1..57: note = Endoplasmin (203-221)
  source 1..57: mol_type = other RNA
gagagcgactccaacgagttcagcgtgatcgccgacccccgcggcaacaccctgggg

SEQ ID NO: 43901 - RNA, 30 nt, synthetic construct
  misc_feature 1..30: note = Netrin receptor UNC5A (438-447)
  source 1..30: mol_type = other RNA
gagagcgaggccggcgtgcccgccctggtc

SEQ ID NO: 43902 - RNA, 27 nt, synthetic construct
  misc_feature 1..27: note = DNA-directed RNA polymerase I subunit RPA1 (186-194)
  source 1..27: mol_type = other RNA
gagagcaagtccaagctgatcgccctc

SEQ ID NO: 43903 - RNA, 24 nt, synthetic construct
  misc_feature 1..24: note = Four and a half LIM domains protein 2 (122-129)
  source 1..24: mol_type = other RNA
gagagcctgttcggcaagaagtac

SEQ ID NO: 43904 - RNA, 24 nt, synthetic construct
  misc_feature 1..24: note = T-complex protein 1 subunit beta (114-121)
  source 1..24: mol_type = other RNA
gagagcctgatcgccaagaagatc

SEQ ID NO: 43905 - RNA, 21 nt, synthetic construct
  misc_feature 1..21: note = Heterogeneous nuclear ribonucleoproteins A2/B1 (23-29)
  source 1..21: mol_type = other RNA
gagagcctgcgcaactactac

SEQ ID NO: 43906 - RNA, 51 nt, synthetic construct
  misc_feature 1..51: note = AT-rich interactive domain-containing protein 1A (78-94)
  source 1..51: mol_type = other RNA
gagagcaacggcgggggcgggggcgggggcgccggctccgggggcgggccc

SEQ ID NO: 43907 - RNA, 21 nt, synthetic construct
  misc_feature 1..21: note = DENN domain-containing protein 4B (1394-1400)
  source 1..21: mol_type = other RNA
gagagcgtgctgcgccacgtc

SEQ ID NO: 43908 - RNA, 27 nt, synthetic construct
  misc_feature 1..27: note = Protein kinase C-binding protein 1 (695-703)
  source 1..27: mol_type = other RNA
gagaccgacagccccaccgtgcacctg

SEQ ID NO: 43909 - RNA, 27 nt, synthetic construct
  misc_feature 1..27: note = HEAT repeat-containing protein 1 (1479-1487)
  source 1..27: mol_type = other RNA
gagaccatccccaaggccgtgagcttc

SEQ ID NO: 43910 - RNA, 27 nt, synthetic construct
  misc_feature 1..27: note = Receptor-type tyrosine-protein phosphatase C (52-60)
  source 1..27: mol_type = other RNA
gagaccaagctgttcaccgccaagctc

SEQ ID NO: 43911 - RNA, 30 nt, synthetic construct
  misc_feature 1..30: note = Uridine-cytidine kinase-like 1 (329-338)
  source 1..30: mol_type = other RNA
gagaccagccgcgacgagttcatcttctac

SEQ ID NO: 43912 - RNA, 54 nt, synthetic construct
  misc_feature 1..54: note = UPF0606 protein KIAA1549 (278-295)
  source 1..54: mol_type = other RNA
gagaccaccctgttcctcagctcccgcagcctgatgccccagccgctgggcgac

SEQ ID NO: 43913 - RNA, 66 nt, synthetic construct
  misc_feature 1..66: note = ATP synthase subunit alpha, mitochondrial (339-360)
  source 1..66: mol_type = other RNA
gaggtggccgccttcgcgcagttcggcagcgacctggacgccgccacccagcagctcctgtcccgc

SEQ ID NO: 43914 - RNA, 27 nt, synthetic construct
  misc_feature 1..27: note = 40S ribosomal protein S21 (38-46)
  source 1..27: mol_type = other RNA
gaggtggacaaggtcaccggccgcttc

SEQ ID NO: 43915 - RNA, 27 nt, synthetic construct
  misc_feature 1..27: note = Melanoma-associated antigen 4 (169-177)
  source 1..27: mol_type = other RNA
gaggtggaccccgccagcaacacctac

SEQ ID NO: 43916 - RNA, 30 nt, synthetic construct
  misc_feature 1..30: note = Dystrophin (1633-1642)
  source 1..30: mol_type = other RNA
gaggtgggcgaggccctgaagaccgtcctc

SEQ ID NO: 43917 - RNA, 48 nt, synthetic construct
  misc_feature 1..48: note = Filamin-A (1150-1165)
  source 1..48: mol_type = other RNA
gaggtgggccagttccaggtcgactgcagctccgccgggagcgccgag

SEQ ID NO: 43918 - RNA, 57 nt, synthetic construct
  misc_feature 1..57: note = Titin (5338-5356)
  source 1..57: mol_type = other RNA
gaggtgggcagctccagctgcgagaccaccttcacggtcctggaccgcgacatcgcc

SEQ ID NO: 43919 - RNA, 27 nt, synthetic construct
  misc_feature 1..27: note = Nucleosome assembly protein 1-like 4 (87-95)
  source 1..27: mol_type = other RNA
gaggtgcacgacctggagcgcaagtac

SEQ ID NO: 43920 - RNA, 24 nt, synthetic construct
  misc_feature 1..24: note = Pseudouridylate synthase 7 homolog-like protein (87-94)
  source 1..24: mol_type = other RNA
gaggtgcacaccctgatcaagtac

SEQ ID NO: 43921 - RNA, 30 nt, synthetic construct
  misc_feature 1..30: note = Midasin (595-604)
  source 1..30: mol_type = other RNA
gaggtgatcggcagcaagctgaacatctcc

SEQ ID NO: 43922 - RNA, 30 nt, synthetic construct
  misc_feature 1..30: note = Protein ZGRF1 (72-81)
  source 1..30: mol_type = other RNA
gaggtgaaggtcgccggcgccatcgggatc

SEQ ID NO: 43923 - RNA, 30 nt, synthetic construct
  misc_feature 1..30: note = RNA-binding protein Nova-1 (277-286)
  source 1..30: mol_type = other RNA
gaggtgctgcccaccgccgccgcggccgcc

SEQ ID NO: 43924 - RNA, 30 nt, synthetic construct
  misc_feature 1..30: note = Hemicentin-1 (2987-2996)
  source 1..30: mol_type = other RNA
gaggtgagcggcttccccccgcccgacctg

SEQ ID NO: 43925 - RNA, 21 nt, synthetic construct
  misc_feature 1..21: note = Basigin (49-55)
  source 1..21: mol_type = other RNA
gaggtgaccggccaccgctgg

SEQ ID NO: 43926 - RNA, 39 nt, synthetic construct
  misc_feature 1..39: note = Annexin A2 (53-65)
  source 1..39: mol_type = other RNA
gaggtgaccatcgtcaacatcctgaccaaccgcagcaac

SEQ ID NO: 43927 - RNA, 45 nt, synthetic construct
  misc_feature 1..45: note = Annexin A2 (53-67)
  source 1..45: mol_type = other RNA
gaggtgaccatcgtcaacatcctgaccaaccgcagcaacgcccag

SEQ ID NO: 43928 - RNA, 27 nt, synthetic construct
  misc_feature 1..27: note = Myotubularin (410-418)
  source 1..27: mol_type = other RNA
gagtggatcagcttcggccacaagttc

SEQ ID NO: 43929 - RNA, 27 nt, synthetic construct
  misc_feature 1..27: note = Zinc finger protein 317 (82-90)
  source 1..27: mol_type = other RNA
gagtacgcccacctgttcgaggtgttc

SEQ ID NO: 43930 - RNA, 27 nt, synthetic construct
  misc_feature 1..27: note = Lysophosphatidylcholine acyltransferase 2 (495-503)
  source 1..27: mol_type = other RNA
gagtacgccaagatcttcaccacctac

SEQ ID NO: 43931 - RNA, 30 nt, synthetic construct
  misc_feature 1..30: note = Meiosis arrest female protein 1 (1363-1372)
  source 1..30: mol_type = other RNA
gagtacgccaagaccttcggctacaccttc

SEQ ID NO: 43932 - RNA, 27 nt, synthetic construct
  misc_feature 1..27: note = Tyrosine-protein kinase Fer (41-49)
  source 1..27: mol_type = other RNA
gagtacgccagcaccctgcagaacctc

SEQ ID NO: 43933 - RNA, 27 nt, synthetic construct
  misc_feature 1..27: note = Origin recognition complex subunit 3 (309-317)
  source 1..27: mol_type = other RNA
gagtacgccagcgtgctgcagctcctg

SEQ ID NO: 43934 - RNA, 27 nt, synthetic construct
  misc_feature 1..27: note = Gamma-tubulin complex component 2 (312-320)
  source 1..27: mol_type = other RNA
gagtacggccaggtgaaccacgccctg

SEQ ID NO: 43935 - RNA, 27 nt, synthetic construct
  misc_feature 1..27: note = Nuclear pore complex protein Nup214 (115-123)
  source 1..27: mol_type = other RNA
gagtacggcagcatcatcgccttcttc

SEQ ID NO: 43936 - RNA, 27 nt, synthetic construct
  misc_feature 1..27: note = GDH/6PGL endoplasmic bifunctional protein (267-275)
  source 1..27: mol_type = other RNA
gagtacggcgtgatccgcgacgtcctg

SEQ ID NO: 43937 - RNA, 27 nt, synthetic construct
  misc_feature 1..27: note = Probable ATP-dependent RNA helicase DDX52 (539-547)
  source 1..27: mol_type = other RNA
gagtacatcaagggcttccagaagctg

SEQ ID NO: 43938 - RNA, 27 nt, synthetic construct
  misc_feature 1..27: note = Myotubularin (566-574)
  source 1..27: mol_type = other RNA
gagtacatcaagcgcctggaggagctc

SEQ ID NO: 43939 - RNA, 27 nt, synthetic construct
  misc_feature 1..27: note = Probable ATP-dependent RNA helicase DDX60-like (1185-1193)
  source 1..27: mol_type = other RNA
gagtacatcaacttcctggagaacctc

SEQ ID NO: 43940 - RNA, 33 nt, synthetic construct
  misc_feature 1..33: note = Aspartate aminotransferase, mitochondrial (95-105)
  source 1..33: mol_type = other RNA
gagtacctgcccatcggcgggctcgccgagttc

SEQ ID NO: 43941 - RNA, 27 nt, synthetic construct
  misc_feature 1..27: note = Phosphatidylinositol-glycan biosynthesis class W protein (124-132)
  source 1..27: mol_type = other RNA
gagtacaaccccgccatcagctgcttc

SEQ ID NO: 43942 - RNA, 27 nt, synthetic construct
  misc_feature 1..27: note = Lysosomal protective protein (111-119)
  source 1..27: mol_type = other RNA
gagtacaacccctacagctggaacctg

SEQ ID NO: 43943 - RNA, 27 nt, synthetic construct
  misc_feature 1..27: note Dolichyl-diphosphooligosaccharide-proteinosyltransferase 48 kDa subunit (332-340)
  source 1..27: mol_type = other RNA
gagtacagcatcgtgatccagcagctg

SEQ ID NO: 43944 - RNA, 27 nt, synthetic construct
  misc_feature 1..27: note = MAU2 chromatid cohesion factor homolog (89-97)
  source 1..27: mol_type = other RNA
gagtacacccgcgccctgttcctcctg

SEQ ID NO: 43945 - RNA, 27 nt, synthetic construct
  misc_feature 1..27: note = FERM, RhoGEF and pleckstrin domain-containing protein 2 (134-142)
  source 1..27: mol_type = other RNA
gagtacacccgctacctgttcgccctc

SEQ ID NO: 43946 - RNA, 27 nt, synthetic construct
  misc_feature 1..27: note = Dual specificity protein kinase CLK3 (343-351)
  source 1..27: mol_type = other RNA
gagtactaccgcggcttcaccctgttc

SEQ ID NO: 43947 - RNA, 24 nt, synthetic construct
  misc_feature 1..24: note = Nuclear receptor corepressor 2 (1025-1032)
  source 1..24: mol_type = other RNA
ttcgccgccgaggcgcagaagctg

SEQ ID NO: 43948 - RNA, 24 nt, synthetic construct
  misc_feature 1..24: note = UDP-N-acetylglucosamine-peptide N-acetylglucosaminyltransferase 110 kDa subunit (428-435)
  source 1..24: mol_type = other RNA
ttcgccgacgcccacagcaacctg

SEQ ID NO: 43949 - RNA, 27 nt, synthetic construct
  misc_feature 1..27: note = Catenin alpha-2 (110-118)
  source 1..27: mol_type = other RNA
ttcgccgacgacccctgcagctccgtg

SEQ ID NO: 43950 - RNA, 27 nt, synthetic construct
  misc_feature 1..27: note = Zinc finger MYM-type protein 1 (482-490)
  source 1..27: mol_type = other RNA
ttcgccgacgagctgagccacctcctg

SEQ ID NO: 43951 - RNA, 30 nt, synthetic construct
  misc_feature 1..30: note = E3 ubiquitin-protein ligase UBR4 (495-504)
  source 1..30: mol_type = other RNA
ttcgccgacaaggagaccctgatccagttc

SEQ ID NO: 43952 - RNA, 30 nt, synthetic construct
  misc_feature 1..30: note = Histone-lysine N-methyltransferase SETDB1 (995-1004)
  source 1..30: mol_type = other RNA
ttcgccgacagcgactcccacagctccttc

SEQ ID NO: 43953 - RNA, 30 nt, synthetic construct
  misc_feature 1..30: note = Staphylococcal nuclease domain-containing protein 1 (819-828)
  source 1..30: mol_type = other RNA
ttcgccgacagcaagggcgacgtggggctg

SEQ ID NO: 43954 - RNA, 27 nt, synthetic construct
  misc_feature 1..27: note = Frizzled-1 (386-394)
  source 1..27: mol_type = other RNA
ttcgccgaggacggcgcccgcaccgtg

SEQ ID NO: 43955 - RNA, 39 nt, synthetic construct
  misc_feature 1..39: note = Amyloid beta A4 protein (18-30)
  source 1..39: mol_type = other RNA
ttcgccgaggacgtgggcagcaacaagggggccatcatc

SEQ ID NO: 43956 - RNA, 42 nt, synthetic construct
  misc_feature 1..42: note = Amyloid beta A4 protein (20-33)
  source 1..42: mol_type = other RNA
ttcgccgaggacgtgggcagcaacaagggggccatcatcggc

SEQ ID NO: 43957 - RNA, 27 nt, synthetic construct
  misc_feature 1..27: note = Centromere protein F (1090-1098)
  source 1..27: mol_type = other RNA
ttcgccgaggagcgcaaccagaacctg

SEQ ID NO: 43958 - RNA, 24 nt, synthetic construct
  misc_feature 1..24: note = Superkiller viralicidic activity 2-like 2 (1024-1031)
  source 1..24: mol_type = other RNA
ttcgccgagggcatcaccaagatc

SEQ ID NO: 43959 - RNA, 27 nt, synthetic construct
  misc_feature 1..27: note = ATP-binding cassette sub-family C member 11 (241-249)
  source 1..27: mol_type = other RNA
ttcgccttcgagaagctgatccagttc

SEQ ID NO: 43960 - RNA, 27 nt, synthetic construct
  misc_feature 1..27: note = Arf-GAP with SH3 domain, ANK repeat and PH domain-containing protein 3 (673-681)
  source 1..27: mol_type = other RNA
ttcgccttccccctgcacgtggactac

SEQ ID NO: 43961 - RNA, 24 nt, synthetic construct
  misc_feature 1..24: note = Filamin-A (333-340)
  source 1..24: mol_type = other RNA
ttcgccggccagcacatcgccaag

SEQ ID NO: 43962 - RNA, 27 nt, synthetic construct
  misc_feature 1..27: note = Elongation factor 1-gamma (198-206)
  source 1..27: mol_type = other RNA
ttcgcccacctgcccaagagcaccttc

SEQ ID NO: 43963 - RNA, 27 nt, synthetic construct
  misc_feature 1..27: note = Nuclear pore complex protein Nup85 (365-373)
  source 1..27: mol_type = other RNA
ttcgcccaccccagcctgtggcagctc

SEQ ID NO: 43964 - RNA, 36 nt, synthetic construct
  misc_feature 1..36: note = Moesin (18-29)
  source 1..36: mol_type = other RNA
ttcgccatccagcccaacaccaccggcaagcagctg

SEQ ID NO: 43965 - RNA, 27 nt, synthetic construct
  misc_feature 1..27: note = Sodium-dependent phosphate transport protein 2C (387-395)
  source 1..27: mol_type = other RNA
ttcgccctgcagagctccagcgtgttc

SEQ ID NO: 43966 - RNA, 45 nt, synthetic construct
  misc_feature 1..45: note = Cytochrome c oxidase subunit 7C, mitochondrial (49-63)
  source 1..45: mol_type = other RNA
ttcgccacccccttcctggtggtccgccaccagctcctgaagacc

SEQ ID NO: 43967 - RNA, 36 nt, synthetic construct
  misc_feature 1..36: note = Beta-secretase 2 (116-127)
  source 1..36: mol_type = other RNA
ttcgccgtggccggcaccccccacagctacatcgac

SEQ ID NO: 43968 - RNA, 27 nt, synthetic construct
  misc_feature 1..27: note = Protein FAM179B (1301-1309)
  source 1..27: mol_type = other RNA
ttcgccgtggtccaggaggtgaagaac

SEQ ID NO: 43969 - RNA, 24 nt, synthetic construct
  misc_feature 1..24: note = WD repeat-containing protein 35 (933-940)
  source 1..24: mol_type = other RNA
ttcgacgccgccaagctgatgttc

SEQ ID NO: 43970 - RNA, 21 nt, synthetic construct
  misc_feature 1..21: note = Synemin (38-44)
  source 1..21: mol_type = other RNA
ttcgacaagaaggtgcagctg

SEQ ID NO: 43971 - RNA, 24 nt, synthetic construct
  misc_feature 1..24: note = Protein SET (138-145)
  source 1..24: mol_type = other RNA
ttcgaggacatcaagagcggctac

SEQ ID NO: 43972 - RNA, 42 nt, synthetic construct
  misc_feature 1..42: note = ATP synthase-coupling factor 6, mitochondrial (95-108)
  source 1..42: mol_type = other RNA
ttcgaggaccccaagttcgaggtgatcgagaagccgcaggcc

SEQ ID NO: 43973 - RNA, 42 nt, synthetic construct
  misc_feature 1..42: note = Cytochrome c oxidase subunit 6C (62-75)
  source 1..42: mol_type = other RNA
ttcgaggagatgcgcaaggccggcatcttccagagcgtgaag

SEQ ID NO: 43974 - RNA, 21 nt, synthetic construct
  misc_feature 1..21: note = Myotubularin-related protein 13 (1490-1496)
  source 1..21: mol_type = other RNA
ttcgagttcaacctgtactac

SEQ ID NO: 43975 - RNA, 33 nt, synthetic construct
  misc_feature 1..33: note = FACT complex subunit SSRP1 (391-401)
  source 1..33: mol_type = other RNA
ttcgagatcgagaccaagcagggcacccagtac

SEQ ID NO: 43976 - RNA, 27 nt, synthetic construct
  misc_feature 1..27: note = Myosin-9 (456-464)
  source 1..27: mol_type = other RNA
ttcgagatcttcgacctgaacagcttc

SEQ ID NO: 43977 - RNA, 24 nt, synthetic construct
  misc_feature 1..24: note = F-box/LRR-repeat protein 5 (75-82)
  source 1..24: mol_type = other RNA
ttcgagaagggcctgaagaacgtg

SEQ ID NO: 43978 - RNA, 27 nt, synthetic construct
  misc_feature 1..27: note = Integrin beta-5 (536-544)
  source 1..27: mol_type = other RNA
ttcgagagcgagttcggcaagatctac

SEQ ID NO: 43979 - RNA, 21 nt, synthetic construct
  misc_feature 1..21: note = Small subunit processome component 20 homolog (1420-1426)
  source 1..21: mol_type = other RNA
ttcgagagcggcctgaagtac

SEQ ID NO: 43980 - RNA, 27 nt, synthetic construct
  misc_feature 1..27: note = ATP synthase-coupling factor 6, mitochondrial (100-108)
  source 1..27: mol_type = other RNA
ttcgaggtgatcgagaagccccaggcc

SEQ ID NO: 43981 - RNA, 30 nt, synthetic construct
  misc_feature 1..30: note = Nuclear pore membraneoprotein 210 (396-405)
  source 1..30: mol_type = other RNA
ttcttcgaggtgctgagctccagccagaac

SEQ ID NO: 43982 - RNA, 27 nt, synthetic construct
  misc_feature 1..27: note = Dynein heavy chain 10, axonemal (148-156)
  source 1..27: mol_type = other RNA
ttcttcttcatcagcgacgacgagctg

SEQ ID NO: 43983 - RNA, 18 nt, synthetic construct
  misc_feature 1..18: note = FACT complex subunit SSRP1 (88-93)
  source 1..18: mol_type = other RNA
ttcttcaagacccactac

SEQ ID NO: 43984 - RNA, 27 nt, synthetic construct
  misc_feature 1..27: note = Sterol regulatory element-binding protein 2 (769-777)
  source 1..27: mol_type = other RNA
ttcttcatggagcgcagctggtccgtg

SEQ ID NO: 43985 - RNA, 27 nt, synthetic construct
  misc_feature 1..27: note = L-dopachrome tautomerase (339-347)
  source 1..27: mol_type = other RNA
ttcttccagaacagcaccttctccttc

SEQ ID NO: 43986 - RNA, 21 nt, synthetic construct
  misc_feature 1..21: note = Protein MCM10 homolog (335-341)
  source 1..21: mol_type = other RNA
ttcggcgaggtgcacaaggcc

SEQ ID NO: 43987 - RNA, 27 nt, synthetic construct
  misc_feature 1..27: note = Dynein light chain 4, axonemal (77-85)
  source 1..27: mol_type = other RNA
ttcggcttcgagatcacccacgaggtg

SEQ ID NO: 43988 - RNA, 27 nt, synthetic construct
  misc_feature 1..27: note = Myelin basic protein (46-54)
  source 1..27: mol_type = other RNA
ttcggcggggaccgcggcgcccccaag

SEQ ID NO: 43989 - RNA, 87 nt, synthetic construct
  misc_feature 1..87: note = Keratin, type I cytoskeletal 9 (90-118)
  source 1..87: mol_type = other RNA
ttcggcgggggcagccgcgggttcggcggggcctccggcggcgggtacagctccagcggcgggttcggcgggggcttcggcgggggc

SEQ ID NO: 43990 - RNA, 24 nt, synthetic construct
  misc_feature 1..24: note = Oxysterol-binding protein-related protein 1 (367-374)
  source 1..24: mol_type = other RNA
ttcggcaaggagctgcacaaggtg

SEQ ID NO: 43991 - RNA, 27 nt, synthetic construct
  misc_feature 1..27: note = Cyclin-dependent kinase 3 (146-154)
  source 1..27: mol_type = other RNA
ttcggcctggcccgcgccttcggggtg

SEQ ID NO: 43992 - RNA, 48 nt, synthetic construct
  misc_feature 1..48: note = Pyruvate kinase PKM (157-172)
  source 1..48: mol_type = other RNA
ttcggcgtggagcaggacgtcgacatggtgttcgccagcttcatccgc

SEQ ID NO: 43993 - RNA, 33 nt, synthetic construct
  misc_feature 1..33: note = AP-2 complex subunit beta (776-786)
  source 1..33: mol_type = other RNA
ttcggcgtgatccccagcaccccgctggccatc

SEQ ID NO: 43994 - RNA, 30 nt, synthetic construct
  misc_feature 1..30: note = Myelin basic protein (152-161)
  source 1..30: mol_type = other RNA
ttcggctacgggggccgcgccagcgactac

SEQ ID NO: 43995 - RNA, 48 nt, synthetic construct
  misc_feature 1..48: note = Cytochrome c oxidase subunit 6A1, mitochondrial (71-86)
  source 1..48: mol_type = other RNA
ttccacaacccccacgtgaacccgctgcccaccggctacgaggacgag

SEQ ID NO: 43996 - RNA, 18 nt, synthetic construct
  misc_feature 1..18: note = Large proline-rich protein BAG6 (789-794)
  source 1..18: mol_type = other RNA
ttccaccagcactacctg

SEQ ID NO: 43997 - RNA, 27 nt, synthetic construct
  misc_feature 1..27: note = Transformation/transcription domain-associated protein (280-288)
  source 1..27: mol_type = other RNA
ttcatcgccgcccagatcaagaccctg

SEQ ID NO: 43998 - RNA, 30 nt, synthetic construct
  misc_feature 1..30: note = Vitamin K-dependent gamma-carboxylase (474-483)
  source 1..30: mol_type = other RNA
ttcatcgccgacttccccggcctgcacctc

SEQ ID NO: 43999 - RNA, 27 nt, synthetic construct
  misc_feature 1..27: note = Ubiquitin carboxyl-terminal hydrolase 7 (183-191)
  source 1..27: mol_type = other RNA
ttcatcgacgacgacaaggtgaccttc

SEQ ID NO: 44000 - RNA, 27 nt, synthetic construct
  misc_feature 1..27: note = Histone-lysine N-methyltransferase SETDB1 (43-51)
  source 1..27: mol_type = other RNA
ttcatcgacgaggagctggagaagatg

SEQ ID NO: 44001 - RNA, 27 nt, synthetic construct
  misc_feature 1..27: note Dolichyl-diphosphooligosaccharide-proteinosyltransferase 48 kDa subunit (119-127)
  source 1..27: mol_type = other RNA
ttcatcgacggcgggggcagcgtgctg

SEQ ID NO: 44002 - RNA, 30 nt, synthetic construct
  misc_feature 1..30: note Dolichyl-diphosphooligosaccharide-proteinosyltransferase 48 kDa subunit (119-128)
  source 1..30: mol_type = other RNA
ttcatcgacggcgggggcagcgtgctggtc

SEQ ID NO: 44003 - RNA, 27 nt, synthetic construct
  misc_feature 1..27: note = Nck-associated protein 1 (400-408)
  source 1..27: mol_type = other RNA
ttcatcgacaagcacatcgccgagctg

SEQ ID NO: 44004 - RNA, 27 nt, synthetic construct
  misc_feature 1..27: note = ATP-dependent RNA helicase DDX19B (230-238)
  source 1..27: mol_type = other RNA
ttcatcgaccccaagaagatcaaggtg

SEQ ID NO: 44005 - RNA, 27 nt, synthetic construct
  misc_feature 1..27: note = BTB/POZ domain-containing protein KCTD15 (102-110)
  source 1..27: mol_type = other RNA
ttcatcgaccgcgacggcgagatcttc

SEQ ID NO: 44006 - RNA, 78 nt, synthetic construct
  misc_feature 1..78: note = Tubulin beta chain (387-412)
  source 1..78: mol_type = other RNA
ttcatcggcaacagcaccgccatccaggagctgttcaagcgcatctccgagcagttcaccgccatgttccggcgcaag

SEQ ID NO: 44007 - RNA, 27 nt, synthetic construct
  misc_feature 1..27: note = Receptor-type protein tyrosine phosphatase beta (1317-1325)
  source 1..27: mol_type = other RNA
ttcatccacgacaccctggtggaggcc

SEQ ID NO: 44008 - RNA, 27 nt, synthetic construct
  misc_feature 1..27: note = Kelch-like protein 7 (120-128)
  source 1..27: mol_type = other RNA
ttcatccaccagcacttcaccgaggtg

SEQ ID NO: 44009 - RNA, 27 nt, synthetic construct
  misc_feature 1..27: note = Kelch-like protein 18 (97-105)
  source 1..27: mol_type = other RNA
ttcatccaccagcacttcgtggaggtc

SEQ ID NO: 44010 - RNA, 27 nt, synthetic construct
  misc_feature 1..27: note = Myotubularin-related protein 13 (272-280)
  source 1..27: mol_type = other RNA
ttcatcatcggcgtgcacagcgtcttc

SEQ ID NO: 44011 - RNA, 27 nt, synthetic construct
  misc_feature 1..27: note = LisH domain-containing protein ARMC9 (551-559)
  source 1..27: mol_type = other RNA
ttcatcaaggagggcaacgccgagatg

SEQ ID NO: 44012 - RNA, 27 nt, synthetic construct
  misc_feature 1..27: note = Importin-5 (200-208)
  source 1..27: mol_type = other RNA
ttcatcctggccaacgagcacaacgtg

SEQ ID NO: 44013 - RNA, 27 nt, synthetic construct
  misc_feature 1..27: note = WD repeat and FYVE domain-containing protein 3 (419-427)
  source 1..27: mol_type = other RNA
ttcatcctggagagccagcacaccctc

SEQ ID NO: 44014 - RNA, 27 nt, synthetic construct
  misc_feature 1..27: note = Cyclin-related protein FAM58A (33-41)
  source 1..27: mol_type = other RNA
ttcatcatggaggccggcgtgaagctg

SEQ ID NO: 44015 - RNA, 27 nt, synthetic construct
  misc_feature 1..27: note = Protein EFR3 homolog A (468-476)
  source 1..27: mol_type = other RNA
ttcatcatgggcaaggtgcccgtcttc

SEQ ID NO: 44016 - RNA, 27 nt, synthetic construct
  misc_feature 1..27: note = Translocated to HRX in t(11,19) leukemia (81-89)
  source 1..27: mol_type = other RNA
ttcatcatgcccatcgaggtgcacttc

SEQ ID NO: 44017 - RNA, 18 nt, synthetic construct
  misc_feature 1..18: note = Endoplasmic reticulum metallopeptidase 1 (110-115)
  source 1..18: mol_type = other RNA
ttcatcaacttcatctac

SEQ ID NO: 44018 - RNA, 30 nt, synthetic construct
  misc_feature 1..30: note = Sacsin (114-123)
  source 1..30: mol_type = other RNA
ttcatcaacggcaacttccccgggaccttc

SEQ ID NO: 44019 - RNA, 27 nt, synthetic construct
  misc_feature 1..27: note = Tripartite motif-containing protein 2 (185-193)
  source 1..27: mol_type = other RNA
ttcatcagcgagatcatccaccagctg

SEQ ID NO: 44020 - RNA, 27 nt, synthetic construct
  misc_feature 1..27: note = Protein TANC1 (603-611)
  source 1..27: mol_type = other RNA
ttcatcaccaagatcatcagcaagttc

SEQ ID NO: 44021 - RNA, 21 nt, synthetic construct
  misc_feature 1..21: note = Gelsolin (365-371)
  source 1..21: mol_type = other RNA
ttcatcaccaagatggactac

SEQ ID NO: 44022 - RNA, 27 nt, synthetic construct
  misc_feature 1..27: note = Calcium/calmodulin-dependent 3',5'-cyclic nucleotide phosphodiesterase 1C (433-441)
  source 1..27: mol_type = other RNA
ttcatcgtggagcccaccttcaccgtc

SEQ ID NO: 44023 - RNA, 30 nt, synthetic construct
  misc_feature 1..30: note = Dopamine D4 receptor (72-81)
  source 1..30: mol_type = other RNA
ttcatcgtgagcctggccgccgcggacctc

SEQ ID NO: 44024 - RNA, 27 nt, synthetic construct
  misc_feature 1..27: note = Regulatory-associated protein of mTOR (277-285)
  source 1..27: mol_type = other RNA
ttcatctgggccaagatcctggccgtg

SEQ ID NO: 44025 - RNA, 27 nt, synthetic construct
  misc_feature 1..27: note = Unconventional myosin-X (583-591)
  source 1..27: mol_type = other RNA
ttcatctacgacctgttcgagcacgtg

SEQ ID NO: 44026 - RNA, 30 nt, synthetic construct
  misc_feature 1..30: note = Cullin-4B (578-587)
  source 1..30: mol_type = other RNA
ttcatctacggcaaggacgtgttcgaggcc

SEQ ID NO: 44027 - RNA, 39 nt, synthetic construct
  misc_feature 1..39: note = Cytochrome c oxidase subunit 7A2, mitochondrial (24-36)
  source 1..39: mol_type = other RNA
ttcaagaacaaggtgcccgagaagcagaagctgttccag

SEQ ID NO: 44028 - RNA, 84 nt, synthetic construct
  misc_feature 1..84: note = Cytochrome c oxidase subunit 7A2, mitochondrial (24-51)
  source 1..84: mol_type = other RNA
ttcaagaacaaggtgcccgagaagcagaagctgttccaggaggacgacgagatcccgctctacctgaagggcggggtcgccgac

SEQ ID NO: 44029 - RNA, 180 nt, synthetic construct
  misc_feature 1..180: note = Cytochrome c oxidase subunit 7A2, mitochondrial (24-83)
  source 1..180: mol_type = other RNA
ttcaagaacaaggtgcccgagaagcagaagctgttccaggaggacgacgagatcccgctctacctgaagggcggggtcgccgacgccctgctctaccgcgcgaccatgatcctgaccgtgggcgggacggcctacgccatctacgagctggccgtggccagcttccccaagaagcaggag

SEQ ID NO: 44030 - RNA, 21 nt, synthetic construct
  misc_feature 1..21: note = Histone deacetylase 1 (241-247)
  source 1..21: mol_type = other RNA
ttcaagcccgtgatgagcaag

SEQ ID NO: 44031 - RNA, 21 nt, synthetic construct
  misc_feature 1..21: note = Protein kinase C-binding protein 1 (213-219)
  source 1..21: mol_type = other RNA
ttcctggccgacgccaagtgg

SEQ ID NO: 44032 - RNA, 30 nt, synthetic construct
  misc_feature 1..30: note = Methionine-tRNA ligase, cytoplasmic (395-404)
  source 1..30: mol_type = other RNA
ttcctggccgaccgcttcgtggagggcgtc

SEQ ID NO: 44033 - RNA, 30 nt, synthetic construct
  misc_feature 1..30: note = Ras GTPase-activating-like protein IQGAP3 (868-877)
  source 1..30: mol_type = other RNA
ttcctggccgaggccgagctcctgaagctg

SEQ ID NO: 44034 - RNA, 30 nt, synthetic construct
  misc_feature 1..30: note = Protein sel-1 homolog 1 (366-375)
  source 1..30: mol_type = other RNA
ttcctggccgagaagggcgacgtgcaggcc

SEQ ID NO: 44035 - RNA, 27 nt, synthetic construct
  misc_feature 1..27: note = H(+)/Cl(-) exchange transporter 3 (206-214)
  source 1..27: mol_type = other RNA
ttcctggccgtgagcctcgtcaaggtg

SEQ ID NO: 44036 - RNA, 27 nt, synthetic construct
  misc_feature 1..27: note = Sodium/potassium-transporting ATPase subunit alpha-1 (28-36)
  source 1..27: mol_type = other RNA
ttcctggcctacagcatccaggccgcg

SEQ ID NO: 44037 - RNA, 24 nt, synthetic construct
  misc_feature 1..24: note = B-cell receptor-associated protein 29 (63-70)
  source 1..24: mol_type = other RNA
ttcctggacgccgtgcgcgaggtc

SEQ ID NO: 44038 - RNA, 27 nt, synthetic construct
  misc_feature 1..27: note = Cytoplasmic dynein 2 heavy chain 1 (42-50)
  source 1..27: mol_type = other RNA
ttcctggacgacggcaaccagatgctc

SEQ ID NO: 44039 - RNA, 27 nt, synthetic construct
  misc_feature 1..27: note = Guanine nucleotide-binding protein G(I)/G(S)/G(T) subunit beta-2 (151-159)
  source 1..27: mol_type = other RNA
ttcctggacgacaaccagatcatcacc

SEQ ID NO: 44040 - RNA, 27 nt, synthetic construct
  misc_feature 1..27: note = Polycystin-1 (3400-3408)
  source 1..27: mol_type = other RNA
ttcctggacgacagcaagtccctcgtg

SEQ ID NO: 44041 - RNA, 27 nt, synthetic construct
  misc_feature 1..27: note = Guanine nucleotide-binding protein subunit beta-4 (151-159)
  source 1..27: mol_type = other RNA
ttcctggacgacagccagatcgtgacc

SEQ ID NO: 44042 - RNA, 27 nt, synthetic construct
  misc_feature 1..27: note = F-box only protein 32 (25-33)
  source 1..27: mol_type = other RNA
ttcctggacgagaagagcggctccttc

SEQ ID NO: 44043 - RNA, 30 nt, synthetic construct
  misc_feature 1..30: note = F-box only protein 32 (25-34)
  source 1..30: mol_type = other RNA
ttcctggacgagaagagcggctccttcgtg

SEQ ID NO: 44044 - RNA, 24 nt, synthetic construct
  misc_feature 1..24: note = Dipeptidyl peptidase 8 (72-79)
  source 1..24: mol_type = other RNA
ttcctggacgagaacgtgcacttc

SEQ ID NO: 44045 - RNA, 27 nt, synthetic construct
  misc_feature 1..27: note = Ubiquitin-like-conjugating enzyme ATG10 (117-125)
  source 1..27: mol_type = other RNA
ttcctggacggccgccccctcaccctg

SEQ ID NO: 44046 - RNA, 27 nt, synthetic construct
  misc_feature 1..27: note = Mediator of RNA polymerase II transcription subunit 18 (51-59)
  source 1..27: mol_type = other RNA
ttcctggaccacgagatggtgttcctc

SEQ ID NO: 44047 - RNA, 24 nt, synthetic construct
  misc_feature 1..24: note = Protein SMG8 (484-491)
  source 1..24: mol_type = other RNA
ttcctggacatcgacaccaagttc

SEQ ID NO: 44048 - RNA, 27 nt, synthetic construct
  misc_feature 1..27: note = Unconventional myosin-Ic (523-531)
  source 1..27: mol_type = other RNA
ttcctggacaagaacaacgacctcctg

SEQ ID NO: 44049 - RNA, 27 nt, synthetic construct
  misc_feature 1..27: note = Sterol regulatory element-binding protein cleavage-activating protein (641-649)
  source 1..27: mol_type = other RNA
ttcctggacaagcgcatcgtggccgcc

SEQ ID NO: 44050 - RNA, 27 nt, synthetic construct
  misc_feature 1..27: note = Major facilitator superfamily domain-containing protein 12 (410-418)
  source 1..27: mol_type = other RNA
ttcctggacaaggtggccaacggcctc

SEQ ID NO: 44051 - RNA, 24 nt, synthetic construct
  misc_feature 1..24: note = Putative bifunctional UDP-N-acetylglucosamine transferase and deubiquitinase ALG13 (156-163)
  source 1..24: mol_type = other RNA
ttcctggacaaggtggtcggcctc

SEQ ID NO: 44052 - RNA, 24 nt, synthetic construct
  misc_feature 1..24: note = Formin-1 (471-478)
  source 1..24: mol_type = other RNA
ttcctggacctcccccacaaggtg

SEQ ID NO: 44053 - RNA, 27 nt, synthetic construct
  misc_feature 1..27: note = Group XV phospholipase A2 (126-134)
  source 1..27: mol_type = other RNA
ttcctggaccccagcaagtccagcgtg

SEQ ID NO: 44054 - RNA, 24 nt, synthetic construct
  misc_feature 1..24: note = Glycogen phosphorylase, muscle form (144-151)
  source 1..24: mol_type = other RNA
ttcctggacagcatggccaccctc

SEQ ID NO: 44055 - RNA, 27 nt, synthetic construct
  misc_feature 1..27: note = Basic leucine zipper and W2 domain-containing protein 2 (51-59)
  source 1..27: mol_type = other RNA
ttcctggacagcaccggctcccgcctc

SEQ ID NO: 44056 - RNA, 27 nt, synthetic construct
  misc_feature 1..27: note = Tuftelin-interacting protein 11 (507-515)
  source 1..27: mol_type = other RNA
ttcctggacagctgggtgcacatcatc

SEQ ID NO: 44057 - RNA, 30 nt, synthetic construct
  misc_feature 1..30: note = Sulfate transporter (658-667)
  source 1..30: mol_type = other RNA
ttcctggacaccgccggcatccacaccctc

SEQ ID NO: 44058 - RNA, 27 nt, synthetic construct
  misc_feature 1..27: note = Protein naked cuticle homolog 1 (320-328)
  source 1..27: mol_type = other RNA
ttcctggacacccccatcgccaaggtg

SEQ ID NO: 44059 - RNA, 27 nt, synthetic construct
  misc_feature 1..27: note = Protein S100-A1 (45-53)
  source 1..27: mol_type = other RNA
ttcctggacgtgaaggagctcatgctg

SEQ ID NO: 44060 - RNA, 27 nt, synthetic construct
  misc_feature 1..27: note = Electron transfer flavoprotein subunit beta (232-240)
  source 1..27: mol_type = other RNA
ttcctggactggccccagggcaccttc

SEQ ID NO: 44061 - RNA, 27 nt, synthetic construct
  misc_feature 1..27: note = A-kinase anchor protein 9 (882-890)
  source 1..27: mol_type = other RNA
ttcctggaggagcgcagcgtgctcctg

SEQ ID NO: 44062 - RNA, 27 nt, synthetic construct
  misc_feature 1..27: note = Paraneoplastic antigen Ma2 (107-115)
  source 1..27: mol_type = other RNA
ttcctggagaaggagggccagaccgtg

SEQ ID NO: 44063 - RNA, 27 nt, synthetic construct
  misc_feature 1..27: note = Nitric oxide synthase-interacting protein (114-122)
  source 1..27: mol_type = other RNA
ttcctggagaaggagagcgccatcgtg

SEQ ID NO: 44064 - RNA, 30 nt, synthetic construct
  misc_feature 1..30: note = Cytochrome c oxidase subunit 2 (127-136)
  source 1..30: mol_type = other RNA
ttcctggagcccggcgacctccgcctgctg

SEQ ID NO: 44065 - RNA, 21 nt, synthetic construct
  misc_feature 1..21: note = Calnexin (139-145)
  source 1..21: mol_type = other RNA
ttcctgttcgacaccaagccc

SEQ ID NO: 44066 - RNA, 27 nt, synthetic construct
  misc_feature 1..27: note = Transmembrane protein 97 (118-126)
  source 1..27: mol_type = other RNA
ttcctgttcgaggacttcagcaaggcc

SEQ ID NO: 44067 - RNA, 27 nt, synthetic construct
  misc_feature 1..27: note = Melanoma-associated antigen 11 (321-329)
  source 1..27: mol_type = other RNA
ttcctgttcggcgagcccaagcgcctc

SEQ ID NO: 44068 - RNA, 27 nt, synthetic construct
  misc_feature 1..27: note = Transmembrane protein 106B (155-163)
  source 1..27: mol_type = other RNA
ttcctgttcccccgcagcatcgacgtg

SEQ ID NO: 44069 - RNA, 27 nt, synthetic construct
  misc_feature 1..27: note = Hephaestin (680-688)
  source 1..27: mol_type = other RNA
ttcctgttcagcaacctcccccgcctg

SEQ ID NO: 44070 - RNA, 27 nt, synthetic construct
  misc_feature 1..27: note = Unconventional myosin-Ib (362-370)
  source 1..27: mol_type = other RNA
ttcctgttcagctccgaccacctcatc

SEQ ID NO: 44071 - RNA, 24 nt, synthetic construct
  misc_feature 1..24: note = POU domain, class 2, transcription factor 1 (70-77)
  source 1..24: mol_type = other RNA
ttcctgggccacctccaccaggtg

SEQ ID NO: 44072 - RNA, 27 nt, synthetic construct
  misc_feature 1..27: note = Glutathione S-transferase Mu 4 (141-149)
  source 1..27: mol_type = other RNA
ttcctgggcaagcgcccctggttcgtg

SEQ ID NO: 44073 - RNA, 27 nt, synthetic construct
  misc_feature 1..27: note = Maltase-glucoamylase, intestinal (1217-1225)
  source 1..27: mol_type = other RNA
ttcctgggccccaccccggagctcgtg

SEQ ID NO: 44074 - RNA, 27 nt, synthetic construct
  misc_feature 1..27: note = Asparagine synthetase (glutamine-hydrolyzing) (51-59)
  source 1..27: mol_type = other RNA
ttcctgggccgcgacacctacggggtg

SEQ ID NO: 44075 - RNA, 27 nt, synthetic construct
  misc_feature 1..27: note = Ras GTPase-activating protein 1 (583-591)
  source 1..27: mol_type = other RNA
ttcctgcacgagaagctcgagagcctg

SEQ ID NO: 44076 - RNA, 27 nt, synthetic construct
  misc_feature 1..27: note = Kelch domain-containing protein 8B (171-179)
  source 1..27: mol_type = other RNA
ttcctgcacggcaacaagatctacgtg

SEQ ID NO: 44077 - RNA, 30 nt, synthetic construct
  misc_feature 1..30: note = VWFA and cache domain-containing protein 1 (212-221)
  source 1..30: mol_type = other RNA
ttcctgatcgacgacaagggctacaccctc

SEQ ID NO: 44078 - RNA, 30 nt, synthetic construct
  misc_feature 1..30: note = Adenylate kinase isoenzyme 5 (224-233)
  source 1..30: mol_type = other RNA
ttcctgatcgacggctacccccgcgaggtg

SEQ ID NO: 44079 - RNA, 27 nt, synthetic construct
  misc_feature 1..27: note = BTB/POZ domain-containing protein KCTD9 (136-144)
  source 1..27: mol_type = other RNA
ttcctgatcgaccgcagccccgagtac

SEQ ID NO: 44080 - RNA, 30 nt, synthetic construct
  misc_feature 1..30: note = Tensin-2 (1202-1211)
  source 1..30: mol_type = other RNA
ttcctgatcgagaccggccccaagggggtg

SEQ ID NO: 44081 - RNA, 27 nt, synthetic construct
  misc_feature 1..27: note = Protein phosphatase 1 regulatory subunit 12A (37-45)
  source 1..27: mol_type = other RNA
ttcctgatcggccagggggcccacgtg

SEQ ID NO: 44082 - RNA, 27 nt, synthetic construct
  misc_feature 1..27: note = Proline-rich protein 12 (641-649)
  source 1..27: mol_type = other RNA
ttcctgatccagcacctcctgcaggcc

SEQ ID NO: 44083 - RNA, 33 nt, synthetic construct
  misc_feature 1..33: note = Protein FAM73A (567-577)
  source 1..33: mol_type = other RNA
ttcctgaaggacatcttcgacttcgagaaggtg

SEQ ID NO: 44084 - RNA, 27 nt, synthetic construct
  misc_feature 1..27: note = Catenin alpha-1 (85-93)
  source 1..27: mol_type = other RNA
ttcctgaaggaggagctcgtggccgcc

SEQ ID NO: 44085 - RNA, 27 nt, synthetic construct
  misc_feature 1..27: note = Threonylcarbamoyladenosine tRNA methylthiotransferase (278-286)
  source 1..27: mol_type = other RNA
ttcctgaaggagaaggtgcccggcatc

SEQ ID NO: 44086 - RNA, 27 nt, synthetic construct
  misc_feature 1..27: note = Ankyrin-3 (171-179)
  source 1..27: mol_type = other RNA
ttcctgctcgaccacggcgccagcctg

SEQ ID NO: 44087 - RNA, 30 nt, synthetic construct
  misc_feature 1..30: note = DNA-binding protein RFX7 (684-693)
  source 1..30: mol_type = other RNA
ttcctgctcgacagcgactccaagagcgtg

SEQ ID NO: 44088 - RNA, 30 nt, synthetic construct
  misc_feature 1..30: note = Protein TANC2 (96-105)
  source 1..30: mol_type = other RNA
ttcctgctcggcgagaaggtgaccgaggtc

SEQ ID NO: 44089 - RNA, 27 nt, synthetic construct
  misc_feature 1..27: note = Transmembrane emp24 domain-containing protein 10 (22-30)
  source 1..27: mol_type = other RNA
ttcctgctcggcccccgcctggtgctg

SEQ ID NO: 44090 - RNA, 27 nt, synthetic construct
  misc_feature 1..27: note = TBC1 domain family member 8B (190-198)
  source 1..27: mol_type = other RNA
ttcctgctcggcagcgagatcaagctg

SEQ ID NO: 44091 - RNA, 27 nt, synthetic construct
  misc_feature 1..27: note = Intraflagellar transport protein 56 (385-393)
  source 1..27: mol_type = other RNA
ttcctgctcatccagagcgagaagatg

SEQ ID NO: 44092 - RNA, 30 nt, synthetic construct
  misc_feature 1..30: note = Peptidyl-prolyl cis-trans isomerase B (15-24)
  source 1..30: mol_type = other RNA
ttcctgctcctgcccggcccgagcgccgcc

SEQ ID NO: 44093 - RNA, 27 nt, synthetic construct
  misc_feature 1..27: note = G-protein coupled receptor 56 (460-468)
  source 1..27: mol_type = other RNA
ttcctgctcagcgagcccgtggccctg

SEQ ID NO: 44094 - RNA, 27 nt, synthetic construct
  misc_feature 1..27: note = Huntingtin (694-702)
  source 1..27: mol_type = other RNA
ttcctgctcaccggcgggaagaacgtg

SEQ ID NO: 44095 - RNA, 36 nt, synthetic construct
  misc_feature 1..36: note = Protocadherin Fat 3 (2442-2453)
  source 1..36: mol_type = other RNA
ttcctgatggacagcaagtccggcgtgatcaccctc

SEQ ID NO: 44096 - RNA, 27 nt, synthetic construct
  misc_feature 1..27: note = Cortactin-binding protein 2 (1244-1252)
  source 1..27: mol_type = other RNA
ttcctgatgggcaccatcgccaaggcc

SEQ ID NO: 44097 - RNA, 33 nt, synthetic construct
  misc_feature 1..33: note = 5,6-dihydroxyindole-2-carboxylic acid oxidase (383-393)
  source 1..33: mol_type = other RNA
ttcctgaacggcaccgggggccagacccacctc

SEQ ID NO: 44098 - RNA, 27 nt, synthetic construct
  misc_feature 1..27: note = Multidrug and toxin extrusion protein 1 (134-142)
  source 1..27: mol_type = other RNA
ttcctgaacacccagcacatcctcctg

SEQ ID NO: 44099 - RNA, 27 nt, synthetic construct
  misc_feature 1..27: note = Peroxisome biogenesis factor 1 (613-621)
  source 1..27: mol_type = other RNA
ttcctgcccgccagcctccgctccgtg

SEQ ID NO: 44100 - RNA, 27 nt, synthetic construct
  misc_feature 1..27: note = Paired amphipathic helix protein Sin3a (379-387)
  source 1..27: mol_type = other RNA
ttcctgcccgacgccaacagctccgtg

SEQ ID NO: 44101 - RNA, 36 nt, synthetic construct
  misc_feature 1..36: note = Eukaryotic translation initiation factor 4 gamma 1 (1367-1378)
  source 1..36: mol_type = other RNA
ttcctgcccgagggccaggacatcggggccttcgtg

SEQ ID NO: 44102 - RNA, 27 nt, synthetic construct
  misc_feature 1..27: note = NADH dehydrogenase (ubiquinone) 1 alpha subcomplex subunit 9, mitochondrial (286-294)
  source 1..27: mol_type = other RNA
ttcctgcccttcccgctccccctgttc

SEQ ID NO: 44103 - RNA, 27 nt, synthetic construct
  misc_feature 1..27: note = Mitochondrial dynamics protein MID51 (470-478)
  source 1..27: mol_type = other RNA
ttcctgccccgccaggccctcctgttc

SEQ ID NO: 44104 - RNA, 30 nt, synthetic construct
  misc_feature 1..30: note = Ubiquitin carboxyl-terminal hydrolase 19 (742-751)
  source 1..30: mol_type = other RNA
ttcctgcccagccactccctcgacaccgtg

SEQ ID NO: 44105 - RNA, 27 nt, synthetic construct
  misc_feature 1..27: note = Peroxisomal acyl-coenzyme A oxidase 1 (107-115)
  source 1..27: mol_type = other RNA
ttcctgcccaccctcctgcaccaggcc

SEQ ID NO: 44106 - RNA, 30 nt, synthetic construct
  misc_feature 1..30: note = ATP-binding cassette sub-family C member 11 (455-464)
  source 1..30: mol_type = other RNA
ttcctgcaggagagccccgtgttctacgtc

SEQ ID NO: 44107 - RNA, 27 nt, synthetic construct
  misc_feature 1..27: note = Hemicentin-1 (2534-2542)
  source 1..27: mol_type = other RNA
ttcctgcagatcaccaacgtgcaggtc

SEQ ID NO: 44108 - RNA, 27 nt, synthetic construct
  misc_feature 1..27: note = Protocadherin gamma-A12 (749-757)
  source 1..27: mol_type = other RNA
ttcctgcagacctacagccacgaggtg

SEQ ID NO: 44109 - RNA, 27 nt, synthetic construct
  misc_feature 1..27: note = Melanocyte protein PMEL (239-247)
  source 1..27: mol_type = other RNA
ttcctgcgcaaccagcccctcaccttc

SEQ ID NO: 44110 - RNA, 33 nt, synthetic construct
  misc_feature 1..33: note = Hemoglobin subunit alpha (5-15)
  source 1..33: mol_type = other RNA
ttcctgagcttccccaccaccaagacgtacttc

SEQ ID NO: 44111 - RNA, 27 nt, synthetic construct
  misc_feature 1..27: note = Insulin receptor substrate 2 (1325-1333)
  source 1..27: mol_type = other RNA
ttcctgagccaccacctcaaggaggcc

SEQ ID NO: 44112 - RNA, 27 nt, synthetic construct
  misc_feature 1..27: note = Tensin-3 (1065-1073)
  source 1..27: mol_type = other RNA
ttcctgagccacaacttcctcaccgtg

SEQ ID NO: 44113 - RNA, 27 nt, synthetic construct
  misc_feature 1..27: note = Protein capicua homolog (1061-1069)
  source 1..27: mol_type = other RNA
ttcctgagcatcatgtcccccgagatc

SEQ ID NO: 44114 - RNA, 33 nt, synthetic construct
  misc_feature 1..33: note = Vitamin K-dependent protein S (26-36)
  source 1..33: mol_type = other RNA
ttcctgagcaagcagcaggcctcccaggtgctc

SEQ ID NO: 44115 - RNA, 36 nt, synthetic construct
  misc_feature 1..36: note = Vitamin K-dependent protein S (26-37)
  source 1..36: mol_type = other RNA
ttcctgagcaagcagcaggcctcccaggtgctcgtc

SEQ ID NO: 44116 - RNA, 24 nt, synthetic construct
  misc_feature 1..24: note = mRNA-decapping enzyme 1A (523-530)
  source 1..24: mol_type = other RNA
ttcctgagcaccctccacgaggtg

SEQ ID NO: 44117 - RNA, 27 nt, synthetic construct
  misc_feature 1..27: note = Lysosomal-trafficking regulator (12-20)
  source 1..27: mol_type = other RNA
ttcctgaccgacgtgaaccgcctctgc

SEQ ID NO: 44118 - RNA, 30 nt, synthetic construct
  misc_feature 1..30: note = L-dopachrome tautomerase (52-61)
  source 1..30: mol_type = other RNA
ttcctgaccagcgaccagctcggctactcc

SEQ ID NO: 44119 - RNA, 33 nt, synthetic construct
  misc_feature 1..33: note = L-dopachrome tautomerase (52-62)
  source 1..33: mol_type = other RNA
ttcctgaccagcgaccagctcggctactcctac

SEQ ID NO: 44120 - RNA, 27 nt, synthetic construct
  misc_feature 1..27: note = Bifunctional glutamate/proline-tRNA ligase (1167-1175)
  source 1..27: mol_type = other RNA
ttcctgtggcaggagggccacagcgcc

SEQ ID NO: 44121 - RNA, 27 nt, synthetic construct
  misc_feature 1..27: note = Fatty acyl-CoA reductase 1 (362-370)
  source 1..27: mol_type = other RNA
ttcctgtacgacatctacctccgcatg

SEQ ID NO: 44122 - RNA, 27 nt, synthetic construct
  misc_feature 1..27: note = Tetratricopeptide repeat protein 17 (740-748)
  source 1..27: mol_type = other RNA
ttcctgtacaacatcaccagctccgtg

SEQ ID NO: 44123 - RNA, 27 nt, synthetic construct
  misc_feature 1..27: note = Chromodomain-helicase-DNA-binding protein 1-like (358-366)
  source 1..27: mol_type = other RNA
ttcctgtacagcggcgggcaccgcgtg

SEQ ID NO: 44124 - RNA, 27 nt, synthetic construct
  misc_feature 1..27: note = Ropporin-1A (163-171)
  source 1..27: mol_type = other RNA
ttcctgtacacctacatcgccaaggtg

SEQ ID NO: 44125 - RNA, 27 nt, synthetic construct
  misc_feature 1..27: note = Histone deacetylase 11 (141-149)
  source 1..27: mol_type = other RNA
ttcatggacgacaagcgcgtgtacatc

SEQ ID NO: 44126 - RNA, 27 nt, synthetic construct
  misc_feature 1..27: note = Pre-mRNA-processing-splicing factor 8 (1561-1569)
  source 1..27: mol_type = other RNA
ttcatgcacggcaagatccccaccctg

SEQ ID NO: 44127 - RNA, 27 nt, synthetic construct
  misc_feature 1..27: note = Maltase-glucoamylase (551-559)
  source 1..27: mol_type = other RNA
ttcatgaacaaccgcagcttcatcctg

SEQ ID NO: 44128 - RNA, 27 nt, synthetic construct
  misc_feature 1..27: note = Adenosine 3'-phospho 5'-phosphosulfate transporter 1 (49-57)
  source 1..27: mol_type = other RNA
ttcatggtgcccggctacctgctcgtc

SEQ ID NO: 44129 - RNA, 27 nt, synthetic construct
  misc_feature 1..27: note = DNA-directed RNA polymerase II subunit RPB1 (1247-1255)
  source 1..27: mol_type = other RNA
ttcaacgacgacaacgccgagaagctg

SEQ ID NO: 44130 - RNA, 27 nt, synthetic construct
  misc_feature 1..27: note = Tumor susceptibility gene 101 protein (44-52)
  source 1..27: mol_type = other RNA
ttcaacgacggcagctcccgcgagctg

SEQ ID NO: 44131 - RNA, 27 nt, synthetic construct
  misc_feature 1..27: note = Amyloid-like protein 2 (10-18)
  source 1..27: mol_type = other RNA
ttcaacggcaacgggaagatcaacgtg

SEQ ID NO: 44132 - RNA, 21 nt, synthetic construct
  misc_feature 1..21: note = Cytoplasmic FMR1-interacting protein 1 (472-478)
  source 1..21: mol_type = other RNA
ttcaaccacgccatccgccac

SEQ ID NO: 44133 - RNA, 30 nt, synthetic construct
  misc_feature 1..30: note = WD repeat-containing protein 19 (187-196)
  source 1..30: mol_type = other RNA
ttccccgacccgaacggcacccgcctggtg

SEQ ID NO: 44134 - RNA, 24 nt, synthetic construct
  misc_feature 1..24: note = WD repeat-containing protein 6 (464-471)
  source 1..24: mol_type = other RNA
ttccccggcaaggtgcacagcctg

SEQ ID NO: 44135 - RNA, 30 nt, synthetic construct
  misc_feature 1..30: note = Collagen alpha-1(VIII) chain (279-288)
  source 1..30: mol_type = other RNA
ttccccggcccgcaggggcccctgggcaag

SEQ ID NO: 44136 - RNA, 24 nt, synthetic construct
  misc_feature 1..24: note = Proline and serine-rich protein 1 (159-166)
  source 1..24: mol_type = other RNA
ttccccggcaccccgctgaagaag

SEQ ID NO: 44137 - RNA, 24 nt, synthetic construct
  misc_feature 1..24: note = Patatin-like phospholipase domain-containing protein 2 (454-461)
  source 1..24: mol_type = other RNA
ttccccccggaggccctgcgcatg

SEQ ID NO: 44138 - RNA, 27 nt, synthetic construct
  misc_feature 1..27: note = Non-POU domain-containing octamer-binding protein (129-137)
  source 1..27: mol_type = other RNA
ttcccccgcccggtgaccgtcgagccc

SEQ ID NO: 44139 - RNA, 27 nt, synthetic construct
  misc_feature 1..27: note = Alpha-mannosidase 2x (42-50)
  source 1..27: mol_type = other RNA
ttcccccgcagccagatctccgtgctg

SEQ ID NO: 44140 - RNA, 30 nt, synthetic construct
  misc_feature 1..30: note = Transformation/transcription domain-associated protein (2223-2232)
  source 1..30: mol_type = other RNA
ttccccaccgagccgagcacctccagcgtg

SEQ ID NO: 44141 - RNA, 27 nt, synthetic construct
  misc_feature 1..27: note = Protein 4.1 (223-231)
  source 1..27: mol_type = other RNA
ttcccctggccgaaggtgctgaagatc

SEQ ID NO: 44142 - RNA, 24 nt, synthetic construct
  misc_feature 1..24: note = DNA polymerase alpha catalytic subunit (594-601)
  source 1..24: mol_type = other RNA
ttcccctacgccttcaaggaggtg

SEQ ID NO: 44143 - RNA, 27 nt, synthetic construct
  misc_feature 1..27: note = DnaJ homolog subfamily C member 11 (314-322)
  source 1..27: mol_type = other RNA
ttccaggacgacgaccagacccgcgtg

SEQ ID NO: 44144 - RNA, 24 nt, synthetic construct
  misc_feature 1..24: note = Structural maintenance of chromosomes flexible hinge domain-containing protein 1 (1128-1135)
  source 1..24: mol_type = other RNA
ttccaggacgaccacgtgagcctg

SEQ ID NO: 44145 - RNA, 27 nt, synthetic construct
  misc_feature 1..27: note = Serine/threonine-protein kinase MRCK alpha (144-152)
  source 1..27: mol_type = other RNA
ttccaggacgacaacaacctgtacctc

SEQ ID NO: 44146 - RNA, 27 nt, synthetic construct
  misc_feature 1..27: note = Zinc finger HIT domain-containing protein 1 (40-48)
  source 1..27: mol_type = other RNA
ttccaggacgacccccacgccggcctg

SEQ ID NO: 44147 - RNA, 27 nt, synthetic construct
  misc_feature 1..27: note = General transcription factor 3C polypeptide 1 (734-742)
  source 1..27: mol_type = other RNA
ttccaggacaaggaccaggtgttcatc

SEQ ID NO: 44148 - RNA, 27 nt, synthetic construct
  misc_feature 1..27: note = Citron Rho-interacting kinase (164-172)
  source 1..27: mol_type = other RNA
ttccaggacaagaaccacctgtacctc

SEQ ID NO: 44149 - RNA, 27 nt, synthetic construct
  misc_feature 1..27: note = Protein PRR14L (1088-1096)
  source 1..27: mol_type = other RNA
ttccaggaggacagccgctccaccctg

SEQ ID NO: 44150 - RNA, 24 nt, synthetic construct
  misc_feature 1..24: note = Plectin (2903-2910)
  source 1..24: mol_type = other RNA
ttccagggcaagaccgtgaccatc

SEQ ID NO: 44151 - RNA, 21 nt, synthetic construct
  misc_feature 1..21: note = Proteasome activator complex subunit 4 (789-795)
  source 1..21: mol_type = other RNA
ttccagggcagccacaagcac

SEQ ID NO: 44152 - RNA, 27 nt, synthetic construct
  misc_feature 1..27: note = Heat shock 70 kDa protein 1B (21-29)
  source 1..27: mol_type = other RNA
ttccagcacggcaaggtggagatcatc

SEQ ID NO: 44153 - RNA, 27 nt, synthetic construct
  misc_feature 1..27: note = Spatacsin (332-340)
  source 1..27: mol_type = other RNA
ttccagatcgaccgcagctggaaggcc

SEQ ID NO: 44154 - RNA, 24 nt, synthetic construct
  misc_feature 1..24: note = Sodium/potassium-transporting ATPase subunit alpha-3 (948-955)
  source 1..24: mol_type = other RNA
ttccagcagggcatgaagaacaag

SEQ ID NO: 44155 - RNA, 33 nt, synthetic construct
  misc_feature 1..33: note = Gamma-secretase C-terminal fragment 59 (565-575)
  source 1..33: mol_type = other RNA
ttccgccacgacagcggctacgaggtgcaccac

SEQ ID NO: 44156 - RNA, 36 nt, synthetic construct
  misc_feature 1..36: note = Gamma-secretase C-terminal fragment 59 (565-576)
  source 1..36: mol_type = other RNA
ttccgccacgacagcggctacgaggtgcaccaccag

SEQ ID NO: 44157 - RNA, 24 nt, synthetic construct
  misc_feature 1..24: note = 60S ribosomal protein L4 (257-264)
  source 1..24: mol_type = other RNA
ttccgcaagctggacgagctctac

SEQ ID NO: 44158 - RNA, 27 nt, synthetic construct
  misc_feature 1..27: note = Annexin A5 (288-296)
  source 1..27: mol_type = other RNA
ttccgcaagaacttcgccaccagcctg

SEQ ID NO: 44159 - RNA, 27 nt, synthetic construct
  misc_feature 1..27: note = Glycogen phosphorylase, brain form (546-554)
  source 1..27: mol_type = other RNA
ttcagcgccttcctggagaaggagtac

SEQ ID NO: 44160 - RNA, 21 nt, synthetic construct
  misc_feature 1..21: note = Erlin-2 (43-49)
  source 1..21: mol_type = other RNA
ttcagcgccgtgcacaagatc

SEQ ID NO: 44161 - RNA, 27 nt, synthetic construct
  misc_feature 1..27: note = Myb-binding protein 1A (239-247)
  source 1..27: mol_type = other RNA
ttcagcgacgagaacgtgccccgcctg

SEQ ID NO: 44162 - RNA, 24 nt, synthetic construct
  misc_feature 1..24: note = Leucine zipper putative tumor suppressor 1 (232-239)
  source 1..24: mol_type = other RNA
ttcagcgacggcgggtccaagctg

SEQ ID NO: 44163 - RNA, 27 nt, synthetic construct
  misc_feature 1..27: note = Basic leucine zipper and W2 domain-containing protein 2 (143-151)
  source 1..27: mol_type = other RNA
ttcagcgagaccgagcagaccaagctg

SEQ ID NO: 44164 - RNA, 30 nt, synthetic construct
  misc_feature 1..30: note = Cytoplasmic dynein 2 heavy chain 1 (202-211)
  source 1..30: mol_type = other RNA
ttcagcgagaccggcgggggcgagaagtac

SEQ ID NO: 44165 - RNA, 27 nt, synthetic construct
  misc_feature 1..27: note = Dual specificity protein phosphatase 4 (366-374)
  source 1..27: mol_type = other RNA
ttcagcttccccgtgtccgtcggcgtg

SEQ ID NO: 44166 - RNA, 30 nt, synthetic construct
  misc_feature 1..30: note = Protein FAM135A (667-676)
  source 1..30: mol_type = other RNA
ttcagcggcgagaacatcaccgtgaagctg

SEQ ID NO: 44167 - RNA, 27 nt, synthetic construct
  misc_feature 1..27: note = Uncharacterized protein C20orf194 (1005-1013)
  source 1..27: mol_type = other RNA
ttcagcggcaacatctaccacatcctg

SEQ ID NO: 44168 - RNA, 24 nt, synthetic construct
  misc_feature 1..24: note = RNA-binding protein FUS (355-362)
  source 1..24: mol_type = other RNA
ttcagcggcaaccccatcaaggtg

SEQ ID NO: 44169 - RNA, 24 nt, synthetic construct
  misc_feature 1..24: note = 5,6-dihydroxyindole-2-carboxylic acid oxidase (213-220)
  source 1..24: mol_type = other RNA
ttcagccacgagggccccgccttc

SEQ ID NO: 44170 - RNA, 24 nt, synthetic construct
  misc_feature 1..24: note = L-dopachrome tautomerase (209-216)
  source 1..24: mol_type = other RNA
ttcagccaccagggccccgccttc

SEQ ID NO: 44171 - RNA, 33 nt, synthetic construct
  misc_feature 1..33: note = Homeobox protein Hox-B7 (11-21)
  source 1..33: mol_type = other RNA
ttcagcaagtaccccgcctccagctccgtgttc

SEQ ID NO: 44172 - RNA, 33 nt, synthetic construct
  misc_feature 1..33: note = Sodium/potassium/calcium exchanger 1 (352-362)
  source 1..33: mol_type = other RNA
ttcagcctgatcaacggcctccagcccgtgccg

SEQ ID NO: 44173 - RNA, 27 nt, synthetic construct
  misc_feature 1..27: note = Small subunit processome component 20 homolog (925-933)
  source 1..27: mol_type = other RNA
ttcagcaacccccgcgccctgtacctc

SEQ ID NO: 44174 - RNA, 42 nt, synthetic construct
  misc_feature 1..42: note = Paired box protein Pax-1 (59-72)
  source 1..42: mol_type = other RNA
ttcagcccctccggcagcctgctctccggggccagcgccgag

SEQ ID NO: 44175 - RNA, 21 nt, synthetic construct
  misc_feature 1..21: note = ADP-ribosylation factor 4 (9-15)
  source 1..21: mol_type = other RNA
ttcagccgcctgttcggcaag

SEQ ID NO: 44176 - RNA, 30 nt, synthetic construct
  misc_feature 1..30: note = Synemin (764-773)
  source 1..30: mol_type = other RNA
ttcagcgtgcccttcaaggtcgaggaggtg

SEQ ID NO: 44177 - RNA, 30 nt, synthetic construct
  misc_feature 1..30: note = Elongation factor 1-gamma (335-344)
  source 1..30: mol_type = other RNA
ttcagctgggagggcgccttccagcacgtg

SEQ ID NO: 44178 - RNA, 27 nt, synthetic construct
  misc_feature 1..27: note = Eukaryotic translation initiation factor 3 subunit H (135-143)
  source 1..27: mol_type = other RNA
ttcagctaccagcacgccatcgaggag

SEQ ID NO: 44179 - RNA, 24 nt, synthetic construct
  misc_feature 1..24: note = Bcl-2-associated transcription factor 1 (338-345)
  source 1..24: mol_type = other RNA
ttcaccgacgaggagagccgcgtg

SEQ ID NO: 44180 - RNA, 27 nt, synthetic construct
  misc_feature 1..27: note = Nuclear pore complex protein Nup160 (151-159)
  source 1..27: mol_type = other RNA
ttcaccgacatcggcaaggtggacttc

SEQ ID NO: 44181 - RNA, 24 nt, synthetic construct
  misc_feature 1..24: note = Homeobox protein TGIF1 (222-229)
  source 1..24: mol_type = other RNA
ttcaccgacaccagcctgatgtac

SEQ ID NO: 44182 - RNA, 27 nt, synthetic construct
  misc_feature 1..27: note = Transmembrane 9 superfamily member 4 (168-176)
  source 1..27: mol_type = other RNA
ttcaccgacgtgaacaagatctacctg

SEQ ID NO: 44183 - RNA, 27 nt, synthetic construct
  misc_feature 1..27: note = Fibronectin isoform 7 (286-294)
  source 1..27: mol_type = other RNA
ttcaccgacgtgcgcgccgccgtctac

SEQ ID NO: 44184 - RNA, 27 nt, synthetic construct
  misc_feature 1..27: note = Integrator complex subunit 1 (745-753)
  source 1..27: mol_type = other RNA
ttcaccgagcagcccgagacctactac

SEQ ID NO: 44185 - RNA, 27 nt, synthetic construct
  misc_feature 1..27: note = CUB and sushi domain-containing protein 1 (3053-3061)
  source 1..27: mol_type = other RNA
ttcaccttcaacaagaccgtgagctac

SEQ ID NO: 44186 - RNA, 21 nt, synthetic construct
  misc_feature 1..21: note = Up-regulated during skeletal muscle growth protein 5 (12-18)
  source 1..21: mol_type = other RNA
ttcaccggcatcaagaagtac

SEQ ID NO: 44187 - RNA, 21 nt, synthetic construct
  misc_feature 1..21: note = Bestrophin-1 (575-581)
  source 1..21: mol_type = other RNA
ttcaccggcatcctggggaag

SEQ ID NO: 44188 - RNA, 27 nt, synthetic construct
  misc_feature 1..27: note = Ribosomal protein S6 kinase alpha-3 (519-527)
  source 1..27: mol_type = other RNA
ttcaccatcaccaagacggtggagtac

SEQ ID NO: 44189 - RNA, 27 nt, synthetic construct
  misc_feature 1..27: note = Nuclear factor erythroid 2-related factor 1 (300-308)
  source 1..27: mol_type = other RNA
ttcaccaacgacaagatcatcaacctg

SEQ ID NO: 44190 - RNA, 27 nt, synthetic construct
  misc_feature 1..27: note = Serine-threonine kinase receptor-associated protein (108-116)
  source 1..27: mol_type = other RNA
ttcacccaggacagcaactacctgctc

SEQ ID NO: 44191 - RNA, 39 nt, synthetic construct
  misc_feature 1..39: note = FXYD domain-containing ion transport regulator 3 isoform 3 (28-40)
  source 1..39: mol_type = other RNA
ttcacccagagccccctgcacggcgccgccgcggcctac

SEQ ID NO: 44192 - RNA, 30 nt, synthetic construct
  misc_feature 1..30: note = FRAS1-related extracellular matrix protein 1 (471-480)
  source 1..30: mol_type = other RNA
ttcaccgtggccgacctgcaggccggcgtc

SEQ ID NO: 44193 - RNA, 27 nt, synthetic construct
  misc_feature 1..27: note = CUB and sushi domain-containing protein 1 (2875-2883)
  source 1..27: mol_type = other RNA
ttcacctacggcgccgtggtccactac

SEQ ID NO: 44194 - RNA, 27 nt, synthetic construct
  misc_feature 1..27: note = Fibronectin (364-372)
  source 1..27: mol_type = other RNA
ttcacctacaacggccgcaccttctac

SEQ ID NO: 44195 - RNA, 27 nt, synthetic construct
  misc_feature 1..27: note = Leucine-rich repeat protein 1 (73-81)
  source 1..27: mol_type = other RNA
ttcgtggacgagggcaaggccaccgtc

SEQ ID NO: 44196 - RNA, 21 nt, synthetic construct
  misc_feature 1..21: note = Protein FAM127B (50-56)
  source 1..21: mol_type = other RNA
ttcgtggacgagaacaccttc

SEQ ID NO: 44197 - RNA, 27 nt, synthetic construct
  misc_feature 1..27: note = Calsyntenin-1 (820-828)
  source 1..27: mol_type = other RNA
ttcgtggacctgagcggccacaacctc

SEQ ID NO: 44198 - RNA, 27 nt, synthetic construct
  misc_feature 1..27: note = Ras-specific guanine nucleotide-releasing factor RalGPS2 (272-280)
  source 1..27: mol_type = other RNA
ttcgtggaggacgacaactacaagctg

SEQ ID NO: 44199 - RNA, 27 nt, synthetic construct
  misc_feature 1..27: note = Smith-Magenis syndrome chromosomal region candidate gene 8 protein (117-125)
  source 1..27: mol_type = other RNA
ttcgtggaggacagcaaggtcgtgctg

SEQ ID NO: 44200 - RNA, 27 nt, synthetic construct
  misc_feature 1..27: note = (38-46)
  source 1..27: mol_type = other RNA
ttcgtggaggagaccgtctacctgctc

SEQ ID NO: 44201 - RNA, 39 nt, synthetic construct
  misc_feature 1..39: note = Tubulin beta chain (110-122)
  source 1..39: mol_type = other RNA
ttcgtgttcggccagagcggggccggcaacaactgggcc

SEQ ID NO: 44202 - RNA, 27 nt, synthetic construct
  misc_feature 1..27: note = 2-hydroxyacylsphingosine 1-beta-galactosyltransferase (145-153)
  source 1..27: mol_type = other RNA
ttcgtgatcgcccacctgctcggcgtc

SEQ ID NO: 44203 - RNA, 27 nt, synthetic construct
  misc_feature 1..27: note = Glioma tumor suppressor candidate region gene 1 protein (784-792)
  source 1..27: mol_type = other RNA
ttcgtgatccagaaccagctgggcgtc

SEQ ID NO: 44204 - RNA, 27 nt, synthetic construct
  misc_feature 1..27: note = 40S ribosomal protein S26 (39-47)
  source 1..27: mol_type = other RNA
ttcgtgatccgcaacatcgtcgaggcc

SEQ ID NO: 44205 - RNA, 27 nt, synthetic construct
  misc_feature 1..27: note = Kelch-like protein 7 (430-438)
  source 1..27: mol_type = other RNA
ttcgtgaaggacaagatcttcgccgtc

SEQ ID NO: 44206 - RNA, 27 nt, synthetic construct
  misc_feature 1..27: note = Tectonic-1 (346-354)
  source 1..27: mol_type = other RNA
ttcgtgctgggcaccgtcagctccgtg

SEQ ID NO: 44207 - RNA, 27 nt, synthetic construct
  misc_feature 1..27: note = Zinc finger protein 618 (573-581)
  source 1..27: mol_type = other RNA
ttcgtgatgagcgagatccgcaccgtc

SEQ ID NO: 44208 - RNA, 30 nt, synthetic construct
  misc_feature 1..30: note = Integrin alpha-11 (525-534)
  source 1..30: mol_type = other RNA
ttcgtgtacaacggcaccctgaaggacagc

SEQ ID NO: 44209 - RNA, 33 nt, synthetic construct
  misc_feature 1..33: note = Protein disulfide-isomerase TMX3 (154-164)
  source 1..33: mol_type = other RNA
ttcgtgtacgtcggcggggagagccccctgaag

SEQ ID NO: 44210 - RNA, 27 nt, synthetic construct
  misc_feature 1..27: note = Palmitoyl-protein thioesterase 1 (194-202)
  source 1..27: mol_type = other RNA
ttctacgcccacatcatccccttcctg

SEQ ID NO: 44211 - RNA, 27 nt, synthetic construct
  misc_feature 1..27: note = Serine/threonine-protein kinase 36 (200-208)
  source 1..27: mol_type = other RNA
ttctacgccaccagcatcttccagctg

SEQ ID NO: 44212 - RNA, 27 nt, synthetic construct
  misc_feature 1..27: note = Tetratricopeptide repeat protein 31 (320-328)
  source 1..27: mol_type = other RNA
ttctaccacgaggccgtggtcctgttc

SEQ ID NO: 44213 - RNA, 30 nt, synthetic construct
  misc_feature 1..30: note = Ubinuclein-1 (160-169)
  source 1..30: mol_type = other RNA
ttctacatcaacagcggcaccctgcagttc

SEQ ID NO: 44214 - RNA, 21 nt, synthetic construct
  misc_feature 1..21: note = HLA class I histocompatibility antigen, B-15 alpha chain (232-238)
  source 1..21: mol_type = other RNA
ttctaccccgccgagatcacc

SEQ ID NO: 44215 - RNA, 27 nt, synthetic construct
  misc_feature 1..27: note = PX domain-containing protein kinase-like protein (233-241)
  source 1..27: mol_type = other RNA
ttctaccgcagctacttctcccagttc

SEQ ID NO: 44216 - RNA, 27 nt, synthetic construct
  misc_feature 1..27: note = HLA class II histocompatibility antigen, DO alpha chain (163-171)
  source 1..27: mol_type = other RNA
ttctacagccagcccgaccacctgttc

SEQ ID NO: 44217 - RNA, 33 nt, synthetic construct
  misc_feature 1..33: note = Hypoxia-inducible factor 1-alpha (545-555)
  source 1..33: mol_type = other RNA
ttctacgtggacagcgacatggtcaacgagttc

SEQ ID NO: 44218 - RNA, 66 nt, synthetic construct
  misc_feature 1..66: note = Neurobeachin (23-44)
  source 1..66: mol_type = other RNA
ggcgccgccgggggcgggggcgggggcagcggcgggggcgggaccggcgggtccggcatgggcgag

SEQ ID NO: 44219 - RNA, 27 nt, synthetic construct
  misc_feature 1..27: note = Myb-binding protein 1A (310-318)
  source 1..27: mol_type = other RNA
ggcgccgccctgcccctcctgaccaag

SEQ ID NO: 44220 - RNA, 27 nt, synthetic construct
  misc_feature 1..27: note = Neutral amino acid transporter A (59-67)
  source 1..27: mol_type = other RNA
ggcgccgccctgcgcgggctcagcctg

SEQ ID NO: 44221 - RNA, 48 nt, synthetic construct
  misc_feature 1..48: note = Beta-secretase 2 (73-88)
  source 1..48: mol_type = other RNA
ggcgccgccaacttcctggcgatggtggacaacctccagggggacagc

SEQ ID NO: 44222 - RNA, 39 nt, synthetic construct
  misc_feature 1..39: note = Transcription factor E2F3 (21-33)
  source 1..39: mol_type = other RNA
ggcgccgccgtggtcgcggccgccgccgccgcgagcatg

SEQ ID NO: 44223 - RNA, 27 nt, synthetic construct
  misc_feature 1..27: note = U3 small nucleolar RNA-associated protein 15 homolog (121-129)
  source 1..27: mol_type = other RNA
ggcgccgacgactacaccgtgaagctg

SEQ ID NO: 44224 - RNA, 27 nt, synthetic construct
  misc_feature 1..27: note = Pre-mRNA-processing factor 19 (241-249)
  source 1..27: mol_type = other RNA
ggcgccgacaagaacgtggtcgtgttc

SEQ ID NO: 44225 - RNA, 57 nt, synthetic construct
  misc_feature 1..57: note = Myc-associated zinc finger protein (303-321)
  source 1..57: mol_type = other RNA
ggcgccgggggcgggggcggggaggccggcgcgggcgggggcgccgccgccgtggcc

SEQ ID NO: 44226 - RNA, 36 nt, synthetic construct
  misc_feature 1..36: note = High affinity cationic amino acid transporter 1 (35-46)
  source 1..36: mol_type = other RNA
ggcgccggggtgtacgtcctggccggcgcggtggcc

SEQ ID NO: 44227 - RNA, 39 nt, synthetic construct
  misc_feature 1..39: note = Cytochrome c oxidase subunit 5B, mitochondrial (117-129)
  source 1..39: mol_type = other RNA
ggcgcccactacaagctggtgccccagcagctcgcccac

SEQ ID NO: 44228 - RNA, 45 nt, synthetic construct
  misc_feature 1..45: note = Adenosylhomocysteinase 3 (39-53)
  source 1..45: mol_type = other RNA
ggcgccatggcccccccggcggggggcggggaccccgaggccccc

SEQ ID NO: 44229 - RNA, 39 nt, synthetic construct
  misc_feature 1..39: note = Sickle tail protein homolog (296-308)
  source 1..39: mol_type = other RNA
ggcgccccccgcccggggagcaccgcccaccccccccac

SEQ ID NO: 44230 - RNA, 33 nt, synthetic construct
  misc_feature 1..33: note = Fibrocystin (1261-1271)
  source 1..33: mol_type = other RNA
ggcgcccccaccgtgccggccgcggtcgaggtg

SEQ ID NO: 44231 - RNA, 57 nt, synthetic construct
  misc_feature 1..57: note = Collagen alpha-1(XVIII) chain (992-1010)
  source 1..57: mol_type = other RNA
ggcgcccgcggggagagcggcctggccggggcgcccggcccggccgggccccccggc

SEQ ID NO: 44232 - RNA, 24 nt, synthetic construct
  misc_feature 1..24: note = Mastermind-like protein 2 (85-92)
  source 1..24: mol_type = other RNA
ggcgcccgcaaggccgggaagcac

SEQ ID NO: 44233 - RNA, 99 nt, synthetic construct
  misc_feature 1..99: note = Frizzled-8 (634-666)
  source 1..99: mol_type = other RNA
ggcgccaccgccgcggggggcgggggcgggcccggcggcgggggcgggggcgggccgggcggcgggggcgggcccggcggcgggggcgggagcctgtac

SEQ ID NO: 44234 - RNA, 60 nt, synthetic construct
  misc_feature 1..60: note = 26S protease regulatory subunit 6A (376-395)
  source 1..60: mol_type = other RNA
ggcgccaccgagctgacccacgaggactacatggaggggatcctcgaggtgcaggccaag

SEQ ID NO: 44235 - RNA, 36 nt, synthetic construct
  misc_feature 1..36: note = Vesicle transport protein SFT2C (154-165)
  source 1..36: mol_type = other RNA
ggcgccaccctgttcgccgcgctcgggctgcgcagc

SEQ ID NO: 44236 - RNA, 45 nt, synthetic construct
  misc_feature 1..45: note = Chondroitin sulfate proteoglycan 4 (2058-2072)
  source 1..45: mol_type = other RNA
ggcgccaccctgcgcctcgaccccaccgtgctggacgccggggag

SEQ ID NO: 44237 - RNA, 27 nt, synthetic construct
  misc_feature 1..27: note = Pecanex-like protein 3 (1088-1096)
  source 1..27: mol_type = other RNA
ggcgccgtggggttcttcacccactac

SEQ ID NO: 44238 - RNA, 27 nt, synthetic construct
  misc_feature 1..27: note = Pecanex-like protein 2 (267-275)
  source 1..27: mol_type = other RNA
ggcgccgtggggttcgtcacccactac

SEQ ID NO: 44239 - RNA, 27 nt, synthetic construct
  misc_feature 1..27: note = Tensin-3 (1204-1212)
  source 1..27: mol_type = other RNA
ggcgcctacgggctggccatgaaggtg

SEQ ID NO: 44240 - RNA, 69 nt, synthetic construct
  misc_feature 1..69: note = Cytochrome c oxidase subunit 6A1, mitochondrial (64-86)
  source 1..69: mol_type = other RNA
ggcgacgggaaccacaccctgttccacaacccccacgtgaacccgctccccaccggctacgaggacgag

SEQ ID NO: 44241 - RNA, 54 nt, synthetic construct
  misc_feature 1..54: note = Cadherin-2 (266-283)
  source 1..54: mol_type = other RNA
ggcgaccccaccgggcgcttcgccatccagaccgacccgaacagcaacgacggc

SEQ ID NO: 44242 - RNA, 30 nt, synthetic construct
  misc_feature 1..30: note = E3 ubiquitin-protein ligase makorin-1 (147-156)
  source 1..30: mol_type = other RNA
ggcgaggccgagagccgcaactccaacttc

SEQ ID NO: 44243 - RNA, 30 nt, synthetic construct
  misc_feature 1..30: note = Suppression of tumorigenicity 5 protein (770-779)
  source 1..30: mol_type = other RNA
ggcgaggacgggagccgccggttcggctac

SEQ ID NO: 44244 - RNA, 33 nt, synthetic construct
  misc_feature 1..33: note = Melanotransferrin (422-432)
  source 1..33: mol_type = other RNA
ggcgaggacatctacaccgccgggaagacctac

SEQ ID NO: 44245 - RNA, 30 nt, synthetic construct
  misc_feature 1..30: note = Protein capicua homolog (1390-1399)
  source 1..30: mol_type = other RNA
ggcgaggaccccgaggggaacaagggcttc

SEQ ID NO: 44246 - RNA, 63 nt, synthetic construct
  misc_feature 1..63: note = Eukaryotic translation initiation factor 5A-1 (130-150)
  source 1..63: mol_type = other RNA
ggcgaggagatcctgatcaccgtgctcagcgccatgaccgaggaggccgcggtcgccatcaag

SEQ ID NO: 44247 - RNA, 27 nt, synthetic construct
  misc_feature 1..27: note = Nucleosome-remodeling factor subunit BPTF (1023-1031)
  source 1..27: mol_type = other RNA
ggcgaggagtaccgcgtgaccgggtac

SEQ ID NO: 44248 - RNA, 48 nt, synthetic construct
  misc_feature 1..48: note = Gamma-interferon-inducible protein 16 (644-659)
  source 1..48: mol_type = other RNA
ggcgagttcacctactacgagatccaggacaacaccgggaagatggag

SEQ ID NO: 44249 - RNA, 27 nt, synthetic construct
  misc_feature 1..27: note = Cyclin-dependent kinase 6 (20-28)
  source 1..27: mol_type = other RNA
ggcgagggggcctacggcaaggtgttc

SEQ ID NO: 44250 - RNA, 24 nt, synthetic construct
  misc_feature 1..24: note = Nestin (495-502)
  source 1..24: mol_type = other RNA
ggcgagggggagggccagatctgg

SEQ ID NO: 44251 - RNA, 27 nt, synthetic construct
  misc_feature 1..27: note = Zinc finger and BTB domain-containing protein 10 (226-234)
  source 1..27: mol_type = other RNA
ggcgagggggagaccgtgcagcacttc

SEQ ID NO: 44252 - RNA, 30 nt, synthetic construct
  misc_feature 1..30: note = Matrix metalloproteinase-24 (185-194)
  source 1..30: mol_type = other RNA
ggcgaggggggcttcctggcccacgcctac

SEQ ID NO: 44253 - RNA, 27 nt, synthetic construct
  misc_feature 1..27: note = Filamin-B (1548-1556)
  source 1..27: mol_type = other RNA
ggcgaggggctgctcgccgtgcagatc

SEQ ID NO: 44254 - RNA, 30 nt, synthetic construct
  misc_feature 1..30: note = Chondroitin sulfate proteoglycan 4 (1563-1572)
  source 1..30: mol_type = other RNA
ggcgagcacaccagccccgggcacttcttc

SEQ ID NO: 44255 - RNA, 27 nt, synthetic construct
  misc_feature 1..27: note = EKC/KEOPS complex subunit TPRKB (113-121)
  source 1..27: mol_type = other RNA
ggcgagaagcagatcaaccaggagtac

SEQ ID NO: 44256 - RNA, 27 nt, synthetic construct
  misc_feature 1..27: note = Peroxisomal biogenesis factor 19 (180-188)
  source 1..27: mol_type = other RNA
ggcgagatgcccccggggctgaacttc

SEQ ID NO: 44257 - RNA, 27 nt, synthetic construct
  misc_feature 1..27: note = TRAF2 and NCK-interacting protein kinase (434-442)
  source 1..27: mol_type = other RNA
ggcgagatgcccaccagcgtggcctac

SEQ ID NO: 44258 - RNA, 30 nt, synthetic construct
  misc_feature 1..30: note = Girdin (1244-1253)
  source 1..30: mol_type = other RNA
ggcgagaacgaccgcctgaaccacacctac

SEQ ID NO: 44259 - RNA, 30 nt, synthetic construct
  misc_feature 1..30: note = Plectin (1154-1163)
  source 1..30: mol_type = other RNA
ggcgagcgcgacgtggaggtcgagcggtgg

SEQ ID NO: 44260 - RNA, 27 nt, synthetic construct
  misc_feature 1..27: note = Fragile X mental retardation syndrome-related protein 1 (266-274)
  source 1..27: mol_type = other RNA
ggcgagagcgccgacgccgtgaagaag

SEQ ID NO: 44261 - RNA, 27 nt, synthetic construct
  misc_feature 1..27: note = Nestin (482-490)
  source 1..27: mol_type = other RNA
ggcgagagcgggggctcccgcgtgttc

SEQ ID NO: 44262 - RNA, 27 nt, synthetic construct
  misc_feature 1..27: note = Protein MON2 homolog (918-926)
  source 1..27: mol_type = other RNA
ggcgagagcctgatccgcaccgccttc

SEQ ID NO: 44263 - RNA, 30 nt, synthetic construct
  misc_feature 1..30: note = Synemin (317-326)
  source 1..30: mol_type = other RNA
ggcgagagcaaccccgagatcgtgatctgg

SEQ ID NO: 44264 - RNA, 27 nt, synthetic construct
  misc_feature 1..27: note = Protein piccolo (255-263)
  source 1..27: mol_type = other RNA
ggcgagagcgtgaagccctccctgccg

SEQ ID NO: 44265 - RNA, 30 nt, synthetic construct
  misc_feature 1..30: note = Vacuolar protein sorting-associated protein 18 homolog (657-666)
  source 1..30: mol_type = other RNA
ggcgagaccgagcaggccatccacaactac

SEQ ID NO: 44266 - RNA, 30 nt, synthetic construct
  misc_feature 1..30: note = Spectrin beta chain, non-erythrocytic 2 (1112-1121)
  source 1..30: mol_type = other RNA
ggcgaggtggagcgcgcccagagcgagtac

SEQ ID NO: 44267 - RNA, 27 nt, synthetic construct
  misc_feature 1..27: note = ATP-citrate synthase (392-400)
  source 1..27: mol_type = other RNA
ggcgaggtggggaagaccaccggcatc

SEQ ID NO: 44268 - RNA, 27 nt, synthetic construct
  misc_feature 1..27: note = Hermansky-Pudlak syndrome 5 protein (252-260)
  source 1..27: mol_type = other RNA
ggcgaggtgatcagcacccaccagttc

SEQ ID NO: 44269 - RNA, 36 nt, synthetic construct
  misc_feature 1..36: note = Serum albumin (423-434)
  source 1..36: mol_type = other RNA
ggcgagtacaagttccagaacgccctgctcgtgcgc

SEQ ID NO: 44270 - RNA, 33 nt, synthetic construct
  misc_feature 1..33: note = HLA class I histocompatibility antigen, B-15 alpha chain (231-241)
  source 1..33: mol_type = other RNA
ggcttctaccccgccgagatcaccctgacctgg

SEQ ID NO: 44271 - RNA, 60 nt, synthetic construct
  misc_feature 1..60: note = Transcription factor Maf (211-230)
  source 1..60: mol_type = other RNA
ggcggggccggcggggccggcgggggcggccccgcgagcgccgggggcgggggcgggggc

SEQ ID NO: 44272 - RNA, 21 nt, synthetic construct
  misc_feature 1..21: note = Inhibitor of nuclear factor kappa-B kinase subunit beta (42-48)
  source 1..21: mol_type = other RNA
ggcggggacctgcgcaagtac

SEQ ID NO: 44273 - RNA, 57 nt, synthetic construct
  misc_feature 1..57: note = Cadherin-2 (265-283)
  source 1..57: mol_type = other RNA
ggcggggaccccaccggccgcttcgccatccagaccgacccgaacagcaacgacggg

SEQ ID NO: 44274 - RNA, 93 nt, synthetic construct
  misc_feature 1..93: note = Keratin, type I cytoskeletal 9 (593-623)
  source 1..93: mol_type = other RNA
ggcggggagagcggcgggtcctacggcgggggcgaggaggccagcggctccgggggcgggtacggcgggggcagcggcaagtccagccactcc

SEQ ID NO: 44275 - RNA, 69 nt, synthetic construct
  misc_feature 1..69: note = Prostaglandin reductase 1 (141-163)
  source 1..69: mol_type = other RNA
ggcggggagaccgtgatggtcaacgccgccgcgggcgccgtggggagcgtggtcggccagatcgccaag

SEQ ID NO: 44276 - RNA, 51 nt, synthetic construct
  misc_feature 1..51: note = Hemicentin-1 (3579-3595)
  source 1..51: mol_type = other RNA
ggcgggggcgaggtgctgcgcatcagcaccgcccaggtcgaggacaccggg

SEQ ID NO: 44277 - RNA, 57 nt, synthetic construct
  misc_feature 1..57: note = Regulator of nonsense transcripts 1 (55-73)
  source 1..57: mol_type = other RNA
ggcgggggcggggccggcgggcccggcggcgccggggcgggcgccgccgccgggcag

SEQ ID NO: 44278 - RNA, 69 nt, synthetic construct
  misc_feature 1..69: note = Electrogenic sodium bicarbonate cotransporter 4 (440-462)
  source 1..69: mol_type = other RNA
ggcgggggcgggggcgcccccgggggcggcaacgggggcgggggcgggggcggcagcgggggcggggcc

SEQ ID NO: 44279 - RNA, 51 nt, synthetic construct
  misc_feature 1..51: note = AT-rich interactive domain-containing protein 1B (322-338)
  source 1..51: mol_type = other RNA
ggcgggggcgggggcgggggcgccggcgccgggggcgcgggggccggcgcc

SEQ ID NO: 44280 - RNA, 45 nt, synthetic construct
  misc_feature 1..45: note = Neuronal PAS domain-containing protein 3 (734-748)
  source 1..45: mol_type = other RNA
ggcgggggcgggggcgggggcgccggcgggggcgggcccagcgcc

SEQ ID NO: 44281 - RNA, 57 nt, synthetic construct
  misc_feature 1..57: note = Homeobox even-skipped homolog protein 2 (416-434)
  source 1..57: mol_type = other RNA
ggcgggggcgggggcgggggcggcgggggcgggggcggggccggcgccggcgggggc

SEQ ID NO: 44282 - RNA, 66 nt, synthetic construct
  misc_feature 1..66: note = WD repeat-containing protein 26 (8-29)
  source 1..66: mol_type = other RNA
ggcgggggcgggggcgggggcggcgggggcgggggcgggggcggcgggggcgggcagggccagacc

SEQ ID NO: 44283 - RNA, 54 nt, synthetic construct
  misc_feature 1..54: note = Keratin, type I cytoskeletal 9 (15-32)
  source 1..54: mol_type = other RNA
ggcgggggcgggggcgggggcctgggcagcgggggctccatccgcagctcctac

SEQ ID NO: 44284 - RNA, 45 nt, synthetic construct
  misc_feature 1..45: note = Zinc finger SWIM domain-containing protein 6 (150-164)
  source 1..45: mol_type = other RNA
ggcgggggcgggggcagctccagctcccccgccgccaccagcgcg

SEQ ID NO: 44285 - RNA, 39 nt, synthetic construct
  misc_feature 1..39: note = 40S ribosomal protein S16 (74-86)
  source 1..39: mol_type = other RNA
ggcgggggccacgtggcccagatctacggggagagccag

SEQ ID NO: 44286 - RNA, 30 nt, synthetic construct
  misc_feature 1..30: note = Serine/threonine-protein kinase TAO2 (869-878)
  source 1..30: mol_type = other RNA
ggcgggggcctgcaggccgccctcctggcg

SEQ ID NO: 44287 - RNA, 54 nt, synthetic construct
  misc_feature 1..54: note = Keratin, type II cytoskeletal 1 (595-612)
  source 1..54: mol_type = other RNA
ggcgggggcagctccgggggccgcgggagcggcggcgggtccagcggcgggtcc

SEQ ID NO: 44288 - RNA, 39 nt, synthetic construct
  misc_feature 1..39: note = Keratin, type II cytoskeletal 3 (144-156)
  source 1..39: mol_type = other RNA
ggcgggggctacgggggcgggatgggcggcgggctgggc

SEQ ID NO: 44289 - RNA, 60 nt, synthetic construct
  misc_feature 1..60: note = Protein scribble homolog (1289-1308)
  source 1..60: mol_type = other RNA
ggcgggaagatggccgagagcccctgctccccgagcggccagcagcccccctcccccccg

SEQ ID NO: 44290 - RNA, 39 nt, synthetic construct
  misc_feature 1..39: note = Protein TASOR (44-56)
  source 1..39: mol_type = other RNA
ggcgggctgaacatcgccgagcccagcggcggggccggc

SEQ ID NO: 44291 - RNA, 78 nt, synthetic construct
  misc_feature 1..78: note = Keratin, type I cytoskeletal 18 (56-81)
  source 1..78: mol_type = other RNA
ggcgggatgggcagcgggggcctggccaccgggatcgccggcggcctcgcggggatgggcgggatccagaacgagaag

SEQ ID NO: 44292 - RNA, 54 nt, synthetic construct
  misc_feature 1..54: note = Inositol 1,4,5-trisphosphate receptor type 1 (1761-1778)
  source 1..54: mol_type = other RNA
ggcgggcccggcaagccggggggcgggggcggcgggagcggctccagctccatg

SEQ ID NO: 44293 - RNA, 30 nt, synthetic construct
  misc_feature 1..30: note = KN motif and ankyrin repeat domain-containing protein 2 (473-482)
  source 1..30: mol_type = other RNA
ggcgggcccccggccggcgtgcgcagcatc

SEQ ID NO: 44294 - RNA, 39 nt, synthetic construct
  misc_feature 1..39: note = AT-rich interactive domain-containing protein 1A (277-289)
  source 1..39: mol_type = other RNA
ggcgggcccagcgccgccggcgggggcaccccgcagccc

SEQ ID NO: 44295 - RNA, 48 nt, synthetic construct
  misc_feature 1..48: note = Protein transport protein Sec24C (725-740)
  source 1..48: mol_type = other RNA
ggcgggagcgtgtacaagtacgcctccttccaggtcgagaacgaccag

SEQ ID NO: 44296 - RNA, 75 nt, synthetic construct
  misc_feature 1..75: note = HLA class I histocompatibility antigen, A-1 alpha chain (316-340)
  source 1..75: mol_type = other RNA
ggcgggagctacacccaggccgcctccagcgactccgcgcagggcagcgacgtgtccctgaccgcctgcaaggtc

SEQ ID NO: 44297 - RNA, 27 nt, synthetic construct
  misc_feature 1..27: note = Abl interactor 2 (222-230)
  source 1..27: mol_type = other RNA
ggccaccccgtgcagttctacagcatg

SEQ ID NO: 44298 - RNA, 84 nt, synthetic construct
  misc_feature 1..84: note = Guanine nucleotide-binding protein subunit beta-2-like 1 (61-88)
  source 1..84: mol_type = other RNA
ggccacagccacttcgtgtccgacgtcgtgatcagctccgacgggcagttcgccctgagcggctcctgggacgggaccctccgc

SEQ ID NO: 44299 - RNA, 27 nt, synthetic construct
  misc_feature 1..27: note = Spatacsin (1079-1087)
  source 1..27: mol_type = other RNA
ggccacaccctgctcgccctggccacc

SEQ ID NO: 44300 - RNA, 27 nt, synthetic construct
  misc_feature 1..27: note = Protein Jumonji (51-59)
  source 1..27: mol_type = other RNA
ggcatcgccgggagcctgaagaccgtg

SEQ ID NO: 44301 - RNA, 27 nt, synthetic construct
  misc_feature 1..27: note = Lipoprotein lipase (23-31)
  source 1..27: mol_type = other RNA
ggcatcgccgggagcctgaccaacaag

SEQ ID NO: 44302 - RNA, 39 nt, synthetic construct
  misc_feature 1..39: note = Protein transport protein Sec16A (84-96)
  source 1..39: mol_type = other RNA
ggcatcgccaaccccctgctcgccgtgccggcgcccagc

SEQ ID NO: 44303 - RNA, 30 nt, synthetic construct
  misc_feature 1..30: note = Interferon alpha-inducible protein 27, mitochondrial (57-66)
  source 1..30: mol_type = other RNA
ggcatcgccagctccagcatcgccgcgaag

SEQ ID NO: 44304 - RNA, 27 nt, synthetic construct
  misc_feature 1..27: note = HLA class II histocompatibility antigen, DQ beta 1 chain (233-241)
  source 1..27: mol_type = other RNA
ggcatcgggggcttcgtgctggggctc

SEQ ID NO: 44305 - RNA, 27 nt, synthetic construct
  misc_feature 1..27: note = Probable methyltransferase TARBP1 (1190-1198)
  source 1..27: mol_type = other RNA
ggcatcatcgaccgcatcttccaggcc

SEQ ID NO: 44306 - RNA, 114 nt, synthetic construct
  misc_feature 1..114: note = Glyceraldehyde-3-phosphate dehydrogenase (272-309)
  source 1..114: mol_type = other RNA
ggcatcctggggtacaccgagcaccaggtggtcagctccgacttcaacagcgacacccactccagcacgttcgacgccggcgccgggatcgcgctcaacgaccacttcgtgaag

SEQ ID NO: 44307 - RNA, 27 nt, synthetic construct
  misc_feature 1..27: note = Zinc finger ZZ-type and EF-hand domain-containing protein 1 (2890-2898)
  source 1..27: mol_type = other RNA
ggcatcctgctccccctgcaccgcgcc

SEQ ID NO: 44308 - RNA, 24 nt, synthetic construct
  misc_feature 1..24: note = HEAT repeat-containing protein 5A (975-982)
  source 1..24: mol_type = other RNA
ggcatccgcaacgggagctgctcc

SEQ ID NO: 44309 - RNA, 27 nt, synthetic construct
  misc_feature 1..27: note = NHP2-like protein 1 (49-57)
  source 1..27: mol_type = other RNA
ggcatcagcgagttcatcgtgatggcc

SEQ ID NO: 44310 - RNA, 27 nt, synthetic construct
  misc_feature 1..27: note = Putative segment polarity protein dishevelled homolog DVL1P1 (277-285)
  source 1..27: mol_type = other RNA
ggcatctacatcgggagcatcatgaag

SEQ ID NO: 44311 - RNA, 27 nt, synthetic construct
  misc_feature 1..27: note = Afadin (1018-1026)
  source 1..27: mol_type = other RNA
ggcatctacgtgaagagcgtcgtgaag

SEQ ID NO: 44312 - RNA, 21 nt, synthetic construct
  misc_feature 1..21: note = Mesoderm induction early response protein 3 (303-309)
  source 1..21: mol_type = other RNA
ggcaaggacttccacctgatc

SEQ ID NO: 44313 - RNA, 36 nt, synthetic construct
  misc_feature 1..36: note = Leucine-rich repeat serine/threonine-protein kinase 2 (780-791)
  source 1..36: mol_type = other RNA
ggcaagggggacagccagatcatctccctgctcctg

SEQ ID NO: 44314 - RNA, 33 nt, synthetic construct
  misc_feature 1..33: note = E1A-binding protein p400 (281-291)
  source 1..33: mol_type = other RNA
ggcaagaccatcacccccgcccacttccagctg

SEQ ID NO: 44315 - RNA, 30 nt, synthetic construct
  misc_feature 1..30: note = Probable E3 ubiquitin-protein ligase HERC1 (2585-2594)
  source 1..30: mol_type = other RNA
ggcctggccgacctcgagcgcgcccaggcg

SEQ ID NO: 44316 - RNA, 27 nt, synthetic construct
  misc_feature 1..27: note = Minor histocompatibility antigen H13 (189-197)
  source 1..27: mol_type = other RNA
ggcctggccttcagcctcaacggggtg

SEQ ID NO: 44317 - RNA, 27 nt, synthetic construct
  misc_feature 1..27: note = Serpin H1 (48-56)
  source 1..27: mol_type = other RNA
ggcctggccttcagcctctaccaggcc

SEQ ID NO: 44318 - RNA, 27 nt, synthetic construct
  misc_feature 1..27: note = Ral GTPase-activating protein subunit beta (790-798)
  source 1..27: mol_type = other RNA
ggcctggccaaggtgaaggtcatggtg

SEQ ID NO: 44319 - RNA, 33 nt, synthetic construct
  misc_feature 1..33: note = Equilibrative nucleoside transporter 1 (483-493)
  source 1..33: mol_type = other RNA
ggcctggccctcggggccgtgttcagcttcctg

SEQ ID NO: 44320 - RNA, 33 nt, synthetic construct
  misc_feature 1..33: note = Prominin-2 (17-27)
  source 1..33: mol_type = other RNA
ggcctggccctcagccagctggccgcgggggcc

SEQ ID NO: 44321 - RNA, 27 nt, synthetic construct
  misc_feature 1..27: note = Vacuolar protein sorting-associated protein 41 homolog (323-331)
  source 1..27: mol_type = other RNA
ggcctggcctacatcaaccacctcgtg

SEQ ID NO: 44322 - RNA, 27 nt, synthetic construct
  misc_feature 1..27: note = Zinc finger and BTB domain-containing protein 39 (63-71)
  source 1..27: mol_type = other RNA
ggcctggacgccgcccgcacctacgtg

SEQ ID NO: 44323 - RNA, 27 nt, synthetic construct
  misc_feature 1..27: note = C-type lectin domain family 11 member A (117-125)
  source 1..27: mol_type = other RNA
ggcctggacgccgggctccaccagctg

SEQ ID NO: 44324 - RNA, 30 nt, synthetic construct
  misc_feature 1..30: note = Protein PRR14L (130-139)
  source 1..30: mol_type = other RNA
ggcctggacgagctcgacggggtgaaggcc

SEQ ID NO: 44325 - RNA, 27 nt, synthetic construct
  misc_feature 1..27: note = Protein furry homolog-like (621-629)
  source 1..27: mol_type = other RNA
ggcctggacaacgagacccacttcctc

SEQ ID NO: 44326 - RNA, 27 nt, synthetic construct
  misc_feature 1..27: note = Heat shock 70 kDa protein 12A (522-530)
  source 1..27: mol_type = other RNA
ggcctggaccccgccgtgatcaaggtc

SEQ ID NO: 44327 - RNA, 27 nt, synthetic construct
  misc_feature 1..27: note = DNA polymerase alpha catalytic subunit (1240-1248)
  source 1..27: mol_type = other RNA
ggcctggaccccacccagttccgcgtg

SEQ ID NO: 44328 - RNA, 27 nt, synthetic construct
  misc_feature 1..27: note = Sodium- and chloride-dependent creatine transporter 1 (299-307)
  source 1..27: mol_type = other RNA
ggcctggacagccagttcgtgggggtc

SEQ ID NO: 44329 - RNA, 27 nt, synthetic construct
  misc_feature 1..27: note = ADP-ribosylation factor 5 (169-177)
  source 1..27: mol_type = other RNA
ggcctggactggctcagccacgagctg

SEQ ID NO: 44330 - RNA, 30 nt, synthetic construct
  misc_feature 1..30: note = Trinucleotide repeat-containing gene 18 protein (737-746)
  source 1..30: mol_type = other RNA
ggcctggaggagagcgggctcggcctgctg

SEQ ID NO: 44331 - RNA, 30 nt, synthetic construct
  misc_feature 1..30: note = Rho GTPase-activating protein 23 (525-534)
  source 1..30: mol_type = other RNA
ggcctggagagcaccgggatctaccgcgtg

SEQ ID NO: 44332 - RNA, 30 nt, synthetic construct
  misc_feature 1..30: note = Ciliary neurotrophic factor (150-159)
  source 1..30: mol_type = other RNA
ggcctgttcgagaagaagctctgggggctg

SEQ ID NO: 44333 - RNA, 30 nt, synthetic construct
  misc_feature 1..30: note = Oxysterol-binding protein-related protein 1 (365-374)
  source 1..30: mol_type = other RNA
ggcctgttcgggaaggagctccacaaggtg

SEQ ID NO: 44334 - RNA, 27 nt, synthetic construct
  misc_feature 1..27: note = Receptor-interacting serine/threonine-protein kinase 4 (180-188)
  source 1..27: mol_type = other RNA
ggcctgttcgggaccatcgcctacctc

SEQ ID NO: 44335 - RNA, 30 nt, synthetic construct
  misc_feature 1..30: note = Presenilin-2 (364-373)
  source 1..30: mol_type = other RNA
ggcctgggggacttcatcttctacagcgtg

SEQ ID NO: 44336 - RNA, 27 nt, synthetic construct
  misc_feature 1..27: note = Nurim (175-183)
  source 1..27: mol_type = other RNA
ggcctgggggagcccctcgccctgaag

SEQ ID NO: 44337 - RNA, 24 nt, synthetic construct
  misc_feature 1..24: note = Unconventional myosin-Va (1848-1855)
  source 1..24: mol_type = other RNA
ggcctggggttcatcagccgcgtg

SEQ ID NO: 44338 - RNA, 24 nt, synthetic construct
  misc_feature 1..24: note = Probable ATP-dependent RNA helicase YTHDC2 (1364-1371)
  source 1..24: mol_type = other RNA
ggcctggggggcgtgttcaaggtc

SEQ ID NO: 44339 - RNA, 24 nt, synthetic construct
  misc_feature 1..24: note = Sodium-dependent multivitamin transporter (227-234)
  source 1..24: mol_type = other RNA
ggcctggggcgcgtgtgggccgtc

SEQ ID NO: 44340 - RNA, 33 nt, synthetic construct
  misc_feature 1..33: note = Vacuole membrane protein 1 (126-136)
  source 1..33: mol_type = other RNA
ggcctggggaccggcctccacaccttcctgctg

SEQ ID NO: 44341 - RNA, 36 nt, synthetic construct
  misc_feature 1..36: note = Elastin (104-115)
  source 1..36: mol_type = other RNA
ggcctgggggtgggcgccggggtccccggcttcggg

SEQ ID NO: 44342 - RNA, 27 nt, synthetic construct
  misc_feature 1..27: note = Bifunctional heparan sulfate N-deacetylase/N-sulfotransferase 3 (265-273)
  source 1..27: mol_type = other RNA
ggcctgcacgacgggatccagcgcgtg

SEQ ID NO: 44343 - RNA, 27 nt, synthetic construct
  misc_feature 1..27: note = Vacuolar protein sorting-associated protein 13D (747-755)
  source 1..27: mol_type = other RNA
ggcctgcacgggctcgtggtccaggcc

SEQ ID NO: 44344 - RNA, 27 nt, synthetic construct
  misc_feature 1..27: note = Ribosome-binding protein 1 (183-191)
  source 1..27: mol_type = other RNA
ggcctgcacgggcagctccaggaggcc

SEQ ID NO: 44345 - RNA, 33 nt, synthetic construct
  misc_feature 1..33: note = Dystonin (1614-1624)
  source 1..33: mol_type = other RNA
ggcctgatcgacgagcagatcctctgccagctg

SEQ ID NO: 44346 - RNA, 33 nt, synthetic construct
  misc_feature 1..33: note = 28 kDa heat- and acid-stable phosphoprotein (79-89)
  source 1..33: mol_type = other RNA
ggcctgatcgacatcgagaaccccaaccgcgtg

SEQ ID NO: 44347 - RNA, 33 nt, synthetic construct
  misc_feature 1..33: note = Dystonin (1576-1586)
  source 1..33: mol_type = other RNA
ggcctgatcgactacgacaccgggatccgcctc

SEQ ID NO: 44348 - RNA, 42 nt, synthetic construct
  misc_feature 1..42: note = ATP-citrate synthase (832-845)
  source 1..42: mol_type = other RNA
ggcctgatccgcaagcccgccagcttcatgacctccatctgc

SEQ ID NO: 44349 - RNA, 21 nt, synthetic construct
  misc_feature 1..21: note = Rho-related BTB domain-containing protein 3 (23-29)
  source 1..21: mol_type = other RNA
ggcctgatccgcacctacctc

SEQ ID NO: 44350 - RNA, 27 nt, synthetic construct
  misc_feature 1..27: note = Nucleolar protein 6 (323-331)
  source 1..27: mol_type = other RNA
ggcctgaaggacggggtggccctcctg

SEQ ID NO: 44351 - RNA, 30 nt, synthetic construct
  misc_feature 1..30: note = Matrin-3 (27-36)
  source 1..30: mol_type = other RNA
ggcctgctcgccgccgcgacccagagcctg

SEQ ID NO: 44352 - RNA, 27 nt, synthetic construct
  misc_feature 1..27: note = Transmembrane protein 223 (112-120)
  source 1..27: mol_type = other RNA
ggcctgctcttcagcctgcgctccgtg

SEQ ID NO: 44353 - RNA, 27 nt, synthetic construct
  misc_feature 1..27: note = Receptor-type tyrosine-protein phosphatase T (1083-1091)
  source 1..27: mol_type = other RNA
ggcctgctcgggttcgtgcgccaggtc

SEQ ID NO: 44354 - RNA, 27 nt, synthetic construct
  misc_feature 1..27: note = LanC-like protein 1 (313-321)
  source 1..27: mol_type = other RNA
ggcctgctcaagaaggggtacggcctg

SEQ ID NO: 44355 - RNA, 30 nt, synthetic construct
  misc_feature 1..30: note = Protein ELYS (20-29)
  source 1..30: mol_type = other RNA
ggcctgctccccttcccggaggtgaccctg

SEQ ID NO: 44356 - RNA, 27 nt, synthetic construct
  misc_feature 1..27: note = Protein farnesyltransferase subunit beta (256-264)
  source 1..27: mol_type = other RNA
ggcctgctccccctgctgcaccgcgcc

SEQ ID NO: 44357 - RNA, 27 nt, synthetic construct
  misc_feature 1..27: note = Angiomotin (797-805)
  source 1..27: mol_type = other RNA
ggcctgctcagccactccagcaccctg

SEQ ID NO: 44358 - RNA, 27 nt, synthetic construct
  misc_feature 1..27: note = Helicase SKI2W (380-388)
  source 1..27: mol_type = other RNA
ggcctgctcaccggggacgtgcagctg

SEQ ID NO: 44359 - RNA, 27 nt, synthetic construct
  misc_feature 1..27: note = Glycerol-3-phosphate acyltransferase 3 (87-95)
  source 1..27: mol_type = other RNA
ggcctgatggggatcatccagcgcgcc

SEQ ID NO: 44360 - RNA, 27 nt, synthetic construct
  misc_feature 1..27: note = Glycerol-3-phosphate acyltransferase 4 (150-158)
  source 1..27: mol_type = other RNA
ggcctgatgggggtgatccagcgcgcc

SEQ ID NO: 44361 - RNA, 30 nt, synthetic construct
  misc_feature 1..30: note = Contactin-associated protein-like 3B (447-456)
  source 1..30: mol_type = other RNA
ggcctgaacgacgggcagtggcacagcgtg

SEQ ID NO: 44362 - RNA, 27 nt, synthetic construct
  misc_feature 1..27: note = Basement membrane-specific heparan sulfate proteoglycan core protein (280-288)
  source 1..27: mol_type = other RNA
ggcctgaacctccacaccctgctgtac

SEQ ID NO: 44363 - RNA, 30 nt, synthetic construct
  misc_feature 1..30: note = Sorting nexin-18 (488-497)
  source 1..30: mol_type = other RNA
ggcctgaaccaggccatcgccttcaccggg

SEQ ID NO: 44364 - RNA, 30 nt, synthetic construct
  misc_feature 1..30: note = Cell surfaceoprotein MUC18 (416-425)
  source 1..30: mol_type = other RNA
ggcctgaaccgcacccagctcgtgaacgtc

SEQ ID NO: 44365 - RNA, 33 nt, synthetic construct
  misc_feature 1..33: note = DnaJ homolog subfamily B member 11 (305-315)
  source 1..33: mol_type = other RNA
ggcctgcccaacttcgacaacaacaacatcaag

SEQ ID NO: 44366 - RNA, 39 nt, synthetic construct
  misc_feature 1..39: note = Epidermal growth factor receptor substrate 15 (256-268)
  source 1..39: mol_type = other RNA
ggcctgcccagcaccctcctggcccacatctggtccctg

SEQ ID NO: 44367 - RNA, 27 nt, synthetic construct
  misc_feature 1..27: note = Uridine phosphorylase 1 (55-63)
  source 1..27: mol_type = other RNA
ggcctgcaggccgccgtggtctgcgtg

SEQ ID NO: 44368 - RNA, 36 nt, synthetic construct
  misc_feature 1..36: note = Nestin (434-445)
  source 1..36: mol_type = other RNA
ggcctgcaggaccccgaggggcagagccagcaggtg

SEQ ID NO: 44369 - RNA, 45 nt, synthetic construct
  misc_feature 1..45: note = Ryanodine receptor 1 (135-149)
  source 1..45: mol_type = other RNA
ggcctgcaggaggacgccaccggggaggcctgctggtggaccatg

SEQ ID NO: 44370 - RNA, 27 nt, synthetic construct
  misc_feature 1..27: note = Catenin beta-1 (278-286)
  source 1..27: mol_type = other RNA
ggcctgcagaagatggtggccctcctg

SEQ ID NO: 44371 - RNA, 27 nt, synthetic construct
  misc_feature 1..27: note = Serine hydroxymethyltransferase, mitochondrial (399-407)
  source 1..27: mol_type = other RNA
ggcctgcgcctcggggcccccgccctg

SEQ ID NO: 44372 - RNA, 51 nt, synthetic construct
  misc_feature 1..51: note = AP-5 complex subunit beta-1 (121-137)
  source 1..51: mol_type = other RNA
ggcctgcgccagcgggccgccctcgacgggggcccccgcgcgctggccacc

SEQ ID NO: 44373 - RNA, 30 nt, synthetic construct
  misc_feature 1..30: note = Actin-like protein 6B (313-322)
  source 1..30: mol_type = other RNA
ggcctgagcgggaacaccatgctcggcgtg

SEQ ID NO: 44374 - RNA, 27 nt, synthetic construct
  misc_feature 1..27: note = Melanoma antigen preferentially expressed in tumors (432-440)
  source 1..27: mol_type = other RNA
ggcctgagcaacctcacccacgtgctg

SEQ ID NO: 44375 - RNA, 27 nt, synthetic construct
  misc_feature 1..27: note = G-protein coupled receptor 143 (150-158)
  source 1..27: mol_type = other RNA
ggcctgagcaccatcctcctgtaccac

SEQ ID NO: 44376 - RNA, 27 nt, synthetic construct
  misc_feature 1..27: note = Purine nucleoside phosphorylase (37-45)
  source 1..27: mol_type = other RNA
ggcctgaccgacaagctcacccaggcc

SEQ ID NO: 44377 - RNA, 30 nt, synthetic construct
  misc_feature 1..30: note = Beta-glucuronidase (23-32)
  source 1..30: mol_type = other RNA
ggcctggtgaactaccagatcagcgtcaag

SEQ ID NO: 44378 - RNA, 114 nt, synthetic construct
  misc_feature 1..114: note = Testis anion transporter 1 (103-140)
  source 1..114: mol_type = other RNA
ggcctggtgcaggtcccccaggggctcaccctgagcctgctcgcccgccagctgatcccgcccctgaacatcgcctacgcggccttctgctccagcgtgatctacgtgatcttc

SEQ ID NO: 44379 - RNA, 27 nt, synthetic construct
  misc_feature 1..27: note = Laminin subunit alpha-4 (1544-1552)
  source 1..27: mol_type = other RNA
ggcctgtggcacgacgtgatcttcatc

SEQ ID NO: 44380 - RNA, 30 nt, synthetic construct
  misc_feature 1..30: note = Disco-interacting protein 2 homolog C (547-556)
  source 1..30: mol_type = other RNA
ggcctgtggcacgggatcctcaccagcgtg

SEQ ID NO: 44381 - RNA, 30 nt, synthetic construct
  misc_feature 1..30: note = Disco-interacting protein 2 homolog B (156-165)
  source 1..30: mol_type = other RNA
ggcctgtggcacgggatgttcgccaacgtg

SEQ ID NO: 44382 - RNA, 27 nt, synthetic construct
  misc_feature 1..27: note = Adhesion G protein-coupled receptor A3 (1170-1178)
  source 1..27: mol_type = other RNA
ggcctgtggaagcacgagaccaccgtg

SEQ ID NO: 44383 - RNA, 27 nt, synthetic construct
  misc_feature 1..27: note = Zinc transporter ZIP14 (20-28)
  source 1..27: mol_type = other RNA
ggcctgtggcgcaccacccccgaggcc

SEQ ID NO: 44384 - RNA, 30 nt, synthetic construct
  misc_feature 1..30: note = RNA pseudouridylate synthase domain-containing protein 1 (32-41)
  source 1..30: mol_type = other RNA
ggcctgtacgccggggaccccgtgagcaag

SEQ ID NO: 44385 - RNA, 27 nt, synthetic construct
  misc_feature 1..27: note = Lysosomal-trafficking regulator (2306-2314)
  source 1..27: mol_type = other RNA
ggcctgtacgagctcctgagcggggtg

SEQ ID NO: 44386 - RNA, 27 nt, synthetic construct
  misc_feature 1..27: note = Zinc finger BED domain-containing protein 1 (137-145)
  source 1..27: mol_type = other RNA
ggcctgtaccccgccagcatcgtggac

SEQ ID NO: 44387 - RNA, 27 nt, synthetic construct
  misc_feature 1..27: note = ATP-dependent RNA helicase DHX36 (824-832)
  source 1..27: mol_type = other RNA
ggcctgtaccccaaggtggccaagatc

SEQ ID NO: 44388 - RNA, 27 nt, synthetic construct
  misc_feature 1..27: note = E3 ubiquitin-protein ligase HERC2 (1628-1636)
  source 1..27: mol_type = other RNA
ggcctgtacccccagagcccgctcctg

SEQ ID NO: 44389 - RNA, 27 nt, synthetic construct
  misc_feature 1..27: note = Unconventional myosin-XVIIIa (758-766)
  source 1..27: mol_type = other RNA
ggcctgtacagcgagctcttcaccctg

SEQ ID NO: 44390 - RNA, 27 nt, synthetic construct
  misc_feature 1..27: note = Gamma-tubulin complex component 2 (879-887)
  source 1..27: mol_type = other RNA
ggcatggccagcgtgatctcccgcctg

SEQ ID NO: 44391 - RNA, 27 nt, synthetic construct
  misc_feature 1..27: note = Intraflagellar transport protein 27 homolog (41-49)
  source 1..27: mol_type = other RNA
ggcatggacctggtggtcaagaccgtg

SEQ ID NO: 44392 - RNA, 30 nt, synthetic construct
  misc_feature 1..30: note = Lysophosphatidic acid phosphatase type 6 (118-127)
  source 1..30: mol_type = other RNA
ggcatgttcgccgggcagctgaccaaggtg

SEQ ID NO: 44393 - RNA, 36 nt, synthetic construct
  misc_feature 1..36: note = AP-3 complex subunit beta-1 (317-328)
  source 1..36: mol_type = other RNA
ggcatgttcgagccctacctgaagagcttctacgtg

SEQ ID NO: 44394 - RNA, 30 nt, synthetic construct
  misc_feature 1..30: note = ATP-dependent RNA helicase DHX29 (113-122)
  source 1..30: mol_type = other RNA
ggcatgatcagcgggcgcctgaccgccaag

SEQ ID NO: 44395 - RNA, 27 nt, synthetic construct
  misc_feature 1..27: note = Glucocorticoid modulatory element-binding protein 2 (289-297)
  source 1..27: mol_type = other RNA
ggcatgctggacctcgtgaagaaggtc

SEQ ID NO: 44396 - RNA, 27 nt, synthetic construct
  misc_feature 1..27: note = E3 ubiquitin-protein ligase HUWE1 (407-415)
  source 1..27: mol_type = other RNA
ggcatgatggaggccctgctcaaggtg

SEQ ID NO: 44397 - RNA, 27 nt, synthetic construct
  misc_feature 1..27: note = Complement receptor type 1 (563-571)
  source 1..27: mol_type = other RNA
ggcatggtgcacgtcatcaccgacatc

SEQ ID NO: 44398 - RNA, 33 nt, synthetic construct
  misc_feature 1..33: note = Chromodomain-helicase-DNA-binding protein 4 (1035-1045)
  source 1..33: mol_type = other RNA
ggcatgtacgacgggagcgccctgatccgcgcc

SEQ ID NO: 44399 - RNA, 30 nt, synthetic construct
  misc_feature 1..30: note = Peroxisomal acyl-coenzyme A oxidase 3 (111-120)
  source 1..30: mol_type = other RNA
ggcatgtacgacagctccctggccgccaag

SEQ ID NO: 44400 - RNA, 78 nt, synthetic construct
  misc_feature 1..78: note = ATP synthase-coupling factor 6, mitochondrial (83-108)
  source 1..78: mol_type = other RNA
ggcaacgccgacatgaacaccttccccaccttcaagttcgaggacccgaagttcgaggtgatcgagaagccccaggcc

SEQ ID NO: 44401 - RNA, 21 nt, synthetic construct
  misc_feature 1..21: note = Sorbitol dehydrogenase (58-64)
  source 1..21: mol_type = other RNA
ggcaacttcatcgtgaagaag

SEQ ID NO: 44402 - RNA, 63 nt, synthetic construct
  misc_feature 1..63: note = Fibrillin-2 (463-483)
  source 1..63: mol_type = other RNA
ggcaacgggttcagccccggcgtggggggcgccggggtcggcgccggcgggcagggcccgatc

SEQ ID NO: 44403 - RNA, 63 nt, synthetic construct
  misc_feature 1..63: note = Cytochrome c oxidase subunit 6A1, mitochondrial (66-86)
  source 1..63: mol_type = other RNA
ggcaaccacaccctgttccacaacccccacgtgaacccgctccccaccgggtacgaggacgag

SEQ ID NO: 44404 - RNA, 27 nt, synthetic construct
  misc_feature 1..27: note = Tyrosine-protein phosphatase non-receptor type substrate 1 (5-13)
  source 1..27: mol_type = other RNA
ggccccgccccggggcgcctgggcccc

SEQ ID NO: 44405 - RNA, 66 nt, synthetic construct
  misc_feature 1..66: note = Heat shock cognate 71 kDa protein (4-25)
  source 1..66: mol_type = other RNA
ggccccgccgtggggatcgacctgggcaccacctacagctgcgtcggggtgttccagcacggcaag

SEQ ID NO: 44406 - RNA, 33 nt, synthetic construct
  misc_feature 1..33: note = Kinesin-like protein KIF13A (1193-1203)
  source 1..33: mol_type = other RNA
ggcccccacgccagcggggtgaactccatcctg

SEQ ID NO: 44407 - RNA, 51 nt, synthetic construct
  misc_feature 1..51: note = Myosin-IIIb (1132-1148)
  source 1..51: mol_type = other RNA
ggcccccacagcccggtggccgccgggacccgcggctccgcggaggtccag

SEQ ID NO: 44408 - RNA, 30 nt, synthetic construct
  misc_feature 1..30: note = Obscurin (6240-6249)
  source 1..30: mol_type = other RNA
ggccccaaggccccggggcccagcaccggc

SEQ ID NO: 44409 - RNA, 36 nt, synthetic construct
  misc_feature 1..36: note = Collagen alpha-2(XI) chain (739-750)
  source 1..36: mol_type = other RNA
ggccccaagggggccaagggcgccaccgggccgggc

SEQ ID NO: 44410 - RNA, 39 nt, synthetic construct
  misc_feature 1..39: note = Collagen alpha-1(III) chain (660-672)
  source 1..39: mol_type = other RNA
ggccccaagggggacgccggcgccccgggggcgcccggc

SEQ ID NO: 44411 - RNA, 27 nt, synthetic construct
  misc_feature 1..27: note = Synaptic vesicle membrane protein VAT-1 homolog (289-297)
  source 1..27: mol_type = other RNA
ggccccaagcgcaacctgatggccctc

SEQ ID NO: 44412 - RNA, 48 nt, synthetic construct
  misc_feature 1..48: note = Fibronectin isoform 6 (1673-1688)
  source 1..48: mol_type = other RNA
ggccccatgaaggagatcaacctggccccggacagctccagcgtggtc

SEQ ID NO: 44413 - RNA, 51 nt, synthetic construct
  misc_feature 1..51: note = Fibronectin isoform 6 (1673-1689)
  source 1..51: mol_type = other RNA
ggccccatgaaggagatcaacctggccccggacagctccagcgtggtcgtg

SEQ ID NO: 44414 - RNA, 36 nt, synthetic construct
  misc_feature 1..36: note = Histone acetyltransferase p300 (672-683)
  source 1..36: mol_type = other RNA
ggccccaacatggggcagccgcagcccggcatgacc

SEQ ID NO: 44415 - RNA, 51 nt, synthetic construct
  misc_feature 1..51: note = Collagen alpha-3(IV) chain (637-653)
  source 1..51: mol_type = other RNA
ggccccccgggggaggccggcccccgcggggagctgagcgtgtccaccccc

SEQ ID NO: 44416 - RNA, 36 nt, synthetic construct
  misc_feature 1..36: note = Collagen alpha-1(III) chain (43-54)
  source 1..36: mol_type = other RNA
ggccccccggggcccgccggcaacaccggggccccc

SEQ ID NO: 44417 - RNA, 30 nt, synthetic construct
  misc_feature 1..30: note = ETS translocation variant 5 (359-368)
  source 1..30: mol_type = other RNA
ggccccccgtaccagcgccgggggagcctg

SEQ ID NO: 44418 - RNA, 45 nt, synthetic construct
  misc_feature 1..45: note = REST corepressor 2 (504-518)
  source 1..45: mol_type = other RNA
ggcccccagccgccccccaccctgatcgggacccccctcgagccg

SEQ ID NO: 44419 - RNA, 27 nt, synthetic construct
  misc_feature 1..27: note = Cathepsin D (303-311)
  source 1..27: mol_type = other RNA
ggccccgtggacgaggtccgcgagctg

SEQ ID NO: 44420 - RNA, 48 nt, synthetic construct
  misc_feature 1..48: note = Collagen alpha-1(V) chain (1225-1240)
  source 1..48: mol_type = other RNA
ggccccgtggggctgcagggcctcccggggccccccggcgagaagggg

SEQ ID NO: 44421 - RNA, 21 nt, synthetic construct
  misc_feature 1..21: note = Barrier-to-autointegration factor (47-53)
  source 1..21: mol_type = other RNA
ggccagttcctggtgctcaag

SEQ ID NO: 44422 - RNA, 51 nt, synthetic construct
  misc_feature 1..51: note = Filamin-A (1240-1256)
  source 1..51: mol_type = other RNA
ggccagggggtgttccgcgaggccaccaccgagttcagcgtcgacgcccgg

SEQ ID NO: 44423 - RNA, 30 nt, synthetic construct
  misc_feature 1..30: note = UHRF1-binding protein 1-like (784-793)
  source 1..30: mol_type = other RNA
ggccagaagcccagctccagcgacaccttc

SEQ ID NO: 44424 - RNA, 30 nt, synthetic construct
  misc_feature 1..30: note = Pleckstrin homology-like domain family B member 1 (354-363)
  source 1..30: mol_type = other RNA
ggccagctgcccgtggtcgccatcagcctc

SEQ ID NO: 44425 - RNA, 27 nt, synthetic construct
  misc_feature 1..27: note = Transcription elongation factor SPT5 (995-1003)
  source 1..27: mol_type = other RNA
ggccagaccggggtgatccgcagcgtc

SEQ ID NO: 44426 - RNA, 27 nt, synthetic construct
  misc_feature 1..27: note = Protein prune homolog 2 (1236-1244)
  source 1..27: mol_type = other RNA
ggccaggtggagatcgtcaccaaggtg

SEQ ID NO: 44427 - RNA, 27 nt, synthetic construct
  misc_feature 1..27: note = E3 SUMO-protein ligase RanBP2 (112-120)
  source 1..27: mol_type = other RNA
ggccgcgccaagtactggctggagcgg

SEQ ID NO: 44428 - RNA, 27 nt, synthetic construct
  misc_feature 1..27: note = Hemicentin-1 (3137-3145)
  source 1..27: mol_type = other RNA
ggccgcgacgacaagaacttccacctg

SEQ ID NO: 44429 - RNA, 114 nt, synthetic construct
  misc_feature 1..114: note = DnaJ homolog subfamily B member 11 (23-60)
  source 1..114: mol_type = other RNA
ggccgcgacttctacaagatcctgggggtgccccggagcgcctccatcaaggacatcaagaaggcctaccgcaagctcgcgctgcagctgcacccggaccggaaccccgacgac

SEQ ID NO: 44430 - RNA, 27 nt, synthetic construct
  misc_feature 1..27: note = Integrin alpha-X (519-527)
  source 1..27: mol_type = other RNA
ggccgcttcggggccgccctgaccgtg

SEQ ID NO: 44431 - RNA, 27 nt, synthetic construct
  misc_feature 1..27: note = Phosphorylase b kinase regulatory subunit alpha, skeletal muscle isoform (1123-1131)
  source 1..27: mol_type = other RNA
ggccgcttcgggaccatgacctacctg

SEQ ID NO: 44432 - RNA, 27 nt, synthetic construct
  misc_feature 1..27: note = Glycerol-3-phosphate acyltransferase 4 (81-89)
  source 1..27: mol_type = other RNA
ggccgcttcaaggagttcatgagcaag

SEQ ID NO: 44433 - RNA, 27 nt, synthetic construct
  misc_feature 1..27: note = Tyrosine-protein phosphatase non-receptor type 21 (1024-1032)
  source 1..27: mol_type = other RNA
ggccgcttcaagatcaccacccggttc

SEQ ID NO: 44434 - RNA, 27 nt, synthetic construct
  misc_feature 1..27: note = Hemicentin-1 (2532-2540)
  source 1..27: mol_type = other RNA
ggccgcttcctgcagatcaccaacgtg

SEQ ID NO: 44435 - RNA, 27 nt, synthetic construct
  misc_feature 1..27: note = 40S ribosomal protein S21 (44-52)
  source 1..27: mol_type = other RNA
ggccgcttcaacgggcagttcaagacc

SEQ ID NO: 44436 - RNA, 27 nt, synthetic construct
  misc_feature 1..27: note = Serine/threonine-protein kinase WNK1 (228-236)
  source 1..27: mol_type = other RNA
ggccgcgggagcttcaagaccgtgtac

SEQ ID NO: 44437 - RNA, 30 nt, synthetic construct
  misc_feature 1..30: note = Homeodomain-interacting protein kinase 1 (197-206)
  source 1..30: mol_type = other RNA
ggccgcgggaccttcggccaggtggccaag

SEQ ID NO: 44438 - RNA, 27 nt, synthetic construct
  misc_feature 1..27: note = Exosome component 10 (399-407)
  source 1..27: mol_type = other RNA
ggccgccacagcctggaccacctcctg

SEQ ID NO: 44439 - RNA, 27 nt, synthetic construct
  misc_feature 1..27: note = Eukaryotic translation initiation factor 3 subunit L (261-269)
  source 1..27: mol_type = other RNA
ggccgccacagcctgtacaagatgctc

SEQ ID NO: 44440 - RNA, 30 nt, synthetic construct
  misc_feature 1..30: note = Hemicentin-1 (305-314)
  source 1..30: mol_type = other RNA
ggccgccacagcgtgcggatcaccgggctg

SEQ ID NO: 44441 - RNA, 27 nt, synthetic construct
  misc_feature 1..27: note = Sulfiredoxin-1 (29-37)
  source 1..27: mol_type = other RNA
ggccgcatcgccgccgtgcacaacgtc

SEQ ID NO: 44442 - RNA, 27 nt, synthetic construct
  misc_feature 1..27: note = FH2 domain-containing protein 1 (1122-1130)
  source 1..27: mol_type = other RNA
ggccgcatcctgaaccccctccggaag

SEQ ID NO: 44443 - RNA, 78 nt, synthetic construct
  misc_feature 1..78: note = 40S ribosomal protein S19 (120-145)
  source 1..78: mol_type = other RNA
ggccgcaagctgaccccccaggggcagcgggacctcgaccgcatcgccggccaggtggccgcggccaacaagaagcac

SEQ ID NO: 44444 - RNA, 27 nt, synthetic construct
  misc_feature 1..27: note = Plectin (581-589)
  source 1..27: mol_type = other RNA
ggccgcctggacctccagtacgccaag

SEQ ID NO: 44445 - RNA, 27 nt, synthetic construct
  misc_feature 1..27: note = Chondroitin sulfate proteoglycan 4 (2121-2129)
  source 1..27: mol_type = other RNA
ggccgcctggggctcgaggtgggccgg

SEQ ID NO: 44446 - RNA, 27 nt, synthetic construct
  misc_feature 1..27: note = CDK-activating kinase assembly factor MAT1 (225-233)
  source 1..27: mol_type = other RNA
ggccgcctggggtacctcaaccacgtg

SEQ ID NO: 44447 - RNA, 27 nt, synthetic construct
  misc_feature 1..27: note = Coiled-coil domain-containing protein 85B (43-51)
  source 1..27: mol_type = other RNA
ggccgcctgatgcaggaggtgaaccgg

SEQ ID NO: 44448 - RNA, 30 nt, synthetic construct
  misc_feature 1..30: note = Up-regulator of cell proliferation (625-634)
  source 1..30: mol_type = other RNA
ggccgcctgcccgccgggcagcggcgcttc

SEQ ID NO: 44449 - RNA, 27 nt, synthetic construct
  misc_feature 1..27: note = Pleckstrin homology-like domain family B member 1 (536-544)
  source 1..27: mol_type = other RNA
ggccgcctgagccccgcctactccctc

SEQ ID NO: 44450 - RNA, 27 nt, synthetic construct
  misc_feature 1..27: note = Muscleblind-like protein 3 (34-42)
  source 1..27: mol_type = other RNA
ggccgcaacaacctgatccagcagaag

SEQ ID NO: 44451 - RNA, 30 nt, synthetic construct
  misc_feature 1..30: note = L-dopachrome tautomerase (313-322)
  source 1..30: mol_type = other RNA
ggccgcaacagcatgaagctgcccaccctc

SEQ ID NO: 44452 - RNA, 33 nt, synthetic construct
  misc_feature 1..33: note = Probable ATP-dependent RNA helicase DDX17 (123-133)
  source 1..33: mol_type = other RNA
ggccgcagctcccagagctccagccagcagttc

SEQ ID NO: 44453 - RNA, 27 nt, synthetic construct
  misc_feature 1..27: note = DNA-dependent protein kinase catalytic subunit (2721-2729)
  source 1..27: mol_type = other RNA
ggccgcaccgacctgctccggctgcgc

SEQ ID NO: 44454 - RNA, 27 nt, synthetic construct
  misc_feature 1..27: note = Alpha-1,3-mannosyl-glycoprotein 4-beta-N-acetylglucosaminyltransferase B (36-44)
  source 1..27: mol_type = other RNA
ggccgcaccggggtgagcgtcgtgatg

SEQ ID NO: 44455 - RNA, 27 nt, synthetic construct
  misc_feature 1..27: note = Ubiquitin-associated protein 2-like (711-719)
  source 1..27: mol_type = other RNA
ggccgcaccagcacctccacgctgctc

SEQ ID NO: 44456 - RNA, 27 nt, synthetic construct
  misc_feature 1..27: note = Multidrug resistance protein 1 (515-523)
  source 1..27: mol_type = other RNA
ggccgcaccaccatcgtgatcgcccac

SEQ ID NO: 44457 - RNA, 30 nt, synthetic construct
  misc_feature 1..30: note = Transmembraneoprotein NMB (76-85)
  source 1..30: mol_type = other RNA
ggccgcgtgcaggccgtcctgaccagcgac

SEQ ID NO: 44458 - RNA, 27 nt, synthetic construct
  misc_feature 1..27: note = DNA-directed RNA polymerase III subunit RPC4 (335-343)
  source 1..27: mol_type = other RNA
ggccgcgtgcagctgctcctggggaag

SEQ ID NO: 44459 - RNA, 27 nt, synthetic construct
  misc_feature 1..27: note = Retinoic acid-induced protein 1 (110-118)
  source 1..27: mol_type = other RNA
ggccgctacgccggggaggagagcctg

SEQ ID NO: 44460 - RNA, 39 nt, synthetic construct
  misc_feature 1..39: note = CD44 antigen (40-52)
  source 1..39: mol_type = other RNA
ggccgctacagcatctcccggaccgaggccgccgacctg

SEQ ID NO: 44461 - RNA, 54 nt, synthetic construct
  misc_feature 1..54: note = Cytochrome c oxidase subunit 7C, mitochondrial (46-63)
  source 1..54: mol_type = other RNA
ggcagcgccttcgccacccccttcctggtggtccgccaccagctcctgaagacc

SEQ ID NO: 44462 - RNA, 39 nt, synthetic construct
  misc_feature 1..39: note = Vimentin (41-53)
  source 1..39: mol_type = other RNA
ggcagcgccctgcgcccctccaccagccggtccctctac

SEQ ID NO: 44463 - RNA, 27 nt, synthetic construct
  misc_feature 1..27: note = WD repeat-containing protein 81 (728-736)
  source 1..27: mol_type = other RNA
ggcagcgacaacggggtgatccgcctg

SEQ ID NO: 44464 - RNA, 30 nt, synthetic construct
  misc_feature 1..30: note = Protein-methionine sulfoxide oxidase MICAL1 (594-603)
  source 1..30: mol_type = other RNA
ggcagcgaccccctggggctcatcgcctac

SEQ ID NO: 44465 - RNA, 36 nt, synthetic construct
  misc_feature 1..36: note = A-kinase anchor protein 8 (159-170)
  source 1..36: mol_type = other RNA
ggcagcgaccgcaacgggtccttcggcgggcagtac

SEQ ID NO: 44466 - RNA, 30 nt, synthetic construct
  misc_feature 1..30: note = Plasminogen activator inhibitor 1 RNA-binding protein (114-123)
  source 1..30: mol_type = other RNA
ggcagcgaccgctccagcttctcccactac

SEQ ID NO: 44467 - RNA, 36 nt, synthetic construct
  misc_feature 1..36: note = Retinoic acid-induced protein 1 (520-531)
  source 1..36: mol_type = other RNA
ggcagcgaggaccccctggagcgctccttcctctac

SEQ ID NO: 44468 - RNA, 27 nt, synthetic construct
  misc_feature 1..27: note = Ribosomal protein S6 kinase alpha-6 (82-90)
  source 1..27: mol_type = other RNA
ggcagcttcgggaaggtgttcctggtc

SEQ ID NO: 44469 - RNA, 33 nt, synthetic construct
  misc_feature 1..33: note = V-type proton ATPase subunit H (179-189)
  source 1..33: mol_type = other RNA
ggcagcggggtggccgtcgagaccggcaccgtg

SEQ ID NO: 44470 - RNA, 42 nt, synthetic construct
  misc_feature 1..42: note = HLA class I histocompatibility antigen, A-1 alpha chain (25-38)
  source 1..42: mol_type = other RNA
ggcagccactccatgcgctacttcttcaccagcgtgtcccgg

SEQ ID NO: 44471 - RNA, 45 nt, synthetic construct
  misc_feature 1..45: note = HLA class I histocompatibility antigen, A-1 alpha chain (25-39)
  source 1..45: mol_type = other RNA
ggcagccactccatgcgctacttcttcaccagcgtgtcccggccc

SEQ ID NO: 44472 - RNA, 51 nt, synthetic construct
  misc_feature 1..51: note = HLA class I histocompatibility antigen, A-1 alpha chain (25-41)
  source 1..51: mol_type = other RNA
ggcagccactccatgcgctacttcttcaccagcgtgtcccggcccgggcgc

SEQ ID NO: 44473 - RNA, 54 nt, synthetic construct
  misc_feature 1..54: note = HLA class I histocompatibility antigen, A-1 alpha chain (25-42)
  source 1..54: mol_type = other RNA
ggcagccactccatgcgctacttcttcaccagcgtgtcccggcccgggcgcggc

SEQ ID NO: 44474 - RNA, 78 nt, synthetic construct
  misc_feature 1..78: note = HLA class I histocompatibility antigen, A-1 alpha chain (25-50)
  source 1..78: mol_type = other RNA
ggcagccactccatgcgctacttcttcaccagcgtgtcccggcccgggcgcggcgagccgcggttcatcgccgtcggg

SEQ ID NO: 44475 - RNA, 87 nt, synthetic construct
  misc_feature 1..87: note = HLA class I histocompatibility antigen, A-1 alpha chain (25-53)
  source 1..87: mol_type = other RNA
ggcagccactccatgcgctacttcttcaccagcgtgtcccggcccgggcgcggcgagccgcggttcatcgccgtcgggtacgtggac

SEQ ID NO: 44476 - RNA, 111 nt, synthetic construct
  misc_feature 1..111: note = HLA class I histocompatibility antigen, A-1 alpha chain (25-61)
  source 1..111: mol_type = other RNA
ggcagccactccatgcgctacttcttcaccagcgtgtcccggcccgggcgcggcgagccgcggttcatcgccgtcgggtacgtggacgacacccagttcgtgcgcttcgac

SEQ ID NO: 44477 - RNA, 117 nt, synthetic construct
  misc_feature 1..117: note = HLA class I histocompatibility antigen, A-1 alpha chain (25-63)
  source 1..117: mol_type = other RNA
ggcagccactccatgcgctacttcttcaccagcgtgtcccggcccgggcgcggcgagccgcggttcatcgccgtcgggtacgtggacgacacccagttcgtgcgcttcgacagcgac

SEQ ID NO: 44478 - RNA, 48 nt, synthetic construct
  misc_feature 1..48: note = HLA class I histocompatibility antigen, A-23 alpha chain (25-40)
  source 1..48: mol_type = other RNA
ggcagccactccatgcgctacttcagcacctccgtgagccggcccggg

SEQ ID NO: 44479 - RNA, 54 nt, synthetic construct
  misc_feature 1..54: note = HLA class I histocompatibility antigen, A-23 alpha chain (25-42)
  source 1..54: mol_type = other RNA
ggcagccactccatgcgctacttcagcacctccgtgagccggcccgggcgcggc

SEQ ID NO: 44480 - RNA, 57 nt, synthetic construct
  misc_feature 1..57: note = HLA class I histocompatibility antigen, A-23 alpha chain (25-43)
  source 1..57: mol_type = other RNA
ggcagccactccatgcgctacttcagcacctccgtgagccggcccgggcgcggcgag

SEQ ID NO: 44481 - RNA, 63 nt, synthetic construct
  misc_feature 1..63: note = HLA class I histocompatibility antigen, A-23 alpha chain (25-45)
  source 1..63: mol_type = other RNA
ggcagccactccatgcgctacttcagcacctccgtgagccggcccgggcgcggcgagccgcgg

SEQ ID NO: 44482 - RNA, 78 nt, synthetic construct
  misc_feature 1..78: note = HLA class I histocompatibility antigen, A-23 alpha chain (25-50)
  source 1..78: mol_type = other RNA
ggcagccactccatgcgctacttcagcacctccgtgagccggcccgggcgcggcgagccgcggttcatcgccgtcggg

SEQ ID NO: 44483 - RNA, 87 nt, synthetic construct
  misc_feature 1..87: note = HLA class I histocompatibility antigen, A-23 alpha chain (25-53)
  source 1..87: mol_type = other RNA
ggcagccactccatgcgctacttcagcacctccgtgagccggcccgggcgcggcgagccgcggttcatcgccgtcgggtacgtggac

SEQ ID NO: 44484 - RNA, 90 nt, synthetic construct
  misc_feature 1..90: note = HLA class I histocompatibility antigen, A-23 alpha chain (25-54)
  source 1..90: mol_type = other RNA
ggcagccactccatgcgctacttcagcacctccgtgagccggcccgggcgcggcgagccgcggttcatcgccgtcgggtacgtggacgac

SEQ ID NO: 44485 - RNA, 108 nt, synthetic construct
  misc_feature 1..108: note = HLA class I histocompatibility antigen, A-23 alpha chain (25-60)
  source 1..108: mol_type = other RNA
ggcagccactccatgcgctacttcagcacctccgtgagccggcccgggcgcggcgagccgcggttcatcgccgtcgggtacgtggacgacacccagttcgtgcgcttc

SEQ ID NO: 44486 - RNA, 111 nt, synthetic construct
  misc_feature 1..111: note = HLA class I histocompatibility antigen, A-23 alpha chain (25-61)
  source 1..111: mol_type = other RNA
ggcagccactccatgcgctacttcagcacctccgtgagccggcccgggcgcggcgagccgcggttcatcgccgtcgggtacgtggacgacacccagttcgtgcgcttcgac

SEQ ID NO: 44487 - RNA, 117 nt, synthetic construct
  misc_feature 1..117: note = HLA class I histocompatibility antigen, A-23 alpha chain (25-63)
  source 1..117: mol_type = other RNA
ggcagccactccatgcgctacttcagcacctccgtgagccggcccgggcgcggcgagccgcggttcatcgccgtcgggtacgtggacgacacccagttcgtgcgcttcgactccgac

SEQ ID NO: 44488 - RNA, 111 nt, synthetic construct
  misc_feature 1..111: note = HLA class I histocompatibility antigen, B-39 alpha chain (25-61)
  source 1..111: mol_type = other RNA
ggcagccactccatgcgctacttctacaccagcgtgtcccggcccgggcgcggcgagccgcggttcatcagcgtcgggtacgtggacgacacccagttcgtgcgcttcgac

SEQ ID NO: 44489 - RNA, 117 nt, synthetic construct
  misc_feature 1..117: note = HLA class I histocompatibility antigen, B-39 alpha chain (25-63)
  source 1..117: mol_type = other RNA
ggcagccactccatgcgctacttctacaccagcgtgtcccggcccgggcgcggcgagccgcggttcatcagcgtcgggtacgtggacgacacccagttcgtgcgcttcgactccgac

SEQ ID NO: 44490 - RNA, 24 nt, synthetic construct
  misc_feature 1..24: note = Inosine-5'-monophosphate dehydrogenase 1 (142-149)
  source 1..24: mol_type = other RNA
ggcagcaagctggtggggatcgtc

SEQ ID NO: 44491 - RNA, 42 nt, synthetic construct
  misc_feature 1..42: note = Leucine-tRNA ligase, cytoplasmic (286-299)
  source 1..42: mol_type = other RNA
ggcagcatgcccgagctgaagaagtacatgaagaaggtgatg

SEQ ID NO: 44492 - RNA, 48 nt, synthetic construct
  misc_feature 1..48: note = Beta-secretase 2 (112-127)
  source 1..48: mol_type = other RNA
ggcagctccaacttcgccgtggccgggaccccccacagctacatcgac

SEQ ID NO: 44493 - RNA, 51 nt, synthetic construct
  misc_feature 1..51: note = Beta-secretase 2 (112-128)
  source 1..51: mol_type = other RNA
ggcagctccaacttcgccgtggccgggaccccccacagctacatcgacacc

SEQ ID NO: 44494 - RNA, 54 nt, synthetic construct
  misc_feature 1..54: note = Keratin, type II cytoskeletal 71 (27-44)
  source 1..54: mol_type = other RNA
ggcagctccagctccttccgcgccgggagcaagggcctgtccgggggcttcggg

SEQ ID NO: 44495 - RNA, 27 nt, synthetic construct
  misc_feature 1..27: note = PH-interacting protein (339-347)
  source 1..27: mol_type = other RNA
ggcagcaccgaccacatcatccgcgtg

SEQ ID NO: 44496 - RNA, 27 nt, synthetic construct
  misc_feature 1..27: note = WD repeat-containing protein 48 (104-112)
  source 1..27: mol_type = other RNA
ggcagcaccgagaaggtgctgcgcgtc

SEQ ID NO: 44497 - RNA, 27 nt, synthetic construct
  misc_feature 1..27: note = Interferon-induced protein with tetratricopeptide repeats 1 (265-273)
  source 1..27: mol_type = other RNA
ggcagcgtggacaaggccctggagctc

SEQ ID NO: 44498 - RNA, 27 nt, synthetic construct
  misc_feature 1..27: note = Polyadenylate-binding protein 2 (223-231)
  source 1..27: mol_type = other RNA
ggcagcgtgaaccgcgtcaccatcctg

SEQ ID NO: 44499 - RNA, 33 nt, synthetic construct
  misc_feature 1..33: note = Immunoglobulin superfamily member 8 (138-148)
  source 1..33: mol_type = other RNA
ggcagctactccgggaaggtggagctgcgcgtc

SEQ ID NO: 44500 - RNA, 72 nt, synthetic construct
  misc_feature 1..72: note = HLA class I histocompatibility antigen, A-23 alpha chain (342-365)
  source 1..72: mol_type = other RNA
ggcagctactcccaggccgccagctccgacagcgcgcaggggtccgacgtgagcctgaccgcctgcaaggtc

SEQ ID NO: 44501 - RNA, 72 nt, synthetic construct
  misc_feature 1..72: note = HLA class I histocompatibility antigen, A-1 alpha chain (317-340)
  source 1..72: mol_type = other RNA
ggcagctacacccaggccgcctccagcgactccgcgcaggggagcgacgtgtccctgaccgcctgcaaggtc

SEQ ID NO: 44502 - RNA, 27 nt, synthetic construct
  misc_feature 1..27: note = Myelin proteolipid protein (19-27)
  source 1..27: mol_type = other RNA
ggcaccgccagcttcttcttcctgtac

SEQ ID NO: 44503 - RNA, 33 nt, synthetic construct
  misc_feature 1..33: note = Hemicentin-1 (688-698)
  source 1..33: mol_type = other RNA
ggcaccgacaagcagaacagcaccctgcgctac

SEQ ID NO: 44504 - RNA, 27 nt, synthetic construct
  misc_feature 1..27: note = Chondroitin sulfate proteoglycan 4 (1612-1620)
  source 1..27: mol_type = other RNA
ggcaccgacccccagctgctcctgtac

SEQ ID NO: 44505 - RNA, 24 nt, synthetic construct
  misc_feature 1..24: note = Cathepsin F (454-461)
  source 1..24: mol_type = other RNA
ggcaccgactggggggagaagggc

SEQ ID NO: 44506 - RNA, 30 nt, synthetic construct
  misc_feature 1..30: note = Cathepsin F (454-463)
  source 1..30: mol_type = other RNA
ggcaccgactggggggagaagggctactac

SEQ ID NO: 44507 - RNA, 33 nt, synthetic construct
  misc_feature 1..33: note = Cathepsin F (454-464)
  source 1..33: mol_type = other RNA
ggcaccgactggggggagaagggctactactac

SEQ ID NO: 44508 - RNA, 27 nt, synthetic construct
  misc_feature 1..27: note = Cytoplasmic dynein 1 heavy chain 1 (2749-2757)
  source 1..27: mol_type = other RNA
ggcaccttcaaccgcgccatgctgcgg

SEQ ID NO: 44509 - RNA, 93 nt, synthetic construct
  misc_feature 1..93: note = Nucleoporin p58/p45 (64-94)
  source 1..93: mol_type = other RNA
ggcaccgggctgttcggcagcaagcccgccaccgggttcacgctcggcgggaccaacaccggcaccccggccacgacctccgcggccaccacc

SEQ ID NO: 44510 - RNA, 27 nt, synthetic construct
  misc_feature 1..27: note = DNA damage-binding protein 1 (702-710)
  source 1..27: mol_type = other RNA
ggcaccatcgacgagatccagaagctg

SEQ ID NO: 44511 - RNA, 30 nt, synthetic construct
  misc_feature 1..30: note = 60S ribosomal protein L6 (147-156)
  source 1..30: mol_type = other RNA
ggcaccatcctgatcatcctcaccgggcgc

SEQ ID NO: 44512 - RNA, 39 nt, synthetic construct
  misc_feature 1..39: note = D-3-phosphoglycerate dehydrogenase (49-61)
  source 1..39: mol_type = other RNA
ggcaccatccaggtgatcacccaggggacgagcctgaag

SEQ ID NO: 44513 - RNA, 27 nt, synthetic construct
  misc_feature 1..27: note = Hexokinase-1 (535-543)
  source 1..27: mol_type = other RNA
ggcaccaacttccgcgtgctgctcgtc

SEQ ID NO: 44514 - RNA, 27 nt, synthetic construct
  misc_feature 1..27: note = Calponin-3 (207-215)
  source 1..27: mol_type = other RNA
ggcaccaacaaggtggccagccagaag

SEQ ID NO: 44515 - RNA, 30 nt, synthetic construct
  misc_feature 1..30: note = Tripeptidyl-peptidase 1 (306-315)
  source 1..30: mol_type = other RNA
ggcacccccaacttcccggccctgctcaag

SEQ ID NO: 44516 - RNA, 27 nt, synthetic construct
  misc_feature 1..27: note = Histone-lysine N-methyltransferase ASH1L (311-319)
  source 1..27: mol_type = other RNA
ggcaccaccgccgtgttcatcaacaag

SEQ ID NO: 44517 - RNA, 27 nt, synthetic construct
  misc_feature 1..27: note = L-dopachrome tautomerase (301-309)
  source 1..27: mol_type = other RNA
ggcacctacgaggggctgctccgccgg

SEQ ID NO: 44518 - RNA, 132 nt, synthetic construct
  misc_feature 1..132: note = Cytochrome c oxidase subunit 6C (32-75)
  source 1..132: mol_type = other RNA
ggcgtggccgccctgtacaagttccgcgtcgcggaccagcggaagaaggcctacgccgacttctaccgcaactacgacgtgatgaaggacttcgaggagatgcggaaggccgggatcttccagagcgtgaag

SEQ ID NO: 44519 - RNA, 45 nt, synthetic construct
  misc_feature 1..45: note = Hemicentin-2 (666-680)
  source 1..45: mol_type = other RNA
ggcgtggcccccgaggacgccgggaactacagctgccaggcgacc

SEQ ID NO: 44520 - RNA, 33 nt, synthetic construct
  misc_feature 1..33: note = Unconventional myosin-Ib (244-254)
  source 1..33: mol_type = other RNA
ggcgtggacgacgccgccaacttccgcaccgtc

SEQ ID NO: 44521 - RNA, 48 nt, synthetic construct
  misc_feature 1..48: note = Annexin A2 (50-65)
  source 1..48: mol_type = other RNA
ggcgtggacgaggtcaccatcgtgaacatcctgaccaaccgcagcaac

SEQ ID NO: 44522 - RNA, 54 nt, synthetic construct
  misc_feature 1..54: note = Annexin A2 (50-67)
  source 1..54: mol_type = other RNA
ggcgtggacgaggtcaccatcgtgaacatcctgaccaaccgcagcaacgcccag

SEQ ID NO: 44523 - RNA, 27 nt, synthetic construct
  misc_feature 1..27: note = Complement C3 (1424-1432)
  source 1..27: mol_type = other RNA
ggcgtggaccgctacatcagcaagtac

SEQ ID NO: 44524 - RNA, 27 nt, synthetic construct
  misc_feature 1..27: note = Biotinidase (443-451)
  source 1..27: mol_type = other RNA
ggcgtgttcgacgggctgcacaccgtc

SEQ ID NO: 44525 - RNA, 27 nt, synthetic construct
  misc_feature 1..27: note = T-cell immunomodulatory protein (25-33)
  source 1..27: mol_type = other RNA
ggcgtggggcccgtcccggcccgcgcc

SEQ ID NO: 44526 - RNA, 27 nt, synthetic construct
  misc_feature 1..27: note = CD109 antigen (187-195)
  source 1..27: mol_type = other RNA
ggcgtgatcagcaagaccttccagctg

SEQ ID NO: 44527 - RNA, 27 nt, synthetic construct
  misc_feature 1..27: note = Zinc finger CCCH domain-containing protein 14 (68-76)
  source 1..27: mol_type = other RNA
ggcgtgctggacaagctccgcagcgtc

SEQ ID NO: 44528 - RNA, 33 nt, synthetic construct
  misc_feature 1..33: note = Probable E3 ubiquitin-protein ligase HERC1 (3840-3850)
  source 1..33: mol_type = other RNA
ggcgtgctggggctcaacatggccccctgcatg

SEQ ID NO: 44529 - RNA, 57 nt, synthetic construct
  misc_feature 1..57: note = Glia-derived nexin (188-206)
  source 1..57: mol_type = other RNA
ggcgtgctgacccgcctcgtcctggtgaacgccgtgtacttcaaggggctgtggaag

SEQ ID NO: 44530 - RNA, 24 nt, synthetic construct
  misc_feature 1..24: note = Nucleolar RNA helicase 2 (421-428)
  source 1..24: mol_type = other RNA
ggcgtgctggtcgccaccaacgtg

SEQ ID NO: 44531 - RNA, 39 nt, synthetic construct
  misc_feature 1..39: note = Neuronal cell adhesion molecule (398-410)
  source 1..39: mol_type = other RNA
ggcgtgcccatcgagatcgccccggacgaccccagccgc

SEQ ID NO: 44532 - RNA, 42 nt, synthetic construct
  misc_feature 1..42: note = Neuronal cell adhesion molecule (398-411)
  source 1..42: mol_type = other RNA
ggcgtgcccatcgagatcgccccggacgaccccagccgcaag

SEQ ID NO: 44533 - RNA, 72 nt, synthetic construct
  misc_feature 1..72: note = Heat shock cognate 71 kDa protein (470-493)
  source 1..72: mol_type = other RNA
ggcgtgccccagatcgaggtcaccttcgacatcgacgccaacgggatcctgaacgtgagcgccgtggacaag

SEQ ID NO: 44534 - RNA, 102 nt, synthetic construct
  misc_feature 1..102: note = Apolipoprotein L1 (146-179)
  source 1..102: mol_type = other RNA
ggcgtgcagaaggtccacaaggggaccaccatcgccaacgtggtgagcggctccctgagcatctccagcgggatcctcacgctggtcggcatggggctggcc

SEQ ID NO: 44535 - RNA, 27 nt, synthetic construct
  misc_feature 1..27: note = Ropporin-1B (131-139)
  source 1..27: mol_type = other RNA
ggcgtgaccatcaccaagacgctgaag

SEQ ID NO: 44536 - RNA, 27 nt, synthetic construct
  misc_feature 1..27: note = Alpha-synuclein (47-55)
  source 1..27: mol_type = other RNA
ggcgtggtccacggggtggccaccgtg

SEQ ID NO: 44537 - RNA, 30 nt, synthetic construct
  misc_feature 1..30: note = Melanoma-associated antigen C2 (257-266)
  source 1..30: mol_type = other RNA
ggcgtgtacgccgggcgcgagcacttcgtc

SEQ ID NO: 44538 - RNA, 141 nt, synthetic construct
  misc_feature 1..141: note = Protein CDV3 homolog (167-213)
  source 1..141: mol_type = other RNA
ggcgtgtaccgccccccgggggcccggctgaccaccacgcgcaagaccccccagggcccccccgagatctacagcgacacccagttcccgtccctccagagcaccgccaagcacgtcgagtcccggaaccgctacctgaag

SEQ ID NO: 44539 - RNA, 27 nt, synthetic construct
  misc_feature 1..27: note = Procollagen-lysine,2-oxoglutarate 5-dioxygenase 1 (159-167)
  source 1..27: mol_type = other RNA
ggctacgcccccaacctgagcaagctc

SEQ ID NO: 44540 - RNA, 45 nt, synthetic construct
  misc_feature 1..45: note = Interferon alpha-inducible protein 6 (116-130)
  source 1..45: mol_type = other RNA
ggctacgccacccacaagtacctggacagcgaggaggacgaggag

SEQ ID NO: 44541 - RNA, 48 nt, synthetic construct
  misc_feature 1..48: note = HLA class I histocompatibility antigen, B-44 alpha chain (136-151)
  source 1..48: mol_type = other RNA
ggctacgaccaggacgcctacgacgggaaggactacatcgccctgaac

SEQ ID NO: 44542 - RNA, 27 nt, synthetic construct
  misc_feature 1..27: note = Alpha-parvin (305-313)
  source 1..27: mol_type = other RNA
ggctacttcgtgcccctgcacagcttc

SEQ ID NO: 44543 - RNA, 30 nt, synthetic construct
  misc_feature 1..30: note = Keratin, type II cytoskeletal 3 (100-109)
  source 1..30: mol_type = other RNA
ggctacgggggcgggttcggcgggggcttc

SEQ ID NO: 44544 - RNA, 48 nt, synthetic construct
  misc_feature 1..48: note = HLA class I histocompatibility antigen, A-2 alpha chain (111-126)
  source 1..48: mol_type = other RNA
ggctaccaccagtacgcctacgacgggaaggactacatcgccctgaag

SEQ ID NO: 44545 - RNA, 48 nt, synthetic construct
  misc_feature 1..48: note = Laminin subunit gamma-1 (666-681)
  source 1..48: mol_type = other RNA
ggctacctggacgacgtgaccctcgccagcgcccgccccgggccgggc

SEQ ID NO: 44546 - RNA, 33 nt, synthetic construct
  misc_feature 1..33: note = Unconventional myosin-XVIIIa (1111-1121)
  source 1..33: mol_type = other RNA
ggctaccccgaccacatggtgttcagcgagttc

SEQ ID NO: 44547 - RNA, 27 nt, synthetic construct
  misc_feature 1..27: note = Heterogeneous nuclear ribonucleoprotein U-like protein 1 (231-239)
  source 1..27: mol_type = other RNA
ggctaccccctgaccatcgaggggttc

SEQ ID NO: 44548 - RNA, 30 nt, synthetic construct
  misc_feature 1..30: note = Spectrin beta chain, non-erythrocytic 1 (189-198)
  source 1..30: mol_type = other RNA
ggctaccccaacgtgaacatccacaacttc

SEQ ID NO: 44549 - RNA, 27 nt, synthetic construct
  misc_feature 1..27: note = FERM domain-containing protein 5 (67-75)
  source 1..27: mol_type = other RNA
ggctacagctccaagttccagttcttc

SEQ ID NO: 44550 - RNA, 60 nt, synthetic construct
  misc_feature 1..60: note = L-lactate dehydrogenase B chain (247-266)
  source 1..60: mol_type = other RNA
ggctacaccaactgggccatcgggctgagcgtggccgacctcatcgagtccatgctgaag

SEQ ID NO: 44551 - RNA, 60 nt, synthetic construct
  misc_feature 1..60: note = L-lactate dehydrogenase A chain (275-294)
  source 1..60: mol_type = other RNA
ggctacaccagctgggccatcgggctgtccgtggccgacctcgcggagagcatcatgaag

SEQ ID NO: 44552 - RNA, 27 nt, synthetic construct
  misc_feature 1..27: note = Beta-hexosaminidase subunit alpha (369-377)
  source 1..27: mol_type = other RNA
ggctacgtggtctggcaggaggtgttc

SEQ ID NO: 44553 - RNA, 27 nt, synthetic construct
  misc_feature 1..27: note = Nestin (55-63)
  source 1..27: mol_type = other RNA
cacgccgacgacgagctggccgcgctc

SEQ ID NO: 44554 - RNA, 27 nt, synthetic construct
  misc_feature 1..27: note = Centrosomal protein C10orf90 (226-234)
  source 1..27: mol_type = other RNA
cacgccgacgacaaggagaccagcttc

SEQ ID NO: 44555 - RNA, 27 nt, synthetic construct
  misc_feature 1..27: note = Sentrin-specific protease 6 (139-147)
  source 1..27: mol_type = other RNA
cacgcccacgcccagatccccgtggtc

SEQ ID NO: 44556 - RNA, 27 nt, synthetic construct
  misc_feature 1..27: note = Sodium/potassium/calcium exchanger 1 (212-220)
  source 1..27: mol_type = other RNA
cacgccatcaccccccgcaccacggtg

SEQ ID NO: 44557 - RNA, 24 nt, synthetic construct
  misc_feature 1..24: note = Growth/differentiation factor 15 (241-248)
  source 1..24: mol_type = other RNA
cacgcccagatcaagaccagcctg

SEQ ID NO: 44558 - RNA, 27 nt, synthetic construct
  misc_feature 1..27: note = Beta-parvin (157-165)
  source 1..27: mol_type = other RNA
cacgacctgctccgcccccggggctgg

SEQ ID NO: 44559 - RNA, 36 nt, synthetic construct
  misc_feature 1..36: note = Kinase D-interacting substrate of 220 kDa (21-32)
  source 1..36: mol_type = other RNA
cacgagggccccccgcgcgcccccagcgggtactcc

SEQ ID NO: 44560 - RNA, 27 nt, synthetic construct
  misc_feature 1..27: note = Sex comb on midleg-like protein 2 (691-699)
  source 1..27: mol_type = other RNA
cacgagatcgacggcaaggccctgttc

SEQ ID NO: 44561 - RNA, 27 nt, synthetic construct
  misc_feature 1..27: note = Aldehyde dehydrogenase family 1 member A3 (41-49)
  source 1..27: mol_type = other RNA
cacgagagcaagtccggcaagaagttc

SEQ ID NO: 44562 - RNA, 27 nt, synthetic construct
  misc_feature 1..27: note = Echinoderm microtubule-associated protein-like 6 (1842-1850)
  source 1..27: mol_type = other RNA
cacgaggtgcccctgggcaagcaggtc

SEQ ID NO: 44563 - RNA, 18 nt, synthetic construct
  misc_feature 1..18: note = Leucine-rich repeat-containing protein 42 (71-76)
  source 1..18: mol_type = other RNA
cacttcatcttcacctac

SEQ ID NO: 44564 - RNA, 45 nt, synthetic construct
  misc_feature 1..45: note = Laminin subunit gamma-1 (101-115)
  source 1..45: mol_type = other RNA
cacggcgccgccttcctgaccgactacaacaaccaggcggacacc

SEQ ID NO: 44565 - RNA, 48 nt, synthetic construct
  misc_feature 1..48: note = Laminin subunit gamma-1 (101-116)
  source 1..48: mol_type = other RNA
cacggcgccgccttcctgaccgactacaacaaccaggcggacaccacg

SEQ ID NO: 44566 - RNA, 27 nt, synthetic construct
  misc_feature 1..27: note = Fibrocystin-L (1809-1817)
  source 1..27: mol_type = other RNA
caccacagcgtgtccgtcgtggtgggc

SEQ ID NO: 44567 - RNA, 27 nt, synthetic construct
  misc_feature 1..27: note = DIS3-like exonuclease 1 (421-429)
  source 1..27: mol_type = other RNA
cacatcgccgacgtgacccacttcgtc

SEQ ID NO: 44568 - RNA, 27 nt, synthetic construct
  misc_feature 1..27: note = Protein arginine N-methyltransferase 3 (190-198)
  source 1..27: mol_type = other RNA
cacatcttcaaggacaaggtggtcctg

SEQ ID NO: 44569 - RNA, 27 nt, synthetic construct
  misc_feature 1..27: note = Carbonic anhydrase 14 (176-184)
  source 1..27: mol_type = other RNA
cacatcctgagccacctccacgaggtg

SEQ ID NO: 44570 - RNA, 27 nt, synthetic construct
  misc_feature 1..27: note = Coatomer subunit gamma-2 (46-54)
  source 1..27: mol_type = other RNA
cacatcctgaccaagatcctctacctg

SEQ ID NO: 44571 - RNA, 27 nt, synthetic construct
  misc_feature 1..27: note = Chondroitin sulfate proteoglycan 4 (290-298)
  source 1..27: mol_type = other RNA
cacatcaacgcccaccgcctggagatc

SEQ ID NO: 44572 - RNA, 21 nt, synthetic construct
  misc_feature 1..21: note = Mediator of RNA polymerase II transcription subunit 23 (178-184)
  source 1..21: mol_type = other RNA
cacatcaaccagatcggctac

SEQ ID NO: 44573 - RNA, 72 nt, synthetic construct
  misc_feature 1..72: note = Histidine triad nucleotide-binding protein 1 (59-82)
  source 1..72: mol_type = other RNA
cacatcagccagatctccgtggccgaggacgacgacgagagcctgctcggccacctgatgatcgtcgggaag

SEQ ID NO: 44574 - RNA, 21 nt, synthetic construct
  misc_feature 1..21: note = Thymidylate synthase (256-262)
  source 1..21: mol_type = other RNA
cacatctacctgaaccacatc

SEQ ID NO: 44575 - RNA, 27 nt, synthetic construct
  misc_feature 1..27: note = Vesicle-trafficking protein SEC22c (208-216)
  source 1..27: mol_type = other RNA
cacctggccgagcacagcctccaggtg

SEQ ID NO: 44576 - RNA, 27 nt, synthetic construct
  misc_feature 1..27: note = Leucine-rich repeat-containing protein C10orf11 (68-76)
  source 1..27: mol_type = other RNA
cacctggccgaggtgacccccgccctc

SEQ ID NO: 44577 - RNA, 33 nt, synthetic construct
  misc_feature 1..33: note = Cytochrome c oxidase subunit 1 (151-161)
  source 1..33: mol_type = other RNA
cacctggccggcgtgagctccatcctcggggcc

SEQ ID NO: 44578 - RNA, 27 nt, synthetic construct
  misc_feature 1..27: note = Beta-hexosaminidase subunit beta (59-67)
  source 1..27: mol_type = other RNA
cacctggcccccgagaacttctacatc

SEQ ID NO: 44579 - RNA, 27 nt, synthetic construct
  misc_feature 1..27: note = Zinc finger protein 638 (1613-1621)
  source 1..27: mol_type = other RNA
cacctggcccaggccctcgtgaccgtc

SEQ ID NO: 44580 - RNA, 27 nt, synthetic construct
  misc_feature 1..27: note = Receptor-interacting serine/threonine-protein kinase 4 (730-738)
  source 1..27: mol_type = other RNA
cacctggccaccgtgaagctcctggtc

SEQ ID NO: 44581 - RNA, 27 nt, synthetic construct
  misc_feature 1..27: note = Unconventional myosin-Ic (1017-1025)
  source 1..27: mol_type = other RNA
cacctggccgtggtcgccccccgcctc

SEQ ID NO: 44582 - RNA, 30 nt, synthetic construct
  misc_feature 1..30: note = Zinc finger protein 879 (30-39)
  source 1..30: mol_type = other RNA
cacctggacagcgcccagcgcgccctctac

SEQ ID NO: 44583 - RNA, 27 nt, synthetic construct
  misc_feature 1..27: note = Vacuolar protein sorting-associated protein 13C (1304-1312)
  source 1..27: mol_type = other RNA
cacctggacagcatgaacgtgtccctc

SEQ ID NO: 44584 - RNA, 27 nt, synthetic construct
  misc_feature 1..27: note = Membrane-associated transporter protein (324-332)
  source 1..27: mol_type = other RNA
cacctgatcggctggaccgccttcctc

SEQ ID NO: 44585 - RNA, 24 nt, synthetic construct
  misc_feature 1..24: note = Neutral alpha-glucosidase AB (77-84)
  source 1..24: mol_type = other RNA
cacctgatccacgaggtgaccaag

SEQ ID NO: 44586 - RNA, 27 nt, synthetic construct
  misc_feature 1..27: note = Polypeptide N-acetylgalactosaminyltransferase 2 (166-174)
  source 1..27: mol_type = other RNA
cacctgatcaaggagatcatcctcgtg

SEQ ID NO: 44587 - RNA, 33 nt, synthetic construct
  misc_feature 1..33: note = Myomegalin (201-211)
  source 1..33: mol_type = other RNA
cacctgctcgaggagcccaccagcatggaggtg

SEQ ID NO: 44588 - RNA, 27 nt, synthetic construct
  misc_feature 1..27: note = Transmembrane and TPR repeat-containing protein 3 (93-101)
  source 1..27: mol_type = other RNA
cacctgctcaacatgatcttccacgcc

SEQ ID NO: 44589 - RNA, 27 nt, synthetic construct
  misc_feature 1..27: note = Gamma-tubulin complex component 5 (435-443)
  source 1..27: mol_type = other RNA
cacctgctcaacaccctgtacaaggcc

SEQ ID NO: 44590 - RNA, 27 nt, synthetic construct
  misc_feature 1..27: note = RNA-binding protein EWS (499-507)
  source 1..27: mol_type = other RNA
cacctgaacggccacatcaagcaggtg

SEQ ID NO: 44591 - RNA, 27 nt, synthetic construct
  misc_feature 1..27: note = Triple functional domain protein (852-860)
  source 1..27: mol_type = other RNA
cacctgcaggccgaggtgaagcaggtc

SEQ ID NO: 44592 - RNA, 27 nt, synthetic construct
  misc_feature 1..27: note = Eukaryotic translation initiation factor 3 subunit C-like protein (594-602)
  source 1..27: mol_type = other RNA
cacctgcaggacaacatccagcacgcc

SEQ ID NO: 44593 - RNA, 51 nt, synthetic construct
  misc_feature 1..51: note = Histone H2A.V (60-76)
  source 1..51: mol_type = other RNA
cacctgcagctcgccatccgcggcgacgaggagctggacagcctgatcaag

SEQ ID NO: 44594 - RNA, 27 nt, synthetic construct
  misc_feature 1..27: note = Inhibitor of nuclear factor kappa-B kinase subunit alpha (688-696)
  source 1..27: mol_type = other RNA
cacctgagcaccatcatccacgaggcc

SEQ ID NO: 44595 - RNA, 27 nt, synthetic construct
  misc_feature 1..27: note = Protein TANC1 (1149-1157)
  source 1..27: mol_type = other RNA
cacctgagcaccgtggagttcctcctg

SEQ ID NO: 44596 - RNA, 27 nt, synthetic construct
  misc_feature 1..27: note = Pre-mRNA-splicing factor ATP-dependent RNA helicase PRP16 (1008-1016)
  source 1..27: mol_type = other RNA
cacctgacctacctcaacgtgtacctg

SEQ ID NO: 44597 - RNA, 30 nt, synthetic construct
  misc_feature 1..30: note = ATPase family AAA domain-containing protein 1 (79-88)
  source 1..30: mol_type = other RNA
cacctggtggaccccctcaacatgcacgtc

SEQ ID NO: 44598 - RNA, 27 nt, synthetic construct
  misc_feature 1..27: note = Dedicator of cytokinesis protein 1 (422-430)
  source 1..27: mol_type = other RNA
cacctggtggaccgcaccaccgccgtc

SEQ ID NO: 44599 - RNA, 27 nt, synthetic construct
  misc_feature 1..27: note = Putative inactive carbonic anhydrase 5B-like protein (29-37)
  source 1..27: mol_type = other RNA
cacctggtgcactggaacgccgtcaag

SEQ ID NO: 44600 - RNA, 27 nt, synthetic construct
  misc_feature 1..27: note = UDP-galactose translocator (109-117)
  source 1..27: mol_type = other RNA
cacctggtgctcttcctgcacgaggcc

SEQ ID NO: 44601 - RNA, 27 nt, synthetic construct
  misc_feature 1..27: note = Tonsoku-like protein (37-45)
  source 1..27: mol_type = other RNA
cacctgtacgaggacctcttccgcgcc

SEQ ID NO: 44602 - RNA, 27 nt, synthetic construct
  misc_feature 1..27: note = Alpha/beta hydrolase domain-containing protein 13 (38-46)
  source 1..27: mol_type = other RNA
cacctgtacggcgggatcatcctcctg

SEQ ID NO: 44603 - RNA, 27 nt, synthetic construct
  misc_feature 1..27: note = Interferon-related developmental regulator 1 (373-381)
  source 1..27: mol_type = other RNA
cacctgtacaacagcgccgccttcaag

SEQ ID NO: 44604 - RNA, 18 nt, synthetic construct
  misc_feature 1..18: note = Bax inhibitor 1 (94-99)
  source 1..18: mol_type = other RNA
cacatggtgacccacttc

SEQ ID NO: 44605 - RNA, 27 nt, synthetic construct
  misc_feature 1..27: note = Eukaryotic translation initiation factor 3 subunit C-like protein (433-441)
  source 1..27: mol_type = other RNA
cacaacgccgaccagcccctgcgcgtg

SEQ ID NO: 44606 - RNA, 45 nt, synthetic construct
  misc_feature 1..45: note = Tartrate-resistant acid phosphatase type 5 (240-254)
  source 1..45: mol_type = other RNA
cacaacctgcagtacctccaggacgagaacggcgtggggtacgtc

SEQ ID NO: 44607 - RNA, 27 nt, synthetic construct
  misc_feature 1..27: note = GMP synthase (glutamine-hydrolyzing) (555-563)
  source 1..27: mol_type = other RNA
cacaacgtgaaccgcgtcgtgtacatc

SEQ ID NO: 44608 - RNA, 24 nt, synthetic construct
  misc_feature 1..24: note = 60S ribosomal protein L10 (92-99)
  source 1..24: mol_type = other RNA
caccccttccacgtgatccgcatc

SEQ ID NO: 44609 - RNA, 27 nt, synthetic construct
  misc_feature 1..27: note = Protein EURL homolog (214-222)
  source 1..27: mol_type = other RNA
cacccccactacagccgcgaggagctg

SEQ ID NO: 44610 - RNA, 27 nt, synthetic construct
  misc_feature 1..27: note = Porphobilinogen deaminase (109-117)
  source 1..27: mol_type = other RNA
caccccaagttcgtgggcaagaccctg

SEQ ID NO: 44611 - RNA, 30 nt, synthetic construct
  misc_feature 1..30: note = Transmembrane protein 209 (465-474)
  source 1..30: mol_type = other RNA
caccccaagtacccggacggcaagaccttc

SEQ ID NO: 44612 - RNA, 27 nt, synthetic construct
  misc_feature 1..27: note = WD repeat-containing protein 43 (361-369)
  source 1..27: mol_type = other RNA
caccccaacagcgccgtgctgatggtc

SEQ ID NO: 44613 - RNA, 24 nt, synthetic construct
  misc_feature 1..24: note = Angio-associated migratory cell protein (51-58)
  source 1..24: mol_type = other RNA
cacccccgcgccccggtgctgctc

SEQ ID NO: 44614 - RNA, 24 nt, synthetic construct
  misc_feature 1..24: note = Microtubule-associated proteins 1A/1B light chain 3B (27-34)
  source 1..24: mol_type = other RNA
caccccaccaagatcccggtgatc

SEQ ID NO: 44615 - RNA, 27 nt, synthetic construct
  misc_feature 1..27: note = Uncharacterized protein C18orf8 (244-252)
  source 1..27: mol_type = other RNA
caccccgtgctgccggcccgcagcatc

SEQ ID NO: 44616 - RNA, 27 nt, synthetic construct
  misc_feature 1..27: note = Melanoma-derived growth regulatory protein (65-73)
  source 1..27: mol_type = other RNA
caccgcggccaggtggtctacgtgttc

SEQ ID NO: 44617 - RNA, 27 nt, synthetic construct
  misc_feature 1..27: note = Platelet-derived growth factor D (2-10)
  source 1..27: mol_type = other RNA
caccgcctgatcttcgtgtacaccctc

SEQ ID NO: 44618 - RNA, 24 nt, synthetic construct
  misc_feature 1..24: note = Serine protease HTRA1 (143-150)
  source 1..24: mol_type = other RNA
caccgccccccggtgatcgtcctg

SEQ ID NO: 44619 - RNA, 27 nt, synthetic construct
  misc_feature 1..27: note = Asparagine synthetase (glutamine-hydrolyzing) (86-94)
  source 1..27: mol_type = other RNA
cacagcgccacccccttcctgaaggtg

SEQ ID NO: 44620 - RNA, 24 nt, synthetic construct
  misc_feature 1..24: note = Histone deacetylase 1 (68-75)
  source 1..24: mol_type = other RNA
cacagcgacgactacatcaagttc

SEQ ID NO: 44621 - RNA, 33 nt, synthetic construct
  misc_feature 1..33: note = Histone-lysine N-methyltransferase NSD3 (877-887)
  source 1..33: mol_type = other RNA
cacagcgaccccatgttctccagctacgcctac

SEQ ID NO: 44622 - RNA, 27 nt, synthetic construct
  misc_feature 1..27: note = Histone deacetylase 9 (697-705)
  source 1..27: mol_type = other RNA
cacagcgagcaccactccctgctctac

SEQ ID NO: 44623 - RNA, 42 nt, synthetic construct
  misc_feature 1..42: note = Tubulin alpha-1C chain (209-222)
  source 1..42: mol_type = other RNA
cacagcttcggcgggggcaccgggtccggcttcaccagcctg

SEQ ID NO: 44624 - RNA, 24 nt, synthetic construct
  misc_feature 1..24: note = Neuropilin-2 (415-422)
  source 1..24: mol_type = other RNA
cacagcggcatcgccctgcgcctc

SEQ ID NO: 44625 - RNA, 24 nt, synthetic construct
  misc_feature 1..24: note = Pre-mRNA-processing factor 19 (391-398)
  source 1..24: mol_type = other RNA
cacagcggccccatcacctccatc

SEQ ID NO: 44626 - RNA, 27 nt, synthetic construct
  misc_feature 1..27: note = Centrosome-associated protein 350 (1116-1124)
  source 1..27: mol_type = other RNA
cacagcatctccatccccaccaagctg

SEQ ID NO: 44627 - RNA, 27 nt, synthetic construct
  misc_feature 1..27: note = Serine/threonine-protein kinase MRCK alpha (1363-1371)
  source 1..27: mol_type = other RNA
cacagcaacgaccacaccctgtccttc

SEQ ID NO: 44628 - RNA, 27 nt, synthetic construct
  misc_feature 1..27: note = Heterogeneous nuclear ribonucleoprotein K (187-195)
  source 1..27: mol_type = other RNA
cacagcaccgaccgcgtggtcctgatc

SEQ ID NO: 44629 - RNA, 24 nt, synthetic construct
  misc_feature 1..24: note = COP9 signalosome complex subunit 6 (130-137)
  source 1..24: mol_type = other RNA
cacaccgacctgcccgtgagcgtc

SEQ ID NO: 44630 - RNA, 42 nt, synthetic construct
  misc_feature 1..42: note = Sodium/potassium-transporting ATPase subunit alpha-3 (688-701)
  source 1..42: mol_type = other RNA
cacaccgagatcgtgttcgcccgcaccagcccccagcagaag

SEQ ID NO: 44631 - RNA, 45 nt, synthetic construct
  misc_feature 1..45: note = Sodium/potassium-transporting ATPase subunit alpha-3 (688-702)
  source 1..45: mol_type = other RNA
cacaccgagatcgtgttcgcccgcaccagcccccagcagaagctg

SEQ ID NO: 44632 - RNA, 42 nt, synthetic construct
  misc_feature 1..42: note = Tyrosine-protein phosphatase non-receptor type substrate 1 (453-466)
  source 1..42: mol_type = other RNA
cacaccgagtacgccagcatccagacctccccccagccggcc

SEQ ID NO: 44633 - RNA, 27 nt, synthetic construct
  misc_feature 1..27: note = H(+)/Cl(-) exchange transporter 3 (72-80)
  source 1..27: mol_type = other RNA
cacaccatcgactgggtgcgcgagaag

SEQ ID NO: 44634 - RNA, 33 nt, synthetic construct
  misc_feature 1..33: note = Tensin-3 (344-354)
  source 1..33: mol_type = other RNA
cacacccagggccccgtggacgggagcctgtac

SEQ ID NO: 44635 - RNA, 27 nt, synthetic construct
  misc_feature 1..27: note = Bifunctional glutamate/proline-tRNA ligase (1093-1101)
  source 1..27: mol_type = other RNA
cacgtggccgacttcgcccccgaggtc

SEQ ID NO: 44636 - RNA, 36 nt, synthetic construct
  misc_feature 1..36: note = Cytochrome c oxidase subunit 6A1, mitochondrial (75-86)
  source 1..36: mol_type = other RNA
cacgtgaaccccctgccgaccggctacgaggacgag

SEQ ID NO: 44637 - RNA, 48 nt, synthetic construct
  misc_feature 1..48: note = Beta-2-microglobulin (83-98)
  source 1..48: mol_type = other RNA
cacgtgaccctgagccagcccaagatcgtcaagtgggaccgcgacatg

SEQ ID NO: 44638 - RNA, 18 nt, synthetic construct
  misc_feature 1..18: note = GPI transamidase component PIG-T (164-169)
  source 1..18: mol_type = other RNA
cactacttcctgcgctac

SEQ ID NO: 44639 - RNA, 24 nt, synthetic construct
  misc_feature 1..24: note = Vacuolar protein sorting-associated protein 41 homolog (13-20)
  source 1..24: mol_type = other RNA
cactacggcaaggtgtacctgctc

SEQ ID NO: 44640 - RNA, 24 nt, synthetic construct
  misc_feature 1..24: note = Interferon-induced protein with tetratricopeptide repeats 1 (383-390)
  source 1..24: mol_type = other RNA
cactacggccgcttccaggagttc

SEQ ID NO: 44641 - RNA, 27 nt, synthetic construct
  misc_feature 1..27: note = Transcription factor SOX-10 (387-395)
  source 1..27: mol_type = other RNA
cactacggcagcgccttcccctccatc

SEQ ID NO: 44642 - RNA, 27 nt, synthetic construct
  misc_feature 1..27: note = AF4/FMR2 family member 4 (917-925)
  source 1..27: mol_type = other RNA
cactacctgcaggaggccaagaagctc

SEQ ID NO: 44643 - RNA, 27 nt, synthetic construct
  misc_feature 1..27: note = KN motif and ankyrin repeat domain-containing protein 1 (1167-1175)
  source 1..27: mol_type = other RNA
cactacagcgtgtcccacagcaacttc

SEQ ID NO: 44644 - RNA, 27 nt, synthetic construct
  misc_feature 1..27: note = L-dopachrome tautomerase (189-197)
  source 1..27: mol_type = other RNA
cactactacagcgtgcgcgacaccctg

SEQ ID NO: 44645 - RNA, 24 nt, synthetic construct
  misc_feature 1..24: note = Brefeldin A-inhibited guanine nucleotide-exchange protein 2 (340-347)
  source 1..24: mol_type = other RNA
atcgccgacgaccgccagagcctg

SEQ ID NO: 44646 - RNA, 27 nt, synthetic construct
  misc_feature 1..27: note = Tripartite motif-containing protein 44 (270-278)
  source 1..27: mol_type = other RNA
atcgccgacgaggagcagaaggccctg

SEQ ID NO: 44647 - RNA, 30 nt, synthetic construct
  misc_feature 1..30: note = Serine hydroxymethyltransferase, cytosolic (79-88)
  source 1..30: mol_type = other RNA
atcgccgacgagaacggcgcctacctgatg

SEQ ID NO: 44648 - RNA, 27 nt, synthetic construct
  misc_feature 1..27: note = Vitamin K-dependent gamma-carboxylase (475-483)
  source 1..27: mol_type = other RNA
atcgccgacttccccggcctgcacctc

SEQ ID NO: 44649 - RNA, 27 nt, synthetic construct
  misc_feature 1..27: note = Chromodomain-helicase-DNA-binding protein 3 (372-380)
  source 1..27: mol_type = other RNA
atcgccgacggcgggttcaccgagctg

SEQ ID NO: 44650 - RNA, 24 nt, synthetic construct
  misc_feature 1..24: note = Probable dimethyladenosine transferase (116-123)
  source 1..24: mol_type = other RNA
atcgccgacaagatccagcagatc

SEQ ID NO: 44651 - RNA, 24 nt, synthetic construct
  misc_feature 1..24: note = Mitotic checkpoint serine/threonine-protein kinase BUB1 beta (956-963)
  source 1..24: mol_type = other RNA
atcgccgacctggcccacctcctg

SEQ ID NO: 44652 - RNA, 27 nt, synthetic construct
  misc_feature 1..27: note = Gamma-interferon-inducible protein 16 (48-56)
  source 1..27: mol_type = other RNA
atcgccgacctgatggaggagaagttc

SEQ ID NO: 44653 - RNA, 24 nt, synthetic construct
  misc_feature 1..24: note = Ras association domain-containing protein 5 (335-342)
  source 1..24: mol_type = other RNA
atcgccgaccgccccctgtacctc

SEQ ID NO: 44654 - RNA, 24 nt, synthetic construct
  misc_feature 1..24: note Dolichyl-diphosphooligosaccharide-proteinosyltransferase subunit 2 (268-275)
  source 1..24: mol_type = other RNA
atcgccgacagccaccagaacttc

SEQ ID NO: 44655 - RNA, 27 nt, synthetic construct
  misc_feature 1..27: note = Consortin (202-210)
  source 1..27: mol_type = other RNA
atcgccgaggaccccaaggtgttcctg

SEQ ID NO: 44656 - RNA, 27 nt, synthetic construct
  misc_feature 1..27: note = Eukaryotic translation initiation factor 4 gamma 2 (5-13)
  source 1..27: mol_type = other RNA
atcgccgagggcggggccagccgcttc

SEQ ID NO: 44657 - RNA, 27 nt, synthetic construct
  misc_feature 1..27: note = Tensin-3 (154-162)
  source 1..27: mol_type = other RNA
atcgccttcagccgccccgtgaagtac

SEQ ID NO: 44658 - RNA, 90 nt, synthetic construct
  misc_feature 1..90: note = Flavin reductaseADPH) (6-35)
  source 1..90: mol_type = other RNA
atcgccatcttcggcgccaccgggcagaccggcctgacgaccctcgcgcaggccgtgcaggccgggtacgaggtcaccgtgctggtgcgc

SEQ ID NO: 44659 - RNA, 27 nt, synthetic construct
  misc_feature 1..27: note = Ras GTPase-activating-like protein IQGAP2 (219-227)
  source 1..27: mol_type = other RNA
atcgccatcaacgaggccgtggagaag

SEQ ID NO: 44660 - RNA, 27 nt, synthetic construct
  misc_feature 1..27: note = Ubiquitin carboxyl-terminal hydrolase 15 (259-267)
  source 1..27: mol_type = other RNA
atcgccaagagctacgccgagctgatc

SEQ ID NO: 44661 - RNA, 27 nt, synthetic construct
  misc_feature 1..27: note = Prolow-density lipoprotein receptor-related protein 1 (1392-1400)
  source 1..27: mol_type = other RNA
atcgccctggacccccgcgacggcatc

SEQ ID NO: 44662 - RNA, 36 nt, synthetic construct
  misc_feature 1..36: note = Transcription factor Sp1 (551-562)
  source 1..36: mol_type = other RNA
atcgccaacgcccccggcgaccacggggcgcagctg

SEQ ID NO: 44663 - RNA, 27 nt, synthetic construct
  misc_feature 1..27: note Dolichyl-diphosphooligosaccharide-proteinosyltransferase subunit 2 (220-228)
  source 1..27: mol_type = other RNA
atcgccaacaccgtggagctgcgcgtc

SEQ ID NO: 44664 - RNA, 42 nt, synthetic construct
  misc_feature 1..42: note = Solute carrier family 2, facilitated glucose transporter member 1 (21-34)
  source 1..42: mol_type = other RNA
atcgcccaggtgttcggcctggacagcatcatggggaacaag

SEQ ID NO: 44665 - RNA, 48 nt, synthetic construct
  misc_feature 1..48: note = Solute carrier family 2, facilitated glucose transporter member 1 (21-36)
  source 1..48: mol_type = other RNA
atcgcccaggtgttcggcctggacagcatcatggggaacaaggacctc

SEQ ID NO: 44666 - RNA, 24 nt, synthetic construct
  misc_feature 1..24: note = 60S ribosomal protein L35 (54-61)
  source 1..24: mol_type = other RNA
atcgcccgcgtgctgaccgtcatc

SEQ ID NO: 44667 - RNA, 27 nt, synthetic construct
  misc_feature 1..27: note = Alpha-actinin-3 (114-122)
  source 1..27: mol_type = other RNA
atcgccagcaagggcgtgaagctggtc

SEQ ID NO: 44668 - RNA, 27 nt, synthetic construct
  misc_feature 1..27: note = Derlin-2 (50-58)
  source 1..27: mol_type = other RNA
atcgccgtgggccacatctacttcttc

SEQ ID NO: 44669 - RNA, 21 nt, synthetic construct
  misc_feature 1..21: note = Solute carrier family 25 member 35 (138-144)
  source 1..21: mol_type = other RNA
atcgccgtgggccaccagtac

SEQ ID NO: 44670 - RNA, 27 nt, synthetic construct
  misc_feature 1..27: note = Ectonucleoside triphosphate diphosphohydrolase 4 (279-287)
  source 1..27: mol_type = other RNA
atcgcctacgaggtgcccaagaccgtc

SEQ ID NO: 44671 - RNA, 27 nt, synthetic construct
  misc_feature 1..27: note = DNA topoisomerase 3-beta-1 (521-529)
  source 1..27: mol_type = other RNA
atctgccagcgcaactacgtgaccgtc

SEQ ID NO: 44672 - RNA, 30 nt, synthetic construct
  misc_feature 1..30: note = Zinc transporter ZIP14 (350-359)
  source 1..30: mol_type = other RNA
atcgacggcctggccatcggggccagcttc

SEQ ID NO: 44673 - RNA, 27 nt, synthetic construct
  misc_feature 1..27: note = Nucleolin (454-462)
  source 1..27: mol_type = other RNA
atcgacggccgcagcatctccctgtac

SEQ ID NO: 44674 - RNA, 30 nt, synthetic construct
  misc_feature 1..30: note = Nucleolin (454-463)
  source 1..30: mol_type = other RNA
atcgacggccgcagcatctccctgtactac

SEQ ID NO: 44675 - RNA, 21 nt, synthetic construct
  misc_feature 1..21: note = Keratin, type II cytoskeletal 1b (179-185)
  source 1..21: mol_type = other RNA
atcgacaaggtgcgcttcctg

SEQ ID NO: 44676 - RNA, 69 nt, synthetic construct
  misc_feature 1..69: note = Puromycin-sensitive aminopeptidase (305-327)
  source 1..69: mol_type = other RNA
atcgacctgatcgccatcgccgacttcgcggccggcgccatggagaactgggggctcgtgacctaccgc

SEQ ID NO: 44677 - RNA, 27 nt, synthetic construct
  misc_feature 1..27: note = Prelamin-A/C (80-88)
  source 1..27: mol_type = other RNA
atcgacaacggcaagcagcgcgagttc

SEQ ID NO: 44678 - RNA, 30 nt, synthetic construct
  misc_feature 1..30: note = Structural maintenance of chromosomes flexible hinge domain-containing protein 1 (183-192)
  source 1..30: mol_type = other RNA
atcgacaacggccgcgggatgaccagcaag

SEQ ID NO: 44679 - RNA, 27 nt, synthetic construct
  misc_feature 1..27: note = DNA damage-binding protein 1 (794-802)
  source 1..27: mol_type = other RNA
atcgaccagcacaccttcgaggtgctg

SEQ ID NO: 44680 - RNA, 21 nt, synthetic construct
  misc_feature 1..21: note = Pre-mRNA-processing-splicing factor 8 (1380-1386)
  source 1..21: mol_type = other RNA
atcgacagccagcgcgtgtgg

SEQ ID NO: 44681 - RNA, 42 nt, synthetic construct
  misc_feature 1..42: note = Clathrin heavy chain 1 (1125-1138)
  source 1..42: mol_type = other RNA
atcgacagctacatcaaggccgacgacccctccagctacatg

SEQ ID NO: 44682 - RNA, 45 nt, synthetic construct
  misc_feature 1..45: note = Clathrin heavy chain 1 (1125-1139)
  source 1..45: mol_type = other RNA
atcgacagctacatcaaggccgacgacccctccagctacatggag

SEQ ID NO: 44683 - RNA, 21 nt, synthetic construct
  misc_feature 1..21: note = Talin-1 (292-298)
  source 1..21: mol_type = other RNA
atcgaggccaaggtgcgctac

SEQ ID NO: 44684 - RNA, 27 nt, synthetic construct
  misc_feature 1..27: note = Microtubule-associated protein 4 (17-25)
  source 1..27: mol_type = other RNA
atcgagggcgagatcaagcgcgacttc

SEQ ID NO: 44685 - RNA, 27 nt, synthetic construct
  misc_feature 1..27: note = Actin, cytoplasmic 2 (71-79)
  source 1..27: mol_type = other RNA
atcgagcacggcatcgtgaccaactgg

SEQ ID NO: 44686 - RNA, 18 nt, synthetic construct
  misc_feature 1..18: note = Fatty acid desaturase 2 (352-357)
  source 1..18: mol_type = other RNA
atcgagcaccacctgttc

SEQ ID NO: 44687 - RNA, 21 nt, synthetic construct
  misc_feature 1..21: note = Programmed cell death protein 5 (93-99)
  source 1..21: mol_type = other RNA
atcgagatcctgaagaaggtg

SEQ ID NO: 44688 - RNA, 27 nt, synthetic construct
  misc_feature 1..27: note = DnaJ homolog subfamily C member 7 (216-224)
  source 1..27: mol_type = other RNA
atcgagaaggccgtgcagttcttcgtc

SEQ ID NO: 44689 - RNA, 21 nt, synthetic construct
  misc_feature 1..21: note = Cysteine-rich protein 2-binding protein (156-162)
  source 1..21: mol_type = other RNA
atcgagaagcactggaccttc

SEQ ID NO: 44690 - RNA, 24 nt, synthetic construct
  misc_feature 1..24: note = rRNA-processing protein FCF1 homolog (110-117)
  source 1..24: mol_type = other RNA
atcgagaagctgggccagaagtac

SEQ ID NO: 44691 - RNA, 30 nt, synthetic construct
  misc_feature 1..30: note = Lysosomal-trafficking regulator (3604-3613)
  source 1..30: mol_type = other RNA
atcgagatggagacccagatccacctgtac

SEQ ID NO: 44692 - RNA, 27 nt, synthetic construct
  misc_feature 1..27: note = Cholinesterase (384-392)
  source 1..27: mol_type = other RNA
atcttcttccccggcgtgagcgagttc

SEQ ID NO: 44693 - RNA, 27 nt, synthetic construct
  misc_feature 1..27: note = Inositol 1,4,5-trisphosphate receptor type 2 (1770-1778)
  source 1..27: mol_type = other RNA
atcttcagcgagggcatcttcctgggg

SEQ ID NO: 44694 - RNA, 30 nt, synthetic construct
  misc_feature 1..30: note = E3 ubiquitin-protein ligase UBR4 (2405-2414)
  source 1..30: mol_type = other RNA
atcggcgccagcgtggaccccgccggggtc

SEQ ID NO: 44695 - RNA, 27 nt, synthetic construct
  misc_feature 1..27: note = Mannose-6-phosphate isomerase (121-129)
  source 1..27: mol_type = other RNA
atcggcgacgaggccgccacccacctg

SEQ ID NO: 44696 - RNA, 27 nt, synthetic construct
  misc_feature 1..27: note = Beta-catenin-like protein 1 (430-438)
  source 1..27: mol_type = other RNA
atcggcgacgggcgcagccccgagttc

SEQ ID NO: 44697 - RNA, 27 nt, synthetic construct
  misc_feature 1..27: note = Fructose-bisphosphate aldolase A (208-216)
  source 1..27: mol_type = other RNA
atcggcgagcacacccccagcgccctg

SEQ ID NO: 44698 - RNA, 21 nt, synthetic construct
  misc_feature 1..21: note = 40S ribosomal protein S29 (50-56)
  source 1..21: mol_type = other RNA
atcggcttcatcaagctggac

SEQ ID NO: 44699 - RNA, 24 nt, synthetic construct
  misc_feature 1..24: note = Transmembrane protein 263 (60-67)
  source 1..24: mol_type = other RNA
atcggcgggaagagcctggaggtg

SEQ ID NO: 44700 - RNA, 30 nt, synthetic construct
  misc_feature 1..30: note = RNA-binding Raly-like protein (25-34)
  source 1..30: mol_type = other RNA
atcggcaacctgaacaccgccatcgtgaag

SEQ ID NO: 44701 - RNA, 30 nt, synthetic construct
  misc_feature 1..30: note = RNA-binding protein Raly (25-34)
  source 1..30: mol_type = other RNA
atcggcaacctgaacaccgccctcgtgaag

SEQ ID NO: 44702 - RNA, 45 nt, synthetic construct
  misc_feature 1..45: note = Protocadherin Fat 1 (1606-1620)
  source 1..45: mol_type = other RNA
atcggcaacagcttcatgatcgaccccgtgctggggtccatcaag

SEQ ID NO: 44703 - RNA, 45 nt, synthetic construct
  misc_feature 1..45: note = Protocadherin Fat 1 (1682-1696)
  source 1..45: mol_type = other RNA
atcggcagcttcgtggggatggtcaccgcccactcccagagctcc

SEQ ID NO: 44704 - RNA, 24 nt, synthetic construct
  misc_feature 1..24: note = Cilia- and flagella-associated protein 20 (17-24)
  source 1..24: mol_type = other RNA
atcggcagcaagcccctgcagatc

SEQ ID NO: 44705 - RNA, 21 nt, synthetic construct
  misc_feature 1..21: note = Retinoblastoma-like protein 1 (197-203)
  source 1..21: mol_type = other RNA
atcggcaccccccgcaagttc

SEQ ID NO: 44706 - RNA, 72 nt, synthetic construct
  misc_feature 1..72: note = Heterogeneous nuclear ribonucleoprotein U (241-264)
  source 1..72: mol_type = other RNA
atcggctggagcctgaccacctccgggatgctcctgggcgaggaggagttcagctacgggtactccctgaag

SEQ ID NO: 44707 - RNA, 24 nt, synthetic construct
  misc_feature 1..24: note = Zinc finger protein 148 (258-265)
  source 1..24: mol_type = other RNA
atccaccccccgaagctggtgctc

SEQ ID NO: 44708 - RNA, 27 nt, synthetic construct
  misc_feature 1..27: note = Trifunctional purine biosynthetic protein adenosine-3 (206-214)
  source 1..27: mol_type = other RNA
atccaccccagcctgctcccgtccttc

SEQ ID NO: 44709 - RNA, 21 nt, synthetic construct
  misc_feature 1..21: note = Dedicator of cytokinesis protein 7 (741-747)
  source 1..21: mol_type = other RNA
atccactacgtgttccgcctg

SEQ ID NO: 44710 - RNA, 24 nt, synthetic construct
  misc_feature 1..24: note = MICOS complex subunit MIC27 (159-166)
  source 1..24: mol_type = other RNA
atcatcgccaaggtgaccgccaag

SEQ ID NO: 44711 - RNA, 24 nt, synthetic construct
  misc_feature 1..24: note = Protein PRRC2C (1659-1666)
  source 1..24: mol_type = other RNA
atcatcgacgaccaccccgaggtg

SEQ ID NO: 44712 - RNA, 27 nt, synthetic construct
  misc_feature 1..27: note = 26S protease regulatory subunit 4 (115-123)
  source 1..27: mol_type = other RNA
atcatcgacgacaaccacgccatcgtg

SEQ ID NO: 44713 - RNA, 24 nt, synthetic construct
  misc_feature 1..24: note = Lambda-crystallin homolog (90-97)
  source 1..24: mol_type = other RNA
atcatcgacgaccgcgtgatcctg

SEQ ID NO: 44714 - RNA, 27 nt, synthetic construct
  misc_feature 1..27: note = RANBP2-like and GRIP domain-containing protein 1 (712-720)
  source 1..27: mol_type = other RNA
atcatcgacgacagcgactccaacctg

SEQ ID NO: 44715 - RNA, 27 nt, synthetic construct
  misc_feature 1..27: note = Niemann-Pick C1 protein (1094-1102)
  source 1..27: mol_type = other RNA
atcatcgacgacaccatcttcaacctg

SEQ ID NO: 44716 - RNA, 27 nt, synthetic construct
  misc_feature 1..27: note = Eukaryotic translation initiation factor 3 subunit L (186-194)
  source 1..27: mol_type = other RNA
atcatcgacgagttcatctaccagttc

SEQ ID NO: 44717 - RNA, 30 nt, synthetic construct
  misc_feature 1..30: note = UDP-N-acetylhexosamine pyrophosphorylase (491-500)
  source 1..30: mol_type = other RNA
atcatcgacgagaacggcgtgcacgagctg

SEQ ID NO: 44718 - RNA, 27 nt, synthetic construct
  misc_feature 1..27: note = Serine/threonine-protein kinase Kist (152-160)
  source 1..27: mol_type = other RNA
atcatcgaccacatcttcgccagcaag

SEQ ID NO: 44719 - RNA, 27 nt, synthetic construct
  misc_feature 1..27: note = AP-3 complex subunit mu-2 (190-198)
  source 1..27: mol_type = other RNA
atcatcgacaagagcggctccaccatc

SEQ ID NO: 44720 - RNA, 27 nt, synthetic construct
  misc_feature 1..27: note = Caspase recruitment domain-containing protein 19 (143-151)
  source 1..27: mol_type = other RNA
atcatcgaccgccacgtgagccggtac

SEQ ID NO: 44721 - RNA, 24 nt, synthetic construct
  misc_feature 1..24: note = Double-strand-break repair protein rad21 homolog (444-451)
  source 1..24: mol_type = other RNA
atcatcgaggagcccagccgcctg

SEQ ID NO: 44722 - RNA, 63 nt, synthetic construct
  misc_feature 1..63: note = T-complex protein 1 subunit alpha (160-180)
  source 1..63: mol_type = other RNA
atcatcggcatcaacggggacttcttcgccaacatggtggtcgacgccgtgctggcgatcaag

SEQ ID NO: 44723 - RNA, 27 nt, synthetic construct
  misc_feature 1..27: note = Ubiquitin-like modifier-activating enzyme 1 (91-99)
  source 1..27: mol_type = other RNA
atcatcctgggcggggtgaaggccgtc

SEQ ID NO: 44724 - RNA, 27 nt, synthetic construct
  misc_feature 1..27: note = Transportin-1 (757-765)
  source 1..27: mol_type = other RNA
atcatcaaccgccccaacaccccgaag

SEQ ID NO: 44725 - RNA, 27 nt, synthetic construct
  misc_feature 1..27: note = Far upstream element-binding protein 1 (359-367)
  source 1..27: mol_type = other RNA
atcatcaccgacctgctccgcagcgtg

SEQ ID NO: 44726 - RNA, 27 nt, synthetic construct
  misc_feature 1..27: note = Glycerol-3-phosphate acyltransferase 4 (30-38)
  source 1..27: mol_type = other RNA
atcatcgtgcccgccatcttcggcgtc

SEQ ID NO: 44727 - RNA, 45 nt, synthetic construct
  misc_feature 1..45: note = Syntaxin-7 (70-84)
  source 1..45: mol_type = other RNA
atcaaggagttcggcagcctgcccaccaccccgtccgagcagcgc

SEQ ID NO: 44728 - RNA, 48 nt, synthetic construct
  misc_feature 1..48: note = Alpha-enolase (26-41)
  source 1..48: mol_type = other RNA
atcaaggagaagtacggcaaggacgccaccaacgtgggggacgagggc

SEQ ID NO: 44729 - RNA, 21 nt, synthetic construct
  misc_feature 1..21: note = 26S proteasome non-ATPase regulatory subunit 8 (133-139)
  source 1..21: mol_type = other RNA
atcaagcaccccgtgagcctg

SEQ ID NO: 44730 - RNA, 33 nt, synthetic construct
  misc_feature 1..33: note = Keratin, type II cytoskeletal 1 (184-194)
  source 1..33: mol_type = other RNA
atcaagagcctgaacaaccagttcgcctccttc

SEQ ID NO: 44731 - RNA, 30 nt, synthetic construct
  misc_feature 1..30: note = Synaptojanin-1 (895-904)
  source 1..30: mol_type = other RNA
atcaagagctccctgcccgagaacaacttc

SEQ ID NO: 44732 - RNA, 69 nt, synthetic construct
  misc_feature 1..69: note = Vimentin (444-466)
  source 1..69: mol_type = other RNA
atcaagaccgtggagacccgcgacggccaggtcatcaacgagacgagccagcaccacgacgacctggag

SEQ ID NO: 44733 - RNA, 27 nt, synthetic construct
  misc_feature 1..27: note = Talin-1 (862-870)
  source 1..27: mol_type = other RNA
atcctggccgacgccaccgcgaagatg

SEQ ID NO: 44734 - RNA, 30 nt, synthetic construct
  misc_feature 1..30: note = DNA-dependent protein kinase catalytic subunit (544-553)
  source 1..30: mol_type = other RNA
atcctggccgacgaggccttcttcagcgtg

SEQ ID NO: 44735 - RNA, 30 nt, synthetic construct
  misc_feature 1..30: note = Exonuclease 3'-5' domain-containing protein 2 (30-39)
  source 1..30: mol_type = other RNA
atcctggccgacggcaccatcctcaaggtg

SEQ ID NO: 44736 - RNA, 36 nt, synthetic construct
  misc_feature 1..36: note = Globoside alpha-1,3-N-acetylgalactosaminyltransferase 1 (266-277)
  source 1..36: mol_type = other RNA
atcctggccgacaaggccaacggcatcatggcggcc

SEQ ID NO: 44737 - RNA, 33 nt, synthetic construct
  misc_feature 1..33: note = Catenin alpha-1 (140-150)
  source 1..33: mol_type = other RNA
atcctggccgacatggccgacgtgtacaagctc

SEQ ID NO: 44738 - RNA, 27 nt, synthetic construct
  misc_feature 1..27: note = Dynactin subunit 3 (87-95)
  source 1..27: mol_type = other RNA
atcctggccgaggagcagttcatcctc

SEQ ID NO: 44739 - RNA, 27 nt, synthetic construct
  misc_feature 1..27: note = Transmembrane protein 87A (234-242)
  source 1..27: mol_type = other RNA
atcctggccgagctcctgagcgccgtg

SEQ ID NO: 44740 - RNA, 27 nt, synthetic construct
  misc_feature 1..27: note = Serum paraoxonase/arylesterase 2 (239-247)
  source 1..27: mol_type = other RNA
atcctggcccacgagatccacgtgctc

SEQ ID NO: 44741 - RNA, 27 nt, synthetic construct
  misc_feature 1..27: note = Centrosomal protein of 170 kDa protein B (1269-1277)
  source 1..27: mol_type = other RNA
atcctggcccaggagatccacgacgtg

SEQ ID NO: 44742 - RNA, 27 nt, synthetic construct
  misc_feature 1..27: note = Unconventional myosin-XV (2127-2135)
  source 1..27: mol_type = other RNA
atcctggcccagctcgccaaccaggtg

SEQ ID NO: 44743 - RNA, 27 nt, synthetic construct
  misc_feature 1..27: note = Multidrug resistance-associated protein 1 (560-568)
  source 1..27: mol_type = other RNA
atcctggacgcccagaccgccttcgtg

SEQ ID NO: 44744 - RNA, 27 nt, synthetic construct
  misc_feature 1..27: note = Unconventional myosin-Id (455-463)
  source 1..27: mol_type = other RNA
atcctggacgacgcctgcatgaacgtg

SEQ ID NO: 44745 - RNA, 27 nt, synthetic construct
  misc_feature 1..27: note = Acyl-CoA synthetase short-chain family member 3, mitochondrial (486-494)
  source 1..27: mol_type = other RNA
atcctggacgacaacatgcagaagctc

SEQ ID NO: 44746 - RNA, 27 nt, synthetic construct
  misc_feature 1..27: note = FRAS1-related extracellular matrix protein 1 (98-106)
  source 1..27: mol_type = other RNA
atcctggacgaggacaccgtgaagctc

SEQ ID NO: 44747 - RNA, 27 nt, synthetic construct
  misc_feature 1..27: note = HEAT repeat-containing protein 1 (1277-1285)
  source 1..27: mol_type = other RNA
atcctggacgaggagaagttcaacgtg

SEQ ID NO: 44748 - RNA, 24 nt, synthetic construct
  misc_feature 1..24: note = Hemicentin-1 (2341-2348)
  source 1..24: mol_type = other RNA
atcctggacgagggccacatcctc

SEQ ID NO: 44749 - RNA, 30 nt, synthetic construct
  misc_feature 1..30: note = Hemicentin-1 (2341-2350)
  source 1..30: mol_type = other RNA
atcctggacgagggccacatcctccagctg

SEQ ID NO: 44750 - RNA, 27 nt, synthetic construct
  misc_feature 1..27: note = Pleckstrin homology domain-containing family H member 1 (1314-1322)
  source 1..27: mol_type = other RNA
atcctggaccacaacaccatgcaggtg

SEQ ID NO: 44751 - RNA, 27 nt, synthetic construct
  misc_feature 1..27: note = Mitochondrial tRNA-specific 2-thiouridylase 1 (63-71)
  source 1..27: mol_type = other RNA
atcctggacatccccttccaccaggtg

SEQ ID NO: 44752 - RNA, 27 nt, synthetic construct
  misc_feature 1..27: note = Protein GPR107 (122-130)
  source 1..27: mol_type = other RNA
atcctggacatcagccgctccgaggtg

SEQ ID NO: 44753 - RNA, 24 nt, synthetic construct
  misc_feature 1..24: note = Heat shock protein HSP 90-beta (496-503)
  source 1..24: mol_type = other RNA
atcctggacaagaaggtggagaag

SEQ ID NO: 44754 - RNA, 27 nt, synthetic construct
  misc_feature 1..27: note = Anthrax toxin receptor 1 (48-56)
  source 1..27: mol_type = other RNA
atcctggacaagagcggctccgtgctc

SEQ ID NO: 44755 - RNA, 30 nt, synthetic construct
  misc_feature 1..30: note = UDP-glucose 4-epimerase (67-76)
  source 1..30: mol_type = other RNA
atcctggaccagggcgccctccagcgcctg

SEQ ID NO: 44756 - RNA, 33 nt, synthetic construct
  misc_feature 1..33: note = Pleckstrin homology-like domain family B member 1 (850-860)
  source 1..33: mol_type = other RNA
atcctggacagccaggccggccagatccgcgcc

SEQ ID NO: 44757 - RNA, 27 nt, synthetic construct
  misc_feature 1..27: note = Chromobox protein homolog 6 (48-56)
  source 1..27: mol_type = other RNA
atcctggacagccgcctcatcgccgcc

SEQ ID NO: 44758 - RNA, 30 nt, synthetic construct
  misc_feature 1..30: note = Voltage-dependent calcium channel subunit alpha-2/delta-2 (731-740)
  source 1..30: mol_type = other RNA
atcctggacaccggcatcacccagcagctc

SEQ ID NO: 44759 - RNA, 27 nt, synthetic construct
  misc_feature 1..27: note = Kinesin-like protein KIF1B (1497-1505)
  source 1..27: mol_type = other RNA
atcctggacaccagcgtggcctacgtc

SEQ ID NO: 44760 - RNA, 27 nt, synthetic construct
  misc_feature 1..27: note = CAP-Gly domain-containing linker protein 4 (12-20)
  source 1..27: mol_type = other RNA
atcctgttcgaccccaagaccagcgtg

SEQ ID NO: 44761 - RNA, 27 nt, synthetic construct
  misc_feature 1..27: note = ATP-binding cassette sub-family A member 13 (826-834)
  source 1..27: mol_type = other RNA
atcctgttcgagatcaaccccaagctc

SEQ ID NO: 44762 - RNA, 27 nt, synthetic construct
  misc_feature 1..27: note = Carbonic anhydrase-related protein (233-241)
  source 1..27: mol_type = other RNA
atcctgttccgctaccccctcaccatc

SEQ ID NO: 44763 - RNA, 27 nt, synthetic construct
  misc_feature 1..27: note = Tribbles homolog 1 (150-158)
  source 1..27: mol_type = other RNA
atcctgggcgagaccaaggcctacgtg

SEQ ID NO: 44764 - RNA, 27 nt, synthetic construct
  misc_feature 1..27: note = KH domain-containing, RNA-binding, signal transduction-associated protein 1 (176-184)
  source 1..27: mol_type = other RNA
atcctgggcccccaggggaacaccatc

SEQ ID NO: 44765 - RNA, 24 nt, synthetic construct
  misc_feature 1..24: note = Epidermal growth factor receptor substrate 15 (164-171)
  source 1..24: mol_type = other RNA
atcctgggccgcgtgtgggagctc

SEQ ID NO: 44766 - RNA, 24 nt, synthetic construct
  misc_feature 1..24: note = Lecithin retinol acyltransferase (98-105)
  source 1..24: mol_type = other RNA
atcctgggcgtgatcgtcaaggtg

SEQ ID NO: 44767 - RNA, 111 nt, synthetic construct
  misc_feature 1..111: note = Glyceraldehyde-3-phosphate dehydrogenase (273-309)
  source 1..111: mol_type = other RNA
atcctgggctacaccgagcaccaggtggtcagctccgacttcaacagcgacacccactccagcacgttcgacgccggggccggcatcgcgctcaacgaccacttcgtgaag

SEQ ID NO: 44768 - RNA, 24 nt, synthetic construct
  misc_feature 1..24: note = Sperm-associated antigen 7 (80-87)
  source 1..24: mol_type = other RNA
atcctgcacgacgtggtcgaggtg

SEQ ID NO: 44769 - RNA, 36 nt, synthetic construct
  misc_feature 1..36: note = Lysosomal-trafficking regulator (1804-1815)
  source 1..36: mol_type = other RNA
atcctgcacgagatcggcgggaccggcatcttcgtg

SEQ ID NO: 44770 - RNA, 27 nt, synthetic construct
  misc_feature 1..27: note = Coiled-coil domain-containing protein 93 (480-488)
  source 1..27: mol_type = other RNA
atcctgcaccgcaagatcgacgaggtg

SEQ ID NO: 44771 - RNA, 27 nt, synthetic construct
  misc_feature 1..27: note = S1 RNA-binding domain-containing protein 1 (186-194)
  source 1..27: mol_type = other RNA
atcctgcacaccgacgtggtctacctc

SEQ ID NO: 44772 - RNA, 27 nt, synthetic construct
  misc_feature 1..27: note = Prolow-density lipoprotein receptor-related protein 1 (408-416)
  source 1..27: mol_type = other RNA
atcctgatcgagcacctctacggcctg

SEQ ID NO: 44773 - RNA, 27 nt, synthetic construct
  misc_feature 1..27: note = Tissue-type plasminogen activator (243-251)
  source 1..27: mol_type = other RNA
atcctgatcggcaaggtgtacaccgcc

SEQ ID NO: 44774 - RNA, 57 nt, synthetic construct
  misc_feature 1..57: note = ATP-citrate synthase (337-355)
  source 1..57: mol_type = other RNA
atcctgatcatcggcgggagcatcgccaacttcaccaacgtggccgcgaccttcaag

SEQ ID NO: 44775 - RNA, 27 nt, synthetic construct
  misc_feature 1..27: note = Laminin subunit beta-1 (612-620)
  source 1..27: mol_type = other RNA
atcctgatccgctacgagccccagctc

SEQ ID NO: 44776 - RNA, 27 nt, synthetic construct
  misc_feature 1..27: note = Receptor-interacting serine/threonine-protein kinase 4 (149-157)
  source 1..27: mol_type = other RNA
atcctgctcgacgcccactaccacgtg

SEQ ID NO: 44777 - RNA, 30 nt, synthetic construct
  misc_feature 1..30: note = CD109 antigen (864-873)
  source 1..30: mol_type = other RNA
atcctgctcgacctgaccgacaaccgcctg

SEQ ID NO: 44778 - RNA, 27 nt, synthetic construct
  misc_feature 1..27: note = Lon protease homolog 2, peroxisomal (293-301)
  source 1..27: mol_type = other RNA
atcctgctcgacaacgaccactacgcc

SEQ ID NO: 44779 - RNA, 27 nt, synthetic construct
  misc_feature 1..27: note = Zinc finger protein basonuclin-1 (109-117)
  source 1..27: mol_type = other RNA
atcctgctcgaccgcctgttcagcgtg

SEQ ID NO: 44780 - RNA, 27 nt, synthetic construct
  misc_feature 1..27: note = COP9 signalosome complex subunit 3 (213-221)
  source 1..27: mol_type = other RNA
atcctgctcggcaaggtgcagcagctg

SEQ ID NO: 44781 - RNA, 30 nt, synthetic construct
  misc_feature 1..30: note = T-lymphoma invasion and metastasis-inducing protein 1 (425-434)
  source 1..30: mol_type = other RNA
atcctgctcaccgccgcccagggcaccgtg

SEQ ID NO: 44782 - RNA, 27 nt, synthetic construct
  misc_feature 1..27: note = Transcription factor IIIB 90 kDa subunit (434-442)
  source 1..27: mol_type = other RNA
atcctgaacgagagcgaggcccgcgtg

SEQ ID NO: 44783 - RNA, 30 nt, synthetic construct
  misc_feature 1..30: note = G-protein coupled receptor 143 (297-306)
  source 1..30: mol_type = other RNA
atcctgaaccccgcccagggcttcctcctg

SEQ ID NO: 44784 - RNA, 27 nt, synthetic construct
  misc_feature 1..27: note = Adipocyte enhancer-binding protein 1 (945-953)
  source 1..27: mol_type = other RNA
atcctgaaccccggcgagtaccgcgtg

SEQ ID NO: 44785 - RNA, 27 nt, synthetic construct
  misc_feature 1..27: note = Kinesin-like protein KIF13B (36-44)
  source 1..27: mol_type = other RNA
atcctgaaccccgtgaacaccaacctc

SEQ ID NO: 44786 - RNA, 27 nt, synthetic construct
  misc_feature 1..27: note = Lysine-specific demethylase 5B (178-186)
  source 1..27: mol_type = other RNA
atcctgaacccctacaacctcttcctg

SEQ ID NO: 44787 - RNA, 27 nt, synthetic construct
  misc_feature 1..27: note = Importin-7 (833-841)
  source 1..27: mol_type = other RNA
atcctgcccgccttcatcctcctgttc

SEQ ID NO: 44788 - RNA, 33 nt, synthetic construct
  misc_feature 1..33: note = Lysosome-associated membraneoprotein 1 (248-258)
  source 1..33: mol_type = other RNA
atcctgcccgacgcccgcgacccggccttcaag

SEQ ID NO: 44789 - RNA, 33 nt, synthetic construct
  misc_feature 1..33: note = Peroxisome biogenesis factor 1 (908-918)
  source 1..33: mol_type = other RNA
atcctgcccgacgagagcaagttcaacatgtac

SEQ ID NO: 44790 - RNA, 27 nt, synthetic construct
  misc_feature 1..27: note = E3 ubiquitin-protein ligase CBL-B (77-85)
  source 1..27: mol_type = other RNA
atcctgcccgacacctaccagcacctc

SEQ ID NO: 44791 - RNA, 27 nt, synthetic construct
  misc_feature 1..27: note = Estradiol 17-beta-dehydrogenase 11 (272-280)
  source 1..27: mol_type = other RNA
atcctgcccgagcgcttcctcgccgtg

SEQ ID NO: 44792 - RNA, 27 nt, synthetic construct
  misc_feature 1..27: note = E1A-binding protein p400 (1032-1040)
  source 1..27: mol_type = other RNA
atcctgcccaagggcagcgcccgcgtg

SEQ ID NO: 44793 - RNA, 27 nt, synthetic construct
  misc_feature 1..27: note = LINE-1 retrotransposable element ORF2 protein (817-825)
  source 1..27: mol_type = other RNA
atcctgcccaaggtgatctaccgcttc

SEQ ID NO: 44794 - RNA, 27 nt, synthetic construct
  misc_feature 1..27: note = Aryl hydrocarbon receptor (23-31)
  source 1..27: mol_type = other RNA
atcctgcccccgcagctcgccctgttc

SEQ ID NO: 44795 - RNA, 27 nt, synthetic construct
  misc_feature 1..27: note = Zinc finger and SCAN domain-containing protein 25 (93-101)
  source 1..27: mol_type = other RNA
atcctgccccgcgagttctacgcctgg

SEQ ID NO: 44796 - RNA, 27 nt, synthetic construct
  misc_feature 1..27: note = DDB1- and CUL4-associated factor 4 (318-326)
  source 1..27: mol_type = other RNA
atcctgcaggacgagcagtacctcatg

SEQ ID NO: 44797 - RNA, 27 nt, synthetic construct
  misc_feature 1..27: note = Zinc finger protein RFP (330-338)
  source 1..27: mol_type = other RNA
atcctgagcgacaacctccgccaggtg

SEQ ID NO: 44798 - RNA, 27 nt, synthetic construct
  misc_feature 1..27: note = AP2-associated protein kinase 1 (635-643)
  source 1..27: mol_type = other RNA
atcctgagcgacgtgacccactccgcc

SEQ ID NO: 44799 - RNA, 27 nt, synthetic construct
  misc_feature 1..27: note = Ras GTPase-activating protein 1 (674-682)
  source 1..27: mol_type = other RNA
atcctgagcgagctcgtggagaagatc

SEQ ID NO: 44800 - RNA, 27 nt, synthetic construct
  misc_feature 1..27: note = Mediator of RNA polymerase II transcription subunit 13 (1076-1084)
  source 1..27: mol_type = other RNA
atcctgagcgagtccgtgatgaacctc

SEQ ID NO: 44801 - RNA, 27 nt, synthetic construct
  misc_feature 1..27: note = Endoplasmic reticulum metallopeptidase 1 (340-348)
  source 1..27: mol_type = other RNA
atcctgaccgacagcatccagcgcgcc

SEQ ID NO: 44802 - RNA, 27 nt, synthetic construct
  misc_feature 1..27: note = Ankyrin repeat domain-containing protein 17 (886-894)
  source 1..27: mol_type = other RNA
atcctgaccgagacccagcagggcctc

SEQ ID NO: 44803 - RNA, 27 nt, synthetic construct
  misc_feature 1..27: note = Notchless protein homolog 1 (240-248)
  source 1..27: mol_type = other RNA
atcctgaccggccacacccagagcgtg

SEQ ID NO: 44804 - RNA, 24 nt, synthetic construct
  misc_feature 1..24: note = InaD-like protein (50-57)
  source 1..24: mol_type = other RNA
atcctgaccctccagcagagcatc

SEQ ID NO: 44805 - RNA, 27 nt, synthetic construct
  misc_feature 1..27: note = Fibrous sheath-interacting protein 2 (3738-3746)
  source 1..27: mol_type = other RNA
atcctgaccaacaacctccagctgagc

SEQ ID NO: 44806 - RNA, 27 nt, synthetic construct
  misc_feature 1..27: note = Midasin (1057-1065)
  source 1..27: mol_type = other RNA
atcctgaccagctccgtgaagctcaac

SEQ ID NO: 44807 - RNA, 27 nt, synthetic construct
  misc_feature 1..27: note = Spatacsin (642-650)
  source 1..27: mol_type = other RNA
atcctgaccagctacatcaacgagctc

SEQ ID NO: 44808 - RNA, 27 nt, synthetic construct
  misc_feature 1..27: note = Eukaryotic translation initiation factor 2-alpha kinase 4 (377-385)
  source 1..27: mol_type = other RNA
atcctggtggagcacatcagcggcgtc

SEQ ID NO: 44809 - RNA, 27 nt, synthetic construct
  misc_feature 1..27: note = Plexin-B2 (432-440)
  source 1..27: mol_type = other RNA
atcctggtggagatcaacaagcgcgtc

SEQ ID NO: 44810 - RNA, 27 nt, synthetic construct
  misc_feature 1..27: note = Heat shock factor protein 4 (167-175)
  source 1..27: mol_type = other RNA
atcctgtggcgcgaggtggtcaccctc

SEQ ID NO: 44811 - RNA, 27 nt, synthetic construct
  misc_feature 1..27: note = 1-phosphatidylinositol 4,5-bisphosphate phosphodiesterase gamma-1 (109-117)
  source 1..27: mol_type = other RNA
atcctgtacggcatggagttccgcctc

SEQ ID NO: 44812 - RNA, 30 nt, synthetic construct
  misc_feature 1..30: note = 116 kDa U5 small nuclear ribonucleoprotein component (202-211)
  source 1..30: mol_type = other RNA
atcatggacacccccggccacgtgaacttc

SEQ ID NO: 44813 - RNA, 27 nt, synthetic construct
  misc_feature 1..27: note = Eukaryotic translation initiation factor 4 gamma 3 (915-923)
  source 1..27: mol_type = other RNA
atcatgcacgactgcgtggtcaagctg

SEQ ID NO: 44814 - RNA, 30 nt, synthetic construct
  misc_feature 1..30: note = Syntenin-1 (269-278)
  source 1..30: mol_type = other RNA
atcatgcccgccttcatcttcgagcacatc

SEQ ID NO: 44815 - RNA, 27 nt, synthetic construct
  misc_feature 1..27: note = CLIP-associating protein 1 (410-418)
  source 1..27: mol_type = other RNA
atcatgcccaccatcttcaacctgatc

SEQ ID NO: 44816 - RNA, 30 nt, synthetic construct
  misc_feature 1..30: note = Hexokinase-2 (118-127)
  source 1..30: mol_type = other RNA
atcatgcgcggcagcgggacccagctgttc

SEQ ID NO: 44817 - RNA, 36 nt, synthetic construct
  misc_feature 1..36: note = Protein ERGIC-53 (496-507)
  source 1..36: mol_type = other RNA
atcatgtaccgcagccagcaggaggccgccgcgaag

SEQ ID NO: 44818 - RNA, 66 nt, synthetic construct
  misc_feature 1..66: note = T-complex protein 1 subunit eta (413-434)
  source 1..66: mol_type = other RNA
atcaacgccctgaccgccgcgagcgaggccgcctgcctcatcgtgtccgtcgacgagaccatcaag

SEQ ID NO: 44819 - RNA, 36 nt, synthetic construct
  misc_feature 1..36: note = Vimentin (455-466)
  source 1..36: mol_type = other RNA
atcaacgagaccagccagcaccacgacgacctggag

SEQ ID NO: 44820 - RNA, 24 nt, synthetic construct
  misc_feature 1..24: note = DNA-dependent protein kinase catalytic subunit (866-873)
  source 1..24: mol_type = other RNA
atcaacaagaacctgctcaccgtg

SEQ ID NO: 44821 - RNA, 21 nt, synthetic construct
  misc_feature 1..21: note = Deoxynucleotidyltransferase terminal-interacting protein 2 (255-261)
  source 1..21: mol_type = other RNA
atcaacaagcccaacttctac

SEQ ID NO: 44822 - RNA, 33 nt, synthetic construct
  misc_feature 1..33: note = Pleckstrin homology domain-containing family H member 1 (922-932)
  source 1..33: mol_type = other RNA
atcaacgtgcccgtcgaggccgccagcgtggac

SEQ ID NO: 44823 - RNA, 24 nt, synthetic construct
  misc_feature 1..24: note = Sodium/potassium-transporting ATPase subunit alpha-1 (2-9)
  source 1..24: mol_type = other RNA
atccccgccgacctgcgcatcatc

SEQ ID NO: 44824 - RNA, 30 nt, synthetic construct
  misc_feature 1..30: note = Far upstream element-binding protein 1 (213-222)
  source 1..30: mol_type = other RNA
atccccgccagcaaggccggcctggtgatc

SEQ ID NO: 44825 - RNA, 30 nt, synthetic construct
  misc_feature 1..30: note = Collagen alpha-1(XV) chain (185-194)
  source 1..30: mol_type = other RNA
atccccttccagcgcagctcccaggccctg

SEQ ID NO: 44826 - RNA, 45 nt, synthetic construct
  misc_feature 1..45: note = Leucine-rich repeat-containing G-protein coupled receptor 6 (62-76)
  source 1..45: mol_type = other RNA
atccccggccaggccttcagcgggctgtactccctcaagatcctg

SEQ ID NO: 44827 - RNA, 27 nt, synthetic construct
  misc_feature 1..27: note = Low-density lipoprotein receptor-related protein 2 (601-609)
  source 1..27: mol_type = other RNA
atcccccacccgttcggcgtgagcctg

SEQ ID NO: 44828 - RNA, 24 nt, synthetic construct
  misc_feature 1..24: note = BCL-6 corepressor (730-737)
  source 1..24: mol_type = other RNA
atcccccacaccccgatcgagatc

SEQ ID NO: 44829 - RNA, 27 nt, synthetic construct
  misc_feature 1..27: note = Chondroitin sulfate proteoglycan 4 (108-116)
  source 1..27: mol_type = other RNA
atcccccacaccgtggtcctgaccgtg

SEQ ID NO: 44830 - RNA, 27 nt, synthetic construct
  misc_feature 1..27: note = C-syn protooncogene (266-274)
  source 1..27: mol_type = other RNA
atcccccgcgagagcctgcagctcatc

SEQ ID NO: 44831 - RNA, 27 nt, synthetic construct
  misc_feature 1..27: note = Interferon-induced transmembrane protein 10 (62-70)
  source 1..27: mol_type = other RNA
atcccccgcccgcccgccggcagcccc

SEQ ID NO: 44832 - RNA, 27 nt, synthetic construct
  misc_feature 1..27: note = Basement membrane-specific heparan sulfate proteoglycan core protein (447-455)
  source 1..27: mol_type = other RNA
atccccagccacccgcgcgtgaccgtc

SEQ ID NO: 44833 - RNA, 45 nt, synthetic construct
  misc_feature 1..45: note = E3 ubiquitin-protein ligase RNF13 (145-159)
  source 1..45: mol_type = other RNA
atccccagcgtgttcatcggcgagtccagcgccaactccctgaag

SEQ ID NO: 44834 - RNA, 27 nt, synthetic construct
  misc_feature 1..27: note = Sorbin and SH3 domain-containing protein 2 (262-270)
  source 1..27: mol_type = other RNA
atccccaccgccatccgcaccacggtg

SEQ ID NO: 44835 - RNA, 27 nt, synthetic construct
  misc_feature 1..27: note = Procollagen-lysine,2-oxoglutarate 5-dioxygenase 2 (34-42)
  source 1..27: mol_type = other RNA
atccccaccgacaagctgctcgtgatc

SEQ ID NO: 44836 - RNA, 27 nt, synthetic construct
  misc_feature 1..27: note = Rap1 GTPase-activating protein 1 (28-36)
  source 1..27: mol_type = other RNA
atcccctacccgagcgtgcacgaggtc

SEQ ID NO: 44837 - RNA, 27 nt, synthetic construct
  misc_feature 1..27: note = Spectrin beta chain, non-erythrocytic 1 (579-587)
  source 1..27: mol_type = other RNA
atccaggccgagcgcgtgcggggcgtc

SEQ ID NO: 44838 - RNA, 24 nt, synthetic construct
  misc_feature 1..24: note = N6-adenosine-methyltransferase 70 kDa subunit (8-15)
  source 1..24: mol_type = other RNA
atccaggcccacaagaagcagctg

SEQ ID NO: 44839 - RNA, 30 nt, synthetic construct
  misc_feature 1..30: note = Potassium/sodium hyperpolarization-activated cyclic nucleotide-gated channel 4 (778-787)
  source 1..30: mol_type = other RNA
atccaggcccccctgcaggccgcggccgcc

SEQ ID NO: 44840 - RNA, 27 nt, synthetic construct
  misc_feature 1..27: note = CCAAT/enhancer-binding protein zeta (255-263)
  source 1..27: mol_type = other RNA
atccaggacgacgccgtgcacaccctg

SEQ ID NO: 44841 - RNA, 42 nt, synthetic construct
  misc_feature 1..42: note = Beta-2-microglobulin (21-34)
  source 1..42: mol_type = other RNA
atccagcgcacccccaagatccaggtgtacagccggcacccg

SEQ ID NO: 44842 - RNA, 45 nt, synthetic construct
  misc_feature 1..45: note = Beta-2-microglobulin (21-35)
  source 1..45: mol_type = other RNA
atccagcgcacccccaagatccaggtgtacagccggcacccggcc

SEQ ID NO: 44843 - RNA, 51 nt, synthetic construct
  misc_feature 1..51: note = Beta-2-microglobulin (21-37)
  source 1..51: mol_type = other RNA
atccagcgcacccccaagatccaggtgtacagccggcacccggccgagaac

SEQ ID NO: 44844 - RNA, 54 nt, synthetic construct
  misc_feature 1..54: note = Beta-2-microglobulin (21-38)
  source 1..54: mol_type = other RNA
atccagcgcacccccaagatccaggtgtacagccggcacccggccgagaacggc

SEQ ID NO: 44845 - RNA, 57 nt, synthetic construct
  misc_feature 1..57: note = Beta-2-microglobulin (21-39)
  source 1..57: mol_type = other RNA
atccagcgcacccccaagatccaggtgtacagccggcacccggccgagaacggcaag

SEQ ID NO: 44846 - RNA, 60 nt, synthetic construct
  misc_feature 1..60: note = Beta-2-microglobulin (1-20)
  source 1..60: mol_type = other RNA
atccagcgcacccccaagatccaggtgtacagccggcacccggccgagaacggcaagtcc

SEQ ID NO: 44847 - RNA, 63 nt, synthetic construct
  misc_feature 1..63: note = Beta-2-microglobulin (1-21)
  source 1..63: mol_type = other RNA
atccagcgcacccccaagatccaggtgtacagccggcacccggccgagaacggcaagtccaac

SEQ ID NO: 44848 - RNA, 69 nt, synthetic construct
  misc_feature 1..69: note = Beta-2-microglobulin (21-43)
  source 1..69: mol_type = other RNA
atccagcgcacccccaagatccaggtgtacagccggcacccggccgagaacggcaagtccaacttcctg

SEQ ID NO: 44849 - RNA, 72 nt, synthetic construct
  misc_feature 1..72: note = Beta-2-microglobulin (21-44)
  source 1..72: mol_type = other RNA
atccagcgcacccccaagatccaggtgtacagccggcacccggccgagaacggcaagtccaacttcctgaac

SEQ ID NO: 44850 - RNA, 27 nt, synthetic construct
  misc_feature 1..27: note = Hemicentin-1 (876-884)
  source 1..27: mol_type = other RNA
atccagagcgagaccaccgtgacggtc

SEQ ID NO: 44851 - RNA, 33 nt, synthetic construct
  misc_feature 1..33: note = Glia-derived nexin (392-402)
  source 1..33: mol_type = other RNA
atccgccacaaccccaccggcgccgtgctgttc

SEQ ID NO: 44852 - RNA, 27 nt, synthetic construct
  misc_feature 1..27: note = Protein wntless homolog (302-310)
  source 1..27: mol_type = other RNA
atccgccagggcatcttctacgccatg

SEQ ID NO: 44853 - RNA, 21 nt, synthetic construct
  misc_feature 1..21: note = Synembryn-B (156-162)
  source 1..21: mol_type = other RNA
atccgcagccagctgcggtac

SEQ ID NO: 44854 - RNA, 27 nt, synthetic construct
  misc_feature 1..27: note = Clathrin heavy chain 1 (170-178)
  source 1..27: mol_type = other RNA
atcagcgcccagcagaaccgcgtggtc

SEQ ID NO: 44855 - RNA, 24 nt, synthetic construct
  misc_feature 1..24: note = HLA class I histocompatibility antigen, B-44 alpha chain (218-225)
  source 1..24: mol_type = other RNA
atcagcgaccacgaggtgaccctg

SEQ ID NO: 44856 - RNA, 27 nt, synthetic construct
  misc_feature 1..27: note = Integrin-alpha FG-GAP repeat-containing protein 2 (132-140)
  source 1..27: mol_type = other RNA
atcagcgacatcggcgggcacgcctac

SEQ ID NO: 44857 - RNA, 24 nt, synthetic construct
  misc_feature 1..24: note = Protein arginine N-methyltransferase 1 (112-119)
  source 1..24: mol_type = other RNA
atcagcgactacgccgtgaagatc

SEQ ID NO: 44858 - RNA, 27 nt, synthetic construct
  misc_feature 1..27: note = Membrane-associated transporter protein (237-245)
  source 1..27: mol_type = other RNA
atcagcgaggcccccctgaccgaggtg

SEQ ID NO: 44859 - RNA, 24 nt, synthetic construct
  misc_feature 1..24: note = 26S proteasome non-ATPase regulatory subunit 13 (64-71)
  source 1..24: mol_type = other RNA
atcagcgagttcgagcaccgcgtg

SEQ ID NO: 44860 - RNA, 21 nt, synthetic construct
  misc_feature 1..21: note = Cleft lip and palate transmembrane protein 1 (109-115)
  source 1..21: mol_type = other RNA
atcagcgagcacgagcacttc

SEQ ID NO: 44861 - RNA, 27 nt, synthetic construct
  misc_feature 1..27: note = Zinc finger protein ZFPM2 (861-869)
  source 1..27: mol_type = other RNA
atcagcttcaacaaggtggagaactac

SEQ ID NO: 44862 - RNA, 30 nt, synthetic construct
  misc_feature 1..30: note = Neprilysin (536-545)
  source 1..30: mol_type = other RNA
atcagcggcgccgccgtggtcaacgcgttc

SEQ ID NO: 44863 - RNA, 33 nt, synthetic construct
  misc_feature 1..33: note = Annexin A2 (214-224)
  source 1..33: mol_type = other RNA
atcagcatcatgaccgagcgctccgtgccccac

SEQ ID NO: 44864 - RNA, 27 nt, synthetic construct
  misc_feature 1..27: note = Integrin alpha-6 (516-524)
  source 1..27: mol_type = other RNA
atcagcatcgtgggcaccctggaggcc

SEQ ID NO: 44865 - RNA, 27 nt, synthetic construct
  misc_feature 1..27: note = Transcription factor SOX-10 (334-342)
  source 1..27: mol_type = other RNA
atcagcaagcccccgggcgtggccctg

SEQ ID NO: 44866 - RNA, 24 nt, synthetic construct
  misc_feature 1..24: note = Serine-protein kinase ATM (1999-2006)
  source 1..24: mol_type = other RNA
atcagcctgcaggacctcctgctg

SEQ ID NO: 44867 - RNA, 45 nt, synthetic construct
  misc_feature 1..45: note = Glia-derived nexin (263-277)
  source 1..45: mol_type = other RNA
atcagcatgctgatcgccctccccaccgagtccagcaccccgctg

SEQ ID NO: 44868 - RNA, 27 nt, synthetic construct
  misc_feature 1..27: note = Unconventional myosin-XVIIIa (62-70)
  source 1..27: mol_type = other RNA
atcagcaaccccatcccgatcaaggtg

SEQ ID NO: 44869 - RNA, 27 nt, synthetic construct
  misc_feature 1..27: note = Interferon regulatory factor 3 (68-76)
  source 1..27: mol_type = other RNA
atcagcaactcccaccccctgagcctc

SEQ ID NO: 44870 - RNA, 27 nt, synthetic construct
  misc_feature 1..27: note = Poly (ADP-ribose) polymerase 14 (310-318)
  source 1..27: mol_type = other RNA
atcagccccggccgctacttcctgctc

SEQ ID NO: 44871 - RNA, 48 nt, synthetic construct
  misc_feature 1..48: note = Disintegrin and metalloproteinase domain-containing protein 10 (189-204)
  source 1..48: mol_type = other RNA
atcagctcccacgtgaaggccatcgacaccatctaccagaccacggac

SEQ ID NO: 44872 - RNA, 30 nt, synthetic construct
  misc_feature 1..30: note Dolichyl-diphosphooligosaccharide-proteinosyltransferase subunit 2 (230-239)
  source 1..30: mol_type = other RNA
atcagcaccgaggtgggcatcaccaacgtc

SEQ ID NO: 44873 - RNA, 27 nt, synthetic construct
  misc_feature 1..27: note = Peroxisome biogenesis factor 1 (593-601)
  source 1..27: mol_type = other RNA
atcagcacccgcgagaagctggtgctc

SEQ ID NO: 44874 - RNA, 27 nt, synthetic construct
  misc_feature 1..27: note = Hemicentin-1 (2-10)
  source 1..27: mol_type = other RNA
atcagctgggaggtggtccacaccgtg

SEQ ID NO: 44875 - RNA, 27 nt, synthetic construct
  misc_feature 1..27: note = UDP-N-acetylhexosamine pyrophosphorylase (463-471)
  source 1..27: mol_type = other RNA
atcaccgccgacgtgaaccacaacctg

SEQ ID NO: 44876 - RNA, 33 nt, synthetic construct
  misc_feature 1..33: note = Endoplasmin (418-428)
  source 1..33: mol_type = other RNA
atcaccgacgacttccacgacatgatgcccaag

SEQ ID NO: 44877 - RNA, 27 nt, synthetic construct
  misc_feature 1..27: note = Maltase-glucoamylase (141-149)
  source 1..27: mol_type = other RNA
atcaccgacttcaacaacatccgctac

SEQ ID NO: 44878 - RNA, 21 nt, synthetic construct
  misc_feature 1..21: note = Hemicentin-1 (2935-2941)
  source 1..21: mol_type = other RNA
atcaccgacatcggccgctac

SEQ ID NO: 44879 - RNA, 24 nt, synthetic construct
  misc_feature 1..24: note = Ral GTPase-activating protein subunit beta (1463-1470)
  source 1..24: mol_type = other RNA
atcaccgacatcgtgaacaagtac

SEQ ID NO: 44880 - RNA, 24 nt, synthetic construct
  misc_feature 1..24: note = Myosin-9 (315-322)
  source 1..24: mol_type = other RNA
atcaccgacctggaggagcgcctc

SEQ ID NO: 44881 - RNA, 27 nt, synthetic construct
  misc_feature 1..27: note = Protein piccolo (883-891)
  source 1..27: mol_type = other RNA
atcaccgacctgcagaaggagttctac

SEQ ID NO: 44882 - RNA, 30 nt, synthetic construct
  misc_feature 1..30: note = Titin (15513-15522)
  source 1..30: mol_type = other RNA
atcaccggcctgaccgagaaccaggagtac

SEQ ID NO: 44883 - RNA, 27 nt, synthetic construct
  misc_feature 1..27: note = Leucine-rich repeat-containing protein 34 (306-314)
  source 1..27: mol_type = other RNA
atcacccacgacggcatggtgtacctg

SEQ ID NO: 44884 - RNA, 24 nt, synthetic construct
  misc_feature 1..24: note = Titin (14574-14581)
  source 1..24: mol_type = other RNA
atcaccaaggacagcgtgaccctg

SEQ ID NO: 44885 - RNA, 21 nt, synthetic construct
  misc_feature 1..21: note = Elongation factor 2 (165-171)
  source 1..21: mol_type = other RNA
atcaccaagggcgtgcagtac

SEQ ID NO: 44886 - RNA, 27 nt, synthetic construct
  misc_feature 1..27: note = CLIP-associating protein 1 (390-398)
  source 1..27: mol_type = other RNA
atcaccctgggccacctcagctccgtg

SEQ ID NO: 44887 - RNA, 27 nt, synthetic construct
  misc_feature 1..27: note = Armadillo repeat-containing X-linked protein 2 (498-506)
  source 1..27: mol_type = other RNA
atcaccaacgactaccagcacctgctc

SEQ ID NO: 44888 - RNA, 30 nt, synthetic construct
  misc_feature 1..30: note = Titin (16885-16894)
  source 1..30: mol_type = other RNA
atcaccaacctgacccagggcgaggagtac

SEQ ID NO: 44889 - RNA, 27 nt, synthetic construct
  misc_feature 1..27: note = Heat shock 70 kDa protein 1-like (299-307)
  source 1..27: mol_type = other RNA
atcacccgcgcccggttcgaggagctg

SEQ ID NO: 44890 - RNA, 60 nt, synthetic construct
  misc_feature 1..60: note = L-lactate dehydrogenase A chain (23-42)
  source 1..60: mol_type = other RNA
atcaccgtggtcggcgtgggggccgtgggcatggcctgcgcgatcagcatcctgatgaag

SEQ ID NO: 44891 - RNA, 60 nt, synthetic construct
  misc_feature 1..60: note = L-lactate dehydrogenase B chain (24-43)
  source 1..60: mol_type = other RNA
atcaccgtggtcggcgtggggcaggtgggcatggcctgcgccatcagcatcctggggaag

SEQ ID NO: 44892 - RNA, 27 nt, synthetic construct
  misc_feature 1..27: note = G protein-coupled receptor kinase 4 (6-14)
  source 1..27: mol_type = other RNA
atcgtggccaacagcctgctcctgaag

SEQ ID NO: 44893 - RNA, 27 nt, synthetic construct
  misc_feature 1..27: note = G protein-coupled receptor kinase 6 (6-14)
  source 1..27: mol_type = other RNA
atcgtggccaacaccgtcctgctcaag

SEQ ID NO: 44894 - RNA, 27 nt, synthetic construct
  misc_feature 1..27: note = T-cell surfaceoprotein CD8 beta chain (211-219)
  source 1..27: mol_type = other RNA
atcgtgtgcctgaagatcagcggcttc

SEQ ID NO: 44895 - RNA, 27 nt, synthetic construct
  misc_feature 1..27: note = Sorting nexin-13 (161-169)
  source 1..27: mol_type = other RNA
atcgtggacgacttcggcacccacctg

SEQ ID NO: 44896 - RNA, 27 nt, synthetic construct
  misc_feature 1..27: note = Tripartite motif-containing protein 2 (200-208)
  source 1..27: mol_type = other RNA
atcgtggacgacatccacagcaccttc

SEQ ID NO: 44897 - RNA, 27 nt, synthetic construct
  misc_feature 1..27: note = Fibronectin isoform 7 (519-527)
  source 1..27: mol_type = other RNA
atcgtggacgacatcacctacaacgtc

SEQ ID NO: 44898 - RNA, 27 nt, synthetic construct
  misc_feature 1..27: note = U3 small nucleolar ribonucleoprotein protein MPP10 (190-198)
  source 1..27: mol_type = other RNA
atcgtggacgacaagttcttcaagctg

SEQ ID NO: 44899 - RNA, 24 nt, synthetic construct
  misc_feature 1..24: note = Alpha-actinin-1 (115-122)
  source 1..24: mol_type = other RNA
atcgtggacggcaacgtcaagatg

SEQ ID NO: 44900 - RNA, 30 nt, synthetic construct
  misc_feature 1..30: note = Methylcrotonoyl-CoA carboxylase beta chain, mitochondrial (300-309)
  source 1..30: mol_type = other RNA
atcgtggacggcagccgcttcaccgagttc

SEQ ID NO: 44901 - RNA, 27 nt, synthetic construct
  misc_feature 1..27: note = Proteasome inhibitor PI31 subunit (209-217)
  source 1..27: mol_type = other RNA
atcgtggaccccctgcgcagcggcttc

SEQ ID NO: 44902 - RNA, 27 nt, synthetic construct
  misc_feature 1..27: note = Neutral amino acid transporter A (156-164)
  source 1..27: mol_type = other RNA
atcgtggaccgcaccaccacggtcgtg

SEQ ID NO: 44903 - RNA, 27 nt, synthetic construct
  misc_feature 1..27: note = HMG domain-containing protein 3 (1356-1364)
  source 1..27: mol_type = other RNA
atcgtggacagcaagcccaacggcgtc

SEQ ID NO: 44904 - RNA, 27 nt, synthetic construct
  misc_feature 1..27: note = Synemin (748-756)
  source 1..27: mol_type = other RNA
atcgtggaggagcccgtcagctacgtg

SEQ ID NO: 44905 - RNA, 33 nt, synthetic construct
  misc_feature 1..33: note = Glia-derived nexin (63-73)
  source 1..33: mol_type = other RNA
atcgtgatcagcccccacggcatcgcctccgtc

SEQ ID NO: 44906 - RNA, 36 nt, synthetic construct
  misc_feature 1..36: note = Sterol regulatory element-binding protein 2 (1129-1140)
  source 1..36: mol_type = other RNA
atcgtgaagctgggcgggggcaccgccatcgccgcg

SEQ ID NO: 44907 - RNA, 51 nt, synthetic construct
  misc_feature 1..51: note = Melanoma-associated antigen 4 (205-221)
  source 1..51: mol_type = other RNA
atcgtgctgggcaccatcgccatggagggggacagcgcctccgaggaggag

SEQ ID NO: 44908 - RNA, 27 nt, synthetic construct
  misc_feature 1..27: note = Elongator complex protein 4 (107-115)
  source 1..27: mol_type = other RNA
atcgtgaacggccacaccctgctcgtc

SEQ ID NO: 44909 - RNA, 30 nt, synthetic construct
  misc_feature 1..30: note = Rho guanine nucleotide exchange factor 2 (500-509)
  source 1..30: mol_type = other RNA
atcgtgcgcgacatcgccaaccaggagaag

SEQ ID NO: 44910 - RNA, 27 nt, synthetic construct
  misc_feature 1..27: note = Cytoplasmic dynein 1 heavy chain 1 (1043-1051)
  source 1..27: mol_type = other RNA
atcgtgagcgaggtcgagcagtacgtg

SEQ ID NO: 44911 - RNA, 42 nt, synthetic construct
  misc_feature 1..42: note = Glia-derived nexin (119-132)
  source 1..42: mol_type = other RNA
atcgtgaccgtcgccaacgccgtgttcgtgaagaacgcgagc

SEQ ID NO: 44912 - RNA, 30 nt, synthetic construct
  misc_feature 1..30: note = Neuropilin-2 (58-67)
  source 1..30: mol_type = other RNA
atcgtgtacgcccccgagccgaaccagaag

SEQ ID NO: 44913 - RNA, 27 nt, synthetic construct
  misc_feature 1..27: note = Mitochondrial calcium uniporter regulator 1 (3-11)
  source 1..27: mol_type = other RNA
atcgtgtacaaggacatggtcaccaag

SEQ ID NO: 44914 - RNA, 27 nt, synthetic construct
  misc_feature 1..27: note = Transmembrane emp24 domain-containing protein 5 (5-13)
  source 1..27: mol_type = other RNA
atctggctgcccttcccggtgctcctg

SEQ ID NO: 44915 - RNA, 27 nt, synthetic construct
  misc_feature 1..27: note = Unconventional myosin-Va (407-415)
  source 1..27: mol_type = other RNA
atctacgccaagctgttcaactggatc

SEQ ID NO: 44916 - RNA, 27 nt, synthetic construct
  misc_feature 1..27: note = Alpha-soluble NSF attachment protein (44-52)
  source 1..27: mol_type = other RNA
atctacgcccgcgccgcgaacatgttc

SEQ ID NO: 44917 - RNA, 27 nt, synthetic construct
  misc_feature 1..27: note = DNA polymerase delta subunit 2 (88-96)
  source 1..27: mol_type = other RNA
atctacgccacccgcctgatccagatg

SEQ ID NO: 44918 - RNA, 24 nt, synthetic construct
  misc_feature 1..24: note = 39S ribosomal protein L20, mitochondrial (107-114)
  source 1..24: mol_type = other RNA
atctacgagcccaagaccttcaag

SEQ ID NO: 44919 - RNA, 27 nt, synthetic construct
  misc_feature 1..27: note = V-type proton ATPase 116 kDa subunit a isoform 1 (560-568)
  source 1..27: mol_type = other RNA
atctacttcaagaagcccctgaacatc

SEQ ID NO: 44920 - RNA, 33 nt, synthetic construct
  misc_feature 1..33: note = Antizyme inhibitor 1 (258-268)
  source 1..33: mol_type = other RNA
atctacttccccgagggcagcggggtgaagatc

SEQ ID NO: 44921 - RNA, 30 nt, synthetic construct
  misc_feature 1..30: note = Protein disulfide-isomerase A3 (453-462)
  source 1..30: mol_type = other RNA
atctacttcagccccgccaacaagaagctg

SEQ ID NO: 44922 - RNA, 24 nt, synthetic construct
  misc_feature 1..24: note = Zinc finger protein 382 (116-123)
  source 1..24: mol_type = other RNA
atctacggcaagaccttcaccctg

SEQ ID NO: 44923 - RNA, 27 nt, synthetic construct
  misc_feature 1..27: note = Protein kinase C and casein kinase substrate in neurons protein 2 (266-274)
  source 1..27: mol_type = other RNA
atctaccacgacctggagcagagcatc

SEQ ID NO: 44924 - RNA, 27 nt, synthetic construct
  misc_feature 1..27: note = Ubiquitin-conjugating enzyme E2 N (75-83)
  source 1..27: mol_type = other RNA
atctaccaccccaacgtggacaagctg

SEQ ID NO: 44925 - RNA, 27 nt, synthetic construct
  misc_feature 1..27: note = Diacylglycerol kinase zeta (748-756)
  source 1..27: mol_type = other RNA
atctacatcctggaccccgagctcctg

SEQ ID NO: 44926 - RNA, 27 nt, synthetic construct
  misc_feature 1..27: note = Lysosomal protective protein (183-191)
  source 1..27: mol_type = other RNA
atctacatccccaccctggccgtgctc

SEQ ID NO: 44927 - RNA, 27 nt, synthetic construct
  misc_feature 1..27: note = Protein unc-119 homolog A (83-91)
  source 1..27: mol_type = other RNA
atctacaagatcgacttcgtgcgcttc

SEQ ID NO: 44928 - RNA, 30 nt, synthetic construct
  misc_feature 1..30: note = Alpha-2-macroglobulin (162-171)
  source 1..30: mol_type = other RNA
atctacaagcccggccagaccgtgaagttc

SEQ ID NO: 44929 - RNA, 27 nt, synthetic construct
  misc_feature 1..27: note = Tubby-related protein 4 (640-648)
  source 1..27: mol_type = other RNA
atctacctgcccgaggtgcgcaagatc

SEQ ID NO: 44930 - RNA, 27 nt, synthetic construct
  misc_feature 1..27: note = Alpha-adducin (165-173)
  source 1..27: mol_type = other RNA
atctacaaccacatcaccacccgcgtg

SEQ ID NO: 44931 - RNA, 27 nt, synthetic construct
  misc_feature 1..27: note = Sprouty-related, EVH1 domain-containing protein 1 (81-89)
  source 1..27: mol_type = other RNA
atctacaacaaggtgacccccaccttc

SEQ ID NO: 44932 - RNA, 27 nt, synthetic construct
  misc_feature 1..27: note = Serine-protein kinase ATM (1147-1155)
  source 1..27: mol_type = other RNA
atctacaaccgcaagagcgtgctgctc

SEQ ID NO: 44933 - RNA, 27 nt, synthetic construct
  misc_feature 1..27: note = Spermine synthase (46-54)
  source 1..27: mol_type = other RNA
atctacccccacggcctggtgctcctg

SEQ ID NO: 44934 - RNA, 27 nt, synthetic construct
  misc_feature 1..27: note = E3 ubiquitin-protein ligase RNF213 (3834-3842)
  source 1..27: mol_type = other RNA
atctacccccaggtgctgcacagcctc

SEQ ID NO: 44935 - RNA, 30 nt, synthetic construct
  misc_feature 1..30: note = Nuclear fragile X mental retardation-interacting protein 2 (473-482)
  source 1..30: mol_type = other RNA
atctaccccagcaacatgcagaccatgctg

SEQ ID NO: 44936 - RNA, 27 nt, synthetic construct
  misc_feature 1..27: note = Zinc finger protein castor homolog 1 (463-471)
  source 1..27: mol_type = other RNA
atctaccagaagtacatcgcccgcttc

SEQ ID NO: 44937 - RNA, 27 nt, synthetic construct
  misc_feature 1..27: note = Renin receptor (327-335)
  source 1..27: mol_type = other RNA
atctaccgcatgaccaaccagaagatc

SEQ ID NO: 44938 - RNA, 27 nt, synthetic construct
  misc_feature 1..27: note = Pericentriolar material 1 protein (1385-1393)
  source 1..27: mol_type = other RNA
atctacagcgaggtggccaccctgatc

SEQ ID NO: 44939 - RNA, 33 nt, synthetic construct
  misc_feature 1..33: note = Perilipin-2 (353-363)
  source 1..33: mol_type = other RNA
atctacagcgtgttccgcaacgccgcctccttc

SEQ ID NO: 44940 - RNA, 27 nt, synthetic construct
  misc_feature 1..27: note = Poly (ADP-ribose) polymerase 14 (1584-1592)
  source 1..27: mol_type = other RNA
atctacacccacggcaaccacagcctg

SEQ ID NO: 44941 - RNA, 27 nt, synthetic construct
  misc_feature 1..27: note = Transmembraneoprotein NMB (174-182)
  source 1..27: mol_type = other RNA
atctacgtgttccacaccctgggctgg

SEQ ID NO: 44942 - RNA, 27 nt, synthetic construct
  misc_feature 1..27: note = Protein-methionine sulfoxide oxidase MICAL3 (1990-1998)
  source 1..27: mol_type = other RNA
atctacgtgccccacgccctggccttc

SEQ ID NO: 44943 - RNA, 27 nt, synthetic construct
  misc_feature 1..27: note = Clathrin heavy chain 1 (1130-1138)
  source 1..27: mol_type = other RNA
aaggccgacgaccccagctcctacatg

SEQ ID NO: 44944 - RNA, 33 nt, synthetic construct
  misc_feature 1..33: note = L-dopachrome tautomerase (356-366)
  source 1..33: mol_type = other RNA
aaggccgacggcaccctggacagccaggtgatg

SEQ ID NO: 44945 - RNA, 27 nt, synthetic construct
  misc_feature 1..27: note = Activating signal cointegrator 1 complex subunit 2 (32-40)
  source 1..27: mol_type = other RNA
aaggccgaccgctacttcgtgctgtac

SEQ ID NO: 44946 - RNA, 27 nt, synthetic construct
  misc_feature 1..27: note = Lupus La protein (148-156)
  source 1..27: mol_type = other RNA
aaggccttcaagggcagcatcttcgtg

SEQ ID NO: 44947 - RNA, 27 nt, synthetic construct
  misc_feature 1..27: note = Neuronal PAS domain-containing protein 3 (509-517)
  source 1..27: mol_type = other RNA
aaggccggcgaggacgggttcggcgcc

SEQ ID NO: 44948 - RNA, 27 nt, synthetic construct
  misc_feature 1..27: note = Filamin-A (2252-2260)
  source 1..27: mol_type = other RNA
aaggccggcaacaacatgctgctcgtg

SEQ ID NO: 44949 - RNA, 27 nt, synthetic construct
  misc_feature 1..27: note = Alpha-soluble NSF attachment protein (180-188)
  source 1..27: mol_type = other RNA
aaggccatcgacatctacgagcaggtg

SEQ ID NO: 44950 - RNA, 27 nt, synthetic construct
  misc_feature 1..27: note = Phosphorylase b kinase regulatory subunit beta (81-89)
  source 1..27: mol_type = other RNA
aaggccaagatccaggacagcctgtac

SEQ ID NO: 44951 - RNA, 33 nt, synthetic construct
  misc_feature 1..33: note = Vacuolar protein sorting-associated protein 13A (1058-1068)
  source 1..33: mol_type = other RNA
aaggccctggtgggcggggccgtcggcgggctc

SEQ ID NO: 44952 - RNA, 33 nt, synthetic construct
  misc_feature 1..33: note = Zinc finger homeobox protein 3 (2172-2182)
  source 1..33: mol_type = other RNA
aaggccaacgaggtgctgggcctcgccgcgcag

SEQ ID NO: 44953 - RNA, 54 nt, synthetic construct
  misc_feature 1..54: note = Bifunctional glutamate/proline-tRNA ligase (778-795)
  source 1..54: mol_type = other RNA
aaggcccccaaggaggacgtggacgccgcggtcaagcagctgctcagcctgaag

SEQ ID NO: 44954 - RNA, 27 nt, synthetic construct
  misc_feature 1..27: note = Treacle protein (215-223)
  source 1..27: mol_type = other RNA
aaggccagcgagaagatcctgcaggtg

SEQ ID NO: 44955 - RNA, 30 nt, synthetic construct
  misc_feature 1..30: note = Cytoplasmic dynein 1 heavy chain 1 (1729-1738)
  source 1..30: mol_type = other RNA
aaggccaccagcatcgaccccaacacctac

SEQ ID NO: 44956 - RNA, 27 nt, synthetic construct
  misc_feature 1..27: note = Tubulin alpha-1A chain (171-179)
  source 1..27: mol_type = other RNA
aaggcctaccacgagcagctgagcgtg

SEQ ID NO: 44957 - RNA, 30 nt, synthetic construct
  misc_feature 1..30: note = UDP-N-acetylhexosamine pyrophosphorylase-like protein 1 (151-160)
  source 1..30: mol_type = other RNA
aaggcctaccccgaggagccggtgggcgtc

SEQ ID NO: 44958 - RNA, 75 nt, synthetic construct
  misc_feature 1..75: note = Beta-2-microglobulin (74-98)
  source 1..75: mol_type = other RNA
aaggacgagtacgcctgccgcgtgaaccacgtcaccctgagccagcccaagatcgtgaagtgggaccgggacatg

SEQ ID NO: 44959 - RNA, 45 nt, synthetic construct
  misc_feature 1..45: note = Glia-derived nexin (117-131)
  source 1..45: mol_type = other RNA
aaggacatcgtgaccgtcgccaacgccgtgttcgtgaagaacgcg

SEQ ID NO: 44960 - RNA, 48 nt, synthetic construct
  misc_feature 1..48: note = Glia-derived nexin (117-132)
  source 1..48: mol_type = other RNA
aaggacatcgtgaccgtcgccaacgccgtgttcgtgaagaacgcgagc

SEQ ID NO: 44961 - RNA, 27 nt, synthetic construct
  misc_feature 1..27: note = Serine-protein kinase ATM (129-137)
  source 1..27: mol_type = other RNA
aaggacagctccaacggcgccatctac

SEQ ID NO: 44962 - RNA, 27 nt, synthetic construct
  misc_feature 1..27: note = E3 ubiquitin-protein ligase RNF213 (4774-4782)
  source 1..27: mol_type = other RNA
aaggaggccgagctgcgcctcgtgaag

SEQ ID NO: 44963 - RNA, 27 nt, synthetic construct
  misc_feature 1..27: note = Neuron navigator 2 (1035-1043)
  source 1..27: mol_type = other RNA
aaggaggacagccgcccccacctgttc

SEQ ID NO: 44964 - RNA, 30 nt, synthetic construct
  misc_feature 1..30: note = Multidrug resistance-associated protein 7 (836-845)
  source 1..30: mol_type = other RNA
aaggagggcgccgtggccctgcacgtctac

SEQ ID NO: 44965 - RNA, 30 nt, synthetic construct
  misc_feature 1..30: note = Hemicentin-1 (4939-4948)
  source 1..30: mol_type = other RNA
aaggagatcggcgaggccgtgaacgggttc

SEQ ID NO: 44966 - RNA, 27 nt, synthetic construct
  misc_feature 1..27: note = Synemin (925-933)
  source 1..27: mol_type = other RNA
aaggagatcaagatcccccacgagttc

SEQ ID NO: 44967 - RNA, 30 nt, synthetic construct
  misc_feature 1..30: note = Annexin A1 (147-156)
  source 1..30: mol_type = other RNA
aaggagatccgcgacatcaaccgggtgtac

SEQ ID NO: 44968 - RNA, 27 nt, synthetic construct
  misc_feature 1..27: note = Probable global transcription activator SNF2L1 (774-782)
  source 1..27: mol_type = other RNA
aaggagaagctgctcacccagggcttc

SEQ ID NO: 44969 - RNA, 57 nt, synthetic construct
  misc_feature 1..57: note = Protein FAM208B (1764-1782)
  source 1..57: mol_type = other RNA
aaggagaacctgagcaaggagcccctcgcctccttcgtgagcgagtccttcgacacc

SEQ ID NO: 44970 - RNA, 27 nt, synthetic construct
  misc_feature 1..27: note = Cullin-4B (885-893)
  source 1..27: mol_type = other RNA
aaggagaaccccaaccagtacaactac

SEQ ID NO: 44971 - RNA, 69 nt, synthetic construct
  misc_feature 1..69: note = 60S ribosomal protein L18 (16-38)
  source 1..69: mol_type = other RNA
aaggagcccaagagccaggacatctacctgcgcctcctggtgaagctgtaccggttcctcgcccgccgg

SEQ ID NO: 44972 - RNA, 30 nt, synthetic construct
  misc_feature 1..30: note = Melanoma-associated antigen 10 (192-201)
  source 1..30: mol_type = other RNA
aaggaggtggaccccaccggccacagcttc

SEQ ID NO: 44973 - RNA, 30 nt, synthetic construct
  misc_feature 1..30: note = Melanoma-associated antigen 11 (251-260)
  source 1..30: mol_type = other RNA
aaggaggtggaccccaccagccactcctac

SEQ ID NO: 44974 - RNA, 30 nt, synthetic construct
  misc_feature 1..30: note = Melanoma-associated antigen 4 (168-177)
  source 1..30: mol_type = other RNA
aaggaggtggaccccaccagcaacacctac

SEQ ID NO: 44975 - RNA, 57 nt, synthetic construct
  misc_feature 1..57: note = ATP-dependent RNA helicase A (392-410)
  source 1..57: mol_type = other RNA
aagttcgagagcgagatcctggaggccatctcccagaacagcgtggtcatcatccgc

SEQ ID NO: 44976 - RNA, 30 nt, synthetic construct
  misc_feature 1..30: note = ATP synthase-coupling factor 6, mitochondrial (99-108)
  source 1..30: mol_type = other RNA
aagttcgaggtgatcgagaagccccaggcc

SEQ ID NO: 44977 - RNA, 42 nt, synthetic construct
  misc_feature 1..42: note = B-cell CLL/lymphoma 9 protein (45-58)
  source 1..42: mol_type = other RNA
aagttcagcaaccagggcaagcaggggggctccgccagccag

SEQ ID NO: 44978 - RNA, 27 nt, synthetic construct
  misc_feature 1..27: note = Collagen alpha-1(IV) chain (238-246)
  source 1..27: mol_type = other RNA
aagttcagcaccatgcccttcctgttc

SEQ ID NO: 44979 - RNA, 27 nt, synthetic construct
  misc_feature 1..27: note = Protein diaphanous homolog 2 (949-957)
  source 1..27: mol_type = other RNA
aagttcgtggagaagatgaccagcttc

SEQ ID NO: 44980 - RNA, 30 nt, synthetic construct
  misc_feature 1..30: note = V-type proton ATPase 116 kDa subunit a isoform 1 (813-822)
  source 1..30: mol_type = other RNA
aagttctacagcggcaccgggttcaagttc

SEQ ID NO: 44981 - RNA, 60 nt, synthetic construct
  misc_feature 1..60: note = Collagen alpha-2(I) chain (441-460)
  source 1..60: mol_type = other RNA
aagggcgagcccggggtggtcggcgccgtggggaccgccggcccgagcgggccctccggc

SEQ ID NO: 44982 - RNA, 48 nt, synthetic construct
  misc_feature 1..48: note = Calpain small subunit 1 (9-24)
  source 1..48: mol_type = other RNA
aagggcgggggcgggggcgggggcggcgggggcgggctgggcgggggc

SEQ ID NO: 44983 - RNA, 78 nt, synthetic construct
  misc_feature 1..78: note = HLA class I histocompatibility antigen, A-23 alpha chain (340-365)
  source 1..78: mol_type = other RNA
aagggcgggagctactcccaggccgccagctccgacagcgcgcagggctccgacgtgagcctgaccgcctgcaaggtc

SEQ ID NO: 44984 - RNA, 78 nt, synthetic construct
  misc_feature 1..78: note = HLA class I histocompatibility antigen, A-1 alpha chain (315-340)
  source 1..78: mol_type = other RNA
aagggcgggagctacacccaggccgcctccagcgactccgcgcagggcagcgacgtgtccctgaccgcctgcaaggtc

SEQ ID NO: 44985 - RNA, 114 nt, synthetic construct
  misc_feature 1..114: note = Cytochrome c oxidase subunit 7A2, mitochondrial (46-83)
  source 1..114: mol_type = other RNA
aagggcggggtggccgacgccctgctctaccgcgcgaccatgatcctgaccgtcggcgggacggcctacgccatctacgagctggccgtggccagcttccccaagaagcaggag

SEQ ID NO: 44986 - RNA, 30 nt, synthetic construct
  misc_feature 1..30: note = Nebulin (852-861)
  source 1..30: mol_type = other RNA
aagggcaagatgatcggggccctgagcatc

SEQ ID NO: 44987 - RNA, 30 nt, synthetic construct
  misc_feature 1..30: note = Fatty acid synthase (2391-2400)
  source 1..30: mol_type = other RNA
aagggcctggaggagcgcgtggccgccgcg

SEQ ID NO: 44988 - RNA, 27 nt, synthetic construct
  misc_feature 1..27: note = E3 ubiquitin-protein ligase HUWE1 (1718-1726)
  source 1..27: mol_type = other RNA
aagggcaacgacacccccctggccctc

SEQ ID NO: 44989 - RNA, 27 nt, synthetic construct
  misc_feature 1..27: note = Vigilin (314-322)
  source 1..27: mol_type = other RNA
aagggcaacagcctgcaggagatcctc

SEQ ID NO: 44990 - RNA, 24 nt, synthetic construct
  misc_feature 1..24: note = UDP-glucose:glycoprotein glucosyltransferase 1 (1055-1062)
  source 1..24: mol_type = other RNA
aagggccccatcgccaagttcctg

SEQ ID NO: 44991 - RNA, 27 nt, synthetic construct
  misc_feature 1..27: note = Serine/arginine-rich splicing factor 4 (23-31)
  source 1..27: mol_type = other RNA
aagggctacgggaagatcctggaggtg

SEQ ID NO: 44992 - RNA, 75 nt, synthetic construct
  misc_feature 1..75: note = Histidine triad nucleotide-binding protein 1 (58-82)
  source 1..75: mol_type = other RNA
aagcacatcagccagatctccgtggccgaggacgacgacgagagcctgctcggccacctgatgatcgtcgggaag

SEQ ID NO: 44993 - RNA, 24 nt, synthetic construct
  misc_feature 1..24: note = Trabeculin-alpha (4579-4586)
  source 1..24: mol_type = other RNA
aagcacaaggagttccagaagacc

SEQ ID NO: 44994 - RNA, 27 nt, synthetic construct
  misc_feature 1..27: note = Unconventional myosin-VIIa (1948-1956)
  source 1..27: mol_type = other RNA
aagatcgccgacaaggtgctgagcgtc

SEQ ID NO: 44995 - RNA, 21 nt, synthetic construct
  misc_feature 1..21: note = LIM domain transcription factor LMO4 (29-35)
  source 1..21: mol_type = other RNA
aagatcgccgaccgcttcctg

SEQ ID NO: 44996 - RNA, 30 nt, synthetic construct
  misc_feature 1..30: note = MICOS complex subunit MIC60 (45-54)
  source 1..30: mol_type = other RNA
aagatcgccggcgccgggctgctcttcgtg

SEQ ID NO: 44997 - RNA, 36 nt, synthetic construct
  misc_feature 1..36: note = Calcium-binding mitochondrial carrier protein SCaMC-2 (252-263)
  source 1..36: mol_type = other RNA
aagatcgcccccgagagcgccatcaagttcatggcg

SEQ ID NO: 44998 - RNA, 27 nt, synthetic construct
  misc_feature 1..27: note = Protein TASOR (673-681)
  source 1..27: mol_type = other RNA
aagatcgccagcaaccccctggagcgc

SEQ ID NO: 44999 - RNA, 27 nt, synthetic construct
  misc_feature 1..27: note = UV excision repair protein RAD23 homolog B (42-50)
  source 1..27: mol_type = other RNA
aagatcgacgagaagaacttcgtggtc

SEQ ID NO: 45000 - RNA, 27 nt, synthetic construct
  misc_feature 1..27: note = RNA-binding protein 5 (302-310)
  source 1..27: mol_type = other RNA
aagatcgacggcaagaccatcggggtg

SEQ ID NO: 45001 - RNA, 27 nt, synthetic construct
  misc_feature 1..27: note = 26S protease regulatory subunit 7 (156-164)
  source 1..27: mol_type = other RNA
aagatcgaccccaccgtgaccatgatg

SEQ ID NO: 45002 - RNA, 33 nt, synthetic construct
  misc_feature 1..33: note = 26S protease regulatory subunit 7 (156-166)
  source 1..33: mol_type = other RNA
aagatcgaccccaccgtgaccatgatgcaggtc

SEQ ID NO: 45003 - RNA, 27 nt, synthetic construct
  misc_feature 1..27: note = Thioredoxin reductase 1, cytoplasmic (299-307)
  source 1..27: mol_type = other RNA
aagatcggcctggagaccgtgggggtc

SEQ ID NO: 45004 - RNA, 30 nt, synthetic construct
  misc_feature 1..30: note = 1-phosphatidylinositol 4,5-bisphosphate phosphodiesterase gamma-1 (969-978)
  source 1..30: mol_type = other RNA
aagatcggcaccgagcgcgcctgctaccgg

SEQ ID NO: 45005 - RNA, 24 nt, synthetic construct
  misc_feature 1..24: note = Heat shock protein 105 kDa (711-718)
  source 1..24: mol_type = other RNA
aagatcggcacccccgtgaaggtc

SEQ ID NO: 45006 - RNA, 30 nt, synthetic construct
  misc_feature 1..30: note = Pleckstrin homology domain-containing family G member 3 (122-131)
  source 1..30: mol_type = other RNA
aagatcatcgacacccccggcctgctcaag

SEQ ID NO: 45007 - RNA, 27 nt, synthetic construct
  misc_feature 1..27: note = Unconventional myosin-Id (269-277)
  source 1..27: mol_type = other RNA
aagatcctggccgccatcctccacctg

SEQ ID NO: 45008 - RNA, 30 nt, synthetic construct
  misc_feature 1..30: note = Kinesin-like protein KIF1B (1496-1505)
  source 1..30: mol_type = other RNA
aagatcctggacaccagcgtggcctacgtc

SEQ ID NO: 45009 - RNA, 27 nt, synthetic construct
  misc_feature 1..27: note = 28S ribosomal protein S2, mitochondrial (61-69)
  source 1..27: mol_type = other RNA
aagatcctgaacgagcccctcaagcac

SEQ ID NO: 45010 - RNA, 33 nt, synthetic construct
  misc_feature 1..33: note = D-3-phosphoglycerate dehydrogenase (21-31)
  source 1..33: mol_type = other RNA
aagatcctgcaggacggcgggctccaggtggtc

SEQ ID NO: 45011 - RNA, 27 nt, synthetic construct
  misc_feature 1..27: note = Endothelial differentiation-related factor 1 (98-106)
  source 1..27: mol_type = other RNA
aagatcaacgagaagccccaggtgatc

SEQ ID NO: 45012 - RNA, 27 nt, synthetic construct
  misc_feature 1..27: note = Upstream stimulatory factor 2 (138-146)
  source 1..27: mol_type = other RNA
aagatcaacaactggatcgtgcagctg

SEQ ID NO: 45013 - RNA, 27 nt, synthetic construct
  misc_feature 1..27: note = Sodium/potassium/calcium exchanger 5 (219-227)
  source 1..27: mol_type = other RNA
aagatcaaccagtacatcatcaagaag

SEQ ID NO: 45014 - RNA, 27 nt, synthetic construct
  misc_feature 1..27: note = Protein sidekick-1 (309-317)
  source 1..27: mol_type = other RNA
aagatccagggcctgagctccctcacc

SEQ ID NO: 45015 - RNA, 27 nt, synthetic construct
  misc_feature 1..27: note = Keratinocyte-associated protein 2 (136-144)
  source 1..27: mol_type = other RNA
aagatcagctccaccctgtaccaggcc

SEQ ID NO: 45016 - RNA, 33 nt, synthetic construct
  misc_feature 1..33: note Dolichyl-diphosphooligosaccharide-proteinosyltransferase subunit 2 (368-378)
  source 1..33: mol_type = other RNA
aagatcagcaccgaggtgggcatcaccaacgtc

SEQ ID NO: 45017 - RNA, 33 nt, synthetic construct
  misc_feature 1..33: note = Melanoma-associated antigen 6 (220-230)
  source 1..33: mol_type = other RNA
aagatctgggaggagctgagcgtgctcgaggtc

SEQ ID NO: 45018 - RNA, 33 nt, synthetic construct
  misc_feature 1..33: note = Ras GTPase-activating-like protein IQGAP1 (94-104)
  source 1..33: mol_type = other RNA
aagatctacgaccgcgagcagacccggtacaag

SEQ ID NO: 45019 - RNA, 27 nt, synthetic construct
  misc_feature 1..27: note = NADH dehydrogenase (ubiquinone) 1 beta subcomplex subunit 5, mitochondrial (79-87)
  source 1..27: mol_type = other RNA
aagatctacgagcgcaccatggccgtg

SEQ ID NO: 45020 - RNA, 24 nt, synthetic construct
  misc_feature 1..24: note = Lariat debranching enzyme (72-79)
  source 1..24: mol_type = other RNA
aagaaggcccccgtgctgaccctc

SEQ ID NO: 45021 - RNA, 24 nt, synthetic construct
  misc_feature 1..24: note = Myc proto-oncogene protein (412-419)
  source 1..24: mol_type = other RNA
aagaaggccaccgcctacatcctg

SEQ ID NO: 45022 - RNA, 27 nt, synthetic construct
  misc_feature 1..27: note = Zinc phosphodiesterase ELAC protein 2 (366-374)
  source 1..27: mol_type = other RNA
aagaaggagggccccaccctgagcgtg

SEQ ID NO: 45023 - RNA, 48 nt, synthetic construct
  misc_feature 1..48: note = Serum albumin (437-452)
  source 1..48: mol_type = other RNA
aagaaggtgccccaggtcagcaccccgaccctggtggaggtgtcccgc

SEQ ID NO: 45024 - RNA, 27 nt, synthetic construct
  misc_feature 1..27: note = Nuclear mitotic apparatus protein 1 (1-9)
  source 1..27: mol_type = other RNA
aagctggccgacgacctcagcaccctg

SEQ ID NO: 45025 - RNA, 27 nt, synthetic construct
  misc_feature 1..27: note = SNW domain-containing protein 1 (28-36)
  source 1..27: mol_type = other RNA
aagctggccgaggccctctacatcgcg

SEQ ID NO: 45026 - RNA, 27 nt, synthetic construct
  misc_feature 1..27: note = Vesicle transport protein USE1 (171-179)
  source 1..27: mol_type = other RNA
aagctggccgaggagatgctcggcctg

SEQ ID NO: 45027 - RNA, 27 nt, synthetic construct
  misc_feature 1..27: note = SLIT-ROBO Rho GTPase-activating protein 2C (69-77)
  source 1..27: mol_type = other RNA
aagctggccgagcacttcctcgccaag

SEQ ID NO: 45028 - RNA, 27 nt, synthetic construct
  misc_feature 1..27: note = Plexin-A3 (55-63)
  source 1..27: mol_type = other RNA
aagctggcccccaacctcaccgagctg

SEQ ID NO: 45029 - RNA, 27 nt, synthetic construct
  misc_feature 1..27: note = Peroxisome biogenesis factor 1 (411-419)
  source 1..27: mol_type = other RNA
aagctggacgcccacgtggagcgcgtc

SEQ ID NO: 45030 - RNA, 27 nt, synthetic construct
  misc_feature 1..27: note = Probable helicase with zinc finger domain (944-952)
  source 1..27: mol_type = other RNA
aagctggacgacggcagcatcggggtg

SEQ ID NO: 45031 - RNA, 27 nt, synthetic construct
  misc_feature 1..27: note = Afadin (391-399)
  source 1..27: mol_type = other RNA
aagctggacgacaacagcatccagctc

SEQ ID NO: 45032 - RNA, 27 nt, synthetic construct
  misc_feature 1..27: note = E3 ubiquitin-protein ligase RNF139 (456-464)
  source 1..27: mol_type = other RNA
aagctggacgactacgtgtactacgtc

SEQ ID NO: 45033 - RNA, 27 nt, synthetic construct
  misc_feature 1..27: note = Transcriptional regulator ATRX (1499-1507)
  source 1..27: mol_type = other RNA
aagctggacttcagcaccgccctcgtg

SEQ ID NO: 45034 - RNA, 27 nt, synthetic construct
  misc_feature 1..27: note = Probable ATP-dependent RNA helicase DHX58 (177-185)
  source 1..27: mol_type = other RNA
aagctggacggcgccatcaaccacgtg

SEQ ID NO: 45035 - RNA, 27 nt, synthetic construct
  misc_feature 1..27: note = Serine/threonine-protein kinase Sgk3 (115-123)
  source 1..27: mol_type = other RNA
aagctggacggcaagttctacgccgtg

SEQ ID NO: 45036 - RNA, 27 nt, synthetic construct
  misc_feature 1..27: note = Inter-alpha-trypsin inhibitor heavy chain H5 (522-530)
  source 1..27: mol_type = other RNA
aagctggaccacctccacgtggaggtc

SEQ ID NO: 45037 - RNA, 27 nt, synthetic construct
  misc_feature 1..27: note = Kin of IRRE-like protein 1 (435-443)
  source 1..27: mol_type = other RNA
aagctggacatcaaggtggagaccgtc

SEQ ID NO: 45038 - RNA, 27 nt, synthetic construct
  misc_feature 1..27: note = Tectonic-1 (198-206)
  source 1..27: mol_type = other RNA
aagctggacatccccaccgccgccaag

SEQ ID NO: 45039 - RNA, 30 nt, synthetic construct
  misc_feature 1..30: note = Lactoperoxidase (313-322)
  source 1..30: mol_type = other RNA
aagctggacctcagcccctgggcctccgtg

SEQ ID NO: 45040 - RNA, 27 nt, synthetic construct
  misc_feature 1..27: note = WD repeat-containing protein 26 (306-314)
  source 1..27: mol_type = other RNA
aagctggacaacaacctcgacagcgtg

SEQ ID NO: 45041 - RNA, 27 nt, synthetic construct
  misc_feature 1..27: note = Cytoplasmic dynein 1 heavy chain 1 (828-836)
  source 1..27: mol_type = other RNA
aagctggacccctacgtgcagcgcctc

SEQ ID NO: 45042 - RNA, 27 nt, synthetic construct
  misc_feature 1..27: note = cAMP-dependent protein kinase type I-beta regulatory subunit (349-357)
  source 1..27: mol_type = other RNA
aagctggaccgcccccggttcgagcgc

SEQ ID NO: 45043 - RNA, 33 nt, synthetic construct
  misc_feature 1..33: note = SH3 domain-binding protein 4 (249-259)
  source 1..33: mol_type = other RNA
aagctggacagctccggcggggccgtgcagctc

SEQ ID NO: 45044 - RNA, 27 nt, synthetic construct
  misc_feature 1..27: note = Eukaryotic initiation factor 4A-II (260-268)
  source 1..27: mol_type = other RNA
aagctggacaccctctgcgacctgtac

SEQ ID NO: 45045 - RNA, 30 nt, synthetic construct
  misc_feature 1..30: note = Eukaryotic translation initiation factor 3 subunit I (213-222)
  source 1..30: mol_type = other RNA
aagctgttcgacagcaccaccctcgagcac

SEQ ID NO: 45046 - RNA, 27 nt, synthetic construct
  misc_feature 1..27: note = Centromere protein R (110-118)
  source 1..27: mol_type = other RNA
aagctgttcgagaagagcaccggcctc

SEQ ID NO: 45047 - RNA, 27 nt, synthetic construct
  misc_feature 1..27: note = Protein kinase C delta type (581-589)
  source 1..27: mol_type = other RNA
aagctgttcgagcgcgagcccaccaag

SEQ ID NO: 45048 - RNA, 27 nt, synthetic construct
  misc_feature 1..27: note = Nucleolar complex protein 2 homolog (168-176)
  source 1..27: mol_type = other RNA
aagctgttccacgaggtggtccaggcc

SEQ ID NO: 45049 - RNA, 30 nt, synthetic construct
  misc_feature 1..30: note = Unconventional myosin-Va (410-419)
  source 1..30: mol_type = other RNA
aagctgttcaactggatcgtggacaacgtc

SEQ ID NO: 45050 - RNA, 27 nt, synthetic construct
  misc_feature 1..27: note = Constitutive coactivator of PPAR-gamma-like protein 1 (805-813)
  source 1..27: mol_type = other RNA
aagctgttccagagcaagctcctgaag

SEQ ID NO: 45051 - RNA, 30 nt, synthetic construct
  misc_feature 1..30: note = GTPase-activating protein and VPS9 domain-containing protein 1 (42-51)
  source 1..30: mol_type = other RNA
aagctgttcagcgagggcctcttctccgcc

SEQ ID NO: 45052 - RNA, 24 nt, synthetic construct
  misc_feature 1..24: note = Pleckstrin homology domain-containing family M member 2 (338-345)
  source 1..24: mol_type = other RNA
aagctgggcgacatcagcgccgtg

SEQ ID NO: 45053 - RNA, 27 nt, synthetic construct
  misc_feature 1..27: note = Atrial natriuretic peptide receptor 2 (148-156)
  source 1..27: mol_type = other RNA
aagctgggcgagttcgtggtcaccctc

SEQ ID NO: 45054 - RNA, 24 nt, synthetic construct
  misc_feature 1..24: note = Destrin (151-158)
  source 1..24: mol_type = other RNA
aagctgggcgggagcctcatcgtg

SEQ ID NO: 45055 - RNA, 24 nt, synthetic construct
  misc_feature 1..24: note = Transformation/transcription domain-associated protein (1157-1164)
  source 1..24: mol_type = other RNA
aagctgggcggggtggtcagcatc

SEQ ID NO: 45056 - RNA, 24 nt, synthetic construct
  misc_feature 1..24: note = Laminin subunit beta-2 (55-62)
  source 1..24: mol_type = other RNA
aagctgggcatcgtgcaggggatc

SEQ ID NO: 45057 - RNA, 27 nt, synthetic construct
  misc_feature 1..27: note = TRPM8 channel-associated factor 1 (281-289)
  source 1..27: mol_type = other RNA
aagctgggccccttcctcctgaacgcc

SEQ ID NO: 45058 - RNA, 36 nt, synthetic construct
  misc_feature 1..36: note = Transcription and mRNA export factor ENY2 (19-30)
  source 1..36: mol_type = other RNA
aagctgatcgagaccggcgagcgcgagcggctcaag

SEQ ID NO: 45059 - RNA, 27 nt, synthetic construct
  misc_feature 1..27: note = Ral GTPase-activating protein subunit beta (194-202)
  source 1..27: mol_type = other RNA
aagctgatcggcgtgctcttcgaggtc

SEQ ID NO: 45060 - RNA, 27 nt, synthetic construct
  misc_feature 1..27: note = Protein FAM179B (1545-1553)
  source 1..27: mol_type = other RNA
aagctgatcaccggcctcctgaacgcc

SEQ ID NO: 45061 - RNA, 36 nt, synthetic construct
  misc_feature 1..36: note = L-lactate dehydrogenase B chain (308-319)
  source 1..36: mol_type = other RNA
aagctgaaggacgacgaggtggcccagctcaagaag

SEQ ID NO: 45062 - RNA, 30 nt, synthetic construct
  misc_feature 1..30: note = Formin-1 (1119-1128)
  source 1..30: mol_type = other RNA
aagctgctcgacaagcccgagcagttcctg

SEQ ID NO: 45063 - RNA, 33 nt, synthetic construct
  misc_feature 1..33: note = Formin-1 (1119-1129)
  source 1..33: mol_type = other RNA
aagctgctcgacaagcccgagcagttcctgcac

SEQ ID NO: 45064 - RNA, 30 nt, synthetic construct
  misc_feature 1..30: note = Inositol 1,4,5-trisphosphate receptor type 2 (474-483)
  source 1..30: mol_type = other RNA
aagctgctcgaggacctgatcttcttcgtg

SEQ ID NO: 45065 - RNA, 30 nt, synthetic construct
  misc_feature 1..30: note = AP-3 complex delta subunit (1019-1028)
  source 1..30: mol_type = other RNA
aagctgctcgagagcggcgacctgtccatg

SEQ ID NO: 45066 - RNA, 33 nt, synthetic construct
  misc_feature 1..33: note = Catenin beta-1 (158-168)
  source 1..33: mol_type = other RNA
aagctgctcaacgacgaggaccaggtggtcgtg

SEQ ID NO: 45067 - RNA, 27 nt, synthetic construct
  misc_feature 1..27: note = Laminin subunit gamma-1 (646-654)
  source 1..27: mol_type = other RNA
aagctgctcaacaacctgaccagcatc

SEQ ID NO: 45068 - RNA, 30 nt, synthetic construct
  misc_feature 1..30: note = Laminin subunit gamma-1 (646-655)
  source 1..30: mol_type = other RNA
aagctgctcaacaacctgaccagcatcaag

SEQ ID NO: 45069 - RNA, 30 nt, synthetic construct
  misc_feature 1..30: note = Dedicator of cytokinesis protein 5 (404-413)
  source 1..30: mol_type = other RNA
aagctgctccccggcgacctgacccaggtg

SEQ ID NO: 45070 - RNA, 30 nt, synthetic construct
  misc_feature 1..30: note = Myosin-10 (1002-1011)
  source 1..30: mol_type = other RNA
aagctgatggaggaccgcatcgccgagtgc

SEQ ID NO: 45071 - RNA, 27 nt, synthetic construct
  misc_feature 1..27: note = Heat shock protein HSP 90-beta (491-499)
  source 1..27: mol_type = other RNA
aagctgatgaaggagatcctcgacaag

SEQ ID NO: 45072 - RNA, 27 nt, synthetic construct
  misc_feature 1..27: note = Nuclear envelope integral membrane protein 1 (123-131)
  source 1..27: mol_type = other RNA
aagctgaacgacacctacgtgaacgtc

SEQ ID NO: 45073 - RNA, 27 nt, synthetic construct
  misc_feature 1..27: note = Zinc finger protein ZIC 1 (48-56)
  source 1..27: mol_type = other RNA
aagctgaaccccagctcccacgagctc

SEQ ID NO: 45074 - RNA, 27 nt, synthetic construct
  misc_feature 1..27: note = Lysine-specific histone demethylase 1A (609-617)
  source 1..27: mol_type = other RNA
aagctgaacaccgccgtgcgccaggtc

SEQ ID NO: 45075 - RNA, 24 nt, synthetic construct
  misc_feature 1..24: note = Probable ATP-dependent RNA helicase DDX60-like (1106-1113)
  source 1..24: mol_type = other RNA
aagctgcccgccatcttcttcctc

SEQ ID NO: 45076 - RNA, 27 nt, synthetic construct
  misc_feature 1..27: note = Probable ATP-dependent RNA helicase DDX60-like (1106-1114)
  source 1..27: mol_type = other RNA
aagctgcccgccatcttcttcctcttc

SEQ ID NO: 45077 - RNA, 24 nt, synthetic construct
  misc_feature 1..24: note = Probable ATP-dependent RNA helicase DDX60 (1126-1133)
  source 1..24: mol_type = other RNA
aagctgcccgccctcttcttcctg

SEQ ID NO: 45078 - RNA, 27 nt, synthetic construct
  misc_feature 1..27: note = Probable ATP-dependent RNA helicase DDX60 (1126-1134)
  source 1..27: mol_type = other RNA
aagctgcccgccctcttcttcctgttc

SEQ ID NO: 45079 - RNA, 30 nt, synthetic construct
  misc_feature 1..30: note = Nuclear receptor coactivator 7 (189-198)
  source 1..30: mol_type = other RNA
aagctgcccgacgccgacctcgcccgcaag

SEQ ID NO: 45080 - RNA, 27 nt, synthetic construct
  misc_feature 1..27: note Dolichyl-diphosphooligosaccharide-proteinosyltransferase 48 kDa subunit (380-388)
  source 1..27: mol_type = other RNA
aagctgcccgacgtgtacggcgtcttc

SEQ ID NO: 45081 - RNA, 27 nt, synthetic construct
  misc_feature 1..27: note = Neuropathy target esterase (713-721)
  source 1..27: mol_type = other RNA
aagctgcccgagggcaccctcgggcac

SEQ ID NO: 45082 - RNA, 27 nt, synthetic construct
  misc_feature 1..27: note = von Willebrand factor A domain-containing protein 9 (368-376)
  source 1..27: mol_type = other RNA
aagctgcccgagaagacccagaccttc

SEQ ID NO: 45083 - RNA, 27 nt, synthetic construct
  misc_feature 1..27: note = Puratrophin-1 (608-616)
  source 1..27: mol_type = other RNA
aagctgcccccggtgggcagcaccgcc

SEQ ID NO: 45084 - RNA, 27 nt, synthetic construct
  misc_feature 1..27: note = MAU2 chromatid cohesion factor homolog (108-116)
  source 1..27: mol_type = other RNA
aagctgcaggaggtgcaccccctcctg

SEQ ID NO: 45085 - RNA, 27 nt, synthetic construct
  misc_feature 1..27: note = Myosin-10 (1284-1292)
  source 1..27: mol_type = other RNA
aagctgcagaacgagctcgacaacgtg

SEQ ID NO: 45086 - RNA, 27 nt, synthetic construct
  misc_feature 1..27: note = Unconventional myosin-If (409-417)
  source 1..27: mol_type = other RNA
aagctgcagcagatcttcatcgagctc

SEQ ID NO: 45087 - RNA, 33 nt, synthetic construct
  misc_feature 1..33: note = High affinity cAMP-specific and IBMX-insensitive 3',5'-cyclic phosphodiesterase 8B (264-274)
  source 1..33: mol_type = other RNA
aagctgcgcgcctgcaacagcgtgttcaccgcc

SEQ ID NO: 45088 - RNA, 27 nt, synthetic construct
  misc_feature 1..27: note = Laminin subunit beta-2 (210-218)
  source 1..27: mol_type = other RNA
aagctgagcgcccacacccacaccctc

SEQ ID NO: 45089 - RNA, 30 nt, synthetic construct
  misc_feature 1..30: note = Nischarin (1228-1237)
  source 1..30: mol_type = other RNA
aagctgagcgacctccagtccgtgaacgtc

SEQ ID NO: 45090 - RNA, 27 nt, synthetic construct
  misc_feature 1..27: note = Threonine synthase-like 2 (359-367)
  source 1..27: mol_type = other RNA
aagctgagcgaggccgtgacctccgtc

SEQ ID NO: 45091 - RNA, 27 nt, synthetic construct
  misc_feature 1..27: note = Rho GTPase-activating protein 7 (720-728)
  source 1..27: mol_type = other RNA
aagctgagcgagaccttcctccagatc

SEQ ID NO: 45092 - RNA, 24 nt, synthetic construct
  misc_feature 1..24: note = Myristoylated alanine-rich C-kinase substrate (165-172)
  source 1..24: mol_type = other RNA
aagctgagcggcttctccttcaag

SEQ ID NO: 45093 - RNA, 27 nt, synthetic construct
  misc_feature 1..27: note = Kinesin-1 heavy chain (222-230)
  source 1..27: mol_type = other RNA
aagctgagcggcaagctctacctggtg

SEQ ID NO: 45094 - RNA, 30 nt, synthetic construct
  misc_feature 1..30: note = Cathepsin D (348-357)
  source 1..30: mol_type = other RNA
aagctgagccccgaggactacaccctcaag

SEQ ID NO: 45095 - RNA, 27 nt, synthetic construct
  misc_feature 1..27: note = 26S proteasome non-ATPase regulatory subunit 4 (83-91)
  source 1..27: mol_type = other RNA
aagctgaccgccttcgtgaacaccctc

SEQ ID NO: 45096 - RNA, 27 nt, synthetic construct
  misc_feature 1..27: note = Kinesin-like protein KIF13A (701-709)
  source 1..27: mol_type = other RNA
aagctgaccgactaccaggtgaccctc

SEQ ID NO: 45097 - RNA, 27 nt, synthetic construct
  misc_feature 1..27: note = Cyclin-dependent kinase 2 (24-32)
  source 1..27: mol_type = other RNA
aagctgaccggcgaggtggtcgccctc

SEQ ID NO: 45098 - RNA, 27 nt, synthetic construct
  misc_feature 1..27: note = E3 ubiquitin-protein ligase UBR2 (543-551)
  source 1..27: mol_type = other RNA
aagctgacccacgtgatcagcatgatg

SEQ ID NO: 45099 - RNA, 27 nt, synthetic construct
  misc_feature 1..27: note = AP-1 complex subunit beta-1 (901-909)
  source 1..27: mol_type = other RNA
aagctgaccaacggcatctgggtgctc

SEQ ID NO: 45100 - RNA, 27 nt, synthetic construct
  misc_feature 1..27: note = Copine-3 (110-118)
  source 1..27: mol_type = other RNA
aagctgacccgccccctcgtgatgaag

SEQ ID NO: 45101 - RNA, 27 nt, synthetic construct
  misc_feature 1..27: note = Rab3 GTPase-activating protein non-catalytic subunit (337-345)
  source 1..27: mol_type = other RNA
aagctgaccagcgccctcttcaacgcc

SEQ ID NO: 45102 - RNA, 27 nt, synthetic construct
  misc_feature 1..27: note = Endothelin B receptor (175-183)
  source 1..27: mol_type = other RNA
aagctggtgcccttcatccagaaggcc

SEQ ID NO: 45103 - RNA, 27 nt, synthetic construct
  misc_feature 1..27: note = Platelet-activating factor acetylhydrolase IB subunit alpha (53-61)
  source 1..27: mol_type = other RNA
aagctgtgggacttccagggcttcgag

SEQ ID NO: 45104 - RNA, 27 nt, synthetic construct
  misc_feature 1..27: note = Interleukin-24 (68-76)
  source 1..27: mol_type = other RNA
aagctgtgggaggccttctgggccgtg

SEQ ID NO: 45105 - RNA, 27 nt, synthetic construct
  misc_feature 1..27: note = Coatomer subunit beta' (771-779)
  source 1..27: mol_type = other RNA
aagctgtggcgcgagaacctcagcaag

SEQ ID NO: 45106 - RNA, 27 nt, synthetic construct
  misc_feature 1..27: note = Cullin-9 (1503-1511)
  source 1..27: mol_type = other RNA
aagctgtacgagcacctccagcgcgcc

SEQ ID NO: 45107 - RNA, 27 nt, synthetic construct
  misc_feature 1..27: note = Phosphatidylinositol 4,5-bisphosphate 3-kinase catalytic subunit beta isoform (191-199)
  source 1..27: mol_type = other RNA
aagctgtacggcgggaagctcatcgtg

SEQ ID NO: 45108 - RNA, 33 nt, synthetic construct
  misc_feature 1..33: note = Protein FAM3C (30-40)
  source 1..33: mol_type = other RNA
aagatggacgccagcctgggcaacctcttcgcc

SEQ ID NO: 45109 - RNA, 30 nt, synthetic construct
  misc_feature 1..30: note = Dihydropyrimidinase-related protein 2 (338-347)
  source 1..30: mol_type = other RNA
aagatggacgagaaccagttcgtggccgtc

SEQ ID NO: 45110 - RNA, 36 nt, synthetic construct
  misc_feature 1..36: note = Splicing factor, arginine/serine-rich 19 (1112-1123)
  source 1..36: mol_type = other RNA
aagatggaggaggccaacctggccagccgcgcgaag

SEQ ID NO: 45111 - RNA, 36 nt, synthetic construct
  misc_feature 1..36: note = Leucine-tRNA ligase, cytoplasmic (497-508)
  source 1..36: mol_type = other RNA
aagatgatcgacgccggcgacgccctgatctacatg

SEQ ID NO: 45112 - RNA, 33 nt, synthetic construct
  misc_feature 1..33: note = LisH domain-containing protein ARMC9 (259-269)
  source 1..33: mol_type = other RNA
aagatgatcacccccgagtacctgcagagcgtg

SEQ ID NO: 45113 - RNA, 30 nt, synthetic construct
  misc_feature 1..30: note = Neuron navigator 1 (1349-1358)
  source 1..30: mol_type = other RNA
aagatgctggacgaggccgtgttccaggtc

SEQ ID NO: 45114 - RNA, 27 nt, synthetic construct
  misc_feature 1..27: note = Eukaryotic translation initiation factor 3 subunit L (267-275)
  source 1..27: mol_type = other RNA
aagatgctgggctacttcagcctcgtg

SEQ ID NO: 45115 - RNA, 27 nt, synthetic construct
  misc_feature 1..27: note = KDEL motif-containing protein 1 (7-15)
  source 1..27: mol_type = other RNA
aagatgcccgacgtggagctgttcgtc

SEQ ID NO: 45116 - RNA, 27 nt, synthetic construct
  misc_feature 1..27: note = Ceramide synthase 1 (98-106)
  source 1..27: mol_type = other RNA
aagatgcccgagagcgcctggaagttc

SEQ ID NO: 45117 - RNA, 39 nt, synthetic construct
  misc_feature 1..39: note = Amyloid-like protein 2 (688-700)
  source 1..39: mol_type = other RNA
aagatgcagaaccacggctacgagaaccccacctacaag

SEQ ID NO: 45118 - RNA, 39 nt, synthetic construct
  misc_feature 1..39: note = Gamma-secretase C-terminal fragment 59 (641-653)
  source 1..39: mol_type = other RNA
aagatgcagcagaacggctacgagaaccccacctacaag

SEQ ID NO: 45119 - RNA, 33 nt, synthetic construct
  misc_feature 1..33: note = E3 ubiquitin-protein ligase UBR4 (905-915)
  source 1..33: mol_type = other RNA
aagatggtggacggcgtcggggtgtgcaccgtg

SEQ ID NO: 45120 - RNA, 27 nt, synthetic construct
  misc_feature 1..27: note = Polypyrimidine tract-binding protein 2 (415-423)
  source 1..27: mol_type = other RNA
aagatgtacggcaagatcatccgcgtg

SEQ ID NO: 45121 - RNA, 30 nt, synthetic construct
  misc_feature 1..30: note = Protein diaphanous homolog 2 (637-646)
  source 1..30: mol_type = other RNA
aagatgtacaagcccgaggtgagcatgaag

SEQ ID NO: 45122 - RNA, 27 nt, synthetic construct
  misc_feature 1..27: note = Nuclear pore complex protein Nup93 (510-518)
  source 1..27: mol_type = other RNA
aagaacgccgacaaggtgctggagctc

SEQ ID NO: 45123 - RNA, 27 nt, synthetic construct
  misc_feature 1..27: note = 5'-nucleotidase domain-containing protein 1 (159-167)
  source 1..27: mol_type = other RNA
aagaacgccggcaagatcctgctcctg

SEQ ID NO: 45124 - RNA, 27 nt, synthetic construct
  misc_feature 1..27: note = 60S ribosomal protein L13 (174-182)
  source 1..27: mol_type = other RNA
aagaacttcaaggccttcgccagcctg

SEQ ID NO: 45125 - RNA, 27 nt, synthetic construct
  misc_feature 1..27: note = Centrosome-associated protein 350 (625-633)
  source 1..27: mol_type = other RNA
aagaacaagcgcctgcaggagctctac

SEQ ID NO: 45126 - RNA, 27 nt, synthetic construct
  misc_feature 1..27: note = Aldehyde dehydrogenase family 1 member A3 (446-454)
  source 1..27: mol_type = other RNA
aagaacctggacaaggccctcaagctg

SEQ ID NO: 45127 - RNA, 27 nt, synthetic construct
  misc_feature 1..27: note = Junction plakoglobin (278-286)
  source 1..27: mol_type = other RNA
aagaacaaccccaagttcctggccatc

SEQ ID NO: 45128 - RNA, 27 nt, synthetic construct
  misc_feature 1..27: note = COX assembly mitochondrial protein homolog (43-51)
  source 1..27: mol_type = other RNA
aagaacagcggcgtgctgatggtcgtg

SEQ ID NO: 45129 - RNA, 27 nt, synthetic construct
  misc_feature 1..27: note = Cytosolic acyl coenzyme A thioester hydrolase (126-134)
  source 1..27: mol_type = other RNA
aagaacgtggacaaggtcctggaggtg

SEQ ID NO: 45130 - RNA, 27 nt, synthetic construct
  misc_feature 1..27: note = Synaptic vesicle membrane protein VAT-1 homolog (374-382)
  source 1..27: mol_type = other RNA
aagaacgtgggcaaggtcctgctcgtg

SEQ ID NO: 45131 - RNA, 27 nt, synthetic construct
  misc_feature 1..27: note = DnaJ homolog subfamily A member 4 (79-87)
  source 1..27: mol_type = other RNA
aagaacgtggtccaccagctgagcgtg

SEQ ID NO: 45132 - RNA, 36 nt, synthetic construct
  misc_feature 1..36: note = Triosephosphate isomerase (156-167)
  source 1..36: mol_type = other RNA
aagcccgagttcgtggacatcatcaacgccaagcag

SEQ ID NO: 45133 - RNA, 27 nt, synthetic construct
  misc_feature 1..27: note = Rho GTPase-activating protein 7 (369-377)
  source 1..27: mol_type = other RNA
aagcccggcaccttcccgaaggccctg

SEQ ID NO: 45134 - RNA, 27 nt, synthetic construct
  misc_feature 1..27: note = Anion exchange protein 3 (360-368)
  source 1..27: mol_type = other RNA
aagccccacgtggccagcctgtccttc

SEQ ID NO: 45135 - RNA, 21 nt, synthetic construct
  misc_feature 1..21: note = Kelch repeat and BTB domain-containing protein 6 (284-290)
  source 1..21: mol_type = other RNA
aagcccatcgtgaagaagtac

SEQ ID NO: 45136 - RNA, 27 nt, synthetic construct
  misc_feature 1..27: note = Protein quaking (6-14)
  source 1..27: mol_type = other RNA
aagcccaagccgacccccgactacctg

SEQ ID NO: 45137 - RNA, 27 nt, synthetic construct
  misc_feature 1..27: note = Sulfate transporter (548-556)
  source 1..27: mol_type = other RNA
aagcccaagagctccctgctcggcctg

SEQ ID NO: 45138 - RNA, 27 nt, synthetic construct
  misc_feature 1..27: note = Adenylate cyclase type 1 (422-430)
  source 1..27: mol_type = other RNA
aagcccaacagctccctggtggtcctc

SEQ ID NO: 45139 - RNA, 21 nt, synthetic construct
  misc_feature 1..21: note = Serine/threonine-protein kinase tousled-like 1 (483-489)
  source 1..21: mol_type = other RNA
aagcccccgatcatccactac

SEQ ID NO: 45140 - RNA, 54 nt, synthetic construct
  misc_feature 1..54: note = NEDD4 family-interacting protein 1 (63-80)
  source 1..54: mol_type = other RNA
aagcccccgagctacaacgtggccaccaccctgccctcctacgacgaggccgag

SEQ ID NO: 45141 - RNA, 27 nt, synthetic construct
  misc_feature 1..27: note = Plexin-D1 (92-100)
  source 1..27: mol_type = other RNA
aagccccgcaacctgaacgtgagcttc

SEQ ID NO: 45142 - RNA, 33 nt, synthetic construct
  misc_feature 1..33: note = Collagen alpha-1(XV) chain (98-108)
  source 1..33: mol_type = other RNA
aagcccagctccacccgcggcggggtgctgttc

SEQ ID NO: 45143 - RNA, 63 nt, synthetic construct
  misc_feature 1..63: note = Nuclear pore complex protein Nup214 (1252-1272)
  source 1..63: mol_type = other RNA
aagcccagctacgaggccatcccggagtccagccccccctccggcatcaccagcgcctccaac

SEQ ID NO: 45144 - RNA, 27 nt, synthetic construct
  misc_feature 1..27: note = Phosphatidylinositol-binding clathrin assembly protein (465-473)
  source 1..27: mol_type = other RNA
aagcccaccgtggccagccagaaccag

SEQ ID NO: 45145 - RNA, 27 nt, synthetic construct
  misc_feature 1..27: note = Lysyl oxidase homolog 3 (52-60)
  source 1..27: mol_type = other RNA
aagccctacgagggccgcgtggagatc

SEQ ID NO: 45146 - RNA, 27 nt, synthetic construct
  misc_feature 1..27: note = Nuclear factor of activated T-cells, cytoplasmic 2 (50-58)
  source 1..27: mol_type = other RNA
aagccctacagcccgctggcctccctc

SEQ ID NO: 45147 - RNA, 27 nt, synthetic construct
  misc_feature 1..27: note = Procollagen galactosyltransferase 1 (274-282)
  source 1..27: mol_type = other RNA
aagcaggccgaggtgcagatgtacgtc

SEQ ID NO: 45148 - RNA, 30 nt, synthetic construct
  misc_feature 1..30: note = Syntaxin-binding protein 6 (78-87)
  source 1..30: mol_type = other RNA
aagcagttcgagggcagcacctccttcgtg

SEQ ID NO: 45149 - RNA, 30 nt, synthetic construct
  misc_feature 1..30: note = Dystonin (5209-5218)
  source 1..30: mol_type = other RNA
aagcagaaggagaccatcaaggccttcctg

SEQ ID NO: 45150 - RNA, 27 nt, synthetic construct
  misc_feature 1..27: note = EAW49110.1 (48-56)
  source 1..27: mol_type = other RNA
aagcagctggaggacggccgcagcctc

SEQ ID NO: 45151 - RNA, 27 nt, synthetic construct
  misc_feature 1..27: note = E3 ubiquitin-protein ligase RNF130 (159-167)
  source 1..27: mol_type = other RNA
aagcagaacgacgtggtccgcatcctg

SEQ ID NO: 45152 - RNA, 27 nt, synthetic construct
  misc_feature 1..27: note = Putative signal peptidase complex catalytic subunit SEC11B (91-99)
  source 1..27: mol_type = other RNA
aagcagaacggccacatcaagttcctg

SEQ ID NO: 45153 - RNA, 27 nt, synthetic construct
  misc_feature 1..27: note = Unconventional myosin-IXa (65-73)
  source 1..27: mol_type = other RNA
aagcagcccgaggagtaccactacctg

SEQ ID NO: 45154 - RNA, 27 nt, synthetic construct
  misc_feature 1..27: note = Rho guanine nucleotide exchange factor 2 (208-216)
  source 1..27: mol_type = other RNA
aagcagcaggacgtgatctacgagctg

SEQ ID NO: 45155 - RNA, 48 nt, synthetic construct
  misc_feature 1..48: note = Heat shock 70 kDa protein 4 (754-769)
  source 1..48: mol_type = other RNA
aagcagagcctgaccatggaccccgtggtcaagtccaaggagatcgag

SEQ ID NO: 45156 - RNA, 30 nt, synthetic construct
  misc_feature 1..30: note = Serum albumin (549-558)
  source 1..30: mol_type = other RNA
aagcagaccgccctggtggagctcgtcaag

SEQ ID NO: 45157 - RNA, 30 nt, synthetic construct
  misc_feature 1..30: note = Tyrosine-protein kinase Fer (613-622)
  source 1..30: mol_type = other RNA
aagcagtacgaccaccccaacatcgtgaag

SEQ ID NO: 45158 - RNA, 27 nt, synthetic construct
  misc_feature 1..27: note = Transmembrane emp24 domain-containing protein 3 (83-91)
  source 1..27: mol_type = other RNA
aagcagtacgacagcttcacctaccgc

SEQ ID NO: 45159 - RNA, 36 nt, synthetic construct
  misc_feature 1..36: note = Protein Niban (482-493)
  source 1..36: mol_type = other RNA
aagcagtacgactacgacagctccaccatccgcaag

SEQ ID NO: 45160 - RNA, 39 nt, synthetic construct
  misc_feature 1..39: note = Protein Niban (482-494)
  source 1..39: mol_type = other RNA
aagcagtacgactacgacagctccaccatccgcaagaag

SEQ ID NO: 45161 - RNA, 27 nt, synthetic construct
  misc_feature 1..27: note = Phosphatidylinositol 3,4,5-trisphosphate-dependent Rac exchanger 1 protein (1094-1102)
  source 1..27: mol_type = other RNA
aagcagtacgtgacccagatcaaccgc

SEQ ID NO: 45162 - RNA, 27 nt, synthetic construct
  misc_feature 1..27: note = Unconventional myosin-Ib (37-45)
  source 1..27: mol_type = other RNA
aagcgcttcgaccacagcgagatctac

SEQ ID NO: 45163 - RNA, 27 nt, synthetic construct
  misc_feature 1..27: note = Serine/threonine-protein kinase 10 (596-604)
  source 1..27: mol_type = other RNA
aagcgcttcgagcaggagatcaacgcc

SEQ ID NO: 45164 - RNA, 24 nt, synthetic construct
  misc_feature 1..24: note = 60S ribosomal protein L10a (47-54)
  source 1..24: mol_type = other RNA
aagcgcttcagcggcaccgtgcgg

SEQ ID NO: 45165 - RNA, 27 nt, synthetic construct
  misc_feature 1..27: note = Copine-1 (190-198)
  source 1..27: mol_type = other RNA
aagcgcttcagcgtgcccgtccagcac

SEQ ID NO: 45166 - RNA, 30 nt, synthetic construct
  misc_feature 1..30: note = MAP/microtubule affinity-regulating kinase 3 (731-740)
  source 1..30: mol_type = other RNA
aagcgcatcagcggcacctccatcgccttc

SEQ ID NO: 45167 - RNA, 27 nt, synthetic construct
  misc_feature 1..27: note = Intraflagellar transport protein 81 homolog (264-272)
  source 1..27: mol_type = other RNA
aagcgcctggaggaggagatcaagttc

SEQ ID NO: 45168 - RNA, 30 nt, synthetic construct
  misc_feature 1..30: note = ATP-dependent RNA helicase A (30-39)
  source 1..30: mol_type = other RNA
aagcgcctgggctacatccaccggaacttc

SEQ ID NO: 45169 - RNA, 27 nt, synthetic construct
  misc_feature 1..27: note = Maltase-glucoamylase (110-118)
  source 1..27: mol_type = other RNA
aagcgcctgcccagcccgtccctcttc

SEQ ID NO: 45170 - RNA, 27 nt, synthetic construct
  misc_feature 1..27: note = Serum albumin (468-476)
  source 1..27: mol_type = other RNA
aagcgcatgccctgcgccgaggactac

SEQ ID NO: 45171 - RNA, 27 nt, synthetic construct
  misc_feature 1..27: note = Gamma-interferon-inducible protein 16 (202-210)
  source 1..27: mol_type = other RNA
aagcgccccgtgatcgtcaaggtgctg

SEQ ID NO: 45172 - RNA, 27 nt, synthetic construct
  misc_feature 1..27: note = Band 4.1-like protein 2 (451-459)
  source 1..27: mol_type = other RNA
aagcgcagcaacttctacatcaaggtg

SEQ ID NO: 45173 - RNA, 42 nt, synthetic construct
  misc_feature 1..42: note = Glyceraldehyde-3-phosphate dehydrogenase (117-130)
  source 1..42: mol_type = other RNA
aagcgcgtgatcatcagcgccccctccgccgacgcgccgatg

SEQ ID NO: 45174 - RNA, 27 nt, synthetic construct
  misc_feature 1..27: note = Glia-derived nexin (299-307)
  source 1..27: mol_type = other RNA
aagcgcgtgcaggtcatcctgcccaag

SEQ ID NO: 45175 - RNA, 27 nt, synthetic construct
  misc_feature 1..27: note = Growth/differentiation factor 15 (45-53)
  source 1..27: mol_type = other RNA
aagcgctacgaggacctgctcacccgg

SEQ ID NO: 45176 - RNA, 27 nt, synthetic construct
  misc_feature 1..27: note = Insulin-like growth factor 1 receptor (927-935)
  source 1..27: mol_type = other RNA
aagcgctacgagaacttcatccacctg

SEQ ID NO: 45177 - RNA, 27 nt, synthetic construct
  misc_feature 1..27: note = Protein zyg-11 homolog B (68-76)
  source 1..27: mol_type = other RNA
aagcgctacagcgagcgggccttcttc

SEQ ID NO: 45178 - RNA, 30 nt, synthetic construct
  misc_feature 1..30: note = Glycerol-3-phosphate acyltransferase 4 (407-416)
  source 1..30: mol_type = other RNA
aagagcgccatcgcccgccagggcgggctg

SEQ ID NO: 45179 - RNA, 27 nt, synthetic construct
  misc_feature 1..27: note = Centrosomal protein C10orf90 (33-41)
  source 1..27: mol_type = other RNA
aagagcgacttcaccaaggagaccctg

SEQ ID NO: 45180 - RNA, 30 nt, synthetic construct
  misc_feature 1..30: note = Transcriptional protein SWT1 (56-65)
  source 1..30: mol_type = other RNA
aagagcgaccacaccgacgtgctgtactac

SEQ ID NO: 45181 - RNA, 27 nt, synthetic construct
  misc_feature 1..27: note = 78 kDa glucose-regulated protein (335-343)
  source 1..27: mol_type = other RNA
aagagcgacatcgacgagatcgtgctg

SEQ ID NO: 45182 - RNA, 27 nt, synthetic construct
  misc_feature 1..27: note = Copine-9 (167-175)
  source 1..27: mol_type = other RNA
aagagcgaccccttcctggtgttctac

SEQ ID NO: 45183 - RNA, 27 nt, synthetic construct
  misc_feature 1..27: note = Pre-mRNA-processing factor 40 homolog A (164-172)
  source 1..27: mol_type = other RNA
aagagcgactccggcaagccctactac

SEQ ID NO: 45184 - RNA, 48 nt, synthetic construct
  misc_feature 1..48: note = Serine/threonine-protein phosphatase 2A 65 kDa regulatory subunit A alpha isoform (202-217)
  source 1..48: mol_type = other RNA
aagagcgagatcatccccatgttctccaacctggccagcgacgagcag

SEQ ID NO: 45185 - RNA, 27 nt, synthetic construct
  misc_feature 1..27: note = Minor histocompatibility antigen H13 (234-242)
  source 1..27: mol_type = other RNA
aagagcttcgaggcccccatcaagctg

SEQ ID NO: 45186 - RNA, 54 nt, synthetic construct
  misc_feature 1..54: note = Protein HEG homolog 1 (147-164)
  source 1..54: mol_type = other RNA
aagagcggcgacttccagatgtccccctacgccgagtacccgaagaacccccgc

SEQ ID NO: 45187 - RNA, 27 nt, synthetic construct
  misc_feature 1..27: note = Protein LAP2 (860-868)
  source 1..27: mol_type = other RNA
aagagcggccccgtggggtccgtcgtg

SEQ ID NO: 45188 - RNA, 24 nt, synthetic construct
  misc_feature 1..24: note = Vacuolar protein sorting-associated protein 16 homolog (82-89)
  source 1..24: mol_type = other RNA
aagagcggccccgtggtctccctg

SEQ ID NO: 45189 - RNA, 27 nt, synthetic construct
  misc_feature 1..27: note = Alpha-catulin (373-381)
  source 1..27: mol_type = other RNA
aagagcatcgccgaggagctggagctc

SEQ ID NO: 45190 - RNA, 27 nt, synthetic construct
  misc_feature 1..27: note = 60S ribosomal protein L35 (52-60)
  source 1..27: mol_type = other RNA
aagagcatcgcccgcgtgctgaccgtc

SEQ ID NO: 45191 - RNA, 27 nt, synthetic construct
  misc_feature 1..27: note = Syntenin-1 (130-138)
  source 1..27: mol_type = other RNA
aagagcatcgacaacggcatcttcgtg

SEQ ID NO: 45192 - RNA, 27 nt, synthetic construct
  misc_feature 1..27: note = Protein disulfide-isomerase TMX3 (71-79)
  source 1..27: mol_type = other RNA
aagagcatcggctcccccgtgaaggtc

SEQ ID NO: 45193 - RNA, 27 nt, synthetic construct
  misc_feature 1..27: note = Protein RTF2 homolog (83-91)
  source 1..27: mol_type = other RNA
aagagcatcaagaacgtgaccgagctg

SEQ ID NO: 45194 - RNA, 27 nt, synthetic construct
  misc_feature 1..27: note = Adenylosuccinate synthetase isozyme 2 (203-211)
  source 1..27: mol_type = other RNA
aagagcatctaccccaccctggagatc

SEQ ID NO: 45195 - RNA, 27 nt, synthetic construct
  misc_feature 1..27: note = Selenoprotein N (53-61)
  source 1..27: mol_type = other RNA
aagagcaaggacggcttcctgggggtg

SEQ ID NO: 45196 - RNA, 30 nt, synthetic construct
  misc_feature 1..30: note = Nucleolar pre-ribosomal-associated protein 1 (429-438)
  source 1..30: mol_type = other RNA
aagagcctgaccaagctcctgatcatgaag

SEQ ID NO: 45197 - RNA, 27 nt, synthetic construct
  misc_feature 1..27: note = Astrotactin-2 (499-507)
  source 1..27: mol_type = other RNA
aagagcatgcccttcatcacctacctg

SEQ ID NO: 45198 - RNA, 33 nt, synthetic construct
  misc_feature 1..33: note = Transmembrane protein 98 (144-154)
  source 1..33: mol_type = other RNA
aagagcatgtaccccccgctggaccccaagctc

SEQ ID NO: 45199 - RNA, 27 nt, synthetic construct
  misc_feature 1..27: note = CD44 antigen (303-311)
  source 1..27: mol_type = other RNA
aagagccaggagatggtgcacctggtc

SEQ ID NO: 45200 - RNA, 27 nt, synthetic construct
  misc_feature 1..27: note = Targeting protein for Xklp2 (686-694)
  source 1..27: mol_type = other RNA
aagagctccgaccagcccctgaccgtg

SEQ ID NO: 45201 - RNA, 27 nt, synthetic construct
  misc_feature 1..27: note = Chromodomain-helicase-DNA-binding protein 1 (88-96)
  source 1..27: mol_type = other RNA
aagagctcccccagcatcctggccgtg

SEQ ID NO: 45202 - RNA, 27 nt, synthetic construct
  misc_feature 1..27: note = Leucine-tRNA ligase, cytoplasmic (28-36)
  source 1..27: mol_type = other RNA
aagagcaccggcaacttcctgaccctc

SEQ ID NO: 45203 - RNA, 27 nt, synthetic construct
  misc_feature 1..27: note = 116 kDa U5 small nuclear ribonucleoprotein component (182-190)
  source 1..27: mol_type = other RNA
aagagcacccccgtgaccgtcgtgctg

SEQ ID NO: 45204 - RNA, 27 nt, synthetic construct
  misc_feature 1..27: note = Lysosome-associated membraneoprotein 2 (402-410)
  source 1..27: mol_type = other RNA
aagagctacgccggctaccagaccctg

SEQ ID NO: 45205 - RNA, 27 nt, synthetic construct
  misc_feature 1..27: note = 2',3'-cyclic-nucleotide 3'-phosphodiesterase (256-264)
  source 1..27: mol_type = other RNA
aagagctactccaaggccttcaccctg

SEQ ID NO: 45206 - RNA, 27 nt, synthetic construct
  misc_feature 1..27: note = Zinc finger protein ZIC 2 (401-409)
  source 1..27: mol_type = other RNA
aagagctacacccacccctccagcctg

SEQ ID NO: 45207 - RNA, 24 nt, synthetic construct
  misc_feature 1..24: note = Ubiquitin carboxyl-terminal hydrolase 8 (34-41)
  source 1..24: mol_type = other RNA
aagagctacgtgcactccgccctg

SEQ ID NO: 45208 - RNA, 27 nt, synthetic construct
  misc_feature 1..27: note = Peptidyl-prolyl cis-trans isomerase A (31-39)
  source 1..27: mol_type = other RNA
aagaccgccgagaacttccgcgccctg

SEQ ID NO: 45209 - RNA, 27 nt, synthetic construct
  misc_feature 1..27: note = Endothelin B receptor (359-367)
  source 1..27: mol_type = other RNA
aagaccgccaaggactggtggctgttc

SEQ ID NO: 45210 - RNA, 27 nt, synthetic construct
  misc_feature 1..27: note = V-type proton ATPase 116 kDa subunit a isoform 4 (360-368)
  source 1..27: mol_type = other RNA
aagaccgcccccccgaccttcaaccgc

SEQ ID NO: 45211 - RNA, 27 nt, synthetic construct
  misc_feature 1..27: note = RAC-gamma serine/threonine-protein kinase (32-40)
  source 1..27: mol_type = other RNA
aagaccgacggcagcttcatcgggtac

SEQ ID NO: 45212 - RNA, 33 nt, synthetic construct
  misc_feature 1..33: note = Growth/differentiation factor 15 (274-284)
  source 1..33: mol_type = other RNA
aagaccgacaccggcgtgagcctgcagacgtac

SEQ ID NO: 45213 - RNA, 51 nt, synthetic construct
  misc_feature 1..51: note = Myeloid-derived growth factor (132-148)
  source 1..51: mol_type = other RNA
aagaccgaggagttcgaggtgaccaagacggccgtcgcccaccgccccggc

SEQ ID NO: 45214 - RNA, 27 nt, synthetic construct
  misc_feature 1..27: note = Myosin-IIIb (442-450)
  source 1..27: mol_type = other RNA
aagaccgagagcgcccacctgatcgtg

SEQ ID NO: 45215 - RNA, 27 nt, synthetic construct
  misc_feature 1..27: note = Cullin-4B (327-335)
  source 1..27: mol_type = other RNA
aagaccatcgacggcatcctgctcctg

SEQ ID NO: 45216 - RNA, 27 nt, synthetic construct
  misc_feature 1..27: note = UPF0769 protein C21orf59 (114-122)
  source 1..27: mol_type = other RNA
aagaccatcgaggaggccaaggccatc

SEQ ID NO: 45217 - RNA, 30 nt, synthetic construct
  misc_feature 1..30: note = Protein FAM184A (180-189)
  source 1..30: mol_type = other RNA
aagaccatcggcaagctgaagaccgagctc

SEQ ID NO: 45218 - RNA, 27 nt, synthetic construct
  misc_feature 1..27: note = Probable C-mannosyltransferase DPY19L4 (129-137)
  source 1..27: mol_type = other RNA
aagaccatcaacgccgtgcagcagatg

SEQ ID NO: 45219 - RNA, 27 nt, synthetic construct
  misc_feature 1..27: note = Transcription factor SOX-8 (16-24)
  source 1..27: mol_type = other RNA
aagaccctgggcaagctctggcgcctg

SEQ ID NO: 45220 - RNA, 24 nt, synthetic construct
  misc_feature 1..24: note = Transcription factor Dp-2 (49-56)
  source 1..24: mol_type = other RNA
aagaccctgggccccatcaacgtg

SEQ ID NO: 45221 - RNA, 60 nt, synthetic construct
  misc_feature 1..60: note = Uncharacterized protein KIAA1109 (4603-4622)
  source 1..60: mol_type = other RNA
aagaccatgaccagcaacctggagaagtccagccaggagcagctcctggacgccgcccac

SEQ ID NO: 45222 - RNA, 27 nt, synthetic construct
  misc_feature 1..27: note = Catenin beta-1 (288-296)
  source 1..27: mol_type = other RNA
aagaccaacgtgaagttcctggccatc

SEQ ID NO: 45223 - RNA, 24 nt, synthetic construct
  misc_feature 1..24: note = RNA-binding protein Raly (143-150)
  source 1..24: mol_type = other RNA
aagaccaacgtgcccgtcaagctg

SEQ ID NO: 45224 - RNA, 27 nt, synthetic construct
  misc_feature 1..27: note = THO complex subunit 2 (892-900)
  source 1..27: mol_type = other RNA
aagacccccaacttcagcaccctgctc

SEQ ID NO: 45225 - RNA, 27 nt, synthetic construct
  misc_feature 1..27: note = HEAT repeat-containing protein 2 (446-454)
  source 1..27: mol_type = other RNA
aagacccccagcgcctccggcctgctc

SEQ ID NO: 45226 - RNA, 27 nt, synthetic construct
  misc_feature 1..27: note = Eukaryotic translation initiation factor 4 gamma 1 (717-725)
  source 1..27: mol_type = other RNA
aagacccaggacctgttccgccgggtg

SEQ ID NO: 45227 - RNA, 27 nt, synthetic construct
  misc_feature 1..27: note = Angiomotin-like protein 1 (332-340)
  source 1..27: mol_type = other RNA
aagacccaggagcacggcctgttctac

SEQ ID NO: 45228 - RNA, 27 nt, synthetic construct
  misc_feature 1..27: note = Cohesin subunit SA-2 (965-973)
  source 1..27: mol_type = other RNA
aagacccgcgaggccatcgccatgctg

SEQ ID NO: 45229 - RNA, 24 nt, synthetic construct
  misc_feature 1..24: note = Golgin subfamily B member 1 (382-389)
  source 1..24: mol_type = other RNA
aagaccagccacatcctgtccctc

SEQ ID NO: 45230 - RNA, 24 nt, synthetic construct
  misc_feature 1..24: note = ATP-binding cassette sub-family F member 3 (144-151)
  source 1..24: mol_type = other RNA
aagaccagcaaccccctggtgctc

SEQ ID NO: 45231 - RNA, 27 nt, synthetic construct
  misc_feature 1..27: note = Hemicentin-1 (971-979)
  source 1..27: mol_type = other RNA
aagaccaccagcgtggtcgtgcacgtg

SEQ ID NO: 45232 - RNA, 27 nt, synthetic construct
  misc_feature 1..27: note = Vigilin (294-302)
  source 1..27: mol_type = other RNA
aagaccaccacgatcgccgtggaggtc

SEQ ID NO: 45233 - RNA, 24 nt, synthetic construct
  misc_feature 1..24: note = Rab3 GTPase-activating protein non-catalytic subunit (1174-1181)
  source 1..24: mol_type = other RNA
aagaccgtgaagcccctgagcctc

SEQ ID NO: 45234 - RNA, 27 nt, synthetic construct
  misc_feature 1..27: note = 40S ribosomal protein S11 (136-144)
  source 1..27: mol_type = other RNA
aagaccgtgcgcttcaacgtcctgaag

SEQ ID NO: 45235 - RNA, 30 nt, synthetic construct
  misc_feature 1..30: note = Melanocyte protein PMEL (154-163)
  source 1..30: mol_type = other RNA
aagacctgggaccaggtgcccttcagcgtc

SEQ ID NO: 45236 - RNA, 27 nt, synthetic construct
  misc_feature 1..27: note = Spermidine synthase (57-65)
  source 1..27: mol_type = other RNA
aagacctacggcaacgtgctggtcctc

SEQ ID NO: 45237 - RNA, 39 nt, synthetic construct
  misc_feature 1..39: note = 26S protease regulatory subunit 7 (34-46)
  source 1..39: mol_type = other RNA
aagacctacggccagagcacctactcccgccagatcaag

SEQ ID NO: 45238 - RNA, 27 nt, synthetic construct
  misc_feature 1..27: note = Cyclin-dependent kinase 16 (470-478)
  source 1..27: mol_type = other RNA
aagacctacaactaccccaagtaccgc

SEQ ID NO: 45239 - RNA, 27 nt, synthetic construct
  misc_feature 1..27: note = Non-receptor tyrosine-protein kinase TNK1 (260-268)
  source 1..27: mol_type = other RNA
aaggtggccgacttcggcctggtccgc

SEQ ID NO: 45240 - RNA, 27 nt, synthetic construct
  misc_feature 1..27: note = GMP synthase (glutamine-hydrolyzing) (292-300)
  source 1..27: mol_type = other RNA
aaggtggccgacggcttcaaggtcgtg

SEQ ID NO: 45241 - RNA, 27 nt, synthetic construct
  misc_feature 1..27: note = Dynactin subunit 3 (32-40)
  source 1..27: mol_type = other RNA
aaggtggccgacggcctggtcaaggtg

SEQ ID NO: 45242 - RNA, 27 nt, synthetic construct
  misc_feature 1..27: note = Phosphoglycerate kinase 1 (216-224)
  source 1..27: mol_type = other RNA
aaggtggccgacaagatccagctgatc

SEQ ID NO: 45243 - RNA, 27 nt, synthetic construct
  misc_feature 1..27: note = Disks large homolog 1 (368-376)
  source 1..27: mol_type = other RNA
aaggtggccaagcccaccagcatgtac

SEQ ID NO: 45244 - RNA, 30 nt, synthetic construct
  misc_feature 1..30: note = GPI mannosyltransferase 1 (15-24)
  source 1..30: mol_type = other RNA
aaggtggcccccgccggcgtcttcggggtg

SEQ ID NO: 45245 - RNA, 36 nt, synthetic construct
  misc_feature 1..36: note = Coatomer subunit delta (123-134)
  source 1..36: mol_type = other RNA
aaggtggcccccgccccggcgcgccccagcggcccc

SEQ ID NO: 45246 - RNA, 27 nt, synthetic construct
  misc_feature 1..27: note = Asparagine synthetase (glutamine-hydrolyzing) (112-120)
  source 1..27: mol_type = other RNA
aaggtggccagcgtcgagatggtgaag

SEQ ID NO: 45247 - RNA, 69 nt, synthetic construct
  misc_feature 1..69: note = Pyridoxal kinase (152-174)
  source 1..69: mol_type = other RNA
aaggtggacgccgtcttcgtgggcaccggggacctgttcgccgcgatgctcctggcctggacccacaag

SEQ ID NO: 45248 - RNA, 27 nt, synthetic construct
  misc_feature 1..27: note = Melanoma-associated antigen 4 (113-121)
  source 1..27: mol_type = other RNA
aaggtggacgagctggcccacttcctc

SEQ ID NO: 45249 - RNA, 27 nt, synthetic construct
  misc_feature 1..27: note = Centromere protein F (738-746)
  source 1..27: mol_type = other RNA
aaggtggacgagctgaccaccgagatc

SEQ ID NO: 45250 - RNA, 27 nt, synthetic construct
  misc_feature 1..27: note = Beta-secretase 2 (314-322)
  source 1..27: mol_type = other RNA
aaggtgttcgacgccgtcgtggaggcc

SEQ ID NO: 45251 - RNA, 27 nt, synthetic construct
  misc_feature 1..27: note = Transcription factor HES-1 (214-222)
  source 1..27: mol_type = other RNA
aaggtgttcggcgggttccaggtcgtg

SEQ ID NO: 45252 - RNA, 24 nt, synthetic construct
  misc_feature 1..24: note = Myelin expression factor 2 (123-130)
  source 1..24: mol_type = other RNA
aaggtgggcgaggtcacctacgtg

SEQ ID NO: 45253 - RNA, 24 nt, synthetic construct
  misc_feature 1..24: note = Uridine phosphorylase 1 (99-106)
  source 1..24: mol_type = other RNA
aaggtgggccccgtcctgagcgtg

SEQ ID NO: 45254 - RNA, 33 nt, synthetic construct
  misc_feature 1..33: note = Nucleosome-remodeling factor subunit BPTF (2095-2105)
  source 1..33: mol_type = other RNA
aaggtgggcagccccgccaccgtcaccttccag

SEQ ID NO: 45255 - RNA, 18 nt, synthetic construct
  misc_feature 1..18: note = E3 ubiquitin/ISG15 ligase TRIM25 (596-601)
  source 1..18: mol_type = other RNA
aaggtgcacctgatgtac

SEQ ID NO: 45256 - RNA, 30 nt, synthetic construct
  misc_feature 1..30: note = Unconventional myosin-Id (255-264)
  source 1..30: mol_type = other RNA
aaggtgatcggcttcaagcccgaggagatc

SEQ ID NO: 45257 - RNA, 39 nt, synthetic construct
  misc_feature 1..39: note = Titin (15654-15666)
  source 1..39: mol_type = other RNA
aaggtgaaggaggtcaccaagaccagcgtgacgctgacc

SEQ ID NO: 45258 - RNA, 27 nt, synthetic construct
  misc_feature 1..27: note = Fructose-bisphosphate aldolase A (262-270)
  source 1..27: mol_type = other RNA
aaggtgctggccgccgtctacaaggcg

SEQ ID NO: 45259 - RNA, 153 nt, synthetic construct
  misc_feature 1..153: note = Titin (21056-21106)
  source 1..153: mol_type = other RNA
aaggtgctggacacccccgccgcctgccagaagctccaggtcaagcacgtgagccgcggcaccgtgacgctgctgtgggacccgcccctcatcgacgggggctcccccatcatcaactacgtcatcgagaagcgggacgcgaccaagcgcacc

SEQ ID NO: 45260 - RNA, 33 nt, synthetic construct
  misc_feature 1..33: note = F-box only protein 32 (98-108)
  source 1..33: mol_type = other RNA
aaggtgctggaggaccagcagaacatccgcctc

SEQ ID NO: 45261 - RNA, 27 nt, synthetic construct
  misc_feature 1..27: note = Melanoma-associated antigen 4 (286-294)
  source 1..27: mol_type = other RNA
aaggtgctggagcacgtcgtgcgcgtg

SEQ ID NO: 45262 - RNA, 27 nt, synthetic construct
  misc_feature 1..27: note = Chloride transport protein 6 (183-191)
  source 1..27: mol_type = other RNA
aaggtgctgggcgtcctcttcagcgtg

SEQ ID NO: 45263 - RNA, 27 nt, synthetic construct
  misc_feature 1..27: note = SLIT-ROBO Rho GTPase-activating protein 2 (155-163)
  source 1..27: mol_type = other RNA
aaggtgctgaacgagctctacagcgtc

SEQ ID NO: 45264 - RNA, 27 nt, synthetic construct
  misc_feature 1..27: note = Signal recognition particle receptor subunit alpha (345-353)
  source 1..27: mol_type = other RNA
aaggtgatgggcaccttcagcaccgtc

SEQ ID NO: 45265 - RNA, 27 nt, synthetic construct
  misc_feature 1..27: note = 40S ribosomal protein S16 (32-40)
  source 1..27: mol_type = other RNA
aaggtgaacggccgccccctggagatg

SEQ ID NO: 45266 - RNA, 24 nt, synthetic construct
  misc_feature 1..24: note = E3 ubiquitin-protein ligase RING1 (361-368)
  source 1..24: mol_type = other RNA
aaggtgagccgccccctggagctc

SEQ ID NO: 45267 - RNA, 27 nt, synthetic construct
  misc_feature 1..27: note = Solute carrier family 41 member 2 (192-200)
  source 1..27: mol_type = other RNA
aaggtgaccgaggtcttcatcctggtg

SEQ ID NO: 45268 - RNA, 27 nt, synthetic construct
  misc_feature 1..27: note = Hom s 1 (524-532)
  source 1..27: mol_type = other RNA
aaggtggtcgagatcgtgaagaagctg

SEQ ID NO: 45269 - RNA, 18 nt, synthetic construct
  misc_feature 1..18: note = Poly (ADP-ribose) polymerase 12 (512-517)
  source 1..18: mol_type = other RNA
aaggtgtggaacctgttc

SEQ ID NO: 45270 - RNA, 30 nt, synthetic construct
  misc_feature 1..30: note = Unconventional myosin-Id (707-716)
  source 1..30: mol_type = other RNA
aaggtgtggcgcggcaccctggcccggatg

SEQ ID NO: 45271 - RNA, 30 nt, synthetic construct
  misc_feature 1..30: note = Hemicentin-1 (2662-2671)
  source 1..30: mol_type = other RNA
aaggtgtacatccccccgatcatcaacaag

SEQ ID NO: 45272 - RNA, 27 nt, synthetic construct
  misc_feature 1..27: note = Probable helicase with zinc finger domain (500-508)
  source 1..27: mol_type = other RNA
aagtacgcccagaacggccagctgttc

SEQ ID NO: 45273 - RNA, 27 nt, synthetic construct
  misc_feature 1..27: note = DNA cross-link repair 1A protein (370-378)
  source 1..27: mol_type = other RNA
aagtacgacgagggcctgtaccgcttc

SEQ ID NO: 45274 - RNA, 27 nt, synthetic construct
  misc_feature 1..27: note = EH domain-containing protein 2 (452-460)
  source 1..27: mol_type = other RNA
aagtacgacgagatcttctacaacctg

SEQ ID NO: 45275 - RNA, 27 nt, synthetic construct
  misc_feature 1..27: note = E3 ubiquitin-protein ligase SIAH1 (198-206)
  source 1..27: mol_type = other RNA
aagtacgacggccaccagcagttcttc

SEQ ID NO: 45276 - RNA, 27 nt, synthetic construct
  misc_feature 1..27: note = Dedicator of cytokinesis protein 4 (92-100)
  source 1..27: mol_type = other RNA
aagtacggcgacatgcgcgtgaccatg

SEQ ID NO: 45277 - RNA, 24 nt, synthetic construct
  misc_feature 1..24: note = Serine/threonine-protein kinase PLK2 (513-520)
  source 1..24: mol_type = other RNA
aagtacggcttcgggtaccagctg

SEQ ID NO: 45278 - RNA, 27 nt, synthetic construct
  misc_feature 1..27: note = Protein SOGA1 (415-423)
  source 1..27: mol_type = other RNA
aagtacggcatcgtgcaggagttcttc

SEQ ID NO: 45279 - RNA, 24 nt, synthetic construct
  misc_feature 1..24: note = Glycerol-3-phosphate acyltransferase 4 (365-372)
  source 1..24: mol_type = other RNA
aagtacggcatggtgacctacctg

SEQ ID NO: 45280 - RNA, 27 nt, synthetic construct
  misc_feature 1..27: note = RNA-binding motif protein, X chromosome (30-38)
  source 1..27: mol_type = other RNA
aagtacggccgcatcgtggaggtcctg

SEQ ID NO: 45281 - RNA, 27 nt, synthetic construct
  misc_feature 1..27: note = Non-specific lipid-transfer protein (92-100)
  source 1..27: mol_type = other RNA
aagtacggcaccaagatcgagcacttc

SEQ ID NO: 45282 - RNA, 30 nt, synthetic construct
  misc_feature 1..30: note = Paired amphipathic helix protein Sin3b (300-309)
  source 1..30: mol_type = other RNA
aagtacggcaccctgcaggagttcagcttc

SEQ ID NO: 45283 - RNA, 27 nt, synthetic construct
  misc_feature 1..27: note = Kinase D-interacting substrate of 220 kDa (126-134)
  source 1..27: mol_type = other RNA
aagtacggcaccacccccctggtgtgg

SEQ ID NO: 45284 - RNA, 27 nt, synthetic construct
  misc_feature 1..27: note = Peroxisome proliferator-activated receptor delta isoform 4 (185-193)
  source 1..27: mol_type = other RNA
aagtacggcgtgcacgaggccatcttc

SEQ ID NO: 45285 - RNA, 27 nt, synthetic construct
  misc_feature 1..27: note = Tubulin-tyrosine ligase-like protein 12 (451-459)
  source 1..27: mol_type = other RNA
aagtacatcgagagccccgtgctgttc

SEQ ID NO: 45286 - RNA, 27 nt, synthetic construct
  misc_feature 1..27: note = Protein yippee-like 3 (104-112)
  source 1..27: mol_type = other RNA
aagtacatcatcgagctgaaccacatg

SEQ ID NO: 45287 - RNA, 27 nt, synthetic construct
  misc_feature 1..27: note = 3-hydroxy-3-methylglutaryl-coenzyme A reductase (89-97)
  source 1..27: mol_type = other RNA
aagtacatcctgggcatcgccgggctc

SEQ ID NO: 45288 - RNA, 27 nt, synthetic construct
  misc_feature 1..27: note = Alpha-fetoprotein (403-411)
  source 1..27: mol_type = other RNA
aagtacatccaggagagccaggccctg

SEQ ID NO: 45289 - RNA, 27 nt, synthetic construct
  misc_feature 1..27: note = Membrane progestin receptor alpha (193-201)
  source 1..27: mol_type = other RNA
aagtacatccagaagcccggcctgctc

SEQ ID NO: 45290 - RNA, 27 nt, synthetic construct
  misc_feature 1..27: note = Centrosomal protein of 135 kDa (857-865)
  source 1..27: mol_type = other RNA
aagtacatcaccgaggtgagccgctgg

SEQ ID NO: 45291 - RNA, 27 nt, synthetic construct
  misc_feature 1..27: note = Transmembrane emp24 domain-containing protein 5 (84-92)
  source 1..27: mol_type = other RNA
aagtacatcaccggcaccgacatcctg

SEQ ID NO: 45292 - RNA, 27 nt, synthetic construct
  misc_feature 1..27: note = Kinesin light chain 1 (266-274)
  source 1..27: mol_type = other RNA
aagtacaaggacgccgccaacctgctc

SEQ ID NO: 45293 - RNA, 27 nt, synthetic construct
  misc_feature 1..27: note = Melanoma-associated antigen B1 (141-149)
  source 1..27: mol_type = other RNA
aagtacaaggaccacttcaccgagatc

SEQ ID NO: 45294 - RNA, 27 nt, synthetic construct
  misc_feature 1..27: note = Melanoma-associated antigen C2 (173-181)
  source 1..27: mol_type = other RNA
aagtacaaggactacttccccgtgatc

SEQ ID NO: 45295 - RNA, 27 nt, synthetic construct
  misc_feature 1..27: note = Kinesin light chain 4 (191-199)
  source 1..27: mol_type = other RNA
aagtacaaggaggccgcccacctgctc

SEQ ID NO: 45296 - RNA, 27 nt, synthetic construct
  misc_feature 1..27: note = Antizyme inhibitor 1 (341-349)
  source 1..27: mol_type = other RNA
aagtacaaggaggacgagcccctgttc

SEQ ID NO: 45297 - RNA, 27 nt, synthetic construct
  misc_feature 1..27: note = Protein disulfide-isomerase (91-99)
  source 1..27: mol_type = other RNA
aagtacaagcccgagagcgaggagctg

SEQ ID NO: 45298 - RNA, 27 nt, synthetic construct
  misc_feature 1..27: note = Peroxisomal acyl-coenzyme A oxidase 3 (120-128)
  source 1..27: mol_type = other RNA
aagtacctgctccacagcctggtgttc

SEQ ID NO: 45299 - RNA, 27 nt, synthetic construct
  misc_feature 1..27: note = Gem-associated protein 4 (188-196)
  source 1..27: mol_type = other RNA
aagtacctgcccgccctcgacgagttc

SEQ ID NO: 45300 - RNA, 33 nt, synthetic construct
  misc_feature 1..33: note = Phosphatidylinositol-glycan biosynthesis class W protein (189-199)
  source 1..33: mol_type = other RNA
aagtacatggagggcagcaagctgcactacttc

SEQ ID NO: 45301 - RNA, 30 nt, synthetic construct
  misc_feature 1..30: note = Histone acetyltransferase type B catalytic subunit (207-216)
  source 1..30: mol_type = other RNA
aagtacaacaaggacggcgccaccctgttc

SEQ ID NO: 45302 - RNA, 27 nt, synthetic construct
  misc_feature 1..27: note = Formin-like protein 3 (158-166)
  source 1..27: mol_type = other RNA
aagtaccccgacctggccaacttctgg

SEQ ID NO: 45303 - RNA, 27 nt, synthetic construct
  misc_feature 1..27: note = Rho guanine nucleotide exchange factor 12 (939-947)
  source 1..27: mol_type = other RNA
aagtaccccctgctcctggacaacatc

SEQ ID NO: 45304 - RNA, 27 nt, synthetic construct
  misc_feature 1..27: note = Rho guanine nucleotide exchange factor 11 (884-892)
  source 1..27: mol_type = other RNA
aagtaccccctgctcctggagagcatc

SEQ ID NO: 45305 - RNA, 27 nt, synthetic construct
  misc_feature 1..27: note = Protein lifeguard 4 (139-147)
  source 1..27: mol_type = other RNA
aagtaccccctgaacctctacctgctg

SEQ ID NO: 45306 - RNA, 27 nt, synthetic construct
  misc_feature 1..27: note = Ceramide glucosyltransferase (104-112)
  source 1..27: mol_type = other RNA
aagtaccccaacgtggacgcccgcctg

SEQ ID NO: 45307 - RNA, 21 nt, synthetic construct
  misc_feature 1..21: note = ATP-dependent RNA helicase A (169-175)
  source 1..21: mol_type = other RNA
aagtaccccagcccgttcttc

SEQ ID NO: 45308 - RNA, 27 nt, synthetic construct
  misc_feature 1..27: note = Early endosome antigen 1 (387-395)
  source 1..27: mol_type = other RNA
aagtaccagcacctgaaggccgagttc

SEQ ID NO: 45309 - RNA, 27 nt, synthetic construct
  misc_feature 1..27: note = Tetratricopeptide repeat protein 9C (156-164)
  source 1..27: mol_type = other RNA
aagtaccgcgacgccgtgagccggtac

SEQ ID NO: 45310 - RNA, 27 nt, synthetic construct
  misc_feature 1..27: note = Zinc finger protein ZFAT (350-358)
  source 1..27: mol_type = other RNA
aagtacagcgacgtgaagaacctgatc

SEQ ID NO: 45311 - RNA, 27 nt, synthetic construct
  misc_feature 1..27: note = Host cell factor 1 (105-113)
  source 1..27: mol_type = other RNA
aagtacagcaacgacctgtacgagctc

SEQ ID NO: 45312 - RNA, 27 nt, synthetic construct
  misc_feature 1..27: note = Serine-protein kinase ATM (331-339)
  source 1..27: mol_type = other RNA
aagtacagctccggcttccgcaacatc

SEQ ID NO: 45313 - RNA, 27 nt, synthetic construct
  misc_feature 1..27: note = Zinc finger MYM-type protein 4 (1301-1309)
  source 1..27: mol_type = other RNA
aagtacagcaccaagatgacctacctg

SEQ ID NO: 45314 - RNA, 72 nt, synthetic construct
  misc_feature 1..72: note = Actin, gamma-enteric smooth muscle (294-317)
  source 1..72: mol_type = other RNA
aagtacagcgtgtggatcggcgggtccatcctggccagcctctccaccttccagcagatgtggatcagcaag

SEQ ID NO: 45315 - RNA, 27 nt, synthetic construct
  misc_feature 1..27: note = DNA/RNA-binding protein KIN17 (311-319)
  source 1..27: mol_type = other RNA
aagtacaccgccgtggtcaagatgatc

SEQ ID NO: 45316 - RNA, 27 nt, synthetic construct
  misc_feature 1..27: note = Signal peptidase complex subunit 2 (73-81)
  source 1..27: mol_type = other RNA
aagtacgtggagaacttcggcctgatc

SEQ ID NO: 45317 - RNA, 27 nt, synthetic construct
  misc_feature 1..27: note = Sorting nexin-29 (103-111)
  source 1..27: mol_type = other RNA
aagtacgtgggcgccgtccagatgctg

SEQ ID NO: 45318 - RNA, 24 nt, synthetic construct
  misc_feature 1..24: note = Zinc finger protein 195 (148-155)
  source 1..24: mol_type = other RNA
aagtacgtgaagatcttcgacaac

SEQ ID NO: 45319 - RNA, 27 nt, synthetic construct
  misc_feature 1..27: note = Zinc finger protein 92 (117-125)
  source 1..27: mol_type = other RNA
aagtacgtgaaggtcttccacaagttc

SEQ ID NO: 45320 - RNA, 27 nt, synthetic construct
  misc_feature 1..27: note = Zinc finger protein 708 (80-88)
  source 1..27: mol_type = other RNA
aagtacgtgaaggtcttccacaagtac

SEQ ID NO: 45321 - RNA, 27 nt, synthetic construct
  misc_feature 1..27: note = Tubulin beta chain (78-86)
  source 1..27: mol_type = other RNA
aagtacgtgccccgcgccatcctggtc

SEQ ID NO: 45322 - RNA, 27 nt, synthetic construct
  misc_feature 1..27: note = Centromere/kinetochore protein zw10 homolog (130-138)
  source 1..27: mol_type = other RNA
aagtacgtgaccggcgcccagcgcctg

SEQ ID NO: 45323 - RNA, 27 nt, synthetic construct
  misc_feature 1..27: note = Ubiquitin carboxyl-terminal hydrolase 8 (65-73)
  source 1..27: mol_type = other RNA
aagtacgtgaccgtctacaacctgatc

SEQ ID NO: 45324 - RNA, 27 nt, synthetic construct
  misc_feature 1..27: note = Digestive organ expansion factor homolog (526-534)
  source 1..27: mol_type = other RNA
aagtactaccgccagaccctgctcttc

SEQ ID NO: 45325 - RNA, 30 nt, synthetic construct
  misc_feature 1..30: note = Probable E3 ubiquitin-protein ligase HERC1 (3206-3215)
  source 1..30: mol_type = other RNA
ctggccgccggcctcgagagcctggggctg

SEQ ID NO: 45326 - RNA, 33 nt, synthetic construct
  misc_feature 1..33: note = Glutamate receptor ionotropic, kainate 2 (827-837)
  source 1..33: mol_type = other RNA
ctggccgccggcctcgtgctgagcgtcttcgtg

SEQ ID NO: 45327 - RNA, 27 nt, synthetic construct
  misc_feature 1..27: note = Ankyrin repeat domain-containing protein 17 (848-856)
  source 1..27: mol_type = other RNA
ctggccgccggccccctcccgcccggg

SEQ ID NO: 45328 - RNA, 24 nt, synthetic construct
  misc_feature 1..24: note = Spectrin beta chain, non-erythrocytic 4 (1779-1786)
  source 1..24: mol_type = other RNA
ctggccgccgtgaaccagatggtc

SEQ ID NO: 45329 - RNA, 27 nt, synthetic construct
  misc_feature 1..27: note = Vimentin (88-96)
  source 1..27: mol_type = other RNA
ctggccgacgccatcaacaccgagttc

SEQ ID NO: 45330 - RNA, 27 nt, synthetic construct
  misc_feature 1..27: note = Exonuclease 3'-5' domain-containing protein 2 (31-39)
  source 1..27: mol_type = other RNA
ctggccgacggcaccatcctcaaggtg

SEQ ID NO: 45331 - RNA, 27 nt, synthetic construct
  misc_feature 1..27: note = Kinesin-associated protein 3 (289-297)
  source 1..27: mol_type = other RNA
ctggccgaggacacccgcaccgagctc

SEQ ID NO: 45332 - RNA, 24 nt, synthetic construct
  misc_feature 1..24: note = Kinectin (601-608)
  source 1..24: mol_type = other RNA
ctggccgaggagctccacaaggtg

SEQ ID NO: 45333 - RNA, 24 nt, synthetic construct
  misc_feature 1..24: note = CREB-binding protein (654-661)
  source 1..24: mol_type = other RNA
ctggccgagaagatctacaagatc

SEQ ID NO: 45334 - RNA, 24 nt, synthetic construct
  misc_feature 1..24: note = Protein shisa-4 (79-86)
  source 1..24: mol_type = other RNA
ctggccttcagccccaagaccatc

SEQ ID NO: 45335 - RNA, 24 nt, synthetic construct
  misc_feature 1..24: note = DNA-dependent protein kinase catalytic subunit (29-36)
  source 1..24: mol_type = other RNA
ctggccggccaccagctcatccgc

SEQ ID NO: 45336 - RNA, 30 nt, synthetic construct
  misc_feature 1..30: note = Signal transducer and activator of transcription 3 (221-230)
  source 1..30: mol_type = other RNA
ctggccggcctcctgagcgccatggagtac

SEQ ID NO: 45337 - RNA, 27 nt, synthetic construct
  misc_feature 1..27: note = Phosphoacetylglucosamine mutase (519-527)
  source 1..27: mol_type = other RNA
ctggcccacgaggtgagcctcgccgtc

SEQ ID NO: 45338 - RNA, 33 nt, synthetic construct
  misc_feature 1..33: note = Ancient ubiquitous protein 1 (320-330)
  source 1..33: mol_type = other RNA
ctggccaagaccggctgcgtggacctcaccatc

SEQ ID NO: 45339 - RNA, 27 nt, synthetic construct
  misc_feature 1..27: note = Splicing factor 3B subunit 3 (765-773)
  source 1..27: mol_type = other RNA
ctggccctcgagaagctgggcgccgtg

SEQ ID NO: 45340 - RNA, 24 nt, synthetic construct
  misc_feature 1..24: note = EH domain-containing protein 1 (503-510)
  source 1..24: mol_type = other RNA
ctggccaaccacctcatcaaggtg

SEQ ID NO: 45341 - RNA, 24 nt, synthetic construct
  misc_feature 1..24: note = Alpha-2-macroglobulin-like protein 1 (37-44)
  source 1..24: mol_type = other RNA
ctggcccccgacccgagcctcgtg

SEQ ID NO: 45342 - RNA, 24 nt, synthetic construct
  misc_feature 1..24: note = COP9 signalosome complex subunit 1 (358-365)
  source 1..24: mol_type = other RNA
ctggccccccacgtgcgcaccctc

SEQ ID NO: 45343 - RNA, 27 nt, synthetic construct
  misc_feature 1..27: note = WAS/WASL-interacting protein family member 2 (294-302)
  source 1..27: mol_type = other RNA
ctggcccccccgccccccaccagcgcc

SEQ ID NO: 45344 - RNA, 24 nt, synthetic construct
  misc_feature 1..24: note = Ancient ubiquitous protein 1 (300-307)
  source 1..24: mol_type = other RNA
ctggcccagcgcgtgaaggaggtc

SEQ ID NO: 45345 - RNA, 27 nt, synthetic construct
  misc_feature 1..27: note = Fatty acid synthase (899-907)
  source 1..27: mol_type = other RNA
ctggcccgcgccctcggcctgggggtg

SEQ ID NO: 45346 - RNA, 30 nt, synthetic construct
  misc_feature 1..30: note = Molybdate-anion transporter (181-190)
  source 1..30: mol_type = other RNA
ctggccgtggtcgccggcgtggcggccgag

SEQ ID NO: 45347 - RNA, 54 nt, synthetic construct
  misc_feature 1..54: note = Epidermal growth factor receptor (5-22)
  source 1..54: mol_type = other RNA
ctggccgtggtcagcctcaacatcacctccctgggcctgcgcagcctcaaggag

SEQ ID NO: 45348 - RNA, 21 nt, synthetic construct
  misc_feature 1..21: note = Serum albumin (484-490)
  source 1..21: mol_type = other RNA
ctgtgcgtgctccacgagaag

SEQ ID NO: 45349 - RNA, 69 nt, synthetic construct
  misc_feature 1..69: note = Actin, cytoplasmic 2 (73-95)
  source 1..69: mol_type = other RNA
ctgtgctacgtggccctcgacttcgagcaggagatggccaccgcggccagctccagctccctggagaag

SEQ ID NO: 45350 - RNA, 24 nt, synthetic construct
  misc_feature 1..24: note = Coiled-coil domain-containing protein 93 (525-532)
  source 1..24: mol_type = other RNA
ctggacgacaagaaggtgtacctc

SEQ ID NO: 45351 - RNA, 30 nt, synthetic construct
  misc_feature 1..30: note = Melanoma inhibitory activity protein 3 (157-166)
  source 1..30: mol_type = other RNA
ctggacgacaccgccaagaacctccgcgtg

SEQ ID NO: 45352 - RNA, 24 nt, synthetic construct
  misc_feature 1..24: note = Axin-1 (509-516)
  source 1..24: mol_type = other RNA
ctggacgagcacgtgcagcgcgtc

SEQ ID NO: 45353 - RNA, 24 nt, synthetic construct
  misc_feature 1..24: note = Probable ATP-dependent RNA helicase DDX27 (86-93)
  source 1..24: mol_type = other RNA
ctggacgagaagatcgagaaggtg

SEQ ID NO: 45354 - RNA, 24 nt, synthetic construct
  misc_feature 1..24: note = U6 snRNA-associated Sm-like protein LSm8 (17-24)
  source 1..24: mol_type = other RNA
ctggacgagagccacgagcgcgtg

SEQ ID NO: 45355 - RNA, 111 nt, synthetic construct
  misc_feature 1..111: note = Collagen alpha-1(XX) chain (189-225)
  source 1..111: mol_type = other RNA
ctggacttcctccagctgggcgccctggccgggctcctgagccgcctgatctgccagcggctccagggcgggtccccccgccagggcccggcggccgcccccgccctggac

SEQ ID NO: 45356 - RNA, 24 nt, synthetic construct
  misc_feature 1..24: note = Prelamin-A/C (55-62)
  source 1..24: mol_type = other RNA
ctggacttccagaagaacatctac

SEQ ID NO: 45357 - RNA, 30 nt, synthetic construct
  misc_feature 1..30: note = ATP-binding cassette sub-family A member 13 (447-456)
  source 1..30: mol_type = other RNA
ctggacggcgccctccgcaacgccatcgcg

SEQ ID NO: 45358 - RNA, 21 nt, synthetic construct
  misc_feature 1..21: note = Mitochondrial dicarboxylate carrier (145-151)
  source 1..21: mol_type = other RNA
ctggacggcctctaccgcgtg

SEQ ID NO: 45359 - RNA, 21 nt, synthetic construct
  misc_feature 1..21: note = Heat shock protein HSP 90-beta (497-503)
  source 1..21: mol_type = other RNA
ctggacaagaaggtggagaag

SEQ ID NO: 45360 - RNA, 24 nt, synthetic construct
  misc_feature 1..24: note = RHO/RAC effector protein (1024-1031)
  source 1..24: mol_type = other RNA
ctggacaagaacgaccacagcctc

SEQ ID NO: 45361 - RNA, 21 nt, synthetic construct
  misc_feature 1..21: note = Small subunit processome component 20 homolog (301-307)
  source 1..21: mol_type = other RNA
ctggacctccacaccaaggtg

SEQ ID NO: 45362 - RNA, 24 nt, synthetic construct
  misc_feature 1..24: note = Exportin-1 (715-722)
  source 1..24: mol_type = other RNA
ctggacatgctcaacgtgtacaag

SEQ ID NO: 45363 - RNA, 27 nt, synthetic construct
  misc_feature 1..27: note = Mediator of RNA polymerase II transcription subunit 12 (1430-1438)
  source 1..27: mol_type = other RNA
ctggacatgctcagcgtgctgatcaac

SEQ ID NO: 45364 - RNA, 24 nt, synthetic construct
  misc_feature 1..24: note = Serine/threonine-protein kinase N1 (459-466)
  source 1..24: mol_type = other RNA
ctggacaacgagcgccacgaggtg

SEQ ID NO: 45365 - RNA, 27 nt, synthetic construct
  misc_feature 1..27: note = SWI/SNF-related matrix-associated actin-dependent regulator of chromatin subfamily A member 5 (921-929)
  source 1..27: mol_type = other RNA
ctggacaccaagatcggccgctacaag

SEQ ID NO: 45366 - RNA, 27 nt, synthetic construct
  misc_feature 1..27: note = Serine-protein kinase ATM (1050-1058)
  source 1..27: mol_type = other RNA
ctggaggccgacccctacagcaagtgg

SEQ ID NO: 45367 - RNA, 39 nt, synthetic construct
  misc_feature 1..39: note = Erlin-2 (327-339)
  source 1..39: mol_type = other RNA
ctggaggacgagcccctcgagaccgccaccaaggagaac

SEQ ID NO: 45368 - RNA, 30 nt, synthetic construct
  misc_feature 1..30: note = Spectrin beta chain, non-erythrocytic 1 (740-749)
  source 1..30: mol_type = other RNA
ctggaggaggccagcctcctgcaccagttc

SEQ ID NO: 45369 - RNA, 27 nt, synthetic construct
  misc_feature 1..27: note = Structural maintenance of chromosomes protein 1A (367-375)
  source 1..27: mol_type = other RNA
ctggaggagaaccaggtgaagaagtac

SEQ ID NO: 45370 - RNA, 39 nt, synthetic construct
  misc_feature 1..39: note = Moesin (16-28)
  source 1..39: mol_type = other RNA
ctggagttcgccatccagcccaacaccaccggcaagcag

SEQ ID NO: 45371 - RNA, 42 nt, synthetic construct
  misc_feature 1..42: note = Moesin (16-29)
  source 1..42: mol_type = other RNA
ctggagttcgccatccagcccaacaccaccggcaagcagctc

SEQ ID NO: 45372 - RNA, 30 nt, synthetic construct
  misc_feature 1..30: note = Synemin (898-907)
  source 1..30: mol_type = other RNA
ctggagggcgacctcgggagcacccactgg

SEQ ID NO: 45373 - RNA, 21 nt, synthetic construct
  misc_feature 1..21: note = Melanoma-associated antigen 4 (288-294)
  source 1..21: mol_type = other RNA
ctggagcacgtggtccgcgtg

SEQ ID NO: 45374 - RNA, 27 nt, synthetic construct
  misc_feature 1..27: note = Keratin, type II cytoskeletal 1 (477-485)
  source 1..27: mol_type = other RNA
ctggagatcgccacctaccgcaccctc

SEQ ID NO: 45375 - RNA, 27 nt, synthetic construct
  misc_feature 1..27: note = Integrator complex subunit 11 (341-349)
  source 1..27: mol_type = other RNA
ctggagatggagggccgccaggtgctc

SEQ ID NO: 45376 - RNA, 27 nt, synthetic construct
  misc_feature 1..27: note = Voltage-dependent calcium channel subunit alpha-2/delta-1 (566-574)
  source 1..27: mol_type = other RNA
ctggagaacgacatcaaggtggagatc

SEQ ID NO: 45377 - RNA, 27 nt, synthetic construct
  misc_feature 1..27: note = Histone acetyltransferase type B catalytic subunit (44-52)
  source 1..27: mol_type = other RNA
ctggagaacgacatccgcaccttcttc

SEQ ID NO: 45378 - RNA, 51 nt, synthetic construct
  misc_feature 1..51: note = Thioredoxin domain-containing protein 15 (185-201)
  source 1..51: mol_type = other RNA
ctggagaacttcaccctcaagatcctgaacatgagccaggacctgatggac

SEQ ID NO: 45379 - RNA, 36 nt, synthetic construct
  misc_feature 1..36: note = HLA class I histocompatibility antigen, A-2 alpha chain (171-182)
  source 1..36: mol_type = other RNA
ctggagaacggcaaggagaccctccagcgcaccgac

SEQ ID NO: 45380 - RNA, 27 nt, synthetic construct
  misc_feature 1..27: note = V-type proton ATPase subunit H (318-326)
  source 1..27: mol_type = other RNA
ctggagaacctcgagcagcagaagtac

SEQ ID NO: 45381 - RNA, 45 nt, synthetic construct
  misc_feature 1..45: note = Tubulin beta-6 chain (68-82)
  source 1..45: mol_type = other RNA
ctggagcccggcaccatggacagcgtgcgctccgggccgttcggc

SEQ ID NO: 45382 - RNA, 27 nt, synthetic construct
  misc_feature 1..27: note = DNA repair protein RAD51 homolog 3 (91-99)
  source 1..27: mol_type = other RNA
ctggagcaggagcacacccagggcttc

SEQ ID NO: 45383 - RNA, 27 nt, synthetic construct
  misc_feature 1..27: note = Laminin subunit gamma-1 (1296-1304)
  source 1..27: mol_type = other RNA
ctggagcagctcatcgaccagaagctg

SEQ ID NO: 45384 - RNA, 24 nt, synthetic construct
  misc_feature 1..24: note = Serine/arginine-rich splicing factor 3 (26-33)
  source 1..24: mol_type = other RNA
ctggagcgcgccttcggctactac

SEQ ID NO: 45385 - RNA, 24 nt, synthetic construct
  misc_feature 1..24: note = Melanoma-associated antigen 4 (137-144)
  source 1..24: mol_type = other RNA
ctggagcgcgtgatcaagaactac

SEQ ID NO: 45386 - RNA, 42 nt, synthetic construct
  misc_feature 1..42: note = Kin of IRRE-like protein 1 (338-351)
  source 1..42: mol_type = other RNA
ctggagcgctacaccgtggagcggaccaacagcggctccggg

SEQ ID NO: 45387 - RNA, 21 nt, synthetic construct
  misc_feature 1..21: note = Cyclic AMP-dependent transcription factor ATF-4 (38-44)
  source 1..21: mol_type = other RNA
ctggaggtggccaagcacttc

SEQ ID NO: 45388 - RNA, 66 nt, synthetic construct
  misc_feature 1..66: note = Calpain-2 catalytic subunit (459-480)
  source 1..66: mol_type = other RNA
ctgttcgcccagctcgccggcgaggacgcggagatcagcgccttcgagctgcagaccatcctgcgc

SEQ ID NO: 45389 - RNA, 27 nt, synthetic construct
  misc_feature 1..27: note = Vacuolar protein sorting-associated protein 8 homolog (853-861)
  source 1..27: mol_type = other RNA
ctgttcgaccaggtgctcgagttcctg

SEQ ID NO: 45390 - RNA, 30 nt, synthetic construct
  misc_feature 1..30: note = Titin (9698-9707)
  source 1..30: mol_type = other RNA
ctgttcttcgtgagcgagccccagtccatc

SEQ ID NO: 45391 - RNA, 24 nt, synthetic construct
  misc_feature 1..24: note = Protein MCM10 homolog (334-341)
  source 1..24: mol_type = other RNA
ctgttcggcgaggtgcacaaggcc

SEQ ID NO: 45392 - RNA, 24 nt, synthetic construct
  misc_feature 1..24: note = Guanine nucleotide-binding protein subunit beta-5 (321-328)
  source 1..24: mol_type = other RNA
ctgttcggccacgagaaccgcgtg

SEQ ID NO: 45393 - RNA, 30 nt, synthetic construct
  misc_feature 1..30: note = Cullin-7 (1270-1279)
  source 1..30: mol_type = other RNA
ctgttcggcccccgcgccgccttcctcctg

SEQ ID NO: 45394 - RNA, 30 nt, synthetic construct
  misc_feature 1..30: note = HLA class II histocompatibility antigen, DP alpha 1 chain (167-176)
  source 1..30: mol_type = other RNA
ctgttcctcccccgcaccgactacagcttc

SEQ ID NO: 45395 - RNA, 33 nt, synthetic construct
  misc_feature 1..33: note = ER membrane protein complex subunit 1 (430-440)
  source 1..33: mol_type = other RNA
ctgttcctccagcagctggccggcaaggtggtc

SEQ ID NO: 45396 - RNA, 24 nt, synthetic construct
  misc_feature 1..24: note = Asparagine synthetase (glutamine-hydrolyzing) (155-162)
  source 1..24: mol_type = other RNA
ctgttcaacaacgccgtgaagaag

SEQ ID NO: 45397 - RNA, 27 nt, synthetic construct
  misc_feature 1..27: note = Chloride transport protein 6 (104-112)
  source 1..27: mol_type = other RNA
ctgttcacccagctcaagttcggcgtg

SEQ ID NO: 45398 - RNA, 30 nt, synthetic construct
  misc_feature 1..30: note = Cytochrome c oxidase subunit 1 (347-356)
  source 1..30: mol_type = other RNA
ctgttcaccgtgggcgggctcaccggcatc

SEQ ID NO: 45399 - RNA, 30 nt, synthetic construct
  misc_feature 1..30: note = Protein-glutamine gamma-glutamyltransferase 5 (627-636)
  source 1..30: mol_type = other RNA
ctgggcgccgccgtggtcaaccagcccctc

SEQ ID NO: 45400 - RNA, 33 nt, synthetic construct
  misc_feature 1..33: note = Elastin (48-58)
  source 1..33: mol_type = other RNA
ctgggcgccctcgggggcggggccctgggcccc

SEQ ID NO: 45401 - RNA, 21 nt, synthetic construct
  misc_feature 1..21: note = Proteasome subunit beta type-4 (122-128)
  source 1..21: mol_type = other RNA
ctgggcgacgggcacagctac

SEQ ID NO: 45402 - RNA, 27 nt, synthetic construct
  misc_feature 1..27: note = Mitogen-activated protein kinase 4 (26-34)
  source 1..27: mol_type = other RNA
ctgggcttcggggtgaacggcctcgtc

SEQ ID NO: 45403 - RNA, 21 nt, synthetic construct
  misc_feature 1..21: note = Lipopolysaccharide-responsive and beige-like anchor protein (138-144)
  source 1..21: mol_type = other RNA
ctgggcaagatcgagaaggtg

SEQ ID NO: 45404 - RNA, 21 nt, synthetic construct
  misc_feature 1..21: note = EH domain-containing protein 4 (484-490)
  source 1..21: mol_type = other RNA
ctgggcaagatctggaagctc

SEQ ID NO: 45405 - RNA, 27 nt, synthetic construct
  misc_feature 1..27: note = Probable E3 ubiquitin-protein ligase HECTD4 (712-720)
  source 1..27: mol_type = other RNA
ctgggcaagtacgccgagagcatcctc

SEQ ID NO: 45406 - RNA, 60 nt, synthetic construct
  misc_feature 1..60: note = 14-3-3 protein beta/alpha (170-189)
  source 1..60: mol_type = other RNA
ctgggcctcgccctgaacttcagcgtgttctactacgagatcctgaactcccccgagaag

SEQ ID NO: 45407 - RNA, 102 nt, synthetic construct
  misc_feature 1..102: note = Heat shock protein HSP 90-alpha (510-543)
  source 1..102: mol_type = other RNA
ctgggcctcgggatcgacgaggacgaccccaccgccgacgacaccagcgccgcggtgacggaggagatgccgcccctggagggcgacgacgacacctcccgc

SEQ ID NO: 45408 - RNA, 30 nt, synthetic construct
  misc_feature 1..30: note = HLA class II histocompatibility antigen, DQ alpha 1 chain (223-232)
  source 1..30: mol_type = other RNA
ctgggcctcagcgtggggctggtcggcatc

SEQ ID NO: 45409 - RNA, 27 nt, synthetic construct
  misc_feature 1..27: note = Splicing factor 3B subunit 2 (104-112)
  source 1..27: mol_type = other RNA
ctgggccccccgccccccctccgcgtg

SEQ ID NO: 45410 - RNA, 30 nt, synthetic construct
  misc_feature 1..30: note = Ankyrin repeat domain-containing protein 17 (882-891)
  source 1..30: mol_type = other RNA
ctgggccaggggatcctcaccgagacccag

SEQ ID NO: 45411 - RNA, 33 nt, synthetic construct
  misc_feature 1..33: note = Transketolase (38-48)
  source 1..33: mol_type = other RNA
ctgggccaggggctcggcgccgcctgcgggatg

SEQ ID NO: 45412 - RNA, 24 nt, synthetic construct
  misc_feature 1..24: note = 60S ribosomal protein L13a (138-145)
  source 1..24: mol_type = other RNA
ctgggccgcctcgcccacgaggtg

SEQ ID NO: 45413 - RNA, 72 nt, synthetic construct
  misc_feature 1..72: note = Filamin-B (1896-1919)
  source 1..72: mol_type = other RNA
ctgggcagcgccgccgacttcctcctggacatctccgagaccgacctgagctccctcaccgcgagcatcaag

SEQ ID NO: 45414 - RNA, 21 nt, synthetic construct
  misc_feature 1..21: note = YY1-associated protein 1 (323-329)
  source 1..21: mol_type = other RNA
ctgggcagcgagacccgctac

SEQ ID NO: 45415 - RNA, 30 nt, synthetic construct
  misc_feature 1..30: note = Cadherin-2 (351-360)
  source 1..30: mol_type = other RNA
ctgcacgccggcaccatgctcaccacgttc

SEQ ID NO: 45416 - RNA, 24 nt, synthetic construct
  misc_feature 1..24: note = Mortality factor 4-like protein 1 (291-298)
  source 1..24: mol_type = other RNA
ctgcacgacttcctcaagtacctg

SEQ ID NO: 45417 - RNA, 30 nt, synthetic construct
  misc_feature 1..30: note = Cyclin-G-associated kinase (18-27)
  source 1..30: mol_type = other RNA
ctgcacagcgaggtgggcgccgggcccgcc

SEQ ID NO: 45418 - RNA, 96 nt, synthetic construct
  misc_feature 1..96: note = Glia-derived nexin (345-376)
  source 1..96: mol_type = other RNA
ctgcacgtgagccacatcctccagaaggccaagatcgaggtctccgaggacggcaccaaggccagcgcggccaccacggccatcctgatcgcccgc

SEQ ID NO: 45419 - RNA, 102 nt, synthetic construct
  misc_feature 1..102: note = Glia-derived nexin (345-378)
  source 1..102: mol_type = other RNA
ctgcacgtgagccacatcctccagaaggccaagatcgaggtctccgaggacggcaccaaggccagcgcggccaccacggccatcctgatcgcccgctccagc

SEQ ID NO: 45420 - RNA, 30 nt, synthetic construct
  misc_feature 1..30: note = Cyclin-dependent kinase 1 (135-144)
  source 1..30: mol_type = other RNA
ctgatcgacgacaagggcaccatcaagctc

SEQ ID NO: 45421 - RNA, 27 nt, synthetic construct
  misc_feature 1..27: note = CCR4-NOT transcription complex subunit 3 (77-85)
  source 1..27: mol_type = other RNA
ctgatcgacaaccgcaagctcatcgag

SEQ ID NO: 45422 - RNA, 27 nt, synthetic construct
  misc_feature 1..27: note = Eukaryotic translation initiation factor 3 subunit L (66-74)
  source 1..27: mol_type = other RNA
ctgatcgaccagaaggtgtacgagctc

SEQ ID NO: 45423 - RNA, 24 nt, synthetic construct
  misc_feature 1..24: note = Dystonin (1766-1773)
  source 1..24: mol_type = other RNA
ctgatcgaccgcgagaccatgttc

SEQ ID NO: 45424 - RNA, 30 nt, synthetic construct
  misc_feature 1..30: note = Elongation factor 2 (102-111)
  source 1..30: mol_type = other RNA
ctgatcgacagccccggccacgtggacttc

SEQ ID NO: 45425 - RNA, 27 nt, synthetic construct
  misc_feature 1..27: note = Ubiquitin-like domain-containing CTD phosphatase 1 (226-234)
  source 1..27: mol_type = other RNA
ctgatcgacgtgaagcccctcggcgtc

SEQ ID NO: 45426 - RNA, 24 nt, synthetic construct
  misc_feature 1..24: note = Programmed cell death protein 5 (92-99)
  source 1..24: mol_type = other RNA
ctgatcgagatcctcaagaaggtg

SEQ ID NO: 45427 - RNA, 24 nt, synthetic construct
  misc_feature 1..24: note = Nuclear pore complex protein Nup205 (249-256)
  source 1..24: mol_type = other RNA
ctgatcggccacctcgagcgcgtg

SEQ ID NO: 45428 - RNA, 72 nt, synthetic construct
  misc_feature 1..72: note = Vimentin (443-466)
  source 1..72: mol_type = other RNA
ctgatcaagaccgtggagacccgcgacggccaggtcatcaacgagacgagccagcaccacgacgacctcgag

SEQ ID NO: 45429 - RNA, 30 nt, synthetic construct
  misc_feature 1..30: note = Syndetin (107-116)
  source 1..30: mol_type = other RNA
ctgatcctcgagaagcagcccgcctacgtg

SEQ ID NO: 45430 - RNA, 27 nt, synthetic construct
  misc_feature 1..27: note = Small subunit processome component 20 homolog (1298-1306)
  source 1..27: mol_type = other RNA
ctgatcctcccccacgtgccggccatc

SEQ ID NO: 45431 - RNA, 27 nt, synthetic construct
  misc_feature 1..27: note = Patatin-like phospholipase domain-containing protein 2 (154-162)
  source 1..27: mol_type = other RNA
ctgatccccccgagcctccagggcgtg

SEQ ID NO: 45432 - RNA, 27 nt, synthetic construct
  misc_feature 1..27: note = Histone deacetylase 6 (119-127)
  source 1..27: mol_type = other RNA
ctgatccaggagggcctcctggaccgc

SEQ ID NO: 45433 - RNA, 27 nt, synthetic construct
  misc_feature 1..27: note = Membrane-bound transcription factor site-2 protease (165-173)
  source 1..27: mol_type = other RNA
ctgatcagcggcgtggtccacgagatc

SEQ ID NO: 45434 - RNA, 24 nt, synthetic construct
  misc_feature 1..24: note = Asparagine synthetase (glutamine-hydrolyzing) (264-271)
  source 1..24: mol_type = other RNA
ctgatcagcaagtacatccgcaag

SEQ ID NO: 45435 - RNA, 33 nt, synthetic construct
  misc_feature 1..33: note = Histone H4 (19-29)
  source 1..33: mol_type = other RNA
ctgatctacgaggagacccgcggcgtgctcaag

SEQ ID NO: 45436 - RNA, 33 nt, synthetic construct
  misc_feature 1..33: note = Endoplasmic reticulum-Golgi intermediate compartment protein 3 (328-338)
  source 1..33: mol_type = other RNA
ctgatctaccacagcgcccgcgccatccagaag

SEQ ID NO: 45437 - RNA, 30 nt, synthetic construct
  misc_feature 1..30: note = Zinc finger protein 638 (6-15)
  source 1..30: mol_type = other RNA
ctgaaggccctcaacagcaactccatctac

SEQ ID NO: 45438 - RNA, 24 nt, synthetic construct
  misc_feature 1..24: note = Protein FAM171B (21-28)
  source 1..24: mol_type = other RNA
ctgaaggcccgcctcgtgcccgcc

SEQ ID NO: 45439 - RNA, 33 nt, synthetic construct
  misc_feature 1..33: note = E3 ubiquitin-protein ligase UHRF1 (701-711)
  source 1..33: mol_type = other RNA
ctgaaggaccgccccgccagcggctccccgttc

SEQ ID NO: 45440 - RNA, 21 nt, synthetic construct
  misc_feature 1..21: note = Putative RNA exonuclease NEF-sp (343-349)
  source 1..21: mol_type = other RNA
ctgaagttcctcgccaaggtg

SEQ ID NO: 45441 - RNA, 39 nt, synthetic construct
  misc_feature 1..39: note = Triosephosphate isomerase (155-167)
  source 1..39: mol_type = other RNA
ctgaagcccgagttcgtggacatcatcaacgccaagcag

SEQ ID NO: 45442 - RNA, 42 nt, synthetic construct
  misc_feature 1..42: note = Transmembrane protein 181 (194-207)
  source 1..42: mol_type = other RNA
ctgaagcccatccagatcctcagcaacccgctgtccacctac

SEQ ID NO: 45443 - RNA, 24 nt, synthetic construct
  misc_feature 1..24: note = Clathrin light chain A (223-230)
  source 1..24: mol_type = other RNA
ctgaagcaggcccccctcgtgcac

SEQ ID NO: 45444 - RNA, 24 nt, synthetic construct
  misc_feature 1..24: note = Eukaryotic translation initiation factor 4 gamma 1 (786-793)
  source 1..24: mol_type = other RNA
ctgaaggtgcccaccaccgagaag

SEQ ID NO: 45445 - RNA, 30 nt, synthetic construct
  misc_feature 1..30: note = T-complex protein 1 subunit eta (12-21)
  source 1..30: mol_type = other RNA
ctgctcgccgccgagttcctgaagcaggtg

SEQ ID NO: 45446 - RNA, 33 nt, synthetic construct
  misc_feature 1..33: note = E3 ubiquitin-protein ligase UBR4 (195-205)
  source 1..33: mol_type = other RNA
ctgctcgccgccggcagccagctggacaccgtg

SEQ ID NO: 45447 - RNA, 27 nt, synthetic construct
  misc_feature 1..27: note = Torsin-1B (16-24)
  source 1..27: mol_type = other RNA
ctgctcgccgcccgcgtggtcgcggcc

SEQ ID NO: 45448 - RNA, 27 nt, synthetic construct
  misc_feature 1..27: note = Vacuolar protein sorting-associated protein 18 homolog (338-346)
  source 1..27: mol_type = other RNA
ctgctcgccgaccgcgtggaggccgtc

SEQ ID NO: 45449 - RNA, 27 nt, synthetic construct
  misc_feature 1..27: note = Protein zyg-11 homolog B (139-147)
  source 1..27: mol_type = other RNA
ctgctcgccgacgtgacccacctgctg

SEQ ID NO: 45450 - RNA, 27 nt, synthetic construct
  misc_feature 1..27: note = Tumor suppressor candidate 3 (48-56)
  source 1..27: mol_type = other RNA
ctgctcgccgagaaggtggagcagctg

SEQ ID NO: 45451 - RNA, 36 nt, synthetic construct
  misc_feature 1..36: note = Sulfhydryl oxidase 1 (651-662)
  source 1..36: mol_type = other RNA
ctgctcgccgagagccgcgccgagaagaaccggctg

SEQ ID NO: 45452 - RNA, 33 nt, synthetic construct
  misc_feature 1..33: note = Poly (ADP-ribose) polymerase 10 (465-475)
  source 1..33: mol_type = other RNA
ctgctcgccggcctgggggacgtggccctgctc

SEQ ID NO: 45453 - RNA, 27 nt, synthetic construct
  misc_feature 1..27: note = General transcription factor IIH subunit 3 (91-99)
  source 1..27: mol_type = other RNA
ctgctcgccggcagcctggccaaggcg

SEQ ID NO: 45454 - RNA, 27 nt, synthetic construct
  misc_feature 1..27: note = E3 ubiquitin-protein ligase MARCH6 (678-686)
  source 1..27: mol_type = other RNA
ctgctcgccggcgtggtccccctgctg

SEQ ID NO: 45455 - RNA, 30 nt, synthetic construct
  misc_feature 1..30: note = DNA-directed RNA polymerases I, II, and III subunit RPABC5 (49-58)
  source 1..30: mol_type = other RNA
ctgctcgcccacgtggacctgatcgagaag

SEQ ID NO: 45456 - RNA, 75 nt, synthetic construct
  misc_feature 1..75: note = RWD domain-containing protein 1 (86-110)
  source 1..75: mol_type = other RNA
ctgctcgccctgcaggccgaggagaacctgggcatggtgatgatcttcaccctcgtcaccgcggtgcaggagaag

SEQ ID NO: 45457 - RNA, 27 nt, synthetic construct
  misc_feature 1..27: note = N-terminal kinase-like protein (58-66)
  source 1..27: mol_type = other RNA
ctgctcgcccccaagctgaacgaggcc

SEQ ID NO: 45458 - RNA, 27 nt, synthetic construct
  misc_feature 1..27: note = Actin-binding protein anillin (610-618)
  source 1..27: mol_type = other RNA
ctgctcgcccccctggcccagaccgtg

SEQ ID NO: 45459 - RNA, 27 nt, synthetic construct
  misc_feature 1..27: note = Transmembrane and coiled-coil domain-containing protein 3 (411-419)
  source 1..27: mol_type = other RNA
ctgctcgcccccgtgctgtggcgcgcc

SEQ ID NO: 45460 - RNA, 24 nt, synthetic construct
  misc_feature 1..24: note = Receptor-interacting serine/threonine-protein kinase 4 (150-157)
  source 1..24: mol_type = other RNA
ctgctcgacgcccactaccacgtg

SEQ ID NO: 45461 - RNA, 27 nt, synthetic construct
  misc_feature 1..27: note = Brefeldin A-inhibited guanine nucleotide-exchange protein 1 (1477-1485)
  source 1..27: mol_type = other RNA
ctgctcgacgacatcttcgcccagctg

SEQ ID NO: 45462 - RNA, 33 nt, synthetic construct
  misc_feature 1..33: note = ETS translocation variant 1 (241-251)
  source 1..33: mol_type = other RNA
ctgctcgacgaccccagcaactcccacttcatc

SEQ ID NO: 45463 - RNA, 30 nt, synthetic construct
  misc_feature 1..30: note = Contactin-associated protein-like 4 (266-275)
  source 1..30: mol_type = other RNA
ctgctcgacgaccagcactggcacagcgtg

SEQ ID NO: 45464 - RNA, 27 nt, synthetic construct
  misc_feature 1..27: note = Protein FAM179B (402-410)
  source 1..27: mol_type = other RNA
ctgctcgacgacagcaacttcaaggtg

SEQ ID NO: 45465 - RNA, 24 nt, synthetic construct
  misc_feature 1..24: note = von Willebrand factor A domain-containing protein 8 (512-519)
  source 1..24: mol_type = other RNA
ctgctcgacggcatccaccgcgtg

SEQ ID NO: 45466 - RNA, 27 nt, synthetic construct
  misc_feature 1..27: note = Leucine-rich repeat-containing protein 40 (571-579)
  source 1..27: mol_type = other RNA
ctgctcgacggcaaccccttccgcgtg

SEQ ID NO: 45467 - RNA, 24 nt, synthetic construct
  misc_feature 1..24: note = Uridine-cytidine kinase-like 1 (454-461)
  source 1..24: mol_type = other RNA
ctgctcgaccacgacgtgcccgag

SEQ ID NO: 45468 - RNA, 27 nt, synthetic construct
  misc_feature 1..27: note = Armadillo repeat protein deleted in velo-cardio-facial syndrome (408-416)
  source 1..27: mol_type = other RNA
ctgctcgaccacccccgcgccgaggtg

SEQ ID NO: 45469 - RNA, 27 nt, synthetic construct
  misc_feature 1..27: note = Integrator complex subunit 8 (617-625)
  source 1..27: mol_type = other RNA
ctgctcgacatccacacccacgaggcc

SEQ ID NO: 45470 - RNA, 27 nt, synthetic construct
  misc_feature 1..27: note = RNA-binding protein 20 (68-76)
  source 1..27: mol_type = other RNA
ctgctcgacaagaaccccttcagcgtg

SEQ ID NO: 45471 - RNA, 24 nt, synthetic construct
  misc_feature 1..24: note = Small subunit processome component 20 homolog (300-307)
  source 1..24: mol_type = other RNA
ctgctcgacctgcacaccaaggtg

SEQ ID NO: 45472 - RNA, 27 nt, synthetic construct
  misc_feature 1..27: note = AP-1 complex subunit beta-1 (395-403)
  source 1..27: mol_type = other RNA
ctgctcgacctgatccagaccaaggtg

SEQ ID NO: 45473 - RNA, 27 nt, synthetic construct
  misc_feature 1..27: note = ERI1 exoribonuclease 3 (155-163)
  source 1..27: mol_type = other RNA
ctgctcgaccccaacgtgaagagcatc

SEQ ID NO: 45474 - RNA, 30 nt, synthetic construct
  misc_feature 1..30: note = DDB1- and CUL4-associated factor 16 (80-89)
  source 1..30: mol_type = other RNA
ctgctcgaccccagcaccccggtgcacatc

SEQ ID NO: 45475 - RNA, 24 nt, synthetic construct
  misc_feature 1..24: note = Coiled-coil domain-containing protein 180 (707-714)
  source 1..24: mol_type = other RNA
ctgctcgaccagctgcgccagcag

SEQ ID NO: 45476 - RNA, 21 nt, synthetic construct
  misc_feature 1..21: note = Protein Bop (113-119)
  source 1..21: mol_type = other RNA
ctgctcgaccgcttcctggcc

SEQ ID NO: 45477 - RNA, 24 nt, synthetic construct
  misc_feature 1..24: note = Nuclear pore complex protein Nup205 (319-326)
  source 1..24: mol_type = other RNA
ctgctcgaccgcatcgtgagcgtc

SEQ ID NO: 45478 - RNA, 30 nt, synthetic construct
  misc_feature 1..30: note = Plexin-B3 (450-459)
  source 1..30: mol_type = other RNA
ctgctcgacagctccggcagccacctgtac

SEQ ID NO: 45479 - RNA, 27 nt, synthetic construct
  misc_feature 1..27: note = Protein PML (195-203)
  source 1..27: mol_type = other RNA
ctgctcgacagctcccacagcgagctg

SEQ ID NO: 45480 - RNA, 33 nt, synthetic construct
  misc_feature 1..33: note = Asparagine synthetase (glutamine-hydrolyzing) (42-52)
  source 1..33: mol_type = other RNA
ctgctcgacaccgccaacaagaaggtgttcctg

SEQ ID NO: 45481 - RNA, 24 nt, synthetic construct
  misc_feature 1..24: note = Myosin-10 (265-272)
  source 1..24: mol_type = other RNA
ctgctcgagaagagccgcgccgtg

SEQ ID NO: 45482 - RNA, 30 nt, synthetic construct
  misc_feature 1..30: note = Serine/threonine-protein kinase Kist (127-136)
  source 1..30: mol_type = other RNA
ctgctcgagatgttcagcggcatgaagctg

SEQ ID NO: 45483 - RNA, 30 nt, synthetic construct
  misc_feature 1..30: note = Serine/threonine-protein kinase MRCK gamma (979-988)
  source 1..30: mol_type = other RNA
ctgctcttcgacgcccccgacctgcgcctg

SEQ ID NO: 45484 - RNA, 27 nt, synthetic construct
  misc_feature 1..27: note = Cartilage-associated protein (322-330)
  source 1..27: mol_type = other RNA
ctgctcttcgaccagaacgacaaggtg

SEQ ID NO: 45485 - RNA, 39 nt, synthetic construct
  misc_feature 1..39: note = Protein wntless homolog (297-309)
  source 1..39: mol_type = other RNA
ctgctcttcggcgacatccgccaggggatcttctacgcc

SEQ ID NO: 45486 - RNA, 27 nt, synthetic construct
  misc_feature 1..27: note = Cytoplasmic dynein 2 heavy chain 1 (138-146)
  source 1..27: mol_type = other RNA
ctgctcttcggcgacctgctgcgcgtg

SEQ ID NO: 45487 - RNA, 30 nt, synthetic construct
  misc_feature 1..30: note = Protein YIF1B (224-233)
  source 1..30: mol_type = other RNA
ctgctcttcggcaagatcgggtactacctg

SEQ ID NO: 45488 - RNA, 27 nt, synthetic construct
  misc_feature 1..27: note = Probable palmitoyltransferase ZDHHC24 (214-222)
  source 1..27: mol_type = other RNA
ctgctcttccacggcatgctgctgctc

SEQ ID NO: 45489 - RNA, 27 nt, synthetic construct
  misc_feature 1..27: note = Kelch-like protein 5 (518-526)
  source 1..27: mol_type = other RNA
ctgctcggcgacaagctgtacgccgtg

SEQ ID NO: 45490 - RNA, 27 nt, synthetic construct
  misc_feature 1..27: note = E3 ubiquitin-protein ligase RNF213 (957-965)
  source 1..27: mol_type = other RNA
ctgctcggcgacatggagtggcgcctg

SEQ ID NO: 45491 - RNA, 24 nt, synthetic construct
  misc_feature 1..24: note = Receptor-type tyrosine-protein phosphatase T (1084-1091)
  source 1..24: mol_type = other RNA
ctgctcggcttcgtgcgccaggtc

SEQ ID NO: 45492 - RNA, 33 nt, synthetic construct
  misc_feature 1..33: note = Neurosecretory protein VGF (286-296)
  source 1..33: mol_type = other RNA
ctgctcggcgggagcgaggccggcgagcgcctg

SEQ ID NO: 45493 - RNA, 24 nt, synthetic construct
  misc_feature 1..24: note = MAU2 chromatid cohesion factor homolog (357-364)
  source 1..24: mol_type = other RNA
ctgctcggccacatcttctacgtg

SEQ ID NO: 45494 - RNA, 24 nt, synthetic construct
  misc_feature 1..24: note = Polypeptide N-acetylgalactosaminyltransferase 2 (186-193)
  source 1..24: mol_type = other RNA
ctgctcggcaagatcgagaaggtg

SEQ ID NO: 45495 - RNA, 24 nt, synthetic construct
  misc_feature 1..24: note = Spectrin alpha chain, non-erythrocytic 1 (418-425)
  source 1..24: mol_type = other RNA
ctgctcggcagcgcccacgaggtg

SEQ ID NO: 45496 - RNA, 30 nt, synthetic construct
  misc_feature 1..30: note = Zinc finger X-linked protein ZXDA (257-266)
  source 1..30: mol_type = other RNA
ctgctcggcagcgggcccggcgtggtcctg

SEQ ID NO: 45497 - RNA, 30 nt, synthetic construct
  misc_feature 1..30: note = CUB and sushi domain-containing protein 1 (2833-2842)
  source 1..30: mol_type = other RNA
ctgctcggcagctccgccctgacctgcatg

SEQ ID NO: 45498 - RNA, 27 nt, synthetic construct
  misc_feature 1..27: note = Protein virilizer homolog (786-794)
  source 1..27: mol_type = other RNA
ctgctcggcaccctgcacaacctgtac

SEQ ID NO: 45499 - RNA, 27 nt, synthetic construct
  misc_feature 1..27: note = Zinc transporter ZIP1 (215-223)
  source 1..27: mol_type = other RNA
ctgctccacaagggcatcctggccgtg

SEQ ID NO: 45500 - RNA, 33 nt, synthetic construct
  misc_feature 1..33: note = Catenin beta-1 (263-273)
  source 1..33: mol_type = other RNA
ctgctccaccaggagggcgccaagatggccgtg

SEQ ID NO: 45501 - RNA, 27 nt, synthetic construct
  misc_feature 1..27: note = Actin-binding protein anillin (773-781)
  source 1..27: mol_type = other RNA
ctgctcatcgacgagctgaacaagctg

SEQ ID NO: 45502 - RNA, 48 nt, synthetic construct
  misc_feature 1..48: note = Tastin (465-480)
  source 1..48: mol_type = other RNA
ctgctcatcggcctggccgtggggggcgggggcggggaggacagcacc

SEQ ID NO: 45503 - RNA, 27 nt, synthetic construct
  misc_feature 1..27: note = Mitochondrial dynamics protein MID49 (418-426)
  source 1..27: mol_type = other RNA
ctgctcatcggcagcctggagcaggcc

SEQ ID NO: 45504 - RNA, 75 nt, synthetic construct
  misc_feature 1..75: note = Vimentin (276-300)
  source 1..75: mol_type = other RNA
ctgctcatcaagaccgtggagacccgcgacggccaggtcatcaacgagacgagccagcaccacgacgacctggag

SEQ ID NO: 45505 - RNA, 27 nt, synthetic construct
  misc_feature 1..27: note = Histone deacetylase 9 (93-101)
  source 1..27: mol_type = other RNA
ctgctcatccagcagcagcagcagatc

SEQ ID NO: 45506 - RNA, 30 nt, synthetic construct
  misc_feature 1..30: note Dolichyl-diphosphooligosaccharide-proteinosyltransferase 48 kDa subunit (180-189)
  source 1..30: mol_type = other RNA
ctgctcaaggcccccaccatcgtgggcaag

SEQ ID NO: 45507 - RNA, 27 nt, synthetic construct
  misc_feature 1..27: note = Protein FAM171B (20-28)
  source 1..27: mol_type = other RNA
ctgctcaaggcccgcctggtgcccgcc

SEQ ID NO: 45508 - RNA, 24 nt, synthetic construct
  misc_feature 1..24: note = Melanoma-associated antigen 10 (311-318)
  source 1..24: mol_type = other RNA
ctgctcaagttcctggccaaggtg

SEQ ID NO: 45509 - RNA, 27 nt, synthetic construct
  misc_feature 1..27: note = Protein TANC1 (360-368)
  source 1..27: mol_type = other RNA
ctgctcaagcccctgctgttcgaggtg

SEQ ID NO: 45510 - RNA, 24 nt, synthetic construct
  misc_feature 1..24: note = Asparagine synthetase (glutamine-hydrolyzing) (187-194)
  source 1..24: mol_type = other RNA
ctgctcaagcagctgaaggaggcc

SEQ ID NO: 45511 - RNA, 33 nt, synthetic construct
  misc_feature 1..33: note = Transmembrane protein 132B (372-382)
  source 1..33: mol_type = other RNA
ctgctcaagagcggcgggcccgacgccttcacc

SEQ ID NO: 45512 - RNA, 39 nt, synthetic construct
  misc_feature 1..39: note = BAH and coiled-coil domain-containing protein 1 (636-648)
  source 1..39: mol_type = other RNA
ctgctcaagtacagctcccaggccctggtggtcggccag

SEQ ID NO: 45513 - RNA, 30 nt, synthetic construct
  misc_feature 1..30: note = Procollagen-lysine,2-oxoglutarate 5-dioxygenase 3 (319-328)
  source 1..30: mol_type = other RNA
ctgctcctggactaccccccggaccgcgtg

SEQ ID NO: 45514 - RNA, 36 nt, synthetic construct
  misc_feature 1..36: note = Procollagen-lysine,2-oxoglutarate 5-dioxygenase 3 (319-330)
  source 1..36: mol_type = other RNA
ctgctcctggactaccccccggaccgcgtgaccctg

SEQ ID NO: 45515 - RNA, 24 nt, synthetic construct
  misc_feature 1..24: note = Mediator of RNA polymerase II transcription subunit 12 (988-995)
  source 1..24: mol_type = other RNA
ctgctcctggaggacctgatccgc

SEQ ID NO: 45516 - RNA, 27 nt, synthetic construct
  misc_feature 1..27: note = Mediator of RNA polymerase II transcription subunit 12 (988-996)
  source 1..27: mol_type = other RNA
ctgctcctggaggacctgatccgctgc

SEQ ID NO: 45517 - RNA, 27 nt, synthetic construct
  misc_feature 1..27: note = Myosin phosphatase Rho-interacting protein (997-1005)
  source 1..27: mol_type = other RNA
ctgctcctggagaagacccaggagctg

SEQ ID NO: 45518 - RNA, 63 nt, synthetic construct
  misc_feature 1..63: note = Fatty acid synthase (81-101)
  source 1..63: mol_type = other RNA
ctgctcctggaggtgacctacgaggccatcgtcgacggcgggatcaaccccgacagcctgcgc

SEQ ID NO: 45519 - RNA, 45 nt, synthetic construct
  misc_feature 1..45: note = Ephrin type-B receptor 3 (28-42)
  source 1..45: mol_type = other RNA
ctgctcctgctgcccgccggctgccgcgccctcgaggagaccctg

SEQ ID NO: 45520 - RNA, 27 nt, synthetic construct
  misc_feature 1..27: note = TBC1 domain family member 9 (215-223)
  source 1..27: mol_type = other RNA
ctgctcctgcccgacgtgatcaaggtc

SEQ ID NO: 45521 - RNA, 27 nt, synthetic construct
  misc_feature 1..27: note = Lysosomal thioesterase PPT2 (16-24)
  source 1..27: mol_type = other RNA
ctgctcctgcccttcctgccgctcctg

SEQ ID NO: 45522 - RNA, 27 nt, synthetic construct
  misc_feature 1..27: note = Tartrate-resistant acid phosphatase type 5 (13-21)
  source 1..27: mol_type = other RNA
ctgctcctgcccagcctggccgacggc

SEQ ID NO: 45523 - RNA, 27 nt, synthetic construct
  misc_feature 1..27: note = Cathepsin K (7-15)
  source 1..27: mol_type = other RNA
ctgctcctgcccgtggtcagcttcgcc

SEQ ID NO: 45524 - RNA, 27 nt, synthetic construct
  misc_feature 1..27: note = 4F2 cell-surface antigen heavy chain (521-529)
  source 1..27: mol_type = other RNA
ctgctcctgcgcttcccctacgccgcc

SEQ ID NO: 45525 - RNA, 33 nt, synthetic construct
  misc_feature 1..33: note = Glypican-6 (15-25)
  source 1..33: mol_type = other RNA
ctgctcctgagcctgcccgccggcgccgacgtg

SEQ ID NO: 45526 - RNA, 33 nt, synthetic construct
  misc_feature 1..33: note = Tyrosinase (514-524)
  source 1..33: mol_type = other RNA
ctgctcatggagaaggaggactaccacagcctg

SEQ ID NO: 45527 - RNA, 27 nt, synthetic construct
  misc_feature 1..27: note = Glutamine-tRNA ligase (137-145)
  source 1..27: mol_type = other RNA
ctgctcatgggcgaggcccgcgccgtg

SEQ ID NO: 45528 - RNA, 27 nt, synthetic construct
  misc_feature 1..27: note = Nucleolar protein 11 (405-413)
  source 1..27: mol_type = other RNA
ctgctcaacgccatcctgcacagcgcc

SEQ ID NO: 45529 - RNA, 33 nt, synthetic construct
  misc_feature 1..33: note = Eukaryotic translation initiation factor 4 gamma 1 (363-373)
  source 1..33: mol_type = other RNA
ctgctcaacggcgcccccagcccgcccgccgtg

SEQ ID NO: 45530 - RNA, 27 nt, synthetic construct
  misc_feature 1..27: note = Plexin-B3 (1376-1384)
  source 1..27: mol_type = other RNA
ctgctcaacagcaagctgttcctgctc

SEQ ID NO: 45531 - RNA, 27 nt, synthetic construct
  misc_feature 1..27: note = E3 ubiquitin-protein ligase CBL (87-95)
  source 1..27: mol_type = other RNA
ctgctccccgacacctaccagcacctg

SEQ ID NO: 45532 - RNA, 27 nt, synthetic construct
  misc_feature 1..27: note = F-box only protein 46 (301-309)
  source 1..27: mol_type = other RNA
ctgctccccgagcacgtgctggtcaag

SEQ ID NO: 45533 - RNA, 33 nt, synthetic construct
  misc_feature 1..33: note = Fibronectin isoform 6 (1328-1338)
  source 1..33: mol_type = other RNA
ctgctccccggcaccgagtacgtggtcagcgtg

SEQ ID NO: 45534 - RNA, 27 nt, synthetic construct
  misc_feature 1..27: note = Fibronectin type III domain-containing protein 3B (282-290)
  source 1..27: mol_type = other RNA
ctgctccccggcaccgtgtaccgcttc

SEQ ID NO: 45535 - RNA, 27 nt, synthetic construct
  misc_feature 1..27: note = Transportin-2 (391-399)
  source 1..27: mol_type = other RNA
ctgctcccccacctgctgccgctcctg

SEQ ID NO: 45536 - RNA, 27 nt, synthetic construct
  misc_feature 1..27: note = Atlastin-3 (264-272)
  source 1..27: mol_type = other RNA
ctgctcccccacccgggcctgcaggtg

SEQ ID NO: 45537 - RNA, 27 nt, synthetic construct
  misc_feature 1..27: note = Probable E3 SUMO-protein ligase RNF212 (145-153)
  source 1..27: mol_type = other RNA
ctgctccccccgcacagctccgccccc

SEQ ID NO: 45538 - RNA, 27 nt, synthetic construct
  misc_feature 1..27: note = Matrix metalloproteinase-17 (588-596)
  source 1..27: mol_type = other RNA
ctgctccccccgctgagccccggcgcc

SEQ ID NO: 45539 - RNA, 27 nt, synthetic construct
  misc_feature 1..27: note = Astrotactin-2 (41-49)
  source 1..27: mol_type = other RNA
ctgctccccccgccccccctgctggcc

SEQ ID NO: 45540 - RNA, 27 nt, synthetic construct
  misc_feature 1..27: note = Serine/threonine-protein kinase 32A (347-355)
  source 1..27: mol_type = other RNA
ctgctccaggagcacctggacagcgtg

SEQ ID NO: 45541 - RNA, 42 nt, synthetic construct
  misc_feature 1..42: note = Adhesion G-protein coupled receptor F3 (210-223)
  source 1..42: mol_type = other RNA
ctgctccagcccggcacccaggtgagcgtcacctccagccac

SEQ ID NO: 45542 - RNA, 30 nt, synthetic construct
  misc_feature 1..30: note = Interleukin-24 (91-100)
  source 1..30: mol_type = other RNA
ctgctccagcaggaggtgctgcagaacgtc

SEQ ID NO: 45543 - RNA, 27 nt, synthetic construct
  misc_feature 1..27: note = Oxysterol-binding protein-related protein 10 (231-239)
  source 1..27: mol_type = other RNA
ctgctccagcagagcgtgcaccaggcc

SEQ ID NO: 45544 - RNA, 27 nt, synthetic construct
  misc_feature 1..27: note = Nodal modulator 3 (688-696)
  source 1..27: mol_type = other RNA
ctgctccgcgacggcgagaactacgtg

SEQ ID NO: 45545 - RNA, 21 nt, synthetic construct
  misc_feature 1..21: note = Serine/threonine-protein phosphatase PP1-beta catalytic subunit (71-77)
  source 1..21: mol_type = other RNA
ctgctccgcctgttcgagtac

SEQ ID NO: 45546 - RNA, 27 nt, synthetic construct
  misc_feature 1..27: note = Sorting nexin-10 (27-35)
  source 1..27: mol_type = other RNA
ctgctcagcgactccagcctgcacctg

SEQ ID NO: 45547 - RNA, 27 nt, synthetic construct
  misc_feature 1..27: note = Brefeldin A-inhibited guanine nucleotide-exchange protein 2 (1424-1432)
  source 1..27: mol_type = other RNA
ctgctcagcgacgtgttcgcccagctg

SEQ ID NO: 45548 - RNA, 27 nt, synthetic construct
  misc_feature 1..27: note = BTB/POZ domain-containing protein 1 (67-75)
  source 1..27: mol_type = other RNA
ctgctcagcgacgtgcgcttcgtcctg

SEQ ID NO: 45549 - RNA, 27 nt, synthetic construct
  misc_feature 1..27: note = Spermatogenesis-associated protein 20 (129-137)
  source 1..27: mol_type = other RNA
ctgctcagcgaggacttcgtgtccgtc

SEQ ID NO: 45550 - RNA, 27 nt, synthetic construct
  misc_feature 1..27: note = Mediator of RNA polymerase II transcription subunit 13 (188-196)
  source 1..27: mol_type = other RNA
ctgctcagcgaggagcacatcaccctg

SEQ ID NO: 45551 - RNA, 27 nt, synthetic construct
  misc_feature 1..27: note = Synemin (707-715)
  source 1..27: mol_type = other RNA
ctgctcagcaaggacatcaaggaggtg

SEQ ID NO: 45552 - RNA, 36 nt, synthetic construct
  misc_feature 1..36: note = Plexin-B3 (33-44)
  source 1..36: mol_type = other RNA
ctgctcagccccccgcccctgcccctgaccggcgcc

SEQ ID NO: 45553 - RNA, 27 nt, synthetic construct
  misc_feature 1..27: note = Nuclear pore complex protein Nup88 (115-123)
  source 1..27: mol_type = other RNA
ctgctcagccccacccagcaccacgtg

SEQ ID NO: 45554 - RNA, 27 nt, synthetic construct
  misc_feature 1..27: note = Fanconi anemia group D2 protein (1110-1118)
  source 1..27: mol_type = other RNA
ctgctcagccagtccgtgcactacctg

SEQ ID NO: 45555 - RNA, 24 nt, synthetic construct
  misc_feature 1..24: note = Regulatory-associated protein of mTOR (224-231)
  source 1..24: mol_type = other RNA
ctgctcagccaggtgcaccgcctg

SEQ ID NO: 45556 - RNA, 30 nt, synthetic construct
  misc_feature 1..30: note = Muskelin (78-87)
  source 1..30: mol_type = other RNA
ctgctcagctccggcctgaagaacgactac

SEQ ID NO: 45557 - RNA, 24 nt, synthetic construct
  misc_feature 1..24: note = Ras GTPase-activating-like protein IQGAP2 (416-423)
  source 1..24: mol_type = other RNA
ctgctcagcgtgaagctggaggtc

SEQ ID NO: 45558 - RNA, 27 nt, synthetic construct
  misc_feature 1..27: note = Mediator of RNA polymerase II transcription subunit 13 (1410-1418)
  source 1..27: mol_type = other RNA
ctgctcaccgacggcatcatgcgcgtg

SEQ ID NO: 45559 - RNA, 27 nt, synthetic construct
  misc_feature 1..27: note = T-complex protein 1 subunit zeta-2 (471-479)
  source 1..27: mol_type = other RNA
ctgctcgtggacgagatcatgcgcgcc

SEQ ID NO: 45560 - RNA, 33 nt, synthetic construct
  misc_feature 1..33: note = Nuclear factor of activated T-cells, cytoplasmic 2 (115-125)
  source 1..33: mol_type = other RNA
ctgctcgtggagcagcccccgctggccggcgtc

SEQ ID NO: 45561 - RNA, 33 nt, synthetic construct
  misc_feature 1..33: note = Ankyrin repeat and KH domain-containing protein 1 (1008-1018)
  source 1..33: mol_type = other RNA
ctgctcgtgcaggagcccgacggcctgatggtc

SEQ ID NO: 45562 - RNA, 27 nt, synthetic construct
  misc_feature 1..27: note = Structure-specific endonuclease subunit SLX1 (242-250)
  source 1..27: mol_type = other RNA
ctgctctggggcgacctgatctggctg

SEQ ID NO: 45563 - RNA, 27 nt, synthetic construct
  misc_feature 1..27: note = Interleukin-24 (41-49)
  source 1..27: mol_type = other RNA
ctgctctggagccaggtgtccggcgcc

SEQ ID NO: 45564 - RNA, 33 nt, synthetic construct
  misc_feature 1..33: note = Interleukin-24 (41-51)
  source 1..33: mol_type = other RNA
ctgctctggagccaggtgtccggcgcccagggg

SEQ ID NO: 45565 - RNA, 27 nt, synthetic construct
  misc_feature 1..27: note = Glutamate receptor ionotropic, kainate 3 (325-333)
  source 1..27: mol_type = other RNA
ctgctctacgacgccgtgcacatcgtc

SEQ ID NO: 45566 - RNA, 33 nt, synthetic construct
  misc_feature 1..33: note = AT-rich interactive domain-containing protein 1A (1336-1346)
  source 1..33: mol_type = other RNA
ctgctctacgacgacaacagcatcatgaccttc

SEQ ID NO: 45567 - RNA, 30 nt, synthetic construct
  misc_feature 1..30: note = Intron-binding protein aquarius (152-161)
  source 1..30: mol_type = other RNA
ctgctctacgacttccagctgatcaacgtg

SEQ ID NO: 45568 - RNA, 27 nt, synthetic construct
  misc_feature 1..27: note = Nicastrin (501-509)
  source 1..27: mol_type = other RNA
ctgctctacggcttcctgatcaaggcc

SEQ ID NO: 45569 - RNA, 30 nt, synthetic construct
  misc_feature 1..30: note = Adenosine 3'-phospho 5'-phosphosulfate transporter 1 (251-260)
  source 1..30: mol_type = other RNA
ctgctctacggccacaccgtgaccgtcgtg

SEQ ID NO: 45570 - RNA, 30 nt, synthetic construct
  misc_feature 1..30: note = DNA-dependent protein kinase catalytic subunit (421-430)
  source 1..30: mol_type = other RNA
ctgctctacctggacaccgtgcccgaggtc

SEQ ID NO: 45571 - RNA, 27 nt, synthetic construct
  misc_feature 1..27: note = Unconventional myosin-Ib (533-541)
  source 1..27: mol_type = other RNA
ctgctctaccgcgacctgagccaggcc

SEQ ID NO: 45572 - RNA, 27 nt, synthetic construct
  misc_feature 1..27: note = Nuclear pore complex protein Nup85 (266-274)
  source 1..27: mol_type = other RNA
ctgctctacagcaaccccaccgtgaag

SEQ ID NO: 45573 - RNA, 30 nt, synthetic construct
  misc_feature 1..30: note = Microtubule-actin cross-linking factor 1, isoforms 1/2/3/5 (794-803)
  source 1..30: mol_type = other RNA
ctgatggacgagaagctcctgcacaacgtg

SEQ ID NO: 45574 - RNA, 30 nt, synthetic construct
  misc_feature 1..30: note = Tyrosinase (515-524)
  source 1..30: mol_type = other RNA
ctgatggagaaggaggactaccacagcctc

SEQ ID NO: 45575 - RNA, 33 nt, synthetic construct
  misc_feature 1..33: note = Tyrosinase (515-525)
  source 1..33: mol_type = other RNA
ctgatggagaaggaggactaccacagcctctac

SEQ ID NO: 45576 - RNA, 24 nt, synthetic construct
  misc_feature 1..24: note = Leucine-tRNA ligase, cytoplasmic (211-218)
  source 1..24: mol_type = other RNA
ctgatggaggtgacccacgacctc

SEQ ID NO: 45577 - RNA, 24 nt, synthetic construct
  misc_feature 1..24: note = Dynein light chain roadblock-type 1 (52-59)
  source 1..24: mol_type = other RNA
ctgatgcacagcttcatcctcaag

SEQ ID NO: 45578 - RNA, 30 nt, synthetic construct
  misc_feature 1..30: note = T-complex protein 1 subunit beta (159-168)
  source 1..30: mol_type = other RNA
ctgatgaacatcgccggcaccaccctcagc

SEQ ID NO: 45579 - RNA, 24 nt, synthetic construct
  misc_feature 1..24: note = Phosphatidylinositol 5-phosphate 4-kinase type-2 beta (66-73)
  source 1..24: mol_type = other RNA
ctgatgcccgacgacttcaaggcc

SEQ ID NO: 45580 - RNA, 27 nt, synthetic construct
  misc_feature 1..27: note = Folliculin-interacting protein 1 (804-812)
  source 1..27: mol_type = other RNA
ctgatgagcgacctctcccacgccgtg

SEQ ID NO: 45581 - RNA, 27 nt, synthetic construct
  misc_feature 1..27: note = Constitutive coactivator of PPAR-gamma-like protein 2 (619-627)
  source 1..27: mol_type = other RNA
ctgatgtacccctacatctaccacgtg

SEQ ID NO: 45582 - RNA, 27 nt, synthetic construct
  misc_feature 1..27: note = Sodium channel protein type 5 subunit alpha (1513-1521)
  source 1..27: mol_type = other RNA
ctgaacaagtaccagggcttcatcttc

SEQ ID NO: 45583 - RNA, 18 nt, synthetic construct
  misc_feature 1..18: note = Heterogeneous nuclear ribonucleoprotein K (133-138)
  source 1..18: mol_type = other RNA
ctgaactaccagcactac

SEQ ID NO: 45584 - RNA, 24 nt, synthetic construct
  misc_feature 1..24: note = Tropomodulin-2 (46-53)
  source 1..24: mol_type = other RNA
ctgcccgccggcttccgccagaag

SEQ ID NO: 45585 - RNA, 21 nt, synthetic construct
  misc_feature 1..21: note = Probable ATP-dependent RNA helicase DDX5 (150-156)
  source 1..21: mol_type = other RNA
ctgcccgccatcgtgcacatc

SEQ ID NO: 45586 - RNA, 33 nt, synthetic construct
  misc_feature 1..33: note = Basement membrane-specific heparan sulfate proteoglycan core protein (1907-1917)
  source 1..33: mol_type = other RNA
ctgcccgccaaggcccagatccacggcgggatc

SEQ ID NO: 45587 - RNA, 24 nt, synthetic construct
  misc_feature 1..24: note = UV excision repair protein RAD23 homolog B (278-285)
  source 1..24: mol_type = other RNA
ctgcccgccctcctgcagcagatc

SEQ ID NO: 45588 - RNA, 27 nt, synthetic construct
  misc_feature 1..27: note = Potassium/sodium hyperpolarization-activated cyclic nucleotide-gated channel 3 (671-679)
  source 1..27: mol_type = other RNA
ctgcccgccccgcccgcccgcaccctc

SEQ ID NO: 45589 - RNA, 30 nt, synthetic construct
  misc_feature 1..30: note = AT-hook-containing transcription factor (393-402)
  source 1..30: mol_type = other RNA
ctgcccgccccgagcggccaggcccccatg

SEQ ID NO: 45590 - RNA, 30 nt, synthetic construct
  misc_feature 1..30: note = Lysosome-associated membraneoprotein 1 (249-258)
  source 1..30: mol_type = other RNA
ctgcccgacgcccgcgacccggccttcaag

SEQ ID NO: 45591 - RNA, 48 nt, synthetic construct
  misc_feature 1..48: note = Legumain (198-213)
  source 1..48: mol_type = other RNA
ctgcccgacaacatcaacgtgtacgccaccaccgccgcgaacccgcgc

SEQ ID NO: 45592 - RNA, 24 nt, synthetic construct
  misc_feature 1..24: note = Serine/threonine-protein kinase ULK3 (109-116)
  source 1..24: mol_type = other RNA
ctgcccgagaaggtggcccgcgtc

SEQ ID NO: 45593 - RNA, 24 nt, synthetic construct
  misc_feature 1..24: note = Solute carrier family 23 member 2 (603-610)
  source 1..24: mol_type = other RNA
ctgcccttcggcatgaacatcatc

SEQ ID NO: 45594 - RNA, 36 nt, synthetic construct
  misc_feature 1..36: note = Retinoic acid receptor RXR-beta (168-179)
  source 1..36: mol_type = other RNA
ctgcccggcgggggcagcgggccgcccgaggacgtg

SEQ ID NO: 45595 - RNA, 45 nt, synthetic construct
  misc_feature 1..45: note = Mucin-19 (5182-5196)
  source 1..45: mol_type = other RNA
ctgcccggcgtgagcgccgggctcaccggcaccatcgggtccccg

SEQ ID NO: 45596 - RNA, 27 nt, synthetic construct
  misc_feature 1..27: note = (Pyruvate dehydrogenase (acetyl-transferring))-phosphatase 1, mitochondrial (168-176)
  source 1..27: mol_type = other RNA
ctgccccacgagaccctcctggagatc

SEQ ID NO: 45597 - RNA, 24 nt, synthetic construct
  misc_feature 1..24: note = Transportin-1 (395-402)
  source 1..24: mol_type = other RNA
ctgccccacatcctcccgctgctg

SEQ ID NO: 45598 - RNA, 27 nt, synthetic construct
  misc_feature 1..27: note = Phosphatidylcholine translocator ABCB4 (1167-1175)
  source 1..27: mol_type = other RNA
ctgccccacaagtacgagacccgcgtg

SEQ ID NO: 45599 - RNA, 27 nt, synthetic construct
  misc_feature 1..27: note = HMG domain-containing protein 3 (213-221)
  source 1..27: mol_type = other RNA
ctgccccacctcccgcagagcgagatc

SEQ ID NO: 45600 - RNA, 27 nt, synthetic construct
  misc_feature 1..27: note = Low-density lipoprotein receptor-related protein 2 (704-712)
  source 1..27: mol_type = other RNA
ctgccccacccgttcgccatcaccatc

SEQ ID NO: 45601 - RNA, 24 nt, synthetic construct
  misc_feature 1..24: note = Melanophilin (392-399)
  source 1..24: mol_type = other RNA
ctgcccatcttcctcccgcgcgtg

SEQ ID NO: 45602 - RNA, 45 nt, synthetic construct
  misc_feature 1..45: note = Collagen alpha-1(I) chain (1013-1027)
  source 1..45: mol_type = other RNA
ctgcccatcatcgacgtggccccgctcgacgtcggcgcccccgac

SEQ ID NO: 45603 - RNA, 27 nt, synthetic construct
  misc_feature 1..27: note = Coatomer subunit gamma-1 (712-720)
  source 1..27: mol_type = other RNA
ctgcccaaggaggacccgaccgccgtg

SEQ ID NO: 45604 - RNA, 27 nt, synthetic construct
  misc_feature 1..27: note = Tight junction protein ZO-1 (478-486)
  source 1..27: mol_type = other RNA
ctgcccaagggcgaggaggtgaccatc

SEQ ID NO: 45605 - RNA, 24 nt, synthetic construct
  misc_feature 1..24: note = 40S ribosomal protein S26 (64-71)
  source 1..24: mol_type = other RNA
ctgcccaagctctacgtgaagctg

SEQ ID NO: 45606 - RNA, 27 nt, synthetic construct
  misc_feature 1..27: note = Interferon alpha-inducible protein 27, mitochondrial (28-36)
  source 1..27: mol_type = other RNA
ctgcccctcgcccgcatcgccaccgtg

SEQ ID NO: 45607 - RNA, 27 nt, synthetic construct
  misc_feature 1..27: note = Receptor tyrosine-protein kinase erbB-3 (97-105)
  source 1..27: mol_type = other RNA
ctgcccctcccgaacctgcgcgtggtc

SEQ ID NO: 45608 - RNA, 27 nt, synthetic construct
  misc_feature 1..27: note = Ubiquitin domain-containing protein UBFD1 (251-259)
  source 1..27: mol_type = other RNA
ctgcccatgggcagcatcaagaacgtg

SEQ ID NO: 45609 - RNA, 27 nt, synthetic construct
  misc_feature 1..27: note = Ras-related protein Rab-38 (114-122)
  source 1..27: mol_type = other RNA
ctgcccaacggcaagccggtgagcgtc

SEQ ID NO: 45610 - RNA, 27 nt, synthetic construct
  misc_feature 1..27: note = Transcriptional regulator Kaiso (298-306)
  source 1..27: mol_type = other RNA
ctgcccaaccacatgccgagctccatc

SEQ ID NO: 45611 - RNA, 27 nt, synthetic construct
  misc_feature 1..27: note = Bromodomain-containing protein 4 (958-966)
  source 1..27: mol_type = other RNA
ctgcccccgcccccccaccccagcgtg

SEQ ID NO: 45612 - RNA, 27 nt, synthetic construct
  misc_feature 1..27: note = Shootin-1 (302-310)
  source 1..27: mol_type = other RNA
ctgcccccgcccccccccaacccgatc

SEQ ID NO: 45613 - RNA, 24 nt, synthetic construct
  misc_feature 1..24: note = Nicotinamide phosphoribosyltransferase (344-351)
  source 1..24: mol_type = other RNA
ctgcccccgtacctccgcgtgatc

SEQ ID NO: 45614 - RNA, 27 nt, synthetic construct
  misc_feature 1..27: note = Kinase D-interacting substrate of 220 kDa (104-112)
  source 1..27: mol_type = other RNA
ctgccccgcgaccagaacaacggcctc

SEQ ID NO: 45615 - RNA, 27 nt, synthetic construct
  misc_feature 1..27: note = Cap-specific mRNAucleoside-2'-O-)-methyltransferase 1 (631-639)
  source 1..27: mol_type = other RNA
ctgccccgcgacaccctcctgagcgtg

SEQ ID NO: 45616 - RNA, 30 nt, synthetic construct
  misc_feature 1..30: note = Serine/threonine-protein kinase 32A (171-180)
  source 1..30: mol_type = other RNA
ctgccccgcgagacccagatcaccacgatg

SEQ ID NO: 45617 - RNA, 30 nt, synthetic construct
  misc_feature 1..30: note = Ubiquitin-associated protein 1 (236-245)
  source 1..30: mol_type = other RNA
ctgccccgcggcgggagcggctccgtgctc

SEQ ID NO: 45618 - RNA, 27 nt, synthetic construct
  misc_feature 1..27: note = Intercellular adhesion molecule 1 (16-24)
  source 1..27: mol_type = other RNA
ctgccccgcggcgggagcgtgctcgtc

SEQ ID NO: 45619 - RNA, 27 nt, synthetic construct
  misc_feature 1..27: note = Ropporin-1B (153-161)
  source 1..27: mol_type = other RNA
ctgccccgcatcccgttcagcaccttc

SEQ ID NO: 45620 - RNA, 27 nt, synthetic construct
  misc_feature 1..27: note = LIM domain and actin-binding protein 1 (161-169)
  source 1..27: mol_type = other RNA
ctgccccgcctcagcgagacctccatc

SEQ ID NO: 45621 - RNA, 27 nt, synthetic construct
  misc_feature 1..27: note = Apolipoprotein L1 (85-93)
  source 1..27: mol_type = other RNA
ctgccccgcaacgaggccgacgagctc

SEQ ID NO: 45622 - RNA, 27 nt, synthetic construct
  misc_feature 1..27: note = E3 ubiquitin-protein ligase TRIP12 (518-526)
  source 1..27: mol_type = other RNA
ctgccccgcagctccgccgtggtcgtg

SEQ ID NO: 45623 - RNA, 27 nt, synthetic construct
  misc_feature 1..27: note = Periaxin (1315-1323)
  source 1..27: mol_type = other RNA
ctgccccgcgtgggcctcgccgccccg

SEQ ID NO: 45624 - RNA, 24 nt, synthetic construct
  misc_feature 1..24: note = SET domain-containing protein 5 (1382-1389)
  source 1..24: mol_type = other RNA
ctgcccagcgacctccgcaccatc

SEQ ID NO: 45625 - RNA, 48 nt, synthetic construct
  misc_feature 1..48: note = Cathepsin F (337-352)
  source 1..48: mol_type = other RNA
ctgcccagcaacgcctactccgccatcaagaacctcggcgggctggag

SEQ ID NO: 45626 - RNA, 27 nt, synthetic construct
  misc_feature 1..27: note = Ropporin-1B (99-107)
  source 1..27: mol_type = other RNA
ctgcccaccgacctcttcaacagcgtg

SEQ ID NO: 45627 - RNA, 24 nt, synthetic construct
  misc_feature 1..24: note = AP-5 complex subunit zeta-1 (154-161)
  source 1..24: mol_type = other RNA
ctgcccgtgatggccaaggtcgtg

SEQ ID NO: 45628 - RNA, 24 nt, synthetic construct
  misc_feature 1..24: note = Rho guanine nucleotide exchange factor 2 (884-891)
  source 1..24: mol_type = other RNA
ctgcccgtgaccacccgcagcgtc

SEQ ID NO: 45629 - RNA, 24 nt, synthetic construct
  misc_feature 1..24: note = Protein O-mannosyl-transferase 1 (538-545)
  source 1..24: mol_type = other RNA
ctgcccgtggtcctccagcacatc

SEQ ID NO: 45630 - RNA, 27 nt, synthetic construct
  misc_feature 1..27: note = Histone-lysine N-methyltransferase 2A (1096-1104)
  source 1..27: mol_type = other RNA
ctgccctgggaggagcgcgagaagatc

SEQ ID NO: 45631 - RNA, 27 nt, synthetic construct
  misc_feature 1..27: note = Lathosterol oxidase (84-92)
  source 1..27: mol_type = other RNA
ctgccctggatcagcatcctcaccgtg

SEQ ID NO: 45632 - RNA, 27 nt, synthetic construct
  misc_feature 1..27: note = Metallophosphoesterase MPPED2 (106-114)
  source 1..27: mol_type = other RNA
ctgccctacgagtacaagatcgtgatc

SEQ ID NO: 45633 - RNA, 24 nt, synthetic construct
  misc_feature 1..24: note = Glia-derived nexin (256-263)
  source 1..24: mol_type = other RNA
ctgccctaccacggcgagagcatc

SEQ ID NO: 45634 - RNA, 30 nt, synthetic construct
  misc_feature 1..30: note = Glia-derived nexin (256-265)
  source 1..30: mol_type = other RNA
ctgccctaccacggcgagagcatctccatg

SEQ ID NO: 45635 - RNA, 24 nt, synthetic construct
  misc_feature 1..24: note = Neurofibromin (488-495)
  source 1..24: mol_type = other RNA
ctgccctacctcttccacgtggtc

SEQ ID NO: 45636 - RNA, 30 nt, synthetic construct
  misc_feature 1..30: note = NAD-dependent protein deacetylase sirtuin-2 (95-104)
  source 1..30: mol_type = other RNA
ctgccctacccggaggccatcttcgagatc

SEQ ID NO: 45637 - RNA, 30 nt, synthetic construct
  misc_feature 1..30: note = NAD-dependent protein deacetylase sirtuin-3, mitochondrial (173-182)
  source 1..30: mol_type = other RNA
ctgccctacccggaggccatcttcgagctc

SEQ ID NO: 45638 - RNA, 27 nt, synthetic construct
  misc_feature 1..27: note = CDK5 and ABL1 enzyme substrate 1 (27-35)
  source 1..27: mol_type = other RNA
ctgccctaccgcgacagcacccaggtg

SEQ ID NO: 45639 - RNA, 24 nt, synthetic construct
  misc_feature 1..24: note = Serpin B6 (104-111)
  source 1..24: mol_type = other RNA
ctgccctacgtgggcaaggagctc

SEQ ID NO: 45640 - RNA, 33 nt, synthetic construct
  misc_feature 1..33: note = Guanine nucleotide exchange factor VAV3 (680-690)
  source 1..33: mol_type = other RNA
ctgcaggccgagaccgagctcatcaaccgcgtg

SEQ ID NO: 45641 - RNA, 27 nt, synthetic construct
  misc_feature 1..27: note = Peroxisome proliferator-activated receptor gamma coactivator-related protein 1 (1097-1105)
  source 1..27: mol_type = other RNA
ctgcaggcccccgagctcgccaacgtg

SEQ ID NO: 45642 - RNA, 36 nt, synthetic construct
  misc_feature 1..36: note = Zinc finger homeobox protein 2 (544-555)
  source 1..36: mol_type = other RNA
ctgcagggcttccaggccgggcccggcgggcagggc

SEQ ID NO: 45643 - RNA, 48 nt, synthetic construct
  misc_feature 1..48: note = Proline-rich transmembrane protein 3 (172-187)
  source 1..48: mol_type = other RNA
ctgcagcacgagggccaggaggggcagtggcccccgcgcgacgagggc

SEQ ID NO: 45644 - RNA, 72 nt, synthetic construct
  misc_feature 1..72: note = Plectin (387-410)
  source 1..72: mol_type = other RNA
ctgcagatggaggccggcctctgcgaggagcagctgaaccaggccgacgcgctgctccagagcgacgtgcgc

SEQ ID NO: 45645 - RNA, 33 nt, synthetic construct
  misc_feature 1..33: note = T-complex protein 1 subunit gamma (268-278)
  source 1..33: mol_type = other RNA
ctgcagatggaggaggagtacatccagcagctc

SEQ ID NO: 45646 - RNA, 42 nt, synthetic construct
  misc_feature 1..42: note = Glyceraldehyde-3-phosphate dehydrogenase (203-216)
  source 1..42: mol_type = other RNA
ctgcagaacatcatccccgccagcaccggcgccgcgaaggcc

SEQ ID NO: 45647 - RNA, 27 nt, synthetic construct
  misc_feature 1..27: note = Ubiquitin carboxyl-terminal hydrolase 22 (305-313)
  source 1..27: mol_type = other RNA
ctgcagagcgacgtgacctgccaggtc

SEQ ID NO: 45648 - RNA, 24 nt, synthetic construct
  misc_feature 1..24: note = Titin (123-130)
  source 1..24: mol_type = other RNA
ctgcaggtgcgcgtcaccggcatc

SEQ ID NO: 45649 - RNA, 54 nt, synthetic construct
  misc_feature 1..54: note = Collagen alpha-1(VI) chain (694-711)
  source 1..54: mol_type = other RNA
ctgcagtggatggccggcgggaccttcaccggcgaggccctccagtacacgcgc

SEQ ID NO: 45650 - RNA, 24 nt, synthetic construct
  misc_feature 1..24: note = Interferon regulatory factor 2-binding protein 1 (301-308)
  source 1..24: mol_type = other RNA
ctgcgcgagcccggcaaggccctc

SEQ ID NO: 45651 - RNA, 33 nt, synthetic construct
  misc_feature 1..33: note = Disintegrin and metalloproteinase domain-containing protein 10 (60-70)
  source 1..33: mol_type = other RNA
ctgcgcctcgacttccacgcccacggccggcac

SEQ ID NO: 45652 - RNA, 30 nt, synthetic construct
  misc_feature 1..30: note = Keratin, type I cytoskeletal 10 (294-303)
  source 1..30: mol_type = other RNA
ctgcgcaacgtgagcaccggcgacgtcaac

SEQ ID NO: 45653 - RNA, 33 nt, synthetic construct
  misc_feature 1..33: note = Casein kinase II subunit alpha (305-315)
  source 1..33: mol_type = other RNA
ctgcgctacgaccaccagagccggctcaccgcc

SEQ ID NO: 45654 - RNA, 39 nt, synthetic construct
  misc_feature 1..39: note = SKI family transcriptional corepressor 2 (329-341)
  source 1..39: mol_type = other RNA
ctgagcgccgccgcggcctccctcagcgtggccgccgcc

SEQ ID NO: 45655 - RNA, 27 nt, synthetic construct
  misc_feature 1..27: note = DNA-binding protein RFX7 (64-72)
  source 1..27: mol_type = other RNA
ctgagcgccgccgacttcggcaagatc

SEQ ID NO: 45656 - RNA, 57 nt, synthetic construct
  misc_feature 1..57: note = Heterogeneous nuclear ribonucleoprotein U (186-204)
  source 1..57: mol_type = other RNA
ctgagcgcctccagcctcaccatggagtccttcgccttcctgtgggcgggcgggcgc

SEQ ID NO: 45657 - RNA, 27 nt, synthetic construct
  misc_feature 1..27: note = Unconventional myosin-Ib (87-95)
  source 1..27: mol_type = other RNA
ctgagcgacgaggcctaccgctccctc

SEQ ID NO: 45658 - RNA, 27 nt, synthetic construct
  misc_feature 1..27: note = Leucine-tRNA ligase, cytoplasmic (166-174)
  source 1..27: mol_type = other RNA
ctgagcgacgaggagatcgtgaagttc

SEQ ID NO: 45659 - RNA, 27 nt, synthetic construct
  misc_feature 1..27: note = 1-phosphatidylinositol 4,5-bisphosphate phosphodiesterase beta-4 (725-733)
  source 1..27: mol_type = other RNA
ctgagcgacaagaagatcggcacctac

SEQ ID NO: 45660 - RNA, 27 nt, synthetic construct
  misc_feature 1..27: note = CCAAT/enhancer-binding protein beta (118-126)
  source 1..27: mol_type = other RNA
ctgagcgacctcttctccgacgactac

SEQ ID NO: 45661 - RNA, 27 nt, synthetic construct
  misc_feature 1..27: note = Ras association domain-containing protein 3 (88-96)
  source 1..27: mol_type = other RNA
ctgagcgaccgcgagcaccccctctac

SEQ ID NO: 45662 - RNA, 27 nt, synthetic construct
  misc_feature 1..27: note = Plexin-D1 (920-928)
  source 1..27: mol_type = other RNA
ctgagcgacgtggcccacggcgtctgg

SEQ ID NO: 45663 - RNA, 27 nt, synthetic construct
  misc_feature 1..27: note = Melanoma antigen preferentially expressed in tumors (334-342)
  source 1..27: mol_type = other RNA
ctgagcgagggcgacgtgatgcacctc

SEQ ID NO: 45664 - RNA, 27 nt, synthetic construct
  misc_feature 1..27: note = Putative pre-mRNA-splicing factor ATP-dependent RNA helicase DHX16 (506-514)
  source 1..27: mol_type = other RNA
ctgagcgagcccgacctcgcctcctac

SEQ ID NO: 45665 - RNA, 21 nt, synthetic construct
  misc_feature 1..21: note = Hemoglobin subunit alpha (6-12)
  source 1..21: mol_type = other RNA
ctgagcttccccaccaccaag

SEQ ID NO: 45666 - RNA, 27 nt, synthetic construct
  misc_feature 1..27: note = Hemoglobin subunit alpha (6-14)
  source 1..27: mol_type = other RNA
ctgagcttccccaccaccaagacgtac

SEQ ID NO: 45667 - RNA, 27 nt, synthetic construct
  misc_feature 1..27: note = Sister chromatid cohesion protein PDS5 homolog B (656-664)
  source 1..27: mol_type = other RNA
ctgagcttcacccaccccatctccttc

SEQ ID NO: 45668 - RNA, 30 nt, synthetic construct
  misc_feature 1..30: note = Zinc transporter ZIP12 (31-40)
  source 1..30: mol_type = other RNA
ctgagcggcgacgccctcctgcacctgatc

SEQ ID NO: 45669 - RNA, 30 nt, synthetic construct
  misc_feature 1..30: note = Asparagine synthetase (glutamine-hydrolyzing) (174-183)
  source 1..30: mol_type = other RNA
ctgagcggcgggctcgactccagcctggtg

SEQ ID NO: 45670 - RNA, 27 nt, synthetic construct
  misc_feature 1..27: note = Phosphorylase b kinase regulatory subunit alpha, liver isoform (46-54)
  source 1..27: mol_type = other RNA
ctgagcggccagcacggggtgaccgtc

SEQ ID NO: 45671 - RNA, 33 nt, synthetic construct
  misc_feature 1..33: note = PCNA-interacting partner (149-159)
  source 1..33: mol_type = other RNA
ctgagcatccccacctccccgaccagcaagtac

SEQ ID NO: 45672 - RNA, 24 nt, synthetic construct
  misc_feature 1..24: note = Synemin (708-715)
  source 1..24: mol_type = other RNA
ctgagcaaggacatcaaggaggtg

SEQ ID NO: 45673 - RNA, 24 nt, synthetic construct
  misc_feature 1..24: note = Ryanodine receptor 1 (442-449)
  source 1..24: mol_type = other RNA
ctgagcctccaggacctgatcatc

SEQ ID NO: 45674 - RNA, 33 nt, synthetic construct
  misc_feature 1..33: note = Codanin-1 (382-392)
  source 1..33: mol_type = other RNA
ctgagcaacctcgacaagggcaccctgaagctg

SEQ ID NO: 45675 - RNA, 30 nt, synthetic construct
  misc_feature 1..30: note = Caprin-2 (108-117)
  source 1..30: mol_type = other RNA
ctgagctccgccgccagcccctcccaggcg

SEQ ID NO: 45676 - RNA, 57 nt, synthetic construct
  misc_feature 1..57: note = Protein unc-13 homolog D (375-393)
  source 1..57: mol_type = other RNA
ctgagctccggccagaaggaccaggggcaggccgccaacatgctctgcgtggtcgtg

SEQ ID NO: 45677 - RNA, 30 nt, synthetic construct
  misc_feature 1..30: note = Melanocyte-stimulating hormone receptor (129-138)
  source 1..30: mol_type = other RNA
ctgagctccctctgcttcctgggcgccatc

SEQ ID NO: 45678 - RNA, 27 nt, synthetic construct
  misc_feature 1..27: note = Protein prune homolog 2 (1282-1290)
  source 1..27: mol_type = other RNA
ctgagctcccccgagaccggcaagtac

SEQ ID NO: 45679 - RNA, 27 nt, synthetic construct
  misc_feature 1..27: note = Kelch-like protein 12 (386-394)
  source 1..27: mol_type = other RNA
ctgagctccgtggaggcctacaacatc

SEQ ID NO: 45680 - RNA, 36 nt, synthetic construct
  misc_feature 1..36: note = AP-2 complex subunit beta (710-721)
  source 1..36: mol_type = other RNA
ctgagcaccggcatcgggatggcccccggcgggtac

SEQ ID NO: 45681 - RNA, 30 nt, synthetic construct
  misc_feature 1..30: note = Peroxisome assembly protein 12 (247-256)
  source 1..30: mol_type = other RNA
ctgagcaccggcctctccgtgggggtcttc

SEQ ID NO: 45682 - RNA, 27 nt, synthetic construct
  misc_feature 1..27: note = Amyloid protein-binding protein 2 (472-480)
  source 1..27: mol_type = other RNA
ctgagcgtgggccacctcgcctccctg

SEQ ID NO: 45683 - RNA, 21 nt, synthetic construct
  misc_feature 1..21: note = Serine/threonine-protein kinase mTOR (1960-1966)
  source 1..21: mol_type = other RNA
ctgaccgacatcggccgctac

SEQ ID NO: 45684 - RNA, 24 nt, synthetic construct
  misc_feature 1..24: note = Tyrosine-protein kinase BAZ1B (894-901)
  source 1..24: mol_type = other RNA
ctgaccgacatgaagcaggtgttc

SEQ ID NO: 45685 - RNA, 30 nt, synthetic construct
  misc_feature 1..30: note = CDC2L5 protein kinase (1231-1240)
  source 1..30: mol_type = other RNA
ctgaccgacccccacgccggcgtgaaggcc

SEQ ID NO: 45686 - RNA, 27 nt, synthetic construct
  misc_feature 1..27: note = Zinc finger with UFM1-specific peptidase domain protein (139-147)
  source 1..27: mol_type = other RNA
ctgaccgagatcaagggcagcgtgtac

SEQ ID NO: 45687 - RNA, 24 nt, synthetic construct
  misc_feature 1..24: note = Protocadherin-15 (1267-1274)
  source 1..24: mol_type = other RNA
ctgaccgagatcctcgaccgctac

SEQ ID NO: 45688 - RNA, 27 nt, synthetic construct
  misc_feature 1..27: note = Beta-1-syntrophin (254-262)
  source 1..27: mol_type = other RNA
ctgaccgagaaggacctcctgatctac

SEQ ID NO: 45689 - RNA, 27 nt, synthetic construct
  misc_feature 1..27: note = Alpha-1-syntrophin (122-130)
  source 1..27: mol_type = other RNA
ctgaccgagaaggagctcctgctgtac

SEQ ID NO: 45690 - RNA, 27 nt, synthetic construct
  misc_feature 1..27: note = Nucleoprotein TPR (587-595)
  source 1..27: mol_type = other RNA
ctgaccgagctcgagcagctgcgcaag

SEQ ID NO: 45691 - RNA, 27 nt, synthetic construct
  misc_feature 1..27: note = Zinc finger MIZ domain-containing protein 1 (470-478)
  source 1..27: mol_type = other RNA
ctgaccttccccgtgcgcgacggcgtc

SEQ ID NO: 45692 - RNA, 48 nt, synthetic construct
  misc_feature 1..48: note = Basement membrane-specific heparan sulfate proteoglycan core protein (350-365)
  source 1..48: mol_type = other RNA
ctgaccggcgagttcaccgtggagcccgtcccggagggggcccagctc

SEQ ID NO: 45693 - RNA, 24 nt, synthetic construct
  misc_feature 1..24: note = Erythrocyte band 7 integral membrane protein (109-116)
  source 1..24: mol_type = other RNA
ctgaccaaggacagcgtgaccatc

SEQ ID NO: 45694 - RNA, 27 nt, synthetic construct
  misc_feature 1..27: note = CCR4-NOT transcription complex subunit 1 (247-255)
  source 1..27: mol_type = other RNA
ctgaccaagcccatgcagatcctctac

SEQ ID NO: 45695 - RNA, 27 nt, synthetic construct
  misc_feature 1..27: note = Phenylalanine-tRNA ligase alpha subunit (381-389)
  source 1..27: mol_type = other RNA
ctgaccctcggccacctgatgggggtg

SEQ ID NO: 45696 - RNA, 27 nt, synthetic construct
  misc_feature 1..27: note = Plectin (1055-1063)
  source 1..27: mol_type = other RNA
ctgaccctcggcaagctggagcaggtg

SEQ ID NO: 45697 - RNA, 81 nt, synthetic construct
  misc_feature 1..81: note = POU domain, class 6, transcription factor 2 (131-157)
  source 1..81: mol_type = other RNA
ctgaccctccccaccgccaacctgacgaacatccagggcctggtggccgcggccgccgccgggggcatcatgaccctcccg

SEQ ID NO: 45698 - RNA, 27 nt, synthetic construct
  misc_feature 1..27: note = Cytoplasmic dynein 1 heavy chain 1 (469-477)
  source 1..27: mol_type = other RNA
ctgaccatggagatcaaccccaaggtg

SEQ ID NO: 45699 - RNA, 30 nt, synthetic construct
  misc_feature 1..30: note = Plasma membrane calcium-transporting ATPase 1 (480-489)
  source 1..30: mol_type = other RNA
ctgaccatgaaccgcatgaccgtggtccag

SEQ ID NO: 45700 - RNA, 36 nt, synthetic construct
  misc_feature 1..36: note = Insulin-like growth factor-binding protein complex acid labile subunit (399-410)
  source 1..36: mol_type = other RNA
ctgaccaacgtggccgtcatgaacctcagcggcaac

SEQ ID NO: 45701 - RNA, 27 nt, synthetic construct
  misc_feature 1..27: note = Peroxisomal acyl-coenzyme A oxidase 1 (273-281)
  source 1..27: mol_type = other RNA
ctgacctacggcaccatggtgttcgtc

SEQ ID NO: 45702 - RNA, 36 nt, synthetic construct
  misc_feature 1..36: note = Potassium/sodium hyperpolarization-activated cyclic nucleotide-gated channel 4 (1006-1017)
  source 1..36: mol_type = other RNA
ctggtggccggcgccagcgggggcgcgtcccccgtc

SEQ ID NO: 45703 - RNA, 30 nt, synthetic construct
  misc_feature 1..30: note = ER membrane protein complex subunit 7 (68-77)
  source 1..30: mol_type = other RNA
ctggtggacggcgaggagcacgtcgggttc

SEQ ID NO: 45704 - RNA, 24 nt, synthetic construct
  misc_feature 1..24: note = Manganese-transporting ATPase 13A1 (282-289)
  source 1..24: mol_type = other RNA
ctggtggacatccccgtcgagttc

SEQ ID NO: 45705 - RNA, 27 nt, synthetic construct
  misc_feature 1..27: note = Supervillin (1622-1630)
  source 1..27: mol_type = other RNA
ctggtggacaaccaccacgaggtctac

SEQ ID NO: 45706 - RNA, 27 nt, synthetic construct
  misc_feature 1..27: note = Aldehyde dehydrogenase family 1 member A3 (106-114)
  source 1..27: mol_type = other RNA
ctggtggagcgcgaccgggccaccctc

SEQ ID NO: 45707 - RNA, 27 nt, synthetic construct
  misc_feature 1..27: note = A-kinase anchor protein 11 (654-662)
  source 1..27: mol_type = other RNA
ctggtgttcgagggcatcatggaggtc

SEQ ID NO: 45708 - RNA, 30 nt, synthetic construct
  misc_feature 1..30: note = Serum albumin (66-75)
  source 1..30: mol_type = other RNA
ctggtgaacgaggtcaccgagttcgccaag

SEQ ID NO: 45709 - RNA, 24 nt, synthetic construct
  misc_feature 1..24: note = Cytochrome c oxidase subunit 5B, mitochondrial (122-129)
  source 1..24: mol_type = other RNA
ctggtgccccagcagctcgcccac

SEQ ID NO: 45710 - RNA, 30 nt, synthetic construct
  misc_feature 1..30: note = Stabilin-2 (1032-1041)
  source 1..30: mol_type = other RNA
ctggtgcccagccagcaggccaccgaggac

SEQ ID NO: 45711 - RNA, 24 nt, synthetic construct
  misc_feature 1..24: note = Adenomatous polyposis coli protein 2 (11-18)
  source 1..24: mol_type = other RNA
ctggtgcgccaggtcgaggccctc

SEQ ID NO: 45712 - RNA, 48 nt, synthetic construct
  misc_feature 1..48: note = 60S ribosomal protein L9 (153-168)
  source 1..48: mol_type = other RNA
ctggtgagcaactccgccgccctcatccagcaggcgaccaccgtcaag

SEQ ID NO: 45713 - RNA, 33 nt, synthetic construct
  misc_feature 1..33: note = Thioredoxin reductase 2, mitochondrial (4-14)
  source 1..33: mol_type = other RNA
ctggtggtcggcgggggcagcgggggcctcgcc

SEQ ID NO: 45714 - RNA, 27 nt, synthetic construct
  misc_feature 1..27: note = Midasin (3107-3115)
  source 1..27: mol_type = other RNA
ctggtggtcagcgacggccgcgggctc

SEQ ID NO: 45715 - RNA, 30 nt, synthetic construct
  misc_feature 1..30: note = Kelch-like protein 29 (511-520)
  source 1..30: mol_type = other RNA
ctggtgtacgacggcaagatctacaccctc

SEQ ID NO: 45716 - RNA, 27 nt, synthetic construct
  misc_feature 1..27: note = Pre-mRNA-processing-splicing factor 8 (405-413)
  source 1..27: mol_type = other RNA
ctgtgggccccccgcccgttcaacctc

SEQ ID NO: 45717 - RNA, 27 nt, synthetic construct
  misc_feature 1..27: note = Plexin-B3 (1462-1470)
  source 1..27: mol_type = other RNA
ctgtacgccttcctccgcgaggtggcc

SEQ ID NO: 45718 - RNA, 30 nt, synthetic construct
  misc_feature 1..30: note = Aldehyde dehydrogenase family 1 member A3 (471-480)
  source 1..30: mol_type = other RNA
ctgtacgcccaggcccccttcggcgggttc

SEQ ID NO: 45719 - RNA, 27 nt, synthetic construct
  misc_feature 1..27: note = DNA-binding protein RFXANK (131-139)
  source 1..27: mol_type = other RNA
ctgtacgccgtgcgcggcaaccacgtc

SEQ ID NO: 45720 - RNA, 27 nt, synthetic construct
  misc_feature 1..27: note = Asparagine synthetase (glutamine-hydrolyzing) (132-140)
  source 1..27: mol_type = other RNA
ctgtacgacaacgtggagaagctcttc

SEQ ID NO: 45721 - RNA, 24 nt, synthetic construct
  misc_feature 1..24: note = Mediator of RNA polymerase II transcription subunit 12 (572-579)
  source 1..24: mol_type = other RNA
ctgtacgaccagccccgccacgtg

SEQ ID NO: 45722 - RNA, 24 nt, synthetic construct
  misc_feature 1..24: note = Signal recognition particle subunit SRP68 (454-461)
  source 1..24: mol_type = other RNA
ctgtacgaccgcgtgctcaagtac

SEQ ID NO: 45723 - RNA, 27 nt, synthetic construct
  misc_feature 1..27: note = GPI mannosyltransferase 2 (80-88)
  source 1..27: mol_type = other RNA
ctgtacgagcacaacttcgccttcttc

SEQ ID NO: 45724 - RNA, 27 nt, synthetic construct
  misc_feature 1..27: note = Hemicentin-1 (1595-1603)
  source 1..27: mol_type = other RNA
ctgtacatcgacaagggccagtacctc

SEQ ID NO: 45725 - RNA, 27 nt, synthetic construct
  misc_feature 1..27: note = Cleavage and polyadenylation specificity factor subunit 6 (83-91)
  source 1..27: mol_type = other RNA
ctgtacatcggcaacctcacctggtgg

SEQ ID NO: 45726 - RNA, 27 nt, synthetic construct
  misc_feature 1..27: note = Myotubularin-related protein 12 (484-492)
  source 1..27: mol_type = other RNA
ctgtacatccccatcttcagcaccttc

SEQ ID NO: 45727 - RNA, 27 nt, synthetic construct
  misc_feature 1..27: note = Disintegrin and metalloproteinase domain-containing protein 10 (167-175)
  source 1..27: mol_type = other RNA
ctgtacatccagaccgaccacctcttc

SEQ ID NO: 45728 - RNA, 27 nt, synthetic construct
  misc_feature 1..27: note = SUN domain-containing ossification factor (723-731)
  source 1..27: mol_type = other RNA
ctgtacatcgtggagcccctcaagttc

SEQ ID NO: 45729 - RNA, 30 nt, synthetic construct
  misc_feature 1..30: note = Solute carrier family 25 member 34 (267-276)
  source 1..30: mol_type = other RNA
ctgtacaagggcctcgggcccgcctacctg

SEQ ID NO: 45730 - RNA, 27 nt, synthetic construct
  misc_feature 1..27: note = ER membrane protein complex subunit 1 (731-739)
  source 1..27: mol_type = other RNA
ctgtacaagagcctcaaccccaacctg

SEQ ID NO: 45731 - RNA, 27 nt, synthetic construct
  misc_feature 1..27: note = NTF2-related export protein 2 (39-47)
  source 1..27: mol_type = other RNA
ctgtacctcgacaaggccaccctgatc

SEQ ID NO: 45732 - RNA, 30 nt, synthetic construct
  misc_feature 1..30: note = NTF2-related export protein 2 (39-48)
  source 1..30: mol_type = other RNA
ctgtacctcgacaaggccaccctgatctgg

SEQ ID NO: 45733 - RNA, 27 nt, synthetic construct
  misc_feature 1..27: note = SWI/SNF-related matrix-associated actin-dependent regulator of chromatin subfamily A containing DEAD/H box 1 (320-328)
  source 1..27: mol_type = other RNA
ctgtacctcggcctgttcaaccgcctg

SEQ ID NO: 45734 - RNA, 27 nt, synthetic construct
  misc_feature 1..27: note = Protein CLN8 (226-234)
  source 1..27: mol_type = other RNA
ctgtacctcccccacctgaccctgttc

SEQ ID NO: 45735 - RNA, 21 nt, synthetic construct
  misc_feature 1..21: note = Mitochondrial carrier homolog 1 (63-69)
  source 1..21: mol_type = other RNA
ctgtacctccccagcttcttc

SEQ ID NO: 45736 - RNA, 27 nt, synthetic construct
  misc_feature 1..27: note = DnaJ homolog subfamily A member 2 (129-137)
  source 1..27: mol_type = other RNA
ctgtacaacggcaagaccaccaagctc

SEQ ID NO: 45737 - RNA, 33 nt, synthetic construct
  misc_feature 1..33: note = Melanocyte protein PMEL (55-65)
  source 1..33: mol_type = other RNA
ctgtaccccgagtggaccgaggcccagcgcctc

SEQ ID NO: 45738 - RNA, 27 nt, synthetic construct
  misc_feature 1..27: note = Protein transport protein Sec23B (560-568)
  source 1..27: mol_type = other RNA
ctgtacccccagttcatgttccacctc

SEQ ID NO: 45739 - RNA, 27 nt, synthetic construct
  misc_feature 1..27: note = Vacuolar protein sorting-associated protein 4A (31-39)
  source 1..27: mol_type = other RNA
ctgtaccagcacgccgtggagtacttc

SEQ ID NO: 45740 - RNA, 27 nt, synthetic construct
  misc_feature 1..27: note = CCAAT/enhancer-binding protein zeta (212-220)
  source 1..27: mol_type = other RNA
ctgtaccagcacgagatcaacctcttc

SEQ ID NO: 45741 - RNA, 27 nt, synthetic construct
  misc_feature 1..27: note = Engulfment and cell motility protein 2 (207-215)
  source 1..27: mol_type = other RNA
ctgtaccagaagatcgccgaggagatc

SEQ ID NO: 45742 - RNA, 24 nt, synthetic construct
  misc_feature 1..24: note = E3 ubiquitin-protein ligase UBR5 (1255-1262)
  source 1..24: mol_type = other RNA
ctgtaccgcctcctgaccgccacc

SEQ ID NO: 45743 - RNA, 27 nt, synthetic construct
  misc_feature 1..27: note = Unconventional myosin-Ib (356-364)
  source 1..27: mol_type = other RNA
ctgtacagccgcctcttctcctggctg

SEQ ID NO: 45744 - RNA, 27 nt, synthetic construct
  misc_feature 1..27: note = Ubiquitin-like modifier-activating enzyme 7 (14-22)
  source 1..27: mol_type = other RNA
ctgtacagccgccagctctacgtgctg

SEQ ID NO: 45745 - RNA, 24 nt, synthetic construct
  misc_feature 1..24: note = Mitochondrial ubiquitin ligase activator of NFKB 1 (25-32)
  source 1..24: mol_type = other RNA
ctgtacagcgtgtaccgccagaag

SEQ ID NO: 45746 - RNA, 27 nt, synthetic construct
  misc_feature 1..27: note = Melanoma antigen preferentially expressed in tumors (301-309)
  source 1..27: mol_type = other RNA
ctgtacgtggacagcctcttcttcctg

SEQ ID NO: 45747 - RNA, 27 nt, synthetic construct
  misc_feature 1..27: note = Beta-galactosidase-1-like protein (586-594)
  source 1..27: mol_type = other RNA
ctgtacgtgccccgcttcctcctgttc

SEQ ID NO: 45748 - RNA, 24 nt, synthetic construct
  misc_feature 1..24: note = 40S ribosomal protein S29 (6-13)
  source 1..24: mol_type = other RNA
ctgtactggagccacccccgcaag

SEQ ID NO: 45749 - RNA, 39 nt, synthetic construct
  misc_feature 1..39: note = Mitogen-activated protein kinase 1 (1-13)
  source 1..39: mol_type = other RNA
atggccgccgcggccgccgccggcgccgggcccgagatg

SEQ ID NO: 45750 - RNA, 27 nt, synthetic construct
  misc_feature 1..27: note = B-cell CLL/lymphoma 9-like protein (186-194)
  source 1..27: mol_type = other RNA
atggccgccccccagctgggcccgggg

SEQ ID NO: 45751 - RNA, 30 nt, synthetic construct
  misc_feature 1..30: note = Glucosylceramidase (21-30)
  source 1..30: mol_type = other RNA
atggccggcagcctgaccgggctcctgctg

SEQ ID NO: 45752 - RNA, 24 nt, synthetic construct
  misc_feature 1..24: note = Dystonin (1657-1664)
  source 1..24: mol_type = other RNA
atggccatcaaggtgctggagatc

SEQ ID NO: 45753 - RNA, 24 nt, synthetic construct
  misc_feature 1..24: note = BRAF (48-55)
  source 1..24: mol_type = other RNA
atggcccccgaggtgatccgcatg

SEQ ID NO: 45754 - RNA, 24 nt, synthetic construct
  misc_feature 1..24: note = HLA class I histocompatibility antigen, alpha chain F (1-8)
  source 1..24: mol_type = other RNA
atggccccccgcagcctgctcctg

SEQ ID NO: 45755 - RNA, 24 nt, synthetic construct
  misc_feature 1..24: note = HLA class I histocompatibility antigen, B-39 alpha chain (4-11)
  source 1..24: mol_type = other RNA
atggccccccgcaccgtgctgctc

SEQ ID NO: 45756 - RNA, 48 nt, synthetic construct
  misc_feature 1..48: note = Gamma-secretase C-terminal fragment 59 (561-576)
  source 1..48: mol_type = other RNA
atggacgccgagttccgccacgacagcggctacgaggtgcaccaccag

SEQ ID NO: 45757 - RNA, 48 nt, synthetic construct
  misc_feature 1..48: note = Dihydropyrimidinase-related protein 2 (339-354)
  source 1..48: mol_type = other RNA
atggacgagaaccagttcgtggccgtcaccagcaccaacgccgcgaag

SEQ ID NO: 45758 - RNA, 21 nt, synthetic construct
  misc_feature 1..21: note = Insulin receptor substrate 2 (545-551)
  source 1..21: mol_type = other RNA
atggaccgccccctgagccac

SEQ ID NO: 45759 - RNA, 27 nt, synthetic construct
  misc_feature 1..27: note = Receptor-type tyrosine-protein phosphatase gamma (796-804)
  source 1..27: mol_type = other RNA
atggaggccatccccgtgaagcagttc

SEQ ID NO: 45760 - RNA, 30 nt, synthetic construct
  misc_feature 1..30: note = Protein wntless homolog (185-194)
  source 1..30: mol_type = other RNA
atggagatcggcagcgtggcccacaagttc

SEQ ID NO: 45761 - RNA, 27 nt, synthetic construct
  misc_feature 1..27: note = Tyrosinase (516-524)
  source 1..27: mol_type = other RNA
atggagaaggaggactaccacagcctg

SEQ ID NO: 45762 - RNA, 30 nt, synthetic construct
  misc_feature 1..30: note = PRELI domain containing protein 3B (91-100)
  source 1..30: mol_type = other RNA
atggagctgaagagcaccaacatctccttc

SEQ ID NO: 45763 - RNA, 30 nt, synthetic construct
  misc_feature 1..30: note = Fructose-bisphosphate aldolase A (219-228)
  source 1..30: mol_type = other RNA
atggagaacgccaacgtgctggcccgctac

SEQ ID NO: 45764 - RNA, 30 nt, synthetic construct
  misc_feature 1..30: note = Poly(U)-binding-splicing factor PUF60 (74-83)
  source 1..30: mol_type = other RNA
atggagcagagcatcaagtccgtgctggtc

SEQ ID NO: 45765 - RNA, 30 nt, synthetic construct
  misc_feature 1..30: note = Melanoma-associated antigen 3 (167-176)
  source 1..30: mol_type = other RNA
atggaggtggaccccatcggccacctgtac

SEQ ID NO: 45766 - RNA, 24 nt, synthetic construct
  misc_feature 1..24: note = Synemin (37-44)
  source 1..24: mol_type = other RNA
atgttcgacaagaaggtgcagctg

SEQ ID NO: 45767 - RNA, 18 nt, synthetic construct
  misc_feature 1..18: note = Proliferating cell nuclear antigen (244-249)
  source 1..18: mol_type = other RNA
atgggccacctgaagtac

SEQ ID NO: 45768 - RNA, 60 nt, synthetic construct
  misc_feature 1..60: note = Actin, aortic smooth muscle (49-68)
  source 1..60: mol_type = other RNA
atgggccagaaggacagctacgtgggggacgaggcccagtccaagcgcggcatcctgacc

SEQ ID NO: 45769 - RNA, 24 nt, synthetic construct
  misc_feature 1..24: note = Ankyrin-1 (733-740)
  source 1..24: mol_type = other RNA
atgggctacacccccctgcacgtg

SEQ ID NO: 45770 - RNA, 21 nt, synthetic construct
  misc_feature 1..21: note = Dynein light chain roadblock-type 1 (53-59)
  source 1..21: mol_type = other RNA
atgcacagcttcatcctgaag

SEQ ID NO: 45771 - RNA, 27 nt, synthetic construct
  misc_feature 1..27: note = Glycogen phosphorylase, liver form (619-627)
  source 1..27: mol_type = other RNA
atgatcatcaagctgatcaccagcgtg

SEQ ID NO: 45772 - RNA, 27 nt, synthetic construct
  misc_feature 1..27: note = Phenylalanine-tRNA ligase alpha subunit (465-473)
  source 1..27: mol_type = other RNA
atgatcaagtacggcatcaacaacatc

SEQ ID NO: 45773 - RNA, 30 nt, synthetic construct
  misc_feature 1..30: note = Malate dehydrogenase, mitochondrial (273-282)
  source 1..30: mol_type = other RNA
atgatcagcgacgccatccccgagctgaag

SEQ ID NO: 45774 - RNA, 27 nt, synthetic construct
  misc_feature 1..27: note = ER membrane protein complex subunit 1 (976-984)
  source 1..27: mol_type = other RNA
atgatcaccaagcgcctggcccaggtg

SEQ ID NO: 45775 - RNA, 27 nt, synthetic construct
  misc_feature 1..27: note = Huntingtin (537-545)
  source 1..27: mol_type = other RNA
atgatcaccacccaccccgccctggtg

SEQ ID NO: 45776 - RNA, 27 nt, synthetic construct
  misc_feature 1..27: note = EH domain-containing protein 3 (385-393)
  source 1..27: mol_type = other RNA
atgctggcccacgacatcgcccagctc

SEQ ID NO: 45777 - RNA, 24 nt, synthetic construct
  misc_feature 1..24: note = Chondroitin sulfate proteoglycan 4 (22-29)
  source 1..24: mol_type = other RNA
atgctggcccgcctcgccagcgcg

SEQ ID NO: 45778 - RNA, 33 nt, synthetic construct
  misc_feature 1..33: note = COP9 signalosome complex subunit 1 (344-354)
  source 1..33: mol_type = other RNA
atgctggacgagatgaaggacaacctcctgctg

SEQ ID NO: 45779 - RNA, 33 nt, synthetic construct
  misc_feature 1..33: note = Baculoviral IAP repeat-containing protein 6 (1752-1762)
  source 1..33: mol_type = other RNA
atgctggaggacgagaaggtgaccatgttcctc

SEQ ID NO: 45780 - RNA, 21 nt, synthetic construct
  misc_feature 1..21: note = Spectrin beta chain, non-erythrocytic 4 (2042-2048)
  source 1..21: mol_type = other RNA
atgctggaggtgcaccagttc

SEQ ID NO: 45781 - RNA, 27 nt, synthetic construct
  misc_feature 1..27: note = Mitotic checkpoint serine/threonine-protein kinase BUB1 (998-1006)
  source 1..27: mol_type = other RNA
atgctgttcggcacctacatgaaggtg

SEQ ID NO: 45782 - RNA, 24 nt, synthetic construct
  misc_feature 1..24: note = Collagen alpha-1(XVIII) chain (1454-1461)
  source 1..24: mol_type = other RNA
atgctgggccaggtgcacgaggtc

SEQ ID NO: 45783 - RNA, 27 nt, synthetic construct
  misc_feature 1..27: note = Tetratricopeptide repeat protein 28 (1354-1362)
  source 1..27: mol_type = other RNA
atgctgatcggcagcgacgtgaagctc

SEQ ID NO: 45784 - RNA, 27 nt, synthetic construct
  misc_feature 1..27: note = Phosphatidylinositol 5-phosphate 4-kinase type-2 beta (65-73)
  source 1..27: mol_type = other RNA
atgctgatgcccgacgacttcaaggcc

SEQ ID NO: 45785 - RNA, 66 nt, synthetic construct
  misc_feature 1..66: note = T-complex protein 1 subunit beta (445-466)
  source 1..66: mol_type = other RNA
atgctgcccaccatcatcgccgacaacgccggctacgacagcgcggacctcgtggcccagctgcgc

SEQ ID NO: 45786 - RNA, 27 nt, synthetic construct
  misc_feature 1..27: note = DNA-binding protein SATB2 (142-150)
  source 1..27: mol_type = other RNA
atgctgcaggacgtgtaccacgtcgtg

SEQ ID NO: 45787 - RNA, 174 nt, synthetic construct
  misc_feature 1..174: note = 6.8 kDa mitochondrial proteolipid (1-58)
  source 1..174: mol_type = other RNA
atgctgcagagcatcatcaagaacatctggatccccatgaagccgtactacaccaaggtgtaccaggagatctggatcggcatggggctcatgggcttcatcgtctacaagatccgcgccgccgacaagcggtccaaggcgctgaaggccagcgcccccgcccccgggcaccac

SEQ ID NO: 45788 - RNA, 30 nt, synthetic construct
  misc_feature 1..30: note = BTB/POZ domain-containing protein KCTD3 (428-437)
  source 1..30: mol_type = other RNA
atgctgagcgagaagcacctcgtgtccgtc

SEQ ID NO: 45789 - RNA, 27 nt, synthetic construct
  misc_feature 1..27: note = Death-associated protein kinase 1 (763-771)
  source 1..27: mol_type = other RNA
atgatgttcgagcccggcctgaccaag

SEQ ID NO: 45790 - RNA, 27 nt, synthetic construct
  misc_feature 1..27: note = RB1-inducible coiled-coil protein 1 (107-115)
  source 1..27: mol_type = other RNA
atgatgcccgccgtgttccacaccgtc

SEQ ID NO: 45791 - RNA, 48 nt, synthetic construct
  misc_feature 1..48: note = Exostosin-like 1 (589-604)
  source 1..48: mol_type = other RNA
atgaacttcatcgtggccgccgtcaccaagctgcccccgatcaaggtg

SEQ ID NO: 45792 - RNA, 27 nt, synthetic construct
  misc_feature 1..27: note = Sodium/potassium/calcium exchanger 5 (298-306)
  source 1..27: mol_type = other RNA
atgcccgaggccgacctgaagcgcatc

SEQ ID NO: 45793 - RNA, 24 nt, synthetic construct
  misc_feature 1..24: note = Filamin-B (1129-1136)
  source 1..24: mol_type = other RNA
atgcccttcgacccgagcaaggtg

SEQ ID NO: 45794 - RNA, 69 nt, synthetic construct
  misc_feature 1..69: note = Heat shock cognate 71 kDa protein (621-643)
  source 1..69: mol_type = other RNA
atgcccggcgggttcccgggcgggggcgccccccccagcgggggcgcctccagcggccccaccatcgag

SEQ ID NO: 45795 - RNA, 27 nt, synthetic construct
  misc_feature 1..27: note = Protein polybromo-1 (1078-1086)
  source 1..27: mol_type = other RNA
atgcccatcagctccgtgcgcttcgtc

SEQ ID NO: 45796 - RNA, 27 nt, synthetic construct
  misc_feature 1..27: note = Malignant T-cell-amplified sequence 1 (45-53)
  source 1..27: mol_type = other RNA
atgcccaagaaggacccggtgaagatc

SEQ ID NO: 45797 - RNA, 27 nt, synthetic construct
  misc_feature 1..27: note = Melanoma antigen preferentially expressed in tumors (218-226)
  source 1..27: mol_type = other RNA
atgcccatgcaggacatcaagatgatc

SEQ ID NO: 45798 - RNA, 27 nt, synthetic construct
  misc_feature 1..27: note = Nuclear factor related to kappa-B-binding protein (810-818)
  source 1..27: mol_type = other RNA
atgcccccgaaggccggccagaccatc

SEQ ID NO: 45799 - RNA, 27 nt, synthetic construct
  misc_feature 1..27: note = E3 ubiquitin-protein ligase Itchy homolog (380-388)
  source 1..27: mol_type = other RNA
atgccccagcacatcaagatcaccgtg

SEQ ID NO: 45800 - RNA, 39 nt, synthetic construct
  misc_feature 1..39: note = Myotubularin-related protein 5 (315-327)
  source 1..39: mol_type = other RNA
atgccccgctacgccgacgccagcggccggaacaccctg

SEQ ID NO: 45801 - RNA, 30 nt, synthetic construct
  misc_feature 1..30: note = Splicing factor 3B subunit 2 (596-605)
  source 1..30: mol_type = other RNA
atgcccgtgggcccgaacgcccacaaggtc

SEQ ID NO: 45802 - RNA, 27 nt, synthetic construct
  misc_feature 1..27: note = Zinc finger protein 512B (211-219)
  source 1..27: mol_type = other RNA
atgcccgtgaccaagccgatcaccgtc

SEQ ID NO: 45803 - RNA, 27 nt, synthetic construct
  misc_feature 1..27: note = Dihydropyrimidinase-related protein 3 (192-200)
  source 1..27: mol_type = other RNA
atgccctacaagggcatgaccaccgtg

SEQ ID NO: 45804 - RNA, 21 nt, synthetic construct
  misc_feature 1..21: note = Transmembraneoprotein NMB (38-44)
  source 1..21: mol_type = other RNA
atgcgcgagcacaaccagctg

SEQ ID NO: 45805 - RNA, 27 nt, synthetic construct
  misc_feature 1..27: note = WD repeat-containing protein 81 (60-68)
  source 1..27: mol_type = other RNA
atgagcgaggagcacaccgccgtgtac

SEQ ID NO: 45806 - RNA, 27 nt, synthetic construct
  misc_feature 1..27: note = Bombesin receptor-activated protein C6orf89 (44-52)
  source 1..27: mol_type = other RNA
atgagcgagaaggccatcgagaagttc

SEQ ID NO: 45807 - RNA, 27 nt, synthetic construct
  misc_feature 1..27: note = Inactive ubiquitin carboxyl-terminal hydrolase 53 (1045-1053)
  source 1..27: mol_type = other RNA
atgaccgacacctaccgcctgaagtac

SEQ ID NO: 45808 - RNA, 18 nt, synthetic construct
  misc_feature 1..18: note = Neuronal membraneoprotein M6-a (202-207)
  source 1..18: mol_type = other RNA
atgaccttccacctgttc

SEQ ID NO: 45809 - RNA, 87 nt, synthetic construct
  misc_feature 1..87: note = POTE ankyrin domain family member I (36-64)
  source 1..87: mol_type = other RNA
atgacccagatcatgttcgagaccttcaacacgcccgccatgtacgtggccatccaggcggtcctgagcctctacgcctccggccgc

SEQ ID NO: 45810 - RNA, 36 nt, synthetic construct
  misc_feature 1..36: note = Protein disulfide-isomerase A3 (285-296)
  source 1..36: mol_type = other RNA
atggtggccaagaagttcctggacgccggccacaag

SEQ ID NO: 45811 - RNA, 24 nt, synthetic construct
  misc_feature 1..24: note = Unconventional myosin-Id (310-317)
  source 1..24: mol_type = other RNA
atggtggagaaggccctgctctac

SEQ ID NO: 45812 - RNA, 27 nt, synthetic construct
  misc_feature 1..27: note = Putative eukaryotic translation initiation factor 2 subunit 3-like protein (353-361)
  source 1..27: mol_type = other RNA
atggtgggccagatcctgggggccgtc

SEQ ID NO: 45813 - RNA, 42 nt, synthetic construct
  misc_feature 1..42: note = MICOS complex subunit MIC60 (88-101)
  source 1..42: mol_type = other RNA
atggtgctgggccccgccgcctacaacgtcccgctccccaag

SEQ ID NO: 45814 - RNA, 27 nt, synthetic construct
  misc_feature 1..27: note = ER membrane protein complex subunit 7 (169-177)
  source 1..27: mol_type = other RNA
atggtgctgcccctcctgatcttcgtc

SEQ ID NO: 45815 - RNA, 69 nt, synthetic construct
  misc_feature 1..69: note = X-ray repair cross-complementing protein 5 (210-232)
  source 1..69: mol_type = other RNA
atggtgatgatcagcctggagggcgaggacgggctcgacgagatctactccttcagcgagtccctgcgc

SEQ ID NO: 45816 - RNA, 30 nt, synthetic construct
  misc_feature 1..30: note = Threonine-tRNA ligase, cytoplasmic (655-664)
  source 1..30: mol_type = other RNA
atggtggtccccgtgggcccgacctgcgac

SEQ ID NO: 45817 - RNA, 30 nt, synthetic construct
  misc_feature 1..30: note = NAD(P)H dehydrogenase (quinone) 1 (129-138)
  source 1..30: mol_type = other RNA
atgtacgacaagggccccttccgcagcaag

SEQ ID NO: 45818 - RNA, 30 nt, synthetic construct
  misc_feature 1..30: note = Exportin-1 (545-554)
  source 1..30: mol_type = other RNA
atgtacatcgtgggccagtacccccgcttc

SEQ ID NO: 45819 - RNA, 27 nt, synthetic construct
  misc_feature 1..27: note = MICOS complex subunit MIC25 (169-177)
  source 1..27: mol_type = other RNA
atgtacaagctgagctccgagcagttc

SEQ ID NO: 45820 - RNA, 27 nt, synthetic construct
  misc_feature 1..27: note = F-box only protein 21 (417-425)
  source 1..27: mol_type = other RNA
atgtaccccgaccaggtgcagctgctc

SEQ ID NO: 45821 - RNA, 30 nt, synthetic construct
  misc_feature 1..30: note = Sodium/potassium-transporting ATPase subunit alpha-1 (980-989)
  source 1..30: mol_type = other RNA
atgtaccccctgaagccgacctggtggttc

SEQ ID NO: 45822 - RNA, 27 nt, synthetic construct
  misc_feature 1..27: note = Sphingomyelin phosphodiesterase 4 (377-385)
  source 1..27: mol_type = other RNA
atgtacaccaagctgttcgtgggcttc

SEQ ID NO: 45823 - RNA, 33 nt, synthetic construct
  misc_feature 1..33: note = DNA-binding protein SATB1 (453-463)
  source 1..33: mol_type = other RNA
aacgccgccagcgcgatgggccccgccccgctg

SEQ ID NO: 45824 - RNA, 30 nt, synthetic construct
  misc_feature 1..30: note = Eukaryotic translation initiation factor 3 subunit L (169-178)
  source 1..30: mol_type = other RNA
aacgccgacggccccgccccgctggagctc

SEQ ID NO: 45825 - RNA, 27 nt, synthetic construct
  misc_feature 1..27: note = Far upstream element-binding protein 1 (418-426)
  source 1..27: mol_type = other RNA
aacgccgaccccaacatgaagctgttc

SEQ ID NO: 45826 - RNA, 27 nt, synthetic construct
  misc_feature 1..27: note = Erythrocyte band 7 integral membrane protein (138-146)
  source 1..27: mol_type = other RNA
aacgccgacagcgccacccgcctgctc

SEQ ID NO: 45827 - RNA, 27 nt, synthetic construct
  misc_feature 1..27: note = AP-2 complex subunit beta (874-882)
  source 1..27: mol_type = other RNA
aacgccgacaccgtgagctccaagctg

SEQ ID NO: 45828 - RNA, 27 nt, synthetic construct
  misc_feature 1..27: note = CD44 antigen (137-145)
  source 1..27: mol_type = other RNA
aacgccttcgacggccccatcaccatc

SEQ ID NO: 45829 - RNA, 36 nt, synthetic construct
  misc_feature 1..36: note = Catenin alpha-1 (43-54)
  source 1..36: mol_type = other RNA
aacgccggcaacgagcaggacctggggatccagtac

SEQ ID NO: 45830 - RNA, 24 nt, synthetic construct
  misc_feature 1..24: note = Helicase-like transcription factor (96-103)
  source 1..24: mol_type = other RNA
aacgccatcaaggtgaacaacgtc

SEQ ID NO: 45831 - RNA, 24 nt, synthetic construct
  misc_feature 1..24: note = Similar to 60S ribosomal protein L7 (171-178)
  source 1..24: mol_type = other RNA
aacgccctgatcgcccgcagcctc

SEQ ID NO: 45832 - RNA, 33 nt, synthetic construct
  misc_feature 1..33: note = Forkhead box protein C1 (212-222)
  source 1..33: mol_type = other RNA
aacgcccccggcccgcagcccccccccgtgcgc

SEQ ID NO: 45833 - RNA, 24 nt, synthetic construct
  misc_feature 1..24: note = Serine/threonine-protein phosphatase 2A regulatory subunit B'' subunit alpha (81-88)
  source 1..24: mol_type = other RNA
aacgcccccctgagcatcaacatc

SEQ ID NO: 45834 - RNA, 21 nt, synthetic construct
  misc_feature 1..21: note = Protein FAM208B (1664-1670)
  source 1..21: mol_type = other RNA
aacgccaccctgacccactac

SEQ ID NO: 45835 - RNA, 24 nt, synthetic construct
  misc_feature 1..24: note = Rho guanine nucleotide exchange factor 11 (1029-1036)
  source 1..24: mol_type = other RNA
aacgccgtgctgatccgcagcgtc

SEQ ID NO: 45836 - RNA, 30 nt, synthetic construct
  misc_feature 1..30: note = T-complex protein 1 subunit theta (48-57)
  source 1..30: mol_type = other RNA
aacgacgccgccaccatcctgcgcgagctc

SEQ ID NO: 45837 - RNA, 27 nt, synthetic construct
  misc_feature 1..27: note = Pumilio homolog 2 (927-935)
  source 1..27: mol_type = other RNA
aacgacggcccccacagcgccctgtac

SEQ ID NO: 45838 - RNA, 24 nt, synthetic construct
  misc_feature 1..24: note = Ribonuclease P protein subunit p21 (126-133)
  source 1..24: mol_type = other RNA
aacgaccccggccacctgctctgg

SEQ ID NO: 45839 - RNA, 30 nt, synthetic construct
  misc_feature 1..30: note = Protein TANC1 (587-596)
  source 1..30: mol_type = other RNA
aacgaggccgagttccacaagcccgactac

SEQ ID NO: 45840 - RNA, 30 nt, synthetic construct
  misc_feature 1..30: note = Hemicentin-1 (2650-2659)
  source 1..30: mol_type = other RNA
aacgaggccggcgagatgatcaagcactac

SEQ ID NO: 45841 - RNA, 30 nt, synthetic construct
  misc_feature 1..30: note = Hemicentin-1 (3510-3519)
  source 1..30: mol_type = other RNA
aacgaggccggcgaggtgagcaagcacttc

SEQ ID NO: 45842 - RNA, 30 nt, synthetic construct
  misc_feature 1..30: note = E3 ubiquitin-protein ligase MYCBP2 (2115-2124)
  source 1..30: mol_type = other RNA
aacgaggccctgttcagcctcgagaccgcc

SEQ ID NO: 45843 - RNA, 27 nt, synthetic construct
  misc_feature 1..27: note = Insulin-like growth factor 1 receptor (1048-1056)
  source 1..27: mol_type = other RNA
aacgaggccagcgtgatgaaggagttc

SEQ ID NO: 45844 - RNA, 30 nt, synthetic construct
  misc_feature 1..30: note = Neutral amino acid transporter B(0) (61-70)
  source 1..30: mol_type = other RNA
aacgaggccaccatggtgctggtcagctgg

SEQ ID NO: 45845 - RNA, 27 nt, synthetic construct
  misc_feature 1..27: note = Kinesin-like protein KIF13B (360-368)
  source 1..27: mol_type = other RNA
aacgaggaccccaacgcccgcatcatc

SEQ ID NO: 45846 - RNA, 27 nt, synthetic construct
  misc_feature 1..27: note = Smith-Magenis syndrome chromosomal region candidate gene 8 protein (896-904)
  source 1..27: mol_type = other RNA
aacgaggacgtgcgcgtcgtgcagtac

SEQ ID NO: 45847 - RNA, 27 nt, synthetic construct
  misc_feature 1..27: note = RNA-binding motif, single-stranded-interacting protein 3 (399-407)
  source 1..27: mol_type = other RNA
aacgagcacgcccccgcctacagctac

SEQ ID NO: 45848 - RNA, 30 nt, synthetic construct
  misc_feature 1..30: note = 2-hydroxyacylsphingosine 1-beta-galactosyltransferase (284-293)
  source 1..30: mol_type = other RNA
aacgagcacggcttcgtgctggtcagcttc

SEQ ID NO: 45849 - RNA, 30 nt, synthetic construct
  misc_feature 1..30: note = Protocadherin gamma-A9 (143-152)
  source 1..30: mol_type = other RNA
aacgagatcgccgtgcccggcgcccgctac

SEQ ID NO: 45850 - RNA, 33 nt, synthetic construct
  misc_feature 1..33: note = Protein transport protein Sec23A (436-446)
  source 1..33: mol_type = other RNA
aacgagatcggcaccgggggcacctgccagtgg

SEQ ID NO: 45851 - RNA, 30 nt, synthetic construct
  misc_feature 1..30: note = Serine incorporator 3 (396-405)
  source 1..30: mol_type = other RNA
aacgagaaggagggcgtgcagtacagctac

SEQ ID NO: 45852 - RNA, 27 nt, synthetic construct
  misc_feature 1..27: note = Pre-rRNA-processing protein TSR1 homolog (69-77)
  source 1..27: mol_type = other RNA
aacgagctgggcaacacccagaacttc

SEQ ID NO: 45853 - RNA, 27 nt, synthetic construct
  misc_feature 1..27: note = T-box transcription factor TBX2 (676-684)
  source 1..27: mol_type = other RNA
aacgagctgcagagcatccagcgcctc

SEQ ID NO: 45854 - RNA, 27 nt, synthetic construct
  misc_feature 1..27: note = Spectrin beta chain, non-erythrocytic 1 (32-40)
  source 1..27: mol_type = other RNA
aacgagaacagctccgcccgcctgttc

SEQ ID NO: 45855 - RNA, 27 nt, synthetic construct
  misc_feature 1..27: note = Cytoplasmic FMR1-interacting protein 2 (99-107)
  source 1..27: mol_type = other RNA
aacgagcagcccaaccgcgtggagatc

SEQ ID NO: 45856 - RNA, 30 nt, synthetic construct
  misc_feature 1..30: note = Serine incorporator 1 (377-386)
  source 1..30: mol_type = other RNA
aacgagcgcgacggcgtgacctacagctac

SEQ ID NO: 45857 - RNA, 27 nt, synthetic construct
  misc_feature 1..27: note = Transcription factor SOX-10 (146-154)
  source 1..27: mol_type = other RNA
aacgagagcgacaagcgccccttcatc

SEQ ID NO: 45858 - RNA, 27 nt, synthetic construct
  misc_feature 1..27: note = Laminin subunit beta-1 (541-549)
  source 1..27: mol_type = other RNA
aacgaggtggagcccggctactacttc

SEQ ID NO: 45859 - RNA, 21 nt, synthetic construct
  misc_feature 1..21: note = AP-1 complex subunit sigma-1A (105-111)
  source 1..21: mol_type = other RNA
aacttcgagaaggcctacttc

SEQ ID NO: 45860 - RNA, 18 nt, synthetic construct
  misc_feature 1..18: note = Serine/threonine-protein phosphatase 2A 55 kDa regulatory subunit B alpha isoform (364-369)
  source 1..18: mol_type = other RNA
aacttcttccgcatgttc

SEQ ID NO: 45861 - RNA, 27 nt, synthetic construct
  misc_feature 1..27: note = Astrotactin-2 (354-362)
  source 1..27: mol_type = other RNA
aacttcatcaaggacttcccccagctg

SEQ ID NO: 45862 - RNA, 21 nt, synthetic construct
  misc_feature 1..21: note = Absent in melanoma 1 protein (1462-1468)
  source 1..21: mol_type = other RNA
aacttcaccggcaaccagtac

SEQ ID NO: 45863 - RNA, 24 nt, synthetic construct
  misc_feature 1..24: note = RNA-binding protein 12B (194-201)
  source 1..24: mol_type = other RNA
aacggcgacgccatcgtgaagttc

SEQ ID NO: 45864 - RNA, 27 nt, synthetic construct
  misc_feature 1..27: note = Receptor-interacting serine/threonine-protein kinase 4 (562-570)
  source 1..27: mol_type = other RNA
aacggcgacgagagctccacccgcctg

SEQ ID NO: 45865 - RNA, 24 nt, synthetic construct
  misc_feature 1..24: note = Ankyrin-1 (403-410)
  source 1..24: mol_type = other RNA
aacggcttcacccccctgcacatc

SEQ ID NO: 45866 - RNA, 33 nt, synthetic construct
  misc_feature 1..33: note = Insulin-like growth factor-binding protein complex acid labile subunit (458-468)
  source 1..33: mol_type = other RNA
aacggcctggtggggatcgaggagcagagcctc

SEQ ID NO: 45867 - RNA, 78 nt, synthetic construct
  misc_feature 1..78: note = RNA-binding protein Nova-2 (369-394)
  source 1..78: mol_type = other RNA
aacggctacctgggggccggcgccgggggcggggcgggcggcgggggcgggcccctcgtggccgccgccgccgcggcc

SEQ ID NO: 45868 - RNA, 24 nt, synthetic construct
  misc_feature 1..24: note = Ankyrin-1 (634-641)
  source 1..24: mol_type = other RNA
aacggctacacccccctgcacatc

SEQ ID NO: 45869 - RNA, 30 nt, synthetic construct
  misc_feature 1..30: note = Hemicentin-1 (4034-4043)
  source 1..30: mol_type = other RNA
aaccacgccgtgctgcccagcggcgggctc

SEQ ID NO: 45870 - RNA, 45 nt, synthetic construct
  misc_feature 1..45: note = Tyrosine-protein phosphatase non-receptor type substrate 1 (452-466)
  source 1..45: mol_type = other RNA
aaccacaccgagtacgccagcatccagacctccccccagccggcc

SEQ ID NO: 45871 - RNA, 51 nt, synthetic construct
  misc_feature 1..51: note = Tyrosine-protein phosphatase non-receptor type substrate 1 (452-468)
  source 1..51: mol_type = other RNA
aaccacaccgagtacgccagcatccagacctccccccagccggccagcgag

SEQ ID NO: 45872 - RNA, 54 nt, synthetic construct
  misc_feature 1..54: note = Tyrosine-protein phosphatase non-receptor type substrate 1 (452-469)
  source 1..54: mol_type = other RNA
aaccacaccgagtacgccagcatccagacctccccccagccggccagcgaggac

SEQ ID NO: 45873 - RNA, 60 nt, synthetic construct
  misc_feature 1..60: note = Cytochrome c oxidase subunit 6A1, mitochondrial (67-86)
  source 1..60: mol_type = other RNA
aaccacaccctgttccacaacccccacgtgaacccgctccccaccggctacgaggacgag

SEQ ID NO: 45874 - RNA, 51 nt, synthetic construct
  misc_feature 1..51: note = Beta-2-microglobulin (82-98)
  source 1..51: mol_type = other RNA
aaccacgtgaccctgagccagcccaagatcgtcaagtgggaccgcgacatg

SEQ ID NO: 45875 - RNA, 18 nt, synthetic construct
  misc_feature 1..18: note = Ketosamine-3-kinase (149-154)
  source 1..18: mol_type = other RNA
aaccactggaaccacttc

SEQ ID NO: 45876 - RNA, 27 nt, synthetic construct
  misc_feature 1..27: note = Probable ATP-dependent RNA helicase YTHDC2 (689-697)
  source 1..27: mol_type = other RNA
aacatcgccgagaccagcatcaccgtg

SEQ ID NO: 45877 - RNA, 30 nt, synthetic construct
  misc_feature 1..30: note = Retinoic acid receptor RXR-gamma (268-277)
  source 1..30: mol_type = other RNA
aacatctgccacgccgccgacaagcagctg

SEQ ID NO: 45878 - RNA, 27 nt, synthetic construct
  misc_feature 1..27: note = ATP-dependent RNA helicase A (346-354)
  source 1..27: mol_type = other RNA
aacatcgacgagggccccctggccttc

SEQ ID NO: 45879 - RNA, 27 nt, synthetic construct
  misc_feature 1..27: note = P2X purinoceptor 7 (195-203)
  source 1..27: mol_type = other RNA
aacatcgacttccccggccacaactac

SEQ ID NO: 45880 - RNA, 45 nt, synthetic construct
  misc_feature 1..45: note = Tyrosinase (122-136)
  source 1..45: mol_type = other RNA
aacatcttcgacctgagcgcccccgagaaggacaagttcttcgcc

SEQ ID NO: 45881 - RNA, 36 nt, synthetic construct
  misc_feature 1..36: note = Glyceraldehyde-3-phosphate dehydrogenase, testis-specific (277-288)
  source 1..36: mol_type = other RNA
aacatcatccccgccagcaccggcgccgcgaaggcc

SEQ ID NO: 45882 - RNA, 27 nt, synthetic construct
  misc_feature 1..27: note = SLIT-ROBO Rho GTPase-activating protein 2 (123-131)
  source 1..27: mol_type = other RNA
aacatcatcccccgcttcgtgcaggtc

SEQ ID NO: 45883 - RNA, 27 nt, synthetic construct
  misc_feature 1..27: note = Heterogeneous nuclear ribonucleoprotein U-like protein 1 (451-459)
  source 1..27: mol_type = other RNA
aacatcctgggcaccaacgccatcatg

SEQ ID NO: 45884 - RNA, 78 nt, synthetic construct
  misc_feature 1..78: note = ATP synthase-coupling factor 6, mitochondrial (33-58)
  source 1..78: mol_type = other RNA
aacaaggagctggaccccatccagaagctcttcgtggacaagatccgcgagtacaagagcaagcggcagacctccggc

SEQ ID NO: 45885 - RNA, 90 nt, synthetic construct
  misc_feature 1..90: note = ATP synthase-coupling factor 6, mitochondrial (33-62)
  source 1..90: mol_type = other RNA
aacaaggagctggaccccatccagaagctcttcgtggacaagatccgcgagtacaagagcaagcggcagacctccggcgggccggtcgac

SEQ ID NO: 45886 - RNA, 33 nt, synthetic construct
  misc_feature 1..33: note = Eukaryotic translation initiation factor 3 subunit C-like protein (131-141)
  source 1..33: mol_type = other RNA
aacaagaacaacgccaaggccctgagcaccctc

SEQ ID NO: 45887 - RNA, 51 nt, synthetic construct
  misc_feature 1..51: note = Heat shock 70 kDa protein 4 (753-769)
  source 1..51: mol_type = other RNA
aacaagcagagcctgaccatggaccccgtggtcaagtccaaggagatcgag

SEQ ID NO: 45888 - RNA, 27 nt, synthetic construct
  misc_feature 1..27: note = Bifunctional glutamate/proline-tRNA ligase (1023-1031)
  source 1..27: mol_type = other RNA
aacctggccgactggtacagccaggtg

SEQ ID NO: 45889 - RNA, 24 nt, synthetic construct
  misc_feature 1..24: note = Vimentin (177-184)
  source 1..24: mol_type = other RNA
aacctggccgaggacatcatgcgc

SEQ ID NO: 45890 - RNA, 33 nt, synthetic construct
  misc_feature 1..33: note = Dystonin (208-218)
  source 1..33: mol_type = other RNA
aacctggccaacctcgagcacgccttctacgtg

SEQ ID NO: 45891 - RNA, 27 nt, synthetic construct
  misc_feature 1..27: note = CMP-sialic acid transporter (111-119)
  source 1..27: mol_type = other RNA
aacctggacgccgccgtgtaccaggtc

SEQ ID NO: 45892 - RNA, 27 nt, synthetic construct
  misc_feature 1..27: note = Cysteine andine-rich protein 1 (43-51)
  source 1..27: mol_type = other RNA
aacctggacagcaccaccgtggccgtc

SEQ ID NO: 45893 - RNA, 30 nt, synthetic construct
  misc_feature 1..30: note = Phospholipase A1 member A (42-51)
  source 1..30: mol_type = other RNA
aacctgttcgagggcaccgacctcaaggtg

SEQ ID NO: 45894 - RNA, 27 nt, synthetic construct
  misc_feature 1..27: note = Eukaryotic translation initiation factor 3 subunit L (162-170)
  source 1..27: mol_type = other RNA
aacctgttcaactacatcctcaacgcc

SEQ ID NO: 45895 - RNA, 24 nt, synthetic construct
  misc_feature 1..24: note = Eukaryotic translation initiation factor 2-alpha kinase 4 (1314-1321)
  source 1..24: mol_type = other RNA
aacctgggcctcgtgtacaaggtc

SEQ ID NO: 45896 - RNA, 27 nt, synthetic construct
  misc_feature 1..27: note = F-box/LRR-repeat protein 18 (261-269)
  source 1..27: mol_type = other RNA
aacctgcacgccttcctcatcagcgtg

SEQ ID NO: 45897 - RNA, 99 nt, synthetic construct
  misc_feature 1..99: note = Glia-derived nexin (344-376)
  source 1..99: mol_type = other RNA
aacctgcacgtgagccacatcctccagaaggccaagatcgaggtctccgaggacggcaccaaggccagcgcggccaccacggccatcctgatcgcccgc

SEQ ID NO: 45898 - RNA, 102 nt, synthetic construct
  misc_feature 1..102: note = Glia-derived nexin (344-377)
  source 1..102: mol_type = other RNA
aacctgcacgtgagccacatcctccagaaggccaagatcgaggtctccgaggacggcaccaaggccagcgcggccaccacggccatcctgatcgcccgctcc

SEQ ID NO: 45899 - RNA, 27 nt, synthetic construct
  misc_feature 1..27: note = GPI ethanolamine phosphate transferase 3 (51-59)
  source 1..27: mol_type = other RNA
aacctgatcaagcagctcaccagcgcc

SEQ ID NO: 45900 - RNA, 27 nt, synthetic construct
  misc_feature 1..27: note = Protein EFR3 homolog B (453-461)
  source 1..27: mol_type = other RNA
aacctgatcagccagctcaccaccgtg

SEQ ID NO: 45901 - RNA, 30 nt, synthetic construct
  misc_feature 1..30: note = Protein FAM179B (401-410)
  source 1..30: mol_type = other RNA
aacctgctcgacgacagcaacttcaaggtg

SEQ ID NO: 45902 - RNA, 30 nt, synthetic construct
  misc_feature 1..30: note = FERM domain-containing protein 5 (46-55)
  source 1..30: mol_type = other RNA
aacctgctcgagaaggactacttcggcatc

SEQ ID NO: 45903 - RNA, 27 nt, synthetic construct
  misc_feature 1..27: note = Plexin-B3 (1375-1383)
  source 1..27: mol_type = other RNA
aacctgctcaacagcaagctgttcctg

SEQ ID NO: 45904 - RNA, 27 nt, synthetic construct
  misc_feature 1..27: note = Vacuolar protein sorting-associated protein 53 homolog (176-184)
  source 1..27: mol_type = other RNA
aacctgctccagggcgtgatgaacgtc

SEQ ID NO: 45905 - RNA, 27 nt, synthetic construct
  misc_feature 1..27: note = Transcription factor SOX-6 (265-273)
  source 1..27: mol_type = other RNA
aacctgctccagcagcagatccaggtg

SEQ ID NO: 45906 - RNA, 33 nt, synthetic construct
  misc_feature 1..33: note = Putative segment polarity protein dishevelled homolog DVL1P1 (257-267)
  source 1..33: mol_type = other RNA
aacctgaacagcggctccagcgggacctccgac

SEQ ID NO: 45907 - RNA, 27 nt, synthetic construct
  misc_feature 1..27: note = Melanophilin (391-399)
  source 1..27: mol_type = other RNA
aacctgcccatcttcctcccgcgcgtg

SEQ ID NO: 45908 - RNA, 24 nt, synthetic construct
  misc_feature 1..24: note = CUB and sushi domain-containing protein 3 (2038-2045)
  source 1..24: mol_type = other RNA
aacctgcccatcggcttcggggtg

SEQ ID NO: 45909 - RNA, 27 nt, synthetic construct
  misc_feature 1..27: note = Krueppel-like factor 15 (273-281)
  source 1..27: mol_type = other RNA
aacctgcccagcaagttcgtgcgcatc

SEQ ID NO: 45910 - RNA, 30 nt, synthetic construct
  misc_feature 1..30: note = Clathrin heavy chain 1 (795-804)
  source 1..30: mol_type = other RNA
aacctgcagaagtacatcgagatctacgtg

SEQ ID NO: 45911 - RNA, 33 nt, synthetic construct
  misc_feature 1..33: note = Histone-lysine N-methyltransferase, H3 lysine-79 specific (241-251)
  source 1..33: mol_type = other RNA
aacctgagcgacatcggcaccatcatgcgcgtg

SEQ ID NO: 45912 - RNA, 27 nt, synthetic construct
  misc_feature 1..27: note = Talin-1 (583-591)
  source 1..27: mol_type = other RNA
aacctgaccgagatgagccgcggcgtg

SEQ ID NO: 45913 - RNA, 27 nt, synthetic construct
  misc_feature 1..27: note = Cytoplasmic dynein 2 heavy chain 1 (271-279)
  source 1..27: mol_type = other RNA
aacctgtgggaggacccctactacctc

SEQ ID NO: 45914 - RNA, 27 nt, synthetic construct
  misc_feature 1..27: note = Receptor-type tyrosine-protein phosphatase kappa (420-428)
  source 1..27: mol_type = other RNA
aacctgtggaacagcacccaccacgtg

SEQ ID NO: 45915 - RNA, 30 nt, synthetic construct
  misc_feature 1..30: note = Contactin-associated protein-like 3B (1097-1106)
  source 1..30: mol_type = other RNA
aacatggccgacggccagctgcaccaggtg

SEQ ID NO: 45916 - RNA, 27 nt, synthetic construct
  misc_feature 1..27: note = Nucleolar pre-ribosomal-associated protein 1 (1538-1546)
  source 1..27: mol_type = other RNA
aacatggacaaggtgcccggcttctac

SEQ ID NO: 45917 - RNA, 36 nt, synthetic construct
  misc_feature 1..36: note = Unconventional myosin-Va (131-142)
  source 1..36: mol_type = other RNA
aacatgggcgacatggacccccacatcttcgccgtg

SEQ ID NO: 45918 - RNA, 27 nt, synthetic construct
  misc_feature 1..27: note = Sodium-dependent proline transporter (134-142)
  source 1..27: mol_type = other RNA
aacatgatcatcgcctacgtgctgttc

SEQ ID NO: 45919 - RNA, 27 nt, synthetic construct
  misc_feature 1..27: note = Striatin-interacting protein 2 (728-736)
  source 1..27: mol_type = other RNA
aacatgaagaccatgagcgccatctac

SEQ ID NO: 45920 - RNA, 27 nt, synthetic construct
  misc_feature 1..27: note = Laminin subunit gamma-1 (71-79)
  source 1..27: mol_type = other RNA
aacatgctgaagcagctccaggaggcc

SEQ ID NO: 45921 - RNA, 27 nt, synthetic construct
  misc_feature 1..27: note = UDP-glucose:glycoprotein glucosyltransferase 2 (920-928)
  source 1..27: mol_type = other RNA
aacatgagcgacttcatcatgaaggtg

SEQ ID NO: 45922 - RNA, 27 nt, synthetic construct
  misc_feature 1..27: note = Lysine-tRNA ligase (423-431)
  source 1..27: mol_type = other RNA
aacatggtggaggagctggagaaggcc

SEQ ID NO: 45923 - RNA, 27 nt, synthetic construct
  misc_feature 1..27: note = Tetratricopeptide repeat protein 28 (1500-1508)
  source 1..27: mol_type = other RNA
aacatggtgggcatgctgcaccaggtc

SEQ ID NO: 45924 - RNA, 30 nt, synthetic construct
  misc_feature 1..30: note = Sodium/potassium-transporting ATPase subunit alpha-3 (166-175)
  source 1..30: mol_type = other RNA
aacatggtgccccagcaggccctggtcatc

SEQ ID NO: 45925 - RNA, 27 nt, synthetic construct
  misc_feature 1..27: note = Inositol 1,4,5-trisphosphate receptor type 1 (2083-2091)
  source 1..27: mol_type = other RNA
aacaacgccagcaagctgctcctggcc

SEQ ID NO: 45926 - RNA, 21 nt, synthetic construct
  misc_feature 1..21: note = F-box only protein 25 (151-157)
  source 1..21: mol_type = other RNA
aacaacatcctgtaccgcttc

SEQ ID NO: 45927 - RNA, 24 nt, synthetic construct
  misc_feature 1..24: note = Keratin, type II cytoskeletal 1b (325-332)
  source 1..24: mol_type = other RNA
aacaaccgcagcctggacctcgac

SEQ ID NO: 45928 - RNA, 48 nt, synthetic construct
  misc_feature 1..48: note = Filamin-A (2114-2129)
  source 1..48: mol_type = other RNA
aaccccgccgagttcgtggtcaacaccagcaacgccggcgcgggggcc

SEQ ID NO: 45929 - RNA, 51 nt, synthetic construct
  misc_feature 1..51: note = Filamin-A (2114-2130)
  source 1..51: mol_type = other RNA
aaccccgccgagttcgtggtcaacaccagcaacgccggcgcgggggccctg

SEQ ID NO: 45930 - RNA, 30 nt, synthetic construct
  misc_feature 1..30: note = Ras GTPase-activating-like protein IQGAP1 (1197-1206)
  source 1..30: mol_type = other RNA
aaccccgccatcgtggccccggacgcgttc

SEQ ID NO: 45931 - RNA, 27 nt, synthetic construct
  misc_feature 1..27: note = Leucine-rich repeat serine/threonine-protein kinase 2 (1842-1850)
  source 1..27: mol_type = other RNA
aaccccgaccagccgcgcctgaccatc

SEQ ID NO: 45932 - RNA, 45 nt, synthetic construct
  misc_feature 1..45: note = Calreticulin (296-310)
  source 1..45: mol_type = other RNA
aaccccgagtacagcccggacccctccatctacgcctacgacaac

SEQ ID NO: 45933 - RNA, 42 nt, synthetic construct
  misc_feature 1..42: note = Cytochrome c oxidase subunit 6A1, mitochondrial (73-86)
  source 1..42: mol_type = other RNA
aacccccacgtgaacccgctgcccaccggctacgaggacgag

SEQ ID NO: 45934 - RNA, 27 nt, synthetic construct
  misc_feature 1..27: note = Pre-mRNA-splicing factor ATP-dependent RNA helicase PRP16 (832-840)
  source 1..27: mol_type = other RNA
aacccccgcatcggcatggacgccctg

SEQ ID NO: 45935 - RNA, 54 nt, synthetic construct
  misc_feature 1..54: note = E3 ubiquitin-protein ligase UBR4 (202-219)
  source 1..54: mol_type = other RNA
aacccccgcaccgtggccagccagccgatctccacccagacgctggtcgagggc

SEQ ID NO: 45936 - RNA, 27 nt, synthetic construct
  misc_feature 1..27: note = Angiomotin (27-35)
  source 1..27: mol_type = other RNA
aaccccagcgagaaccgctccctgctc

SEQ ID NO: 45937 - RNA, 30 nt, synthetic construct
  misc_feature 1..30: note = E3 ubiquitin-protein ligase HERC2 (1771-1780)
  source 1..30: mol_type = other RNA
aaccccagcggcccgtccctggggaccatc

SEQ ID NO: 45938 - RNA, 27 nt, synthetic construct
  misc_feature 1..27: note = Poly (ADP-ribose) polymerase 14 (87-95)
  source 1..27: mol_type = other RNA
aacccctacaacggcgggggccgcgtg

SEQ ID NO: 45939 - RNA, 24 nt, synthetic construct
  misc_feature 1..24: note = Ceramide synthase 2 (123-130)
  source 1..24: mol_type = other RNA
aaccaggaccgccccagcctgctc

SEQ ID NO: 45940 - RNA, 27 nt, synthetic construct
  misc_feature 1..27: note = Exosome complex exonuclease RRP44 (115-123)
  source 1..27: mol_type = other RNA
aaccaggagaagcacttctacaccttc

SEQ ID NO: 45941 - RNA, 60 nt, synthetic construct
  misc_feature 1..60: note = Heterogeneous nuclear ribonucleoprotein A1-like 2 (148-167)
  source 1..60: mol_type = other RNA
aaccagggcgggtacggcgggagctccagctccagctcctacggcagcgggcgccggttc

SEQ ID NO: 45942 - RNA, 21 nt, synthetic construct
  misc_feature 1..21: note = Mid1-interacting protein 1 (8-14)
  source 1..21: mol_type = other RNA
aaccagaagcacagcctgttc

SEQ ID NO: 45943 - RNA, 27 nt, synthetic construct
  misc_feature 1..27: note = Splicing factor U2AF 65 kDa subunit (348-356)
  source 1..27: mol_type = other RNA
aaccagacccccgtgaccctgcaggtc

SEQ ID NO: 45944 - RNA, 21 nt, synthetic construct
  misc_feature 1..21: note = DNA polymerase epsilon catalytic subunit A (1795-1801)
  source 1..21: mol_type = other RNA
aaccaggtgatgcacttctac

SEQ ID NO: 45945 - RNA, 30 nt, synthetic construct
  misc_feature 1..30: note = Ankyrin repeat domain-containing protein 26 (77-86)
  source 1..30: mol_type = other RNA
aaccgcaagctgatcccccgggagaacctc

SEQ ID NO: 45946 - RNA, 24 nt, synthetic construct
  misc_feature 1..24: note = Myosin-9 (710-717)
  source 1..24: mol_type = other RNA
aaccgcgtggtcttccaggagttc

SEQ ID NO: 45947 - RNA, 42 nt, synthetic construct
  misc_feature 1..42: note = Hemicentin-1 (685-698)
  source 1..42: mol_type = other RNA
aacagcgccggcaccgacaagcagaactccaccctgcgctac

SEQ ID NO: 45948 - RNA, 24 nt, synthetic construct
  misc_feature 1..24: note = Mitochondrial import inner membrane translocase subunit TIM50 (276-283)
  source 1..24: mol_type = other RNA
aacagcgacgaccgcgtgctgctc

SEQ ID NO: 45949 - RNA, 36 nt, synthetic construct
  misc_feature 1..36: note = Cell adhesion molecule-related/down-regulated by oncogenes (944-955)
  source 1..36: mol_type = other RNA
aacagcctgggctccgggggcaacgtggggcccgcc

SEQ ID NO: 45950 - RNA, 30 nt, synthetic construct
  misc_feature 1..30: note = Protein phosphatase 1 regulatory subunit 12A (714-723)
  source 1..30: mol_type = other RNA
aacagcctggtgggcatcacctccgcctac

SEQ ID NO: 45951 - RNA, 42 nt, synthetic construct
  misc_feature 1..42: note = Synaptotagmin-like protein 2 (277-290)
  source 1..42: mol_type = other RNA
aacagctccagctccagcaccgactccgagaccctgcgctac

SEQ ID NO: 45952 - RNA, 33 nt, synthetic construct
  misc_feature 1..33: note = ATP synthase subunit epsilon-like protein, mitochondrial (41-51)
  source 1..33: mol_type = other RNA
aacagcgtgaagatcgtcaaggtgaagaaggag

SEQ ID NO: 45953 - RNA, 39 nt, synthetic construct
  misc_feature 1..39: note = Ankyrin-2 (1558-1570)
  source 1..39: mol_type = other RNA
aacaccgagcccctgcaggagcgcatcagccactcctac

SEQ ID NO: 45954 - RNA, 27 nt, synthetic construct
  misc_feature 1..27: note = GRB2-associated-binding protein 1 (88-96)
  source 1..27: mol_type = other RNA
aacaccatcgaccgcatcttctacctg

SEQ ID NO: 45955 - RNA, 33 nt, synthetic construct
  misc_feature 1..33: note = Microphthalmia-associated transcription factor (237-247)
  source 1..33: mol_type = other RNA
aacaccctgcccgtgagcggcaacctcatcgac

SEQ ID NO: 45956 - RNA, 36 nt, synthetic construct
  misc_feature 1..36: note = Microphthalmia-associated transcription factor (90-101)
  source 1..36: mol_type = other RNA
aacaccctgcccgtgagcggcaacctcatcgacctg

SEQ ID NO: 45957 - RNA, 27 nt, synthetic construct
  misc_feature 1..27: note = Multidrug and toxin extrusion protein 1 (136-144)
  source 1..27: mol_type = other RNA
aacacccagcacatcctgctcctgttc

SEQ ID NO: 45958 - RNA, 30 nt, synthetic construct
  misc_feature 1..30: note = Hemicentin-1 (2932-2941)
  source 1..30: mol_type = other RNA
aacacccagatcaccgacatcggccgctac

SEQ ID NO: 45959 - RNA, 33 nt, synthetic construct
  misc_feature 1..33: note = Titin (6557-6567)
  source 1..33: mol_type = other RNA
aacgtggccggcgacgacgcctgcagcgggatc

SEQ ID NO: 45960 - RNA, 27 nt, synthetic construct
  misc_feature 1..27: note = Rho guanine nucleotide exchange factor 2 (401-409)
  source 1..27: mol_type = other RNA
aacgtggacgagggcatctaccagctg

SEQ ID NO: 45961 - RNA, 27 nt, synthetic construct
  misc_feature 1..27: note = Hemicentin-1 (3845-3853)
  source 1..27: mol_type = other RNA
aacgtggaccagaaccagaacagctac

SEQ ID NO: 45962 - RNA, 27 nt, synthetic construct
  misc_feature 1..27: note = Serine/threonine-protein phosphatase PP1-beta catalytic subunit (7-15)
  source 1..27: mol_type = other RNA
aacgtggacagcctgatcacccgcctc

SEQ ID NO: 45963 - RNA, 48 nt, synthetic construct
  misc_feature 1..48: note = Alpha-enolase (36-51)
  source 1..48: mol_type = other RNA
aacgtgggcgacgaggggggcttcgcccccaacatcctggagaacaag

SEQ ID NO: 45964 - RNA, 21 nt, synthetic construct
  misc_feature 1..21: note = tRNA (adenine(58)-N(1))-methyltransferase non-catalytic subunit TRM6 (56-62)
  source 1..21: mol_type = other RNA
aacgtgatcggccacagctac

SEQ ID NO: 45965 - RNA, 81 nt, synthetic construct
  misc_feature 1..81: note = Heat shock-related 70 kDa protein 2 (197-223)
  source 1..81: mol_type = other RNA
aacgtgctgatcttcgacctcggcgggggcaccttcgacgtcagcatcctgaccatcgaggacgggatcttcgaggtgaag

SEQ ID NO: 45966 - RNA, 48 nt, synthetic construct
  misc_feature 1..48: note = Heat shock 70 kDa protein 1-like (170-185)
  source 1..48: mol_type = other RNA
aacgtgctgcgcatcatcaacgagcccaccgccgccgcgatcgcctac

SEQ ID NO: 45967 - RNA, 51 nt, synthetic construct
  misc_feature 1..51: note = 78 kDa glucose-regulated protein (176-192)
  source 1..51: mol_type = other RNA
aacgtgatgcgcatcatcaacgagcccaccgccgccgcgatcgcctacggc

SEQ ID NO: 45968 - RNA, 45 nt, synthetic construct
  misc_feature 1..45: note = Guanine nucleotide-binding protein G(i) subunit alpha-1 (331-345)
  source 1..45: mol_type = other RNA
aacgtgcagttcgtcttcgacgccgtgaccgacgtgatcatcaag

SEQ ID NO: 45969 - RNA, 24 nt, synthetic construct
  misc_feature 1..24: note = Nuclease-sensitive element-binding protein 1 (67-74)
  source 1..24: mol_type = other RNA
aacgtgcgcaacggctacgggttc

SEQ ID NO: 45970 - RNA, 27 nt, synthetic construct
  misc_feature 1..27: note = Receptor-type tyrosine-protein phosphatase kappa (1423-1431)
  source 1..27: mol_type = other RNA
aacgtggtcgacgtgttccacgccgtg

SEQ ID NO: 45971 - RNA, 27 nt, synthetic construct
  misc_feature 1..27: note = Fidgetin-like protein 1 (81-89)
  source 1..27: mol_type = other RNA
aactacgccgagaacatcctgaccctc

SEQ ID NO: 45972 - RNA, 21 nt, synthetic construct
  misc_feature 1..21: note = DNA-directed RNA polymerases I, II, and III subunit RPABC5 (61-67)
  source 1..21: mol_type = other RNA
aactacgcccccctggagaag

SEQ ID NO: 45973 - RNA, 27 nt, synthetic construct
  misc_feature 1..27: note = Melanoma-associated antigen 10 (167-175)
  source 1..27: mol_type = other RNA
aactacgaggaccacttccccctgctc

SEQ ID NO: 45974 - RNA, 33 nt, synthetic construct
  misc_feature 1..33: note = Protein phosphatase Slingshot homolog 1 (196-206)
  source 1..33: mol_type = other RNA
aactacttccccggcggggtggccctgatctgg

SEQ ID NO: 45975 - RNA, 27 nt, synthetic construct
  misc_feature 1..27: note = Transformation/transcription domain-associated protein (1707-1715)
  source 1..27: mol_type = other RNA
aactacggcgacatcgagctgctcttc

SEQ ID NO: 45976 - RNA, 27 nt, synthetic construct
  misc_feature 1..27: note = Isocitrate dehydrogenase (NAD) subunit gamma, mitochondrial (298-306)
  source 1..27: mol_type = other RNA
aactacggccacgtgtacgccgtcttc

SEQ ID NO: 45977 - RNA, 27 nt, synthetic construct
  misc_feature 1..27: note = Lathosterol oxidase (239-247)
  source 1..27: mol_type = other RNA
aactacggccagtacttcaccctgtgg

SEQ ID NO: 45978 - RNA, 27 nt, synthetic construct
  misc_feature 1..27: note = Beta-Ala-His dipeptidase (489-497)
  source 1..27: mol_type = other RNA
aactacatcgagggcaccaagctgttc

SEQ ID NO: 45979 - RNA, 27 nt, synthetic construct
  misc_feature 1..27: note = Procollagen-lysine,2-oxoglutarate 5-dioxygenase 1 (255-263)
  source 1..27: mol_type = other RNA
aactacatcccccgcttctggaccttc

SEQ ID NO: 45980 - RNA, 27 nt, synthetic construct
  misc_feature 1..27: note = Probable E3 ubiquitin-protein ligase HERC3 (467-475)
  source 1..27: mol_type = other RNA
aactacatcaccgccgccctgaagctc

SEQ ID NO: 45981 - RNA, 21 nt, synthetic construct
  misc_feature 1..21: note = Heat shock protein HSP 90-beta (351-357)
  source 1..21: mol_type = other RNA
aactacaagaagttctacgag

SEQ ID NO: 45982 - RNA, 27 nt, synthetic construct
  misc_feature 1..27: note = Heat shock protein HSP 90-beta (351-359)
  source 1..27: mol_type = other RNA
aactacaagaagttctacgaggccttc

SEQ ID NO: 45983 - RNA, 33 nt, synthetic construct
  misc_feature 1..33: note = Muskelin (29-39)
  source 1..33: mol_type = other RNA
aactaccccccgcagtacctgatcctcaagctg

SEQ ID NO: 45984 - RNA, 27 nt, synthetic construct
  misc_feature 1..27: note = Pleckstrin homology domain-containing family G member 2 (150-158)
  source 1..27: mol_type = other RNA
aactaccccagctccctggccctcctg

SEQ ID NO: 45985 - RNA, 33 nt, synthetic construct
  misc_feature 1..33: note = DNA polymerase zeta catalytic subunit (1024-1034)
  source 1..33: mol_type = other RNA
aactacagcgacgtgatgtccaagctgggcttc

SEQ ID NO: 45986 - RNA, 27 nt, synthetic construct
  misc_feature 1..27: note = Transmembraneoprotein NMB (275-283)
  source 1..27: mol_type = other RNA
aactacagcaccatcaactacaagtgg

SEQ ID NO: 45987 - RNA, 27 nt, synthetic construct
  misc_feature 1..27: note = 1,2-dihydroxy-3-keto-5-methylthiopentene dioxygenase (141-149)
  source 1..27: mol_type = other RNA
aactacaccaaggccatgcgcctgttc

SEQ ID NO: 45988 - RNA, 30 nt, synthetic construct
  misc_feature 1..30: note = HLA class II histocompatibility antigen, DR alpha chain (103-112)
  source 1..30: mol_type = other RNA
aactacacccccatcaccaacgacaagttc

SEQ ID NO: 45989 - RNA, 27 nt, synthetic construct
  misc_feature 1..27: note = DNA-dependent protein kinase catalytic subunit (289-297)
  source 1..27: mol_type = other RNA
aactacgtgagcctgttcgaggtcctc

SEQ ID NO: 45990 - RNA, 27 nt, synthetic construct
  misc_feature 1..27: note = Polycystin-1 (3-11)
  source 1..27: mol_type = other RNA
cccgccgccccggcgcgcctggccctc

SEQ ID NO: 45991 - RNA, 24 nt, synthetic construct
  misc_feature 1..24: note = Exportin-T (609-616)
  source 1..24: mol_type = other RNA
cccgccgagcgcaagcaggccctg

SEQ ID NO: 45992 - RNA, 36 nt, synthetic construct
  misc_feature 1..36: note = Collagen alpha-1(V) chain (1145-1156)
  source 1..36: mol_type = other RNA
cccgccggcccggtggggccccccggcgaggacggg

SEQ ID NO: 45993 - RNA, 24 nt, synthetic construct
  misc_feature 1..24: note = tRNA pseudouridine synthase-like 1 (273-280)
  source 1..24: mol_type = other RNA
cccgcccacggcctgttcctcaag

SEQ ID NO: 45994 - RNA, 24 nt, synthetic construct
  misc_feature 1..24: note = Sushi repeat-containing protein SRPX (4-11)
  source 1..24: mol_type = other RNA
cccgcccaccgcccggccctgctc

SEQ ID NO: 45995 - RNA, 39 nt, synthetic construct
  misc_feature 1..39: note = Syntenin-1 (29-41)
  source 1..39: mol_type = other RNA
cccgccatcctgagcgaggcctccgcgccgatcccccac

SEQ ID NO: 45996 - RNA, 24 nt, synthetic construct
  misc_feature 1..24: note = Acetolactate synthase-like protein (225-232)
  source 1..24: mol_type = other RNA
cccgccaagccgcccaagggcctg

SEQ ID NO: 45997 - RNA, 27 nt, synthetic construct
  misc_feature 1..27: note = Calmodulin-regulated spectrin-associated protein 3 (958-966)
  source 1..27: mol_type = other RNA
cccgccccggccgcgcgcgcccccgcc

SEQ ID NO: 45998 - RNA, 27 nt, synthetic construct
  misc_feature 1..27: note = Tissue factor pathway inhibitor 2 (3-11)
  source 1..27: mol_type = other RNA
cccgcccgcccgctgggcctcagcatc

SEQ ID NO: 45999 - RNA, 21 nt, synthetic construct
  misc_feature 1..21: note = Phosphoinositide 3-kinase regulatory subunit 5 (495-501)
  source 1..21: mol_type = other RNA
cccgccagccgcccgcagcgg

SEQ ID NO: 46000 - RNA, 27 nt, synthetic construct
  misc_feature 1..27: note = m7GpppX diphosphatase (134-142)
  source 1..27: mol_type = other RNA
cccgccaccgagaagcacctgcagaag

SEQ ID NO: 46001 - RNA, 36 nt, synthetic construct
  misc_feature 1..36: note = Nardilysin (738-749)
  source 1..36: mol_type = other RNA
cccgcctacgaggccgacgtggcgcagctggagtac

SEQ ID NO: 46002 - RNA, 27 nt, synthetic construct
  misc_feature 1..27: note = Lysosome-associated membraneoprotein 1 (250-258)
  source 1..27: mol_type = other RNA
cccgacgcccgcgacccggccttcaag

SEQ ID NO: 46003 - RNA, 21 nt, synthetic construct
  misc_feature 1..21: note = Uncharacterized protein C14orf119 (123-129)
  source 1..21: mol_type = other RNA
cccgacttcgtggccaagttc

SEQ ID NO: 46004 - RNA, 24 nt, synthetic construct
  misc_feature 1..24: note = RNA-binding protein 12B (29-36)
  source 1..24: mol_type = other RNA
cccgacggcggggtgcacatcatc

SEQ ID NO: 46005 - RNA, 21 nt, synthetic construct
  misc_feature 1..21: note = Thyroid transcription factor 1-associated protein 26 (90-96)
  source 1..21: mol_type = other RNA
cccgacaacctgaagcacctc

SEQ ID NO: 46006 - RNA, 24 nt, synthetic construct
  misc_feature 1..24: note = Tubulin beta-6 chain (95-102)
  source 1..24: mol_type = other RNA
cccgaccgcatcatgaacaccttc

SEQ ID NO: 46007 - RNA, 36 nt, synthetic construct
  misc_feature 1..36: note = SH3 and multiple ankyrin repeat domains protein 1 (980-991)
  source 1..36: mol_type = other RNA
cccgacaccccggcccccgccacccccctgcccccg

SEQ ID NO: 46008 - RNA, 30 nt, synthetic construct
  misc_feature 1..30: note = Copper-transporting ATPase 1 (1234-1243)
  source 1..30: mol_type = other RNA
cccgaggccgagctggccatccacatcctc

SEQ ID NO: 46009 - RNA, 45 nt, synthetic construct
  misc_feature 1..45: note = Putative endoplasmin-like protein (220-234)
  source 1..45: mol_type = other RNA
cccgagttcgacggcaagcgcttccagaacgtggccaaggagggg

SEQ ID NO: 46010 - RNA, 33 nt, synthetic construct
  misc_feature 1..33: note = Fatty acid synthase (753-763)
  source 1..33: mol_type = other RNA
cccgagcacgccgtggtcctggagatcgccccg

SEQ ID NO: 46011 - RNA, 24 nt, synthetic construct
  misc_feature 1..24: note = Proteasome-associated protein ECM29 homolog (684-691)
  source 1..24: mol_type = other RNA
cccgagaagctggccaccaagttc

SEQ ID NO: 46012 - RNA, 21 nt, synthetic construct
  misc_feature 1..21: note = Serine/threonine-protein kinase ULK3 (110-116)
  source 1..21: mol_type = other RNA
cccgagaaggtggcccgcgtc

SEQ ID NO: 46013 - RNA, 33 nt, synthetic construct
  misc_feature 1..33: note = Alsin (1431-1441)
  source 1..33: mol_type = other RNA
cccgagctgccggaggagggcagcaccatcccc

SEQ ID NO: 46014 - RNA, 30 nt, synthetic construct
  misc_feature 1..30: note = Serine/arginine repetitive matrix protein 2 (361-370)
  source 1..30: mol_type = other RNA
cccgagccgcccgcccccacccccctgctc

SEQ ID NO: 46015 - RNA, 36 nt, synthetic construct
  misc_feature 1..36: note = Homeobox protein SIX5 (88-99)
  source 1..36: mol_type = other RNA
cccgagcaggtggcctgcgtctgcgaggccctgctc

SEQ ID NO: 46016 - RNA, 30 nt, synthetic construct
  misc_feature 1..30: note = Putative exonuclease GOR (33-42)
  source 1..30: mol_type = other RNA
cccgagcgcccgggcggggccgtgctgttc

SEQ ID NO: 46017 - RNA, 72 nt, synthetic construct
  misc_feature 1..72: note = Neutral alpha-glucosidase AB (824-847)
  source 1..72: mol_type = other RNA
cccgagaccagcgtgctggtcctccgcaagccgggcatcaacgtggcctccgactggagcatccacctgcgg

SEQ ID NO: 46018 - RNA, 21 nt, synthetic construct
  misc_feature 1..21: note = Coatomer subunit alpha (635-641)
  source 1..21: mol_type = other RNA
cccgaggtggccctgcacttc

SEQ ID NO: 46019 - RNA, 27 nt, synthetic construct
  misc_feature 1..27: note = Melanocyte protein PMEL (57-65)
  source 1..27: mol_type = other RNA
cccgagtggaccgaggcccagcgcctg

SEQ ID NO: 46020 - RNA, 42 nt, synthetic construct
  misc_feature 1..42: note = Calreticulin (297-310)
  source 1..42: mol_type = other RNA
cccgagtacagcccggacccctccatctacgcctacgacaac

SEQ ID NO: 46021 - RNA, 24 nt, synthetic construct
  misc_feature 1..24: note = Tyrosine-protein phosphatase non-receptor type 11 (284-291)
  source 1..24: mol_type = other RNA
cccttcgaccacacccgcgtggtc

SEQ ID NO: 46022 - RNA, 24 nt, synthetic construct
  misc_feature 1..24: note = Polypyrimidine tract-binding protein 2 (92-99)
  source 1..24: mol_type = other RNA
cccttcggcaaggtgaccaacatc

SEQ ID NO: 46023 - RNA, 24 nt, synthetic construct
  misc_feature 1..24: note = Polypyrimidine tract-binding protein 3 (124-131)
  source 1..24: mol_type = other RNA
cccttcggcaaggtgaccaacctg

SEQ ID NO: 46024 - RNA, 30 nt, synthetic construct
  misc_feature 1..30: note = Uncharacterized protein KIAA0556 (546-555)
  source 1..30: mol_type = other RNA
cccttccacccgcccctgcagctcttcttc

SEQ ID NO: 46025 - RNA, 30 nt, synthetic construct
  misc_feature 1..30: note = Transmembrane and TPR repeat-containing protein 1 (393-402)
  source 1..30: mol_type = other RNA
cccttcatcccggccagcaacctgttcttc

SEQ ID NO: 46026 - RNA, 27 nt, synthetic construct
  misc_feature 1..27: note = Glycine dehydrogenase (decarboxylating), mitochondrial (778-786)
  source 1..27: mol_type = other RNA
cccttcctgccgaaccaccccgtgatc

SEQ ID NO: 46027 - RNA, 36 nt, synthetic construct
  misc_feature 1..36: note = Cytochrome c oxidase subunit 7C, mitochondrial (52-63)
  source 1..36: mol_type = other RNA
cccttcctggtggtccgccaccagctcctgaagacc

SEQ ID NO: 46028 - RNA, 21 nt, synthetic construct
  misc_feature 1..21: note = Interferon-induced 35 kDa protein (53-59)
  source 1..21: mol_type = other RNA
cccttcagcgtgccgaagatc

SEQ ID NO: 46029 - RNA, 27 nt, synthetic construct
  misc_feature 1..27: note = U2 small nuclear ribonucleoprotein B'' (73-81)
  source 1..27: mol_type = other RNA
cccttctacggcaagccgatgcgcatc

SEQ ID NO: 46030 - RNA, 39 nt, synthetic construct
  misc_feature 1..39: note = SH2 domain-containing protein 3A (404-416)
  source 1..39: mol_type = other RNA
cccggcgccgccggggacctgccgggcctcgcggccgtg

SEQ ID NO: 46031 - RNA, 30 nt, synthetic construct
  misc_feature 1..30: note = NADH dehydrogenase (ubiquinone) 1 beta subcomplex subunit 7 (126-135)
  source 1..30: mol_type = other RNA
cccggcgaggtggacccgaaggtcgccctg

SEQ ID NO: 46032 - RNA, 48 nt, synthetic construct
  misc_feature 1..48: note = Heat shock cognate 71 kDa protein (622-637)
  source 1..48: mol_type = other RNA
cccggcgggttcccgggcgggggcgccccccccagcgggggcgcctcc

SEQ ID NO: 46033 - RNA, 39 nt, synthetic construct
  misc_feature 1..39: note = Shadow of prion protein (108-120)
  source 1..39: mol_type = other RNA
cccggcgggaacggcaccgggccgggcatctacagctac

SEQ ID NO: 46034 - RNA, 24 nt, synthetic construct
  misc_feature 1..24: note = HLA class II histocompatibility antigen, DR beta 5 chain (7-14)
  source 1..24: mol_type = other RNA
cccggcgggagctacatggccaag

SEQ ID NO: 46035 - RNA, 24 nt, synthetic construct
  misc_feature 1..24: note = BAG family molecular chaperone regulator 3 (334-341)
  source 1..24: mol_type = other RNA
cccggccacatcccgatccaggtg

SEQ ID NO: 46036 - RNA, 54 nt, synthetic construct
  misc_feature 1..54: note = Collagen alpha-5(IV) chain (1035-1052)
  source 1..54: mol_type = other RNA
cccggcccgcagggggtggagggcccccccgggcccagcggcgtcccggggcag

SEQ ID NO: 46037 - RNA, 24 nt, synthetic construct
  misc_feature 1..24: note = Adenomatous polyposis coli protein 2 (1191-1198)
  source 1..24: mol_type = other RNA
cccggcccgcgcgccaccccccgg

SEQ ID NO: 46038 - RNA, 27 nt, synthetic construct
  misc_feature 1..27: note = Mucin-5B (364-372)
  source 1..27: mol_type = other RNA
cccggcaccgccccgccccccaaggtg

SEQ ID NO: 46039 - RNA, 60 nt, synthetic construct
  misc_feature 1..60: note = Elastin (116-135)
  source 1..60: mol_type = other RNA
cccggcgtggggggcctgggggtcagcgccggcgccgtggtgccgcagcccggggcgggc

SEQ ID NO: 46040 - RNA, 21 nt, synthetic construct
  misc_feature 1..21: note = Mitochondrial import inner membrane translocase subunit TIM50 (216-222)
  source 1..21: mol_type = other RNA
ccccacggcttcatcagctac

SEQ ID NO: 46041 - RNA, 18 nt, synthetic construct
  misc_feature 1..18: note = BolA-like protein 2 (65-70)
  source 1..18: mol_type = other RNA
ccccacatccacgccttc

SEQ ID NO: 46042 - RNA, 24 nt, synthetic construct
  misc_feature 1..24: note = ATP synthase subunit d, mitochondrial (130-137)
  source 1..24: mol_type = other RNA
ccccaccagccgatcgagaacctg

SEQ ID NO: 46043 - RNA, 24 nt, synthetic construct
  misc_feature 1..24: note Dolichyl-diphosphooligosaccharide-proteinosyltransferase subunit 2 (292-299)
  source 1..24: mol_type = other RNA
ccccaccagaccttcgtgcgcctg

SEQ ID NO: 46044 - RNA, 60 nt, synthetic construct
  misc_feature 1..60: note = Syndecan-3 (6-25)
  source 1..60: mol_type = other RNA
ccccaccgcgccggcgccgcgcacggggccggcgccggggccggcgccgcggccgggccg

SEQ ID NO: 46045 - RNA, 39 nt, synthetic construct
  misc_feature 1..39: note = Cytochrome c oxidase subunit 6A1, mitochondrial (74-86)
  source 1..39: mol_type = other RNA
ccccacgtgaacccgctgcccaccggctacgaggacgag

SEQ ID NO: 46046 - RNA, 21 nt, synthetic construct
  misc_feature 1..21: note = BAG family molecular chaperone regulator 3 (292-298)
  source 1..21: mol_type = other RNA
cccatccgcgtgcacaccgtc

SEQ ID NO: 46047 - RNA, 24 nt, synthetic construct
  misc_feature 1..24: note = Major facilitator superfamily domain-containing protein 12 (309-316)
  source 1..24: mol_type = other RNA
cccaagaagttcatcgccaccatc

SEQ ID NO: 46048 - RNA, 63 nt, synthetic construct
  misc_feature 1..63: note = MICOS complex subunit MIC27 (248-268)
  source 1..63: mol_type = other RNA
cccaagctgatggaccacggccagagccacccggaggacatcgacatgtactccacccgcagc

SEQ ID NO: 46049 - RNA, 21 nt, synthetic construct
  misc_feature 1..21: note = 40S ribosomal protein S26 (65-71)
  source 1..21: mol_type = other RNA
cccaagctgtacgtgaagctc

SEQ ID NO: 46050 - RNA, 24 nt, synthetic construct
  misc_feature 1..24: note = 26S proteasome non-ATPase regulatory subunit 6 (12-19)
  source 1..24: mol_type = other RNA
cccaagaacccggacctgcgcatc

SEQ ID NO: 46051 - RNA, 24 nt, synthetic construct
  misc_feature 1..24: note = Ran-binding protein 9 (351-358)
  source 1..24: mol_type = other RNA
cccaagcagccgcccctggccctc

SEQ ID NO: 46052 - RNA, 24 nt, synthetic construct
  misc_feature 1..24: note = High mobility group protein B1 (95-102)
  source 1..24: mol_type = other RNA
cccaagcgcccgcccagcgccttc

SEQ ID NO: 46053 - RNA, 36 nt, synthetic construct
  misc_feature 1..36: note = Ras-associated and pleckstrin homology domains-containing protein 1 (1085-1096)
  source 1..36: mol_type = other RNA
cccaaggtggccgtcgtgaacccgcagccccagcag

SEQ ID NO: 46054 - RNA, 42 nt, synthetic construct
  misc_feature 1..42: note = Annexin A2 (211-224)
  source 1..42: mol_type = other RNA
cccaagtggatcagcatcatgaccgagcgctccgtgccgcac

SEQ ID NO: 46055 - RNA, 24 nt, synthetic construct
  misc_feature 1..24: note = Guanine nucleotide-binding protein-like 3 (296-303)
  source 1..24: mol_type = other RNA
cccctggacaagcagatcaccatc

SEQ ID NO: 46056 - RNA, 30 nt, synthetic construct
  misc_feature 1..30: note = MAX gene-associated protein (2401-2410)
  source 1..30: mol_type = other RNA
cccctgttcagcggcccggtggtcgccgtg

SEQ ID NO: 46057 - RNA, 21 nt, synthetic construct
  misc_feature 1..21: note = A-kinase anchor protein 6 (596-602)
  source 1..21: mol_type = other RNA
cccctgctcagcaagcacaag

SEQ ID NO: 46058 - RNA, 21 nt, synthetic construct
  misc_feature 1..21: note = Ubiquitin carboxyl-terminal hydrolase 11 (444-450)
  source 1..21: mol_type = other RNA
cccctgccgatcagccacaag

SEQ ID NO: 46059 - RNA, 30 nt, synthetic construct
  misc_feature 1..30: note = Protein transport protein Sec23B (244-253)
  source 1..30: mol_type = other RNA
cccctgcgcagcaccggcgtggccctctcc

SEQ ID NO: 46060 - RNA, 21 nt, synthetic construct
  misc_feature 1..21: note = Muskelin (629-635)
  source 1..21: mol_type = other RNA
cccctgagcgccctcaagtac

SEQ ID NO: 46061 - RNA, 24 nt, synthetic construct
  misc_feature 1..24: note = X-ray repair cross-complementing protein 5 (529-536)
  source 1..24: mol_type = other RNA
cccctgagcaagatcaagaccctc

SEQ ID NO: 46062 - RNA, 27 nt, synthetic construct
  misc_feature 1..27: note = HLA class I histocompatibility antigen, B-15 alpha chain (293-301)
  source 1..27: mol_type = other RNA
cccctgaccctccgctgggagccgagc

SEQ ID NO: 46063 - RNA, 63 nt, synthetic construct
  misc_feature 1..63: note = 60 kDa heat shock protein, mitochondrial (154-174)
  source 1..63: mol_type = other RNA
cccctggtgatcatcgccgaggacgtcgacggcgaggccctcagcaccctggtgctgaaccgc

SEQ ID NO: 46064 - RNA, 27 nt, synthetic construct
  misc_feature 1..27: note = Protein DBF4 homolog A (45-53)
  source 1..27: mol_type = other RNA
cccctgtggggcaaggtgttctacctc

SEQ ID NO: 46065 - RNA, 27 nt, synthetic construct
  misc_feature 1..27: note = Extracellular matrix protein FRAS1 (1653-1661)
  source 1..27: mol_type = other RNA
cccatggccaccggcgacaccttcacg

SEQ ID NO: 46066 - RNA, 24 nt, synthetic construct
  misc_feature 1..24: note = Alpha/beta hydrolase domain-containing protein 14B (204-211)
  source 1..24: mol_type = other RNA
cccaaccaccgcgtgctgatcatg

SEQ ID NO: 46067 - RNA, 24 nt, synthetic construct
  misc_feature 1..24: note = Ubiquitin-associated protein 2-like (269-276)
  source 1..24: mol_type = other RNA
cccccggcccccttcatgcacatc

SEQ ID NO: 46068 - RNA, 27 nt, synthetic construct
  misc_feature 1..27: note = Transforming acidic coiled-coil-containing protein 2 (1969-1977)
  source 1..27: mol_type = other RNA
cccccggcccccccccccccgcccccc

SEQ ID NO: 46069 - RNA, 30 nt, synthetic construct
  misc_feature 1..30: note = Rho GTPase-activating protein 33 (668-677)
  source 1..30: mol_type = other RNA
cccccggccgtgctggagctcctgggcgcc

SEQ ID NO: 46070 - RNA, 48 nt, synthetic construct
  misc_feature 1..48: note = Transmembrane protein 238 (14-29)
  source 1..48: mol_type = other RNA
cccccgggcgcccccagcgcccccgcggccgcccccgccccggccgcg

SEQ ID NO: 46071 - RNA, 36 nt, synthetic construct
  misc_feature 1..36: note = Homeobox protein SIX5 (441-452)
  source 1..36: mol_type = other RNA
cccccgggccccgtgcccgccgtcgccgcgccccag

SEQ ID NO: 46072 - RNA, 36 nt, synthetic construct
  misc_feature 1..36: note = Collagen alpha-1(VII) chain (2384-2395)
  source 1..36: mol_type = other RNA
cccccgggcgtgaagggggacctgggcctccccggg

SEQ ID NO: 46073 - RNA, 27 nt, synthetic construct
  misc_feature 1..27: note = Mitochondrial fission regulator 1 (151-159)
  source 1..27: mol_type = other RNA
cccccgcaccccccccccccgcccccc

SEQ ID NO: 46074 - RNA, 21 nt, synthetic construct
  misc_feature 1..21: note = Sentrin-specific protease 6 (157-163)
  source 1..21: mol_type = other RNA
cccccgcacgtgcagaaggtc

SEQ ID NO: 46075 - RNA, 30 nt, synthetic construct
  misc_feature 1..30: note = CCR4-NOT transcription complex subunit 1 (574-583)
  source 1..30: mol_type = other RNA
cccccgatcaccaccacgaccaccagcacc

SEQ ID NO: 46076 - RNA, 21 nt, synthetic construct
  misc_feature 1..21: note = Cyclin E variant ex7del (21-27)
  source 1..21: mol_type = other RNA
cccccgaagctgcaccagttc

SEQ ID NO: 46077 - RNA, 27 nt, synthetic construct
  misc_feature 1..27: note = Drebrin (365-373)
  source 1..27: mol_type = other RNA
cccccgctgcccccccccccgcccccc

SEQ ID NO: 46078 - RNA, 42 nt, synthetic construct
  misc_feature 1..42: note = Tuberin (1264-1277)
  source 1..42: mol_type = other RNA
cccccgctgccccgcagcaacaccgtggcctccttcagctcc

SEQ ID NO: 46079 - RNA, 27 nt, synthetic construct
  misc_feature 1..27: note = Multiple epidermal growth factor-like domains protein 8 (2528-2536)
  source 1..27: mol_type = other RNA
cccccgcccgccccccccccgcccccc

SEQ ID NO: 46080 - RNA, 27 nt, synthetic construct
  misc_feature 1..27: note = Shootin-1 (299-307)
  source 1..27: mol_type = other RNA
cccccgcccctgccccccccgcccccc

SEQ ID NO: 46081 - RNA, 39 nt, synthetic construct
  misc_feature 1..39: note = Serine/threonine-protein kinase WNK2 (136-148)
  source 1..39: mol_type = other RNA
cccccgcccagcgacatgggcaccgtggggggccaggcc

SEQ ID NO: 46082 - RNA, 42 nt, synthetic construct
  misc_feature 1..42: note = Retinoic acid-induced protein 1 (1033-1046)
  source 1..42: mol_type = other RNA
cccccgcagggccagatggagggggccggcgcccccgggcgc

SEQ ID NO: 46083 - RNA, 27 nt, synthetic construct
  misc_feature 1..27: note = Retrotransposon-derived protein PEG10 (765-773)
  source 1..27: mol_type = other RNA
cccccgcagcccccccccccgcccccc

SEQ ID NO: 46084 - RNA, 27 nt, synthetic construct
  misc_feature 1..27: note = Acrosin (110-118)
  source 1..27: mol_type = other RNA
cccccgagccccccccccccgcccccc

SEQ ID NO: 46085 - RNA, 27 nt, synthetic construct
  misc_feature 1..27: note = Transcription factor SOX-9 (356-364)
  source 1..27: mol_type = other RNA
ccccaggccccgccccagccccaggcc

SEQ ID NO: 46086 - RNA, 21 nt, synthetic construct
  misc_feature 1..21: note = Protein transport protein Sec23B (562-568)
  source 1..21: mol_type = other RNA
ccccagttcatgttccacctg

SEQ ID NO: 46087 - RNA, 27 nt, synthetic construct
  misc_feature 1..27: note = Squalene monooxygenase (366-374)
  source 1..27: mol_type = other RNA
ccccagatcccggaccacctgaaggag

SEQ ID NO: 46088 - RNA, 33 nt, synthetic construct
  misc_feature 1..33: note = Histone-lysine N-methyltransferase 2C (2512-2522)
  source 1..33: mol_type = other RNA
ccccagctgcgccggagcgtgtccgtcgacatg

SEQ ID NO: 46089 - RNA, 27 nt, synthetic construct
  misc_feature 1..27: note = Disintegrin and metalloproteinase domain-containing protein 18 (67-75)
  source 1..27: mol_type = other RNA
ccccagaacttcctggtgtacacctac

SEQ ID NO: 46090 - RNA, 27 nt, synthetic construct
  misc_feature 1..27: note = Retrotransposon-derived protein PEG10 (766-774)
  source 1..27: mol_type = other RNA
ccccagccgcccccccccccgcccccc

SEQ ID NO: 46091 - RNA, 39 nt, synthetic construct
  misc_feature 1..39: note = Serum albumin (440-452)
  source 1..39: mol_type = other RNA
ccccaggtgagcaccccgaccctggtcgaggtgtcccgc

SEQ ID NO: 46092 - RNA, 24 nt, synthetic construct
  misc_feature 1..24: note = Neural Wiskott-Aldrich syndrome protein (83-90)
  source 1..24: mol_type = other RNA
ccccgcggctacttccacaccttc

SEQ ID NO: 46093 - RNA, 30 nt, synthetic construct
  misc_feature 1..30: note = 60S ribosomal protein L13 (48-57)
  source 1..30: mol_type = other RNA
ccccgcccggccagcggccccatccggccc

SEQ ID NO: 46094 - RNA, 24 nt, synthetic construct
  misc_feature 1..24: note = Histone H2A deubiquitinase MYSM1 (447-454)
  source 1..24: mol_type = other RNA
ccccgcccgaccaagagctccttc

SEQ ID NO: 46095 - RNA, 24 nt, synthetic construct
  misc_feature 1..24: note = ATP-dependent RNA helicase DDX24 (200-207)
  source 1..24: mol_type = other RNA
ccccgcccggtgctgcgggccctc

SEQ ID NO: 46096 - RNA, 24 nt, synthetic construct
  misc_feature 1..24: note = Splicing factor 3B subunit 3 (431-438)
  source 1..24: mol_type = other RNA
ccccgcagctccctgcgggtgctc

SEQ ID NO: 46097 - RNA, 24 nt, synthetic construct
  misc_feature 1..24: note = Ankyrin repeat and KH domain-containing protein 1 (749-756)
  source 1..24: mol_type = other RNA
ccccgcgtgccgacccacaccctg

SEQ ID NO: 46098 - RNA, 42 nt, synthetic construct
  misc_feature 1..42: note = AT-rich interactive domain-containing protein 1A (279-292)
  source 1..42: mol_type = other RNA
cccagcgccgccggcgggggcaccccgcagcccaccgcgacg

SEQ ID NO: 46099 - RNA, 27 nt, synthetic construct
  misc_feature 1..27: note = Large proline-rich protein BAG6 (53-61)
  source 1..27: mol_type = other RNA
cccagcgagaagcagcgcctgatctac

SEQ ID NO: 46100 - RNA, 33 nt, synthetic construct
  misc_feature 1..33: note = Ankyrin-2 (1035-1045)
  source 1..33: mol_type = other RNA
cccagcggcgcccagttcctggggccggtgatc

SEQ ID NO: 46101 - RNA, 24 nt, synthetic construct
  misc_feature 1..24: note = Eukaryotic translation initiation factor 3 subunit C-like protein (204-211)
  source 1..24: mol_type = other RNA
cccagcggcgagtcccgcaagttc

SEQ ID NO: 46102 - RNA, 27 nt, synthetic construct
  misc_feature 1..27: note = BAI1-associated protein 3 (124-132)
  source 1..27: mol_type = other RNA
cccagcctgggcctccgcgccctggcc

SEQ ID NO: 46103 - RNA, 84 nt, synthetic construct
  misc_feature 1..84: note = Attractin (1008-1035)
  source 1..84: mol_type = other RNA
cccagcaacaccggcaaggggaagtgcatcgagggctcctacaaggggccggtgaagatgcccagccaggcccccaccggcaac

SEQ ID NO: 46104 - RNA, 54 nt, synthetic construct
  misc_feature 1..54: note = Zinc finger protein 469 (879-896)
  source 1..54: mol_type = other RNA
cccagctccggccacccgctgaagagcaaggccggggtgacccccgagtccaag

SEQ ID NO: 46105 - RNA, 72 nt, synthetic construct
  misc_feature 1..72: note = Serine/threonine-protein kinase WNK1 (1547-1570)
  source 1..72: mol_type = other RNA
cccagctccagctccagcccgggcgccggggtgtccagctacatctcccagcccggcgggctgcaccccctc

SEQ ID NO: 46106 - RNA, 36 nt, synthetic construct
  misc_feature 1..36: note = Fibronectin isoform 6 (769-780)
  source 1..36: mol_type = other RNA
cccagcaccgccacctccgtgaacatcccggacctg

SEQ ID NO: 46107 - RNA, 21 nt, synthetic construct
  misc_feature 1..21: note = Transcription factor HES-1 (104-110)
  source 1..21: mol_type = other RNA
cccagcgtgctgggcaagtac

SEQ ID NO: 46108 - RNA, 24 nt, synthetic construct
  misc_feature 1..24: note = Basement membrane-specific heparan sulfate proteoglycan core protein (2626-2633)
  source 1..24: mol_type = other RNA
cccagcgtgtccccgcccatccgc

SEQ ID NO: 46109 - RNA, 27 nt, synthetic construct
  misc_feature 1..27: note = Serine/threonine-protein kinase ICK (273-281)
  source 1..27: mol_type = other RNA
cccaccgccagccaggccctgcgctac

SEQ ID NO: 46110 - RNA, 27 nt, synthetic construct
  misc_feature 1..27: note = Myotubularin-related protein 14 (360-368)
  source 1..27: mol_type = other RNA
cccaccgagatcctgtacctcaccgtg

SEQ ID NO: 46111 - RNA, 30 nt, synthetic construct
  misc_feature 1..30: note = Nicastrin (540-549)
  source 1..30: mol_type = other RNA
cccaccaacaccacgtacgtggtccagtac

SEQ ID NO: 46112 - RNA, 21 nt, synthetic construct
  misc_feature 1..21: note = Sorting nexin-5 (259-265)
  source 1..21: mol_type = other RNA
cccaccgtgatcaagaagtac

SEQ ID NO: 46113 - RNA, 30 nt, synthetic construct
  misc_feature 1..30: note = Doublesex- and mab-3-related transcription factor A2 (25-34)
  source 1..30: mol_type = other RNA
cccgtggccagcgtcgcctccgtggcggcc

SEQ ID NO: 46114 - RNA, 27 nt, synthetic construct
  misc_feature 1..27: note = UPF0609 protein C4orf27 (230-238)
  source 1..27: mol_type = other RNA
cccgtggacaagaacgacgtcggctac

SEQ ID NO: 46115 - RNA, 27 nt, synthetic construct
  misc_feature 1..27: note = Hephaestin (425-433)
  source 1..27: mol_type = other RNA
cccgtggacctgctcaccggcaaggtc

SEQ ID NO: 46116 - RNA, 33 nt, synthetic construct
  misc_feature 1..33: note = Single-stranded DNA-binding protein 3 (128-138)
  source 1..33: mol_type = other RNA
cccgtgccgcccggcgggagccgctccaacttc

SEQ ID NO: 46117 - RNA, 27 nt, synthetic construct
  misc_feature 1..27: note = Enolase-like protein ENO4 (194-202)
  source 1..27: mol_type = other RNA
cccgtgccgcccccccccccgcccccc

SEQ ID NO: 46118 - RNA, 27 nt, synthetic construct
  misc_feature 1..27: note = Obscurin (6294-6302)
  source 1..27: mol_type = other RNA
cccgtggtcccgaccctgtacgtgacc

SEQ ID NO: 46119 - RNA, 24 nt, synthetic construct
  misc_feature 1..24: note = Matrin-3 (231-238)
  source 1..24: mol_type = other RNA
ccctacggcaagatcaagaactac

SEQ ID NO: 46120 - RNA, 30 nt, synthetic construct
  misc_feature 1..30: note = Alpha-actinin-4 (178-187)
  source 1..30: mol_type = other RNA
ccctacaagaacgtgaacgtccagaacttc

SEQ ID NO: 46121 - RNA, 27 nt, synthetic construct
  misc_feature 1..27: note = Dedicator of cytokinesis protein 7 (627-635)
  source 1..27: mol_type = other RNA
ccctacctggacaagttcttcgccctc

SEQ ID NO: 46122 - RNA, 27 nt, synthetic construct
  misc_feature 1..27: note = Dedicator of cytokinesis protein 6 (722-730)
  source 1..27: mol_type = other RNA
ccctacctggacaagttcttcaccctc

SEQ ID NO: 46123 - RNA, 27 nt, synthetic construct
  misc_feature 1..27: note = Eukaryotic peptide chain release factor GTP-binding subunit ERF3A (285-293)
  source 1..27: mol_type = other RNA
ccctacctggacaacctcccgaacttc

SEQ ID NO: 46124 - RNA, 27 nt, synthetic construct
  misc_feature 1..27: note = Melanoma antigen preferentially expressed in tumors (254-262)
  source 1..27: mol_type = other RNA
ccctacctgggccagatgatcaacctc

SEQ ID NO: 46125 - RNA, 27 nt, synthetic construct
  misc_feature 1..27: note = Elongation of very long chain fatty acids protein 5 (194-202)
  source 1..27: mol_type = other RNA
ccctacctgtggtggaagaagtacatc

SEQ ID NO: 46126 - RNA, 33 nt, synthetic construct
  misc_feature 1..33: note = Tubulin beta-6 chain (117-127)
  source 1..33: mol_type = other RNA
ccctacaacgccaccctgagcgtgcaccagctc

SEQ ID NO: 46127 - RNA, 24 nt, synthetic construct
  misc_feature 1..24: note = LYR motif-containing protein 1 (80-87)
  source 1..24: mol_type = other RNA
ccctacccgcgccccatccacctg

SEQ ID NO: 46128 - RNA, 27 nt, synthetic construct
  misc_feature 1..27: note = Cubilin (2661-2669)
  source 1..27: mol_type = other RNA
ccctacagccaggtgtggatccacttc

SEQ ID NO: 46129 - RNA, 36 nt, synthetic construct
  misc_feature 1..36: note = Pumilio homolog 1 (440-451)
  source 1..36: mol_type = other RNA
ccctacaccgccggcctggccgcggccgccaccctc

SEQ ID NO: 46130 - RNA, 27 nt, synthetic construct
  misc_feature 1..27: note = Serine/threonine-protein kinase Nek6 (236-244)
  source 1..27: mol_type = other RNA
ccctactacatgagcccggagcgcatc

SEQ ID NO: 46131 - RNA, 24 nt, synthetic construct
  misc_feature 1..24: note = Progestin and adipoQ receptor family member 4 (113-120)
  source 1..24: mol_type = other RNA
caggccgccgcgcgcctgctcgtg

SEQ ID NO: 46132 - RNA, 48 nt, synthetic construct
  misc_feature 1..48: note = HLA class I histocompatibility antigen, B-15 alpha chain (346-361)
  source 1..48: mol_type = other RNA
caggccgccagctccgacagcgcgcagggctccgacgtgagcctgacc

SEQ ID NO: 46133 - RNA, 60 nt, synthetic construct
  misc_feature 1..60: note = HLA class I histocompatibility antigen, A-23 alpha chain (346-365)
  source 1..60: mol_type = other RNA
caggccgccagctccgacagcgcgcagggctccgacgtgagcctgaccgcctgcaaggtc

SEQ ID NO: 46134 - RNA, 27 nt, synthetic construct
  misc_feature 1..27: note = Nuclear distribution protein nudE-like 1 (66-74)
  source 1..27: mol_type = other RNA
caggccgacaaccagcgcctgaagtac

SEQ ID NO: 46135 - RNA, 42 nt, synthetic construct
  misc_feature 1..42: note = Glycogenin-1 (2-15)
  source 1..42: mol_type = other RNA
caggccttcgtgaccctgaccacgaacgacgcctacgcgaag

SEQ ID NO: 46136 - RNA, 39 nt, synthetic construct
  misc_feature 1..39: note = CREB-binding protein (405-417)
  source 1..39: mol_type = other RNA
caggccatcctgggcagccccgcctccgggatccagaac

SEQ ID NO: 46137 - RNA, 30 nt, synthetic construct
  misc_feature 1..30: note = Scavenger receptor cysteine-rich type 1 protein M160 (412-421)
  source 1..30: mol_type = other RNA
caggccctggtggtctgcaagcagctcggc

SEQ ID NO: 46138 - RNA, 27 nt, synthetic construct
  misc_feature 1..27: note = Myelin basic protein (108-116)
  source 1..27: mol_type = other RNA
caggacgagaaccccgtggtccacttc

SEQ ID NO: 46139 - RNA, 21 nt, synthetic construct
  misc_feature 1..21: note = Clathrin heavy chain 1 (723-729)
  source 1..21: mol_type = other RNA
caggaccccgacgtgcacttc

SEQ ID NO: 46140 - RNA, 27 nt, synthetic construct
  misc_feature 1..27: note = Fatty acid synthase (1595-1603)
  source 1..27: mol_type = other RNA
caggacagcctgctcggcatggagttc

SEQ ID NO: 46141 - RNA, 27 nt, synthetic construct
  misc_feature 1..27: note = Stathmin-3 (88-96)
  source 1..27: mol_type = other RNA
caggaggcccaggtgctgaagcagctc

SEQ ID NO: 46142 - RNA, 33 nt, synthetic construct
  misc_feature 1..33: note = Formin-1 (1099-1109)
  source 1..33: mol_type = other RNA
caggaggacgagctggtgaagatccgcaagtac

SEQ ID NO: 46143 - RNA, 27 nt, synthetic construct
  misc_feature 1..27: note = WD repeat-containing protein 26 (508-516)
  source 1..27: mol_type = other RNA
caggaggaccaccccatcatgagcttc

SEQ ID NO: 46144 - RNA, 33 nt, synthetic construct
  misc_feature 1..33: note = Large proline-rich protein BAG6 (1111-1121)
  source 1..33: mol_type = other RNA
caggaggaccccaactacagcccgcagcgcttc

SEQ ID NO: 46145 - RNA, 27 nt, synthetic construct
  misc_feature 1..27: note = Vigilin (1012-1020)
  source 1..27: mol_type = other RNA
caggaggaccgcgccctgcggagcttc

SEQ ID NO: 46146 - RNA, 36 nt, synthetic construct
  misc_feature 1..36: note = Nestin (502-513)
  source 1..36: mol_type = other RNA
caggaggaggagggcagcgccctgaagacctcctgg

SEQ ID NO: 46147 - RNA, 27 nt, synthetic construct
  misc_feature 1..27: note = DNA (cytosine-5)-methyltransferase 3A (426-434)
  source 1..27: mol_type = other RNA
caggagttcgaccccccgaaggtgtac

SEQ ID NO: 46148 - RNA, 30 nt, synthetic construct
  misc_feature 1..30: note = AT-rich interactive domain-containing protein 1B (1797-1806)
  source 1..30: mol_type = other RNA
caggagttcaacagcggcctgctccactgg

SEQ ID NO: 46149 - RNA, 27 nt, synthetic construct
  misc_feature 1..27: note = Hemicentin-1 (1703-1711)
  source 1..27: mol_type = other RNA
caggagatcgaccgcggccagtacatc

SEQ ID NO: 46150 - RNA, 21 nt, synthetic construct
  misc_feature 1..21: note = Annexin A2 (141-147)
  source 1..21: mol_type = other RNA
caggagatcaaccgcgtgtac

SEQ ID NO: 46151 - RNA, 30 nt, synthetic construct
  misc_feature 1..30: note = Mitogen-activated protein kinase kinase kinase kinase 5 (802-811)
  source 1..30: mol_type = other RNA
caggagatcagcgacgagacccgcgtgttc

SEQ ID NO: 46152 - RNA, 27 nt, synthetic construct
  misc_feature 1..27: note = Serine-protein kinase ATM (95-103)
  source 1..27: mol_type = other RNA
caggagatcagctccctggtgaagtac

SEQ ID NO: 46153 - RNA, 39 nt, synthetic construct
  misc_feature 1..39: note = Desmoglein-2 (903-915)
  source 1..39: mol_type = other RNA
caggagatcgtgaccgagcgcagcgtctccagccggcag

SEQ ID NO: 46154 - RNA, 30 nt, synthetic construct
  misc_feature 1..30: note = Synemin (16-25)
  source 1..30: mol_type = other RNA
caggagctgaacgcccgcctctacgactac

SEQ ID NO: 46155 - RNA, 36 nt, synthetic construct
  misc_feature 1..36: note = Nestin (337-348)
  source 1..36: mol_type = other RNA
caggagctgccccagagcgccgacgtgcagcgctgg

SEQ ID NO: 46156 - RNA, 27 nt, synthetic construct
  misc_feature 1..27: note = Receptor-interacting serine/threonine-protein kinase 4 (597-605)
  source 1..27: mol_type = other RNA
caggagaacatcgtgcgcatcctgctc

SEQ ID NO: 46157 - RNA, 27 nt, synthetic construct
  misc_feature 1..27: note = TSC22 domain family protein 1 (93-101)
  source 1..27: mol_type = other RNA
caggagaacaacctgctcaagaccctg

SEQ ID NO: 46158 - RNA, 30 nt, synthetic construct
  misc_feature 1..30: note = Protein flightless-1 homolog (1024-1033)
  source 1..30: mol_type = other RNA
caggagaaccccaagttcctgagccacttc

SEQ ID NO: 46159 - RNA, 30 nt, synthetic construct
  misc_feature 1..30: note = RNA-binding motif, single-stranded-interacting protein 3 (126-135)
  source 1..30: mol_type = other RNA
caggagcaggaccccaccaacctgtacatc

SEQ ID NO: 46160 - RNA, 33 nt, synthetic construct
  misc_feature 1..33: note = T-complex protein 1 subunit theta (20-30)
  source 1..33: mol_type = other RNA
caggagcaggaggtgggcgacgggaccaacttc

SEQ ID NO: 46161 - RNA, 27 nt, synthetic construct
  misc_feature 1..27: note = ETS translocation variant 1 (65-73)
  source 1..27: mol_type = other RNA
caggagcagcccttcaagttcagctac

SEQ ID NO: 46162 - RNA, 27 nt, synthetic construct
  misc_feature 1..27: note = Nucleolar complex protein 2 homolog (188-196)
  source 1..27: mol_type = other RNA
caggagagcgccgaggccaacaagttc

SEQ ID NO: 46163 - RNA, 30 nt, synthetic construct
  misc_feature 1..30: note = Protein transport protein Sec24D (86-95)
  source 1..30: mol_type = other RNA
caggagagccagtccgtgatccacaacctg

SEQ ID NO: 46164 - RNA, 30 nt, synthetic construct
  misc_feature 1..30: note = Ankycorbin (839-848)
  source 1..30: mol_type = other RNA
caggaggtgaacgagctgctccagaagttc

SEQ ID NO: 46165 - RNA, 24 nt, synthetic construct
  misc_feature 1..24: note = Up-regulated during skeletal muscle growth protein 5 (11-18)
  source 1..24: mol_type = other RNA
cagttcaccggcatcaagaagtac

SEQ ID NO: 46166 - RNA, 30 nt, synthetic construct
  misc_feature 1..30: note = Proprotein convertase subtilisin/kexin type 7 (93-102)
  source 1..30: mol_type = other RNA
cagggccactacctgttcgtgcagcccgcc

SEQ ID NO: 46167 - RNA, 18 nt, synthetic construct
  misc_feature 1..18: note = All-trans-retinol 13,14-reductase (57-62)
  source 1..18: mol_type = other RNA
cagggcatccactacatc

SEQ ID NO: 46168 - RNA, 33 nt, synthetic construct
  misc_feature 1..33: note = Serine/threonine-protein phosphatase 1 regulatory subunit 10 (572-582)
  source 1..33: mol_type = other RNA
cagggccccgggggcgggggcatcaacgtgcag

SEQ ID NO: 46169 - RNA, 36 nt, synthetic construct
  misc_feature 1..36: note = HLA class I histocompatibility antigen, A-23 alpha chain (354-365)
  source 1..36: mol_type = other RNA
cagggcagcgacgtgtccctgaccgcctgcaaggtc

SEQ ID NO: 46170 - RNA, 30 nt, synthetic construct
  misc_feature 1..30: note = Fibronectin isoform 6 (1715-1724)
  source 1..30: mol_type = other RNA
cagggcgtggtcaccaccctggagaacgtg

SEQ ID NO: 46171 - RNA, 57 nt, synthetic construct
  misc_feature 1..57: note = Heterogeneous nuclear ribonucleoprotein L (52-70)
  source 1..57: mol_type = other RNA
cagcacggcgggggcgggggcgggggcggcggggccggcgccgcggggggcgggggc

SEQ ID NO: 46172 - RNA, 66 nt, synthetic construct
  misc_feature 1..66: note = Splicing factor, proline- and glutamine-rich (246-267)
  source 1..66: mol_type = other RNA
cagcaccaccccccgtaccaccagcagcaccaccagggccccccccccgggggcccggggggccgc

SEQ ID NO: 46173 - RNA, 39 nt, synthetic construct
  misc_feature 1..39: note = Dynein heavy chain 8, axonemal (2665-2677)
  source 1..39: mol_type = other RNA
cagcacaaggccgtgctgctcaccggcgagcaggggacc

SEQ ID NO: 46174 - RNA, 33 nt, synthetic construct
  misc_feature 1..33: note = Synaptic vesicle membrane protein VAT-1 homolog (26-36)
  source 1..33: mol_type = other RNA
cagcaccccgccgccagcgagggcgcggccgcc

SEQ ID NO: 46175 - RNA, 39 nt, synthetic construct
  misc_feature 1..39: note = Band 4.1-like protein 2 (54-66)
  source 1..39: mol_type = other RNA
cagatcgacggcggggccggcggggacagcggcaccctg

SEQ ID NO: 46176 - RNA, 24 nt, synthetic construct
  misc_feature 1..24: note = 60S ribosomal protein L26 (66-73)
  source 1..24: mol_type = other RNA
cagatcggcaaggtggtccaggtg

SEQ ID NO: 46177 - RNA, 27 nt, synthetic construct
  misc_feature 1..27: note = Cytoskeleton-associated protein 5 (1667-1675)
  source 1..27: mol_type = other RNA
cagatcctggaccacctcaccatgatc

SEQ ID NO: 46178 - RNA, 27 nt, synthetic construct
  misc_feature 1..27: note = DNA-dependent protein kinase catalytic subunit (865-873)
  source 1..27: mol_type = other RNA
cagatcaacaagaacctgctcaccgtg

SEQ ID NO: 46179 - RNA, 51 nt, synthetic construct
  misc_feature 1..51: note = Transmembraneoprotein NMB (370-386)
  source 1..51: mol_type = other RNA
cagatcaaccgctacggccacttccaggccaccatcaccatcgtggagggg

SEQ ID NO: 46180 - RNA, 27 nt, synthetic construct
  misc_feature 1..27: note = Dehydrogenase/reductase SDR family member 2, mitochondrial (127-135)
  source 1..27: mol_type = other RNA
cagatctgggacaagatcctgagcgtg

SEQ ID NO: 46181 - RNA, 36 nt, synthetic construct
  misc_feature 1..36: note = Nodal modulator 2 (399-410)
  source 1..36: mol_type = other RNA
cagctggccgacatcgtggccaccggcttcagcgtc

SEQ ID NO: 46182 - RNA, 27 nt, synthetic construct
  misc_feature 1..27: note = Laminin subunit alpha-4 (470-478)
  source 1..27: mol_type = other RNA
cagctggacgactacaacgccaagctc

SEQ ID NO: 46183 - RNA, 27 nt, synthetic construct
  misc_feature 1..27: note = Myotubularin-related protein 6 (229-237)
  source 1..27: mol_type = other RNA
cagctggacggcgaccccaaggaggtg

SEQ ID NO: 46184 - RNA, 27 nt, synthetic construct
  misc_feature 1..27: note = Circadian clock protein PASD1 (383-391)
  source 1..27: mol_type = other RNA
cagctggaggagcgcacctggctcctg

SEQ ID NO: 46185 - RNA, 21 nt, synthetic construct
  misc_feature 1..21: note = ATP-dependent RNA helicase DHX8 (283-289)
  source 1..21: mol_type = other RNA
cagctggagggcctccgcaag

SEQ ID NO: 46186 - RNA, 27 nt, synthetic construct
  misc_feature 1..27: note = Erlin-2 (26-34)
  source 1..27: mol_type = other RNA
cagctgggcgccgtggtcgccgtggcg

SEQ ID NO: 46187 - RNA, 27 nt, synthetic construct
  misc_feature 1..27: note = Probable histidine-tRNA ligase, mitochondrial (60-68)
  source 1..27: mol_type = other RNA
cagctgggcgacttcctcatcaaggtg

SEQ ID NO: 46188 - RNA, 27 nt, synthetic construct
  misc_feature 1..27: note = Complement factor I (347-355)
  source 1..27: mol_type = other RNA
cagctgggcgacctcccctggcaggtg

SEQ ID NO: 46189 - RNA, 27 nt, synthetic construct
  misc_feature 1..27: note = E3 ubiquitin-protein ligase TRIM63 (281-289)
  source 1..27: mol_type = other RNA
cagctgatcaagagcatcgtggaggcc

SEQ ID NO: 46190 - RNA, 27 nt, synthetic construct
  misc_feature 1..27: note = Class E basic helix-loop-helix protein 41 (161-169)
  source 1..27: mol_type = other RNA
cagctgatcaaccacctccacgccgtg

SEQ ID NO: 46191 - RNA, 27 nt, synthetic construct
  misc_feature 1..27: note = E3 ubiquitin-protein ligase listerin (245-253)
  source 1..27: mol_type = other RNA
cagctgatccccttcatcgacgccgtg

SEQ ID NO: 46192 - RNA, 27 nt, synthetic construct
  misc_feature 1..27: note = Intron-binding protein aquarius (224-232)
  source 1..27: mol_type = other RNA
cagctgatccagaagttcatcagcgtg

SEQ ID NO: 46193 - RNA, 33 nt, synthetic construct
  misc_feature 1..33: note = Pleckstrin homology domain-containing family H member 1 (700-710)
  source 1..33: mol_type = other RNA
cagctgatcagcgagaagaagacctactacctc

SEQ ID NO: 46194 - RNA, 30 nt, synthetic construct
  misc_feature 1..30: note = WASH complex subunit 7 (254-263)
  source 1..30: mol_type = other RNA
cagctgctcgacggcatgatcttccaggcc

SEQ ID NO: 46195 - RNA, 33 nt, synthetic construct
  misc_feature 1..33: note = Transmembrane protein 209 (327-337)
  source 1..33: mol_type = other RNA
cagctgctcgaccacatggacagctggaccgcc

SEQ ID NO: 46196 - RNA, 27 nt, synthetic construct
  misc_feature 1..27: note = StAR-related lipid transfer protein 13 (922-930)
  source 1..27: mol_type = other RNA
cagctgctcggcggggtgcgcgccgtc

SEQ ID NO: 46197 - RNA, 27 nt, synthetic construct
  misc_feature 1..27: note = Small subunit processome component 20 homolog (1596-1604)
  source 1..27: mol_type = other RNA
cagctgatggagggcaaggtggtcctc

SEQ ID NO: 46198 - RNA, 27 nt, synthetic construct
  misc_feature 1..27: note = Serine/threonine-protein kinase mTOR (66-74)
  source 1..27: mol_type = other RNA
cagctgaaccaccacatcttcgagctc

SEQ ID NO: 46199 - RNA, 33 nt, synthetic construct
  misc_feature 1..33: note = Liprin-alpha-2 (76-86)
  source 1..33: mol_type = other RNA
cagctgaacagcgccctcccccaggacatcgag

SEQ ID NO: 46200 - RNA, 27 nt, synthetic construct
  misc_feature 1..27: note = Protein Shroom4 (1452-1460)
  source 1..27: mol_type = other RNA
cagctgcaggactaccagcacttcgtg

SEQ ID NO: 46201 - RNA, 39 nt, synthetic construct
  misc_feature 1..39: note = Plectin (3123-3135)
  source 1..39: mol_type = other RNA
cagctgagcaccggcgggatcgtggacccctccaagagc

SEQ ID NO: 46202 - RNA, 27 nt, synthetic construct
  misc_feature 1..27: note = Protein wntless homolog (517-525)
  source 1..27: mol_type = other RNA
cagctgaccaccacgatcacccacgtg

SEQ ID NO: 46203 - RNA, 27 nt, synthetic construct
  misc_feature 1..27: note = Chondroitin sulfate proteoglycan 4 (77-85)
  source 1..27: mol_type = other RNA
cagctgtacagcggccgcctccaggtg

SEQ ID NO: 46204 - RNA, 30 nt, synthetic construct
  misc_feature 1..30: note = Solute carrier family 12 member 6 (45-54)
  source 1..30: mol_type = other RNA
cagatgggcaccttcatgggggtgtacctg

SEQ ID NO: 46205 - RNA, 27 nt, synthetic construct
  misc_feature 1..27: note = Synemin (724-732)
  source 1..27: mol_type = other RNA
cagatgatcggcgacatcatcaacctg

SEQ ID NO: 46206 - RNA, 36 nt, synthetic construct
  misc_feature 1..36: note = DNA-dependent protein kinase catalytic subunit (947-958)
  source 1..36: mol_type = other RNA
cagatgcccgagggcgggcagggcgccccgcccatg

SEQ ID NO: 46207 - RNA, 27 nt, synthetic construct
  misc_feature 1..27: note = Actin-like protein 6A (239-247)
  source 1..27: mol_type = other RNA
cagatgcccaccgtgcactacgagttc

SEQ ID NO: 46208 - RNA, 27 nt, synthetic construct
  misc_feature 1..27: note = Talin-1 (288-296)
  source 1..27: mol_type = other RNA
cagatgagcgagatcgaggccaaggtg

SEQ ID NO: 46209 - RNA, 36 nt, synthetic construct
  misc_feature 1..36: note = L-lactate dehydrogenase A chain (20-31)
  source 1..36: mol_type = other RNA
cagaacaagatcaccgtggtcggcgtgggggccgtg

SEQ ID NO: 46210 - RNA, 27 nt, synthetic construct
  misc_feature 1..27: note = POU domain, class 2, transcription factor 1 (208-216)
  source 1..27: mol_type = other RNA
cagcccgccaccccgacccgcacgatc

SEQ ID NO: 46211 - RNA, 27 nt, synthetic construct
  misc_feature 1..27: note = Integrin alpha-6 (55-63)
  source 1..27: mol_type = other RNA
cagcccgaggacaagcgcctgctcctg

SEQ ID NO: 46212 - RNA, 33 nt, synthetic construct
  misc_feature 1..33: note = Beta-2-microglobulin (88-98)
  source 1..33: mol_type = other RNA
cagcccaagatcgtgaagtgggaccgcgacatg

SEQ ID NO: 46213 - RNA, 24 nt, synthetic construct
  misc_feature 1..24: note = Potassium voltage-gated channel subfamily H member 2 (335-342)
  source 1..24: mol_type = other RNA
cagcccctggccgtggtcgacctc

SEQ ID NO: 46214 - RNA, 33 nt, synthetic construct
  misc_feature 1..33: note = Histone-lysine N-methyltransferase 2A (3086-3096)
  source 1..33: mol_type = other RNA
cagcccctgtacgtgctccagaccctgccgaac

SEQ ID NO: 46215 - RNA, 27 nt, synthetic construct
  misc_feature 1..27: note = Rho GTPase-activating protein 31 (988-996)
  source 1..27: mol_type = other RNA
cagccccaggccccgcgccgggagatc

SEQ ID NO: 46216 - RNA, 27 nt, synthetic construct
  misc_feature 1..27: note = Tribbles homolog 1 (15-23)
  source 1..27: mol_type = other RNA
cagccccgcggcccggccctgctcttc

SEQ ID NO: 46217 - RNA, 30 nt, synthetic construct
  misc_feature 1..30: note = Transcription intermediary factor 1-alpha (611-620)
  source 1..30: mol_type = other RNA
cagccccgcccgcccagcaaccggaccgtg

SEQ ID NO: 46218 - RNA, 27 nt, synthetic construct
  misc_feature 1..27: note = DNA-directed RNA polymerase II subunit RPB3 (6-14)
  source 1..27: mol_type = other RNA
cagcccaccgtgcgcatcaccgagctg

SEQ ID NO: 46219 - RNA, 36 nt, synthetic construct
  misc_feature 1..36: note = Guanine nucleotide exchange factor VAV3 (393-404)
  source 1..36: mol_type = other RNA
cagcccgtgctgctcttcggccgcccgcagggggac

SEQ ID NO: 46220 - RNA, 24 nt, synthetic construct
  misc_feature 1..24: note = Dual specificity protein kinase CLK3 (230-237)
  source 1..24: mol_type = other RNA
cagccctacccgctgccccacgtg

SEQ ID NO: 46221 - RNA, 60 nt, synthetic construct
  misc_feature 1..60: note = CCR4-NOT transcription complex subunit 1 (48-67)
  source 1..60: mol_type = other RNA
cagcagggcatcctgaagaccgacgacctcatcacccgcttcttccggctgtgcacggag

SEQ ID NO: 46222 - RNA, 27 nt, synthetic construct
  misc_feature 1..27: note = Tetratricopeptide repeat protein 37 (642-650)
  source 1..27: mol_type = other RNA
cagcagatcctgggcaagtacaaggag

SEQ ID NO: 46223 - RNA, 24 nt, synthetic construct
  misc_feature 1..24: note = Eukaryotic initiation factor 4A-I (114-121)
  source 1..24: mol_type = other RNA
cagcagatccagaaggtggtcatg

SEQ ID NO: 46224 - RNA, 27 nt, synthetic construct
  misc_feature 1..27: note = Pyridoxal kinase (30-38)
  source 1..27: mol_type = other RNA
cagcagaacccccgcctggtgtacgtc

SEQ ID NO: 46225 - RNA, 24 nt, synthetic construct
  misc_feature 1..24: note = Titin (12085-12092)
  source 1..24: mol_type = other RNA
cagcgcgccgaggtggtccccgtg

SEQ ID NO: 46226 - RNA, 27 nt, synthetic construct
  misc_feature 1..27: note = Caprin-1 (666-674)
  source 1..27: mol_type = other RNA
cagcgcgacggctaccagcagaacttc

SEQ ID NO: 46227 - RNA, 21 nt, synthetic construct
  misc_feature 1..21: note = Signal transducer and activator of transcription 6 (89-95)
  source 1..21: mol_type = other RNA
cagcgcgaccccctgaagctc

SEQ ID NO: 46228 - RNA, 27 nt, synthetic construct
  misc_feature 1..27: note = Interleukin-24 (5-13)
  source 1..27: mol_type = other RNA
cagcgcctgcagagcctctggaccctg

SEQ ID NO: 46229 - RNA, 27 nt, synthetic construct
  misc_feature 1..27: note = Tight junction protein ZO-1 (750-758)
  source 1..27: mol_type = other RNA
cagcgcagctccggcatcatccggctg

SEQ ID NO: 46230 - RNA, 27 nt, synthetic construct
  misc_feature 1..27: note = Mastermind-like protein 2 (349-357)
  source 1..27: mol_type = other RNA
cagcgcagcaccccccggccgtccctg

SEQ ID NO: 46231 - RNA, 27 nt, synthetic construct
  misc_feature 1..27: note = Polypyrimidine tract-binding protein 1 (384-392)
  source 1..27: mol_type = other RNA
cagcgcgtgaagatcctgttcaacaag

SEQ ID NO: 46232 - RNA, 27 nt, synthetic construct
  misc_feature 1..27: note = KN motif and ankyrin repeat domain-containing protein 2 (79-87)
  source 1..27: mol_type = other RNA
cagagcgagatcgcctccatgctgtac

SEQ ID NO: 46233 - RNA, 30 nt, synthetic construct
  misc_feature 1..30: note = Nuclear factor erythroid 2-related factor 2 (93-102)
  source 1..30: mol_type = other RNA
cagagcgagacctccggcagcgccaactac

SEQ ID NO: 46234 - RNA, 21 nt, synthetic construct
  misc_feature 1..21: note = Golgin subfamily A member 4 (541-547)
  source 1..21: mol_type = other RNA
cagagcgagtacctgaagatc

SEQ ID NO: 46235 - RNA, 30 nt, synthetic construct
  misc_feature 1..30: note = RNA-binding protein 27 (597-606)
  source 1..30: mol_type = other RNA
cagagcggcggggccggcgaggactgccag

SEQ ID NO: 46236 - RNA, 33 nt, synthetic construct
  misc_feature 1..33: note = Heterogeneous nuclear ribonucleoprotein K (153-163)
  source 1..33: mol_type = other RNA
cagagcctggccggcgggatcatcggcgtgaag

SEQ ID NO: 46237 - RNA, 30 nt, synthetic construct
  misc_feature 1..30: note = Interphotoreceptor matrix proteoglycan 1 (289-298)
  source 1..30: mol_type = other RNA
cagagcctggacgtgggcaccatccagttc

SEQ ID NO: 46238 - RNA, 27 nt, synthetic construct
  misc_feature 1..27: note = Hsc70-interacting protein (339-347)
  source 1..27: mol_type = other RNA
cagagcaaccccaaggtgatgaacctg

SEQ ID NO: 46239 - RNA, 27 nt, synthetic construct
  misc_feature 1..27: note = Hemicentin-1 (1877-1885)
  source 1..27: mol_type = other RNA
cagagctccggccgcgtgctgcagatc

SEQ ID NO: 46240 - RNA, 27 nt, synthetic construct
  misc_feature 1..27: note = CUB and sushi domain-containing protein 3 (16-24)
  source 1..27: mol_type = other RNA
cagaccgccagcggcttcatctacacc

SEQ ID NO: 46241 - RNA, 27 nt, synthetic construct
  misc_feature 1..27: note = Nodal modulator 1 (450-458)
  source 1..27: mol_type = other RNA
cagaccttccccctgaccgtgacgaac

SEQ ID NO: 46242 - RNA, 36 nt, synthetic construct
  misc_feature 1..36: note = Receptor-type tyrosine-protein phosphatase delta (33-44)
  source 1..36: mol_type = other RNA
cagaccggcgtgagcgggggcgtcgcctccttcatc

SEQ ID NO: 46243 - RNA, 27 nt, synthetic construct
  misc_feature 1..27: note = Ribosome maturation protein SBDS (52-60)
  source 1..27: mol_type = other RNA
cagacccacagcgtgttcgtcaacgtg

SEQ ID NO: 46244 - RNA, 30 nt, synthetic construct
  misc_feature 1..30: note = Histone-lysine N-methyltransferase EHMT1 (170-179)
  source 1..30: mol_type = other RNA
cagacccccgccgccccgcccgcgaccctg

SEQ ID NO: 46245 - RNA, 21 nt, synthetic construct
  misc_feature 1..21: note = rRNA 2'-O-methyltransferase fibrillarin (239-245)
  source 1..21: mol_type = other RNA
cagacccgcatcgtggccctg

SEQ ID NO: 46246 - RNA, 33 nt, synthetic construct
  misc_feature 1..33: note = Protein FAM135A (647-657)
  source 1..33: mol_type = other RNA
cagaccacccccagcctgggcgtgcgcacgatc

SEQ ID NO: 46247 - RNA, 30 nt, synthetic construct
  misc_feature 1..30: note = Catenin beta-1 (78-87)
  source 1..30: mol_type = other RNA
caggtggccgacatcgacggccagtacgcc

SEQ ID NO: 46248 - RNA, 123 nt, synthetic construct
  misc_feature 1..123: note = E1A-binding protein p400 (51-91)
  source 1..123: mol_type = other RNA
caggtggccagcctgcgcgccgagcggatcgcgaaggagaagaaggccctcgccgaccagcagaaggcccagcagcccgccgtcgcgcagccgccccccccccagccgcagcccccccccccg

SEQ ID NO: 46249 - RNA, 30 nt, synthetic construct
  misc_feature 1..30: note = Integrator complex subunit 1 (125-134)
  source 1..30: mol_type = other RNA
caggtggccagccgcgtcctggccatgaag

SEQ ID NO: 46250 - RNA, 27 nt, synthetic construct
  misc_feature 1..27: note = ATP-binding cassette sub-family A member 2 (2330-2338)
  source 1..27: mol_type = other RNA
caggtgttcagcaagatggagcaggtc

SEQ ID NO: 46251 - RNA, 42 nt, synthetic construct
  misc_feature 1..42: note = Zinc finger protein 423 (1103-1116)
  source 1..42: mol_type = other RNA
caggtgggcgggctggcccccccggagcccgccgaccgcccc

SEQ ID NO: 46252 - RNA, 30 nt, synthetic construct
  misc_feature 1..30: note = Transcription factor SOX-5 (88-97)
  source 1..30: mol_type = other RNA
caggtgctggacggcaaggtcgccgtggtg

SEQ ID NO: 46253 - RNA, 45 nt, synthetic construct
  misc_feature 1..45: note = T-complex protein 1 subunit beta (502-516)
  source 1..45: mol_type = other RNA
caggtgctgctcagcgccgccgaggcggccgaggtcatcctgcgc

SEQ ID NO: 46254 - RNA, 21 nt, synthetic construct
  misc_feature 1..21: note = Peptidyl-prolyl cis-trans isomerase FKBP9 (200-206)
  source 1..21: mol_type = other RNA
caggtgcagatccacacctac

SEQ ID NO: 46255 - RNA, 63 nt, synthetic construct
  misc_feature 1..63: note = Poly(rC)-binding protein 2 (304-324)
  source 1..63: mol_type = other RNA
caggtgaccatcaccggcagcgccgcctccatcagcctggcgcagtacctcatcaacgtccgc

SEQ ID NO: 46256 - RNA, 27 nt, synthetic construct
  misc_feature 1..27: note = Transcriptional regulator ATRX (1486-1494)
  source 1..27: mol_type = other RNA
caggtggtcagcttcctgcacaccgtg

SEQ ID NO: 46257 - RNA, 27 nt, synthetic construct
  misc_feature 1..27: note = 14-3-3 protein eta (46-54)
  source 1..27: mol_type = other RNA
cagtacgagagcaaggtgttctacctg

SEQ ID NO: 46258 - RNA, 27 nt, synthetic construct
  misc_feature 1..27: note = TELO2-interacting protein 1 homolog (50-58)
  source 1..27: mol_type = other RNA
cagtacatcctgttccccctccgcttc

SEQ ID NO: 46259 - RNA, 27 nt, synthetic construct
  misc_feature 1..27: note = Vam6/Vps39-like protein (296-304)
  source 1..27: mol_type = other RNA
cagtaccccaacccgctgcccgtgctc

SEQ ID NO: 46260 - RNA, 45 nt, synthetic construct
  misc_feature 1..45: note = Forkhead box protein D3 (302-316)
  source 1..45: mol_type = other RNA
cagtacccctacgccctgccgcccgtggcccccgtcctccccccg

SEQ ID NO: 46261 - RNA, 27 nt, synthetic construct
  misc_feature 1..27: note = Spectrin beta chain, non-erythrocytic 1 (17-25)
  source 1..27: mol_type = other RNA
cagtacagcgacgtgaacaaccgctgg

SEQ ID NO: 46262 - RNA, 30 nt, synthetic construct
  misc_feature 1..30: note = Ubiquitin-like modifier-activating enzyme 1 (717-726)
  source 1..30: mol_type = other RNA
cagtacagcaacaacatccgccagctgctc

SEQ ID NO: 46263 - RNA, 30 nt, synthetic construct
  misc_feature 1..30: note = Golgin subfamily A member 4 (432-441)
  source 1..30: mol_type = other RNA
cgcgccgccttcgaggagctggagaaggcg

SEQ ID NO: 46264 - RNA, 27 nt, synthetic construct
  misc_feature 1..27: note = HDAC2 (27-35)
  source 1..27: mol_type = other RNA
cgcgccttccccgccccgccccccctg

SEQ ID NO: 46265 - RNA, 27 nt, synthetic construct
  misc_feature 1..27: note = Formin-like protein 2 (15-23)
  source 1..27: mol_type = other RNA
cgcgcccacaacgtgcccctgaagctc

SEQ ID NO: 46266 - RNA, 27 nt, synthetic construct
  misc_feature 1..27: note = Catenin beta-1 (151-159)
  source 1..27: mol_type = other RNA
cgcgccatccccgagctgaccaagctc

SEQ ID NO: 46267 - RNA, 33 nt, synthetic construct
  misc_feature 1..33: note = Fatty acid synthase (2352-2362)
  source 1..33: mol_type = other RNA
cgcgccaagctgacccccggctgcgaggccgag

SEQ ID NO: 46268 - RNA, 27 nt, synthetic construct
  misc_feature 1..27: note = Junction plakoglobin (142-150)
  source 1..27: mol_type = other RNA
cgcgccctgcccgagctcaccaagctg

SEQ ID NO: 46269 - RNA, 24 nt, synthetic construct
  misc_feature 1..24: note = Astrotactin-2 (360-367)
  source 1..24: mol_type = other RNA
cgcgccaacacccccatcgagatc

SEQ ID NO: 46270 - RNA, 27 nt, synthetic construct
  misc_feature 1..27: note = Microtubule-associated protein 4 (356-364)
  source 1..27: mol_type = other RNA
cgcgccagccccatcaagatggacctg

SEQ ID NO: 46271 - RNA, 27 nt, synthetic construct
  misc_feature 1..27: note = Protein scribble homolog (473-481)
  source 1..27: mol_type = other RNA
cgcgccaccccccacccgagcgagctg

SEQ ID NO: 46272 - RNA, 33 nt, synthetic construct
  misc_feature 1..33: note = Perilipin-2 (230-240)
  source 1..33: mol_type = other RNA
cgcgcctaccagcaggccctgagccgggtgaag

SEQ ID NO: 46273 - RNA, 27 nt, synthetic construct
  misc_feature 1..27: note = Probable E3 ubiquitin-protein ligase HERC1 (2112-2120)
  source 1..27: mol_type = other RNA
cgcgcctacagcggcaacctgtaccac

SEQ ID NO: 46274 - RNA, 27 nt, synthetic construct
  misc_feature 1..27: note = Fibronectin isoform 6 (1162-1170)
  source 1..27: mol_type = other RNA
cgcgacgcccccatcgtgaacaaggtc

SEQ ID NO: 46275 - RNA, 51 nt, synthetic construct
  misc_feature 1..51: note = Vimentin (450-466)
  source 1..51: mol_type = other RNA
cgcgacggccaggtgatcaacgagaccagccagcaccacgacgacctggag

SEQ ID NO: 46276 - RNA, 45 nt, synthetic construct
  misc_feature 1..45: note = Protein NipSnap homolog 2 (40-54)
  source 1..45: mol_type = other RNA
cgcgaggacagctggctgaagtccctcttcgtgcggaaggtcgac

SEQ ID NO: 46277 - RNA, 33 nt, synthetic construct
  misc_feature 1..33: note = Vimentin (196-206)
  source 1..33: mol_type = other RNA
cgcgaggaggccgagaacaccctgcagagcttc

SEQ ID NO: 46278 - RNA, 27 nt, synthetic construct
  misc_feature 1..27: note = Transcription elongation factor SPT5 (606-614)
  source 1..27: mol_type = other RNA
cgcgagggcgagatccggcacctgttc

SEQ ID NO: 46279 - RNA, 129 nt, synthetic construct
  misc_feature 1..129: note = Vimentin (258-300)
  source 1..129: mol_type = other RNA
cgcgagaccaacctggacagcctccccctggtggacacccactccaagcggacgctgctcatcaagaccgtcgagacccgcgacggccaggtgatcaacgagaccagccagcaccacgacgacctggag

SEQ ID NO: 46280 - RNA, 24 nt, synthetic construct
  misc_feature 1..24: note = Myosin-7 (243-250)
  source 1..24: mol_type = other RNA
cgcttcggcaagttcatccggatc

SEQ ID NO: 46281 - RNA, 36 nt, synthetic construct
  misc_feature 1..36: note = Protein YIF1B (85-96)
  source 1..36: mol_type = other RNA
cgcttcatccccatcaccaagctgaagtactacttc

SEQ ID NO: 46282 - RNA, 33 nt, synthetic construct
  misc_feature 1..33: note = Filamin-A (2059-2069)
  source 1..33: mol_type = other RNA
cgcttcatcccccgggagaacggcgtgtacctg

SEQ ID NO: 46283 - RNA, 27 nt, synthetic construct
  misc_feature 1..27: note = Uncharacterized protein C11orf96 (157-165)
  source 1..27: mol_type = other RNA
cgcttcaagacccagcccgtgaccttc

SEQ ID NO: 46284 - RNA, 27 nt, synthetic construct
  misc_feature 1..27: note = Serine/threonine-protein phosphatase 2A 56 kDa regulatory subunit epsilon isoform (227-235)
  source 1..27: mol_type = other RNA
cgcttcgtgtacgagaccgagcacttc

SEQ ID NO: 46285 - RNA, 39 nt, synthetic construct
  misc_feature 1..39: note = NADH dehydrogenase (ubiquinone) 1 beta subcomplex subunit 5, mitochondrial (61-73)
  source 1..39: mol_type = other RNA
cgcttctacgaccggcgcttcctgaagctcctgcggttc

SEQ ID NO: 46286 - RNA, 33 nt, synthetic construct
  misc_feature 1..33: note = Collagen alpha-2(I) chain (495-505)
  source 1..33: mol_type = other RNA
cgcggcgcccccggggccgtgggcgcgccgggg

SEQ ID NO: 46287 - RNA, 30 nt, synthetic construct
  misc_feature 1..30: note = Nuclear receptor corepressor 2 (1514-1523)
  source 1..30: mol_type = other RNA
cgcggcgcccccgtgatcgtcccggagctg

SEQ ID NO: 46288 - RNA, 27 nt, synthetic construct
  misc_feature 1..27: note = Pre-mRNA-processing-splicing factor 8 (763-771)
  source 1..27: mol_type = other RNA
cgcggcgccaccgtggacaagaccgtc

SEQ ID NO: 46289 - RNA, 30 nt, synthetic construct
  misc_feature 1..30: note = Inositol 1,4,5-trisphosphate receptor type 2 (1365-1374)
  source 1..30: mol_type = other RNA
cgcggcgacgagagcgggcccctggcctac

SEQ ID NO: 46290 - RNA, 27 nt, synthetic construct
  misc_feature 1..27: note = Collagen alpha-2(V) chain (785-793)
  source 1..27: mol_type = other RNA
cgcggcttcaccgggctgcagggcctc

SEQ ID NO: 46291 - RNA, 30 nt, synthetic construct
  misc_feature 1..30: note = Inactive phospholipase C-like protein 2 (6-15)
  source 1..30: mol_type = other RNA
cgcggcggggccgccggcggggcgctgccc

SEQ ID NO: 46292 - RNA, 24 nt, synthetic construct
  misc_feature 1..24: note = Eukaryotic translation initiation factor 4 gamma 1 (993-1000)
  source 1..24: mol_type = other RNA
cgcggcgggcccccgggccccccc

SEQ ID NO: 46293 - RNA, 33 nt, synthetic construct
  misc_feature 1..33: note = Plexin-B3 (190-200)
  source 1..33: mol_type = other RNA
cgcggcctggccgggaagctcagcgccggcgtg

SEQ ID NO: 46294 - RNA, 42 nt, synthetic construct
  misc_feature 1..42: note = Collagen alpha-1(III) chain (761-774)
  source 1..42: mol_type = other RNA
cgcggccccaccgggccgatcggcccccccgggcccgccggc

SEQ ID NO: 46295 - RNA, 27 nt, synthetic construct
  misc_feature 1..27: note = Heat shock protein HSP 90-beta (103-111)
  source 1..27: mol_type = other RNA
cgcggcaccaaggtgatcctgcacctc

SEQ ID NO: 46296 - RNA, 27 nt, synthetic construct
  misc_feature 1..27: note = UDP-N-acetylhexosamine pyrophosphorylase-like protein 1 (111-119)
  source 1..27: mol_type = other RNA
cgcggcgtggagttcgtccacgtgtac

SEQ ID NO: 46297 - RNA, 18 nt, synthetic construct
  misc_feature 1..18: note = Msx2-interacting protein (535-540)
  source 1..18: mol_type = other RNA
cgccacttctgccggtac

SEQ ID NO: 46298 - RNA, 30 nt, synthetic construct
  misc_feature 1..30: note = Krueppel-like factor 15 (280-289)
  source 1..30: mol_type = other RNA
cgcatcgcccccgtgccgatcgccgcgaag

SEQ ID NO: 46299 - RNA, 30 nt, synthetic construct
  misc_feature 1..30: note = Phosphoglycerate kinase 1 (39-48)
  source 1..30: mol_type = other RNA
cgcatcaaggccgccgtgcccagcatcaag

SEQ ID NO: 46300 - RNA, 24 nt, synthetic construct
  misc_feature 1..24: note = General transcription factor II-I (492-499)
  source 1..24: mol_type = other RNA
cgcatcaagttcgtgatcaagcgg

SEQ ID NO: 46301 - RNA, 33 nt, synthetic construct
  misc_feature 1..33: note = Alpha-globin transcription factor CP2 (148-158)
  source 1..33: mol_type = other RNA
cgcatcctggacatcgacatccccatgagcgtg

SEQ ID NO: 46302 - RNA, 27 nt, synthetic construct
  misc_feature 1..27: note = Asparagine synthetase (glutamine-hydrolyzing) (153-161)
  source 1..27: mol_type = other RNA
cgcatcctgttcaacaacgccgtgaag

SEQ ID NO: 46303 - RNA, 27 nt, synthetic construct
  misc_feature 1..27: note = Nuclear factor of activated T-cells, cytoplasmic 2 (247-255)
  source 1..27: mol_type = other RNA
cgcatcctgaagccccacgccttctac

SEQ ID NO: 46304 - RNA, 30 nt, synthetic construct
  misc_feature 1..30: note = cAMP-dependent protein kinase type I-beta regulatory subunit (233-242)
  source 1..30: mol_type = other RNA
cgcatcctgatgggcagcaccctccggaag

SEQ ID NO: 46305 - RNA, 33 nt, synthetic construct
  misc_feature 1..33: note = CCR4-NOT transcription complex subunit 1 (238-248)
  source 1..33: mol_type = other RNA
cgcatcctgcccgacagcggcggggtggccaag

SEQ ID NO: 46306 - RNA, 27 nt, synthetic construct
  misc_feature 1..27: note = Centrin-2 (164-172)
  source 1..27: mol_type = other RNA
cgcatcatgaagaagaccagcctgtac

SEQ ID NO: 46307 - RNA, 30 nt, synthetic construct
  misc_feature 1..30: note = Transcription factor HES-1 (49-58)
  source 1..30: mol_type = other RNA
cgcatcaacgagagcctgtcccagctcaag

SEQ ID NO: 46308 - RNA, 27 nt, synthetic construct
  misc_feature 1..27: note = Vigilin (291-299)
  source 1..27: mol_type = other RNA
cgcatcaacatccccccgcccagcgtg

SEQ ID NO: 46309 - RNA, 27 nt, synthetic construct
  misc_feature 1..27: note = Pumilio homolog 1 (920-928)
  source 1..27: mol_type = other RNA
cgcatccggggccacgtgctgagcctc

SEQ ID NO: 46310 - RNA, 27 nt, synthetic construct
  misc_feature 1..27: note = Proteasome subunit beta type-5 (76-84)
  source 1..27: mol_type = other RNA
cgcatcagcggcgccaccttctccgtg

SEQ ID NO: 46311 - RNA, 33 nt, synthetic construct
  misc_feature 1..33: note = Cubilin (1911-1921)
  source 1..33: mol_type = other RNA
cgcatctacgacggccccagcatccacgcccgg

SEQ ID NO: 46312 - RNA, 27 nt, synthetic construct
  misc_feature 1..27: note = Centrosomal protein C10orf90 (654-662)
  source 1..27: mol_type = other RNA
cgcatctacgacaacctgcccgaggtg

SEQ ID NO: 46313 - RNA, 39 nt, synthetic construct
  misc_feature 1..39: note = Probable phospholipid-transporting ATPase VB (153-165)
  source 1..39: mol_type = other RNA
cgcatctacgagcggaaggagcagacctacgtgcagaag

SEQ ID NO: 46314 - RNA, 81 nt, synthetic construct
  misc_feature 1..81: note = HLA class I histocompatibility antigen, A-23 alpha chain (339-365)
  source 1..81: mol_type = other RNA
cgcaagggcgggagctactcccaggccgccagctccgacagcgcgcagggctccgacgtgagcctgaccgcctgcaaggtc

SEQ ID NO: 46315 - RNA, 81 nt, synthetic construct
  misc_feature 1..81: note = HLA class I histocompatibility antigen, A-1 alpha chain (314-340)
  source 1..81: mol_type = other RNA
cgcaagggcgggagctacacccaggccgcctccagcgactccgcgcagggcagcgacgtgtccctgaccgcctgcaaggtc

SEQ ID NO: 46316 - RNA, 27 nt, synthetic construct
  misc_feature 1..27: note = Ellis-van Creveld syndrome protein (396-404)
  source 1..27: mol_type = other RNA
cgcctggccgccatcagccacggcctc

SEQ ID NO: 46317 - RNA, 27 nt, synthetic construct
  misc_feature 1..27: note = Interferon-induced protein with tetratricopeptide repeats 1 (110-118)
  source 1..27: mol_type = other RNA
cgcctggccgaggcccagacctacctc

SEQ ID NO: 46318 - RNA, 27 nt, synthetic construct
  misc_feature 1..27: note = EMILIN-1 (205-213)
  source 1..27: mol_type = other RNA
cgcctggccgaggacgtgcagcgggcc

SEQ ID NO: 46319 - RNA, 27 nt, synthetic construct
  misc_feature 1..27: note = Periodic tryptophan protein 2 homolog (276-284)
  source 1..27: mol_type = other RNA
cgcctggccaagtacttcttcaacaag

SEQ ID NO: 46320 - RNA, 27 nt, synthetic construct
  misc_feature 1..27: note = Keratin, type I cytoskeletal 24 (150-158)
  source 1..27: mol_type = other RNA
cgcctggccaactacctcgacaaggtg

SEQ ID NO: 46321 - RNA, 27 nt, synthetic construct
  misc_feature 1..27: note = Histone-lysine N-methyltransferase 2D (2762-2770)
  source 1..27: mol_type = other RNA
cgcctggcccccagcatggccatggtg

SEQ ID NO: 46322 - RNA, 27 nt, synthetic construct
  misc_feature 1..27: note = Ankyrin-2 (1004-1012)
  source 1..27: mol_type = other RNA
cgcctggccaccatgcccccgatggtg

SEQ ID NO: 46323 - RNA, 30 nt, synthetic construct
  misc_feature 1..30: note = Coatomer subunit gamma-1 (208-217)
  source 1..30: mol_type = other RNA
cgcctggccgtgaacaagatgatcagcaag

SEQ ID NO: 46324 - RNA, 27 nt, synthetic construct
  misc_feature 1..27: note = Apolipoprotein E (246-254)
  source 1..27: mol_type = other RNA
cgcctggacgaggtgaaggagcaggtc

SEQ ID NO: 46325 - RNA, 24 nt, synthetic construct
  misc_feature 1..24: note = Vimentin (217-224)
  source 1..24: mol_type = other RNA
cgcctggacctcgagcggaaggtg

SEQ ID NO: 46326 - RNA, 30 nt, synthetic construct
  misc_feature 1..30: note = Protein kinase C and casein kinase substrate in neurons protein 2 (468-477)
  source 1..30: mol_type = other RNA
cgcctggacaacggccaggtggggctctac

SEQ ID NO: 46327 - RNA, 27 nt, synthetic construct
  misc_feature 1..27: note = Sestrin-3 (71-79)
  source 1..27: mol_type = other RNA
cgcctggacaacatcacccaggtgatg

SEQ ID NO: 46328 - RNA, 27 nt, synthetic construct
  misc_feature 1..27: note = Glutamine and serine-rich protein 1 (616-624)
  source 1..27: mol_type = other RNA
cgcctggaggaccaggtgatcggcgtc

SEQ ID NO: 46329 - RNA, 27 nt, synthetic construct
  misc_feature 1..27: note = Myosin-10 (1407-1415)
  source 1..27: mol_type = other RNA
cgcctggaggagaaggccctcgcctac

SEQ ID NO: 46330 - RNA, 33 nt, synthetic construct
  misc_feature 1..33: note = 40S ribosomal protein S9 (9-19)
  source 1..33: mol_type = other RNA
cgcctgttcgagggcaacgccctcctgcggcgc

SEQ ID NO: 46331 - RNA, 27 nt, synthetic construct
  misc_feature 1..27: note = Spectrin beta chain, erythrocytic (38-46)
  source 1..27: mol_type = other RNA
cgcctgttcgagcggagccgcatcaag

SEQ ID NO: 46332 - RNA, 27 nt, synthetic construct
  misc_feature 1..27: note = Unconventional myosin-XVIIIa (821-829)
  source 1..27: mol_type = other RNA
cgcctgttccacgagcggaccttcgtg

SEQ ID NO: 46333 - RNA, 30 nt, synthetic construct
  misc_feature 1..30: note = Cytochrome P450 4V2 (390-399)
  source 1..30: mol_type = other RNA
cgcctgttccccagcgtgccgctcttcgcc

SEQ ID NO: 46334 - RNA, 27 nt, synthetic construct
  misc_feature 1..27: note = Mitogen-activated protein kinase-binding protein 1 (328-336)
  source 1..27: mol_type = other RNA
cgcctgttcagcggcgtggccaacgcc

SEQ ID NO: 46335 - RNA, 27 nt, synthetic construct
  misc_feature 1..27: note = Cysteine andine-rich protein 2 (87-95)
  source 1..27: mol_type = other RNA
cgcctgggcatcaagcccgagagcgtg

SEQ ID NO: 46336 - RNA, 24 nt, synthetic construct
  misc_feature 1..24: note = E3 ubiquitin-protein ligase HECTD1 (175-182)
  source 1..24: mol_type = other RNA
cgcctgggcgtgatcagcaaggtc

SEQ ID NO: 46337 - RNA, 27 nt, synthetic construct
  misc_feature 1..27: note = Protein fantom (56-64)
  source 1..27: mol_type = other RNA
cgcctgcacgacgagaacatcctcctg

SEQ ID NO: 46338 - RNA, 30 nt, synthetic construct
  misc_feature 1..30: note = General transcription factor 3C polypeptide 1 (377-386)
  source 1..30: mol_type = other RNA
cgcctgatcgagagcctcttcaccatccag

SEQ ID NO: 46339 - RNA, 27 nt, synthetic construct
  misc_feature 1..27: note = Heterogeneous nuclear ribonucleoprotein U-like protein 1 (490-498)
  source 1..27: mol_type = other RNA
cgcctgatccagatcgccgcccggaag

SEQ ID NO: 46340 - RNA, 27 nt, synthetic construct
  misc_feature 1..27: note = Cytochrome c oxidase subunit 2 (134-142)
  source 1..27: mol_type = other RNA
cgcctgctcgacgtggacaaccgggtc

SEQ ID NO: 46341 - RNA, 33 nt, synthetic construct
  misc_feature 1..33: note = Keratin, type I cytoskeletal 18 (324-334)
  source 1..33: mol_type = other RNA
cgcctgctcgaggacggcgaggacttcaacctg

SEQ ID NO: 46342 - RNA, 30 nt, synthetic construct
  misc_feature 1..30: note = Cytoplasmic FMR1-interacting protein 1 (113-122)
  source 1..30: mol_type = other RNA
cgcctgctcggctaccaggggatcgccgtg

SEQ ID NO: 46343 - RNA, 30 nt, synthetic construct
  misc_feature 1..30: note = Histone-lysine N-methyltransferase 2D (4468-4477)
  source 1..30: mol_type = other RNA
cgcctgctcaacctggacctggacctctgg

SEQ ID NO: 46344 - RNA, 33 nt, synthetic construct
  misc_feature 1..33: note = Homeobox protein Hox-B9 (220-230)
  source 1..33: mol_type = other RNA
cgcctgctcaacctgagcgagcggcaggtgaag

SEQ ID NO: 46345 - RNA, 27 nt, synthetic construct
  misc_feature 1..27: note = Apolipoprotein C-II (4-12)
  source 1..27: mol_type = other RNA
cgcctgctccccgccctgttcctggtg

SEQ ID NO: 46346 - RNA, 30 nt, synthetic construct
  misc_feature 1..30: note = Syndecan-3 (138-147)
  source 1..30: mol_type = other RNA
cgcctgctccccctgccgctgaccaccgtg

SEQ ID NO: 46347 - RNA, 39 nt, synthetic construct
  misc_feature 1..39: note = Long-chain fatty acid transport protein 1 (273-285)
  source 1..39: mol_type = other RNA
cgcctgctcccccaggtggacaccaccggcacgttcaag

SEQ ID NO: 46348 - RNA, 27 nt, synthetic construct
  misc_feature 1..27: note = Muskelin (14-22)
  source 1..27: mol_type = other RNA
cgcctgctcccctacgccctgcacaag

SEQ ID NO: 46349 - RNA, 27 nt, synthetic construct
  misc_feature 1..27: note = Regulator of G-protein signaling 12 (718-726)
  source 1..27: mol_type = other RNA
cgcctgctccaggaccccgtgggcgtc

SEQ ID NO: 46350 - RNA, 33 nt, synthetic construct
  misc_feature 1..33: note = G2/mitotic-specific cyclin-B1 (217-227)
  source 1..33: mol_type = other RNA
cgcctgctccaggagaccatgtacatgaccgtg

SEQ ID NO: 46351 - RNA, 33 nt, synthetic construct
  misc_feature 1..33: note = Interleukin-24 (90-100)
  source 1..33: mol_type = other RNA
cgcctgctccagcaggaggtgctgcagaacgtc

SEQ ID NO: 46352 - RNA, 27 nt, synthetic construct
  misc_feature 1..27: note = Unconventional myosin-Ic (138-146)
  source 1..27: mol_type = other RNA
cgcctgctccagagcaaccccgtgctg

SEQ ID NO: 46353 - RNA, 30 nt, synthetic construct
  misc_feature 1..30: note = AP-1 complex subunit beta-1 (528-537)
  source 1..30: mol_type = other RNA
cgcctgctcagcaccgaccccgtggccgcc

SEQ ID NO: 46354 - RNA, 27 nt, synthetic construct
  misc_feature 1..27: note = Neurochondrin (561-569)
  source 1..27: mol_type = other RNA
cgcctgctcagcacctcccccgccctg

SEQ ID NO: 46355 - RNA, 30 nt, synthetic construct
  misc_feature 1..30: note = Bombesin receptor-activated protein C6orf89 (119-128)
  source 1..30: mol_type = other RNA
cgcctgatgagcctccccatcgccaagaag

SEQ ID NO: 46356 - RNA, 27 nt, synthetic construct
  misc_feature 1..27: note = Cytochrome c oxidase subunit 2 (178-186)
  source 1..27: mol_type = other RNA
cgcctgaaccagaccaccttcacggcc

SEQ ID NO: 46357 - RNA, 27 nt, synthetic construct
  misc_feature 1..27: note = Lysosome-associated membraneoprotein 2 (273-281)
  source 1..27: mol_type = other RNA
cgcctgaacagctccaccatcaagtac

SEQ ID NO: 46358 - RNA, 27 nt, synthetic construct
  misc_feature 1..27: note = Lysosomal thioesterase PPT2 (8-16)
  source 1..27: mol_type = other RNA
cgcctgcccgccgcctgggtgctcctg

SEQ ID NO: 46359 - RNA, 30 nt, synthetic construct
  misc_feature 1..30: note = Protein scribble homolog (257-266)
  source 1..30: mol_type = other RNA
cgcctgcccgacggcatcgggcagctcaag

SEQ ID NO: 46360 - RNA, 27 nt, synthetic construct
  misc_feature 1..27: note = Neuron navigator 2 (921-929)
  source 1..27: mol_type = other RNA
cgcctgcccgacggcatggccgtggtc

SEQ ID NO: 46361 - RNA, 30 nt, synthetic construct
  misc_feature 1..30: note = Lysine-specific demethylase 5B (1280-1289)
  source 1..30: mol_type = other RNA
cgcctgcccgagggcgacgccctccggtac

SEQ ID NO: 46362 - RNA, 33 nt, synthetic construct
  misc_feature 1..33: note = Transformation/transcription domain-associated protein (696-706)
  source 1..33: mol_type = other RNA
cgcctgcccgagatgggcagcaacgtggagctc

SEQ ID NO: 46363 - RNA, 27 nt, synthetic construct
  misc_feature 1..27: note = Probable E3 ubiquitin-protein ligase HERC6 (578-586)
  source 1..27: mol_type = other RNA
cgcctgcccgagaacaccttcaacatc

SEQ ID NO: 46364 - RNA, 27 nt, synthetic construct
  misc_feature 1..27: note = WD repeat-containing protein 90 (1359-1367)
  source 1..27: mol_type = other RNA
cgcctgcccgagccggtgcacggcgtc

SEQ ID NO: 46365 - RNA, 33 nt, synthetic construct
  misc_feature 1..33: note = YrdC domain-containing protein, mitochondrial (48-58)
  source 1..33: mol_type = other RNA
cgcctgcccggcagcggggccgtgcaggccgcg

SEQ ID NO: 46366 - RNA, 33 nt, synthetic construct
  misc_feature 1..33: note = Insulin receptor substrate 2 (1043-1053)
  source 1..33: mol_type = other RNA
cgcctgcccccggccagcgccgtggcgaccgcc

SEQ ID NO: 46367 - RNA, 27 nt, synthetic construct
  misc_feature 1..27: note = Zinc finger BED domain-containing protein 6 (445-453)
  source 1..27: mol_type = other RNA
cgcctgcccagcgagacctacttcttc

SEQ ID NO: 46368 - RNA, 27 nt, synthetic construct
  misc_feature 1..27: note = DNA-dependent protein kinase catalytic subunit (2530-2538)
  source 1..27: mol_type = other RNA
cgcctgcccagcaacaccctcgaccgg

SEQ ID NO: 46369 - RNA, 27 nt, synthetic construct
  misc_feature 1..27: note = T-cell immunomodulatory protein (6-14)
  source 1..27: mol_type = other RNA
cgcctgcccagctcctgggccctcttc

SEQ ID NO: 46370 - RNA, 30 nt, synthetic construct
  misc_feature 1..30: note = Peroxisome proliferator-activated receptor gamma coactivator-related protein 1 (1096-1105)
  source 1..30: mol_type = other RNA
cgcctgcaggcccccgagctcgccaacgtg

SEQ ID NO: 46371 - RNA, 27 nt, synthetic construct
  misc_feature 1..27: note = DNA-dependent protein kinase catalytic subunit (14-22)
  source 1..27: mol_type = other RNA
cgcctgcaggagaccctcagcgccgcc

SEQ ID NO: 46372 - RNA, 27 nt, synthetic construct
  misc_feature 1..27: note = DNA ligase 3 (740-748)
  source 1..27: mol_type = other RNA
cgcctgcagaacgagctcgacatggtg

SEQ ID NO: 46373 - RNA, 33 nt, synthetic construct
  misc_feature 1..33: note = 2'-5'-oligoadenylate synthase 3 (18-28)
  source 1..33: mol_type = other RNA
cgcctgcagccccggaaggagttcgtggagaag

SEQ ID NO: 46374 - RNA, 27 nt, synthetic construct
  misc_feature 1..27: note = Plectin (2433-2441)
  source 1..27: mol_type = other RNA
cgcctgcgggaggccatcgccgagctc

SEQ ID NO: 46375 - RNA, 27 nt, synthetic construct
  misc_feature 1..27: note = Tripeptidyl-peptidase 1 (60-68)
  source 1..27: mol_type = other RNA
cgcctgagcgagctcgtgcaggccgtc

SEQ ID NO: 46376 - RNA, 27 nt, synthetic construct
  misc_feature 1..27: note = Desumoylating isopeptidase 1 (23-31)
  source 1..27: mol_type = other RNA
cgcctgagccccatcatgctcggcaag

SEQ ID NO: 46377 - RNA, 27 nt, synthetic construct
  misc_feature 1..27: note = GCN1 general control of amino-acid synthesis 1-like 1 (2013-2021)
  source 1..27: mol_type = other RNA
cgcctgaccagcgccgacgccctccgg

SEQ ID NO: 46378 - RNA, 36 nt, synthetic construct
  misc_feature 1..36: note = Melanoma antigen preferentially expressed in tumors (25-36)
  source 1..36: mol_type = other RNA
cgcctggtggagctcgccggccagagcctgctgaag

SEQ ID NO: 46379 - RNA, 24 nt, synthetic construct
  misc_feature 1..24: note = Lysophosphatidic acid phosphatase type 6 (9-16)
  source 1..24: mol_type = other RNA
cgcctgtggacccccgtgggcgtc

SEQ ID NO: 46380 - RNA, 33 nt, synthetic construct
  misc_feature 1..33: note = Tubulin-specific chaperone C (217-227)
  source 1..33: mol_type = other RNA
cgcctgtacggcaaccccaacaccctccggctg

SEQ ID NO: 46381 - RNA, 30 nt, synthetic construct
  misc_feature 1..30: note = Tetratricopeptide repeat protein 30A (82-91)
  source 1..30: mol_type = other RNA
cgcctgtaccaggcccaggccctctacaag

SEQ ID NO: 46382 - RNA, 27 nt, synthetic construct
  misc_feature 1..27: note = Protein asteroid homolog 1 (274-282)
  source 1..27: mol_type = other RNA
cgcctgtacagcggctccctcgtgcac

SEQ ID NO: 46383 - RNA, 27 nt, synthetic construct
  misc_feature 1..27: note = Filamin-A (2280-2288)
  source 1..27: mol_type = other RNA
cgcctgtacagcgtgtcctacctcctg

SEQ ID NO: 46384 - RNA, 30 nt, synthetic construct
  misc_feature 1..30: note = Unconventional myosin-X (1476-1485)
  source 1..30: mol_type = other RNA
cgcctgtacaccaagctcctgaacgaggcc

SEQ ID NO: 46385 - RNA, 30 nt, synthetic construct
  misc_feature 1..30: note = Vimentin (13-22)
  source 1..30: mol_type = other RNA
cgcatgttcggcgggcccggcaccgccagc

SEQ ID NO: 46386 - RNA, 45 nt, synthetic construct
  misc_feature 1..45: note = Vimentin (13-27)
  source 1..45: mol_type = other RNA
cgcatgttcggcgggcccggcaccgccagccggccgtccagctcc

SEQ ID NO: 46387 - RNA, 48 nt, synthetic construct
  misc_feature 1..48: note = Vimentin (13-28)
  source 1..48: mol_type = other RNA
cgcatgttcggcgggcccggcaccgccagccggccgtccagctcccgc

SEQ ID NO: 46388 - RNA, 51 nt, synthetic construct
  misc_feature 1..51: note = Vimentin (13-29)
  source 1..51: mol_type = other RNA
cgcatgttcggcgggcccggcaccgccagccggccgtccagctcccgcagc

SEQ ID NO: 46389 - RNA, 30 nt, synthetic construct
  misc_feature 1..30: note = Mitochondrial 2-oxoglutarate/malate carrier protein (240-249)
  source 1..30: mol_type = other RNA
cgcatgatcgacggcaagcccgagtacaag

SEQ ID NO: 46390 - RNA, 42 nt, synthetic construct
  misc_feature 1..42: note = Spermine synthase (79-92)
  source 1..42: mol_type = other RNA
cgcatgaaggagctgagccaggactccaccggccgggtgaag

SEQ ID NO: 46391 - RNA, 27 nt, synthetic construct
  misc_feature 1..27: note = Eukaryotic translation initiation factor 2 subunit 3 (352-360)
  source 1..27: mol_type = other RNA
cgcatggtgggccaggtcctgggggcc

SEQ ID NO: 46392 - RNA, 30 nt, synthetic construct
  misc_feature 1..30: note = tRNA (adenine(58)-N(1))-methyltransferase non-catalytic subunit TRM6 (197-206)
  source 1..30: mol_type = other RNA
cgcaacgccgacggcctgatcgtggccagc

SEQ ID NO: 46393 - RNA, 27 nt, synthetic construct
  misc_feature 1..27: note = Probable global transcription activator SNF2L1 (166-174)
  source 1..27: mol_type = other RNA
cgcaacatccccggcccgcacatggtg

SEQ ID NO: 46394 - RNA, 27 nt, synthetic construct
  misc_feature 1..27: note = Melanocyte protein PMEL (241-249)
  source 1..27: mol_type = other RNA
cgcaaccagcccctgaccttcgccctc

SEQ ID NO: 46395 - RNA, 96 nt, synthetic construct
  misc_feature 1..96: note = HLA class I histocompatibility antigen, A-23 alpha chain (334-365)
  source 1..96: mol_type = other RNA
cgcaacagctccgaccggaagggcgggagctactcccaggccgccagctccgacagcgcgcagggctccgacgtgagcctgaccgcctgcaaggtc

SEQ ID NO: 46396 - RNA, 27 nt, synthetic construct
  misc_feature 1..27: note = Heterogeneous nuclear ribonucleoprotein K (37-45)
  source 1..27: mol_type = other RNA
cgcaacaccgacgagatggtggagctg

SEQ ID NO: 46397 - RNA, 27 nt, synthetic construct
  misc_feature 1..27: note = V-type proton ATPase subunit D (136-144)
  source 1..27: mol_type = other RNA
cgcaactacgccaaggccgtggagctg

SEQ ID NO: 46398 - RNA, 30 nt, synthetic construct
  misc_feature 1..30: note = Fibronectin isoform 6 (1712-1721)
  source 1..30: mol_type = other RNA
cgccccgcccagggcgtggtcaccaccctg

SEQ ID NO: 46399 - RNA, 27 nt, synthetic construct
  misc_feature 1..27: note = Putative inactive carbonic anhydrase 5B-like protein (84-92)
  source 1..27: mol_type = other RNA
cgccccgcccagaagcactgggtgctg

SEQ ID NO: 46400 - RNA, 27 nt, synthetic construct
  misc_feature 1..27: note = Glycosylated lysosomal membrane protein (121-129)
  source 1..27: mol_type = other RNA
cgccccgcccagccgccccggctgctc

SEQ ID NO: 46401 - RNA, 27 nt, synthetic construct
  misc_feature 1..27: note = Chondroitin sulfate synthase 2 (384-392)
  source 1..27: mol_type = other RNA
cgccccgccagccggttcgaggtgctg

SEQ ID NO: 46402 - RNA, 24 nt, synthetic construct
  misc_feature 1..24: note = L-dopachrome tautomerase (266-273)
  source 1..24: mol_type = other RNA
cgccccgacgacccgaccctgatc

SEQ ID NO: 46403 - RNA, 27 nt, synthetic construct
  misc_feature 1..27: note = Cancer/testis antigen 2 (82-90)
  source 1..27: mol_type = other RNA
cgccccgacagccggctgctccagctg

SEQ ID NO: 46404 - RNA, 45 nt, synthetic construct
  misc_feature 1..45: note = Titin (9911-9925)
  source 1..45: mol_type = other RNA
cgccccggcccgcccgtggggcccatcaagttcgagagcgtctcc

SEQ ID NO: 46405 - RNA, 63 nt, synthetic construct
  misc_feature 1..63: note = Glia-derived nexin (58-78)
  source 1..63: mol_type = other RNA
cgcccccacgacaacatcgtgatcagcccgcacggcatcgcctccgtcctggggatgctccag

SEQ ID NO: 46406 - RNA, 51 nt, synthetic construct
  misc_feature 1..51: note = Collagen alpha-2(I) chain (949-965)
  source 1..51: mol_type = other RNA
cgccccaaggactacgaggtggacgccaccctgaagagcctcaacaaccag

SEQ ID NO: 46407 - RNA, 27 nt, synthetic construct
  misc_feature 1..27: note = 6-phosphofructo-2-kinase/fructose-2,6-bisphosphatase 2 (486-494)
  source 1..27: mol_type = other RNA
cgccccctgaagccgctcagccccctg

SEQ ID NO: 46408 - RNA, 30 nt, synthetic construct
  misc_feature 1..30: note = Protein transport protein Sec23A (259-268)
  source 1..30: mol_type = other RNA
cgccccctgcggagctccggcgtggccctc

SEQ ID NO: 46409 - RNA, 27 nt, synthetic construct
  misc_feature 1..27: note = VPS10 domain-containing receptor SorCS1 (1153-1161)
  source 1..27: mol_type = other RNA
cgccccaacgtgccgcagaccgagctg

SEQ ID NO: 46410 - RNA, 21 nt, synthetic construct
  misc_feature 1..21: note = 40S ribosomal protein S26 (109-115)
  source 1..21: mol_type = other RNA
cgccccccgcccaagcccatg

SEQ ID NO: 46411 - RNA, 30 nt, synthetic construct
  misc_feature 1..30: note = Dystonin (1741-1750)
  source 1..30: mol_type = other RNA
cgcccccaggagggcgggcggatcaccctg

SEQ ID NO: 46412 - RNA, 24 nt, synthetic construct
  misc_feature 1..24: note = Kelch-like protein 20 (247-254)
  source 1..24: mol_type = other RNA
cgcccccagctgccgcaggtgctc

SEQ ID NO: 46413 - RNA, 24 nt, synthetic construct
  misc_feature 1..24: note = Renin receptor (59-66)
  source 1..24: mol_type = other RNA
cgcccccgggccaccgtgatggtc

SEQ ID NO: 46414 - RNA, 27 nt, synthetic construct
  misc_feature 1..27: note = UPF0524 protein C3orf70 (87-95)
  source 1..27: mol_type = other RNA
cgcccccgggagccgaccaacaccatc

SEQ ID NO: 46415 - RNA, 27 nt, synthetic construct
  misc_feature 1..27: note = Thiosulfate sulfurtransferase/rhodanese-like domain-containing protein 2 (485-493)
  source 1..27: mol_type = other RNA
cgcccccggatcccgcgcgagctgctc

SEQ ID NO: 46416 - RNA, 27 nt, synthetic construct
  misc_feature 1..27: note = Homocysteine-responsive endoplasmic reticulum-resident ubiquitin-like domain member 1 protein (48-56)
  source 1..27: mol_type = other RNA
cgcccccggccggaggaccagcgcctg

SEQ ID NO: 46417 - RNA, 27 nt, synthetic construct
  misc_feature 1..27: note = Transmembraneoprotein NMB (331-339)
  source 1..27: mol_type = other RNA
cgccccagcaagccgaccccctccctg

SEQ ID NO: 46418 - RNA, 27 nt, synthetic construct
  misc_feature 1..27: note = Rho GTPase-activating protein 7 (565-573)
  source 1..27: mol_type = other RNA
cgccccagcctgaactccgtgagcctc

SEQ ID NO: 46419 - RNA, 27 nt, synthetic construct
  misc_feature 1..27: note = Vimentin (45-53)
  source 1..27: mol_type = other RNA
cgccccagcacctcccggagcctgtac

SEQ ID NO: 46420 - RNA, 30 nt, synthetic construct
  misc_feature 1..30: note = Vimentin (45-54)
  source 1..30: mol_type = other RNA
cgccccagcacctcccggagcctgtacgcc

SEQ ID NO: 46421 - RNA, 24 nt, synthetic construct
  misc_feature 1..24: note = Kinase D-interacting substrate of 220 kDa (97-104)
  source 1..24: mol_type = other RNA
cgccccagcgtgaagacctccctg

SEQ ID NO: 46422 - RNA, 27 nt, synthetic construct
  misc_feature 1..27: note = Integrin beta-5 (445-453)
  source 1..27: mol_type = other RNA
cgccccgtgggcttccgggacagcctg

SEQ ID NO: 46423 - RNA, 27 nt, synthetic construct
  misc_feature 1..27: note = Dual specificity protein phosphatase 6 (6-14)
  source 1..27: mol_type = other RNA
cgccccgtgccgttcgccagcgagatg

SEQ ID NO: 46424 - RNA, 27 nt, synthetic construct
  misc_feature 1..27: note = L-dopachrome tautomerase (69-77)
  source 1..27: mol_type = other RNA
cgcccctggagcggcccgtacatcctg

SEQ ID NO: 46425 - RNA, 27 nt, synthetic construct
  misc_feature 1..27: note = Mannosyl-oligosaccharide 1,2-alpha-mannosidase IB (132-140)
  source 1..27: mol_type = other RNA
cgccaggccgagaagtactacatcctg

SEQ ID NO: 46426 - RNA, 27 nt, synthetic construct
  misc_feature 1..27: note = V-type proton ATPase subunit H (132-140)
  source 1..27: mol_type = other RNA
cgccaggaccccttcaccgtgcacatg

SEQ ID NO: 46427 - RNA, 27 nt, synthetic construct
  misc_feature 1..27: note = Dol-P-Man:Man(5)GlcNAc(2)-PP-Dol alpha-1,3-mannosyltransferase (218-226)
  source 1..27: mol_type = other RNA
cgccagttcctgttccactggaccgtg

SEQ ID NO: 46428 - RNA, 39 nt, synthetic construct
  misc_feature 1..39: note = Cohesin subunit SA-1 (249-261)
  source 1..39: mol_type = other RNA
cgccagtacgaggccgagcggaacaagatgatcggcaag

SEQ ID NO: 46429 - RNA, 27 nt, synthetic construct
  misc_feature 1..27: note = X-ray repair cross-complementing protein 5 (431-439)
  source 1..27: mol_type = other RNA
cgccagtacatgttcagctccctgaag

SEQ ID NO: 46430 - RNA, 21 nt, synthetic construct
  misc_feature 1..21: note = HLA class II histocompatibility antigen, DQ alpha 1 chain (55-61)
  source 1..21: mol_type = other RNA
cgccggttcgacccccagttc

SEQ ID NO: 46431 - RNA, 27 nt, synthetic construct
  misc_feature 1..27: note = HLA class II histocompatibility antigen, DQ alpha 1 chain (55-63)
  source 1..27: mol_type = other RNA
cgccggttcgacccccagttcgccctg

SEQ ID NO: 46432 - RNA, 30 nt, synthetic construct
  misc_feature 1..30: note = HLA class II histocompatibility antigen, DQ alpha 1 chain (55-64)
  source 1..30: mol_type = other RNA
cgccggttcgacccccagttcgccctgacc

SEQ ID NO: 46433 - RNA, 27 nt, synthetic construct
  misc_feature 1..27: note = Inosine-5'-monophosphate dehydrogenase 2 (355-363)
  source 1..27: mol_type = other RNA
cgccggttcggcgtgcccgtcatcgcc

SEQ ID NO: 46434 - RNA, 27 nt, synthetic construct
  misc_feature 1..27: note = Basement membrane-specific heparan sulfate proteoglycan core protein (587-595)
  source 1..27: mol_type = other RNA
cgccggttcctggtgcacgacagcttc

SEQ ID NO: 46435 - RNA, 30 nt, synthetic construct
  misc_feature 1..30: note = C-1-tetrahydrofolate synthase, cytoplasmic (487-496)
  source 1..30: mol_type = other RNA
cgccggttcagcgacatccagatccgccgg

SEQ ID NO: 46436 - RNA, 21 nt, synthetic construct
  misc_feature 1..21: note = PDZ domain-containing protein 2 (308-314)
  source 1..21: mol_type = other RNA
cgccggttcagcaagggcggg

SEQ ID NO: 46437 - RNA, 27 nt, synthetic construct
  misc_feature 1..27: note = Casein kinase I isoform alpha (106-114)
  source 1..27: mol_type = other RNA
cgccggttcaccatgaagaccgtgctg

SEQ ID NO: 46438 - RNA, 24 nt, synthetic construct
  misc_feature 1..24: note = Cytochrome c oxidase subunit 7C, mitochondrial (7-14)
  source 1..24: mol_type = other RNA
cgccggttcaccaccagcgtggtc

SEQ ID NO: 46439 - RNA, 24 nt, synthetic construct
  misc_feature 1..24: note = Acyl-CoA desaturase (174-181)
  source 1..24: mol_type = other RNA
cgccggggcttcttcttcagccac

SEQ ID NO: 46440 - RNA, 111 nt, synthetic construct
  misc_feature 1..111: note = Growth arrest-specific protein 6 (314-350)
  source 1..111: mol_type = other RNA
cgccggggcccccgcccgtggcaggacatcctgccctgcgtgcccttcagcgtcgccaagtccgtgaagagcctctacctggggcggatgttctccggcacccccgtgatc

SEQ ID NO: 46441 - RNA, 27 nt, synthetic construct
  misc_feature 1..27: note = Homeobox protein Hox-A4 (244-252)
  source 1..27: mol_type = other RNA
cgccggatcgagatcgcccacaccctg

SEQ ID NO: 46442 - RNA, 27 nt, synthetic construct
  misc_feature 1..27: note = WD repeat-containing protein 6 (233-241)
  source 1..27: mol_type = other RNA
cgccggatcagcggccacgtggggatc

SEQ ID NO: 46443 - RNA, 27 nt, synthetic construct
  misc_feature 1..27: note = Protein kinase C-binding protein 1 (354-362)
  source 1..27: mol_type = other RNA
cgccggaagttcggcgtgttcaactac

SEQ ID NO: 46444 - RNA, 27 nt, synthetic construct
  misc_feature 1..27: note = Hemicentin-1 (827-835)
  source 1..27: mol_type = other RNA
cgccggctggacaacatgcccatcttc

SEQ ID NO: 46445 - RNA, 30 nt, synthetic construct
  misc_feature 1..30: note = Hemicentin-1 (827-836)
  source 1..30: mol_type = other RNA
cgccggctggacaacatgcccatcttcagc

SEQ ID NO: 46446 - RNA, 33 nt, synthetic construct
  misc_feature 1..33: note = Hemicentin-1 (827-837)
  source 1..33: mol_type = other RNA
cgccggctggacaacatgcccatcttcagccgc

SEQ ID NO: 46447 - RNA, 27 nt, synthetic construct
  misc_feature 1..27: note = Golgi resident protein GCP60 (73-81)
  source 1..27: mol_type = other RNA
cgccggctggagcagcgctggggcttc

SEQ ID NO: 46448 - RNA, 27 nt, synthetic construct
  misc_feature 1..27: note = N-alpha-acetyltransferase 10 (82-90)
  source 1..27: mol_type = other RNA
cgccggctgggcctcgcccagaagctg

SEQ ID NO: 46449 - RNA, 27 nt, synthetic construct
  misc_feature 1..27: note = Caldesmon (347-355)
  source 1..27: mol_type = other RNA
cgccggctgaaggaggagatcgagcgc

SEQ ID NO: 46450 - RNA, 30 nt, synthetic construct
  misc_feature 1..30: note = Glyoxylate reductase/hydroxypyruvate reductase (170-179)
  source 1..30: mol_type = other RNA
cgccggctgaagcccttcggcgtgcagcgc

SEQ ID NO: 46451 - RNA, 27 nt, synthetic construct
  misc_feature 1..27: note = Ubiquitin-conjugating enzyme E2 variant 3 (9-17)
  source 1..27: mol_type = other RNA
cgccggctgctcggcaagtacaagttc

SEQ ID NO: 46452 - RNA, 30 nt, synthetic construct
  misc_feature 1..30: note = L-dopachrome tautomerase (529-538)
  source 1..30: mol_type = other RNA
cgccggctgcgcaagggctacacccccctc

SEQ ID NO: 46453 - RNA, 39 nt, synthetic construct
  misc_feature 1..39: note = Vimentin (12-24)
  source 1..39: mol_type = other RNA
cgccggatgttcggcgggcccggcaccgccagccgcccg

SEQ ID NO: 46454 - RNA, 48 nt, synthetic construct
  misc_feature 1..48: note = Vimentin (12-27)
  source 1..48: mol_type = other RNA
cgccggatgttcggcgggcccggcaccgccagccgcccgtccagctcc

SEQ ID NO: 46455 - RNA, 54 nt, synthetic construct
  misc_feature 1..54: note = Vimentin (12-29)
  source 1..54: mol_type = other RNA
cgccggatgttcggcgggcccggcaccgccagccgcccgtccagctcccggagc

SEQ ID NO: 46456 - RNA, 27 nt, synthetic construct
  misc_feature 1..27: note = G-protein coupled receptor 143 (256-264)
  source 1..27: mol_type = other RNA
cgccggatgggcgccgtgatcaagatc

SEQ ID NO: 46457 - RNA, 27 nt, synthetic construct
  misc_feature 1..27: note = Polymerase I and transcript release factor (148-156)
  source 1..27: mol_type = other RNA
cgccggaacttcaaggtgatgatctac

SEQ ID NO: 46458 - RNA, 99 nt, synthetic construct
  misc_feature 1..99: note = HLA class I histocompatibility antigen, A-23 alpha chain (333-365)
  source 1..99: mol_type = other RNA
cgccggaacagctccgaccgcaagggcgggagctactcccaggccgccagctccgacagcgcgcagggctccgacgtgagcctgaccgcctgcaaggtc

SEQ ID NO: 46459 - RNA, 30 nt, synthetic construct
  misc_feature 1..30: note = Sodium/potassium-transporting ATPase subunit alpha-3 (943-952)
  source 1..30: mol_type = other RNA
cgccggaacagcgtgttccagcagggcatg

SEQ ID NO: 46460 - RNA, 27 nt, synthetic construct
  misc_feature 1..27: note = NADH dehydrogenase (ubiquinone) 1 alpha subcomplex subunit 13 (48-56)
  source 1..27: mol_type = other RNA
cgccggcgcctgcagatcgaggacttc

SEQ ID NO: 46461 - RNA, 27 nt, synthetic construct
  misc_feature 1..27: note = Dual specificity protein phosphatase 4 (313-321)
  source 1..27: mol_type = other RNA
cgccggagcatcatctcccccaacttc

SEQ ID NO: 46462 - RNA, 27 nt, synthetic construct
  misc_feature 1..27: note = Hsp90 co-chaperone Cdc37 (166-174)
  source 1..27: mol_type = other RNA
cgccggtgggacgacagccagaagtac

SEQ ID NO: 46463 - RNA, 27 nt, synthetic construct
  misc_feature 1..27: note = Transmembraneoprotein NMB (169-177)
  source 1..27: mol_type = other RNA
cgccggtggaacttcatctacgtgttc

SEQ ID NO: 46464 - RNA, 30 nt, synthetic construct
  misc_feature 1..30: note = Transmembraneoprotein NMB (169-178)
  source 1..30: mol_type = other RNA
cgccggtggaacttcatctacgtgttccac

SEQ ID NO: 46465 - RNA, 27 nt, synthetic construct
  misc_feature 1..27: note = Eukaryotic translation initiation factor 3 subunit L (537-545)
  source 1..27: mol_type = other RNA
cgccggtacggcgacttcttcatccgc

SEQ ID NO: 46466 - RNA, 24 nt, synthetic construct
  misc_feature 1..24: note = Eukaryotic initiation factor 4A-I (168-175)
  source 1..24: mol_type = other RNA
cgccggtacctgagccccaagtac

SEQ ID NO: 46467 - RNA, 27 nt, synthetic construct
  misc_feature 1..27: note = Chondroitin sulfate glucuronyltransferase (416-424)
  source 1..27: mol_type = other RNA
cgccggtaccagccccgcctgcggttc

SEQ ID NO: 46468 - RNA, 36 nt, synthetic construct
  misc_feature 1..36: note = 60S ribosomal protein L6 (59-70)
  source 1..36: mol_type = other RNA
cgcagcgccatgtactcccggaaggccatgtacaag

SEQ ID NO: 46469 - RNA, 27 nt, synthetic construct
  misc_feature 1..27: note = Krueppel-like factor 6 (250-258)
  source 1..27: mol_type = other RNA
cgcagcgacgagctgacccggcacttc

SEQ ID NO: 46470 - RNA, 27 nt, synthetic construct
  misc_feature 1..27: note = Synaptotagmin-like protein 2 (665-673)
  source 1..27: mol_type = other RNA
cgcagcgacccctacgtgaaggcctac

SEQ ID NO: 46471 - RNA, 24 nt, synthetic construct
  misc_feature 1..24: note = Isoleucine-tRNA ligase, cytoplasmic (402-409)
  source 1..24: mol_type = other RNA
cgcagcgacacccccctgatctac

SEQ ID NO: 46472 - RNA, 27 nt, synthetic construct
  misc_feature 1..27: note = ETS homologous factor (209-217)
  source 1..27: mol_type = other RNA
cgcagcgagggcgtgttccggttcctg

SEQ ID NO: 46473 - RNA, 27 nt, synthetic construct
  misc_feature 1..27: note = Phosphatidylinositide phosphatase SAC2 (349-357)
  source 1..27: mol_type = other RNA
cgcagcgagaaggagaccgtggcctac

SEQ ID NO: 46474 - RNA, 60 nt, synthetic construct
  misc_feature 1..60: note = Keratin, type I cytoskeletal 9 (13-32)
  source 1..60: mol_type = other RNA
cgcagcggcgggggcgggggcgggggcctgggctccgggggcagcatccggtccagctac

SEQ ID NO: 46475 - RNA, 30 nt, synthetic construct
  misc_feature 1..30: note = Son of sevenless homolog 2 (593-602)
  source 1..30: mol_type = other RNA
cgcagcggcatccccatcatcaaggggggc

SEQ ID NO: 46476 - RNA, 27 nt, synthetic construct
  misc_feature 1..27: note = Manganese-transporting ATPase 13A1 (667-675)
  source 1..27: mol_type = other RNA
cgcagcatcgacggctccatcgtgctg

SEQ ID NO: 46477 - RNA, 27 nt, synthetic construct
  misc_feature 1..27: note = Basement membrane-specific heparan sulfate proteoglycan core protein (92-100)
  source 1..27: mol_type = other RNA
cgcagcatcgagtactccccccagctg

SEQ ID NO: 46478 - RNA, 27 nt, synthetic construct
  misc_feature 1..27: note = Fragile X mental retardation syndrome-related protein 1 (190-198)
  source 1..27: mol_type = other RNA
cgcagcatccggaccaagctgatgctc

SEQ ID NO: 46479 - RNA, 27 nt, synthetic construct
  misc_feature 1..27: note = LIM domain kinase 2 (381-389)
  source 1..27: mol_type = other RNA
cgcagcctggaccaccccaacgtgctc

SEQ ID NO: 46480 - RNA, 48 nt, synthetic construct
  misc_feature 1..48: note = rRNA-processing protein UTP23 homolog (234-249)
  source 1..48: mol_type = other RNA
cgcagcaaccccaaggtgctgtccgagaagcagaacgccgagggcgag

SEQ ID NO: 46481 - RNA, 39 nt, synthetic construct
  misc_feature 1..39: note = Histone H2B type 2-F (32-44)
  source 1..39: mol_type = other RNA
cgcagccggaaggagtcctacagcgtgtacgtctacaag

SEQ ID NO: 46482 - RNA, 27 nt, synthetic construct
  misc_feature 1..27: note = Deoxynucleotidyltransferase terminal-interacting protein 2 (272-280)
  source 1..27: mol_type = other RNA
cgcagctccgagaacatcctgaccgtg

SEQ ID NO: 46483 - RNA, 24 nt, synthetic construct
  misc_feature 1..24: note = DNA replication licensing factor MCM5 (603-610)
  source 1..24: mol_type = other RNA
cgcagctccatccccatcaccgtg

SEQ ID NO: 46484 - RNA, 30 nt, synthetic construct
  misc_feature 1..30: note = DBIRD complex subunit ZNF326 (80-89)
  source 1..30: mol_type = other RNA
cgcagctccctgggcgggcgggacctctac

SEQ ID NO: 46485 - RNA, 27 nt, synthetic construct
  misc_feature 1..27: note = HMG box-containing protein 1 (133-141)
  source 1..27: mol_type = other RNA
cgcagctcccccgtgcacatcatcgcc

SEQ ID NO: 46486 - RNA, 27 nt, synthetic construct
  misc_feature 1..27: note = Helicase with zinc finger domain 2 (147-155)
  source 1..27: mol_type = other RNA
cgcagctccagcgaggtgctggtcctc

SEQ ID NO: 46487 - RNA, 27 nt, synthetic construct
  misc_feature 1..27: note = Cytoplasmic dynein 1 heavy chain 1 (3474-3482)
  source 1..27: mol_type = other RNA
cgcagcaccgccctgctcaagtccctg

SEQ ID NO: 46488 - RNA, 27 nt, synthetic construct
  misc_feature 1..27: note = Cyclin-dependent kinase 5 activator 1 (179-187)
  source 1..27: mol_type = other RNA
cgcagcgtggaccggtccctgctcctg

SEQ ID NO: 46489 - RNA, 27 nt, synthetic construct
  misc_feature 1..27: note = Annexin A2 (220-228)
  source 1..27: mol_type = other RNA
cgcagcgtgccccacctgcagaaggtc

SEQ ID NO: 46490 - RNA, 27 nt, synthetic construct
  misc_feature 1..27: note = Proline and serine-rich protein 2 (7-15)
  source 1..27: mol_type = other RNA
cgcagcgtgcccaccccgctggtcatg

SEQ ID NO: 46491 - RNA, 27 nt, synthetic construct
  misc_feature 1..27: note = Signal peptidase complex subunit 3 (35-43)
  source 1..27: mol_type = other RNA
cgcagcgtgcccgtccggctgcacgtg

SEQ ID NO: 46492 - RNA, 33 nt, synthetic construct
  misc_feature 1..33: note = Zinc finger protein 770 (328-338)
  source 1..33: mol_type = other RNA
cgcagctacaactacaagaccatcgtgaagaag

SEQ ID NO: 46493 - RNA, 39 nt, synthetic construct
  misc_feature 1..39: note = Protein Hook homolog 3 (706-718)
  source 1..39: mol_type = other RNA
cgcagctaccccggccacgtgcagccggccaccgcccgg

SEQ ID NO: 46494 - RNA, 27 nt, synthetic construct
  misc_feature 1..27: note = Annexin A1 (228-236)
  source 1..27: mol_type = other RNA
cgcagctacccccagctgcggcgcgtg

SEQ ID NO: 46495 - RNA, 27 nt, synthetic construct
  misc_feature 1..27: note = Coatomer subunit alpha (1106-1114)
  source 1..27: mol_type = other RNA
cgcaccgccctgaacctcttcttcaag

SEQ ID NO: 46496 - RNA, 27 nt, synthetic construct
  misc_feature 1..27: note = Neuron navigator 2 (898-906)
  source 1..27: mol_type = other RNA
cgcaccgacgacatcaccagcggctac

SEQ ID NO: 46497 - RNA, 27 nt, synthetic construct
  misc_feature 1..27: note = Glycine-tRNA ligase (606-614)
  source 1..27: mol_type = other RNA
cgcaccgacgagatcggcgtggccttc

SEQ ID NO: 46498 - RNA, 27 nt, synthetic construct
  misc_feature 1..27: note = Cirhin (46-54)
  source 1..27: mol_type = other RNA
cgcaccgacggcaccgtggagatctac

SEQ ID NO: 46499 - RNA, 27 nt, synthetic construct
  misc_feature 1..27: note = Origin recognition complex subunit 5 (322-330)
  source 1..27: mol_type = other RNA
cgcaccgacaagcggttcttcctgaag

SEQ ID NO: 46500 - RNA, 30 nt, synthetic construct
  misc_feature 1..30: note = 1-phosphatidylinositol 4,5-bisphosphate phosphodiesterase beta-1 (39-48)
  source 1..30: mol_type = other RNA
cgcaccgacccccagggcttcttcttctac

SEQ ID NO: 46501 - RNA, 27 nt, synthetic construct
  misc_feature 1..27: note = Dedicator of cytokinesis protein 9 (1494-1502)
  source 1..27: mol_type = other RNA
cgcaccgaggccagccagctgctctac

SEQ ID NO: 46502 - RNA, 27 nt, synthetic construct
  misc_feature 1..27: note = DDB1- and CUL4-associated factor 16 (191-199)
  source 1..27: mol_type = other RNA
cgcaccgagcccatcaacaccacgtac

SEQ ID NO: 46503 - RNA, 27 nt, synthetic construct
  misc_feature 1..27: note = Rho guanine nucleotide exchange factor 2 (679-687)
  source 1..27: mol_type = other RNA
cgcaccttcaacggcagcatcgagctg

SEQ ID NO: 46504 - RNA, 33 nt, synthetic construct
  misc_feature 1..33: note = Insulin receptor substrate 2 (718-728)
  source 1..33: mol_type = other RNA
cgcaccttccccgccagcggcgggggctacaag

SEQ ID NO: 46505 - RNA, 24 nt, synthetic construct
  misc_feature 1..24: note = Vigilin (146-153)
  source 1..24: mol_type = other RNA
cgcaccggcgcccacctggagctc

SEQ ID NO: 46506 - RNA, 24 nt, synthetic construct
  misc_feature 1..24: note = E3 ubiquitin-protein ligase HERC2 (17-24)
  source 1..24: mol_type = other RNA
cgcaccggcagccccctgtccctc

SEQ ID NO: 46507 - RNA, 39 nt, synthetic construct
  misc_feature 1..39: note = Prelamin-A/C (16-28)
  source 1..39: mol_type = other RNA
cgcaccggcaccctgctcgcccagcaccccgcctggggg

SEQ ID NO: 46508 - RNA, 27 nt, synthetic construct
  misc_feature 1..27: note = TGF-beta receptor type-1 (199-207)
  source 1..27: mol_type = other RNA
cgcaccatcgcccggaccatcgtgctg

SEQ ID NO: 46509 - RNA, 27 nt, synthetic construct
  misc_feature 1..27: note = Nuclear pore complex protein Nup155 (332-340)
  source 1..27: mol_type = other RNA
cgcaccatcgaccggagcgtgttcaag

SEQ ID NO: 46510 - RNA, 27 nt, synthetic construct
  misc_feature 1..27: note = Protein CASP (616-624)
  source 1..27: mol_type = other RNA
cgcaccatcggcttcttctacaccctg

SEQ ID NO: 46511 - RNA, 27 nt, synthetic construct
  misc_feature 1..27: note = Bifunctional glutamate/proline-tRNA ligase (1278-1286)
  source 1..27: mol_type = other RNA
cgcaccatcggcgtgatgaccatggtc

SEQ ID NO: 46512 - RNA, 27 nt, synthetic construct
  misc_feature 1..27: note = Helicase-like transcription factor (616-624)
  source 1..27: mol_type = other RNA
cgcaccatccagcggcccgtgaccatg

SEQ ID NO: 46513 - RNA, 27 nt, synthetic construct
  misc_feature 1..27: note = AF4/FMR2 family member 4 (46-54)
  source 1..27: mol_type = other RNA
cgcaccatcagccagtccagctccctg

SEQ ID NO: 46514 - RNA, 27 nt, synthetic construct
  misc_feature 1..27: note = Ankyrin repeat domain-containing protein 17 (1031-1039)
  source 1..27: mol_type = other RNA
cgcaccaaggacacccccctgagcctc

SEQ ID NO: 46515 - RNA, 27 nt, synthetic construct
  misc_feature 1..27: note = Inositol 1,4,5-trisphosphate receptor type 3 (1667-1675)
  source 1..27: mol_type = other RNA
cgcaccctgcagcagatgctcctgaag

SEQ ID NO: 46516 - RNA, 33 nt, synthetic construct
  misc_feature 1..33: note = Phosphatidylserine synthase 1 (8-18)
  source 1..33: mol_type = other RNA
cgcaccctgagcaaggacgacgtgaactacaag

SEQ ID NO: 46517 - RNA, 84 nt, synthetic construct
  misc_feature 1..84: note = Heat shock cognate 71 kDa protein (272-299)
  source 1..84: mol_type = other RNA
cgcaccctgagctccagcacccaggcctccatcgagatcgacagcctctacgagggcatcgacttctacacgtccatcacccgg

SEQ ID NO: 46518 - RNA, 27 nt, synthetic construct
  misc_feature 1..27: note = 60S ribosomal protein L18 (55-63)
  source 1..27: mol_type = other RNA
cgcaccaaccggcccccgctgagcctc

SEQ ID NO: 46519 - RNA, 27 nt, synthetic construct
  misc_feature 1..27: note = 60S ribosomal protein L18 (38-46)
  source 1..27: mol_type = other RNA
cgcaccaacagcaccttcaaccaggtg

SEQ ID NO: 46520 - RNA, 27 nt, synthetic construct
  misc_feature 1..27: note = HLA class II histocompatibility antigen, DM beta chain (111-119)
  source 1..27: mol_type = other RNA
cgcacccggcccccgagcgtgcaggtc

SEQ ID NO: 46521 - RNA, 27 nt, synthetic construct
  misc_feature 1..27: note = Solute carrier family 22 member 6 (423-431)
  source 1..27: mol_type = other RNA
cgcaccagcctggccgtgctcggcaag

SEQ ID NO: 46522 - RNA, 27 nt, synthetic construct
  misc_feature 1..27: note = Actin-related protein 3 (290-298)
  source 1..27: mol_type = other RNA
cgcaccgtggacgcccggctgaagctc

SEQ ID NO: 46523 - RNA, 27 nt, synthetic construct
  misc_feature 1..27: note Dolichyl-diphosphooligosaccharide-proteinosyltransferase subunit 1 (38-46)
  source 1..27: mol_type = other RNA
cgcaccgtggacctgagctcccacctc

SEQ ID NO: 46524 - RNA, 27 nt, synthetic construct
  misc_feature 1..27: note = Host cell factor 1 (1385-1393)
  source 1..27: mol_type = other RNA
cgcaccgtggagagcggcctggaggtc

SEQ ID NO: 46525 - RNA, 39 nt, synthetic construct
  misc_feature 1..39: note = Myosin-9 (644-656)
  source 1..39: mol_type = other RNA
cgcaccgtgggccagctgtacaaggagcagctcgccaag

SEQ ID NO: 46526 - RNA, 24 nt, synthetic construct
  misc_feature 1..24: note = Probable C-mannosyltransferase DPY19L4 (518-525)
  source 1..24: mol_type = other RNA
cgcaccgtgcaccccatcctgctc

SEQ ID NO: 46527 - RNA, 93 nt, synthetic construct
  misc_feature 1..93: note = Fructose-bisphosphate aldolase A (313-343)
  source 1..93: mol_type = other RNA
cgcaccgtgcccccggccgtcaccggcatcacgttcctgagcgggggccagtccgaggaggaggccagcatcaacctcaacgcgatcaacaag

SEQ ID NO: 46528 - RNA, 39 nt, synthetic construct
  misc_feature 1..39: note = Programmed cell death protein 6 (100-112)
  source 1..39: mol_type = other RNA
cgcacctacgaccgggacaacagcggcatgatcgacaag

SEQ ID NO: 46529 - RNA, 27 nt, synthetic construct
  misc_feature 1..27: note = Chondroitin sulfate synthase 2 (347-355)
  source 1..27: mol_type = other RNA
cgcacctaccaggagatccaggagctg

SEQ ID NO: 46530 - RNA, 27 nt, synthetic construct
  misc_feature 1..27: note = Vimentin (36-44)
  source 1..27: mol_type = other RNA
cgcacctacagcctgggctccgccctc

SEQ ID NO: 46531 - RNA, 27 nt, synthetic construct
  misc_feature 1..27: note = Mucolipin-1 (420-428)
  source 1..27: mol_type = other RNA
cgcgtggccctgcccagcgtcatgcgg

SEQ ID NO: 46532 - RNA, 33 nt, synthetic construct
  misc_feature 1..33: note = Multiple epidermal growth factor-like domains protein 8 (2514-2524)
  source 1..33: mol_type = other RNA
cgcgtggcccccgacaccggcgtccacaccgtg

SEQ ID NO: 46533 - RNA, 27 nt, synthetic construct
  misc_feature 1..27: note = Rab11 family-interacting protein 5 (210-218)
  source 1..27: mol_type = other RNA
cgcgtggcccccccgcgggccctgctc

SEQ ID NO: 46534 - RNA, 39 nt, synthetic construct
  misc_feature 1..39: note = FUN14 domain-containing protein 1 (35-47)
  source 1..39: mol_type = other RNA
cgcgtgttcggccacagctccgggcccatggtcgagaag

SEQ ID NO: 46535 - RNA, 36 nt, synthetic construct
  misc_feature 1..36: note = Putative ATP-dependent RNA helicase DHX33 (247-258)
  source 1..36: mol_type = other RNA
cgcgtgttccagggcgcccccaaggggtaccggaag

SEQ ID NO: 46536 - RNA, 33 nt, synthetic construct
  misc_feature 1..33: note = Annexin A1 (235-245)
  source 1..33: mol_type = other RNA
cgcgtgttccagaagtacaccaagtacagcaag

SEQ ID NO: 46537 - RNA, 27 nt, synthetic construct
  misc_feature 1..27: note = Centrosomal protein C10orf90 (146-154)
  source 1..27: mol_type = other RNA
cgcgtgggccccccggcccgggccctg

SEQ ID NO: 46538 - RNA, 27 nt, synthetic construct
  misc_feature 1..27: note = E3 ubiquitin-protein ligase MIB2 (385-393)
  source 1..27: mol_type = other RNA
cgcgtgatcggcgacctggacaccgtc

SEQ ID NO: 46539 - RNA, 39 nt, synthetic construct
  misc_feature 1..39: note = Protein FAM177A1 (56-68)
  source 1..39: mol_type = other RNA
cgcgtgatccacttcgtcagcggcgagaccatggaggag

SEQ ID NO: 46540 - RNA, 39 nt, synthetic construct
  misc_feature 1..39: note = Glyceraldehyde-3-phosphate dehydrogenase (118-130)
  source 1..39: mol_type = other RNA
cgcgtgatcatcagcgccccctccgccgacgcgccgatg

SEQ ID NO: 46541 - RNA, 30 nt, synthetic construct
  misc_feature 1..30: note = Nuclear valosin-containing protein-like (16-25)
  source 1..30: mol_type = other RNA
cgcgtgatccagtacctgaccagcaacaag

SEQ ID NO: 46542 - RNA, 30 nt, synthetic construct
  misc_feature 1..30: note = Translation initiation factor eIF-2B subunit alpha (136-145)
  source 1..30: mol_type = other RNA
cgcgtgctggaggccgccgtcgcggccaag

SEQ ID NO: 46543 - RNA, 30 nt, synthetic construct
  misc_feature 1..30: note = Ribosomal RNA-processing protein 8 (380-389)
  source 1..30: mol_type = other RNA
cgcgtgctgaagcccggcgggctcctgaag

SEQ ID NO: 46544 - RNA, 27 nt, synthetic construct
  misc_feature 1..27: note = Nidogen-2 (738-746)
  source 1..27: mol_type = other RNA
cgcgtgctgcggttcgccgtcaccaac

SEQ ID NO: 46545 - RNA, 27 nt, synthetic construct
  misc_feature 1..27: note = HLA class I histocompatibility antigen, Cw-3 alpha chain (2-10)
  source 1..27: mol_type = other RNA
cgcgtgatggccccccggaccctgatc

SEQ ID NO: 46546 - RNA, 27 nt, synthetic construct
  misc_feature 1..27: note = HLA class I histocompatibility antigen, Cw-2 alpha chain (2-10)
  source 1..27: mol_type = other RNA
cgcgtgatggccccccggaccctgctc

SEQ ID NO: 46547 - RNA, 27 nt, synthetic construct
  misc_feature 1..27: note = Carbohydrate sulfotransferase 14 (126-134)
  source 1..27: mol_type = other RNA
cgcgtgatgaaggtcctggccggcgtg

SEQ ID NO: 46548 - RNA, 27 nt, synthetic construct
  misc_feature 1..27: note = Polycomb group RING finger protein 1 (90-98)
  source 1..27: mol_type = other RNA
cgcgtgatgcaggacatcgtctacaag

SEQ ID NO: 46549 - RNA, 33 nt, synthetic construct
  misc_feature 1..33: note = Spectrin alpha chain, non-erythrocytic 1 (204-214)
  source 1..33: mol_type = other RNA
cgcgtgaacgaggtcaaccagttcgccgccaag

SEQ ID NO: 46550 - RNA, 57 nt, synthetic construct
  misc_feature 1..57: note = Beta-2-microglobulin (80-98)
  source 1..57: mol_type = other RNA
cgcgtgaaccacgtcaccctgagccagcccaagatcgtgaagtgggaccgggacatg

SEQ ID NO: 46551 - RNA, 27 nt, synthetic construct
  misc_feature 1..27: note = Ribonuclease inhibitor (53-61)
  source 1..27: mol_type = other RNA
cgcgtgaaccccgccctggccgagctc

SEQ ID NO: 46552 - RNA, 27 nt, synthetic construct
  misc_feature 1..27: note = Major centromere autoantigen B (26-34)
  source 1..27: mol_type = other RNA
cgcgtgcagagccacatcctgcacctc

SEQ ID NO: 46553 - RNA, 27 nt, synthetic construct
  misc_feature 1..27: note = Mannose-1-phosphate guanyltransferase alpha (390-398)
  source 1..27: mol_type = other RNA
cgcgtgcggatccccgccgaggtcctg

SEQ ID NO: 46554 - RNA, 27 nt, synthetic construct
  misc_feature 1..27: note = Probable cation-transporting ATPase 13A2 (897-905)
  source 1..27: mol_type = other RNA
cgcgtgcggcccccgggcgccctgctc

SEQ ID NO: 46555 - RNA, 27 nt, synthetic construct
  misc_feature 1..27: note = Transmembrane protein 121 (244-252)
  source 1..27: mol_type = other RNA
cgcgtgagcgccatcttcgtcggcaag

SEQ ID NO: 46556 - RNA, 27 nt, synthetic construct
  misc_feature 1..27: note = Protein kinase C and casein kinase substrate in neurons protein 2 (92-100)
  source 1..27: mol_type = other RNA
cgcgtgagcgagctgcacctcgaggtc

SEQ ID NO: 46557 - RNA, 27 nt, synthetic construct
  misc_feature 1..27: note = Ectonucleoside triphosphate diphosphohydrolase 6 (359-367)
  source 1..27: mol_type = other RNA
cgcgtgagcgaggtcctgcagaaccgg

SEQ ID NO: 46558 - RNA, 27 nt, synthetic construct
  misc_feature 1..27: note = HLA class I histocompatibility antigen, B-15 alpha chain (2-10)
  source 1..27: mol_type = other RNA
cgcgtgaccgccccccggaccgtcctg

SEQ ID NO: 46559 - RNA, 30 nt, synthetic construct
  misc_feature 1..30: note = F-box/LRR-repeat protein 7 (354-363)
  source 1..30: mol_type = other RNA
cgcgtgaccgacgtcggcatccggtacgtg

SEQ ID NO: 46560 - RNA, 33 nt, synthetic construct
  misc_feature 1..33: note = Titin (16492-16502)
  source 1..33: mol_type = other RNA
cgcgtgaccggcctgatcgagaaccacgactac

SEQ ID NO: 46561 - RNA, 27 nt, synthetic construct
  misc_feature 1..27: note = Phospholipid transfer protein (25-33)
  source 1..27: mol_type = other RNA
cgcgtgaccagcaaggccctggagctc

SEQ ID NO: 46562 - RNA, 27 nt, synthetic construct
  misc_feature 1..27: note = UPF0769 protein C21orf59 (33-41)
  source 1..27: mol_type = other RNA
cgcgtgtacaacggccggctgaaggtc

SEQ ID NO: 46563 - RNA, 54 nt, synthetic construct
  misc_feature 1..54: note = HLA class I histocompatibility antigen, A-2 alpha chain (272-289)
  source 1..54: mol_type = other RNA
cgctgggagcccagctcccagccgaccatccccatcgtgggcatcatcgccggg

SEQ ID NO: 46564 - RNA, 51 nt, synthetic construct
  misc_feature 1..51: note = HLA class I histocompatibility antigen, Cw-17 alpha chain (297-313)
  source 1..51: mol_type = other RNA
cgctggggcgggaagggcgggagctgctcccaggccgccagctccaacagc

SEQ ID NO: 46565 - RNA, 27 nt, synthetic construct
  misc_feature 1..27: note = Calpain-3 (104-112)
  source 1..27: mol_type = other RNA
cgctacgccgacaagcacatgaacatc

SEQ ID NO: 46566 - RNA, 27 nt, synthetic construct
  misc_feature 1..27: note = Tetratricopeptide repeat protein 30A (26-34)
  source 1..27: mol_type = other RNA
cgctacgccgaggccgtgcagctgctc

SEQ ID NO: 46567 - RNA, 24 nt, synthetic construct
  misc_feature 1..24: note = Sodium/potassium-transporting ATPase subunit alpha-1 (276-283)
  source 1..24: mol_type = other RNA
cgctacgccaagatcgtggagatc

SEQ ID NO: 46568 - RNA, 30 nt, synthetic construct
  misc_feature 1..30: note = Sodium/potassium-transporting ATPase subunit alpha-1 (276-285)
  source 1..30: mol_type = other RNA
cgctacgccaagatcgtggagatccccttc

SEQ ID NO: 46569 - RNA, 27 nt, synthetic construct
  misc_feature 1..27: note = Zinc finger and BTB domain-containing protein 11 (581-589)
  source 1..27: mol_type = other RNA
cgctacgccctgatcatgcacaagctc

SEQ ID NO: 46570 - RNA, 30 nt, synthetic construct
  misc_feature 1..30: note = Bestrophin-1 (70-79)
  source 1..30: mol_type = other RNA
cgctacgccaacctgggcaacgtgctcatc

SEQ ID NO: 46571 - RNA, 27 nt, synthetic construct
  misc_feature 1..27: note = Probable helicase with zinc finger domain (214-222)
  source 1..27: mol_type = other RNA
cgctacgccagccggctgatcaagctc

SEQ ID NO: 46572 - RNA, 27 nt, synthetic construct
  misc_feature 1..27: note = (Pyruvate dehydrogenase (acetyl-transferring))-phosphatase 1, mitochondrial (106-114)
  source 1..27: mol_type = other RNA
cgctacgccagcaccccccagaagttc

SEQ ID NO: 46573 - RNA, 27 nt, synthetic construct
  misc_feature 1..27: note = Kelch-like protein 20 (384-392)
  source 1..27: mol_type = other RNA
cgctacgaccccaagaccaaccagtgg

SEQ ID NO: 46574 - RNA, 27 nt, synthetic construct
  misc_feature 1..27: note = Kelch-like protein 20 (337-345)
  source 1..27: mol_type = other RNA
cgctacgacccccagaccaacgagtgg

SEQ ID NO: 46575 - RNA, 27 nt, synthetic construct
  misc_feature 1..27: note = Protein FAM91A1 (437-445)
  source 1..27: mol_type = other RNA
cgctacttcgaccacgccctgaccctc

SEQ ID NO: 46576 - RNA, 27 nt, synthetic construct
  misc_feature 1..27: note = Heterogeneous nuclear ribonucleoprotein H2 (275-283)
  source 1..27: mol_type = other RNA
cgctacggcgacgggggcagctccttc

SEQ ID NO: 46577 - RNA, 27 nt, synthetic construct
  misc_feature 1..27: note = Transmembraneoprotein NMB (373-381)
  source 1..27: mol_type = other RNA
cgctacggccacttccaggccaccatc

SEQ ID NO: 46578 - RNA, 24 nt, synthetic construct
  misc_feature 1..24: note = Protocadherin gamma-A11 (881-888)
  source 1..24: mol_type = other RNA
cgctacggcccccagttcaccctg

SEQ ID NO: 46579 - RNA, 27 nt, synthetic construct
  misc_feature 1..27: note = Melanocyte protein PMEL (486-494)
  source 1..27: mol_type = other RNA
cgctacggcagcttctccgtgaccctg

SEQ ID NO: 46580 - RNA, 27 nt, synthetic construct
  misc_feature 1..27: note = FTS and Hook-interacting protein (249-257)
  source 1..27: mol_type = other RNA
cgctacatcgccgaccacagctacttc

SEQ ID NO: 46581 - RNA, 27 nt, synthetic construct
  misc_feature 1..27: note = Hemicentin-1 (697-705)
  source 1..27: mol_type = other RNA
cgctacatcgaggcccccaagctgatg

SEQ ID NO: 46582 - RNA, 33 nt, synthetic construct
  misc_feature 1..33: note = Leucine-rich repeat LGI family member 3 (441-451)
  source 1..33: mol_type = other RNA
cgctacatcggcgacagcaagatcctgcggtgg

SEQ ID NO: 46583 - RNA, 27 nt, synthetic construct
  misc_feature 1..27: note = DNA repair protein RAD50 (184-192)
  source 1..27: mol_type = other RNA
cgctacatcaaggccctggagaccctc

SEQ ID NO: 46584 - RNA, 30 nt, synthetic construct
  misc_feature 1..30: note = 1,2-dihydroxy-3-keto-5-methylthiopentene dioxygenase (96-105)
  source 1..30: mol_type = other RNA
cgctacatcctggacggcagcgggtacttc

SEQ ID NO: 46585 - RNA, 27 nt, synthetic construct
  misc_feature 1..27: note = Serine/threonine-protein phosphatase 4 regulatory subunit 3B (575-583)
  source 1..27: mol_type = other RNA
cgctacatcaccaagggcaacctgttc

SEQ ID NO: 46586 - RNA, 27 nt, synthetic construct
  misc_feature 1..27: note = HLA class II histocompatibility antigen, DP beta 1 chain (22-30)
  source 1..27: mol_type = other RNA
cgctacatctacaaccgggaggagttc

SEQ ID NO: 46587 - RNA, 27 nt, synthetic construct
  misc_feature 1..27: note = Unconventional myosin-XVIIIa (834-842)
  source 1..27: mol_type = other RNA
cgctacaaggaggagaacatcgagctg

SEQ ID NO: 46588 - RNA, 27 nt, synthetic construct
  misc_feature 1..27: note = Tubulin polyglutamylase TTLL4 (750-758)
  source 1..27: mol_type = other RNA
cgctacctgcacaagccctacctcatc

SEQ ID NO: 46589 - RNA, 27 nt, synthetic construct
  misc_feature 1..27: note = Zinc finger protein 45 (95-103)
  source 1..27: mol_type = other RNA
cgctacctgccccacgaggagctcttc

SEQ ID NO: 46590 - RNA, 27 nt, synthetic construct
  misc_feature 1..27: note = Leucine-rich repeat flightless-interacting protein 2 (360-368)
  source 1..27: mol_type = other RNA
cgctacatgcagggcctgaaggagctc

SEQ ID NO: 46591 - RNA, 24 nt, synthetic construct
  misc_feature 1..24: note = 60S ribosomal protein L28 (39-46)
  source 1..24: mol_type = other RNA
cgctacaacggcctgatccaccgg

SEQ ID NO: 46592 - RNA, 27 nt, synthetic construct
  misc_feature 1..27: note = Leucine-rich repeat transmembrane neuronal protein 3 (444-452)
  source 1..27: mol_type = other RNA
cgctaccccgccagcatgaagcagctg

SEQ ID NO: 46593 - RNA, 27 nt, synthetic construct
  misc_feature 1..27: note = Serine/threonine-protein phosphatase 2A catalytic subunit beta isoform (106-114)
  source 1..27: mol_type = other RNA
cgctaccccgagcggatcaccatcctg

SEQ ID NO: 46594 - RNA, 27 nt, synthetic construct
  misc_feature 1..27: note = SPRY domain-containing protein 3 (41-49)
  source 1..27: mol_type = other RNA
cgctaccaggagcggttcaagcacatc

SEQ ID NO: 46595 - RNA, 27 nt, synthetic construct
  misc_feature 1..27: note = Cation-independent mannose-6-phosphate receptor (1386-1394)
  source 1..27: mol_type = other RNA
cgctacagcgacaactgggaggccatc

SEQ ID NO: 46596 - RNA, 27 nt, synthetic construct
  misc_feature 1..27: note = Phosphatidylcholine translocator ABCB4 (47-55)
  source 1..27: mol_type = other RNA
cgctacagcgactggcaggacaagctg

SEQ ID NO: 46597 - RNA, 30 nt, synthetic construct
  misc_feature 1..30: note = Phosphatidylinositol 3-kinase catalytic subunit type 3 (811-820)
  source 1..30: mol_type = other RNA
cgctacagcaacctgatcctcaacctgttc

SEQ ID NO: 46598 - RNA, 30 nt, synthetic construct
  misc_feature 1..30: note = E3 ubiquitin-protein ligase UBR2 (462-471)
  source 1..30: mol_type = other RNA
cgctacaccgccctgcaggccttcaagttc

SEQ ID NO: 46599 - RNA, 27 nt, synthetic construct
  misc_feature 1..27: note = DnaJ homolog subfamily C member 3 (283-291)
  source 1..27: mol_type = other RNA
cgctacaccgacgccaccagcaagtac

SEQ ID NO: 46600 - RNA, 36 nt, synthetic construct
  misc_feature 1..36: note = E3 ubiquitin-protein ligase HUWE1 (156-167)
  source 1..36: mol_type = other RNA
cgctacaccgacatggagagcgaggactaccacttc

SEQ ID NO: 46601 - RNA, 27 nt, synthetic construct
  misc_feature 1..27: note = Ubiquitin carboxyl-terminal hydrolase 13 (490-498)
  source 1..27: mol_type = other RNA
cgctacaccgagcgggtggactacctg

SEQ ID NO: 46602 - RNA, 27 nt, synthetic construct
  misc_feature 1..27: note = Cullin-1 (190-198)
  source 1..27: mol_type = other RNA
cgctacaccctgcaggccagcaccttc

SEQ ID NO: 46603 - RNA, 27 nt, synthetic construct
  misc_feature 1..27: note = Serine/threonine-protein kinase SMG1 (1394-1402)
  source 1..27: mol_type = other RNA
cgctacaccatgtaccagaaccagctg

SEQ ID NO: 46604 - RNA, 24 nt, synthetic construct
  misc_feature 1..24: note = Rho guanine nucleotide exchange factor 2 (8-15)
  source 1..24: mol_type = other RNA
cgctacaccaacggccacctgttc

SEQ ID NO: 46605 - RNA, 33 nt, synthetic construct
  misc_feature 1..33: note = Rho guanine nucleotide exchange factor 2 (8-18)
  source 1..33: mol_type = other RNA
cgctacaccaacggccacctgttcaccacgatc

SEQ ID NO: 46606 - RNA, 27 nt, synthetic construct
  misc_feature 1..27: note = Cyclin-dependent kinase 9 (184-192)
  source 1..27: mol_type = other RNA
cgctacaccaaccgggtggtcaccctg

SEQ ID NO: 46607 - RNA, 27 nt, synthetic construct
  misc_feature 1..27: note = Chloride channel protein 2 (25-33)
  source 1..27: mol_type = other RNA
cgctacacccaggacctgggcgccttc

SEQ ID NO: 46608 - RNA, 27 nt, synthetic construct
  misc_feature 1..27: note = CDK5 regulatory subunit-associated protein 3 (428-436)
  source 1..27: mol_type = other RNA
cgctacgtggaccgggtcaccgagttc

SEQ ID NO: 46609 - RNA, 27 nt, synthetic construct
  misc_feature 1..27: note = Protein orai-3 (145-153)
  source 1..27: mol_type = other RNA
cgctacgtggagctggcctggggcttc

SEQ ID NO: 46610 - RNA, 27 nt, synthetic construct
  misc_feature 1..27: note = Eukaryotic translation initiation factor 2 subunit 1 (234-242)
  source 1..27: mol_type = other RNA
cgctacgtgatgaccaccacgaccctg

SEQ ID NO: 46611 - RNA, 39 nt, synthetic construct
  misc_feature 1..39: note = HLA class I histocompatibility antigen, B-51 alpha chain (82-94)
  source 1..39: mol_type = other RNA
cgctactacaaccagagcgaggccggctcccacacctgg

SEQ ID NO: 46612 - RNA, 27 nt, synthetic construct
  misc_feature 1..27: note = Homeodomain-interacting protein kinase 2 (365-373)
  source 1..27: mol_type = other RNA
cgctactaccgggcccccgagatcatc

SEQ ID NO: 46613 - RNA, 27 nt, synthetic construct
  misc_feature 1..27: note = Glycogen synthase kinase-3 beta (220-228)
  source 1..27: mol_type = other RNA
cgctactaccgggcccccgagctgatc

SEQ ID NO: 46614 - RNA, 42 nt, synthetic construct
  misc_feature 1..42: note = Motor neuron and pancreas homeobox protein 1 (169-182)
  source 1..42: mol_type = other RNA
agcgccgccgcggccgccgccgccctggcgggccagcacccc

SEQ ID NO: 46615 - RNA, 33 nt, synthetic construct
  misc_feature 1..33: note = AT-rich interactive domain-containing protein 1B (270-280)
  source 1..33: mol_type = other RNA
agcgccgccgcggccggcgcccccgggtccatg

SEQ ID NO: 46616 - RNA, 27 nt, synthetic construct
  misc_feature 1..27: note = Beta-2-syntrophin (491-499)
  source 1..27: mol_type = other RNA
agcgccgacgacggcatccgcaacctg

SEQ ID NO: 46617 - RNA, 30 nt, synthetic construct
  misc_feature 1..30: note = Eukaryotic translation initiation factor 3 subunit K (79-88)
  source 1..30: mol_type = other RNA
agcgccgacgagtccggccagatcttcatc

SEQ ID NO: 46618 - RNA, 81 nt, synthetic construct
  misc_feature 1..81: note = Filamin-B (567-593)
  source 1..81: mol_type = other RNA
agcgccgacttcgtggtcgagtccatcggcagcgaggtggggtccctgggcttcgccatcgaggggcccagccaggcgaag

SEQ ID NO: 46619 - RNA, 24 nt, synthetic construct
  misc_feature 1..24: note = COMM domain-containing protein 4 (177-184)
  source 1..24: mol_type = other RNA
agcgccgacaagttccaggtgctg

SEQ ID NO: 46620 - RNA, 27 nt, synthetic construct
  misc_feature 1..27: note = COMM domain-containing protein 4 (177-185)
  source 1..27: mol_type = other RNA
agcgccgacaagttccaggtgctgctc

SEQ ID NO: 46621 - RNA, 24 nt, synthetic construct
  misc_feature 1..24: note = Transcription factor MafF (16-23)
  source 1..24: mol_type = other RNA
agcgccgaggaggtgacccgcctg

SEQ ID NO: 46622 - RNA, 27 nt, synthetic construct
  misc_feature 1..27: note = E3 SUMO-protein ligase RanBP2 (993-1001)
  source 1..27: mol_type = other RNA
agcgccgagtccaagaccatcgagttc

SEQ ID NO: 46623 - RNA, 27 nt, synthetic construct
  misc_feature 1..27: note = Mucin-19 (2343-2351)
  source 1..27: mol_type = other RNA
agcgccgaggtgtccggccgcatcgag

SEQ ID NO: 46624 - RNA, 51 nt, synthetic construct
  misc_feature 1..51: note = Cytochrome c oxidase subunit 7C, mitochondrial (47-63)
  source 1..51: mol_type = other RNA
agcgccttcgccacccccttcctggtggtccgccaccagctcctgaagacc

SEQ ID NO: 46625 - RNA, 27 nt, synthetic construct
  misc_feature 1..27: note = Ankyrin repeat and KH domain-containing protein 1 (2266-2274)
  source 1..27: mol_type = other RNA
agcgccttcctgggcaactccgtgctc

SEQ ID NO: 46626 - RNA, 27 nt, synthetic construct
  misc_feature 1..27: note = AP-5 complex subunit mu-1 (88-96)
  source 1..27: mol_type = other RNA
agcgccttctccggcccctacaagttc

SEQ ID NO: 46627 - RNA, 93 nt, synthetic construct
  misc_feature 1..93: note = PR domain zinc finger protein 8 (458-488)
  source 1..93: mol_type = other RNA
agcgccttcacctccgtgccccagctgggcagcgccgggtccaccagcggcgggggcgggacgggcgcgggcgccgccgggggcgccgggggc

SEQ ID NO: 46628 - RNA, 21 nt, synthetic construct
  misc_feature 1..21: note = Transmembrane emp24 domain-containing protein 10 (79-85)
  source 1..21: mol_type = other RNA
agcgccggccacatcctgtac

SEQ ID NO: 46629 - RNA, 48 nt, synthetic construct
  misc_feature 1..48: note = Laminin subunit gamma-1 (664-679)
  source 1..48: mol_type = other RNA
agcgccggctacctggacgacgtgaccctcgcctccgcgcgccccggg

SEQ ID NO: 46630 - RNA, 51 nt, synthetic construct
  misc_feature 1..51: note = Laminin subunit gamma-1 (664-680)
  source 1..51: mol_type = other RNA
agcgccggctacctggacgacgtgaccctcgcctccgcgcgccccgggccg

SEQ ID NO: 46631 - RNA, 54 nt, synthetic construct
  misc_feature 1..54: note = Laminin subunit gamma-1 (664-681)
  source 1..54: mol_type = other RNA
agcgccggctacctggacgacgtgaccctcgcctccgcgcgccccgggccgggc

SEQ ID NO: 46632 - RNA, 24 nt, synthetic construct
  misc_feature 1..24: note = Nuclear factor of activated T-cells, cytoplasmic 2 (354-361)
  source 1..24: mol_type = other RNA
agcgcccacgagctgcccatggtg

SEQ ID NO: 46633 - RNA, 27 nt, synthetic construct
  misc_feature 1..27: note = Armadillo repeat-containing protein 1 (96-104)
  source 1..27: mol_type = other RNA
agcgccatcgcctccaccaaggtgatg

SEQ ID NO: 46634 - RNA, 27 nt, synthetic construct
  misc_feature 1..27: note = Tripeptidyl-peptidase 1 (315-323)
  source 1..27: mol_type = other RNA
agcgccctgccccacgtgcacaccgtc

SEQ ID NO: 46635 - RNA, 42 nt, synthetic construct
  misc_feature 1..42: note = 3-hydroxy-3-methylglutaryl-coenzyme A reductase (687-700)
  source 1..42: mol_type = other RNA
agcgccatggccggctccatcgggggctacaacgcgcacgcc

SEQ ID NO: 46636 - RNA, 27 nt, synthetic construct
  misc_feature 1..27: note = Phosphoglucomutase-1 (263-271)
  source 1..27: mol_type = other RNA
agcgccaacgacaaggtgtacaccgtc

SEQ ID NO: 46637 - RNA, 30 nt, synthetic construct
  misc_feature 1..30: note = WD repeat and FYVE domain-containing protein 3 (1236-1245)
  source 1..30: mol_type = other RNA
agcgccaaccccccggtggtctccaccgtg

SEQ ID NO: 46638 - RNA, 24 nt, synthetic construct
  misc_feature 1..24: note = Serine/threonine-protein phosphatase 2A regulatory subunit B'' subunit gamma (114-121)
  source 1..24: mol_type = other RNA
agcgccccctccgccctgcgcgtg

SEQ ID NO: 46639 - RNA, 27 nt, synthetic construct
  misc_feature 1..27: note = Microtubule-associated protein 9 (372-380)
  source 1..27: mol_type = other RNA
agcgcccgcctgatgacctccgagttc

SEQ ID NO: 46640 - RNA, 27 nt, synthetic construct
  misc_feature 1..27: note = Importin-5 (974-982)
  source 1..27: mol_type = other RNA
agcgccgtgggcaagatcatgaagttc

SEQ ID NO: 46641 - RNA, 30 nt, synthetic construct
  misc_feature 1..30: note = Transcription factor SOX-10 (331-340)
  source 1..30: mol_type = other RNA
agcgcctggatctccaagcccccgggcgtg

SEQ ID NO: 46642 - RNA, 27 nt, synthetic construct
  misc_feature 1..27: note = Nuclear export mediator factor NEMF (468-476)
  source 1..27: mol_type = other RNA
agcgcctacgccaacgcgaagaagtac

SEQ ID NO: 46643 - RNA, 24 nt, synthetic construct
  misc_feature 1..24: note = Zinc finger MYM-type protein 4 (449-456)
  source 1..24: mol_type = other RNA
agcgcctaccgcgtgaagatggtc

SEQ ID NO: 46644 - RNA, 27 nt, synthetic construct
  misc_feature 1..27: note = Small subunit processome component 20 homolog (1418-1426)
  source 1..27: mol_type = other RNA
agcgacttcgagtccggcctgaagtac

SEQ ID NO: 46645 - RNA, 21 nt, synthetic construct
  misc_feature 1..21: note = Fas apoptotic inhibitory molecule 1 (47-53)
  source 1..21: mol_type = other RNA
agcgacggcgtgcacaagatc

SEQ ID NO: 46646 - RNA, 21 nt, synthetic construct
  misc_feature 1..21: note = Fructose-bisphosphate aldolase A (272-278)
  source 1..21: mol_type = other RNA
agcgaccaccacatctacctg

SEQ ID NO: 46647 - RNA, 51 nt, synthetic construct
  misc_feature 1..51: note = Galectin-3-binding protein (311-327)
  source 1..51: mol_type = other RNA
agcgacctggccgtgccctccgagctcgccctgctgaaggcggtcgacacc

SEQ ID NO: 46648 - RNA, 87 nt, synthetic construct
  misc_feature 1..87: note = HLA class I histocompatibility antigen, A-23 alpha chain (337-365)
  source 1..87: mol_type = other RNA
agcgaccgcaagggcgggtcctacagccaggccgcctccagcgactccgcgcagggcagcgacgtgtccctgaccgcctgcaaggtc

SEQ ID NO: 46649 - RNA, 48 nt, synthetic construct
  misc_feature 1..48: note = HLA class I histocompatibility antigen, A-23 alpha chain (350-365)
  source 1..48: mol_type = other RNA
agcgactccgcccagggcagcgacgtgtccctgaccgcctgcaaggtc

SEQ ID NO: 46650 - RNA, 27 nt, synthetic construct
  misc_feature 1..27: note = Immunoglobulin superfamily member 3 (355-363)
  source 1..27: mol_type = other RNA
agcgactccgtgttcgtcctgaagatc

SEQ ID NO: 46651 - RNA, 30 nt, synthetic construct
  misc_feature 1..30: note = HLA class I histocompatibility antigen, A-23 alpha chain (356-365)
  source 1..30: mol_type = other RNA
agcgacgtgtccctgaccgcctgcaaggtc

SEQ ID NO: 46652 - RNA, 30 nt, synthetic construct
  misc_feature 1..30: note = Kelch repeat and BTB domain-containing protein 6 (137-146)
  source 1..30: mol_type = other RNA
agcgaggccaacgtggagcgcctgtacgcc

SEQ ID NO: 46653 - RNA, 27 nt, synthetic construct
  misc_feature 1..27: note = YTH domain-containing family protein 1 (301-309)
  source 1..27: mol_type = other RNA
agcgaggacgacatccaccgctccatc

SEQ ID NO: 46654 - RNA, 27 nt, synthetic construct
  misc_feature 1..27: note = RNA-binding protein 28 (126-134)
  source 1..27: mol_type = other RNA
agcgaggacgacctgaagaccgtgttc

SEQ ID NO: 46655 - RNA, 27 nt, synthetic construct
  misc_feature 1..27: note = Sister chromatid cohesion protein PDS5 homolog A (59-67)
  source 1..27: mol_type = other RNA
agcgaggacgagaagcagcagtacctg

SEQ ID NO: 46656 - RNA, 27 nt, synthetic construct
  misc_feature 1..27: note = Hermansky-Pudlak syndrome 5 protein (476-484)
  source 1..27: mol_type = other RNA
agcgaggacgagcgcttcaaggagttc

SEQ ID NO: 46657 - RNA, 27 nt, synthetic construct
  misc_feature 1..27: note = Ras-specific guanine nucleotide-releasing factor RalGPS2 (420-428)
  source 1..27: mol_type = other RNA
agcgaggacctggccgtgcacctctac

SEQ ID NO: 46658 - RNA, 30 nt, synthetic construct
  misc_feature 1..30: note = Peptidyl-prolyl cis-trans isomerase FKBP9 (197-206)
  source 1..30: mol_type = other RNA
agcgaggaccaggtgcagatccacacctac

SEQ ID NO: 46659 - RNA, 27 nt, synthetic construct
  misc_feature 1..27: note = WD repeat-containing protein 6 (258-266)
  source 1..27: mol_type = other RNA
agcgaggaccgctccgtgcggatctgg

SEQ ID NO: 46660 - RNA, 27 nt, synthetic construct
  misc_feature 1..27: note = Thioredoxin-like protein 4A (20-28)
  source 1..27: mol_type = other RNA
agcgaggaggaccgcgtggtcgtgatc

SEQ ID NO: 46661 - RNA, 27 nt, synthetic construct
  misc_feature 1..27: note = Vacuolar protein sorting-associated protein 41 homolog (24-32)
  source 1..27: mol_type = other RNA
agcgaggaggagcccaagctgaagtac

SEQ ID NO: 46662 - RNA, 30 nt, synthetic construct
  misc_feature 1..30: note = Protocadherin Fat 1 (2947-2956)
  source 1..30: mol_type = other RNA
agcgaggagatcaaccgccaggtgacctac

SEQ ID NO: 46663 - RNA, 27 nt, synthetic construct
  misc_feature 1..27: note = Thioredoxin-related transmembrane protein 2 (247-255)
  source 1..27: mol_type = other RNA
agcgaggagaacgtgatccgcgagttc

SEQ ID NO: 46664 - RNA, 21 nt, synthetic construct
  misc_feature 1..21: note = 26S proteasome non-ATPase regulatory subunit 13 (65-71)
  source 1..21: mol_type = other RNA
agcgagttcgagcaccgcgtg

SEQ ID NO: 46665 - RNA, 27 nt, synthetic construct
  misc_feature 1..27: note = Protein PRR14L (1206-1214)
  source 1..27: mol_type = other RNA
agcgagttcggcaaggagtccaccttc

SEQ ID NO: 46666 - RNA, 30 nt, synthetic construct
  misc_feature 1..30: note = Aldehyde dehydrogenase family 1 member A3 (328-337)
  source 1..30: mol_type = other RNA
agcgagttcgtgcgccggtccgtcgagtac

SEQ ID NO: 46667 - RNA, 27 nt, synthetic construct
  misc_feature 1..27: note = Alpha-parvin (149-157)
  source 1..27: mol_type = other RNA
agcgagatcgcccagaagcagaagctg

SEQ ID NO: 46668 - RNA, 30 nt, synthetic construct
  misc_feature 1..30: note = Microtubule cross-linking factor 1 (653-662)
  source 1..30: mol_type = other RNA
agcgagatcgaggaccacaaccgccagctg

SEQ ID NO: 46669 - RNA, 27 nt, synthetic construct
  misc_feature 1..27: note = Protein AHNAK2 (1652-1660)
  source 1..27: mol_type = other RNA
agcgagatcgagggcaacgtgaccttc

SEQ ID NO: 46670 - RNA, 30 nt, synthetic construct
  misc_feature 1..30: note = Manganese-transporting ATPase 13A1 (95-104)
  source 1..30: mol_type = other RNA
agcgagatccgcgccgccgagaagaagttc

SEQ ID NO: 46671 - RNA, 27 nt, synthetic construct
  misc_feature 1..27: note = Vesicle transport protein USE1 (81-89)
  source 1..27: mol_type = other RNA
agcgagaaggccctggccaaccagttc

SEQ ID NO: 46672 - RNA, 30 nt, synthetic construct
  misc_feature 1..30: note = Centromere protein F (130-139)
  source 1..30: mol_type = other RNA
agcgagctggacaagctcctgtccagcttc

SEQ ID NO: 46673 - RNA, 36 nt, synthetic construct
  misc_feature 1..36: note = Proline-rich protein 12 (622-633)
  source 1..36: mol_type = other RNA
agcgagctgctcgccggccccgggggcccgcccgcc

SEQ ID NO: 46674 - RNA, 30 nt, synthetic construct
  misc_feature 1..30: note = LisH domain-containing protein ARMC9 (9-18)
  source 1..30: mol_type = other RNA
agcgagctgctcggcctggtgaaggagtac

SEQ ID NO: 46675 - RNA, 27 nt, synthetic construct
  misc_feature 1..27: note = T-box transcription factor TBX3 (698-706)
  source 1..27: mol_type = other RNA
agcgagctgcagtccatccagcgcctc

SEQ ID NO: 46676 - RNA, 27 nt, synthetic construct
  misc_feature 1..27: note = Sal-like protein 1 (1206-1214)
  source 1..27: mol_type = other RNA
agcgagaacggcaccaacttccgcttc

SEQ ID NO: 46677 - RNA, 105 nt, synthetic construct
  misc_feature 1..105: note = Glia-derived nexin (342-376)
  source 1..105: mol_type = other RNA
agcgagaacctgcacgtgtcccacatcctccagaaggccaagatcgaggtcagcgaggacggcaccaaggcctccgcggccaccacggccatcctgatcgcccgc

SEQ ID NO: 46678 - RNA, 27 nt, synthetic construct
  misc_feature 1..27: note = H/ACA ribonucleoprotein complex subunit 1 (130-138)
  source 1..27: mol_type = other RNA
agcgagaacatgaaggcctccagcttc

SEQ ID NO: 46679 - RNA, 27 nt, synthetic construct
  misc_feature 1..27: note = Plectin (3824-3832)
  source 1..27: mol_type = other RNA
agcgagccctccgaggtgcgcagctac

SEQ ID NO: 46680 - RNA, 27 nt, synthetic construct
  misc_feature 1..27: note = Integrin alpha-3 (534-542)
  source 1..27: mol_type = other RNA
agcgagtccgccgtgttccacggcttc

SEQ ID NO: 46681 - RNA, 30 nt, synthetic construct
  misc_feature 1..30: note = Arfaptin-1 (44-53)
  source 1..30: mol_type = other RNA
agcgagacccagatcacctcccacggcttc

SEQ ID NO: 46682 - RNA, 27 nt, synthetic construct
  misc_feature 1..27: note = Laminin subunit gamma-1 (617-625)
  source 1..27: mol_type = other RNA
agcgagaccaccgtgaagtacgtcttc

SEQ ID NO: 46683 - RNA, 27 nt, synthetic construct
  misc_feature 1..27: note = Plexin-B2 (30-38)
  source 1..27: mol_type = other RNA
agcgagaccgtggtcgagcgcatgctg

SEQ ID NO: 46684 - RNA, 30 nt, synthetic construct
  misc_feature 1..30: note = U5 small nuclear ribonucleoprotein 200 kDa helicase (1230-1239)
  source 1..30: mol_type = other RNA
agcgaggtgatcctgcaccacgagtacttc

SEQ ID NO: 46685 - RNA, 24 nt, synthetic construct
  misc_feature 1..24: note = Eukaryotic translation initiation factor 3 subunit D (444-451)
  source 1..24: mol_type = other RNA
agcgagtacctgaagctcggctac

SEQ ID NO: 46686 - RNA, 27 nt, synthetic construct
  misc_feature 1..27: note = Homeobox protein Hox-D9 (57-65)
  source 1..27: mol_type = other RNA
agcttcgccccccgctccgccgtgttc

SEQ ID NO: 46687 - RNA, 27 nt, synthetic construct
  misc_feature 1..27: note = Renin receptor (256-264)
  source 1..27: mol_type = other RNA
agcttcgacacctccctgatccgcaag

SEQ ID NO: 46688 - RNA, 24 nt, synthetic construct
  misc_feature 1..24: note = Liprin-beta-1 (507-514)
  source 1..24: mol_type = other RNA
agcttcggccgcgggttcttcaag

SEQ ID NO: 46689 - RNA, 27 nt, synthetic construct
  misc_feature 1..27: note = Zinc finger protein 697 (92-100)
  source 1..27: mol_type = other RNA
agcttcatccagtccagccacctgatc

SEQ ID NO: 46690 - RNA, 30 nt, synthetic construct
  misc_feature 1..30: note = High affinity cationic amino acid transporter 1 (57-66)
  source 1..30: mol_type = other RNA
agcttcctgatcgccgccctcgcgtccgtg

SEQ ID NO: 46691 - RNA, 24 nt, synthetic construct
  misc_feature 1..24: note = Immediate early response gene 5 protein (276-283)
  source 1..24: mol_type = other RNA
agcttctccggcctgctccgcaag

SEQ ID NO: 46692 - RNA, 27 nt, synthetic construct
  misc_feature 1..27: note = Zinc finger protein 175 (287-295)
  source 1..27: mol_type = other RNA
agcttcacccagaagtcccacctgttc

SEQ ID NO: 46693 - RNA, 69 nt, synthetic construct
  misc_feature 1..69: note = Eukaryotic peptide chain release factor GTP-binding subunit ERF3A (163-185)
  source 1..69: mol_type = other RNA
agcttcgtgcccaacatgatcggcggggcctcccaggccgacctggcggtcctcgtgatcagcgcccgc

SEQ ID NO: 46694 - RNA, 42 nt, synthetic construct
  misc_feature 1..42: note = Protein HEG homolog 1 (148-161)
  source 1..42: mol_type = other RNA
agcggcgacttccagatgtccccctacgccgagtacccgaag

SEQ ID NO: 46695 - RNA, 51 nt, synthetic construct
  misc_feature 1..51: note = Protein HEG homolog 1 (148-164)
  source 1..51: mol_type = other RNA
agcggcgacttccagatgtccccctacgccgagtacccgaagaacccccgc

SEQ ID NO: 46696 - RNA, 27 nt, synthetic construct
  misc_feature 1..27: note = Trabeculin-alpha (4239-4247)
  source 1..27: mol_type = other RNA
agcggcgaccccaaggtgatcgaggtc

SEQ ID NO: 46697 - RNA, 27 nt, synthetic construct
  misc_feature 1..27: note = Nicastrin (47-55)
  source 1..27: mol_type = other RNA
agcggcgacaccggggtgatccacgtc

SEQ ID NO: 46698 - RNA, 27 nt, synthetic construct
  misc_feature 1..27: note = Bifunctional apoptosis regulator (310-318)
  source 1..27: mol_type = other RNA
agcggcgaggacatcgtgaccaagctg

SEQ ID NO: 46699 - RNA, 66 nt, synthetic construct
  misc_feature 1..66: note = Beta-enolase (330-351)
  source 1..66: mol_type = other RNA
agcggcgagaccgaggacaccttcatcgccgacctggtggtcgggctctgcacgggccagatcaag

SEQ ID NO: 46700 - RNA, 54 nt, synthetic construct
  misc_feature 1..54: note = Putative ATP-dependent RNA helicase DHX57 (36-53)
  source 1..54: mol_type = other RNA
agcggcgggggcgggggcgggggcggcgggggcgggggcgggaaccgcaaggcc

SEQ ID NO: 46701 - RNA, 39 nt, synthetic construct
  misc_feature 1..39: note = Signal recognition particle subunit SRP68 (27-39)
  source 1..39: mol_type = other RNA
agcggcgggggccgcggggccggcggggaggagaacaag

SEQ ID NO: 46702 - RNA, 27 nt, synthetic construct
  misc_feature 1..27: note = Elongation factor 2 (418-426)
  source 1..27: mol_type = other RNA
agcggcctggtgtccaccgggctcaag

SEQ ID NO: 46703 - RNA, 27 nt, synthetic construct
  misc_feature 1..27: note = ATP-dependent RNA helicase DDX39A (90-98)
  source 1..27: mol_type = other RNA
agcggcatggggaagaccgccgtgttc

SEQ ID NO: 46704 - RNA, 45 nt, synthetic construct
  misc_feature 1..45: note = Collagen alpha-1(III) chain (60-74)
  source 1..45: mol_type = other RNA
agcggccccaagggggacgccggccagccgggggagaagggctcc

SEQ ID NO: 46705 - RNA, 48 nt, synthetic construct
  misc_feature 1..48: note = Phosphatidylethanolamine-binding protein 1 (9-24)
  source 1..48: mol_type = other RNA
agcggccccctgtccctccaggaggtggacgagcagccgcagcacccc

SEQ ID NO: 46706 - RNA, 42 nt, synthetic construct
  misc_feature 1..42: note = Laminin subunit alpha-4 (576-589)
  source 1..42: mol_type = other RNA
agccacgacctggtgcaggaggccatcgaccacgcccaggac

SEQ ID NO: 46707 - RNA, 30 nt, synthetic construct
  misc_feature 1..30: note = Protein phosphatase 1J (227-236)
  source 1..30: mol_type = other RNA
agccacgagtccctggtggtcggcgccgtg

SEQ ID NO: 46708 - RNA, 30 nt, synthetic construct
  misc_feature 1..30: note = Protein unc-93 homolog B1 (264-273)
  source 1..30: mol_type = other RNA
agccacggcatcctgtccgggttcaacaag

SEQ ID NO: 46709 - RNA, 27 nt, synthetic construct
  misc_feature 1..27: note = Plasma protease C1 inhibitor (350-358)
  source 1..27: mol_type = other RNA
agccacaacctgtccctcgtgatcctg

SEQ ID NO: 46710 - RNA, 21 nt, synthetic construct
  misc_feature 1..21: note = Protein phosphatase 1 regulatory subunit 3F (177-183)
  source 1..21: mol_type = other RNA
agccaccccctgggcatcctc

SEQ ID NO: 46711 - RNA, 54 nt, synthetic construct
  misc_feature 1..54: note = Cytochrome c oxidase subunit 7C, mitochondrial (17-34)
  source 1..54: mol_type = other RNA
agccactacgaggagggccccgggaagaacctgccgttctccgtggagaacaag

SEQ ID NO: 46712 - RNA, 69 nt, synthetic construct
  misc_feature 1..69: note = Cytochrome c oxidase subunit 7C, mitochondrial (17-39)
  source 1..69: mol_type = other RNA
agccactacgaggagggccccgggaagaacctgccgttctccgtggagaacaagtggagcctcctggcc

SEQ ID NO: 46713 - RNA, 141 nt, synthetic construct
  misc_feature 1..141: note = Cytochrome c oxidase subunit 7C, mitochondrial (17-63)
  source 1..141: mol_type = other RNA
agccactacgaggagggccccgggaagaacctgccgttctccgtggagaacaagtggagcctcctggccaagatgtgcctgtacttcggctccgccttcgcgacccccttcctcgtcgtgcgccaccagctgctgaagacc

SEQ ID NO: 46714 - RNA, 27 nt, synthetic construct
  misc_feature 1..27: note = Clustered mitochondria protein homolog (225-233)
  source 1..27: mol_type = other RNA
agcatcgacttcggcaagaccgtggtc

SEQ ID NO: 46715 - RNA, 27 nt, synthetic construct
  misc_feature 1..27: note = Charged multivesicular body protein 5 (30-38)
  source 1..27: mol_type = other RNA
agcatcgacaagaagatctcccgcctg

SEQ ID NO: 46716 - RNA, 27 nt, synthetic construct
  misc_feature 1..27: note = Nodal modulator 3 (272-280)
  source 1..27: mol_type = other RNA
agcatcgactccgagcccgccctggtg

SEQ ID NO: 46717 - RNA, 27 nt, synthetic construct
  misc_feature 1..27: note = Eukaryotic translation initiation factor 4 gamma 1 (1038-1046)
  source 1..27: mol_type = other RNA
agcatcgactccaacaaccagctgttc

SEQ ID NO: 46718 - RNA, 30 nt, synthetic construct
  misc_feature 1..30: note = Vacuolar protein sorting-associated protein 13B (1953-1962)
  source 1..30: mol_type = other RNA
agcatcttcgacgccgtgctgaagggcgtc

SEQ ID NO: 46719 - RNA, 27 nt, synthetic construct
  misc_feature 1..27: note = Transmembrane channel-like protein 4 (391-399)
  source 1..27: mol_type = other RNA
agcatcttcatcgccggcgtgaacttc

SEQ ID NO: 46720 - RNA, 27 nt, synthetic construct
  misc_feature 1..27: note = Nischarin (214-222)
  source 1..27: mol_type = other RNA
agcatcttcaagtccctgcaccaggtg

SEQ ID NO: 46721 - RNA, 27 nt, synthetic construct
  misc_feature 1..27: note = Adenylate kinase 9 (1441-1449)
  source 1..27: mol_type = other RNA
agcatcggcggggccctgcgctacgtg

SEQ ID NO: 46722 - RNA, 27 nt, synthetic construct
  misc_feature 1..27: note = Protein ELYS (1701-1709)
  source 1..27: mol_type = other RNA
agcatccacgagaccatccccctggtg

SEQ ID NO: 46723 - RNA, 27 nt, synthetic construct
  misc_feature 1..27: note = Hom s 5 (332-340)
  source 1..27: mol_type = other RNA
agcatcatcgccgaggtgaaggcccag

SEQ ID NO: 46724 - RNA, 30 nt, synthetic construct
  misc_feature 1..30: note = Zinc finger E-box-binding homeobox 2 (500-509)
  source 1..30: mol_type = other RNA
agcatcatcgactacaccctggagaaggtg

SEQ ID NO: 46725 - RNA, 30 nt, synthetic construct
  misc_feature 1..30: note = Poly(rC)-binding protein 2 (27-36)
  source 1..30: mol_type = other RNA
agcatcatcggcaagaagggggagtccgtg

SEQ ID NO: 46726 - RNA, 165 nt, synthetic construct
  misc_feature 1..165: note = 6.8 kDa mitochondrial proteolipid (4-58)
  source 1..165: mol_type = other RNA
agcatcatcaagaacatctggatccccatgaagccgtactacaccaaggtgtaccaggagatctggatcggcatggggctgatgggcttcatcgtctacaagatccgcgccgccgacaagcggtccaaggcgctcaaggccagcgcccccgcccccgggcaccac

SEQ ID NO: 46727 - RNA, 27 nt, synthetic construct
  misc_feature 1..27: note = Neuron navigator 2 (1370-1378)
  source 1..27: mol_type = other RNA
agcatcatcccctacctgctcgaggcc

SEQ ID NO: 46728 - RNA, 27 nt, synthetic construct
  misc_feature 1..27: note = Protein transport protein Sec23B (625-633)
  source 1..27: mol_type = other RNA
agcatcctggccgaccgcatcctcctg

SEQ ID NO: 46729 - RNA, 27 nt, synthetic construct
  misc_feature 1..27: note = Raftlin-2 (58-66)
  source 1..27: mol_type = other RNA
agcatcctggacatcgtgaccaaggtc

SEQ ID NO: 46730 - RNA, 27 nt, synthetic construct
  misc_feature 1..27: note = Tripartite motif-containing protein 2 (120-128)
  source 1..27: mol_type = other RNA
agcatcctggagaccgtgaccgccgtc

SEQ ID NO: 46731 - RNA, 27 nt, synthetic construct
  misc_feature 1..27: note = N6-adenosine-methyltransferase 70 kDa subunit (384-392)
  source 1..27: mol_type = other RNA
agcatcctgggcaagttcgccgtggtc

SEQ ID NO: 46732 - RNA, 69 nt, synthetic construct
  misc_feature 1..69: note = Heat shock cognate 71 kDa protein (362-384)
  source 1..69: mol_type = other RNA
agcatcaaccccgacgaggccgtggcctacggcgcggccgtccaggccgccatcctgtccggggacaag

SEQ ID NO: 46733 - RNA, 27 nt, synthetic construct
  misc_feature 1..27: note = Eukaryotic translation initiation factor 4 gamma 1 (244-252)
  source 1..27: mol_type = other RNA
agcatccccggcgacaccatgaccacg

SEQ ID NO: 46734 - RNA, 27 nt, synthetic construct
  misc_feature 1..27: note = Cyclic AMP-dependent transcription factor ATF-6 alpha (178-186)
  source 1..27: mol_type = other RNA
agcatccagcccaagccgctgctcctg

SEQ ID NO: 46735 - RNA, 27 nt, synthetic construct
  misc_feature 1..27: note = E3 ubiquitin-protein ligase UBR5 (550-558)
  source 1..27: mol_type = other RNA
agcatctccgccggcatccccaaggtg

SEQ ID NO: 46736 - RNA, 27 nt, synthetic construct
  misc_feature 1..27: note = Tuberin (341-349)
  source 1..27: mol_type = other RNA
agcatcacccgcctgatcaagaagtac

SEQ ID NO: 46737 - RNA, 27 nt, synthetic construct
  misc_feature 1..27: note = ATP-dependent DNA helicase Q1 (13-21)
  source 1..27: mol_type = other RNA
agcatcacctccgagctgcacgccgtg

SEQ ID NO: 46738 - RNA, 30 nt, synthetic construct
  misc_feature 1..30: note = Alpha-2-macroglobulin (161-170)
  source 1..30: mol_type = other RNA
agcatctacaagcccggccagaccgtgaag

SEQ ID NO: 46739 - RNA, 63 nt, synthetic construct
  misc_feature 1..63: note = Heat shock protein HSP 90-beta (408-428)
  source 1..63: mol_type = other RNA
agcatctactacatcaccggcgagtccaaggagcaggtggccaacagcgccttcgtcgagcgc

SEQ ID NO: 46740 - RNA, 27 nt, synthetic construct
  misc_feature 1..27: note = Pre-mRNA-processing-splicing factor 8 (1179-1187)
  source 1..27: mol_type = other RNA
agcaaggacaaccccaacctgctcttc

SEQ ID NO: 46741 - RNA, 24 nt, synthetic construct
  misc_feature 1..24: note = Histone-lysine N-methyltransferase SETDB1 (427-434)
  source 1..24: mol_type = other RNA
agcaagggccccgtggtccagtac

SEQ ID NO: 46742 - RNA, 21 nt, synthetic construct
  misc_feature 1..21: note = Histone deacetylase 1 (88-94)
  source 1..21: mol_type = other RNA
agcaagcagatgcagcgcttc

SEQ ID NO: 46743 - RNA, 27 nt, synthetic construct
  misc_feature 1..27: note = AT-rich interactive domain-containing protein 1A (1821-1829)
  source 1..27: mol_type = other RNA
agcctggccgcccgcgcgatcgccgtg

SEQ ID NO: 46744 - RNA, 39 nt, synthetic construct
  misc_feature 1..39: note = Tenascin (1578-1590)
  source 1..39: mol_type = other RNA
agcctggccgacctctcccccagcacccactacaccgcc

SEQ ID NO: 46745 - RNA, 33 nt, synthetic construct
  misc_feature 1..33: note = Integrin alpha-7 (461-471)
  source 1..33: mol_type = other RNA
agcctggccgacaccgccgtgctcttccgcgcg

SEQ ID NO: 46746 - RNA, 33 nt, synthetic construct
  misc_feature 1..33: note = Melanocyte protein PMEL (577-587)
  source 1..33: mol_type = other RNA
agcctggccgacaccaactccctcgccgtggtc

SEQ ID NO: 46747 - RNA, 27 nt, synthetic construct
  misc_feature 1..27: note = Sestrin-2 (190-198)
  source 1..27: mol_type = other RNA
agcctggccgagctcatccaggccctg

SEQ ID NO: 46748 - RNA, 27 nt, synthetic construct
  misc_feature 1..27: note = Fatty acid synthase (2500-2508)
  source 1..27: mol_type = other RNA
agcctggccgagccccgcgtgtccgtc

SEQ ID NO: 46749 - RNA, 33 nt, synthetic construct
  misc_feature 1..33: note = Ankyrin-2 (84-94)
  source 1..33: mol_type = other RNA
agcctggccggccaggccgaggtggtcaaggtg

SEQ ID NO: 46750 - RNA, 27 nt, synthetic construct
  misc_feature 1..27: note = Putative WAS protein family homolog 3 (9-17)
  source 1..27: mol_type = other RNA
agcctggccggccagacctacgccgtg

SEQ ID NO: 46751 - RNA, 27 nt, synthetic construct
  misc_feature 1..27: note = Transmembrane protein 25 isoform 5 (201-209)
  source 1..27: mol_type = other RNA
agcctggcccacaacctctccgtggtc

SEQ ID NO: 46752 - RNA, 30 nt, synthetic construct
  misc_feature 1..30: note = T-complex protein 1 subunit beta (5-14)
  source 1..30: mol_type = other RNA
agcctggcccccgtgaacatcttcaaggcc

SEQ ID NO: 46753 - RNA, 30 nt, synthetic construct
  misc_feature 1..30: note = Hermansky-Pudlak syndrome 4 protein (570-579)
  source 1..30: mol_type = other RNA
agcctggcctccctcaacggcctggaggtg

SEQ ID NO: 46754 - RNA, 27 nt, synthetic construct
  misc_feature 1..27: note = Inversin (13-21)
  source 1..27: mol_type = other RNA
agcctggcctcccaggtgcacgccgcg

SEQ ID NO: 46755 - RNA, 30 nt, synthetic construct
  misc_feature 1..30: note = Serine/threonine-protein kinase SMG1 (1090-1099)
  source 1..30: mol_type = other RNA
agcctggcctccgtgatcatcagcgccctc

SEQ ID NO: 46756 - RNA, 27 nt, synthetic construct
  misc_feature 1..27: note = Unconventional myosin-Ic (701-709)
  source 1..27: mol_type = other RNA
agcctggccaccaagatccaggccgcg

SEQ ID NO: 46757 - RNA, 27 nt, synthetic construct
  misc_feature 1..27: note = Growth factor receptor-bound protein 10 (498-506)
  source 1..27: mol_type = other RNA
agcctggacgacggcaacaccaagttc

SEQ ID NO: 46758 - RNA, 33 nt, synthetic construct
  misc_feature 1..33: note = L-dopachrome tautomerase (288-298)
  source 1..33: mol_type = other RNA
agcctggacgactacaaccacctcgtgaccctg

SEQ ID NO: 46759 - RNA, 30 nt, synthetic construct
  misc_feature 1..30: note = Proline-rich protein 12 (709-718)
  source 1..30: mol_type = other RNA
agcctggacgagggcgccaccgccgcgctc

SEQ ID NO: 46760 - RNA, 27 nt, synthetic construct
  misc_feature 1..27: note = Heat shock protein 105 kDa (204-212)
  source 1..27: mol_type = other RNA
agcctggacgagaagccccgcatcgtg

SEQ ID NO: 46761 - RNA, 27 nt, synthetic construct
  misc_feature 1..27: note = Adenomatous polyposis coli protein (1410-1418)
  source 1..27: mol_type = other RNA
agcctggacgagcccttcatccagaag

SEQ ID NO: 46762 - RNA, 30 nt, synthetic construct
  misc_feature 1..30: note = Sister chromatid cohesion protein PDS5 homolog A (493-502)
  source 1..30: mol_type = other RNA
agcctggaccccaacgccgtgaaggccctc

SEQ ID NO: 46763 - RNA, 27 nt, synthetic construct
  misc_feature 1..27: note = Regulator of G-protein signaling 20 (174-182)
  source 1..27: mol_type = other RNA
agcctggactcccgcgtgcgggaggtc

SEQ ID NO: 46764 - RNA, 27 nt, synthetic construct
  misc_feature 1..27: note = Protein AHNAK2 (497-505)
  source 1..27: mol_type = other RNA
agcctggacgtgtccgcccccaaggtc

SEQ ID NO: 46765 - RNA, 33 nt, synthetic construct
  misc_feature 1..33: note = Importin subunit alpha-4 (6-16)
  source 1..33: mol_type = other RNA
agcctggagaaccaccgcatcaagtccttcaag

SEQ ID NO: 46766 - RNA, 27 nt, synthetic construct
  misc_feature 1..27: note = mRNA cap guanine-N7 methyltransferase (14-22)
  source 1..27: mol_type = other RNA
agcctggagcaggccaaggcctccgtg

SEQ ID NO: 46767 - RNA, 30 nt, synthetic construct
  misc_feature 1..30: note = Cytokine receptor common subunit beta (667-676)
  source 1..30: mol_type = other RNA
agcctggagtccggcgggggccccgccccg

SEQ ID NO: 46768 - RNA, 27 nt, synthetic construct
  misc_feature 1..27: note = G-protein coupled receptor 56 (216-224)
  source 1..27: mol_type = other RNA
agcctggagtccaagctcaccagcgtg

SEQ ID NO: 46769 - RNA, 36 nt, synthetic construct
  misc_feature 1..36: note = Tetratricopeptide repeat protein 28 (808-819)
  source 1..36: mol_type = other RNA
agcctgttcgacctccagacctccagctaccaggcc

SEQ ID NO: 46770 - RNA, 30 nt, synthetic construct
  misc_feature 1..30: note = WD repeat-containing protein 27 (376-385)
  source 1..30: mol_type = other RNA
agcctgttcggcgggaagatcgccgtgctc

SEQ ID NO: 46771 - RNA, 21 nt, synthetic construct
  misc_feature 1..21: note = Four and a half LIM domains protein 2 (123-129)
  source 1..21: mol_type = other RNA
agcctgttcggcaagaagtac

SEQ ID NO: 46772 - RNA, 27 nt, synthetic construct
  misc_feature 1..27: note = Four and a half LIM domains protein 2 (123-131)
  source 1..27: mol_type = other RNA
agcctgttcggcaagaagtacatcctc

SEQ ID NO: 46773 - RNA, 27 nt, synthetic construct
  misc_feature 1..27: note = Mannosyl-oligosaccharide 1,2-alpha-mannosidase IA (231-239)
  source 1..27: mol_type = other RNA
agcctgttcggcaacatcaagggggcc

SEQ ID NO: 46774 - RNA, 27 nt, synthetic construct
  misc_feature 1..27: note = Plectin (6-14)
  source 1..27: mol_type = other RNA
agcctgttcccctccctcgtggtcgtg

SEQ ID NO: 46775 - RNA, 39 nt, synthetic construct
  misc_feature 1..39: note = GPI transamidase component PIG-T (490-502)
  source 1..39: mol_type = other RNA
agcctgttccccgtgtccgacggcagcaactacttcgtc

SEQ ID NO: 46776 - RNA, 27 nt, synthetic construct
  misc_feature 1..27: note = Hsp90 co-chaperone Cdc37 (27-35)
  source 1..27: mol_type = other RNA
agcctgttccgctggcggcaccaggcc

SEQ ID NO: 46777 - RNA, 27 nt, synthetic construct
  misc_feature 1..27: note = Zinc finger MYM-type protein 3 (596-604)
  source 1..27: mol_type = other RNA
agcctgttctccggcaagcccgaggtg

SEQ ID NO: 46778 - RNA, 27 nt, synthetic construct
  misc_feature 1..27: note = Uracil phosphoribosyltransferase homolog (268-276)
  source 1..27: mol_type = other RNA
agcctgttctccaccccccacggcgcc

SEQ ID NO: 46779 - RNA, 30 nt, synthetic construct
  misc_feature 1..30: note = Formin-like protein 2 (880-889)
  source 1..30: mol_type = other RNA
agcctgttctacaacgagctccactacgtg

SEQ ID NO: 46780 - RNA, 27 nt, synthetic construct
  misc_feature 1..27: note = Cation-independent mannose-6-phosphate receptor (2149-2157)
  source 1..27: mol_type = other RNA
agcctgggcgacatctacttcaagctc

SEQ ID NO: 46781 - RNA, 27 nt, synthetic construct
  misc_feature 1..27: note = Dynein heavy chain domain-containing protein 1 (1476-1484)
  source 1..27: mol_type = other RNA
agcctgggcgaggccctcaagcagctg

SEQ ID NO: 46782 - RNA, 27 nt, synthetic construct
  misc_feature 1..27: note = Neuroblast differentiation-associated protein AHNAK (969-977)
  source 1..27: mol_type = other RNA
agcctgggcgaggggcacctctccgtg

SEQ ID NO: 46783 - RNA, 24 nt, synthetic construct
  misc_feature 1..24: note = TBC1 domain family member 4 (1089-1096)
  source 1..24: mol_type = other RNA
agcctgggcttcgtggcccgcgtc

SEQ ID NO: 46784 - RNA, 30 nt, synthetic construct
  misc_feature 1..30: note = Caspase-4 (16-25)
  source 1..30: mol_type = other RNA
agcctgggcaaggacttcctcaccggggtg

SEQ ID NO: 46785 - RNA, 24 nt, synthetic construct
  misc_feature 1..24: note = Solute carrier family 26 member 6 (325-332)
  source 1..24: mol_type = other RNA
agcctgggcaagatcttcgccctc

SEQ ID NO: 46786 - RNA, 24 nt, synthetic construct
  misc_feature 1..24: note = Circadian clock protein PASD1 (699-706)
  source 1..24: mol_type = other RNA
agcctgggccccgtggtccaggtg

SEQ ID NO: 46787 - RNA, 24 nt, synthetic construct
  misc_feature 1..24: note = Vesicular glutamate transporter 2 (23-30)
  source 1..24: mol_type = other RNA
agcctgggccagatctaccgcgtg

SEQ ID NO: 46788 - RNA, 27 nt, synthetic construct
  misc_feature 1..27: note = Cathepsin K (65-73)
  source 1..27: mol_type = other RNA
agcctgggcgtgcacacctacgagctc

SEQ ID NO: 46789 - RNA, 27 nt, synthetic construct
  misc_feature 1..27: note = Vacuolar protein sorting-associated protein 16 homolog (139-147)
  source 1..27: mol_type = other RNA
agcctgcacgacaccgtgaccacgctc

SEQ ID NO: 46790 - RNA, 27 nt, synthetic construct
  misc_feature 1..27: note = Probable phospholipid-transporting ATPase IH (690-698)
  source 1..27: mol_type = other RNA
agcctgcacgacgtgctcttcgagctg

SEQ ID NO: 46791 - RNA, 27 nt, synthetic construct
  misc_feature 1..27: note = Sarcoplasmic/endoplasmic reticulum calcium ATPase 1 (817-825)
  source 1..27: mol_type = other RNA
agcctgcacttcctcatcctgtacgtg

SEQ ID NO: 46792 - RNA, 27 nt, synthetic construct
  misc_feature 1..27: note = Coatomer subunit alpha (27-35)
  source 1..27: mol_type = other RNA
agcctgcacaacggcgtgatccagctc

SEQ ID NO: 46793 - RNA, 27 nt, synthetic construct
  misc_feature 1..27: note = Forkhead box protein O1 (252-260)
  source 1..27: mol_type = other RNA
agcctgcactccaagttcatccgcgtg

SEQ ID NO: 46794 - RNA, 36 nt, synthetic construct
  misc_feature 1..36: note = Serum albumin (89-100)
  source 1..36: mol_type = other RNA
agcctgcacaccctcttcggcgacaagctgtgcacc

SEQ ID NO: 46795 - RNA, 27 nt, synthetic construct
  misc_feature 1..27: note = Adenosylhomocysteinase (198-206)
  source 1..27: mol_type = other RNA
agcctgatcgacggcatcaagcgcgcc

SEQ ID NO: 46796 - RNA, 27 nt, synthetic construct
  misc_feature 1..27: note = AP-1 complex subunit beta-1 (665-673)
  source 1..27: mol_type = other RNA
agcctgatcggcgggaccaacttcgtg

SEQ ID NO: 46797 - RNA, 21 nt, synthetic construct
  misc_feature 1..21: note = Myoferlin (1042-1048)
  source 1..21: mol_type = other RNA
agcctgatcggctggaagttc

SEQ ID NO: 46798 - RNA, 27 nt, synthetic construct
  misc_feature 1..27: note = Protein LMBR1L (107-115)
  source 1..27: mol_type = other RNA
agcctgatccacggcctctggaacctg

SEQ ID NO: 46799 - RNA, 27 nt, synthetic construct
  misc_feature 1..27: note = Abelson tyrosine-protein kinase 2 (153-161)
  source 1..27: mol_type = other RNA
agcctgatcaacggctccttcctcgtg

SEQ ID NO: 46800 - RNA, 33 nt, synthetic construct
  misc_feature 1..33: note = RNA-binding protein 34 (218-228)
  source 1..33: mol_type = other RNA
agcctgatccccgccgagggcaccctctccaag

SEQ ID NO: 46801 - RNA, 27 nt, synthetic construct
  misc_feature 1..27: note = DENN domain-containing protein 5B (1249-1257)
  source 1..27: mol_type = other RNA
agcctgatccgcatcctccagaccatc

SEQ ID NO: 46802 - RNA, 27 nt, synthetic construct
  misc_feature 1..27: note = Putative bifunctional UDP-N-acetylglucosamine transferase and deubiquitinase ALG13 (66-74)
  source 1..27: mol_type = other RNA
agcctgaaggaggacatccagaaggcc

SEQ ID NO: 46803 - RNA, 27 nt, synthetic construct
  misc_feature 1..27: note = Manganese-transporting ATPase 13A1 (594-602)
  source 1..27: mol_type = other RNA
agcctgaagttcgtgggcttcatcgtc

SEQ ID NO: 46804 - RNA, 27 nt, synthetic construct
  misc_feature 1..27: note = Protocadherin gamma-C3 (402-410)
  source 1..27: mol_type = other RNA
agcctgaagaactacttcaccctcaag

SEQ ID NO: 46805 - RNA, 27 nt, synthetic construct
  misc_feature 1..27: note = AP-3 complex delta subunit (882-890)
  source 1..27: mol_type = other RNA
agcctgctcgccgagaactcctacgtg

SEQ ID NO: 46806 - RNA, 30 nt, synthetic construct
  misc_feature 1..30: note = Exocyst complex component 1 (476-485)
  source 1..30: mol_type = other RNA
agcctgctcgacatgggcaacatgtccgcc

SEQ ID NO: 46807 - RNA, 27 nt, synthetic construct
  misc_feature 1..27: note = Rotatin (1619-1627)
  source 1..27: mol_type = other RNA
agcctgctcgacaacctgctgaccatc

SEQ ID NO: 46808 - RNA, 36 nt, synthetic construct
  misc_feature 1..36: note = Eukaryotic translation initiation factor 3 subunit L (282-293)
  source 1..36: mol_type = other RNA
agcctgctcggcgactactaccaggccatcaaggtg

SEQ ID NO: 46809 - RNA, 27 nt, synthetic construct
  misc_feature 1..27: note = Long-chain-fatty-acid-CoA ligase 3 (439-447)
  source 1..27: mol_type = other RNA
agcctgctcggcgggaacatccgcctg

SEQ ID NO: 46810 - RNA, 30 nt, synthetic construct
  misc_feature 1..30: note = Solute carrier family 22 member 18 (168-177)
  source 1..30: mol_type = other RNA
agcctgctcggcgggaccctggtgtccgcc

SEQ ID NO: 46811 - RNA, 27 nt, synthetic construct
  misc_feature 1..27: note = Neurochondrin (337-345)
  source 1..27: mol_type = other RNA
agcctgctcaaggagccccagaaggtg

SEQ ID NO: 46812 - RNA, 24 nt, synthetic construct
  misc_feature 1..24: note = Melanoma-associated antigen 10 (310-317)
  source 1..24: mol_type = other RNA
agcctgctcaagttcctggccaag

SEQ ID NO: 46813 - RNA, 27 nt, synthetic construct
  misc_feature 1..27: note = Melanoma-associated antigen 10 (310-318)
  source 1..27: mol_type = other RNA
agcctgctcaagttcctggccaaggtg

SEQ ID NO: 46814 - RNA, 27 nt, synthetic construct
  misc_feature 1..27: note = Zinc finger protein 644 (1297-1305)
  source 1..27: mol_type = other RNA
agcctgctcaagaagcccgcctccatc

SEQ ID NO: 46815 - RNA, 27 nt, synthetic construct
  misc_feature 1..27: note = Metallophosphoesterase 1 (21-29)
  source 1..27: mol_type = other RNA
agcctgctcctgaagctgatcgccgtg

SEQ ID NO: 46816 - RNA, 27 nt, synthetic construct
  misc_feature 1..27: note = Chromodomain-helicase-DNA-binding protein 4 (1004-1012)
  source 1..27: mol_type = other RNA
agcctgctcaacgtggtcatggacctg

SEQ ID NO: 46817 - RNA, 27 nt, synthetic construct
  misc_feature 1..27: note = Importin-4 (220-228)
  source 1..27: mol_type = other RNA
agcctgctcccctacttcccggccatc

SEQ ID NO: 46818 - RNA, 27 nt, synthetic construct
  misc_feature 1..27: note = G-protein coupled receptor 56 (5-13)
  source 1..27: mol_type = other RNA
agcctgctccagaccaccctgttcctg

SEQ ID NO: 46819 - RNA, 27 nt, synthetic construct
  misc_feature 1..27: note = Pericentrin (2516-2524)
  source 1..27: mol_type = other RNA
agcctgctctccgagatccaggccctg

SEQ ID NO: 46820 - RNA, 27 nt, synthetic construct
  misc_feature 1..27: note = Bromodomain adjacent to zinc finger domain protein 2A (217-225)
  source 1..27: mol_type = other RNA
agcctgctctccagctccgtgctgacc

SEQ ID NO: 46821 - RNA, 27 nt, synthetic construct
  misc_feature 1..27: note = Zinc finger ZZ-type and EF-hand domain-containing protein 1 (401-409)
  source 1..27: mol_type = other RNA
agcctgctcacctccctggtgaccgcc

SEQ ID NO: 46822 - RNA, 36 nt, synthetic construct
  misc_feature 1..36: note = Delphilin (264-275)
  source 1..36: mol_type = other RNA
agcctgctcgtgggcgggctggccggccccgggggc

SEQ ID NO: 46823 - RNA, 27 nt, synthetic construct
  misc_feature 1..27: note = Band 4.1-like protein 2 (562-570)
  source 1..27: mol_type = other RNA
agcctgatgaaggacttccccggcgcc

SEQ ID NO: 46824 - RNA, 24 nt, synthetic construct
  misc_feature 1..24: note = Oxysterol-binding protein-related protein 5 (301-308)
  source 1..24: mol_type = other RNA
agcctgatgtggaccctcctgaag

SEQ ID NO: 46825 - RNA, 27 nt, synthetic construct
  misc_feature 1..27: note = EMILIN-1 (224-232)
  source 1..27: mol_type = other RNA
agcctgaacgagctccagaccaccgtg

SEQ ID NO: 46826 - RNA, 27 nt, synthetic construct
  misc_feature 1..27: note = Glutamine and serine-rich protein 1 (920-928)
  source 1..27: mol_type = other RNA
agcctgaacggcaaccaggtgaccgtc

SEQ ID NO: 46827 - RNA, 27 nt, synthetic construct
  misc_feature 1..27: note = Neurofibromin (545-553)
  source 1..27: mol_type = other RNA
agcctgcccaagttctacctcctgttc

SEQ ID NO: 46828 - RNA, 30 nt, synthetic construct
  misc_feature 1..30: note = Ras-related protein Rab-38 (113-122)
  source 1..30: mol_type = other RNA
agcctgcccaacggcaagccggtgtccgtc

SEQ ID NO: 46829 - RNA, 72 nt, synthetic construct
  misc_feature 1..72: note = Talin-1 (1227-1250)
  source 1..72: mol_type = other RNA
agcctgcccccgtccaccggcaccttccaggaggcccagagccgcctcaacgaggccgcggccgggctgaac

SEQ ID NO: 46830 - RNA, 27 nt, synthetic construct
  misc_feature 1..27: note = Disabled homolog 2 (264-272)
  source 1..27: mol_type = other RNA
agcctgccccgcccgaccccccaggcc

SEQ ID NO: 46831 - RNA, 30 nt, synthetic construct
  misc_feature 1..30: note = P2X purinoceptor 7 (420-429)
  source 1..30: mol_type = other RNA
agcctgcaggacgtgaagggccaggaggtc

SEQ ID NO: 46832 - RNA, 27 nt, synthetic construct
  misc_feature 1..27: note = Unconventional myosin-Va (987-995)
  source 1..27: mol_type = other RNA
agcctgcaggaggagatcgccaagctc

SEQ ID NO: 46833 - RNA, 30 nt, synthetic construct
  misc_feature 1..30: note = Hyccin (485-494)
  source 1..30: mol_type = other RNA
agcctgcaggaggagaagctcatctacgtg

SEQ ID NO: 46834 - RNA, 27 nt, synthetic construct
  misc_feature 1..27: note = A-kinase anchor protein 9 (576-584)
  source 1..27: mol_type = other RNA
agcctgcagaaggacctctcccaggtg

SEQ ID NO: 46835 - RNA, 27 nt, synthetic construct
  misc_feature 1..27: note = Sulfate transporter (477-485)
  source 1..27: mol_type = other RNA
agcctgcagaagtccgtgctcggcgtc

SEQ ID NO: 46836 - RNA, 33 nt, synthetic construct
  misc_feature 1..33: note = Matrix metalloproteinase-14 (60-70)
  source 1..33: mol_type = other RNA
agcctgtccgccgccatcgcggccatgcagaag

SEQ ID NO: 46837 - RNA, 27 nt, synthetic construct
  misc_feature 1..27: note = Ethanolamine kinase 2 (36-44)
  source 1..27: mol_type = other RNA
agcctgtccgccgacgtgcccaaggtc

SEQ ID NO: 46838 - RNA, 27 nt, synthetic construct
  misc_feature 1..27: note = Unconventional myosin-Ic (936-944)
  source 1..27: mol_type = other RNA
agcctgtccgacagcctcttcgtgctg

SEQ ID NO: 46839 - RNA, 39 nt, synthetic construct
  misc_feature 1..39: note = Mucin-16 (10281-10293)
  source 1..39: mol_type = other RNA
agcctgtccgaggccatgaccagcttcgccaccacgggc

SEQ ID NO: 46840 - RNA, 27 nt, synthetic construct
  misc_feature 1..27: note = CD109 antigen (1332-1340)
  source 1..27: mol_type = other RNA
agcctgtccgagaccgtgaagaaggtc

SEQ ID NO: 46841 - RNA, 30 nt, synthetic construct
  misc_feature 1..30: note = Melanoma antigen preferentially expressed in tumors (355-364)
  source 1..30: mol_type = other RNA
agcctgtccggcgtgatgctcaccgacgtc

SEQ ID NO: 46842 - RNA, 27 nt, synthetic construct
  misc_feature 1..27: note = WD repeat-containing protein 1 (156-164)
  source 1..27: mol_type = other RNA
agcctgtccggctacatcaactacctc

SEQ ID NO: 46843 - RNA, 27 nt, synthetic construct
  misc_feature 1..27: note = Protein phosphatase 1 regulatory subunit 21 (218-226)
  source 1..27: mol_type = other RNA
agcctgtccatcatcaacgagaaggtg

SEQ ID NO: 46844 - RNA, 30 nt, synthetic construct
  misc_feature 1..30: note = DNA dC-dU-editing enzyme APOBEC-3B (446-455)
  source 1..30: mol_type = other RNA
agcctgtcccccggccacctcccggtgccc

SEQ ID NO: 46845 - RNA, 30 nt, synthetic construct
  misc_feature 1..30: note = Alpha-ketoglutarate-dependent dioxygenase alkB homolog 3 (81-90)
  source 1..30: mol_type = other RNA
agcctgtcccccaccggcgtgagccgcgtc

SEQ ID NO: 46846 - RNA, 27 nt, synthetic construct
  misc_feature 1..27: note = E3 ubiquitin-protein ligase TRIM56 (586-594)
  source 1..27: mol_type = other RNA
agcctgtcccaggccagccacgccgtg

SEQ ID NO: 46847 - RNA, 27 nt, synthetic construct
  misc_feature 1..27: note = Coiled-coil domain-containing protein 91 (414-422)
  source 1..27: mol_type = other RNA
agcctgtccagcctcgagctgttcctg

SEQ ID NO: 46848 - RNA, 27 nt, synthetic construct
  misc_feature 1..27: note = Centrosomal protein of 290 kDa (11-19)
  source 1..27: mol_type = other RNA
agcctgtccagcctcctggtgaagctg

SEQ ID NO: 46849 - RNA, 33 nt, synthetic construct
  misc_feature 1..33: note = Transcription factor HIVEP3 (1019-1029)
  source 1..33: mol_type = other RNA
agcctgaccggcccctccgccccggcccccgtg

SEQ ID NO: 46850 - RNA, 27 nt, synthetic construct
  misc_feature 1..27: note = CDK5 regulatory subunit-associated protein 2 (1447-1455)
  source 1..27: mol_type = other RNA
agcctgacctccgagatccacttcctc

SEQ ID NO: 46851 - RNA, 27 nt, synthetic construct
  misc_feature 1..27: note = Epsilon-sarcoglycan (250-258)
  source 1..27: mol_type = other RNA
agcctggtggacaagaccaagcaggtc

SEQ ID NO: 46852 - RNA, 33 nt, synthetic construct
  misc_feature 1..33: note = Transcription factor AP-2-epsilon (290-300)
  source 1..33: mol_type = other RNA
agcctggtggagggcgaggccgtccacctcgcc

SEQ ID NO: 46853 - RNA, 27 nt, synthetic construct
  misc_feature 1..27: note = Tumor suppressor candidate 3 (209-217)
  source 1..27: mol_type = other RNA
agcctggtgggcgggctcctgtacctg

SEQ ID NO: 46854 - RNA, 27 nt, synthetic construct
  misc_feature 1..27: note = U5 small nuclear ribonucleoprotein 200 kDa helicase (42-50)
  source 1..27: mol_type = other RNA
agcctggtgggcaagctcgaggggacc

SEQ ID NO: 46855 - RNA, 27 nt, synthetic construct
  misc_feature 1..27: note = Niban-like protein 1 (77-85)
  source 1..27: mol_type = other RNA
agcctggtgccccacaactacggcctc

SEQ ID NO: 46856 - RNA, 21 nt, synthetic construct
  misc_feature 1..21: note = DNA mismatch repair protein Msh6 (342-348)
  source 1..21: mol_type = other RNA
agcctggtgcagaagggctac

SEQ ID NO: 46857 - RNA, 27 nt, synthetic construct
  misc_feature 1..27: note = Piezo-type mechanosensitive ion channel component 1 (1709-1717)
  source 1..27: mol_type = other RNA
agcctggtgcgctccgtcgtgggcgtg

SEQ ID NO: 46858 - RNA, 30 nt, synthetic construct
  misc_feature 1..30: note = Arylsulfatase B (320-329)
  source 1..30: mol_type = other RNA
agcctgtgggagggcggggtgcgcggcgtc

SEQ ID NO: 46859 - RNA, 33 nt, synthetic construct
  misc_feature 1..33: note = Cohesin subunit SA-1 (487-497)
  source 1..33: mol_type = other RNA
agcctgtgggagtccagccaggagctcctgaag

SEQ ID NO: 46860 - RNA, 27 nt, synthetic construct
  misc_feature 1..27: note = Membrane magnesium transporter 1 (4-12)
  source 1..27: mol_type = other RNA
agcctgtggaagggcctcgtggggatc

SEQ ID NO: 46861 - RNA, 27 nt, synthetic construct
  misc_feature 1..27: note = Rho guanine nucleotide exchange factor 5 (1151-1159)
  source 1..27: mol_type = other RNA
agcctgtggcaggagatccccgtggtc

SEQ ID NO: 46862 - RNA, 27 nt, synthetic construct
  misc_feature 1..27: note = Lysosomal-trafficking regulator (2437-2445)
  source 1..27: mol_type = other RNA
agcctgtacgacaacatcctcctgcac

SEQ ID NO: 46863 - RNA, 33 nt, synthetic construct
  misc_feature 1..33: note = Lysosomal-trafficking regulator (2437-2447)
  source 1..33: mol_type = other RNA
agcctgtacgacaacatcctcctgcacaacgcc

SEQ ID NO: 46864 - RNA, 27 nt, synthetic construct
  misc_feature 1..27: note = Chloride channel protein 2 (551-559)
  source 1..27: mol_type = other RNA
agcctgtacgactccatcatccgcatc

SEQ ID NO: 46865 - RNA, 30 nt, synthetic construct
  misc_feature 1..30: note = WD repeat-containing protein 3 (586-595)
  source 1..30: mol_type = other RNA
agcctgtacggccacaagctccccgtgatc

SEQ ID NO: 46866 - RNA, 27 nt, synthetic construct
  misc_feature 1..27: note = Protein YIPF4 (129-137)
  source 1..27: mol_type = other RNA
agcctgtacggccagttccgcgtggtc

SEQ ID NO: 46867 - RNA, 33 nt, synthetic construct
  misc_feature 1..33: note = Glutaminyl-peptide cyclotransferase (212-222)
  source 1..33: mol_type = other RNA
agcctgtacggctcccgccacctcgccgccaag

SEQ ID NO: 46868 - RNA, 30 nt, synthetic construct
  misc_feature 1..30: note = Clathrin heavy chain 1 (1532-1541)
  source 1..30: mol_type = other RNA
agcctgtacaaggacgccatgcagtacgcc

SEQ ID NO: 46869 - RNA, 27 nt, synthetic construct
  misc_feature 1..27: note = Laminin subunit alpha-4 (855-863)
  source 1..27: mol_type = other RNA
agcctgtacatgaagcccccggtgaag

SEQ ID NO: 46870 - RNA, 27 nt, synthetic construct
  misc_feature 1..27: note = Membrane-associated transporter protein (382-390)
  source 1..27: mol_type = other RNA
agcctgtactcctacttccagaaggtg

SEQ ID NO: 46871 - RNA, 27 nt, synthetic construct
  misc_feature 1..27: note = Cytoplasmic dynein 1 heavy chain 1 (3309-3317)
  source 1..27: mol_type = other RNA
agcatggccaaccccccggccgcggtg

SEQ ID NO: 46872 - RNA, 27 nt, synthetic construct
  misc_feature 1..27: note = Charged multivesicular body protein 2a (98-106)
  source 1..27: mol_type = other RNA
agcatggcccaggccatgaagggcgtg

SEQ ID NO: 46873 - RNA, 27 nt, synthetic construct
  misc_feature 1..27: note = Probable ATP-dependent RNA helicase DDX59 (525-533)
  source 1..27: mol_type = other RNA
agcatggacgagtacgtgcaccagctg

SEQ ID NO: 46874 - RNA, 36 nt, synthetic construct
  misc_feature 1..36: note = Zinc finger protein 160 (58-69)
  source 1..36: mol_type = other RNA
agcatgctggaggagggcaaggagccctggaccgtg

SEQ ID NO: 46875 - RNA, 30 nt, synthetic construct
  misc_feature 1..30: note = Serine palmitoyltransferase 3 (235-244)
  source 1..30: mol_type = other RNA
agcatgaacatccccgccctggtgggcaag

SEQ ID NO: 46876 - RNA, 27 nt, synthetic construct
  misc_feature 1..27: note = Neuroblast differentiation-associated protein AHNAK (3672-3680)
  source 1..27: mol_type = other RNA
agcatgcccgacttcgacctgaacctc

SEQ ID NO: 46877 - RNA, 27 nt, synthetic construct
  misc_feature 1..27: note = Eukaryotic translation initiation factor 3 subunit L (303-311)
  source 1..27: mol_type = other RNA
agcatgtactcccgcgtgcccgagtgc

SEQ ID NO: 46878 - RNA, 36 nt, synthetic construct
  misc_feature 1..36: note = Histone-lysine N-methyltransferase 2C (3371-3382)
  source 1..36: mol_type = other RNA
agcaacgccaacccccagtccggcccgcccccccgc

SEQ ID NO: 46879 - RNA, 36 nt, synthetic construct
  misc_feature 1..36: note = ATP-dependent RNA helicase A (233-244)
  source 1..36: mol_type = other RNA
agcaacaagaagctggccgcccagtcctgcgcgctc

SEQ ID NO: 46880 - RNA, 24 nt, synthetic construct
  misc_feature 1..24: note = Voltage-dependent L-type calcium channel subunit alpha-1C (157-164)
  source 1..24: mol_type = other RNA
agcaacctggagcgcgtggagtac

SEQ ID NO: 46881 - RNA, 24 nt, synthetic construct
  misc_feature 1..24: note = Aldehyde dehydrogenase, mitochondrial (130-137)
  source 1..24: mol_type = other RNA
agcaacctgaagcgcgtgaccctc

SEQ ID NO: 46882 - RNA, 27 nt, synthetic construct
  misc_feature 1..27: note = Protocadherin gamma-A12 (544-552)
  source 1..27: mol_type = other RNA
agcaacgtgtccctgagcctcttcgtc

SEQ ID NO: 46883 - RNA, 27 nt, synthetic construct
  misc_feature 1..27: note = Neuropilin-2 (579-587)
  source 1..27: mol_type = other RNA
agccccgccggcatcgggatgcgcctg

SEQ ID NO: 46884 - RNA, 27 nt, synthetic construct
  misc_feature 1..27: note = Sushi repeat-containing protein SRPX (3-11)
  source 1..27: mol_type = other RNA
agccccgcccaccgcccggccctgctc

SEQ ID NO: 46885 - RNA, 30 nt, synthetic construct
  misc_feature 1..30: note = Sushi repeat-containing protein SRPX (3-12)
  source 1..30: mol_type = other RNA
agccccgcccaccgcccggccctgctcctg

SEQ ID NO: 46886 - RNA, 24 nt, synthetic construct
  misc_feature 1..24: note = Staphylococcal nuclease domain-containing protein 1 (730-737)
  source 1..24: mol_type = other RNA
agccccgccaagatccacgtgttc

SEQ ID NO: 46887 - RNA, 27 nt, synthetic construct
  misc_feature 1..27: note = Plectin (1284-1292)
  source 1..27: mol_type = other RNA
agccccgccaagaagccgaaggtgcag

SEQ ID NO: 46888 - RNA, 27 nt, synthetic construct
  misc_feature 1..27: note = Integrin beta-5 (81-89)
  source 1..27: mol_type = other RNA
agccccgcctccagcttccacgtgctg

SEQ ID NO: 46889 - RNA, 27 nt, synthetic construct
  misc_feature 1..27: note = Nesprin-1 (72-80)
  source 1..27: mol_type = other RNA
agccccgaggtgggccgcctgtccctc

SEQ ID NO: 46890 - RNA, 27 nt, synthetic construct
  misc_feature 1..27: note = Tetratricopeptide repeat protein 28 (1765-1773)
  source 1..27: mol_type = other RNA
agccccttccagaaggtgggcaagctg

SEQ ID NO: 46891 - RNA, 36 nt, synthetic construct
  misc_feature 1..36: note = Carcinoembryonic antigen-related cell adhesion molecule 1 isoform 3 (361-372)
  source 1..36: mol_type = other RNA
agccccggcgccatcgccgggatcgtgatcggcgtc

SEQ ID NO: 46892 - RNA, 36 nt, synthetic construct
  misc_feature 1..36: note = Transport and Golgi organization protein 6 homolog (29-40)
  source 1..36: mol_type = other RNA
agccccggcgggtccggcagctccagcctgcaggtg

SEQ ID NO: 46893 - RNA, 36 nt, synthetic construct
  misc_feature 1..36: note = Vimentin (56-67)
  source 1..36: mol_type = other RNA
agccccggcggggtgtacgccacccgctccagcgcc

SEQ ID NO: 46894 - RNA, 27 nt, synthetic construct
  misc_feature 1..27: note = HEAT repeat-containing protein 5B (63-71)
  source 1..27: mol_type = other RNA
agccccggcccgcccacccgcaagctg

SEQ ID NO: 46895 - RNA, 27 nt, synthetic construct
  misc_feature 1..27: note = Rho guanine nucleotide exchange factor 26 (304-312)
  source 1..27: mol_type = other RNA
agccccggctccctgcgccgggggctc

SEQ ID NO: 46896 - RNA, 27 nt, synthetic construct
  misc_feature 1..27: note = Glia-derived nexin (66-74)
  source 1..27: mol_type = other RNA
agcccccacggcatcgcctccgtgctg

SEQ ID NO: 46897 - RNA, 30 nt, synthetic construct
  misc_feature 1..30: note = Tensin-3 (1123-1132)
  source 1..30: mol_type = other RNA
agcccccactccggcagcaccatctccatc

SEQ ID NO: 46898 - RNA, 27 nt, synthetic construct
  misc_feature 1..27: note = Ankyrin repeat and BTB/POZ domain-containing protein 2 (632-640)
  source 1..27: mol_type = other RNA
agccccatcccgtccatccccgagatc

SEQ ID NO: 46899 - RNA, 27 nt, synthetic construct
  misc_feature 1..27: note = F-box only protein 7 (406-414)
  source 1..27: mol_type = other RNA
agccccaagggccgcttcgtgatgctg

SEQ ID NO: 46900 - RNA, 27 nt, synthetic construct
  misc_feature 1..27: note = Synaptic vesicle membrane protein VAT-1 homolog (249-257)
  source 1..27: mol_type = other RNA
agccccaagggcgtggacatcgtcatg

SEQ ID NO: 46901 - RNA, 27 nt, synthetic construct
  misc_feature 1..27: note = Sodium-dependent neutral amino acid transporter B(0)AT2 (30-38)
  source 1..27: mol_type = other RNA
agccccaagctgggcgggatcggcttc

SEQ ID NO: 46902 - RNA, 30 nt, synthetic construct
  misc_feature 1..30: note = Collagen alpha-1(XV) chain (314-323)
  source 1..30: mol_type = other RNA
agccccaagcagggctccggggagatcctg

SEQ ID NO: 46903 - RNA, 27 nt, synthetic construct
  misc_feature 1..27: note = E3 ubiquitin-protein ligase RLIM (89-97)
  source 1..27: mol_type = other RNA
agccccctgcacccgatgtccgagatc

SEQ ID NO: 46904 - RNA, 30 nt, synthetic construct
  misc_feature 1..30: note = Cleavage stimulation factor subunit 2 (154-163)
  source 1..30: mol_type = other RNA
agcccccaggaggcccgcaacatgctgctc

SEQ ID NO: 46905 - RNA, 27 nt, synthetic construct
  misc_feature 1..27: note = L-dopachrome tautomerase (134-142)
  source 1..27: mol_type = other RNA
agcccccaggagcgcgagcagttcctg

SEQ ID NO: 46906 - RNA, 27 nt, synthetic construct
  misc_feature 1..27: note = Immunoglobulin superfamily member 11 (234-242)
  source 1..27: mol_type = other RNA
agcccccagccgcgcaacatcggcctg

SEQ ID NO: 46907 - RNA, 27 nt, synthetic construct
  misc_feature 1..27: note = Collagen triple helix repeat-containing protein 1 (9-17)
  source 1..27: mol_type = other RNA
agcccccagcgcctgcggggcctcctg

SEQ ID NO: 46908 - RNA, 27 nt, synthetic construct
  misc_feature 1..27: note = Ropporin-1A (153-161)
  source 1..27: mol_type = other RNA
agcccccgcatcccgttctccaccttc

SEQ ID NO: 46909 - RNA, 24 nt, synthetic construct
  misc_feature 1..24: note = Procollagen-lysine,2-oxoglutarate 5-dioxygenase 3 (702-709)
  source 1..24: mol_type = other RNA
agcccccgcaagggctgggccctg

SEQ ID NO: 46910 - RNA, 24 nt, synthetic construct
  misc_feature 1..24: note = Procollagen-lysine,2-oxoglutarate 5-dioxygenase 2 (174-181)
  source 1..24: mol_type = other RNA
agcccccgcaagggctggtccttc

SEQ ID NO: 46911 - RNA, 24 nt, synthetic construct
  misc_feature 1..24: note = Delta-like protein 3 (3-10)
  source 1..24: mol_type = other RNA
agcccccgcatgtccggcctgctc

SEQ ID NO: 46912 - RNA, 33 nt, synthetic construct
  misc_feature 1..33: note = Delta-like protein 3 (3-13)
  source 1..33: mol_type = other RNA
agcccccgcatgtccggcctgctcagccagacc

SEQ ID NO: 46913 - RNA, 27 nt, synthetic construct
  misc_feature 1..27: note = Integrin alpha-7 (803-811)
  source 1..27: mol_type = other RNA
agcccccgcccgaacatcctgcacctc

SEQ ID NO: 46914 - RNA, 27 nt, synthetic construct
  misc_feature 1..27: note = Protocadherin gamma-C3 (65-73)
  source 1..27: mol_type = other RNA
agcccccgccagaccctgaccgtgctc

SEQ ID NO: 46915 - RNA, 27 nt, synthetic construct
  misc_feature 1..27: note = RPA-interacting protein (7-15)
  source 1..27: mol_type = other RNA
agcccccgccggtccctgtacaagctc

SEQ ID NO: 46916 - RNA, 27 nt, synthetic construct
  misc_feature 1..27: note = E3 ubiquitin-protein ligase RING1 (9-17)
  source 1..27: mol_type = other RNA
agcccccgctccctgcacagcgagctc

SEQ ID NO: 46917 - RNA, 27 nt, synthetic construct
  misc_feature 1..27: note = AP-1 complex subunit sigma-1A (146-154)
  source 1..27: mol_type = other RNA
agcccccgctccgtgctggaggagatg

SEQ ID NO: 46918 - RNA, 54 nt, synthetic construct
  misc_feature 1..54: note = Fatty acid synthase (856-873)
  source 1..54: mol_type = other RNA
agcccctccgccgccatctacaacatcgacaccagctccgagagcccggaccac

SEQ ID NO: 46919 - RNA, 27 nt, synthetic construct
  misc_feature 1..27: note = Rho GTPase-activating protein 32 (243-251)
  source 1..27: mol_type = other RNA
agcccctccaccaagctgctcaccctg

SEQ ID NO: 46920 - RNA, 30 nt, synthetic construct
  misc_feature 1..30: note = Melanoma antigen preferentially expressed in tumors (345-354)
  source 1..30: mol_type = other RNA
agcccctccgtgagccagctgtccgtcctc

SEQ ID NO: 46921 - RNA, 27 nt, synthetic construct
  misc_feature 1..27: note = SAM and SH3 domain-containing protein 1 (442-450)
  source 1..27: mol_type = other RNA
agccccaccgcctcccgcatcagcctg

SEQ ID NO: 46922 - RNA, 27 nt, synthetic construct
  misc_feature 1..27: note = Transcription factor Dp-2 (24-32)
  source 1..27: mol_type = other RNA
agccccaccaagggcaacatctccttc

SEQ ID NO: 46923 - RNA, 27 nt, synthetic construct
  misc_feature 1..27: note = Bestrophin-1 (499-507)
  source 1..27: mol_type = other RNA
agccccaccaacatccacaccacgctg

SEQ ID NO: 46924 - RNA, 27 nt, synthetic construct
  misc_feature 1..27: note = Nuclear factor 1 X-type (373-381)
  source 1..27: mol_type = other RNA
agcccctacttcacccacccgaccatc

SEQ ID NO: 46925 - RNA, 27 nt, synthetic construct
  misc_feature 1..27: note = Zinc finger CCHC domain-containing protein 24 (93-101)
  source 1..27: mol_type = other RNA
agcccctacggctccctgaacaacatc

SEQ ID NO: 46926 - RNA, 27 nt, synthetic construct
  misc_feature 1..27: note = Zinc finger protein 503 (341-349)
  source 1..27: mol_type = other RNA
agcccctacaagccgggccagaccgtg

SEQ ID NO: 46927 - RNA, 30 nt, synthetic construct
  misc_feature 1..30: note = Retinoic acid receptor RXR-gamma (68-77)
  source 1..30: mol_type = other RNA
agcccctaccgcgtgatcacctccgccatg

SEQ ID NO: 46928 - RNA, 24 nt, synthetic construct
  misc_feature 1..24: note = Filamin-A (1603-1610)
  source 1..24: mol_type = other RNA
agcccctaccgcgtgcgggccgtc

SEQ ID NO: 46929 - RNA, 63 nt, synthetic construct
  misc_feature 1..63: note = HLA class I histocompatibility antigen, A-23 alpha chain (345-365)
  source 1..63: mol_type = other RNA
agccaggccgcctccagcgactccgcgcagggcagcgacgtgtccctgaccgcctgcaaggtc

SEQ ID NO: 46930 - RNA, 72 nt, synthetic construct
  misc_feature 1..72: note = AT-rich interactive domain-containing protein 1A (334-357)
  source 1..72: mol_type = other RNA
agccagtgctggggcgccgccgcggccgccgccgccgcggccgccgcctccgggggcgcgcagcagcgcagc

SEQ ID NO: 46931 - RNA, 24 nt, synthetic construct
  misc_feature 1..24: note = Hemicentin-1 (1082-1089)
  source 1..24: mol_type = other RNA
agccaggacaagcccgtggagatc

SEQ ID NO: 46932 - RNA, 27 nt, synthetic construct
  misc_feature 1..27: note = Very large A-kinase anchor protein (777-785)
  source 1..27: mol_type = other RNA
agccaggaccccaaccgcgtggagctg

SEQ ID NO: 46933 - RNA, 27 nt, synthetic construct
  misc_feature 1..27: note = Transmembrane protein 131 (324-332)
  source 1..27: mol_type = other RNA
agccagttctccggcaagatcaccgtg

SEQ ID NO: 46934 - RNA, 63 nt, synthetic construct
  misc_feature 1..63: note = Hsp70-binding protein 1 (65-85)
  source 1..63: mol_type = other RNA
agccagggctgctccagcgggggcgggggcgggggctccagcgccggcgggtccggcaacagc

SEQ ID NO: 46935 - RNA, 30 nt, synthetic construct
  misc_feature 1..30: note = Histone acetyltransferase p300 (1897-1906)
  source 1..30: mol_type = other RNA
agccagggcaaggccgccgggcaggtgacc

SEQ ID NO: 46936 - RNA, 36 nt, synthetic construct
  misc_feature 1..36: note = Beta-2-microglobulin (87-98)
  source 1..36: mol_type = other RNA
agccagcccaagatcgtgaagtgggaccgcgacatg

SEQ ID NO: 46937 - RNA, 39 nt, synthetic construct
  misc_feature 1..39: note = Ras-associating and dilute domain-containing protein (258-270)
  source 1..39: mol_type = other RNA
agccagcagcacgactccctggtgtacgtcctcaaccgc

SEQ ID NO: 46938 - RNA, 30 nt, synthetic construct
  misc_feature 1..30: note = Oxysterol-binding protein-related protein 10 (232-241)
  source 1..30: mol_type = other RNA
agccagtactccggccagctgcacgaggtg

SEQ ID NO: 46939 - RNA, 27 nt, synthetic construct
  misc_feature 1..27: note = Transmembrane and TPR repeat-containing protein 2 (541-549)
  source 1..27: mol_type = other RNA
agccgcttcgccgaggccctgcactac

SEQ ID NO: 46940 - RNA, 27 nt, synthetic construct
  misc_feature 1..27: note = Pre-mRNA-processing-splicing factor 8 (979-987)
  source 1..27: mol_type = other RNA
agccgcttcgagaagatgtacgagaag

SEQ ID NO: 46941 - RNA, 27 nt, synthetic construct
  misc_feature 1..27: note = Glia-derived nexin (207-215)
  source 1..27: mol_type = other RNA
agccgcttccagcccgagaacaccaag

SEQ ID NO: 46942 - RNA, 18 nt, synthetic construct
  misc_feature 1..18: note = ER membrane protein complex subunit 1 (7-12)
  source 1..18: mol_type = other RNA
agccgcttctggctgtgg

SEQ ID NO: 46943 - RNA, 24 nt, synthetic construct
  misc_feature 1..24: note = Splicing factor 3B subunit 3 (33-40)
  source 1..24: mol_type = other RNA
agccgcggcaagatcctggagctc

SEQ ID NO: 46944 - RNA, 27 nt, synthetic construct
  misc_feature 1..27: note = Maltase-glucoamylase (658-666)
  source 1..27: mol_type = other RNA
agccgccactacctgaacatccggtac

SEQ ID NO: 46945 - RNA, 27 nt, synthetic construct
  misc_feature 1..27: note = B-cell lymphoma 6 protein (444-452)
  source 1..27: mol_type = other RNA
agccgcctgaacaacatcgtgaaccgg

SEQ ID NO: 46946 - RNA, 27 nt, synthetic construct
  misc_feature 1..27: note = Centrosomal protein C10orf90 (199-207)
  source 1..27: mol_type = other RNA
agccgcaactccagcgtggtccggctg

SEQ ID NO: 46947 - RNA, 27 nt, synthetic construct
  misc_feature 1..27: note = Maltase-glucoamylase, intestinal (1482-1490)
  source 1..27: mol_type = other RNA
agccgcaacgtgctgcagacccggtac

SEQ ID NO: 46948 - RNA, 66 nt, synthetic construct
  misc_feature 1..66: note = Glia-derived nexin (57-78)
  source 1..66: mol_type = other RNA
agccgcccccacgacaacatcgtgatctccccgcacggcatcgccagcgtcctggggatgctccag

SEQ ID NO: 46949 - RNA, 24 nt, synthetic construct
  misc_feature 1..24: note = Arylsulfatase B (42-49)
  source 1..24: mol_type = other RNA
agccgccccccgcacctggtgttc

SEQ ID NO: 46950 - RNA, 27 nt, synthetic construct
  misc_feature 1..27: note = Fatty acid synthase (1916-1924)
  source 1..27: mol_type = other RNA
agccgctccggcatccggaccgggtac

SEQ ID NO: 46951 - RNA, 27 nt, synthetic construct
  misc_feature 1..27: note = Vasorin (3-11)
  source 1..27: mol_type = other RNA
agccgcgtgcccctgctcctgccgctg

SEQ ID NO: 46952 - RNA, 24 nt, synthetic construct
  misc_feature 1..24: note = Semaphorin-3A (543-550)
  source 1..24: mol_type = other RNA
agccgctacttccccaccgccaag

SEQ ID NO: 46953 - RNA, 48 nt, synthetic construct
  misc_feature 1..48: note = Alpha-1D adrenergic receptor (23-38)
  source 1..48: mol_type = other RNA
agctccgccggcgggggcgggggcagcgccgggggcgcggccccctcc

SEQ ID NO: 46954 - RNA, 27 nt, synthetic construct
  misc_feature 1..27: note = Insulin receptor substrate 2 (311-319)
  source 1..27: mol_type = other RNA
agctccgccacccaccccatcagcgtg

SEQ ID NO: 46955 - RNA, 27 nt, synthetic construct
  misc_feature 1..27: note = Protein CMSS1 (145-153)
  source 1..27: mol_type = other RNA
agctccgccgtgcgcgccctggagctc

SEQ ID NO: 46956 - RNA, 27 nt, synthetic construct
  misc_feature 1..27: note = Protein FAM127A (59-67)
  source 1..27: mol_type = other RNA
agctccgacgccctgaaggtgaccttc

SEQ ID NO: 46957 - RNA, 30 nt, synthetic construct
  misc_feature 1..30: note = Beta-1-syntrophin (489-498)
  source 1..30: mol_type = other RNA
agctccgacgacggcatccgcatgctgtac

SEQ ID NO: 46958 - RNA, 27 nt, synthetic construct
  misc_feature 1..27: note = Transcription elongation factor B polypeptide 1 (7-15)
  source 1..27: mol_type = other RNA
agctccgacggccacgagttcatcgtg

SEQ ID NO: 46959 - RNA, 27 nt, synthetic construct
  misc_feature 1..27: note = Cyclin-dependent kinase-like 3 (88-96)
  source 1..27: mol_type = other RNA
agctccgacctgctccaccacgagtac

SEQ ID NO: 46960 - RNA, 27 nt, synthetic construct
  misc_feature 1..27: note = Neutrophil collagenase (228-236)
  source 1..27: mol_type = other RNA
agctccgaccccggcgccctgatgtac

SEQ ID NO: 46961 - RNA, 51 nt, synthetic construct
  misc_feature 1..51: note = HLA class I histocompatibility antigen, A-23 alpha chain (349-365)
  source 1..51: mol_type = other RNA
agctccgacagcgcccagggctccgacgtgagcctgaccgcctgcaaggtc

SEQ ID NO: 46962 - RNA, 84 nt, synthetic construct
  misc_feature 1..84: note = NADH dehydrogenase (ubiquinone) 1 beta subcomplex subunit 11, mitochondrial (31-58)
  source 1..84: mol_type = other RNA
agctccttcagccgcaccgtggtcgccccctccgccgtggcgggcaagcggccgcccgagcccaccacgccctggcaggaggac

SEQ ID NO: 46963 - RNA, 39 nt, synthetic construct
  misc_feature 1..39: note = Keratin, type I cytoskeletal 10 (570-582)
  source 1..39: mol_type = other RNA
agctccggcagcgtgggggagtccagctccaagggcccc

SEQ ID NO: 46964 - RNA, 21 nt, synthetic construct
  misc_feature 1..21: note = Zinc finger protein 697 (329-335)
  source 1..21: mol_type = other RNA
agctcccacctgctcagccac

SEQ ID NO: 46965 - RNA, 21 nt, synthetic construct
  misc_feature 1..21: note = BTB/POZ domain-containing protein KCTD20 (144-150)
  source 1..21: mol_type = other RNA
agctccaagctgtaccgcttc

SEQ ID NO: 46966 - RNA, 39 nt, synthetic construct
  misc_feature 1..39: note = Voltage-dependent anion-selective channel protein 1 (240-252)
  source 1..39: mol_type = other RNA
agctccctgatcggcctcgggtacacccagaccctgaag

SEQ ID NO: 46967 - RNA, 27 nt, synthetic construct
  misc_feature 1..27: note = Phosphatidylinositol 4-phosphate 3-kinase C2 domain-containing subunit alpha (1113-1121)
  source 1..27: mol_type = other RNA
agctccaacgccgtgcccctgaaggtc

SEQ ID NO: 46968 - RNA, 27 nt, synthetic construct
  misc_feature 1..27: note = Niemann-Pick C1 protein (167-175)
  source 1..27: mol_type = other RNA
agctccaacgacaaggccctgggcctc

SEQ ID NO: 46969 - RNA, 27 nt, synthetic construct
  misc_feature 1..27: note = Ligand of Numb protein X 2 (382-390)
  source 1..27: mol_type = other RNA
agctccaacgaccgcgtgctggccatc

SEQ ID NO: 46970 - RNA, 42 nt, synthetic construct
  misc_feature 1..42: note = Beta-secretase 2 (113-126)
  source 1..42: mol_type = other RNA
agctccaacttcgccgtggccggcaccccccacagctacatc

SEQ ID NO: 46971 - RNA, 45 nt, synthetic construct
  misc_feature 1..45: note = Beta-secretase 2 (113-127)
  source 1..45: mol_type = other RNA
agctccaacttcgccgtggccggcaccccccacagctacatcgac

SEQ ID NO: 46972 - RNA, 48 nt, synthetic construct
  misc_feature 1..48: note = Beta-secretase 2 (113-128)
  source 1..48: mol_type = other RNA
agctccaacttcgccgtggccggcaccccccacagctacatcgacacc

SEQ ID NO: 46973 - RNA, 27 nt, synthetic construct
  misc_feature 1..27: note = Alpha-taxilin (438-446)
  source 1..27: mol_type = other RNA
agctccaacaaggccctgctcgagatg

SEQ ID NO: 46974 - RNA, 27 nt, synthetic construct
  misc_feature 1..27: note = Plakophilin-4 (457-465)
  source 1..27: mol_type = other RNA
agctcccagcgcagcaccctgacctac

SEQ ID NO: 46975 - RNA, 27 nt, synthetic construct
  misc_feature 1..27: note = Golgin subfamily B member 1 (3000-3008)
  source 1..27: mol_type = other RNA
agctcccagacccagcccctgaaggtg

SEQ ID NO: 46976 - RNA, 33 nt, synthetic construct
  misc_feature 1..33: note = Transducin-like enhancer protein 3 (167-177)
  source 1..33: mol_type = other RNA
agctccagcggcctgctcgccctgggggccctg

SEQ ID NO: 46977 - RNA, 42 nt, synthetic construct
  misc_feature 1..42: note = Keratin, type I cytoskeletal 10 (37-50)
  source 1..42: mol_type = other RNA
agctccagcaagggctccctggggggcgggttcagctccggc

SEQ ID NO: 46978 - RNA, 45 nt, synthetic construct
  misc_feature 1..45: note = Keratin, type I cytoskeletal 10 (37-51)
  source 1..45: mol_type = other RNA
agctccagcaagggctccctggggggcgggttcagctccggcggg

SEQ ID NO: 46979 - RNA, 48 nt, synthetic construct
  misc_feature 1..48: note = Keratin, type I cytoskeletal 10 (37-52)
  source 1..48: mol_type = other RNA
agctccagcaagggctccctggggggcgggttcagctccggcgggttc

SEQ ID NO: 46980 - RNA, 54 nt, synthetic construct
  misc_feature 1..54: note = Keratin, type I cytoskeletal 10 (37-54)
  source 1..54: mol_type = other RNA
agctccagcaagggctccctggggggcgggttcagctccggcgggttcagcggc

SEQ ID NO: 46981 - RNA, 57 nt, synthetic construct
  misc_feature 1..57: note = Keratin, type I cytoskeletal 10 (37-55)
  source 1..57: mol_type = other RNA
agctccagcaagggctccctggggggcgggttcagctccggcgggttcagcggcggc

SEQ ID NO: 46982 - RNA, 27 nt, synthetic construct
  misc_feature 1..27: note = Actin, gamma-enteric smooth muscle (190-198)
  source 1..27: mol_type = other RNA
agctccagctccctggagaagagctac

SEQ ID NO: 46983 - RNA, 39 nt, synthetic construct
  misc_feature 1..39: note = Synaptotagmin-like protein 2 (277-289)
  source 1..39: mol_type = other RNA
agctccagctccagcaccgactccgagaccctgcgctac

SEQ ID NO: 46984 - RNA, 36 nt, synthetic construct
  misc_feature 1..36: note = Synaptotagmin-like protein 2 (279-290)
  source 1..36: mol_type = other RNA
agctccagctccaccgacagcgagaccctgcgctac

SEQ ID NO: 46985 - RNA, 30 nt, synthetic construct
  misc_feature 1..30: note = Synaptotagmin-like protein 2 (281-290)
  source 1..30: mol_type = other RNA
agctccaccgacagcgagaccctgcgctac

SEQ ID NO: 46986 - RNA, 27 nt, synthetic construct
  misc_feature 1..27: note = F-actin-capping protein subunit beta (41-49)
  source 1..27: mol_type = other RNA
agctccgtggaccagcccctgaagatc

SEQ ID NO: 46987 - RNA, 21 nt, synthetic construct
  misc_feature 1..21: note = TATA-binding protein-associated factor 2N (44-50)
  source 1..21: mol_type = other RNA
agctcctacggccagaactac

SEQ ID NO: 46988 - RNA, 27 nt, synthetic construct
  misc_feature 1..27: note = Poly(rC)-binding protein 4 (68-76)
  source 1..27: mol_type = other RNA
agcaccgccgccgtgttccacgcggtc

SEQ ID NO: 46989 - RNA, 24 nt, synthetic construct
  misc_feature 1..24: note = 40S ribosomal protein S19 (59-66)
  source 1..24: mol_type = other RNA
agcaccgcccgccacctgtacctc

SEQ ID NO: 46990 - RNA, 33 nt, synthetic construct
  misc_feature 1..33: note = Regulator of G-protein signaling 12 (284-294)
  source 1..33: mol_type = other RNA
agcaccgacaaggccggcgtggtcgccgagtac

SEQ ID NO: 46991 - RNA, 30 nt, synthetic construct
  misc_feature 1..30: note = Neuropilin-2 (829-838)
  source 1..30: mol_type = other RNA
agcaccgacaaggagaagtcctggctgtac

SEQ ID NO: 46992 - RNA, 30 nt, synthetic construct
  misc_feature 1..30: note = Protein LZIC (168-177)
  source 1..30: mol_type = other RNA
agcaccgacctgggccgccccccgtcctac

SEQ ID NO: 46993 - RNA, 27 nt, synthetic construct
  misc_feature 1..27: note = Transcription factor HES-1 (101-109)
  source 1..27: mol_type = other RNA
agcaccgacccctccgtgctgggcaag

SEQ ID NO: 46994 - RNA, 24 nt, synthetic construct
  misc_feature 1..24: note = Heterogeneous nuclear ribonucleoprotein K (188-195)
  source 1..24: mol_type = other RNA
agcaccgaccgcgtggtcctgatc

SEQ ID NO: 46995 - RNA, 30 nt, synthetic construct
  misc_feature 1..30: note = CUB and sushi domain-containing protein 1 (1359-1368)
  source 1..30: mol_type = other RNA
agcaccttcaactccctgaccctccagttc

SEQ ID NO: 46996 - RNA, 24 nt, synthetic construct
  misc_feature 1..24: note = Transcription termination factor 2 (827-834)
  source 1..24: mol_type = other RNA
agcaccggccgccccctggtgatc

SEQ ID NO: 46997 - RNA, 24 nt, synthetic construct
  misc_feature 1..24: note = Basic leucine zipper and W2 domain-containing protein 2 (54-61)
  source 1..24: mol_type = other RNA
agcaccggctcccgcctggactac

SEQ ID NO: 46998 - RNA, 21 nt, synthetic construct
  misc_feature 1..21: note = Synemin (859-865)
  source 1..21: mol_type = other RNA
agcaccatccgctactcctgg

SEQ ID NO: 46999 - RNA, 54 nt, synthetic construct
  misc_feature 1..54: note = Transformation/transcription domain-associated protein (377-394)
  source 1..54: mol_type = other RNA
agcaccctggccgacctcgtgcaccacgtccgccagcacctgcccctgtccgac

SEQ ID NO: 47000 - RNA, 21 nt, synthetic construct
  misc_feature 1..21: note = Nicalin (264-270)
  source 1..21: mol_type = other RNA
agcaccctggagcaccacctc

SEQ ID NO: 47001 - RNA, 93 nt, synthetic construct
  misc_feature 1..93: note = CXXC-type zinc finger protein 5 (18-48)
  source 1..93: mol_type = other RNA
agcaccaacggctccgggggcagcgggtccagcggccccaaggccggggccgcggacaagtccgccgtggtcgccgccgccgcgccggccagc

SEQ ID NO: 47002 - RNA, 30 nt, synthetic construct
  misc_feature 1..30: note = Transmembraneoprotein NMB (294-303)
  source 1..30: mol_type = other RNA
agcaccaaccacaccgtgaaccacacgtac

SEQ ID NO: 47003 - RNA, 27 nt, synthetic construct
  misc_feature 1..27: note = Patatin-like phospholipase domain-containing protein 2 (199-207)
  source 1..27: mol_type = other RNA
agcaccaacatccacgagctgcgcgtg

SEQ ID NO: 47004 - RNA, 27 nt, synthetic construct
  misc_feature 1..27: note = Sodium/potassium-transporting ATPase subunit alpha-3 (487-495)
  source 1..27: mol_type = other RNA
agcaccaacaagtaccagctgtccatc

SEQ ID NO: 47005 - RNA, 27 nt, synthetic construct
  misc_feature 1..27: note = Transmembrane emp24 domain-containing protein 10 (181-189)
  source 1..27: mol_type = other RNA
agcaccaacacccgcgtgctgtacttc

SEQ ID NO: 47006 - RNA, 27 nt, synthetic construct
  misc_feature 1..27: note = DNA-directed RNA polymerase I subunit RPA2 (156-164)
  source 1..27: mol_type = other RNA
agcacccagaagcaggtgctgaactac

SEQ ID NO: 47007 - RNA, 24 nt, synthetic construct
  misc_feature 1..24: note = Protein-methionine sulfoxide oxidase MICAL3 (646-653)
  source 1..24: mol_type = other RNA
agcacccgctcccccatcagcttc

SEQ ID NO: 47008 - RNA, 45 nt, synthetic construct
  misc_feature 1..45: note = Vimentin (2-16)
  source 1..45: mol_type = other RNA
agcacccgctccgtgagctccagctcctaccggcgcatgttcggc

SEQ ID NO: 47009 - RNA, 45 nt, synthetic construct
  misc_feature 1..45: note = Vimentin (47-61)
  source 1..45: mol_type = other RNA
agcacctcccgcagcctgtacgcctccagccccggcggggtgtac

SEQ ID NO: 47010 - RNA, 21 nt, synthetic construct
  misc_feature 1..21: note = WD repeat-containing protein 36 (352-358)
  source 1..21: mol_type = other RNA
agcaccgtgcacgagaagttc

SEQ ID NO: 47011 - RNA, 27 nt, synthetic construct
  misc_feature 1..27: note = Zinc finger CCHC domain-containing protein 3 (228-236)
  source 1..27: mol_type = other RNA
agcgtggccgcccagctgaccggcgtc

SEQ ID NO: 47012 - RNA, 27 nt, synthetic construct
  misc_feature 1..27: note = Zinc finger protein 518B (424-432)
  source 1..27: mol_type = other RNA
agcgtggccctgaagggccactccctc

SEQ ID NO: 47013 - RNA, 33 nt, synthetic construct
  misc_feature 1..33: note = Latent-transforming growth factor beta-binding protein 3 (178-188)
  source 1..33: mol_type = other RNA
agcgtggcctccaagcacgccatctacgcggtc

SEQ ID NO: 47014 - RNA, 27 nt, synthetic construct
  misc_feature 1..27: note = 3-hydroxybutyrate dehydrogenase type 2 (133-141)
  source 1..27: mol_type = other RNA
agcgtggcctccagcgtcaagggcgtg

SEQ ID NO: 47015 - RNA, 60 nt, synthetic construct
  misc_feature 1..60: note = Chondroitin sulfate proteoglycan 4 (124-143)
  source 1..60: mol_type = other RNA
agcgtggacggcttcctgaacgcctccagcgccgtccccggggcgccgctcgaggtgccc

SEQ ID NO: 47016 - RNA, 27 nt, synthetic construct
  misc_feature 1..27: note = GDNF-inducible zinc finger protein 1 (69-77)
  source 1..27: mol_type = other RNA
agcgtggacggcacccgcaccaacgtc

SEQ ID NO: 47017 - RNA, 27 nt, synthetic construct
  misc_feature 1..27: note = Protein AHNAK2 (2175-2183)
  source 1..27: mol_type = other RNA
agcgtggacgtctcccccccgaaggtg

SEQ ID NO: 47018 - RNA, 27 nt, synthetic construct
  misc_feature 1..27: note = Phospholipase B-like 1 (304-312)
  source 1..27: mol_type = other RNA
agcgtgttcaacaagaccctgctcaag

SEQ ID NO: 47019 - RNA, 21 nt, synthetic construct
  misc_feature 1..21: note = Clathrin interactor 1 (166-172)
  source 1..21: mol_type = other RNA
agcgtgggcgggttccgctac

SEQ ID NO: 47020 - RNA, 57 nt, synthetic construct
  misc_feature 1..57: note = Prelamin-A/C (479-497)
  source 1..57: mol_type = other RNA
agcgtgggcgggtccggcgggggcagcttcggggacaacctggtcacccgctcctac

SEQ ID NO: 47021 - RNA, 27 nt, synthetic construct
  misc_feature 1..27: note = Heterogeneous nuclear ribonucleoprotein C-like 1 (47-55)
  source 1..27: mol_type = other RNA
agcgtgcacaagggcttcgccttcgtc

SEQ ID NO: 47022 - RNA, 27 nt, synthetic construct
  misc_feature 1..27: note = COUP transcription factor 2 (223-231)
  source 1..27: mol_type = other RNA
agcgtgatcgagcagctgttcttcgtc

SEQ ID NO: 47023 - RNA, 27 nt, synthetic construct
  misc_feature 1..27: note = Serine/threonine-protein kinase ICK (533-541)
  source 1..27: mol_type = other RNA
agcgtgatctccaaggtcaacagcgtg

SEQ ID NO: 47024 - RNA, 69 nt, synthetic construct
  misc_feature 1..69: note = Glutathione reductase, mitochondrial (234-256)
  source 1..69: mol_type = other RNA
agcgtgatcgtcggcgccgggtacatcgccgtggagatggcgggcatcctgtccgccctcgggagcaag

SEQ ID NO: 47025 - RNA, 27 nt, synthetic construct
  misc_feature 1..27: note = Kelch-like protein 21 (378-386)
  source 1..27: mol_type = other RNA
agcgtgctggacggcctcctgtacgtc

SEQ ID NO: 47026 - RNA, 30 nt, synthetic construct
  misc_feature 1..30: note = Protein transport protein Sec61 subunit alpha isoform 1 (353-362)
  source 1..30: mol_type = other RNA
agcgtgctggaggaccccgtccacgccgtg

SEQ ID NO: 47027 - RNA, 21 nt, synthetic construct
  misc_feature 1..21: note = Tetratricopeptide repeat protein 27 (74-80)
  source 1..21: mol_type = other RNA
agcgtgctgttccagcagttc

SEQ ID NO: 47028 - RNA, 27 nt, synthetic construct
  misc_feature 1..27: note = Histone-lysine N-methyltransferase SETD1B (168-176)
  source 1..27: mol_type = other RNA
agcgtgatgggcaacatcatccacgtc

SEQ ID NO: 47029 - RNA, 27 nt, synthetic construct
  misc_feature 1..27: note = E3 ubiquitin-protein ligase UBR4 (884-892)
  source 1..27: mol_type = other RNA
agcgtgaaccgctacatcctgcagctc

SEQ ID NO: 47030 - RNA, 36 nt, synthetic construct
  misc_feature 1..36: note = Integral membrane protein GPR137C (4-15)
  source 1..36: mol_type = other RNA
agcgtgcccggcccggccgccgcggccgcccccgcc

SEQ ID NO: 47031 - RNA, 78 nt, synthetic construct
  misc_feature 1..78: note = CCR4-NOT transcription complex subunit 3 (392-417)
  source 1..78: mol_type = other RNA
agcgtgcagccctccggcgggggcgggggcgggagcggcggcgggggctccagctccagctccaacagctccgccggg

SEQ ID NO: 47032 - RNA, 30 nt, synthetic construct
  misc_feature 1..30: note = Transmembrane protein 98 (124-133)
  source 1..30: mol_type = other RNA
agcgtgtccgacatcatcgtcgtggccaag

SEQ ID NO: 47033 - RNA, 27 nt, synthetic construct
  misc_feature 1..27: note = Adipocyte enhancer-binding protein 1 (926-934)
  source 1..27: mol_type = other RNA
agcgtgtccggcatcaaccacggggtc

SEQ ID NO: 47034 - RNA, 27 nt, synthetic construct
  misc_feature 1..27: note = Dimethyladenosine transferase 1, mitochondrial (145-153)
  source 1..27: mol_type = other RNA
agcgtgtccacccccctgatcatcaag

SEQ ID NO: 47035 - RNA, 27 nt, synthetic construct
  misc_feature 1..27: note Dolichyl-diphosphooligosaccharide-proteinosyltransferase subunit 2 (121-129)
  source 1..27: mol_type = other RNA
agcgtgacccagatctaccacgccgtc

SEQ ID NO: 47036 - RNA, 27 nt, synthetic construct
  misc_feature 1..27: note = Lysine-specific demethylase 4B (1000-1008)
  source 1..27: mol_type = other RNA
agcgtgacctcccacatctaccaggtc

SEQ ID NO: 47037 - RNA, 27 nt, synthetic construct
  misc_feature 1..27: note = PR domain zinc finger protein 2 (684-692)
  source 1..27: mol_type = other RNA
agcgtgtacctgtccagcaagctcaag

SEQ ID NO: 47038 - RNA, 24 nt, synthetic construct
  misc_feature 1..24: note = Suppressor of tumorigenicity 7 protein (439-446)
  source 1..24: mol_type = other RNA
agcgtgtaccccaagaaggagctg

SEQ ID NO: 47039 - RNA, 36 nt, synthetic construct
  misc_feature 1..36: note = Semaphorin-3D (430-441)
  source 1..36: mol_type = other RNA
agcgtgtaccccgtcgccggcgggccgaccttcaag

SEQ ID NO: 47040 - RNA, 30 nt, synthetic construct
  misc_feature 1..30: note = Melanophilin (449-458)
  source 1..30: mol_type = other RNA
agcgtgtaccgcggctccctgacccagcgg

SEQ ID NO: 47041 - RNA, 30 nt, synthetic construct
  misc_feature 1..30: note = Cathepsin B (254-263)
  source 1..30: mol_type = other RNA
agcgtgtactccgacttcctgctctacaag

SEQ ID NO: 47042 - RNA, 36 nt, synthetic construct
  misc_feature 1..36: note = Synaptotagmin-like protein 2 (618-629)
  source 1..36: mol_type = other RNA
agcgtgtactccggcgacttcgggaacctggaggtc

SEQ ID NO: 47043 - RNA, 27 nt, synthetic construct
  misc_feature 1..27: note = Retrotransposon gag domain-containing protein 4 (253-261)
  source 1..27: mol_type = other RNA
agctacgccgacgccttccagttcctg

SEQ ID NO: 47044 - RNA, 27 nt, synthetic construct
  misc_feature 1..27: note = WD repeat-containing protein 11 (156-164)
  source 1..27: mol_type = other RNA
agctacgccgacaacatcctgtccttc

SEQ ID NO: 47045 - RNA, 27 nt, synthetic construct
  misc_feature 1..27: note = SH3 domain-binding protein 1 (158-166)
  source 1..27: mol_type = other RNA
agctacgccaactacttcatccgcctg

SEQ ID NO: 47046 - RNA, 60 nt, synthetic construct
  misc_feature 1..60: note = Thioredoxin reductase 1, cytoplasmic (10-29)
  source 1..60: mol_type = other RNA
agctacgactacgacctgatcatcatcggcgggggctccgggggcctcgccgccgcgaag

SEQ ID NO: 47047 - RNA, 27 nt, synthetic construct
  misc_feature 1..27: note = Dedicator of cytokinesis protein 7 (739-747)
  source 1..27: mol_type = other RNA
agctacatccactacgtgttccgcctg

SEQ ID NO: 47048 - RNA, 27 nt, synthetic construct
  misc_feature 1..27: note = Transportin-2 (516-524)
  source 1..27: mol_type = other RNA
agctacatcctggacaccctcgtgttc

SEQ ID NO: 47049 - RNA, 27 nt, synthetic construct
  misc_feature 1..27: note = E3 ubiquitin-protein ligase TRIM58 (431-439)
  source 1..27: mol_type = other RNA
agctacatctacaccttcaaccagctg

SEQ ID NO: 47050 - RNA, 27 nt, synthetic construct
  misc_feature 1..27: note = SMC5-SMC6 complex localization factor protein 2 (901-909)
  source 1..27: mol_type = other RNA
agctacaagcccatcttctccaccctg

SEQ ID NO: 47051 - RNA, 21 nt, synthetic construct
  misc_feature 1..21: note = Nicotinamide phosphoribosyltransferase (17-23)
  source 1..21: mol_type = other RNA
agctacaaggtgacccactac

SEQ ID NO: 47052 - RNA, 27 nt, synthetic construct
  misc_feature 1..27: note = Zinc finger CCHC domain-containing protein 24 (70-78)
  source 1..27: mol_type = other RNA
agctacctgaactccttcttccagctc

SEQ ID NO: 47053 - RNA, 27 nt, synthetic construct
  misc_feature 1..27: note = Glycogenin-1 (194-202)
  source 1..27: mol_type = other RNA
agctacctgcccgccttcaaggtgttc

SEQ ID NO: 47054 - RNA, 27 nt, synthetic construct
  misc_feature 1..27: note = DNA-directed RNA polymerase III subunit RPC2 (532-540)
  source 1..27: mol_type = other RNA
agctaccccaacgtgttcctggtcttc

SEQ ID NO: 47055 - RNA, 27 nt, synthetic construct
  misc_feature 1..27: note = Helicase-like transcription factor (29-37)
  source 1..27: mol_type = other RNA
agctaccccaccttcttcccgcgcttc

SEQ ID NO: 47056 - RNA, 27 nt, synthetic construct
  misc_feature 1..27: note = Nesprin-1 (3393-3401)
  source 1..27: mol_type = other RNA
agctaccaggacggcgtgcgccagttc

SEQ ID NO: 47057 - RNA, 27 nt, synthetic construct
  misc_feature 1..27: note = RB1-inducible coiled-coil protein 1 (163-171)
  source 1..27: mol_type = other RNA
agctaccagaagctgctcttcaagttc

SEQ ID NO: 47058 - RNA, 27 nt, synthetic construct
  misc_feature 1..27: note = Farnesyl pyrophosphate synthase (314-322)
  source 1..27: mol_type = other RNA
agctactcccacatcatggccctgatc

SEQ ID NO: 47059 - RNA, 24 nt, synthetic construct
  misc_feature 1..24: note = 2',3'-cyclic-nucleotide 3'-phosphodiesterase (257-264)
  source 1..24: mol_type = other RNA
agctactccaaggccttcaccctg

SEQ ID NO: 47060 - RNA, 69 nt, synthetic construct
  misc_feature 1..69: note = HLA class I histocompatibility antigen, A-23 alpha chain (343-365)
  source 1..69: mol_type = other RNA
agctactcccaggccgccagctccgacagcgcgcagggctccgacgtgagcctgaccgcctgcaaggtc

SEQ ID NO: 47061 - RNA, 69 nt, synthetic construct
  misc_feature 1..69: note = HLA class I histocompatibility antigen, A-1 alpha chain (318-340)
  source 1..69: mol_type = other RNA
agctacacccaggccgcctccagcgactccgcgcagggcagcgacgtgtccctgaccgcctgcaaggtc

SEQ ID NO: 47062 - RNA, 27 nt, synthetic construct
  misc_feature 1..27: note = Mediator of RNA polymerase II transcription subunit 13-like (933-941)
  source 1..27: mol_type = other RNA
agctacgtgcacaaggtcccctccttc

SEQ ID NO: 47063 - RNA, 18 nt, synthetic construct
  misc_feature 1..18: note = Amyloid protein-binding protein 2 (340-345)
  source 1..18: mol_type = other RNA
agctacgtgcaccagtac

SEQ ID NO: 47064 - RNA, 27 nt, synthetic construct
  misc_feature 1..27: note = Melanoma-associated antigen 12 (282-290)
  source 1..27: mol_type = other RNA
agctacgtgaaggtcctgcaccacctc

SEQ ID NO: 47065 - RNA, 27 nt, synthetic construct
  misc_feature 1..27: note Dolichyl-diphosphooligosaccharide-proteinosyltransferase 48 kDa subunit (22-30)
  source 1..27: mol_type = other RNA
accgccgcccgcgcgtgggccctgttc

SEQ ID NO: 47066 - RNA, 27 nt, synthetic construct
  misc_feature 1..27: note = Protein AATF (30-38)
  source 1..27: mol_type = other RNA
accgccgcccgcgtgatcgaccggttc

SEQ ID NO: 47067 - RNA, 30 nt, synthetic construct
  misc_feature 1..30: note Dolichyl-diphosphooligosaccharide-proteinosyltransferase 48 kDa subunit (78-87)
  source 1..30: mol_type = other RNA
accgccgacgaccccagcctgtccctcatc

SEQ ID NO: 47068 - RNA, 24 nt, synthetic construct
  misc_feature 1..24: note = Triokinase/FMN cyclase (233-240)
  source 1..24: mol_type = other RNA
accgccgacgagatcgtgaagctg

SEQ ID NO: 47069 - RNA, 27 nt, synthetic construct
  misc_feature 1..27: note = Calcium homeostasis endoplasmic reticulum protein (170-178)
  source 1..27: mol_type = other RNA
accgccgacggcgcccacttcgagctg

SEQ ID NO: 47070 - RNA, 27 nt, synthetic construct
  misc_feature 1..27: note = Transducin beta-like protein 3 (197-205)
  source 1..27: mol_type = other RNA
accgccgaccacaacctgctcctgtac

SEQ ID NO: 47071 - RNA, 27 nt, synthetic construct
  misc_feature 1..27: note = Late secretory pathway protein AVL9 homolog (340-348)
  source 1..27: mol_type = other RNA
accgccgacgtgagccacaccaacctg

SEQ ID NO: 47072 - RNA, 30 nt, synthetic construct
  misc_feature 1..30: note = Histone acetyltransferase type B catalytic subunit (274-283)
  source 1..30: mol_type = other RNA
accgccgaggaccccagcaagtcctacgtg

SEQ ID NO: 47073 - RNA, 63 nt, synthetic construct
  misc_feature 1..63: note = 3-hydroxyacyl-CoA dehydrogenase type-2 (26-46)
  source 1..63: mol_type = other RNA
accgccgagcgcctggtgggccagggggccagcgcggtcctcctggacctgcccaactccggc

SEQ ID NO: 47074 - RNA, 24 nt, synthetic construct
  misc_feature 1..24: note = H(+)/Cl(-) exchange transporter 7 (101-108)
  source 1..24: mol_type = other RNA
accgccttccgcaccgtggagatc

SEQ ID NO: 47075 - RNA, 84 nt, synthetic construct
  misc_feature 1..84: note = Alpha-1,6-mannosylglycoprotein 6-beta-N-acetylglucosaminyltransferase A (288-315)
  source 1..84: mol_type = other RNA
accgccttcagcggcgggcccctgggcgagctcgtgcagtggtccgacctgatcaccagcctgtacctcctggggcacgacatc

SEQ ID NO: 47076 - RNA, 24 nt, synthetic construct
  misc_feature 1..24: note = Cleavage and polyadenylation specificity factor subunit 2 (239-246)
  source 1..24: mol_type = other RNA
accgccggccgcgtgctggagctc

SEQ ID NO: 47077 - RNA, 27 nt, synthetic construct
  misc_feature 1..27: note = Biorientation of chromosomes in cell division protein 1-like 1 (1268-1276)
  source 1..27: mol_type = other RNA
accgccaaggaccccagcgtgtccatc

SEQ ID NO: 47078 - RNA, 24 nt, synthetic construct
  misc_feature 1..24: note = Guanine nucleotide exchange factor for Rab-3A (87-94)
  source 1..24: mol_type = other RNA
accgccctgaagaccctcgtgatc

SEQ ID NO: 47079 - RNA, 75 nt, synthetic construct
  misc_feature 1..75: note = 60 kDa heat shock protein, mitochondrial (527-551)
  source 1..75: mol_type = other RNA
accgccctgctcgacgccgcgggcgtggccagcctgctgaccacggccgaggtcgtggtgaccgagatccccaag

SEQ ID NO: 47080 - RNA, 84 nt, synthetic construct
  misc_feature 1..84: note = 60 kDa heat shock protein, mitochondrial (527-554)
  source 1..84: mol_type = other RNA
accgccctgctcgacgccgcgggcgtggccagcctgctgaccacggccgaggtcgtggtgaccgagatccccaaggaggagaag

SEQ ID NO: 47081 - RNA, 42 nt, synthetic construct
  misc_feature 1..42: note = Plexin-B2 (1522-1535)
  source 1..42: mol_type = other RNA
accgcccagatcctgagcgacctcgacctgacctcccagcgc

SEQ ID NO: 47082 - RNA, 21 nt, synthetic construct
  misc_feature 1..21: note = 40S ribosomal protein S19 (60-66)
  source 1..21: mol_type = other RNA
accgcccgccacctgtacctc

SEQ ID NO: 47083 - RNA, 48 nt, synthetic construct
  misc_feature 1..48: note = Zinc finger SWIM domain-containing protein 8 (1087-1102)
  source 1..48: mol_type = other RNA
accgccagccagcgctcccccagcaagcacggcgggccgtccgccccc

SEQ ID NO: 47084 - RNA, 51 nt, synthetic construct
  misc_feature 1..51: note = Eukaryotic initiation factor 4A-I (83-99)
  source 1..51: mol_type = other RNA
accgccaccttcgccatcagcatcctgcagcagatcgagctcgacctgaag

SEQ ID NO: 47085 - RNA, 42 nt, synthetic construct
  misc_feature 1..42: note = Tubulin alpha-1C chain (249-262)
  source 1..42: mol_type = other RNA
accgccgtggtcgagccctacaacagcatcctgaccacgcac

SEQ ID NO: 47086 - RNA, 30 nt, synthetic construct
  misc_feature 1..30: note = Endoplasmin (419-428)
  source 1..30: mol_type = other RNA
accgacgacttccacgacatgatgcccaag

SEQ ID NO: 47087 - RNA, 24 nt, synthetic construct
  misc_feature 1..24: note = GPI transamidase component PIG-T (162-169)
  source 1..24: mol_type = other RNA
accgaccactacttcctgcgctac

SEQ ID NO: 47088 - RNA, 42 nt, synthetic construct
  misc_feature 1..42: note = Alpha-enolase (67-80)
  source 1..42: mol_type = other RNA
accgacaaggtggtcatcggcatggacgtggccgccagcgag

SEQ ID NO: 47089 - RNA, 48 nt, synthetic construct
  misc_feature 1..48: note = Alpha-enolase (67-82)
  source 1..48: mol_type = other RNA
accgacaaggtggtcatcggcatggacgtggccgccagcgagttcttc

SEQ ID NO: 47090 - RNA, 42 nt, synthetic construct
  misc_feature 1..42: note = 4F2 cell-surface antigen heavy chain (174-187)
  source 1..42: mol_type = other RNA
accgacctgctccagatcgaccccaacttcggcagcaaggag

SEQ ID NO: 47091 - RNA, 45 nt, synthetic construct
  misc_feature 1..45: note = 4F2 cell-surface antigen heavy chain (174-188)
  source 1..45: mol_type = other RNA
accgacctgctccagatcgaccccaacttcggcagcaaggaggac

SEQ ID NO: 47092 - RNA, 24 nt, synthetic construct
  misc_feature 1..24: note = Synaptotagmin-like protein 2 (283-290)
  source 1..24: mol_type = other RNA
accgacagcgagaccctgcgctac

SEQ ID NO: 47093 - RNA, 21 nt, synthetic construct
  misc_feature 1..21: note = 40S ribosomal protein SA (150-156)
  source 1..21: mol_type = other RNA
accgacagccccctgcgctac

SEQ ID NO: 47094 - RNA, 48 nt, synthetic construct
  misc_feature 1..48: note = Carbonic anhydrase 14 (52-67)
  source 1..48: mol_type = other RNA
accgacagcgtgaccttcgaccccgacctgccggccctccagccccac

SEQ ID NO: 47095 - RNA, 30 nt, synthetic construct
  misc_feature 1..30: note = CD44 antigen (47-56)
  source 1..30: mol_type = other RNA
accgaggccgccgacctgtgcaaggcgttc

SEQ ID NO: 47096 - RNA, 27 nt, synthetic construct
  misc_feature 1..27: note = Rho GTPase-activating protein 5 (467-475)
  source 1..27: mol_type = other RNA
accgaggccgacagcaaggaggtgtac

SEQ ID NO: 47097 - RNA, 30 nt, synthetic construct
  misc_feature 1..30: note = Protein kinase C-binding protein 1 (210-219)
  source 1..30: mol_type = other RNA
accgaggccttcctggccgacgcgaagtgg

SEQ ID NO: 47098 - RNA, 27 nt, synthetic construct
  misc_feature 1..27: note = Inosine-5'-monophosphate dehydrogenase 1 isoform f (446-454)
  source 1..27: mol_type = other RNA
accgaggcccccggcgagtacttcttc

SEQ ID NO: 47099 - RNA, 33 nt, synthetic construct
  misc_feature 1..33: note = Glycogen phosphorylase, muscle form (672-682)
  source 1..33: mol_type = other RNA
accgaggccagcggcaccgggaacatgaagttc

SEQ ID NO: 47100 - RNA, 30 nt, synthetic construct
  misc_feature 1..30: note = Zinc finger BED domain-containing protein 4 (394-403)
  source 1..30: mol_type = other RNA
accgaggacctgcagagccacctcaacccc

SEQ ID NO: 47101 - RNA, 42 nt, synthetic construct
  misc_feature 1..42: note = Large neutral amino acids transporter small subunit 1 (264-277)
  source 1..42: mol_type = other RNA
accgaggagatgatcaacccctaccgcaacctgccgctcgcc

SEQ ID NO: 47102 - RNA, 21 nt, synthetic construct
  misc_feature 1..21: note = Nuclear factor erythroid 2-related factor 1 (9-15)
  source 1..21: mol_type = other RNA
accgagggcctgctccagttc

SEQ ID NO: 47103 - RNA, 27 nt, synthetic construct
  misc_feature 1..27: note = G-protein coupled receptor 98 (3712-3720)
  source 1..27: mol_type = other RNA
accgagggccaggtgctgagcaccatc

SEQ ID NO: 47104 - RNA, 30 nt, synthetic construct
  misc_feature 1..30: note = Fibronectin isoform 7 (376-385)
  source 1..30: mol_type = other RNA
accgagggccgccaggacgggcacctgtgg

SEQ ID NO: 47105 - RNA, 33 nt, synthetic construct
  misc_feature 1..33: note = Tribbles homolog 2 (117-127)
  source 1..33: mol_type = other RNA
accgagatcatcctgggcgagaccaaggcctac

SEQ ID NO: 47106 - RNA, 24 nt, synthetic construct
  misc_feature 1..24: note = Flotillin-2 (60-67)
  source 1..24: mol_type = other RNA
accgagaaggagctgctcgccgtg

SEQ ID NO: 47107 - RNA, 33 nt, synthetic construct
  misc_feature 1..33: note = Centrosomal protein of 41 kDa (40-50)
  source 1..33: mol_type = other RNA
accgagaagctggaggagatcaagaagaactac

SEQ ID NO: 47108 - RNA, 33 nt, synthetic construct
  misc_feature 1..33: note = Integrin alpha-6 (905-915)
  source 1..33: mol_type = other RNA
accgagaagcagatcgacgacaaccgcaagttc

SEQ ID NO: 47109 - RNA, 27 nt, synthetic construct
  misc_feature 1..27: note = Programmed cell death protein 5 (103-111)
  source 1..27: mol_type = other RNA
accgagaagaccacgaccgtgaagttc

SEQ ID NO: 47110 - RNA, 30 nt, synthetic construct
  misc_feature 1..30: note = SH3 domain-binding protein 5 (34-43)
  source 1..30: mol_type = other RNA
accgagctggaggacgcccgccagaagttc

SEQ ID NO: 47111 - RNA, 27 nt, synthetic construct
  misc_feature 1..27: note = Vesicle-trafficking protein SEC22b (140-148)
  source 1..27: mol_type = other RNA
accgagctgcaggacgtgcagcgcatc

SEQ ID NO: 47112 - RNA, 27 nt, synthetic construct
  misc_feature 1..27: note = NHL repeat-containing protein 2 (296-304)
  source 1..27: mol_type = other RNA
accgagaaccacctgatccgcaagatc

SEQ ID NO: 47113 - RNA, 21 nt, synthetic construct
  misc_feature 1..21: note = Zinc finger CCCH domain-containing protein 18 (68-74)
  source 1..21: mol_type = other RNA
accgagccctaccacaactac

SEQ ID NO: 47114 - RNA, 30 nt, synthetic construct
  misc_feature 1..30: note = Baculoviral IAP repeat-containing protein 6 (1992-2001)
  source 1..30: mol_type = other RNA
accgagcagctgcgcaccatcatccggtac

SEQ ID NO: 47115 - RNA, 27 nt, synthetic construct
  misc_feature 1..27: note = Vacuolar protein sorting-associated protein 13C (969-977)
  source 1..27: mol_type = other RNA
accgagcagaccgtgaaggtcgccttc

SEQ ID NO: 47116 - RNA, 27 nt, synthetic construct
  misc_feature 1..27: note = Centrosomal protein C10orf90 isoform X1 (20-28)
  source 1..27: mol_type = other RNA
accgagaccgccgtgcaccgcacgttc

SEQ ID NO: 47117 - RNA, 27 nt, synthetic construct
  misc_feature 1..27: note = Lysosomal-trafficking regulator (2635-2643)
  source 1..27: mol_type = other RNA
accgagaccgagctggcccagcgcctc

SEQ ID NO: 47118 - RNA, 33 nt, synthetic construct
  misc_feature 1..33: note = Receptor-type protein tyrosine phosphatase beta (1331-1341)
  source 1..33: mol_type = other RNA
accgaggtgctggacagccacatccacgcctac

SEQ ID NO: 47119 - RNA, 27 nt, synthetic construct
  misc_feature 1..27: note = Apolipoprotein E (36-44)
  source 1..27: mol_type = other RNA
accgagtggcagagcggccagcgctgg

SEQ ID NO: 47120 - RNA, 27 nt, synthetic construct
  misc_feature 1..27: note = Calmodulin-regulated spectrin-associated protein 2 (1318-1326)
  source 1..27: mol_type = other RNA
accgagtacaccggccccaagctgtac

SEQ ID NO: 47121 - RNA, 27 nt, synthetic construct
  misc_feature 1..27: note = Telomeric repeat-binding factor 1 (223-231)
  source 1..27: mol_type = other RNA
accttccacagcttcttccagcacttc

SEQ ID NO: 47122 - RNA, 30 nt, synthetic construct
  misc_feature 1..30: note Dolichyl-diphosphooligosaccharide-proteinosyltransferase subunit 2 (266-275)
  source 1..30: mol_type = other RNA
accttcatcgccgacagccaccagaacttc

SEQ ID NO: 47123 - RNA, 27 nt, synthetic construct
  misc_feature 1..27: note = Phospholipid transfer protein (118-126)
  source 1..27: mol_type = other RNA
accttcatcaccagcggcatgcgcttc

SEQ ID NO: 47124 - RNA, 18 nt, synthetic construct
  misc_feature 1..18: note = Ras GTPase-activating-like protein IQGAP1 (1614-1619)
  source 1..18: mol_type = other RNA
accttcatgctgcactac

SEQ ID NO: 47125 - RNA, 60 nt, synthetic construct
  misc_feature 1..60: note = ATP synthase-coupling factor 6, mitochondrial (89-108)
  source 1..60: mol_type = other RNA
accttccccaccttcaagttcgaggacccgaagttcgaggtgatcgagaagccccaggcc

SEQ ID NO: 47126 - RNA, 27 nt, synthetic construct
  misc_feature 1..27: note = Zinc finger protein 480 (28-36)
  source 1..27: mol_type = other RNA
accttccgcgacgtggccatcgagttc

SEQ ID NO: 47127 - RNA, 27 nt, synthetic construct
  misc_feature 1..27: note = Zinc finger protein 98 (14-22)
  source 1..27: mol_type = other RNA
accttccgcgacgtggccctggagttc

SEQ ID NO: 47128 - RNA, 27 nt, synthetic construct
  misc_feature 1..27: note = Zinc finger protein 697 (8-16)
  source 1..27: mol_type = other RNA
accttcagcgtgtccagccacctgttc

SEQ ID NO: 47129 - RNA, 24 nt, synthetic construct
  misc_feature 1..24: note = Bestrophin-1 (574-581)
  source 1..24: mol_type = other RNA
accttcaccggcatcctggggaag

SEQ ID NO: 47130 - RNA, 30 nt, synthetic construct
  misc_feature 1..30: note = Glyceraldehyde-3-phosphate dehydrogenase (211-220)
  source 1..30: mol_type = other RNA
accggcgccgccaaggcggtggggaaggtc

SEQ ID NO: 47131 - RNA, 45 nt, synthetic construct
  misc_feature 1..45: note = 4F2 cell-surface antigen heavy chain (120-134)
  source 1..45: mol_type = other RNA
accggcgccctgtaccgcatcggggacctccaggccttccagggc

SEQ ID NO: 47132 - RNA, 21 nt, synthetic construct
  misc_feature 1..21: note = Glia-derived nexin (397-403)
  source 1..21: mol_type = other RNA
accggcgccgtgctgttcatg

SEQ ID NO: 47133 - RNA, 27 nt, synthetic construct
  misc_feature 1..27: note = DNA-dependent protein kinase catalytic subunit (402-410)
  source 1..27: mol_type = other RNA
accggcgacgaccgcgtgtaccagatg

SEQ ID NO: 47134 - RNA, 27 nt, synthetic construct
  misc_feature 1..27: note = Hsp90 co-chaperone Cdc37 (370-378)
  source 1..27: mol_type = other RNA
accggcgacgagaaggacgtgagcgtc

SEQ ID NO: 47135 - RNA, 27 nt, synthetic construct
  misc_feature 1..27: note = Ubiquitin carboxyl-terminal hydrolase 8 (508-516)
  source 1..27: mol_type = other RNA
accggcgacgtgccccacaccagcgtc

SEQ ID NO: 47136 - RNA, 42 nt, synthetic construct
  misc_feature 1..42: note = Basement membrane-specific heparan sulfate proteoglycan core protein (351-364)
  source 1..42: mol_type = other RNA
accggcgagttcaccgtggagcccgtcccggagggggcccag

SEQ ID NO: 47137 - RNA, 33 nt, synthetic construct
  misc_feature 1..33: note = Titin (7053-7063)
  source 1..33: mol_type = other RNA
accggcggggtgctgggcgccagctgcatcctc

SEQ ID NO: 47138 - RNA, 42 nt, synthetic construct
  misc_feature 1..42: note = Transferrin receptor protein 1 (518-531)
  source 1..42: mol_type = other RNA
accggccagttcctgtaccaggacagcaactgggcctccaag

SEQ ID NO: 47139 - RNA, 54 nt, synthetic construct
  misc_feature 1..54: note = Beta-secretase 2 (111-128)
  source 1..54: mol_type = other RNA
accggcagctccaacttcgccgtggccgggaccccccacagctacatcgacacg

SEQ ID NO: 47140 - RNA, 99 nt, synthetic construct
  misc_feature 1..99: note = Histone-lysine N-methyltransferase, H3 lysine-36 and H4 lysine-20 specific (2131-2163)
  source 1..99: mol_type = other RNA
acccacctggccgagcagagcaccggcatggccgcgcaggcccccaagatgtccgacaagccgcccgccgacacgaaccagatgctcagcctgtccaag

SEQ ID NO: 47141 - RNA, 27 nt, synthetic construct
  misc_feature 1..27: note = Ras GTPase-activating-like protein IQGAP1 (446-454)
  source 1..27: mol_type = other RNA
acccaccccgagctgagcgtggccgtc

SEQ ID NO: 47142 - RNA, 27 nt, synthetic construct
  misc_feature 1..27: note = Phosphatidylinositol 4-kinase alpha (399-407)
  source 1..27: mol_type = other RNA
accatcgacgccgacgcccccgagctg

SEQ ID NO: 47143 - RNA, 24 nt, synthetic construct
  misc_feature 1..24: note = Protein prune homolog 2 (1960-1967)
  source 1..24: mol_type = other RNA
accatcgacgacatgagcaagctg

SEQ ID NO: 47144 - RNA, 24 nt, synthetic construct
  misc_feature 1..24: note = DNA damage-binding protein 1 (703-710)
  source 1..24: mol_type = other RNA
accatcgacgagatccagaagctg

SEQ ID NO: 47145 - RNA, 24 nt, synthetic construct
  misc_feature 1..24: note = Calmodulin (66-73)
  source 1..24: mol_type = other RNA
accatcgacttccccgagttcctg

SEQ ID NO: 47146 - RNA, 24 nt, synthetic construct
  misc_feature 1..24: note = Filamin-A (2133-2140)
  source 1..24: mol_type = other RNA
accatcgacggccccagcaaggtg

SEQ ID NO: 47147 - RNA, 27 nt, synthetic construct
  misc_feature 1..27: note = Coatomer subunit alpha (591-599)
  source 1..27: mol_type = other RNA
accatcgaccccaccgagttcaagttc

SEQ ID NO: 47148 - RNA, 27 nt, synthetic construct
  misc_feature 1..27: note = Alpha-actinin-1 (506-514)
  source 1..27: mol_type = other RNA
accatcgaccagctgtacctcgagtac

SEQ ID NO: 47149 - RNA, 24 nt, synthetic construct
  misc_feature 1..24: note = HEAT repeat-containing protein 1 (38-45)
  source 1..24: mol_type = other RNA
accatcgaccgcgacaccgccttc

SEQ ID NO: 47150 - RNA, 33 nt, synthetic construct
  misc_feature 1..33: note = Melanoma-associated antigen C2 (347-357)
  source 1..33: mol_type = other RNA
accatcgacaccgccgacgacgccacggtgatg

SEQ ID NO: 47151 - RNA, 27 nt, synthetic construct
  misc_feature 1..27: note = Vascular endothelial growth factor receptor 2 (1076-1084)
  source 1..27: mol_type = other RNA
accatcttcgaccgcgtgtacaccatc

SEQ ID NO: 47152 - RNA, 27 nt, synthetic construct
  misc_feature 1..27: note = Tripartite motif-containing protein 2 (338-346)
  source 1..27: mol_type = other RNA
accatcatcggccagcccatgagcgtg

SEQ ID NO: 47153 - RNA, 27 nt, synthetic construct
  misc_feature 1..27: note = Obscurin-like protein 1 (641-649)
  source 1..27: mol_type = other RNA
accatcatccagggcacctggttcctg

SEQ ID NO: 47154 - RNA, 36 nt, synthetic construct
  misc_feature 1..36: note = Lysosome-associated membraneoprotein 1 (247-258)
  source 1..36: mol_type = other RNA
accatcctgcccgacgcccgcgacccggccttcaag

SEQ ID NO: 47155 - RNA, 27 nt, synthetic construct
  misc_feature 1..27: note = Eukaryotic translation initiation factor 3 subunit A (435-443)
  source 1..27: mol_type = other RNA
accatcctgcgcctcctgcagcaggtg

SEQ ID NO: 47156 - RNA, 27 nt, synthetic construct
  misc_feature 1..27: note = Putative ATP-dependent RNA helicase DHX30 (700-708)
  source 1..27: mol_type = other RNA
accatcaacgacatcgtgcacgtcgtg

SEQ ID NO: 47157 - RNA, 27 nt, synthetic construct
  misc_feature 1..27: note = Chloride intracellular channel protein 1 (198-206)
  source 1..27: mol_type = other RNA
accatccccgaggccttccgcggcgtg

SEQ ID NO: 47158 - RNA, 27 nt, synthetic construct
  misc_feature 1..27: note = Lysosomal-trafficking regulator (1800-1808)
  source 1..27: mol_type = other RNA
accatccagggcatcctgcacgagatc

SEQ ID NO: 47159 - RNA, 27 nt, synthetic construct
  misc_feature 1..27: note = Plexin-B3 (1547-1555)
  source 1..27: mol_type = other RNA
accatcacccaggtgaaggagaaggtc

SEQ ID NO: 47160 - RNA, 30 nt, synthetic construct
  misc_feature 1..30: note = Serine/threonine-protein kinase DCLK1 (231-240)
  source 1..30: mol_type = other RNA
accatcgtggacggccccctgtacaccgtc

SEQ ID NO: 47161 - RNA, 27 nt, synthetic construct
  misc_feature 1..27: note = Phosphopantothenoylcysteine decarboxylase (109-117)
  source 1..27: mol_type = other RNA
accatcgtggacaaggtcaaggaggtg

SEQ ID NO: 47162 - RNA, 33 nt, synthetic construct
  misc_feature 1..33: note = Heat shock protein HSP 90-alpha (90-100)
  source 1..33: mol_type = other RNA
accatcgtggacaccggcatcgggatgacgaag

SEQ ID NO: 47163 - RNA, 27 nt, synthetic construct
  misc_feature 1..27: note = Mitotic checkpoint serine/threonine-protein kinase BUB1 beta (868-876)
  source 1..27: mol_type = other RNA
accatcgtggagatgctgcacaaggcc

SEQ ID NO: 47164 - RNA, 33 nt, synthetic construct
  misc_feature 1..33: note = Heat shock 70 kDa protein 13 (95-105)
  source 1..33: mol_type = other RNA
accatctacgacgccaagcgcttcatcggcaag

SEQ ID NO: 47165 - RNA, 27 nt, synthetic construct
  misc_feature 1..27: note = Probable dolichyl pyrophosphate Glc1Man9GlcNAc2 alpha-1,3-glucosyltransferase (438-446)
  source 1..27: mol_type = other RNA
accatctacagcatctccagcctgaag

SEQ ID NO: 47166 - RNA, 81 nt, synthetic construct
  misc_feature 1..81: note = Activating signal cointegrator 1 complex subunit 3 (112-138)
  source 1..81: mol_type = other RNA
accaaggccatcaagcagatgttcggccccttcccgagctccagcgccaccgcggcctgcaacgccacgaaccgcatcatc

SEQ ID NO: 47167 - RNA, 81 nt, synthetic construct
  misc_feature 1..81: note = Transmembrane protease serine 9 (436-462)
  source 1..81: mol_type = other RNA
accaaggccagcatgcccctggccccgaccatggcgcccgcccccgccgccccctccacggcctggccgaccagccccgag

SEQ ID NO: 47168 - RNA, 27 nt, synthetic construct
  misc_feature 1..27: note = Protein kinase C delta type (402-410)
  source 1..27: mol_type = other RNA
accctggccgccgagaaccccttcctc

SEQ ID NO: 47169 - RNA, 27 nt, synthetic construct
  misc_feature 1..27: note = Hexokinase-2 (389-397)
  source 1..27: mol_type = other RNA
accctggccgccgtgctccagcgcatc

SEQ ID NO: 47170 - RNA, 27 nt, synthetic construct
  misc_feature 1..27: note = Protein SOGA1 (670-678)
  source 1..27: mol_type = other RNA
accctggccgacatgaaggtgaccctc

SEQ ID NO: 47171 - RNA, 27 nt, synthetic construct
  misc_feature 1..27: note = Ethanolaminephosphotransferase 1 (355-363)
  source 1..27: mol_type = other RNA
accctggcccacatccactacggcgtg

SEQ ID NO: 47172 - RNA, 30 nt, synthetic construct
  misc_feature 1..30: note = WD repeat-containing protein 73 (144-153)
  source 1..30: mol_type = other RNA
accctggcccccggcgtgctccacggggcc

SEQ ID NO: 47173 - RNA, 27 nt, synthetic construct
  misc_feature 1..27: note = Protein kinase C delta-binding protein (77-85)
  source 1..27: mol_type = other RNA
accctggcccagctcctggccaaggcg

SEQ ID NO: 47174 - RNA, 33 nt, synthetic construct
  misc_feature 1..33: note = E3 ubiquitin-protein ligase UBR4 (345-355)
  source 1..33: mol_type = other RNA
accctggacgccgccatcagcaaggtgcaggtc

SEQ ID NO: 47175 - RNA, 27 nt, synthetic construct
  misc_feature 1..27: note = Melanoma-associated antigen C2 (140-148)
  source 1..27: mol_type = other RNA
accctggacgagaaggtggccgagctc

SEQ ID NO: 47176 - RNA, 27 nt, synthetic construct
  misc_feature 1..27: note = Lysine-specific demethylase 5C (1342-1350)
  source 1..27: mol_type = other RNA
accctggacgagaaccacagcatcccc

SEQ ID NO: 47177 - RNA, 30 nt, synthetic construct
  misc_feature 1..30: note = Calcium-dependent secretion activator 2 (651-660)
  source 1..30: mol_type = other RNA
accctggaccaccgcctcaacgacagctac

SEQ ID NO: 47178 - RNA, 24 nt, synthetic construct
  misc_feature 1..24: note = Rho guanine nucleotide exchange factor 2 (487-494)
  source 1..24: mol_type = other RNA
accctggacaagcccagcgtggtc

SEQ ID NO: 47179 - RNA, 27 nt, synthetic construct
  misc_feature 1..27: note = Alpha-mannosidase 2C1 (688-696)
  source 1..27: mol_type = other RNA
accctggacaacggcatcatccgcgtg

SEQ ID NO: 47180 - RNA, 27 nt, synthetic construct
  misc_feature 1..27: note = RING finger protein 150 (368-376)
  source 1..27: mol_type = other RNA
accctggaccccgccgtgcgcaccgtc

SEQ ID NO: 47181 - RNA, 27 nt, synthetic construct
  misc_feature 1..27: note = Proteinase-activated receptor 1 (37-45)
  source 1..27: mol_type = other RNA
accctggacccccgcagcttcctcctg

SEQ ID NO: 47182 - RNA, 24 nt, synthetic construct
  misc_feature 1..24: note = Eukaryotic initiation factor 4A-I (242-249)
  source 1..24: mol_type = other RNA
accctggagggcatccgccagttc

SEQ ID NO: 47183 - RNA, 45 nt, synthetic construct
  misc_feature 1..45: note = Kin of IRRE-like protein 1 (337-351)
  source 1..45: mol_type = other RNA
accctggagcgctacaccgtggagcggacgaacagcggctccggg

SEQ ID NO: 47184 - RNA, 27 nt, synthetic construct
  misc_feature 1..27: note = TBC1 domain family member 4 (1082-1090)
  source 1..27: mol_type = other RNA
accctgttcgccagccagttctccctc

SEQ ID NO: 47185 - RNA, 27 nt, synthetic construct
  misc_feature 1..27: note = Centrosomal protein C10orf90 (172-180)
  source 1..27: mol_type = other RNA
accctgttccaggcccccccggccctc

SEQ ID NO: 47186 - RNA, 33 nt, synthetic construct
  misc_feature 1..33: note = Ubiquitin carboxyl-terminal hydrolase 11 (92-102)
  source 1..33: mol_type = other RNA
accctgttccaggacgagatcaactggcgcctc

SEQ ID NO: 47187 - RNA, 27 nt, synthetic construct
  misc_feature 1..27: note = Transmembraneoprotein NMB (202-210)
  source 1..27: mol_type = other RNA
accctgggcccccagctcatggaggtg

SEQ ID NO: 47188 - RNA, 30 nt, synthetic construct
  misc_feature 1..30: note = Transmembrane channel-like protein 4 (331-340)
  source 1..30: mol_type = other RNA
accctgggccagcaggcccgcgtgtggctc

SEQ ID NO: 47189 - RNA, 24 nt, synthetic construct
  misc_feature 1..24: note = E3 ubiquitin-protein ligase TRIP12 (804-811)
  source 1..24: mol_type = other RNA
accctgggccgcgtgtacaccatc

SEQ ID NO: 47190 - RNA, 24 nt, synthetic construct
  misc_feature 1..24: note = Ubiquitin-60S ribosomal protein L40 (71-78)
  source 1..24: mol_type = other RNA
accctgcacctcgtgctgcgcctg

SEQ ID NO: 47191 - RNA, 27 nt, synthetic construct
  misc_feature 1..27: note = Alpha-adducin (222-230)
  source 1..27: mol_type = other RNA
accctgcacagcgccatctacgccgcg

SEQ ID NO: 47192 - RNA, 27 nt, synthetic construct
  misc_feature 1..27: note = Peptidyl-tRNA hydrolase 2, mitochondrial (125-133)
  source 1..27: mol_type = other RNA
accctgatcgccctcctggcccacgcg

SEQ ID NO: 47193 - RNA, 27 nt, synthetic construct
  misc_feature 1..27: note = Nebulin (5609-5617)
  source 1..27: mol_type = other RNA
accctgatcgagagcgacctcaagtac

SEQ ID NO: 47194 - RNA, 33 nt, synthetic construct
  misc_feature 1..33: note = Ethanolamine-phosphate phospho-lyase (355-365)
  source 1..33: mol_type = other RNA
accctgatcggcgacatccgcgggatcggcctc

SEQ ID NO: 47195 - RNA, 27 nt, synthetic construct
  misc_feature 1..27: note = COP9 signalosome complex subunit 7a (29-37)
  source 1..27: mol_type = other RNA
accctgatccaccaggtgctcgaggcc

SEQ ID NO: 47196 - RNA, 27 nt, synthetic construct
  misc_feature 1..27: note = Translocating chain-associated membrane protein 1 (264-272)
  source 1..27: mol_type = other RNA
accctgatcctcagcgtgctgaccgtc

SEQ ID NO: 47197 - RNA, 27 nt, synthetic construct
  misc_feature 1..27: note = Essential MCU regulator, mitochondrial (82-90)
  source 1..27: mol_type = other RNA
accctgatcagcaagaacttcgccgcc

SEQ ID NO: 47198 - RNA, 42 nt, synthetic construct
  misc_feature 1..42: note = Ryanodine receptor 1 (3790-3803)
  source 1..42: mol_type = other RNA
accctgaagctcggcatcagcatcctgaacgggggcaacgcc

SEQ ID NO: 47199 - RNA, 30 nt, synthetic construct
  misc_feature 1..30: note = General transcription factor IIH subunit 3 (90-99)
  source 1..30: mol_type = other RNA
accctgctcgccggcagcctggccaaggcg

SEQ ID NO: 47200 - RNA, 36 nt, synthetic construct
  misc_feature 1..36: note = ETS translocation variant 5 (376-387)
  source 1..36: mol_type = other RNA
accctgctcgacgaccccgccaacgcccacttcatc

SEQ ID NO: 47201 - RNA, 27 nt, synthetic construct
  misc_feature 1..27: note = Protein kinase C delta-binding protein (27-35)
  source 1..27: mol_type = other RNA
accctgctcgagaagctggccagcatg

SEQ ID NO: 47202 - RNA, 27 nt, synthetic construct
  misc_feature 1..27: note = Spermatogenesis-associated protein 20 (211-219)
  source 1..27: mol_type = other RNA
accctgctcgagaacagccagcgcgtg

SEQ ID NO: 47203 - RNA, 27 nt, synthetic construct
  misc_feature 1..27: note = E3 ubiquitin-protein ligase HERC2 (204-212)
  source 1..27: mol_type = other RNA
accctgctcgagagcatccagcacgtg

SEQ ID NO: 47204 - RNA, 27 nt, synthetic construct
  misc_feature 1..27: note = Putative WAS protein family homolog 3 (362-370)
  source 1..27: mol_type = other RNA
accctgctcgagagcatccgccaggcc

SEQ ID NO: 47205 - RNA, 27 nt, synthetic construct
  misc_feature 1..27: note = WD repeat-containing protein 26 (56-64)
  source 1..27: mol_type = other RNA
accctgctcggcatcatcgtgcgcatg

SEQ ID NO: 47206 - RNA, 78 nt, synthetic construct
  misc_feature 1..78: note = Vimentin (275-300)
  source 1..78: mol_type = other RNA
accctgctcatcaagaccgtggagacgcgcgacggccaggtcatcaacgagaccagccagcaccacgacgacctggag

SEQ ID NO: 47207 - RNA, 27 nt, synthetic construct
  misc_feature 1..27: note = Maltase-glucoamylase (871-879)
  source 1..27: mol_type = other RNA
accctgctcccctacctgtacaccctg

SEQ ID NO: 47208 - RNA, 27 nt, synthetic construct
  misc_feature 1..27: note = Vacuolar protein-sorting-associated protein 25 (148-156)
  source 1..27: mol_type = other RNA
accctgctccgcgccctgcaggccctg

SEQ ID NO: 47209 - RNA, 27 nt, synthetic construct
  misc_feature 1..27: note = Histone acetyltransferase KAT2B (310-318)
  source 1..27: mol_type = other RNA
accctgctccgcagcgtgttcaccgtc

SEQ ID NO: 47210 - RNA, 33 nt, synthetic construct
  misc_feature 1..33: note = Importin-7 (679-689)
  source 1..33: mol_type = other RNA
accctgctcagcgacaccaagtacctggagatg

SEQ ID NO: 47211 - RNA, 27 nt, synthetic construct
  misc_feature 1..27: note = Integrator complex subunit 2 (1086-1094)
  source 1..27: mol_type = other RNA
accctgctcaccgtgctgacgcaggcc

SEQ ID NO: 47212 - RNA, 33 nt, synthetic construct
  misc_feature 1..33: note = Rho GTPase-activating protein 7 (136-146)
  source 1..33: mol_type = other RNA
accctgatggacctcagcgagcgccaggaggtg

SEQ ID NO: 47213 - RNA, 21 nt, synthetic construct
  misc_feature 1..21: note = Glutamine-fructose-6-phosphate aminotransferase (isomerizing) 1 (429-435)
  source 1..21: mol_type = other RNA
accctgatgggcctccgctac

SEQ ID NO: 47214 - RNA, 27 nt, synthetic construct
  misc_feature 1..27: note = Ubiquitin conjugation factor E4 B (1239-1247)
  source 1..27: mol_type = other RNA
accctgatgaccgaccccgtgcgcctc

SEQ ID NO: 47215 - RNA, 27 nt, synthetic construct
  misc_feature 1..27: note = Nuclear factor related to kappa-B-binding protein (308-316)
  source 1..27: mol_type = other RNA
accctgaacgacatcatgacccgcgtg

SEQ ID NO: 47216 - RNA, 27 nt, synthetic construct
  misc_feature 1..27: note = EMILIN-1 (236-244)
  source 1..27: mol_type = other RNA
accctgaacgagatccagcaccagctc

SEQ ID NO: 47217 - RNA, 27 nt, synthetic construct
  misc_feature 1..27: note = Kelch-like protein 21 (467-475)
  source 1..27: mol_type = other RNA
accctgaacggcctcatgtacttcgtg

SEQ ID NO: 47218 - RNA, 33 nt, synthetic construct
  misc_feature 1..33: note = Nuclear pore complex protein Nup214 (188-198)
  source 1..33: mol_type = other RNA
accctgcccagcaccgtggccgtcacgtccgtg

SEQ ID NO: 47219 - RNA, 27 nt, synthetic construct
  misc_feature 1..27: note = Nuclear mitotic apparatus protein 1 (151-159)
  source 1..27: mol_type = other RNA
accctgcaggaggccctcgcccacgcg

SEQ ID NO: 47220 - RNA, 27 nt, synthetic construct
  misc_feature 1..27: note = DENN domain-containing protein 5A (930-938)
  source 1..27: mol_type = other RNA
accctgcaggagttcaacatcaccctc

SEQ ID NO: 47221 - RNA, 27 nt, synthetic construct
  misc_feature 1..27: note = Uveal autoantigen with coiled-coil domains and ankyrin repeats (714-722)
  source 1..27: mol_type = other RNA
accctgcagaaggagatcgagaaggtg

SEQ ID NO: 47222 - RNA, 27 nt, synthetic construct
  misc_feature 1..27: note = Glycogen phosphorylase, liver form (95-103)
  source 1..27: mol_type = other RNA
accctgcagaacaccatgatcaacctc

SEQ ID NO: 47223 - RNA, 30 nt, synthetic construct
  misc_feature 1..30: note = Hemicentin-1 (4435-4444)
  source 1..30: mol_type = other RNA
accctgcagagccccccgatcatcaccctc

SEQ ID NO: 47224 - RNA, 27 nt, synthetic construct
  misc_feature 1..27: note = Interleukin-6 receptor subunit beta (3-11)
  source 1..27: mol_type = other RNA
accctgcagacctggctcgtgcaggcc

SEQ ID NO: 47225 - RNA, 27 nt, synthetic construct
  misc_feature 1..27: note = Alpha-actinin-4 (226-234)
  source 1..27: mol_type = other RNA
accctgagcgacatcaaggccctcatc

SEQ ID NO: 47226 - RNA, 27 nt, synthetic construct
  misc_feature 1..27: note = Nucleolar pre-ribosomal-associated protein 1 (546-554)
  source 1..27: mol_type = other RNA
accctgagcgaggacatgatcctcctg

SEQ ID NO: 47227 - RNA, 27 nt, synthetic construct
  misc_feature 1..27: note = Serine/threonine-protein kinase ULK2 (102-110)
  source 1..27: mol_type = other RNA
accctgagcgaggacaccatccgcgtg

SEQ ID NO: 47228 - RNA, 27 nt, synthetic construct
  misc_feature 1..27: note = Alpha-actinin-1 (426-434)
  source 1..27: mol_type = other RNA
accctgagcgagatcaaggccctcctg

SEQ ID NO: 47229 - RNA, 33 nt, synthetic construct
  misc_feature 1..33: note = Ribosomal protein S6 kinase beta-1 (376-386)
  source 1..33: mol_type = other RNA
accctgagcgagtccgccaaccaggtgttcctc

SEQ ID NO: 47230 - RNA, 33 nt, synthetic construct
  misc_feature 1..33: note = TRPM8 channel-associated factor 1 (309-319)
  source 1..33: mol_type = other RNA
accctgagcggcctcctggccgtggggggcatc

SEQ ID NO: 47231 - RNA, 27 nt, synthetic construct
  misc_feature 1..27: note = RRP12-like protein (274-282)
  source 1..27: mol_type = other RNA
accctgagccacgtgctcgtcaccgcc

SEQ ID NO: 47232 - RNA, 27 nt, synthetic construct
  misc_feature 1..27: note = CLIP-associating protein 1 (164-172)
  source 1..27: mol_type = other RNA
accctgagcaagatcgtgccccacatc

SEQ ID NO: 47233 - RNA, 30 nt, synthetic construct
  misc_feature 1..30: note = Biorientation of chromosomes in cell division protein 1-like 1 (282-291)
  source 1..30: mol_type = other RNA
accctgagccccgtgaaggccggcccggcc

SEQ ID NO: 47234 - RNA, 42 nt, synthetic construct
  misc_feature 1..42: note = Beta-2-microglobulin (85-98)
  source 1..42: mol_type = other RNA
accctgagccagcccaagatcgtgaagtgggaccgcgacatg

SEQ ID NO: 47235 - RNA, 27 nt, synthetic construct
  misc_feature 1..27: note = Laminin subunit gamma-1 (1109-1117)
  source 1..27: mol_type = other RNA
accctgagctcccagatcagccgcctc

SEQ ID NO: 47236 - RNA, 81 nt, synthetic construct
  misc_feature 1..81: note = Heat shock cognate 71 kDa protein (273-299)
  source 1..81: mol_type = other RNA
accctgagctccagcacccaggcctccatcgagatcgacagcctctacgagggcatcgacttctacacgtccatcacccgc

SEQ ID NO: 47237 - RNA, 81 nt, synthetic construct
  misc_feature 1..81: note = Heat shock 70 kDa protein 1B (273-299)
  source 1..81: mol_type = other RNA
accctgagctccagcacccaggcctccctcgagatcgacagcctgttcgagggcatcgacttctacacgtccatcacccgc

SEQ ID NO: 47238 - RNA, 27 nt, synthetic construct
  misc_feature 1..27: note = MAX gene-associated protein (1410-1418)
  source 1..27: mol_type = other RNA
accctgagcaccgtgatctccaaggtc

SEQ ID NO: 47239 - RNA, 33 nt, synthetic construct
  misc_feature 1..33: note = Semaphorin-4C (57-67)
  source 1..33: mol_type = other RNA
accctgaccgagcccacgggcctcctgtacgtg

SEQ ID NO: 47240 - RNA, 27 nt, synthetic construct
  misc_feature 1..27: note = Ras GTPase-activating protein 3 (509-517)
  source 1..27: mol_type = other RNA
accctgaccctcatcagcaagacggtg

SEQ ID NO: 47241 - RNA, 30 nt, synthetic construct
  misc_feature 1..30: note = 26S proteasome non-ATPase regulatory subunit 12 (319-328)
  source 1..30: mol_type = other RNA
accctggtggaggactacggcatggagctc

SEQ ID NO: 47242 - RNA, 27 nt, synthetic construct
  misc_feature 1..27: note = Aggrecan core protein (1921-1929)
  source 1..27: mol_type = other RNA
accctggtggagagcgtcacccaggcc

SEQ ID NO: 47243 - RNA, 27 nt, synthetic construct
  misc_feature 1..27: note = WD repeat-containing protein 5B (36-44)
  source 1..27: mol_type = other RNA
accctggtgggccacaccgaggccgtc

SEQ ID NO: 47244 - RNA, 27 nt, synthetic construct
  misc_feature 1..27: note = Transcription factor SOX-9 (87-95)
  source 1..27: mol_type = other RNA
accctggtgcccatgccggtccgcgtg

SEQ ID NO: 47245 - RNA, 27 nt, synthetic construct
  misc_feature 1..27: note = Eukaryotic translation initiation factor 4 gamma 1 (1438-1446)
  source 1..27: mol_type = other RNA
accctggtgcgcgccctcatgaccgcc

SEQ ID NO: 47246 - RNA, 27 nt, synthetic construct
  misc_feature 1..27: note = Cyclin-dependent kinase 3 (165-173)
  source 1..27: mol_type = other RNA
accctgtggtaccgcgcccccgagatc

SEQ ID NO: 47247 - RNA, 27 nt, synthetic construct
  misc_feature 1..27: note = Cyclin-dependent kinase 11B (347-355)
  source 1..27: mol_type = other RNA
accctgtggtaccgcgcccccgagctc

SEQ ID NO: 47248 - RNA, 27 nt, synthetic construct
  misc_feature 1..27: note = Cyclin-dependent kinase 4 (103-111)
  source 1..27: mol_type = other RNA
accctgtggtaccgcgcccccgaggtg

SEQ ID NO: 47249 - RNA, 33 nt, synthetic construct
  misc_feature 1..33: note = Cyclin-dependent kinase 4 (103-113)
  source 1..33: mol_type = other RNA
accctgtggtaccgcgcccccgaggtgctcctg

SEQ ID NO: 47250 - RNA, 27 nt, synthetic construct
  misc_feature 1..27: note = Cyclin-dependent kinase 9 (191-199)
  source 1..27: mol_type = other RNA
accctgtggtaccgccccccggagctc

SEQ ID NO: 47251 - RNA, 27 nt, synthetic construct
  misc_feature 1..27: note = Bifunctional lysine-specific demethylase and histidyl-hydroxylase NO66 (625-633)
  source 1..27: mol_type = other RNA
accctgtacgacaagggcctcctgctg

SEQ ID NO: 47252 - RNA, 27 nt, synthetic construct
  misc_feature 1..27: note = Ubiquitin-conjugating enzyme E2 G1 (48-56)
  source 1..27: mol_type = other RNA
accctgtacgagggcggggtgttcaag

SEQ ID NO: 47253 - RNA, 27 nt, synthetic construct
  misc_feature 1..27: note = Vacuolar protein sorting-associated protein 13B (1255-1263)
  source 1..27: mol_type = other RNA
accatggccggccccgtgccgaccagc

SEQ ID NO: 47254 - RNA, 24 nt, synthetic construct
  misc_feature 1..24: note = Insulin receptor substrate 2 (544-551)
  source 1..24: mol_type = other RNA
accatggaccgccccctgagccac

SEQ ID NO: 47255 - RNA, 27 nt, synthetic construct
  misc_feature 1..27: note = Polyadenylate-binding protein 1 (489-497)
  source 1..27: mol_type = other RNA
accatgggcccccgcccggccgccgcg

SEQ ID NO: 47256 - RNA, 30 nt, synthetic construct
  misc_feature 1..30: note = ER membrane protein complex subunit 1 (975-984)
  source 1..30: mol_type = other RNA
accatgatcaccaagcgcctggcccaggtg

SEQ ID NO: 47257 - RNA, 24 nt, synthetic construct
  misc_feature 1..24: note = Chondroitin sulfate proteoglycan 4 (21-28)
  source 1..24: mol_type = other RNA
accatgctggcccgcctcgccagc

SEQ ID NO: 47258 - RNA, 27 nt, synthetic construct
  misc_feature 1..27: note = Protein wntless homolog (257-265)
  source 1..27: mol_type = other RNA
accatgatgagccgccccccggtgctg

SEQ ID NO: 47259 - RNA, 48 nt, synthetic construct
  misc_feature 1..48: note = Cytoplasmic polyadenylation element-binding protein 2 (92-107)
  source 1..48: mol_type = other RNA
accatgcaggacgagctgctcctgggcctgacccagcagcccgcccgc

SEQ ID NO: 47260 - RNA, 27 nt, synthetic construct
  misc_feature 1..27: note = Gamma-aminobutyric acid receptor subunit beta-2 (6-14)
  source 1..27: mol_type = other RNA
accatgaccacgatcaacacccacctg

SEQ ID NO: 47261 - RNA, 27 nt, synthetic construct
  misc_feature 1..27: note = Eukaryotic translation initiation factor 4 gamma 1 (249-257)
  source 1..27: mol_type = other RNA
accatgaccacgatccagatgagcgtg

SEQ ID NO: 47262 - RNA, 21 nt, synthetic construct
  misc_feature 1..21: note = Cyclin-dependent kinase 13 (257-263)
  source 1..21: mol_type = other RNA
accaacaaggtgatcaccctg

SEQ ID NO: 47263 - RNA, 33 nt, synthetic construct
  misc_feature 1..33: note = Ankyrin-3 (871-881)
  source 1..33: mol_type = other RNA
accaacgtgagcgcccgcttctggctggccgac

SEQ ID NO: 47264 - RNA, 27 nt, synthetic construct
  misc_feature 1..27: note = Guanine nucleotide exchange factor for Rab-3A (97-105)
  source 1..27: mol_type = other RNA
acccccgccagcccgaaccgcgagctg

SEQ ID NO: 47265 - RNA, 39 nt, synthetic construct
  misc_feature 1..39: note = Sterol regulatory element-binding protein 1 (959-971)
  source 1..39: mol_type = other RNA
acccccgccagctccagcatcgacaaggccgtgcagctg

SEQ ID NO: 47266 - RNA, 48 nt, synthetic construct
  misc_feature 1..48: note = Clathrin heavy chain 1 (394-409)
  source 1..48: mol_type = other RNA
acccccgacaccatccgccggttccagagcgtgccggcccagcccggc

SEQ ID NO: 47267 - RNA, 21 nt, synthetic construct
  misc_feature 1..21: note = TRAF2 and NCK-interacting protein kinase (190-196)
  source 1..21: mol_type = other RNA
acccccgagatccgcaagtac

SEQ ID NO: 47268 - RNA, 24 nt, synthetic construct
  misc_feature 1..24: note = Importin-7 (508-515)
  source 1..24: mol_type = other RNA
acccccttcatccgcccggtgatg

SEQ ID NO: 47269 - RNA, 27 nt, synthetic construct
  misc_feature 1..27: note = (Pyruvate dehydrogenase (acetyl-transferring))-phosphatase 1, mitochondrial (83-91)
  source 1..27: mol_type = other RNA
accccccacccggcctacgccaccttc

SEQ ID NO: 47270 - RNA, 39 nt, synthetic construct
  misc_feature 1..39: note = Zinc finger protein 354B (90-102)
  source 1..39: mol_type = other RNA
acccccaagatgaccaagagcacgcagacccaggactcc

SEQ ID NO: 47271 - RNA, 24 nt, synthetic construct
  misc_feature 1..24: note = ATP-dependent RNA helicase DDX51 (308-315)
  source 1..24: mol_type = other RNA
acccccctgcgcgtgagcctcgtc

SEQ ID NO: 47272 - RNA, 30 nt, synthetic construct
  misc_feature 1..30: note = Homeobox protein TGIF1 (249-258)
  source 1..30: mol_type = other RNA
acccccccgcccaccccccccgacctgaac

SEQ ID NO: 47273 - RNA, 63 nt, synthetic construct
  misc_feature 1..63: note = Annexin A2 (19-39)
  source 1..63: mol_type = other RNA
acccccccgagcgcctacggctccgtgaaggcctacaccaacttcgacgcggagcgcgacgcc

SEQ ID NO: 47274 - RNA, 33 nt, synthetic construct
  misc_feature 1..33: note = Nodal modulator 1 (365-375)
  source 1..33: mol_type = other RNA
accccccagctggccgacatcatcgccaccggc

SEQ ID NO: 47275 - RNA, 27 nt, synthetic construct
  misc_feature 1..27: note = Glycogen phosphorylase, brain form (48-56)
  source 1..27: mol_type = other RNA
accccccgcgactacttcttcgccctg

SEQ ID NO: 47276 - RNA, 27 nt, synthetic construct
  misc_feature 1..27: note = Sialidase-1 (85-93)
  source 1..27: mol_type = other RNA
accccccgcggcaccctgctcgccttc

SEQ ID NO: 47277 - RNA, 27 nt, synthetic construct
  misc_feature 1..27: note = DNA-directed RNA polymerase III subunit RPC1 (167-175)
  source 1..27: mol_type = other RNA
accccccgcaacggcgagccgctgatc

SEQ ID NO: 47278 - RNA, 27 nt, synthetic construct
  misc_feature 1..27: note = E3 ubiquitin-protein ligase RNF169 (410-418)
  source 1..27: mol_type = other RNA
accccccgcaacctgaaccggagcctc

SEQ ID NO: 47279 - RNA, 27 nt, synthetic construct
  misc_feature 1..27: note = Galactose-3-O-sulfotransferase 4 (2-10)
  source 1..27: mol_type = other RNA
accccccgcagcccgacctccgccttc

SEQ ID NO: 47280 - RNA, 30 nt, synthetic construct
  misc_feature 1..30: note = Rho GTPase-activating protein 7 (170-179)
  source 1..30: mol_type = other RNA
accccccgcaccaacagcgtgatctccgtc

SEQ ID NO: 47281 - RNA, 87 nt, synthetic construct
  misc_feature 1..87: note = Beta-2-microglobulin (70-98)
  source 1..87: mol_type = other RNA
acccccaccgagaaggacgagtacgcctgccgcgtgaaccacgtcacgctgagccagccgaagatcgtgaagtgggaccgggacatg

SEQ ID NO: 47282 - RNA, 63 nt, synthetic construct
  misc_feature 1..63: note = HLA class I histocompatibility antigen, A-1 alpha chain (320-340)
  source 1..63: mol_type = other RNA
acccaggccgccagctccgacagcgcgcagggctccgacgtgagcctgaccgcctgcaaggtc

SEQ ID NO: 47283 - RNA, 33 nt, synthetic construct
  misc_feature 1..33: note = NADH dehydrogenase (ubiquinone) iron-sulfur protein 2, mitochondrial (453-463)
  source 1..33: mol_type = other RNA
acccaggacatcgtgttcggcgaggtcgaccgc

SEQ ID NO: 47284 - RNA, 30 nt, synthetic construct
  misc_feature 1..30: note = Myosin-IIIa (288-297)
  source 1..30: mol_type = other RNA
acccagatcgagggcaaggacgtgatgctg

SEQ ID NO: 47285 - RNA, 42 nt, synthetic construct
  misc_feature 1..42: note = Basement membrane-specific heparan sulfate proteoglycan core protein (2340-2353)
  source 1..42: mol_type = other RNA
acccagcccatccgcatcgagccgagctccagccaggtggcc

SEQ ID NO: 47286 - RNA, 45 nt, synthetic construct
  misc_feature 1..45: note = Basement membrane-specific heparan sulfate proteoglycan core protein (2340-2354)
  source 1..45: mol_type = other RNA
acccagcccatccgcatcgagccgagctccagccaggtggccgag

SEQ ID NO: 47287 - RNA, 33 nt, synthetic construct
  misc_feature 1..33: note = Regulator of nonsense transcripts 1 (44-54)
  source 1..33: mol_type = other RNA
acccagacccccccgggcgggcccggcgggccc

SEQ ID NO: 47288 - RNA, 27 nt, synthetic construct
  misc_feature 1..27: note = Cytoplasmic FMR1-interacting protein 1 (680-688)
  source 1..27: mol_type = other RNA
acccgcttcaacaagcagttcctgtac

SEQ ID NO: 47289 - RNA, 30 nt, synthetic construct
  misc_feature 1..30: note = Alpha-1-syntrophin (178-187)
  source 1..30: mol_type = other RNA
acccgccacggcgtggacacccacctgttc

SEQ ID NO: 47290 - RNA, 30 nt, synthetic construct
  misc_feature 1..30: note = Peroxisomal membrane protein PMP34 (90-99)
  source 1..30: mol_type = other RNA
acccgcctgaagctccagggcgccaagttc

SEQ ID NO: 47291 - RNA, 27 nt, synthetic construct
  misc_feature 1..27: note = Maltase-glucoamylase (1080-1088)
  source 1..27: mol_type = other RNA
acccgcctgcccagccagtacatctac

SEQ ID NO: 47292 - RNA, 27 nt, synthetic construct
  misc_feature 1..27: note = Protein disulfide-isomerase A5 (45-53)
  source 1..27: mol_type = other RNA
acccgcaacaacgtgctggtcctctac

SEQ ID NO: 47293 - RNA, 30 nt, synthetic construct
  misc_feature 1..30: note = HLA class I histocompatibility antigen, Cw-7 alpha chain (257-266)
  source 1..30: mol_type = other RNA
acccgccccgccggcgacgggaccttccag

SEQ ID NO: 47294 - RNA, 30 nt, synthetic construct
  misc_feature 1..30: note = L-dopachrome tautomerase (68-77)
  source 1..30: mol_type = other RNA
acccgcccctggagcggcccgtacatcctg

SEQ ID NO: 47295 - RNA, 27 nt, synthetic construct
  misc_feature 1..27: note = Glycerol-3-phosphate acyltransferase 3 (128-136)
  source 1..27: mol_type = other RNA
acccgcaccaacgtgaacttccagtac

SEQ ID NO: 47296 - RNA, 27 nt, synthetic construct
  misc_feature 1..27: note = Multiple PDZ domain protein (66-74)
  source 1..27: mol_type = other RNA
accagcgccacctccaacatcgagtac

SEQ ID NO: 47297 - RNA, 30 nt, synthetic construct
  misc_feature 1..30: note = Protein prune homolog 2 (1091-1100)
  source 1..30: mol_type = other RNA
accagcgacggcatgaacttcaccaagtac

SEQ ID NO: 47298 - RNA, 27 nt, synthetic construct
  misc_feature 1..27: note = Bifunctional glutamate/proline-tRNA ligase (269-277)
  source 1..27: mol_type = other RNA
accagcgaccacttcgagaccatcatg

SEQ ID NO: 47299 - RNA, 27 nt, synthetic construct
  misc_feature 1..27: note = ATP-dependent RNA helicase DDX50 (268-276)
  source 1..27: mol_type = other RNA
accagcgacaagggcttcgtgaccatg

SEQ ID NO: 47300 - RNA, 24 nt, synthetic construct
  misc_feature 1..24: note = Ubinuclein-2 (527-534)
  source 1..24: mol_type = other RNA
accagcgacaagcccctgatgtac

SEQ ID NO: 47301 - RNA, 30 nt, synthetic construct
  misc_feature 1..30: note = Beta-1-syntrophin (132-141)
  source 1..30: mol_type = other RNA
accagcgaccccccgtccagccagtccttc

SEQ ID NO: 47302 - RNA, 24 nt, synthetic construct
  misc_feature 1..24: note = Polymerase delta-interacting protein 3 (356-363)
  source 1..24: mol_type = other RNA
accagcgaccagcccatcctgctc

SEQ ID NO: 47303 - RNA, 27 nt, synthetic construct
  misc_feature 1..27: note = HEAT repeat-containing protein 5A (1033-1041)
  source 1..27: mol_type = other RNA
accagcgagaacgccaagctgcactac

SEQ ID NO: 47304 - RNA, 30 nt, synthetic construct
  misc_feature 1..30: note = HEAT repeat-containing protein 5A (1033-1042)
  source 1..30: mol_type = other RNA
accagcgagaacgccaagctgcactactac

SEQ ID NO: 47305 - RNA, 24 nt, synthetic construct
  misc_feature 1..24: note = Nuclear pore complex protein Nup205 (1076-1083)
  source 1..24: mol_type = other RNA
accagcggccccaccatgcgctac

SEQ ID NO: 47306 - RNA, 30 nt, synthetic construct
  misc_feature 1..30: note = GREB1-like protein (1129-1138)
  source 1..30: mol_type = other RNA
accagcggctccatcatggagaacggggtg

SEQ ID NO: 47307 - RNA, 27 nt, synthetic construct
  misc_feature 1..27: note = E3 ubiquitin-protein ligase UBR4 (516-524)
  source 1..27: mol_type = other RNA
accagcatccagcgcatccagcggctg

SEQ ID NO: 47308 - RNA, 27 nt, synthetic construct
  misc_feature 1..27: note Dolichyl-diphosphooligosaccharide-proteinosyltransferase subunit 1 (228-236)
  source 1..27: mol_type = other RNA
accagcatgacccgcgtgatcgaggtc

SEQ ID NO: 47309 - RNA, 39 nt, synthetic construct
  misc_feature 1..39: note = Treacle protein (596-608)
  source 1..39: mol_type = other RNA
accagccccgccggctccagcccggccgtggcggggggc

SEQ ID NO: 47310 - RNA, 24 nt, synthetic construct
  misc_feature 1..24: note = Chromodomain Y-like protein (94-101)
  source 1..24: mol_type = other RNA
accagccccaaggccctggtgatc

SEQ ID NO: 47311 - RNA, 27 nt, synthetic construct
  misc_feature 1..27: note = Mitogen-activated protein kinase kinase kinase 14 (448-456)
  source 1..27: mol_type = other RNA
accagcccccgcatcgtgccgctgtac

SEQ ID NO: 47312 - RNA, 27 nt, synthetic construct
  misc_feature 1..27: note = Interferon alpha-inducible protein 27, mitochondrial (12-20)
  source 1..27: mol_type = other RNA
accagcgtggccaaggtcgtgcgcgtg

SEQ ID NO: 47313 - RNA, 33 nt, synthetic construct
  misc_feature 1..33: note = RNA binding protein fox-1 homolog 2 (243-253)
  source 1..33: mol_type = other RNA
accaccgccgccgcgttccgcggcgcccacctg

SEQ ID NO: 47314 - RNA, 30 nt, synthetic construct
  misc_feature 1..30: note = Transcriptional regulator ATRX (461-470)
  source 1..30: mol_type = other RNA
accaccgccaaggtgacgaaggagctgtac

SEQ ID NO: 47315 - RNA, 48 nt, synthetic construct
  misc_feature 1..48: note = ATP-citrate synthase (677-692)
  source 1..48: mol_type = other RNA
accaccgacggcgtgtacgagggggtcgccatcggcggggaccgctac

SEQ ID NO: 47316 - RNA, 27 nt, synthetic construct
  misc_feature 1..27: note = Hemicentin-1 (97-105)
  source 1..27: mol_type = other RNA
accaccgaccccaagaagttccagtac

SEQ ID NO: 47317 - RNA, 21 nt, synthetic construct
  misc_feature 1..21: note = Elongation factor 1-alpha 1 (23-29)
  source 1..21: mol_type = other RNA
accaccggccacctgatctac

SEQ ID NO: 47318 - RNA, 27 nt, synthetic construct
  misc_feature 1..27: note = Signal-induced proliferation-associated 1-like protein 3 (1102-1110)
  source 1..27: mol_type = other RNA
accacccccggccacgcccagagcctg

SEQ ID NO: 47319 - RNA, 27 nt, synthetic construct
  misc_feature 1..27: note = Disabled homolog 2-interacting protein (945-953)
  source 1..27: mol_type = other RNA
accacccagaagctggtgctcgagtac

SEQ ID NO: 47320 - RNA, 27 nt, synthetic construct
  misc_feature 1..27: note = Basement membrane-specific heparan sulfate proteoglycan core protein (3563-3571)
  source 1..27: mol_type = other RNA
accacccagagccacgtgctgctcctg

SEQ ID NO: 47321 - RNA, 27 nt, synthetic construct
  misc_feature 1..27: note = Importin-4 (577-585)
  source 1..27: mol_type = other RNA
accgtggccgagaagagcttcgccgtc

SEQ ID NO: 47322 - RNA, 27 nt, synthetic construct
  misc_feature 1..27: note = Nicotinamide phosphoribosyltransferase (220-228)
  source 1..27: mol_type = other RNA
accgtggccggcctggccctcatcaag

SEQ ID NO: 47323 - RNA, 27 nt, synthetic construct
  misc_feature 1..27: note = Keratin, type I cytoskeletal 18 (86-94)
  source 1..27: mol_type = other RNA
accgtggacaacgcccgcatcgtcctg

SEQ ID NO: 47324 - RNA, 24 nt, synthetic construct
  misc_feature 1..24: note = Signal-induced proliferation-associated 1-like protein 2 (821-828)
  source 1..24: mol_type = other RNA
accgtggacaccagcgtcaagttc

SEQ ID NO: 47325 - RNA, 63 nt, synthetic construct
  misc_feature 1..63: note = Vimentin (446-466)
  source 1..63: mol_type = other RNA
accgtggagacccgcgacggccaggtcatcaacgagacgagccagcaccacgacgacctggag

SEQ ID NO: 47326 - RNA, 27 nt, synthetic construct
  misc_feature 1..27: note = Runt-related transcription factor 1 (36-44)
  source 1..27: mol_type = other RNA
accgtgttcaccaaccccccgcaggtc

SEQ ID NO: 47327 - RNA, 27 nt, synthetic construct
  misc_feature 1..27: note = Proto-oncogene tyrosine-protein kinase receptor Ret (350-358)
  source 1..27: mol_type = other RNA
accgtgcacgactaccgcctggtcctc

SEQ ID NO: 47328 - RNA, 48 nt, synthetic construct
  misc_feature 1..48: note = Endoplasmin (688-703)
  source 1..48: mol_type = other RNA
accgtgctggacctcgccgtcgtgctgttcgagaccgccacgctgcgc

SEQ ID NO: 47329 - RNA, 27 nt, synthetic construct
  misc_feature 1..27: note = Transmembrane protein 9 (177-185)
  source 1..27: mol_type = other RNA
accgtgctggagcgcgtcgagggcgcc

SEQ ID NO: 47330 - RNA, 30 nt, synthetic construct
  misc_feature 1..30: note = Cytoskeleton-associated protein 5 (947-956)
  source 1..30: mol_type = other RNA
accgtgctgggcgacagcaagaacaacgtc

SEQ ID NO: 47331 - RNA, 30 nt, synthetic construct
  misc_feature 1..30: note = DNA annealing helicase and endonuclease ZRANB3 (73-82)
  source 1..30: mol_type = other RNA
accgtgctgggctacgggctcctgaccgcc

SEQ ID NO: 47332 - RNA, 27 nt, synthetic construct
  misc_feature 1..27: note = HEAT repeat-containing protein 1 (1553-1561)
  source 1..27: mol_type = other RNA
accgtgctgggctacatcagcgccgtc

SEQ ID NO: 47333 - RNA, 45 nt, synthetic construct
  misc_feature 1..45: note = Actin, cytoplasmic 2 (36-50)
  source 1..45: mol_type = other RNA
accgtgctgagcggcgggaccacgatgtaccccggcatcgccgac

SEQ ID NO: 47334 - RNA, 27 nt, synthetic construct
  misc_feature 1..27: note = Neuron navigator 2 (1903-1911)
  source 1..27: mol_type = other RNA
accgtgatgcagctgcgcaacgagctc

SEQ ID NO: 47335 - RNA, 27 nt, synthetic construct
  misc_feature 1..27: note = Ryanodine receptor 2 (3867-3875)
  source 1..27: mol_type = other RNA
accgtgaacatcatcatcagcaccgtc

SEQ ID NO: 47336 - RNA, 90 nt, synthetic construct
  misc_feature 1..90: note = Fructose-bisphosphate aldolase A (314-343)
  source 1..90: mol_type = other RNA
accgtgcccccggccgtcaccggcatcacgttcctgagcgggggccagtccgaggaggaggccagcatcaacctcaacgcgatcaacaag

SEQ ID NO: 47337 - RNA, 27 nt, synthetic construct
  misc_feature 1..27: note = Mucin-16 (11203-11211)
  source 1..27: mol_type = other RNA
accgtgcagggcctggtcaccagcctc

SEQ ID NO: 47338 - RNA, 84 nt, synthetic construct
  misc_feature 1..84: note = Nucleophosmin (46-73)
  source 1..84: mol_type = other RNA
accgtgagcctgggcgccggggccaaggacgagctccacatcgtcgaggcggaggccatgaactacgagggctcccccatcaag

SEQ ID NO: 47339 - RNA, 33 nt, synthetic construct
  misc_feature 1..33: note = Complement C4-A (408-418)
  source 1..33: mol_type = other RNA
accgtgagctcccccggcagcgtcccggaggtg

SEQ ID NO: 47340 - RNA, 27 nt, synthetic construct
  misc_feature 1..27: note = Exportin-6 (585-593)
  source 1..27: mol_type = other RNA
accgtggtcgagcgcctggtgaaggtg

SEQ ID NO: 47341 - RNA, 33 nt, synthetic construct
  misc_feature 1..33: note = U4/U6 small nuclear ribonucleoprotein Prp3 (29-39)
  source 1..33: mol_type = other RNA
accgtggtcaccgccgccctgaactgcgtgggc

SEQ ID NO: 47342 - RNA, 30 nt, synthetic construct
  misc_feature 1..30: note = Multidrug resistance-associated protein 7 (941-950)
  source 1..30: mol_type = other RNA
accgtgtacgccaccatcgccggcgtcaac

SEQ ID NO: 47343 - RNA, 30 nt, synthetic construct
  misc_feature 1..30: note = MMS19 nucleotide excision repair protein homolog (150-159)
  source 1..30: mol_type = other RNA
accgtgtacaacatcatcaccaacttcatg

SEQ ID NO: 47344 - RNA, 27 nt, synthetic construct
  misc_feature 1..27: note = RNA-binding protein 26 (673-681)
  source 1..27: mol_type = other RNA
accgtgtacaaccccgccgccctgaag

SEQ ID NO: 47345 - RNA, 42 nt, synthetic construct
  misc_feature 1..42: note = Protein SZT2 (605-618)
  source 1..42: mol_type = other RNA
acctggggcctgccccacgccccgcccagccccgggcccctc

SEQ ID NO: 47346 - RNA, 30 nt, synthetic construct
  misc_feature 1..30: note = Tyrosine-protein phosphatase non-receptor type substrate 1 (472-481)
  source 1..30: mol_type = other RNA
acctacgccgacctggacatggtgcacctc

SEQ ID NO: 47347 - RNA, 33 nt, synthetic construct
  misc_feature 1..33: note = Serine/threonine-protein kinase SMG1 (743-753)
  source 1..33: mol_type = other RNA
acctacgcccccctgttcagcctcccgtccttc

SEQ ID NO: 47348 - RNA, 27 nt, synthetic construct
  misc_feature 1..27: note = Muskelin (680-688)
  source 1..27: mol_type = other RNA
acctacgcccagcgcacccagctgttc

SEQ ID NO: 47349 - RNA, 24 nt, synthetic construct
  misc_feature 1..24: note = Low-density lipoprotein receptor-related protein 2 (585-592)
  source 1..24: mol_type = other RNA
acctacgacggcatccagcgcaag

SEQ ID NO: 47350 - RNA, 27 nt, synthetic construct
  misc_feature 1..27: note = Diamine acetyltransferase 1 (80-88)
  source 1..27: mol_type = other RNA
acctacgacccctggatcggcaagctg

SEQ ID NO: 47351 - RNA, 24 nt, synthetic construct
  misc_feature 1..24: note = L-dopachrome tautomerase (302-309)
  source 1..24: mol_type = other RNA
acctacgagggcctgctccgccgg

SEQ ID NO: 47352 - RNA, 27 nt, synthetic construct
  misc_feature 1..27: note = GPI-anchor transamidase (386-394)
  source 1..27: mol_type = other RNA
acctacggcatcaagcacatgaagttc

SEQ ID NO: 47353 - RNA, 27 nt, synthetic construct
  misc_feature 1..27: note = Ral GTPase-activating protein subunit beta (252-260)
  source 1..27: mol_type = other RNA
acctacggccccagcttcccggccttc

SEQ ID NO: 47354 - RNA, 27 nt, synthetic construct
  misc_feature 1..27: note = Talin-1 (307-315)
  source 1..27: mol_type = other RNA
acctacggcgtgagcttcttcctggtc

SEQ ID NO: 47355 - RNA, 24 nt, synthetic construct
  misc_feature 1..24: note = Parafibromin (314-321)
  source 1..24: mol_type = other RNA
acctaccacggcatgaccctgaag

SEQ ID NO: 47356 - RNA, 27 nt, synthetic construct
  misc_feature 1..27: note = Down syndrome critical region protein 3 (108-116)
  source 1..27: mol_type = other RNA
acctaccacggcgtgttcgtcaacatc

SEQ ID NO: 47357 - RNA, 27 nt, synthetic construct
  misc_feature 1..27: note = AP-2 complex subunit alpha-1 (544-552)
  source 1..27: mol_type = other RNA
acctacatcaagttcatcaacctgttc

SEQ ID NO: 47358 - RNA, 30 nt, synthetic construct
  misc_feature 1..30: note = Transmembrane protein 231 (34-43)
  source 1..30: mol_type = other RNA
acctacatccccccgctgctcgtggccttc

SEQ ID NO: 47359 - RNA, 27 nt, synthetic construct
  misc_feature 1..27: note = Phosphatidylinositol 4-phosphate 3-kinase C2 domain-containing subunit alpha (731-739)
  source 1..27: mol_type = other RNA
acctacaagaacttcttctacctgatc

SEQ ID NO: 47360 - RNA, 27 nt, synthetic construct
  misc_feature 1..27: note = Serine-protein kinase ATM (2359-2367)
  source 1..27: mol_type = other RNA
acctacctggagaaggccgtggaggtc

SEQ ID NO: 47361 - RNA, 27 nt, synthetic construct
  misc_feature 1..27: note = T-complex protein 1 subunit theta (427-435)
  source 1..27: mol_type = other RNA
acctacctgggcaagtactgggccatc

SEQ ID NO: 47362 - RNA, 27 nt, synthetic construct
  misc_feature 1..27: note = G1/S-specific cyclin-E1 (111-119)
  source 1..27: mol_type = other RNA
acctacctgcgcgaccagcacttcctc

SEQ ID NO: 47363 - RNA, 27 nt, synthetic construct
  misc_feature 1..27: note = Digestive organ expansion factor homolog (692-700)
  source 1..27: mol_type = other RNA
acctacccccacttctacagcgagatc

SEQ ID NO: 47364 - RNA, 27 nt, synthetic construct
  misc_feature 1..27: note = Sorbin and SH3 domain-containing protein 2 (215-223)
  source 1..27: mol_type = other RNA
acctacccccagcacgcccagagcctg

SEQ ID NO: 47365 - RNA, 27 nt, synthetic construct
  misc_feature 1..27: note = Exportin-T (46-54)
  source 1..27: mol_type = other RNA
acctacagcgacgaccacgtgaagttc

SEQ ID NO: 47366 - RNA, 27 nt, synthetic construct
  misc_feature 1..27: note = Nuclear receptor subfamily 2 group C member 2 (532-540)
  source 1..27: mol_type = other RNA
acctacagcgaggacacctaccgcctg

SEQ ID NO: 47367 - RNA, 27 nt, synthetic construct
  misc_feature 1..27: note = SRSF protein kinase 2 (426-434)
  source 1..27: mol_type = other RNA
acctacagctccagctacgagcagttc

SEQ ID NO: 47368 - RNA, 27 nt, synthetic construct
  misc_feature 1..27: note = Cartilage acidic protein 1 (144-152)
  source 1..27: mol_type = other RNA
acctacaccgacaagctgttcaagttc

SEQ ID NO: 47369 - RNA, 27 nt, synthetic construct
  misc_feature 1..27: note = Cation-independent mannose-6-phosphate receptor (884-892)
  source 1..27: mol_type = other RNA
acctacaccacgcgcatccacctggtg

SEQ ID NO: 47370 - RNA, 27 nt, synthetic construct
  misc_feature 1..27: note = Cathepsin D (130-138)
  source 1..27: mol_type = other RNA
acctacgtgaagaacggcaccagcttc

SEQ ID NO: 47371 - RNA, 36 nt, synthetic construct
  misc_feature 1..36: note = Protein YIF1B (149-160)
  source 1..36: mol_type = other RNA
acctacgtgctggtcgccggcctcgccctggggacc

SEQ ID NO: 47372 - RNA, 27 nt, synthetic construct
  misc_feature 1..27: note = Histone-binding protein RBBP4 (186-194)
  source 1..27: mol_type = other RNA
gtggccgacgaccagaagctgatgatc

SEQ ID NO: 47373 - RNA, 27 nt, synthetic construct
  misc_feature 1..27: note = E3 ubiquitin-protein ligase TRIM56 (523-531)
  source 1..27: mol_type = other RNA
gtggccgacgagcagaaccgcgccctg

SEQ ID NO: 47374 - RNA, 24 nt, synthetic construct
  misc_feature 1..24: note = Coatomer subunit gamma-1 (760-767)
  source 1..24: mol_type = other RNA
gtggccgaccacatccagaaggtc

SEQ ID NO: 47375 - RNA, 27 nt, synthetic construct
  misc_feature 1..27: note = HMG domain-containing protein 4 (317-325)
  source 1..27: mol_type = other RNA
gtggccgaccaccccggcatcgacttc

SEQ ID NO: 47376 - RNA, 24 nt, synthetic construct
  misc_feature 1..24: note = Laminin subunit gamma-1 (1042-1049)
  source 1..24: mol_type = other RNA
gtggccgaccaccgcgtcaagctg

SEQ ID NO: 47377 - RNA, 30 nt, synthetic construct
  misc_feature 1..30: note = Catenin beta-1 (79-88)
  source 1..30: mol_type = other RNA
gtggccgacatcgacggccagtacgccatg

SEQ ID NO: 47378 - RNA, 24 nt, synthetic construct
  misc_feature 1..24: note = Dual specificity protein phosphatase 14 (93-100)
  source 1..24: mol_type = other RNA
gtggccgacaagatccacagcgtc

SEQ ID NO: 47379 - RNA, 27 nt, synthetic construct
  misc_feature 1..27: note = Translin-associated protein X (191-199)
  source 1..27: mol_type = other RNA
gtggccgacctgaccggcgagctcatg

SEQ ID NO: 47380 - RNA, 27 nt, synthetic construct
  misc_feature 1..27: note = Neutral alpha-glucosidase AB (23-31)
  source 1..27: mol_type = other RNA
gtggccgaccccccgatcgcccgcctg

SEQ ID NO: 47381 - RNA, 27 nt, synthetic construct
  misc_feature 1..27: note = Polypeptide N-acetylgalactosaminyltransferase 2 (241-249)
  source 1..27: mol_type = other RNA
gtggccgaggaccgcacccgggtcgtg

SEQ ID NO: 47382 - RNA, 27 nt, synthetic construct
  misc_feature 1..27: note = Protein PRR14L (111-119)
  source 1..27: mol_type = other RNA
gtggccgagagcgccgtctccaagctg

SEQ ID NO: 47383 - RNA, 27 nt, synthetic construct
  misc_feature 1..27: note = UPF0415 protein C7orf25 (292-300)
  source 1..27: mol_type = other RNA
gtggccttccccaccgagatcaaggtc

SEQ ID NO: 47384 - RNA, 30 nt, synthetic construct
  misc_feature 1..30: note = Cytoskeleton-associated protein 5 (883-892)
  source 1..30: mol_type = other RNA
gtggccggcatcatcaacgacgccaagttc

SEQ ID NO: 47385 - RNA, 33 nt, synthetic construct
  misc_feature 1..33: note = HLA class I histocompatibility antigen, alpha chain F (305-315)
  source 1..33: mol_type = other RNA
gtggccggcctggtcgtgctcggggccgtggtc

SEQ ID NO: 47386 - RNA, 24 nt, synthetic construct
  misc_feature 1..24: note = Phosphofurin acidic cluster sorting protein 1 (109-116)
  source 1..24: mol_type = other RNA
gtggccggccgcgtcatgcagtac

SEQ ID NO: 47387 - RNA, 39 nt, synthetic construct
  misc_feature 1..39: note = CLIP-associating protein 2 (347-359)
  source 1..39: mol_type = other RNA
gtggccggccgcgtcagcgccgggtccagcaaggcgtcc

SEQ ID NO: 47388 - RNA, 30 nt, synthetic construct
  misc_feature 1..30: note = CAD protein (1548-1557)
  source 1..30: mol_type = other RNA
gtggccggcagcgccgcggggctgaagctc

SEQ ID NO: 47389 - RNA, 27 nt, synthetic construct
  misc_feature 1..27: note = CLOCK-interacting pacemaker (251-259)
  source 1..27: mol_type = other RNA
gtggccaaggcccccagcctgaccttc

SEQ ID NO: 47390 - RNA, 45 nt, synthetic construct
  misc_feature 1..45: note = Glucose-6-phosphate isomerase (250-264)
  source 1..45: mol_type = other RNA
gtggccaagcacttcgtcgccctgagcaccaacaccacgaaggtg

SEQ ID NO: 47391 - RNA, 48 nt, synthetic construct
  misc_feature 1..48: note = Glucose-6-phosphate isomerase (250-265)
  source 1..48: mol_type = other RNA
gtggccaagcacttcgtcgccctgagcaccaacaccacgaaggtgaag

SEQ ID NO: 47392 - RNA, 27 nt, synthetic construct
  misc_feature 1..27: note = Proline and serine-rich protein 1 (85-93)
  source 1..27: mol_type = other RNA
gtggccctggagctcctggccagcaac

SEQ ID NO: 47393 - RNA, 33 nt, synthetic construct
  misc_feature 1..33: note = Phosphatidylcholine translocator ABCB4 (985-995)
  source 1..33: mol_type = other RNA
gtggccctgggccacgccagctccttcgcgccc

SEQ ID NO: 47394 - RNA, 30 nt, synthetic construct
  misc_feature 1..30: note = ATP-binding cassette sub-family A member 13 (1236-1245)
  source 1..30: mol_type = other RNA
gtggccctgggcaacgccctcgtcagcgtg

SEQ ID NO: 47395 - RNA, 27 nt, synthetic construct
  misc_feature 1..27: note = Neural cell adhesion molecule L1 (3-11)
  source 1..27: mol_type = other RNA
gtggccctgcgctacgtctggcccctc

SEQ ID NO: 47396 - RNA, 24 nt, synthetic construct
  misc_feature 1..24: note = Constitutive coactivator of PPAR-gamma-like protein 1 (551-558)
  source 1..24: mol_type = other RNA
gtggcccccgaggtcctgcgcgtg

SEQ ID NO: 47397 - RNA, 27 nt, synthetic construct
  misc_feature 1..27: note = Glutamate receptor ionotropic, kainate 3 (516-524)
  source 1..27: mol_type = other RNA
gtggcccccctgaccatcacccacgtc

SEQ ID NO: 47398 - RNA, 27 nt, synthetic construct
  misc_feature 1..27: note = Transcription factor p65 (404-412)
  source 1..27: mol_type = other RNA
gtggcccccccggcccccaagcccacc

SEQ ID NO: 47399 - RNA, 33 nt, synthetic construct
  misc_feature 1..33: note = Protein NLRC3 (955-965)
  source 1..33: mol_type = other RNA
gtggccagcatcggcgcctccggggcgcaggtc

SEQ ID NO: 47400 - RNA, 24 nt, synthetic construct
  misc_feature 1..24: note = Endothelin B receptor (292-299)
  source 1..24: mol_type = other RNA
gtggccagctggtcccgcatcaag

SEQ ID NO: 47401 - RNA, 27 nt, synthetic construct
  misc_feature 1..27: note = Zinc finger MYM-type protein 4 (1069-1077)
  source 1..27: mol_type = other RNA
gtggccgtcgagccccgcagcctgatc

SEQ ID NO: 47402 - RNA, 27 nt, synthetic construct
  misc_feature 1..27: note = Transient receptor potential cation channel subfamily V member 2 (408-416)
  source 1..27: mol_type = other RNA
gtggcctaccaccagcccaccctgaag

SEQ ID NO: 47403 - RNA, 150 nt, synthetic construct
  misc_feature 1..150: note = ATP synthase subunit epsilon, mitochondrial (2-51)
  source 1..150: mol_type = other RNA
gtggcctactggcgccaggccggcctgagctacatccggtactcccagatctgcgcgaaggccgtccgcgacgccctcaagaccgagttcaaggccaacgccgagaagaccagcgggtccaacgtgaagatcgtgaaggtcaagaaggag

SEQ ID NO: 47404 - RNA, 66 nt, synthetic construct
  misc_feature 1..66: note = Pyridoxal kinase (153-174)
  source 1..66: mol_type = other RNA
gtggacgccgtcttcgtgggcaccggggacctgttcgccgcgatgctcctggcctggacccacaag

SEQ ID NO: 47405 - RNA, 30 nt, synthetic construct
  misc_feature 1..30: note = Titin (5174-5183)
  source 1..30: mol_type = other RNA
gtggacgacctgatcgccctcggcgggcag

SEQ ID NO: 47406 - RNA, 54 nt, synthetic construct
  misc_feature 1..54: note = HLA class I histocompatibility antigen, B-51 alpha chain (27-44)
  source 1..54: mol_type = other RNA
gtggacgacacccagttcgtccgcttcgacagcgacgccgcctccccccggacc

SEQ ID NO: 47407 - RNA, 60 nt, synthetic construct
  misc_feature 1..60: note = HLA class I histocompatibility antigen, B-51 alpha chain (27-46)
  source 1..60: mol_type = other RNA
gtggacgacacccagttcgtccgcttcgacagcgacgccgcctccccccggaccgagccg

SEQ ID NO: 47408 - RNA, 66 nt, synthetic construct
  misc_feature 1..66: note = Transducin-like enhancer protein 2 (117-138)
  source 1..66: mol_type = other RNA
gtggacgaggaccagcccagcgagccgccctcccccgccaccaccccctgcggcaaggtcccgatc

SEQ ID NO: 47409 - RNA, 45 nt, synthetic construct
  misc_feature 1..45: note = Annexin A2 (51-65)
  source 1..45: mol_type = other RNA
gtggacgaggtcaccatcgtgaacatcctgaccaaccgcagcaac

SEQ ID NO: 47410 - RNA, 51 nt, synthetic construct
  misc_feature 1..51: note = Annexin A2 (51-67)
  source 1..51: mol_type = other RNA
gtggacgaggtcaccatcgtgaacatcctgaccaaccgcagcaacgcccag

SEQ ID NO: 47411 - RNA, 36 nt, synthetic construct
  misc_feature 1..36: note = Glyceraldehyde-3-phosphate dehydrogenase (28-39)
  source 1..36: mol_type = other RNA
gtggacatcgtcgccatcaacgaccccttcatcgac

SEQ ID NO: 47412 - RNA, 27 nt, synthetic construct
  misc_feature 1..27: note = Eukaryotic translation initiation factor 2A (267-275)
  source 1..27: mol_type = other RNA
gtggacaagaccggcgccagctactac

SEQ ID NO: 47413 - RNA, 24 nt, synthetic construct
  misc_feature 1..24: note = 40S ribosomal protein S21 (39-46)
  source 1..24: mol_type = other RNA
gtggacaaggtcaccggccgcttc

SEQ ID NO: 47414 - RNA, 60 nt, synthetic construct
  misc_feature 1..60: note = Collagen alpha-4(IV) chain (1284-1303)
  source 1..60: mol_type = other RNA
gtggacctgctccgcggcgagcccggggactgcggcctgccggggccccccggccccccg

SEQ ID NO: 47415 - RNA, 33 nt, synthetic construct
  misc_feature 1..33: note = Immunoglobulin superfamily DCC subclass member 4 (828-838)
  source 1..33: mol_type = other RNA
gtggacatggacggccccttcgggagcgtcgtg

SEQ ID NO: 47416 - RNA, 45 nt, synthetic construct
  misc_feature 1..45: note = Multidrug resistance-associated protein 6 (610-624)
  source 1..45: mol_type = other RNA
gtggaccccggcgtcgtggacagctccagctccgggagcgccgcc

SEQ ID NO: 47417 - RNA, 24 nt, synthetic construct
  misc_feature 1..24: note = Histone deacetylase 9 (79-86)
  source 1..24: mol_type = other RNA
gtggaccccgtcgtgcgcgagaag

SEQ ID NO: 47418 - RNA, 51 nt, synthetic construct
  misc_feature 1..51: note = Neuron navigator 1 (1420-1436)
  source 1..51: mol_type = other RNA
gtggacagcctggtcttcgagaccctcatccccaagccgatgatgcagcac

SEQ ID NO: 47419 - RNA, 24 nt, synthetic construct
  misc_feature 1..24: note = Microtubule-actin cross-linking factor 1, isoforms 1/2/3/5 (329-336)
  source 1..24: mol_type = other RNA
gtggacagccgctggcaggagtac

SEQ ID NO: 47420 - RNA, 60 nt, synthetic construct
  misc_feature 1..60: note = Beta-secretase 2 (109-128)
  source 1..60: mol_type = other RNA
gtggacaccggcagctccaacttcgccgtcgccgggaccccccacagctacatcgacacg

SEQ ID NO: 47421 - RNA, 33 nt, synthetic construct
  misc_feature 1..33: note = Probable C-mannosyltransferase DPY19L1 (75-85)
  source 1..33: mol_type = other RNA
gtggaggcccccagcttcctgaacggcgtctgg

SEQ ID NO: 47422 - RNA, 36 nt, synthetic construct
  misc_feature 1..36: note = Dynein heavy chain 17, axonemal (1541-1552)
  source 1..36: mol_type = other RNA
gtggaggccaccagcaagcccggcctgtacaacaag

SEQ ID NO: 47423 - RNA, 27 nt, synthetic construct
  misc_feature 1..27: note = Putative RNA-binding protein 15 (166-174)
  source 1..27: mol_type = other RNA
gtggaggacggcctgttccacgagttc

SEQ ID NO: 47424 - RNA, 27 nt, synthetic construct
  misc_feature 1..27: note = Protein phosphatase 1 regulatory subunit 12B (100-108)
  source 1..27: mol_type = other RNA
gtggaggaggacagcaaccgcgactac

SEQ ID NO: 47425 - RNA, 30 nt, synthetic construct
  misc_feature 1..30: note = Protrudin (99-108)
  source 1..30: mol_type = other RNA
gtggagttcttccgcgtcgtgagcgagtac

SEQ ID NO: 47426 - RNA, 30 nt, synthetic construct
  misc_feature 1..30: note = Glycogen phosphorylase, brain form (207-216)
  source 1..30: mol_type = other RNA
gtggagcacacccccgacggcgtcaagtgg

SEQ ID NO: 47427 - RNA, 21 nt, synthetic construct
  misc_feature 1..21: note = CDK5 regulatory subunit-associated protein 1 (383-389)
  source 1..21: mol_type = other RNA
gtggagctggtccaccacatc

SEQ ID NO: 47428 - RNA, 27 nt, synthetic construct
  misc_feature 1..27: note = Chondroitin sulfate glucuronyltransferase (720-728)
  source 1..27: mol_type = other RNA
gtggagcccggcctggtccagaagttc

SEQ ID NO: 47429 - RNA, 39 nt, synthetic construct
  misc_feature 1..39: note = Beta-hexosaminidase subunit alpha (437-449)
  source 1..39: mol_type = other RNA
gtggagcccctggccttcgagggcaccccggagcagaag

SEQ ID NO: 47430 - RNA, 42 nt, synthetic construct
  misc_feature 1..42: note = 40S ribosomal protein S18 (64-77)
  source 1..42: mol_type = other RNA
gtggagcgcgtcatcaccatcatgcagaacccccggcagtac

SEQ ID NO: 47431 - RNA, 45 nt, synthetic construct
  misc_feature 1..45: note = 40S ribosomal protein S18 (64-78)
  source 1..45: mol_type = other RNA
gtggagcgcgtcatcaccatcatgcagaacccccggcagtacaag

SEQ ID NO: 47432 - RNA, 27 nt, synthetic construct
  misc_feature 1..27: note = Myoferlin (1325-1333)
  source 1..27: mol_type = other RNA
gtggagagcgtcgtgatcaagaacctg

SEQ ID NO: 47433 - RNA, 60 nt, synthetic construct
  misc_feature 1..60: note = Vimentin (447-466)
  source 1..60: mol_type = other RNA
gtggagacccgcgacggccaggtcatcaacgagaccagccagcaccacgacgacctggag

SEQ ID NO: 47434 - RNA, 48 nt, synthetic construct
  misc_feature 1..48: note = HLA class I histocompatibility antigen, Cw-7 alpha chain (255-270)
  source 1..48: mol_type = other RNA
gtggagacccgccccgccggcgacgggaccttccagaagtgggccgcg

SEQ ID NO: 47435 - RNA, 27 nt, synthetic construct
  misc_feature 1..27: note = Integrin beta-5 (441-449)
  source 1..27: mol_type = other RNA
gtgttcgccctgcgccccgtcggcttc

SEQ ID NO: 47436 - RNA, 27 nt, synthetic construct
  misc_feature 1..27: note = Ribosomal protein S6 kinase alpha-5 (487-495)
  source 1..27: mol_type = other RNA
gtgttccacgaccagctgcacaccttc

SEQ ID NO: 47437 - RNA, 27 nt, synthetic construct
  misc_feature 1..27: note = Nuclear factor erythroid 2-related factor 3 (266-274)
  source 1..27: mol_type = other RNA
gtgttccacaaccacacctaccacctg

SEQ ID NO: 47438 - RNA, 27 nt, synthetic construct
  misc_feature 1..27: note = Integrin alpha-7 (708-716)
  source 1..27: mol_type = other RNA
gtgttcatcgagctgcccctcagcatc

SEQ ID NO: 47439 - RNA, 27 nt, synthetic construct
  misc_feature 1..27: note = Leucine-rich repeat serine/threonine-protein kinase 2 (619-627)
  source 1..27: mol_type = other RNA
gtgttcatcggcaccgggcacctgctc

SEQ ID NO: 47440 - RNA, 30 nt, synthetic construct
  misc_feature 1..30: note = Putative pre-mRNA-splicing factor ATP-dependent RNA helicase DHX16 (968-977)
  source 1..30: mol_type = other RNA
gtgttcatccaccccaacagctccctgttc

SEQ ID NO: 47441 - RNA, 27 nt, synthetic construct
  misc_feature 1..27: note = E3 ubiquitin-protein ligase RNF213 (400-408)
  source 1..27: mol_type = other RNA
gtgttcatccgcggcggggaggagttc

SEQ ID NO: 47442 - RNA, 27 nt, synthetic construct
  misc_feature 1..27: note = Receptor-type tyrosine-protein phosphatase zeta (120-128)
  source 1..27: mol_type = other RNA
gtgttcaaggccagcaagatcaccttc

SEQ ID NO: 47443 - RNA, 27 nt, synthetic construct
  misc_feature 1..27: note = Baculoviral IAP repeat-containing protein 6 (448-456)
  source 1..27: mol_type = other RNA
gtgttcaagcccatcagctccacctgg

SEQ ID NO: 47444 - RNA, 24 nt, synthetic construct
  misc_feature 1..24: note = Farnesyl pyrophosphate synthase (333-340)
  source 1..24: mol_type = other RNA
gtgttcctgggcctcgcccgcaag

SEQ ID NO: 47445 - RNA, 33 nt, synthetic construct
  misc_feature 1..33: note = Transmembraneoprotein NMB (543-553)
  source 1..33: mol_type = other RNA
gtgttcctgaaccgcgccaaggccgtcttcttc

SEQ ID NO: 47446 - RNA, 30 nt, synthetic construct
  misc_feature 1..30: note = HLA class II histocompatibility antigen, DQ alpha 1 chain (162-171)
  source 1..30: mol_type = other RNA
gtgttcctgccccgcgaggaccacctcttc

SEQ ID NO: 47447 - RNA, 33 nt, synthetic construct
  misc_feature 1..33: note = Extracellular matrix protein FRAS1 (2887-2897)
  source 1..33: mol_type = other RNA
gtgttcctgagctccgcccagggcgccgagctc

SEQ ID NO: 47448 - RNA, 27 nt, synthetic construct
  misc_feature 1..27: note = Beta-hexosaminidase subunit alpha (311-319)
  source 1..27: mol_type = other RNA
gtgttccccgacttctacctgcacctc

SEQ ID NO: 47449 - RNA, 27 nt, synthetic construct
  misc_feature 1..27: note = Sal-like protein 1 (304-312)
  source 1..27: mol_type = other RNA
gtgttccccagcccgctgcccaacatc

SEQ ID NO: 47450 - RNA, 27 nt, synthetic construct
  misc_feature 1..27: note = Lysosomal-trafficking regulator (976-984)
  source 1..27: mol_type = other RNA
gtgttccagaagcagttctaccgcctg

SEQ ID NO: 47451 - RNA, 27 nt, synthetic construct
  misc_feature 1..27: note = Filamin-A (1243-1251)
  source 1..27: mol_type = other RNA
gtgttccgcgaggccaccaccgagttc

SEQ ID NO: 47452 - RNA, 27 nt, synthetic construct
  misc_feature 1..27: note = Tubulin beta chain (336-344)
  source 1..27: mol_type = other RNA
gtgttccgcggccggatgagcatgaag

SEQ ID NO: 47453 - RNA, 30 nt, synthetic construct
  misc_feature 1..30: note = Transformation/transcription domain-associated protein (638-647)
  source 1..30: mol_type = other RNA
gtgttcaccatgatgaaccccctgaccttc

SEQ ID NO: 47454 - RNA, 27 nt, synthetic construct
  misc_feature 1..27: note = Cell division cycle protein 23 homolog (185-193)
  source 1..27: mol_type = other RNA
gtgttcgtcgaggccacccacgtgctg

SEQ ID NO: 47455 - RNA, 33 nt, synthetic construct
  misc_feature 1..33: note = Delphilin (267-277)
  source 1..33: mol_type = other RNA
gtgggcgggctggccggccccgggggcgcccgc

SEQ ID NO: 47456 - RNA, 21 nt, synthetic construct
  misc_feature 1..21: note = Peroxisomal membrane protein 2 (69-75)
  source 1..21: mol_type = other RNA
gtgggcgggcccctgcgctac

SEQ ID NO: 47457 - RNA, 27 nt, synthetic construct
  misc_feature 1..27: note = Eukaryotic translation initiation factor 6 (64-72)
  source 1..27: mol_type = other RNA
gtgggcaaccgccacgggctgctcgtc

SEQ ID NO: 47458 - RNA, 27 nt, synthetic construct
  misc_feature 1..27: note = Nuclear factor of activated T-cells, cytoplasmic 2 (274-282)
  source 1..27: mol_type = other RNA
gtgggcaacaccaaggtcctggagatc

SEQ ID NO: 47459 - RNA, 45 nt, synthetic construct
  misc_feature 1..45: note = Filamin-A (1151-1165)
  source 1..45: mol_type = other RNA
gtgggccagttccaggtcgactgcagctccgccgggagcgccgag

SEQ ID NO: 47460 - RNA, 33 nt, synthetic construct
  misc_feature 1..33: note = Cullin-4A (15-25)
  source 1..33: mol_type = other RNA
gtgggccgcaccaacgggctgaccaagcccgcc

SEQ ID NO: 47461 - RNA, 24 nt, synthetic construct
  misc_feature 1..24: note = F-box only protein 3 (82-89)
  source 1..24: mol_type = other RNA
gtgggccgctacatcgaccactac

SEQ ID NO: 47462 - RNA, 39 nt, synthetic construct
  misc_feature 1..39: note = HLA class I histocompatibility antigen, B-13 alpha chain (24-36)
  source 1..39: mol_type = other RNA
gtgggctacgtcgacgacacccagttcgtgcgcttcgac

SEQ ID NO: 47463 - RNA, 27 nt, synthetic construct
  misc_feature 1..27: note = Lysosomal-trafficking regulator (893-901)
  source 1..27: mol_type = other RNA
gtgcacatcaacaccatcaacctgttc

SEQ ID NO: 47464 - RNA, 21 nt, synthetic construct
  misc_feature 1..21: note = Bax inhibitor 1 (93-99)
  source 1..21: mol_type = other RNA
gtgcacatggtcacccacttc

SEQ ID NO: 47465 - RNA, 27 nt, synthetic construct
  misc_feature 1..27: note = Sterol 26-hydroxylase, mitochondrial (181-189)
  source 1..27: mol_type = other RNA
gtgatcgacgacttcatgacccgcctg

SEQ ID NO: 47466 - RNA, 30 nt, synthetic construct
  misc_feature 1..30: note = Keratin, type I cytoskeletal 18 (130-139)
  source 1..30: mol_type = other RNA
gtgatcgacgacaccaacatcacccgcctg

SEQ ID NO: 47467 - RNA, 27 nt, synthetic construct
  misc_feature 1..27: note = Laminin subunit alpha-4 (1790-1798)
  source 1..27: mol_type = other RNA
gtgatcgacggccaccccgtcagcttc

SEQ ID NO: 47468 - RNA, 24 nt, synthetic construct
  misc_feature 1..24: note = Prefoldin subunit 1 (20-27)
  source 1..24: mol_type = other RNA
gtgatcgacacccagcagaaggtc

SEQ ID NO: 47469 - RNA, 27 nt, synthetic construct
  misc_feature 1..27: note = Protein PRRC2C (1668-1676)
  source 1..27: mol_type = other RNA
gtgatcgaggacccccagagcaacctg

SEQ ID NO: 47470 - RNA, 27 nt, synthetic construct
  misc_feature 1..27: note = Helicase SKI2W (419-427)
  source 1..27: mol_type = other RNA
gtgatcttcgacgaggtccactacatc

SEQ ID NO: 47471 - RNA, 63 nt, synthetic construct
  misc_feature 1..63: note Dolichyl-diphosphooligosaccharide-proteinosyltransferase 48 kDa subunit (255-275)
  source 1..63: mol_type = other RNA
gtgatcttcagcggctccctggacttcttcagcgactccttcttcaacagcgccgtccagaag

SEQ ID NO: 47472 - RNA, 27 nt, synthetic construct
  misc_feature 1..27: note = CLIP-associating protein 1 (218-226)
  source 1..27: mol_type = other RNA
gtgatcttcaccaagttcgacgaggtc

SEQ ID NO: 47473 - RNA, 24 nt, synthetic construct
  misc_feature 1..24: note = Tyrosine-protein phosphatase non-receptor type 13 (1869-1876)
  source 1..24: mol_type = other RNA
gtgatcggccgcgtcctggagctc

SEQ ID NO: 47474 - RNA, 72 nt, synthetic construct
  misc_feature 1..72: note = Glyceraldehyde-3-phosphate dehydrogenase (163-186)
  source 1..72: mol_type = other RNA
gtgatccacgacaacttcggcatcgtcgaggggctgatgaccaccgtgcacgccatcacggccacccagaag

SEQ ID NO: 47475 - RNA, 24 nt, synthetic construct
  misc_feature 1..24: note = ELAV-like protein 1 (102-109)
  source 1..24: mol_type = other RNA
gtgatcaaggacgccaacctgtac

SEQ ID NO: 47476 - RNA, 21 nt, synthetic construct
  misc_feature 1..21: note = U5 small nuclear ribonucleoprotein 200 kDa helicase (1232-1238)
  source 1..21: mol_type = other RNA
gtgatcctgcaccacgagtac

SEQ ID NO: 47477 - RNA, 48 nt, synthetic construct
  misc_feature 1..48: note = Heat shock protein HSP 90-beta (107-122)
  source 1..48: mol_type = other RNA
gtgatcctgcacctcaaggaggaccagaccgagtacctggaggagcgc

SEQ ID NO: 47478 - RNA, 27 nt, synthetic construct
  misc_feature 1..27: note = Zinc finger BED domain-containing protein 1 (183-191)
  source 1..27: mol_type = other RNA
gtgatcctgaaggagctcgccgaggcc

SEQ ID NO: 47479 - RNA, 27 nt, synthetic construct
  misc_feature 1..27: note = Natural resistance-associated macrophage protein 2 (259-267)
  source 1..27: mol_type = other RNA
gtgatcatgccccacaacatgtacctg

SEQ ID NO: 47480 - RNA, 39 nt, synthetic construct
  misc_feature 1..39: note = Vimentin (454-466)
  source 1..39: mol_type = other RNA
gtgatcaacgagaccagccagcaccacgacgacctggag

SEQ ID NO: 47481 - RNA, 27 nt, synthetic construct
  misc_feature 1..27: note = NEDD8 ultimate buster 1 (130-138)
  source 1..27: mol_type = other RNA
gtgatcaacaagaagcagctgcagctc

SEQ ID NO: 47482 - RNA, 27 nt, synthetic construct
  misc_feature 1..27: note = Spectrin beta chain, non-erythrocytic 1 (2228-2236)
  source 1..27: mol_type = other RNA
gtgatcaacaaccaggagatgggcttc

SEQ ID NO: 47483 - RNA, 30 nt, synthetic construct
  misc_feature 1..30: note = Glia-derived nexin (64-73)
  source 1..30: mol_type = other RNA
gtgatcagcccccacggcatcgcctccgtc

SEQ ID NO: 47484 - RNA, 27 nt, synthetic construct
  misc_feature 1..27: note = Serine-protein kinase ATM (120-128)
  source 1..27: mol_type = other RNA
gtgatctacaccctgatccactacatc

SEQ ID NO: 47485 - RNA, 27 nt, synthetic construct
  misc_feature 1..27: note = Protein-L-isoaspartate(D-aspartate) O-methyltransferase (92-100)
  source 1..27: mol_type = other RNA
gtgatctacgtccccctgaccgacaag

SEQ ID NO: 47486 - RNA, 30 nt, synthetic construct
  misc_feature 1..30: note = Collagen alpha-1(XII) chain (423-432)
  source 1..30: mol_type = other RNA
gtgaagggcgccccccgcaacctgaaggtc

SEQ ID NO: 47487 - RNA, 27 nt, synthetic construct
  misc_feature 1..27: note = Transferrin receptor protein 1 (188-196)
  source 1..27: mol_type = other RNA
gtgaagatccaggtcaaggacagcgcc

SEQ ID NO: 47488 - RNA, 51 nt, synthetic construct
  misc_feature 1..51: note = Protocadherin Fat 3 (438-454)
  source 1..51: mol_type = other RNA
gtgaagaaggaggtctacaagctggaggtgaccaacaaggagggcgacctc

SEQ ID NO: 47489 - RNA, 48 nt, synthetic construct
  misc_feature 1..48: note = Gamma-secretase C-terminal fragment 59 (559-574)
  source 1..48: mol_type = other RNA
gtgaagatggacgccgagttccgccacgacagcggctacgaggtccac

SEQ ID NO: 47490 - RNA, 51 nt, synthetic construct
  misc_feature 1..51: note = Gamma-secretase C-terminal fragment 59 (559-575)
  source 1..51: mol_type = other RNA
gtgaagatggacgccgagttccgccacgacagcggctacgaggtccaccac

SEQ ID NO: 47491 - RNA, 54 nt, synthetic construct
  misc_feature 1..54: note = Gamma-secretase C-terminal fragment 59 (559-576)
  source 1..54: mol_type = other RNA
gtgaagatggacgccgagttccgccacgacagcggctacgaggtccaccaccag

SEQ ID NO: 47492 - RNA, 30 nt, synthetic construct
  misc_feature 1..30: note = Small conductance calcium-activated potassium channel protein 2 (419-428)
  source 1..30: mol_type = other RNA
gtgaagaacgccgccgcgaacgtcctgcgc

SEQ ID NO: 47493 - RNA, 33 nt, synthetic construct
  misc_feature 1..33: note = Intraflagellar transport protein 81 homolog (41-51)
  source 1..33: mol_type = other RNA
gtgctggccgagatcgaccccaagcagctcgtc

SEQ ID NO: 47494 - RNA, 27 nt, synthetic construct
  misc_feature 1..27: note = Rootletin (677-685)
  source 1..27: mol_type = other RNA
gtgctggccaaggagctcgtcgaggtg

SEQ ID NO: 47495 - RNA, 27 nt, synthetic construct
  misc_feature 1..27: note = Protein FAM13B (15-23)
  source 1..27: mol_type = other RNA
gtgctggccaacaagatcttcggcatc

SEQ ID NO: 47496 - RNA, 27 nt, synthetic construct
  misc_feature 1..27: note = A-kinase anchor protein 1, mitochondrial (363-371)
  source 1..27: mol_type = other RNA
gtgctggccaccaccgtcggcaaggtg

SEQ ID NO: 47497 - RNA, 33 nt, synthetic construct
  misc_feature 1..33: note = Laminin subunit gamma-1 (20-30)
  source 1..33: mol_type = other RNA
gtgctggccgtcctcgccgcggccgccgccgcc

SEQ ID NO: 47498 - RNA, 30 nt, synthetic construct
  misc_feature 1..30: note = U5 small nuclear ribonucleoprotein 200 kDa helicase (139-148)
  source 1..30: mol_type = other RNA
gtgctggccgtcctcaagaacgagaagctg

SEQ ID NO: 47499 - RNA, 27 nt, synthetic construct
  misc_feature 1..27: note = Microtubule-actin cross-linking factor 1 (1174-1182)
  source 1..27: mol_type = other RNA
gtgctggacgaggagatcgccaaggcc

SEQ ID NO: 47500 - RNA, 27 nt, synthetic construct
  misc_feature 1..27: note = E3 ubiquitin-protein ligase RNF123 (218-226)
  source 1..27: mol_type = other RNA
gtgctggacggcgccgtcatgatgtac

SEQ ID NO: 47501 - RNA, 27 nt, synthetic construct
  misc_feature 1..27: note = Homologous-pairing protein 2 homolog (88-97)
  source 1..27: mol_type = other RNA
gtgctggacggcaagatcgtcgccctc

SEQ ID NO: 47502 - RNA, 27 nt, synthetic construct
  misc_feature 1..27: note = Transcription factor SOX-5 (89-97)
  source 1..27: mol_type = other RNA
gtgctggacggcaaggtcgccgtggtg

SEQ ID NO: 47503 - RNA, 27 nt, synthetic construct
  misc_feature 1..27: note = Serine/arginine-rich splicing factor 2 (79-87)
  source 1..27: mol_type = other RNA
gtgctggacggccgcgagctccgggtc

SEQ ID NO: 47504 - RNA, 27 nt, synthetic construct
  misc_feature 1..27: note = 60S ribosomal protein L13a (8-16)
  source 1..27: mol_type = other RNA
gtgctggacggccgcgggcacctcctg

SEQ ID NO: 47505 - RNA, 24 nt, synthetic construct
  misc_feature 1..24: note = Clustered mitochondria protein homolog (97-104)
  source 1..24: mol_type = other RNA
gtgctggaccacttcagcgagctc

SEQ ID NO: 47506 - RNA, 27 nt, synthetic construct
  misc_feature 1..27: note = Microtubule-associated proteins 1A/1B light chain 3B (46-54)
  source 1..27: mol_type = other RNA
gtgctggacaagaccaagttcctcgtc

SEQ ID NO: 47507 - RNA, 27 nt, synthetic construct
  misc_feature 1..27: note = Coilin (145-153)
  source 1..27: mol_type = other RNA
gtgctggacctcgagcccaaggccgtc

SEQ ID NO: 47508 - RNA, 27 nt, synthetic construct
  misc_feature 1..27: note = Protein flightless-1 homolog (107-115)
  source 1..27: mol_type = other RNA
gtgctggacctcagccacaaccagctg

SEQ ID NO: 47509 - RNA, 27 nt, synthetic construct
  misc_feature 1..27: note = Cadherin-2 (399-407)
  source 1..27: mol_type = other RNA
gtgctggaccgcgagagccccaacgtc

SEQ ID NO: 47510 - RNA, 27 nt, synthetic construct
  misc_feature 1..27: note = Receptor-type protein tyrosine phosphatase beta (1333-1341)
  source 1..27: mol_type = other RNA
gtgctggacagccacatccacgcctac

SEQ ID NO: 47511 - RNA, 27 nt, synthetic construct
  misc_feature 1..27: note = Ubiquitin carboxyl-terminal hydrolase 19 (713-721)
  source 1..27: mol_type = other RNA
gtgctggacagcctctcccagagcgtc

SEQ ID NO: 47512 - RNA, 27 nt, synthetic construct
  misc_feature 1..27: note = Biorientation of chromosomes in cell division protein 1-like 1 (1543-1551)
  source 1..27: mol_type = other RNA
gtgctggacagccgcatcgagaccgcc

SEQ ID NO: 47513 - RNA, 30 nt, synthetic construct
  misc_feature 1..30: note = Probable tRNA methyltransferase 9-like protein (350-359)
  source 1..30: mol_type = other RNA
gtgctggacagcaccgccttcatgcgctac

SEQ ID NO: 47514 - RNA, 27 nt, synthetic construct
  misc_feature 1..27: note = Tubulin-specific chaperone A (71-79)
  source 1..27: mol_type = other RNA
gtgctggacagcgtcaagctcgaggcc

SEQ ID NO: 47515 - RNA, 27 nt, synthetic construct
  misc_feature 1..27: note = COP9 signalosome complex subunit 7b (34-42)
  source 1..27: mol_type = other RNA
gtgctggaggcccccggcgtctacgtg

SEQ ID NO: 47516 - RNA, 27 nt, synthetic construct
  misc_feature 1..27: note = Ras GTPase-activating-like protein IQGAP3 (1063-1071)
  source 1..27: mol_type = other RNA
gtgctggaggacaaggtcctcagcgtg

SEQ ID NO: 47517 - RNA, 24 nt, synthetic construct
  misc_feature 1..24: note = Melanoma-associated antigen 4 (287-294)
  source 1..24: mol_type = other RNA
gtgctggagcacgtcgtgcgcgtg

SEQ ID NO: 47518 - RNA, 27 nt, synthetic construct
  misc_feature 1..27: note = Leucine-tRNA ligase, cytoplasmic (271-279)
  source 1..27: mol_type = other RNA
gtgctggagccctacccgagcaagctc

SEQ ID NO: 47519 - RNA, 27 nt, synthetic construct
  misc_feature 1..27: note = E3 ubiquitin-protein ligase RNF123 (425-433)
  source 1..27: mol_type = other RNA
gtgctgttcgacgtcctccgcagcgtg

SEQ ID NO: 47520 - RNA, 30 nt, synthetic construct
  misc_feature 1..30: note = Nucleolar protein 56 (6-15)
  source 1..30: mol_type = other RNA
gtgctgttcgagcacgccgtcggctacgcc

SEQ ID NO: 47521 - RNA, 27 nt, synthetic construct
  misc_feature 1..27: note = NADH dehydrogenase (ubiquinone) iron-sulfur protein 2, mitochondrial (172-180)
  source 1..27: mol_type = other RNA
gtgctgttcggcgagatcacccgcctc

SEQ ID NO: 47522 - RNA, 36 nt, synthetic construct
  misc_feature 1..36: note = Heat shock 70 kDa protein 12A (519-530)
  source 1..36: mol_type = other RNA
gtgctgttcggcctcgaccccgccgtcatcaaggtg

SEQ ID NO: 47523 - RNA, 18 nt, synthetic construct
  misc_feature 1..18: note = Maestro heat-like repeat-containing protein family member 1 (158-163)
  source 1..18: mol_type = other RNA
gtgctgttccaccagtgg

SEQ ID NO: 47524 - RNA, 27 nt, synthetic construct
  misc_feature 1..27: note = Exostosin-like 1 (657-665)
  source 1..27: mol_type = other RNA
gtgctgttcaaggaccccgtcagcgtg

SEQ ID NO: 47525 - RNA, 30 nt, synthetic construct
  misc_feature 1..30: note = Histone-lysine N-methyltransferase 2D (4817-4826)
  source 1..30: mol_type = other RNA
gtgctgttccccgagagcccggcccgcgcc

SEQ ID NO: 47526 - RNA, 27 nt, synthetic construct
  misc_feature 1..27: note = Ribosomal protein S6 kinase alpha-3 (517-525)
  source 1..27: mol_type = other RNA
gtgctgttcaccatcaccaagacggtc

SEQ ID NO: 47527 - RNA, 30 nt, synthetic construct
  misc_feature 1..30: note = TAF6-like RNA polymerase II p300/CBP-associated factor-associated factor 65 kDa subunit 6L (168-177)
  source 1..30: mol_type = other RNA
gtgctgggcgacgacccccagctcatgaag

SEQ ID NO: 47528 - RNA, 33 nt, synthetic construct
  misc_feature 1..33: note = TAF6-like RNA polymerase II p300/CBP-associated factor-associated factor 65 kDa subunit 6L (168-178)
  source 1..33: mol_type = other RNA
gtgctgggcgacgacccccagctcatgaaggtc

SEQ ID NO: 47529 - RNA, 24 nt, synthetic construct
  misc_feature 1..24: note = Kelch-like protein 21 (509-516)
  source 1..24: mol_type = other RNA
gtgctgggcgggaagctctacgtc

SEQ ID NO: 47530 - RNA, 24 nt, synthetic construct
  misc_feature 1..24: note = Lipopolysaccharide-responsive and beige-like anchor protein (137-144)
  source 1..24: mol_type = other RNA
gtgctgggcaagatcgagaaggtc

SEQ ID NO: 47531 - RNA, 24 nt, synthetic construct
  misc_feature 1..24: note = EH domain-containing protein 4 (483-490)
  source 1..24: mol_type = other RNA
gtgctgggcaagatctggaagctc

SEQ ID NO: 47532 - RNA, 24 nt, synthetic construct
  misc_feature 1..24: note = Dynactin subunit 2 (288-295)
  source 1..24: mol_type = other RNA
gtgctgggcaaggtcaacgagatc

SEQ ID NO: 47533 - RNA, 27 nt, synthetic construct
  misc_feature 1..27: note = Nuclear autoantigenic sperm protein (105-113)
  source 1..27: mol_type = other RNA
gtgctgggcaacgccctcgagggggtc

SEQ ID NO: 47534 - RNA, 27 nt, synthetic construct
  misc_feature 1..27: note = Hepatoma-derived growth factor-related protein 2 (550-558)
  source 1..27: mol_type = other RNA
gtgctgggccccaagatcgaggccgtc

SEQ ID NO: 47535 - RNA, 27 nt, synthetic construct
  misc_feature 1..27: note = Zinc finger protein 518A (419-427)
  source 1..27: mol_type = other RNA
gtgctgggccccaccctcaagaacgtc

SEQ ID NO: 47536 - RNA, 27 nt, synthetic construct
  misc_feature 1..27: note = EAW51983.1 (1173-1181)
  source 1..27: mol_type = other RNA
gtgctgggccccaccccggagctcgtc

SEQ ID NO: 47537 - RNA, 27 nt, synthetic construct
  misc_feature 1..27: note = Transferrin receptor protein 1 (488-496)
  source 1..27: mol_type = other RNA
gtgctgggcaccagcaacttcaaggtc

SEQ ID NO: 47538 - RNA, 24 nt, synthetic construct
  misc_feature 1..24: note = HEAT repeat-containing protein 1 (1554-1561)
  source 1..24: mol_type = other RNA
gtgctgggctacatcagcgccgtc

SEQ ID NO: 47539 - RNA, 30 nt, synthetic construct
  misc_feature 1..30: note = Integrin-linked protein kinase (219-228)
  source 1..30: mol_type = other RNA
gtgctgcacgagggcaccaacttcgtcgtg

SEQ ID NO: 47540 - RNA, 27 nt, synthetic construct
  misc_feature 1..27: note Dolichyl-diphosphooligosaccharide-proteinosyltransferase subunit 1 (138-146)
  source 1..27: mol_type = other RNA
gtgctgcacccctacccgacccagatc

SEQ ID NO: 47541 - RNA, 27 nt, synthetic construct
  misc_feature 1..27: note = Ral GTPase-activating protein subunit beta (21-29)
  source 1..27: mol_type = other RNA
gtgctgcacagctaccccgagtccgtc

SEQ ID NO: 47542 - RNA, 27 nt, synthetic construct
  misc_feature 1..27: note = Alpha-parvin (100-108)
  source 1..27: mol_type = other RNA
gtgctgatcgactggatcaacgacgtc

SEQ ID NO: 47543 - RNA, 27 nt, synthetic construct
  misc_feature 1..27: note = Leucine-tRNA ligase, cytoplasmic (203-211)
  source 1..27: mol_type = other RNA
gtgctgatccacagctcccagtacctc

SEQ ID NO: 47544 - RNA, 27 nt, synthetic construct
  misc_feature 1..27: note = Hemicentin-1 (1559-1567)
  source 1..27: mol_type = other RNA
gtgctgatcaacagcctcatcaagctg

SEQ ID NO: 47545 - RNA, 27 nt, synthetic construct
  misc_feature 1..27: note = Neuron navigator 2 (119-127)
  source 1..27: mol_type = other RNA
gtgctgctcgcccagatcatccaggtc

SEQ ID NO: 47546 - RNA, 27 nt, synthetic construct
  misc_feature 1..27: note = Protein MON2 homolog (1145-1153)
  source 1..27: mol_type = other RNA
gtgctgctcgaccacatccagagcgcc

SEQ ID NO: 47547 - RNA, 33 nt, synthetic construct
  misc_feature 1..33: note = Ankyrin-2 (527-537)
  source 1..33: mol_type = other RNA
gtgctgctcgaggccggcgccgcgcacagcctg

SEQ ID NO: 47548 - RNA, 27 nt, synthetic construct
  misc_feature 1..27: note = Protein wntless homolog (264-272)
  source 1..27: mol_type = other RNA
gtgctgctcgagaaggtcatcttcgcc

SEQ ID NO: 47549 - RNA, 36 nt, synthetic construct
  misc_feature 1..36: note = Tumor necrosis factor receptor superfamily member 19 (5-16)
  source 1..36: mol_type = other RNA
gtgctgctcgagcaggagaagaccttcttcaccctg

SEQ ID NO: 47550 - RNA, 27 nt, synthetic construct
  misc_feature 1..27: note = Hemicentin-1 (3258-3266)
  source 1..27: mol_type = other RNA
gtgctgctcggcgagaacgtcgagctg

SEQ ID NO: 47551 - RNA, 30 nt, synthetic construct
  misc_feature 1..30: note = Nucleolar protein 56 (91-100)
  source 1..30: mol_type = other RNA
gtgctgctcggcgtcggggaccccaagatc

SEQ ID NO: 47552 - RNA, 27 nt, synthetic construct
  misc_feature 1..27: note = Receptor tyrosine-protein kinase erbB-3 (840-848)
  source 1..27: mol_type = other RNA
gtgctgctcaagagcccctcccaggtc

SEQ ID NO: 47553 - RNA, 33 nt, synthetic construct
  misc_feature 1..33: note = A-kinase anchor protein 6 (1028-1038)
  source 1..33: mol_type = other RNA
gtgctgctccccaacgacctgctggagaaggtc

SEQ ID NO: 47554 - RNA, 27 nt, synthetic construct
  misc_feature 1..27: note = Lysosomal-trafficking regulator (260-268)
  source 1..27: mol_type = other RNA
gtgctgctcagcctgctggagaaggtc

SEQ ID NO: 47555 - RNA, 27 nt, synthetic construct
  misc_feature 1..27: note = Cyclic AMP-dependent transcription factor ATF-6 alpha (233-241)
  source 1..27: mol_type = other RNA
gtgctgctcagccagcccaccgtcgtg

SEQ ID NO: 47556 - RNA, 27 nt, synthetic construct
  misc_feature 1..27: note = Regulatory-associated protein of mTOR (223-231)
  source 1..27: mol_type = other RNA
gtgctgctcagccaggtccaccgcctg

SEQ ID NO: 47557 - RNA, 33 nt, synthetic construct
  misc_feature 1..33: note = Synaptic vesicle membrane protein VAT-1 homolog (379-389)
  source 1..33: mol_type = other RNA
gtgctgctcgtccccggcccggagaaggagaac

SEQ ID NO: 47558 - RNA, 33 nt, synthetic construct
  misc_feature 1..33: note = Serine/threonine-protein phosphatase 6 regulatory ankyrin repeat subunit A (378-388)
  source 1..33: mol_type = other RNA
gtgctgatggagaccagcggcaccgacatgctc

SEQ ID NO: 47559 - RNA, 27 nt, synthetic construct
  misc_feature 1..27: note = HEAT repeat-containing protein 1 (847-855)
  source 1..27: mol_type = other RNA
gtgctgatgaagctcttcatcaaggtc

SEQ ID NO: 47560 - RNA, 27 nt, synthetic construct
  misc_feature 1..27: note = Urocortin-2 (11-19)
  source 1..27: mol_type = other RNA
gtgctgatgctcggccgcgtcctggtg

SEQ ID NO: 47561 - RNA, 27 nt, synthetic construct
  misc_feature 1..27: note = Structural maintenance of chromosomes protein 2 (153-161)
  source 1..27: mol_type = other RNA
gtgctgaacatgaagcccccggagatc

SEQ ID NO: 47562 - RNA, 27 nt, synthetic construct
  misc_feature 1..27: note = Bifunctional 3'-phosphoadenosine 5'-phosphosulfate synthase 1 (479-487)
  source 1..27: mol_type = other RNA
gtgctgaaccccgagaccaccgtcgtg

SEQ ID NO: 47563 - RNA, 27 nt, synthetic construct
  misc_feature 1..27: note = Receptor activity-modifying protein 2 (34-42)
  source 1..27: mol_type = other RNA
gtgctgaacccccacgaggccctcgcc

SEQ ID NO: 47564 - RNA, 27 nt, synthetic construct
  misc_feature 1..27: note = Probable cytosolic iron-sulfur protein assembly protein CIAO1 (145-153)
  source 1..27: mol_type = other RNA
gtgctgaacagccacacccaggacgtc

SEQ ID NO: 47565 - RNA, 27 nt, synthetic construct
  misc_feature 1..27: note = Nucleosome-remodeling factor subunit BPTF (2314-2322)
  source 1..27: mol_type = other RNA
gtgctgcccggcccggggcagcagctc

SEQ ID NO: 47566 - RNA, 27 nt, synthetic construct
  misc_feature 1..27: note = Transmembrane protein 94 (322-330)
  source 1..27: mol_type = other RNA
gtgctgcccatcctcccgctgctgttc

SEQ ID NO: 47567 - RNA, 21 nt, synthetic construct
  misc_feature 1..21: note = 40S ribosomal protein S26 (63-69)
  source 1..21: mol_type = other RNA
gtgctgcccaagctctacgtc

SEQ ID NO: 47568 - RNA, 33 nt, synthetic construct
  misc_feature 1..33: note = Protocadherin Fat 3 (2698-2708)
  source 1..33: mol_type = other RNA
gtgctgcccccggagaccttcctccccagcttc

SEQ ID NO: 47569 - RNA, 27 nt, synthetic construct
  misc_feature 1..27: note = Oxysterol-binding protein-related protein 10 (353-361)
  source 1..27: mol_type = other RNA
gtgctgcccaccttcatcctcgagaag

SEQ ID NO: 47570 - RNA, 27 nt, synthetic construct
  misc_feature 1..27: note = Oxysterol-binding protein-related protein 9 (402-410)
  source 1..27: mol_type = other RNA
gtgctgcccaccttcatcctcgagcgc

SEQ ID NO: 47571 - RNA, 30 nt, synthetic construct
  misc_feature 1..30: note = Protein-associating with the carboxyl-terminal domain of ezrin (30-39)
  source 1..30: mol_type = other RNA
gtgctgcaggacggcaagttcgccagcgtc

SEQ ID NO: 47572 - RNA, 27 nt, synthetic construct
  misc_feature 1..27: note = Zinc finger MYM-type protein 4 (793-801)
  source 1..27: mol_type = other RNA
gtgctgcagggcgccgtccccaccgtg

SEQ ID NO: 47573 - RNA, 30 nt, synthetic construct
  misc_feature 1..30: note = Serum paraoxonase/arylesterase 2 (326-335)
  source 1..30: mol_type = other RNA
gtgctgcagggcagctccgtcgccagcgtg

SEQ ID NO: 47574 - RNA, 30 nt, synthetic construct
  misc_feature 1..30: note = Microspherule protein 1 (219-228)
  source 1..30: mol_type = other RNA
gtgctgcagaccaacgacctcaccagcgtc

SEQ ID NO: 47575 - RNA, 42 nt, synthetic construct
  misc_feature 1..42: note = Heat shock 70 kDa protein 1-like (171-184)
  source 1..42: mol_type = other RNA
gtgctgcgcatcatcaacgagcccaccgccgccgcgatcgcc

SEQ ID NO: 47576 - RNA, 27 nt, synthetic construct
  misc_feature 1..27: note = Probable helicase with zinc finger domain (252-260)
  source 1..27: mol_type = other RNA
gtgctgagcgagtgcatcgagggcgtc

SEQ ID NO: 47577 - RNA, 27 nt, synthetic construct
  misc_feature 1..27: note = Magnesium transporter protein 1 (68-76)
  source 1..27: mol_type = other RNA
gtgctgagcgagaaggtctcccagctc

SEQ ID NO: 47578 - RNA, 30 nt, synthetic construct
  misc_feature 1..30: note = Protein misato homolog 1 (109-118)
  source 1..30: mol_type = other RNA
gtgctgagctccgacggcgtctggcgcgtg

SEQ ID NO: 47579 - RNA, 24 nt, synthetic construct
  misc_feature 1..24: note = Small integral membrane protein 15 (39-46)
  source 1..24: mol_type = other RNA
gtgctgagctggaagctcgccaag

SEQ ID NO: 47580 - RNA, 27 nt, synthetic construct
  misc_feature 1..27: note = Autophagy-related protein 16-1 (517-525)
  source 1..27: mol_type = other RNA
gtgctgaccggcaaggtcgagaaggtg

SEQ ID NO: 47581 - RNA, 27 nt, synthetic construct
  misc_feature 1..27: note = Transmembraneoprotein NMB (81-89)
  source 1..27: mol_type = other RNA
gtgctgaccagcgactcccccgccctc

SEQ ID NO: 47582 - RNA, 27 nt, synthetic construct
  misc_feature 1..27: note = E3 ubiquitin-protein ligase XIAP (409-417)
  source 1..27: mol_type = other RNA
gtgctggtcgccgacctcgtgaacgcc

SEQ ID NO: 47583 - RNA, 27 nt, synthetic construct
  misc_feature 1..27: note = Eukaryotic translation initiation factor 3 subunit E (318-326)
  source 1..27: mol_type = other RNA
gtgctggtcaacgacttcttcctcgtg

SEQ ID NO: 47584 - RNA, 27 nt, synthetic construct
  misc_feature 1..27: note = Hemicentin-1 (2884-2892)
  source 1..27: mol_type = other RNA
gtgctggtcaacaagagcgccctcatc

SEQ ID NO: 47585 - RNA, 30 nt, synthetic construct
  misc_feature 1..30: note = Cadherin EGF LAG seven-pass G-type receptor 2 (1100-1109)
  source 1..30: mol_type = other RNA
gtgctggtcagcgacggcgtgcactccgtg

SEQ ID NO: 47586 - RNA, 30 nt, synthetic construct
  misc_feature 1..30: note = Protocadherin beta-8 (440-449)
  source 1..30: mol_type = other RNA
gtgctggtcagcgacgtgaacgacaacgcc

SEQ ID NO: 47587 - RNA, 27 nt, synthetic construct
  misc_feature 1..27: note = Elongator complex protein 2 (41-49)
  source 1..27: mol_type = other RNA
gtgctgtacgaccccctcaagcgcgtc

SEQ ID NO: 47588 - RNA, 33 nt, synthetic construct
  misc_feature 1..33: note = Maltase-glucoamylase (708-718)
  source 1..33: mol_type = other RNA
gtgctgtacgagggcgtcgacgaggtgaaggcc

SEQ ID NO: 47589 - RNA, 30 nt, synthetic construct
  misc_feature 1..30: note = Slit homolog 3 protein (361-370)
  source 1..30: mol_type = other RNA
gtgctgtacggcaacaagatcaccgagatc

SEQ ID NO: 47590 - RNA, 30 nt, synthetic construct
  misc_feature 1..30: note = Slit homolog 2 protein (354-363)
  source 1..30: mol_type = other RNA
gtgctgtacggcaacaagatcaccgagctc

SEQ ID NO: 47591 - RNA, 27 nt, synthetic construct
  misc_feature 1..27: note = Protein nepro homolog (10-18)
  source 1..27: mol_type = other RNA
gtgctgtacaagggcgtcctcaagcgc

SEQ ID NO: 47592 - RNA, 36 nt, synthetic construct
  misc_feature 1..36: note = Melanocyte protein PMEL (483-494)
  source 1..36: mol_type = other RNA
gtgctgtaccgctacggcagcttctccgtcaccctc

SEQ ID NO: 47593 - RNA, 27 nt, synthetic construct
  misc_feature 1..27: note = Putative eukaryotic translation initiation factor 2 subunit 3-like protein (151-159)
  source 1..27: mol_type = other RNA
gtgatggacgccgccctgctcctgatc

SEQ ID NO: 47594 - RNA, 30 nt, synthetic construct
  misc_feature 1..30: note = Putative eukaryotic translation initiation factor 2 subunit 3-like protein (151-160)
  source 1..30: mol_type = other RNA
gtgatggacgccgccctgctcctgatcgcg

SEQ ID NO: 47595 - RNA, 27 nt, synthetic construct
  misc_feature 1..27: note = Carboxypeptidase Q (442-450)
  source 1..27: mol_type = other RNA
gtgatggaccccaagcagatgaacgtc

SEQ ID NO: 47596 - RNA, 33 nt, synthetic construct
  misc_feature 1..33: note = Lipopolysaccharide-responsive and beige-like anchor protein (1389-1399)
  source 1..33: mol_type = other RNA
gtgatgttcaacttccccgacccggccaccgtc

SEQ ID NO: 47597 - RNA, 54 nt, synthetic construct
  misc_feature 1..54: note = Cytochrome c oxidase subunit 6C (58-75)
  source 1..54: mol_type = other RNA
gtgatgaaggacttcgaggagatgcgcaaggccggcatcttccagagcgtcaag

SEQ ID NO: 47598 - RNA, 30 nt, synthetic construct
  misc_feature 1..30: note = Scavenger receptor class B member 1 (146-155)
  source 1..30: mol_type = other RNA
gtgatgatggagaacaagcccatgaccctg

SEQ ID NO: 47599 - RNA, 27 nt, synthetic construct
  misc_feature 1..27: note = Xylosyltransferase 1 (587-595)
  source 1..27: mol_type = other RNA
gtgatgcccaagaaggtcttcaagatc

SEQ ID NO: 47600 - RNA, 42 nt, synthetic construct
  misc_feature 1..42: note = 78 kDa glucose-regulated protein (177-190)
  source 1..42: mol_type = other RNA
gtgatgcgcatcatcaacgagcccaccgccgccgcgatcgcc

SEQ ID NO: 47601 - RNA, 45 nt, synthetic construct
  misc_feature 1..45: note = 78 kDa glucose-regulated protein (177-191)
  source 1..45: mol_type = other RNA
gtgatgcgcatcatcaacgagcccaccgccgccgcgatcgcctac

SEQ ID NO: 47602 - RNA, 27 nt, synthetic construct
  misc_feature 1..27: note = Non-structural maintenance of chromosomes element 1 homolog (4-12)
  source 1..27: mol_type = other RNA
gtgatgaccgacgtccaccgccggttc

SEQ ID NO: 47603 - RNA, 33 nt, synthetic construct
  misc_feature 1..33: note = DNA (cytosine-5)-methyltransferase 3A (139-149)
  source 1..33: mol_type = other RNA
gtgatgtggttcggcgacgggaagttcagcgtc

SEQ ID NO: 47604 - RNA, 21 nt, synthetic construct
  misc_feature 1..21: note = Interferon-induced protein with tetratricopeptide repeats 1 (396-402)
  source 1..21: mol_type = other RNA
gtgaacgccatcatccactac

SEQ ID NO: 47605 - RNA, 54 nt, synthetic construct
  misc_feature 1..54: note = Beta-2-microglobulin (81-98)
  source 1..54: mol_type = other RNA
gtgaaccacgtcaccctgagccagcccaagatcgtgaagtgggaccgcgacatg

SEQ ID NO: 47606 - RNA, 42 nt, synthetic construct
  misc_feature 1..42: note = Protocadherin gamma-C3 (553-566)
  source 1..42: mol_type = other RNA
gtgaacatcttcgtcaccgaccgcaacgacaacgccccccag

SEQ ID NO: 47607 - RNA, 27 nt, synthetic construct
  misc_feature 1..27: note = T-complex protein 1 subunit eta (46-54)
  source 1..27: mol_type = other RNA
gtgaacaagatcaaggagatcgccgtc

SEQ ID NO: 47608 - RNA, 33 nt, synthetic construct
  misc_feature 1..33: note = Cytochrome c oxidase subunit 6A1, mitochondrial (76-86)
  source 1..33: mol_type = other RNA
gtgaaccccctgccgaccggctacgaggacgag

SEQ ID NO: 47609 - RNA, 33 nt, synthetic construct
  misc_feature 1..33: note = Pumilio homolog 1 (533-543)
  source 1..33: mol_type = other RNA
gtgaacagcgccctggccttcggccaggggctc

SEQ ID NO: 47610 - RNA, 21 nt, synthetic construct
  misc_feature 1..21: note = T-complex protein 1 subunit zeta-2 (199-205)
  source 1..21: mol_type = other RNA
gtgaacagcggcttcttctac

SEQ ID NO: 47611 - RNA, 21 nt, synthetic construct
  misc_feature 1..21: note = Bifunctional glutamate/proline-tRNA ligase (51-57)
  source 1..21: mol_type = other RNA
gtgaacagcatcctgcgctac

SEQ ID NO: 47612 - RNA, 72 nt, synthetic construct
  misc_feature 1..72: note = Ras GTPase-activating-like protein IQGAP1 (303-326)
  source 1..72: mol_type = other RNA
gtgaacaccttcagcgccctggccaacatcgacctcgcgctggagcagggcgacgccctggccctcttccgc

SEQ ID NO: 47613 - RNA, 27 nt, synthetic construct
  misc_feature 1..27: note = 40S ribosomal protein S30 (117-125)
  source 1..27: mol_type = other RNA
gtgaacgtcgtgcccaccttcggcaag

SEQ ID NO: 47614 - RNA, 30 nt, synthetic construct
  misc_feature 1..30: note = Transmembraneoprotein NMB (485-494)
  source 1..30: mol_type = other RNA
gtgcccgaccgcgacccggccagccccctg

SEQ ID NO: 47615 - RNA, 27 nt, synthetic construct
  misc_feature 1..27: note = Endothelin B receptor (266-274)
  source 1..27: mol_type = other RNA
gtgcccttcatccagaaggccagcgtc

SEQ ID NO: 47616 - RNA, 27 nt, synthetic construct
  misc_feature 1..27: note = Nectin-3 (335-343)
  source 1..27: mol_type = other RNA
gtgcccttcaagcagaccagctccatc

SEQ ID NO: 47617 - RNA, 24 nt, synthetic construct
  misc_feature 1..24: note = Heat shock protein 105 kDa (412-419)
  source 1..24: mol_type = other RNA
gtgcccttcccgatcagcctgatc

SEQ ID NO: 47618 - RNA, 33 nt, synthetic construct
  misc_feature 1..33: note = Elastin (436-446)
  source 1..33: mol_type = other RNA
gtgcccggcgccccgggggccgtccccggcgtg

SEQ ID NO: 47619 - RNA, 51 nt, synthetic construct
  misc_feature 1..51: note = Carboxypeptidase D (836-852)
  source 1..51: mol_type = other RNA
gtgcccggcacctacaagatcaccgccagcgcccgcgggtacaacccggtc

SEQ ID NO: 47620 - RNA, 45 nt, synthetic construct
  misc_feature 1..45: note = Transmembraneoprotein NMB (221-235)
  source 1..45: mol_type = other RNA
gtgcccatcgcccaggtcaaggacgtgtacgtggtcaccgaccag

SEQ ID NO: 47621 - RNA, 78 nt, synthetic construct
  misc_feature 1..78: note = Transmembraneoprotein NMB (221-246)
  source 1..78: mol_type = other RNA
gtgcccatcgcccaggtcaaggacgtgtacgtggtcaccgaccagatcccggtgttcgtgaccatgttccagaagaac

SEQ ID NO: 47622 - RNA, 36 nt, synthetic construct
  misc_feature 1..36: note = Neuronal cell adhesion molecule (399-410)
  source 1..36: mol_type = other RNA
gtgcccatcgagatcgccccggacgaccccagccgc

SEQ ID NO: 47623 - RNA, 39 nt, synthetic construct
  misc_feature 1..39: note = Neuronal cell adhesion molecule (399-411)
  source 1..39: mol_type = other RNA
gtgcccatcgagatcgccccggacgaccccagccgcaag

SEQ ID NO: 47624 - RNA, 48 nt, synthetic construct
  misc_feature 1..48: note = Neuronal cell adhesion molecule (399-414)
  source 1..48: mol_type = other RNA
gtgcccatcgagatcgccccggacgaccccagccgcaagatcgacggc

SEQ ID NO: 47625 - RNA, 27 nt, synthetic construct
  misc_feature 1..27: note = pre-rRNA processing protein FTSJ3 (78-86)
  source 1..27: mol_type = other RNA
gtgcccatcaagccgctgcccaacgtc

SEQ ID NO: 47626 - RNA, 42 nt, synthetic construct
  misc_feature 1..42: note = Thioredoxin reductase 1, cytoplasmic (252-265)
  source 1..42: mol_type = other RNA
gtgcccatcaaggtcgagcagatcgaggccggcaccccgggg

SEQ ID NO: 47627 - RNA, 27 nt, synthetic construct
  misc_feature 1..27: note = Endoglin (526-534)
  source 1..27: mol_type = other RNA
gtgcccatcccgaagaccggcaccctg

SEQ ID NO: 47628 - RNA, 27 nt, synthetic construct
  misc_feature 1..27: note = Interferon-induced 35 kDa protein (73-81)
  source 1..27: mol_type = other RNA
gtgcccaagagcctggtctccaacctc

SEQ ID NO: 47629 - RNA, 42 nt, synthetic construct
  misc_feature 1..42: note = Solute carrier family 2, facilitated glucose transporter member 14 (177-190)
  source 1..42: mol_type = other RNA
gtgcccatgtacatcggcgagatcagcccgaccgccctgcgc

SEQ ID NO: 47630 - RNA, 45 nt, synthetic construct
  misc_feature 1..45: note = Solute carrier family 2, facilitated glucose transporter member 1 (140-154)
  source 1..45: mol_type = other RNA
gtgcccatgtacgtcggcgaggtgagcccgaccgccctgcgcggg

SEQ ID NO: 47631 - RNA, 27 nt, synthetic construct
  misc_feature 1..27: note = Nucleosome-remodeling factor subunit BPTF (238-246)
  source 1..27: mol_type = other RNA
gtgcccaacgagcacatcatgaacgtc

SEQ ID NO: 47632 - RNA, 30 nt, synthetic construct
  misc_feature 1..30: note = COMM domain-containing protein 7 (78-87)
  source 1..30: mol_type = other RNA
gtgcccaacggcgccctgaagaagagcctc

SEQ ID NO: 47633 - RNA, 27 nt, synthetic construct
  misc_feature 1..27: note = Diacylglycerol O-acyltransferase 1 (328-336)
  source 1..27: mol_type = other RNA
gtgcccaaccacctgatctggctcatc

SEQ ID NO: 47634 - RNA, 27 nt, synthetic construct
  misc_feature 1..27: note = Selenoprotein N (214-222)
  source 1..27: mol_type = other RNA
gtgcccaaccaccgcagcctgaacgtc

SEQ ID NO: 47635 - RNA, 24 nt, synthetic construct
  misc_feature 1..24: note = Polymerase I and transcript release factor (228-235)
  source 1..24: mol_type = other RNA
gtgcccccgttcaccttccacgtc

SEQ ID NO: 47636 - RNA, 24 nt, synthetic construct
  misc_feature 1..24: note = Sodium/potassium-transporting ATPase subunit alpha-3 (168-175)
  source 1..24: mol_type = other RNA
gtgccccagcaggccctggtcatc

SEQ ID NO: 47637 - RNA, 27 nt, synthetic construct
  misc_feature 1..27: note = Neurofibromin (199-207)
  source 1..27: mol_type = other RNA
gtgccccagagccacatgccggagatc

SEQ ID NO: 47638 - RNA, 27 nt, synthetic construct
  misc_feature 1..27: note = Krueppel-like factor 15 (133-141)
  source 1..27: mol_type = other RNA
gtgccccgcccgttccagcccaccctg

SEQ ID NO: 47639 - RNA, 24 nt, synthetic construct
  misc_feature 1..24: note = Transmembrane emp24 domain-containing protein 7 (5-12)
  source 1..24: mol_type = other RNA
gtgccccgcagcgcctccgtcctg

SEQ ID NO: 47640 - RNA, 27 nt, synthetic construct
  misc_feature 1..27: note = Transmembrane emp24 domain-containing protein 7 (5-13)
  source 1..27: mol_type = other RNA
gtgccccgcagcgcctccgtcctgctc

SEQ ID NO: 47641 - RNA, 30 nt, synthetic construct
  misc_feature 1..30: note = Transmembrane emp24 domain-containing protein 7 (5-14)
  source 1..30: mol_type = other RNA
gtgccccgcagcgcctccgtcctgctcctg

SEQ ID NO: 47642 - RNA, 27 nt, synthetic construct
  misc_feature 1..27: note = F-box/WD repeat-containing protein 9 (435-443)
  source 1..27: mol_type = other RNA
gtgcccaccgacccgccccgcaccatc

SEQ ID NO: 47643 - RNA, 24 nt, synthetic construct
  misc_feature 1..24: note = Protein Smaug homolog 1 (103-110)
  source 1..24: mol_type = other RNA
gtgcccaccaccatcaacacgatc

SEQ ID NO: 47644 - RNA, 27 nt, synthetic construct
  misc_feature 1..27: note = Major facilitator superfamily domain-containing protein 12 (214-222)
  source 1..27: mol_type = other RNA
gtgcccgtcttccgcaacctgagcctc

SEQ ID NO: 47645 - RNA, 27 nt, synthetic construct
  misc_feature 1..27: note = Mitogen-activated protein kinase 7 (125-133)
  source 1..27: mol_type = other RNA
gtgccctacggcgagttcaagagcgtc

SEQ ID NO: 47646 - RNA, 24 nt, synthetic construct
  misc_feature 1..24: note = Solute carrier family 22 member 18 (47-54)
  source 1..24: mol_type = other RNA
gtgccctacctgagccgcaagctc

SEQ ID NO: 47647 - RNA, 24 nt, synthetic construct
  misc_feature 1..24: note = Glycogen debranching enzyme (1050-1057)
  source 1..24: mol_type = other RNA
gtgccctaccgcctgaacgagatc

SEQ ID NO: 47648 - RNA, 27 nt, synthetic construct
  misc_feature 1..27: note = Phosphatidylinositol 3-kinase catalytic subunit type 3 (400-408)
  source 1..27: mol_type = other RNA
gtgcaggccctgaagtacgagaacttc

SEQ ID NO: 47649 - RNA, 27 nt, synthetic construct
  misc_feature 1..27: note = Adipocyte enhancer-binding protein 1 (657-665)
  source 1..27: mol_type = other RNA
gtgcaggacacccgcatccacctggtc

SEQ ID NO: 47650 - RNA, 27 nt, synthetic construct
  misc_feature 1..27: note = Spectrin beta chain, non-erythrocytic 5 (994-1002)
  source 1..27: mol_type = other RNA
gtgcagctggcccacagcgtcgaggtg

SEQ ID NO: 47651 - RNA, 27 nt, synthetic construct
  misc_feature 1..27: note = Mitochondrial pyruvate carrier 1 (19-27)
  source 1..27: mol_type = other RNA
gtgcagccccgcaactggctgctcttc

SEQ ID NO: 47652 - RNA, 27 nt, synthetic construct
  misc_feature 1..27: note = Mitogen-activated protein kinase kinase kinase 6 (125-133)
  source 1..27: mol_type = other RNA
gtgcagcccagcctgttctaccacctc

SEQ ID NO: 47653 - RNA, 24 nt, synthetic construct
  misc_feature 1..24: note = CD99 antigen (178-185)
  source 1..24: mol_type = other RNA
gtgcagcgcaccctgctcgagaag

SEQ ID NO: 47654 - RNA, 27 nt, synthetic construct
  misc_feature 1..27: note = eIF-2-alpha kinase activator GCN1 (1752-1760)
  source 1..27: mol_type = other RNA
gtgcgcgacggctacatcatgatgttc

SEQ ID NO: 47655 - RNA, 27 nt, synthetic construct
  misc_feature 1..27: note = Lysosomal-trafficking regulator (3248-3256)
  source 1..27: mol_type = other RNA
gtgcgcatgcccccgttcaccaagatg

SEQ ID NO: 47656 - RNA, 27 nt, synthetic construct
  misc_feature 1..27: note = Tripeptidyl-peptidase 1 (151-159)
  source 1..27: mol_type = other RNA
gtgcgcagcccccacccgtaccagctg

SEQ ID NO: 47657 - RNA, 24 nt, synthetic construct
  misc_feature 1..24: note = Anion exchange protein (986-993)
  source 1..24: mol_type = other RNA
gtgagcgccgccgcggtcgtgttc

SEQ ID NO: 47658 - RNA, 24 nt, synthetic construct
  misc_feature 1..24: note = V-type proton ATPase subunit H (400-407)
  source 1..24: mol_type = other RNA
gtgagcgacgacccccaggtcctg

SEQ ID NO: 47659 - RNA, 24 nt, synthetic construct
  misc_feature 1..24: note = Cofilin-1 (7-14)
  source 1..24: mol_type = other RNA
gtgagcgacggcgtcatcaaggtg

SEQ ID NO: 47660 - RNA, 27 nt, synthetic construct
  misc_feature 1..27: note = Cofilin-1 (7-15)
  source 1..27: mol_type = other RNA
gtgagcgacggcgtcatcaaggtgttc

SEQ ID NO: 47661 - RNA, 24 nt, synthetic construct
  misc_feature 1..24: note = HLA class I histocompatibility antigen, Cw-3 alpha chain (218-225)
  source 1..24: mol_type = other RNA
gtgagcgaccacgaggccaccctg

SEQ ID NO: 47662 - RNA, 24 nt, synthetic construct
  misc_feature 1..24: note = Proteasome subunit beta type-8 (264-271)
  source 1..24: mol_type = other RNA
gtgagcgacctgctccaccagtac

SEQ ID NO: 47663 - RNA, 27 nt, synthetic construct
  misc_feature 1..27: note = Baculoviral IAP repeat-containing protein 6 (689-697)
  source 1..27: mol_type = other RNA
gtgagcgaccccaacctgatccacgtc

SEQ ID NO: 47664 - RNA, 39 nt, synthetic construct
  misc_feature 1..39: note = Microtubule-associated protein (1369-1381)
  source 1..39: mol_type = other RNA
gtgagcgaggagaacaagaccgacgccgccaaccgctac

SEQ ID NO: 47665 - RNA, 24 nt, synthetic construct
  misc_feature 1..24: note = Neuroblast differentiation-associated protein AHNAK (3336-3343)
  source 1..24: mol_type = other RNA
gtgagcggccccaagctgaacatc

SEQ ID NO: 47666 - RNA, 42 nt, synthetic construct
  misc_feature 1..42: note = PR domain zinc finger protein 10 (909-922)
  source 1..42: mol_type = other RNA
gtgagcggccagcccctgtccccgagcgcccagcaggcccag

SEQ ID NO: 47667 - RNA, 30 nt, synthetic construct
  misc_feature 1..30: note = Melanocyte protein PMEL (412-421)
  source 1..30: mol_type = other RNA
gtgagcatcgtcgtgctgtccggcaccacc

SEQ ID NO: 47668 - RNA, 27 nt, synthetic construct
  misc_feature 1..27: note = Kinesin-like protein KIF27 (522-530)
  source 1..27: mol_type = other RNA
gtgagcctgaaggaggcccagaaggtc

SEQ ID NO: 47669 - RNA, 24 nt, synthetic construct
  misc_feature 1..24: note = HLA class I histocompatibility antigen, A-23 alpha chain (358-365)
  source 1..24: mol_type = other RNA
gtgagcctgaccgcctgcaaggtc

SEQ ID NO: 47670 - RNA, 27 nt, synthetic construct
  misc_feature 1..27: note = Potassium-transporting ATPase alpha chain 1 (600-608)
  source 1..27: mol_type = other RNA
gtgagcatgatcgaccccccgcgcgcc

SEQ ID NO: 47671 - RNA, 27 nt, synthetic construct
  misc_feature 1..27: note = Cyclic AMP-dependent transcription factor ATF-6 alpha (445-453)
  source 1..27: mol_type = other RNA
gtgagcaacgacaaggccctgatggtc

SEQ ID NO: 47672 - RNA, 27 nt, synthetic construct
  misc_feature 1..27: note = Vacuolar protein sorting-associated protein 13D (2458-2466)
  source 1..27: mol_type = other RNA
gtgagcaacgagcgccacctggaggtc

SEQ ID NO: 47673 - RNA, 27 nt, synthetic construct
  misc_feature 1..27: note = Transcription initiation factor TFIID subunit 1 (307-315)
  source 1..27: mol_type = other RNA
gtgagccagaagtccctgtggaactac

SEQ ID NO: 47674 - RNA, 27 nt, synthetic construct
  misc_feature 1..27: note = Neuron navigator 3 (198-206)
  source 1..27: mol_type = other RNA
gtgagctccaagaccaccctgcagtac

SEQ ID NO: 47675 - RNA, 27 nt, synthetic construct
  misc_feature 1..27: note Dolichyl-diphosphooligosaccharide-proteinosyltransferase subunit 1 (300-308)
  source 1..27: mol_type = other RNA
gtgagcacctcccacctgctcatcctg

SEQ ID NO: 47676 - RNA, 27 nt, synthetic construct
  misc_feature 1..27: note = DNA damage-binding protein 1 (7-15)
  source 1..27: mol_type = other RNA
gtgaccgcccagaagcccaccgccgtc

SEQ ID NO: 47677 - RNA, 27 nt, synthetic construct
  misc_feature 1..27: note = General transcription factor II-I (201-209)
  source 1..27: mol_type = other RNA
gtgaccgacgccgaccgcagcatcctg

SEQ ID NO: 47678 - RNA, 69 nt, synthetic construct
  misc_feature 1..69: note = Nebulin (5596-5618)
  source 1..69: mol_type = other RNA
gtgaccgacgacaagaacaccgtcctggccctccgcaacacgctgatcgagagcgacctgaagtacaag

SEQ ID NO: 47679 - RNA, 27 nt, synthetic construct
  misc_feature 1..27: note = HLA class II histocompatibility antigen, DQ beta 1 chain (114-122)
  source 1..27: mol_type = other RNA
gtgaccgacttctaccccgcccagatc

SEQ ID NO: 47680 - RNA, 27 nt, synthetic construct
  misc_feature 1..27: note = Protein dopey-2 (2274-2282)
  source 1..27: mol_type = other RNA
gtgaccgacagcccccgcatcctgaag

SEQ ID NO: 47681 - RNA, 27 nt, synthetic construct
  misc_feature 1..27: note = Williams-Beuren syndrome chromosomal region 16 protein (318-326)
  source 1..27: mol_type = other RNA
gtgaccgacagcacccaggtcaacgtg

SEQ ID NO: 47682 - RNA, 30 nt, synthetic construct
  misc_feature 1..30: note = Nebulin (5327-5336)
  source 1..30: mol_type = other RNA
gtgaccgacaccgtcagcgacgtgaagtac

SEQ ID NO: 47683 - RNA, 51 nt, synthetic construct
  misc_feature 1..51: note = Cytochrome c oxidase subunit 6B1 (1-17)
  source 1..51: mol_type = other RNA
gtgaccgactgggacgagcagcgcgccgagggcaccttccccgggaagatc

SEQ ID NO: 47684 - RNA, 27 nt, synthetic construct
  misc_feature 1..27: note = Insulin-like growth factor 1 receptor (683-691)
  source 1..27: mol_type = other RNA
gtgaccgagaaccccaagaccgaggtc

SEQ ID NO: 47685 - RNA, 27 nt, synthetic construct
  misc_feature 1..27: note = Ras association domain-containing protein 3 (64-72)
  source 1..27: mol_type = other RNA
gtgaccgagagccccgccaagttcgcc

SEQ ID NO: 47686 - RNA, 30 nt, synthetic construct
  misc_feature 1..30: note = Large neutral amino acids transporter small subunit 2 (80-89)
  source 1..30: mol_type = other RNA
gtgaccttcggcgagaagctgctcggggtc

SEQ ID NO: 47687 - RNA, 27 nt, synthetic construct
  misc_feature 1..27: note = Cadherin EGF LAG seven-pass G-type receptor 1 (634-642)
  source 1..27: mol_type = other RNA
gtgaccttcagcgccctgctccccggc

SEQ ID NO: 47688 - RNA, 63 nt, synthetic construct
  misc_feature 1..63: note = Heterogeneous nuclear ribonucleoprotein F (327-347)
  source 1..63: mol_type = other RNA
gtgaccggcgaggccgacgtcgagttcgccacccacgaggaggcggtggccgccatgagcaag

SEQ ID NO: 47689 - RNA, 36 nt, synthetic construct
  misc_feature 1..36: note = Mucin-19 (3971-3982)
  source 1..36: mol_type = other RNA
gtgaccggcatcaccgggcccagcgccggcatcacg

SEQ ID NO: 47690 - RNA, 72 nt, synthetic construct
  misc_feature 1..72: note = Splicing factor 3B subunit 4 (49-72)
  source 1..72: mol_type = other RNA
gtgaccggccagcaccaggggtacggcttcgtcgagttcctgagcgaggaggacgccgactacgccatcaag

SEQ ID NO: 47691 - RNA, 27 nt, synthetic construct
  misc_feature 1..27: note = Melanotransferrin (119-127)
  source 1..27: mol_type = other RNA
gtgaccatcgacaccctgaagggcgtc

SEQ ID NO: 47692 - RNA, 30 nt, synthetic construct
  misc_feature 1..30: note = Adhesion G protein-coupled receptor F5 (269-278)
  source 1..30: mol_type = other RNA
gtgaccatcaacgagagcaacttcttcgtc

SEQ ID NO: 47693 - RNA, 27 nt, synthetic construct
  misc_feature 1..27: note = Maltase-glucoamylase (886-894)
  source 1..27: mol_type = other RNA
gtgaccatcaccgacctgcagggcctc

SEQ ID NO: 47694 - RNA, 36 nt, synthetic construct
  misc_feature 1..36: note = Annexin A2 (54-65)
  source 1..36: mol_type = other RNA
gtgaccatcgtcaacatcctgaccaaccgcagcaac

SEQ ID NO: 47695 - RNA, 42 nt, synthetic construct
  misc_feature 1..42: note = Annexin A2 (54-67)
  source 1..42: mol_type = other RNA
gtgaccatcgtcaacatcctgaccaaccgcagcaacgcccag

SEQ ID NO: 47696 - RNA, 57 nt, synthetic construct
  misc_feature 1..57: note = Prelamin-A/C (346-364)
  source 1..57: mol_type = other RNA
gtgaccatctgggccgccggcgcgggggccacccacagccccccgacggacctggtc

SEQ ID NO: 47697 - RNA, 39 nt, synthetic construct
  misc_feature 1..39: note = Laminin subunit gamma-1 (671-683)
  source 1..39: mol_type = other RNA
gtgaccctggccagcgcccgccccggcccgggggtcccc

SEQ ID NO: 47698 - RNA, 33 nt, synthetic construct
  misc_feature 1..33: note = Heat shock transcription factor, X-linked (369-379)
  source 1..33: mol_type = other RNA
gtgaccctggtcgccgccggcgcggcccagccc

SEQ ID NO: 47699 - RNA, 27 nt, synthetic construct
  misc_feature 1..27: note = Trafficking protein particle complex subunit 2-like protein (73-81)
  source 1..27: mol_type = other RNA
gtgaccaacagcaaggtcaagttcgtg

SEQ ID NO: 47700 - RNA, 27 nt, synthetic construct
  misc_feature 1..27: note = Solute carrier family 26 member 10 (164-172)
  source 1..27: mol_type = other RNA
gtgacccccgaccagctgttcgtcagc

SEQ ID NO: 47701 - RNA, 30 nt, synthetic construct
  misc_feature 1..30: note = Treacle protein (248-257)
  source 1..30: mol_type = other RNA
gtgaccccccaggtcaagggcggggccctg

SEQ ID NO: 47702 - RNA, 45 nt, synthetic construct
  misc_feature 1..45: note = Desmoglein-2 (901-915)
  source 1..45: mol_type = other RNA
gtgacccaggagatcgtcaccgagcgcagcgtgtccagccggcag

SEQ ID NO: 47703 - RNA, 48 nt, synthetic construct
  misc_feature 1..48: note = Desmoglein-2 (901-916)
  source 1..48: mol_type = other RNA
gtgacccaggagatcgtcaccgagcgcagcgtgtccagccggcaggcc

SEQ ID NO: 47704 - RNA, 48 nt, synthetic construct
  misc_feature 1..48: note = Voltage-dependent anion-selective channel protein 1 (164-179)
  source 1..48: mol_type = other RNA
gtgacccagagcaacttcgccgtcggctacaagaccgacgagttccag

SEQ ID NO: 47705 - RNA, 27 nt, synthetic construct
  misc_feature 1..27: note = Bifunctional glutamate/proline-tRNA ligase (1104-1112)
  source 1..27: mol_type = other RNA
gtgacccgcagcggcaagaccgagctg

SEQ ID NO: 47706 - RNA, 33 nt, synthetic construct
  misc_feature 1..33: note = HMG domain-containing protein 4 (358-368)
  source 1..33: mol_type = other RNA
gtgaccagcggccccccgccctccatcccctac

SEQ ID NO: 47707 - RNA, 39 nt, synthetic construct
  misc_feature 1..39: note = Vimentin (31-43)
  source 1..39: mol_type = other RNA
gtgaccaccagcacgcgcacctactccctgggcagcgcc

SEQ ID NO: 47708 - RNA, 27 nt, synthetic construct
  misc_feature 1..27: note = Low-density lipoprotein receptor-related protein 2 (584-592)
  source 1..27: mol_type = other RNA
gtgacctacgacggcatccagcgcaag

SEQ ID NO: 47709 - RNA, 27 nt, synthetic construct
  misc_feature 1..27: note = Unconventional myosin-Ic (1036-1044)
  source 1..27: mol_type = other RNA
gtggtcgccccccgcctgaacagccgg

SEQ ID NO: 47710 - RNA, 30 nt, synthetic construct
  misc_feature 1..30: note = Echinoderm microtubule-associated protein-like 3 (378-387)
  source 1..30: mol_type = other RNA
gtggtcgacgacagcaacgagcacatgctg

SEQ ID NO: 47711 - RNA, 27 nt, synthetic construct
  misc_feature 1..27: note = Helicase with zinc finger domain 2 (2588-2596)
  source 1..27: mol_type = other RNA
gtggtcgaccccaaccaggtgaacgtg

SEQ ID NO: 47712 - RNA, 27 nt, synthetic construct
  misc_feature 1..27: note = Catenin alpha-1 (33-41)
  source 1..27: mol_type = other RNA
gtggtcgaggacggcatcctgaagctc

SEQ ID NO: 47713 - RNA, 42 nt, synthetic construct
  misc_feature 1..42: note = Beta-hexosaminidase subunit alpha (397-410)
  source 1..42: mol_type = other RNA
gtggtcgagcccctggccttcgagggcaccccggagcagaag

SEQ ID NO: 47714 - RNA, 39 nt, synthetic construct
  misc_feature 1..39: note = Glyceraldehyde-3-phosphate dehydrogenase (95-107)
  source 1..39: mol_type = other RNA
gtggtcgagagcaccggcgtgttcaccacgatggagaag

SEQ ID NO: 47715 - RNA, 45 nt, synthetic construct
  misc_feature 1..45: note = Glyceraldehyde-3-phosphate dehydrogenase (95-109)
  source 1..45: mol_type = other RNA
gtggtcgagagcaccggcgtgttcaccacgatggagaaggccggg

SEQ ID NO: 47716 - RNA, 48 nt, synthetic construct
  misc_feature 1..48: note = Glyceraldehyde-3-phosphate dehydrogenase (95-110)
  source 1..48: mol_type = other RNA
gtggtcgagagcaccggcgtgttcaccacgatggagaaggccggggcc

SEQ ID NO: 47717 - RNA, 27 nt, synthetic construct
  misc_feature 1..27: note = Thioredoxin-interacting protein (12-20)
  source 1..27: mol_type = other RNA
gtggtcttcaacgaccccgagaaggtg

SEQ ID NO: 47718 - RNA, 27 nt, synthetic construct
  misc_feature 1..27: note = Ribosomal RNA-processing protein 7 homolog A (119-127)
  source 1..27: mol_type = other RNA
gtggtcttccagaagcccagcggcgtg

SEQ ID NO: 47719 - RNA, 27 nt, synthetic construct
  misc_feature 1..27: note = F-box only protein 7 (293-301)
  source 1..27: mol_type = other RNA
gtggtcctgcccctcgagctgaagctg

SEQ ID NO: 47720 - RNA, 27 nt, synthetic construct
  misc_feature 1..27: note = ABCB9 protein (422-430)
  source 1..27: mol_type = other RNA
gtggtccaggtgagcatcctgtactac

SEQ ID NO: 47721 - RNA, 24 nt, synthetic construct
  misc_feature 1..24: note = Unconventional myosin-Ic (251-258)
  source 1..24: mol_type = other RNA
gtggtccgcaaggccctgaccgtg

SEQ ID NO: 47722 - RNA, 27 nt, synthetic construct
  misc_feature 1..27: note = Cancer/testis antigen 55 (63-71)
  source 1..27: mol_type = other RNA
gtggtcaccggcaacgtgcccctgaag

SEQ ID NO: 47723 - RNA, 24 nt, synthetic construct
  misc_feature 1..24: note = Protein FAM65B (860-867)
  source 1..24: mol_type = other RNA
gtggtcaccgtgttccagtactac

SEQ ID NO: 47724 - RNA, 27 nt, synthetic construct
  misc_feature 1..27: note = Leucine-rich repeat LGI family member 4 (16-24)
  source 1..27: mol_type = other RNA
gtggtcgtggcctggcgccccccgaag

SEQ ID NO: 47725 - RNA, 36 nt, synthetic construct
  misc_feature 1..36: note = Glutamate receptor ionotropic, kainate 2 (174-185)
  source 1..36: mol_type = other RNA
gtggtctacgacgacagcaccggcctgatccgcctc

SEQ ID NO: 47726 - RNA, 45 nt, synthetic construct
  misc_feature 1..45: note = Calcium-binding mitochondrial carrier protein SCaMC-1 (444-458)
  source 1..45: mol_type = other RNA
gtggtctacgagaacatgaagcagaccctgggcgtgacccagaag

SEQ ID NO: 47727 - RNA, 33 nt, synthetic construct
  misc_feature 1..33: note = N-acetyllactosaminide beta-1,6-N-acetylglucosaminyl-transferase, isoform A (159-169)
  source 1..33: mol_type = other RNA
gtggtctacggcgggatcagccgcctgcaggcc

SEQ ID NO: 47728 - RNA, 36 nt, synthetic construct
  misc_feature 1..36: note = m7GpppX diphosphatase (131-142)
  source 1..36: mol_type = other RNA
gtggtctaccccgccaccgagaagcacctgcagaag

SEQ ID NO: 47729 - RNA, 27 nt, synthetic construct
  misc_feature 1..27: note = Melanoma-derived growth regulatory protein (69-77)
  source 1..27: mol_type = other RNA
gtggtctacgtgttcagcaagctgaag

SEQ ID NO: 47730 - RNA, 30 nt, synthetic construct
  misc_feature 1..30: note = 2-hydroxyacylsphingosine 1-beta-galactosyltransferase (258-267)
  source 1..30: mol_type = other RNA
gtggtctacgtgggcgggatcctgaccaag

SEQ ID NO: 47731 - RNA, 27 nt, synthetic construct
  misc_feature 1..27: note = N-acylglucosamine 2-epimerase (48-56)
  source 1..27: mol_type = other RNA
gtgtacgacgacctgaagtacgtctgg

SEQ ID NO: 47732 - RNA, 30 nt, synthetic construct
  misc_feature 1..30: note = Cleft lip and palate transmembrane protein 1 (470-479)
  source 1..30: mol_type = other RNA
gtgtacgacgacatggccttccgctacctg

SEQ ID NO: 47733 - RNA, 36 nt, synthetic construct
  misc_feature 1..36: note = Protein phosphatase 1A (58-69)
  source 1..36: mol_type = other RNA
gtgtacgacggccacgccgggagccaggtcgccaag

SEQ ID NO: 47734 - RNA, 27 nt, synthetic construct
  misc_feature 1..27: note = Melanoma-associated antigen 4 (231-239)
  source 1..27: mol_type = other RNA
gtgtacgacggccgcgagcacaccgtc

SEQ ID NO: 47735 - RNA, 30 nt, synthetic construct
  misc_feature 1..30: note = Nuclear pore complex protein Nup160 (1114-1123)
  source 1..30: mol_type = other RNA
gtgtacgaccgccccggcgccagcccgaag

SEQ ID NO: 47736 - RNA, 24 nt, synthetic construct
  misc_feature 1..24: note = Retinoic acid receptor alpha (49-56)
  source 1..24: mol_type = other RNA
gtgtacgagaccgacgtcttcgtg

SEQ ID NO: 47737 - RNA, 27 nt, synthetic construct
  misc_feature 1..27: note = Origin recognition complex subunit 3 (436-444)
  source 1..27: mol_type = other RNA
gtgtacttcagcgccgcccacgcgctg

SEQ ID NO: 47738 - RNA, 27 nt, synthetic construct
  misc_feature 1..27: note = Melanoma-associated antigen C2 (266-274)
  source 1..27: mol_type = other RNA
gtgtacggcgagccccgcgagctgctc

SEQ ID NO: 47739 - RNA, 27 nt, synthetic construct
  misc_feature 1..27: note = UBX domain-containing protein 6 (214-222)
  source 1..27: mol_type = other RNA
gtgtacggcttcgtccgcgaggccctg

SEQ ID NO: 47740 - RNA, 27 nt, synthetic construct
  misc_feature 1..27: note = Tripartite motif-containing protein 55 (92-100)
  source 1..27: mol_type = other RNA
gtgtacggcctgcagcgcaacctcctg

SEQ ID NO: 47741 - RNA, 27 nt, synthetic construct
  misc_feature 1..27: note = Sulfate transporter (138-146)
  source 1..27: mol_type = other RNA
gtgtacggcctgtacaccagcttcttc

SEQ ID NO: 47742 - RNA, 24 nt, synthetic construct
  misc_feature 1..24: note = Filamin-A (747-754)
  source 1..24: mol_type = other RNA
gtgtacggccccggggtcgccaag

SEQ ID NO: 47743 - RNA, 24 nt, synthetic construct
  misc_feature 1..24: note = Serine palmitoyltransferase 2 (238-245)
  source 1..24: mol_type = other RNA
gtgtacggccagccccgcacccgg

SEQ ID NO: 47744 - RNA, 27 nt, synthetic construct
  misc_feature 1..27: note = Rho-related BTB domain-containing protein 3 (463-471)
  source 1..27: mol_type = other RNA
gtgtacggcgtcagcaaggagaccttc

SEQ ID NO: 47745 - RNA, 27 nt, synthetic construct
  misc_feature 1..27: note = Beta-galactoside alpha-2,6-sialyltransferase 1 (260-268)
  source 1..27: mol_type = other RNA
gtgtaccacagcgacatccccaagtgg

SEQ ID NO: 47746 - RNA, 27 nt, synthetic construct
  misc_feature 1..27: note = Heterogeneous nuclear ribonucleoprotein L-like (131-139)
  source 1..27: mol_type = other RNA
gtgtacatcgccggccagcaggccttc

SEQ ID NO: 47747 - RNA, 27 nt, synthetic construct
  misc_feature 1..27: note = Kinesin-like protein KIF3C (175-183)
  source 1..27: mol_type = other RNA
gtgtacatcaaggacctgagctccttc

SEQ ID NO: 47748 - RNA, 27 nt, synthetic construct
  misc_feature 1..27: note = Ubiquitin carboxyl-terminal hydrolase 40 (308-316)
  source 1..27: mol_type = other RNA
gtgtacatcaaggacgtcgaccacctg

SEQ ID NO: 47749 - RNA, 24 nt, synthetic construct
  misc_feature 1..24: note = 26S proteasome non-ATPase regulatory subunit 8 (131-138)
  source 1..24: mol_type = other RNA
gtgtacatcaagcaccccgtcagc

SEQ ID NO: 47750 - RNA, 30 nt, synthetic construct
  misc_feature 1..30: note = Protocadherin gamma-A11 (898-907)
  source 1..30: mol_type = other RNA
gtgtacatccccggcagcaacgccaccctg

SEQ ID NO: 47751 - RNA, 30 nt, synthetic construct
  misc_feature 1..30: note = Myotubularin (63-72)
  source 1..30: mol_type = other RNA
gtgtacatcaccaactaccgcctgtacctc

SEQ ID NO: 47752 - RNA, 27 nt, synthetic construct
  misc_feature 1..27: note = Polycystic kidney disease 2-like 1 protein (265-273)
  source 1..27: mol_type = other RNA
gtgtacaacgccaacatcaacctgttc

SEQ ID NO: 47753 - RNA, 27 nt, synthetic construct
  misc_feature 1..27: note = Intron-binding protein aquarius (344-352)
  source 1..27: mol_type = other RNA
gtgtacaacatgtacatgcacctgatc

SEQ ID NO: 47754 - RNA, 27 nt, synthetic construct
  misc_feature 1..27: note = Unconventional myosin-X (213-221)
  source 1..27: mol_type = other RNA
gtgtacaacaacaacagctcccgcttc

SEQ ID NO: 47755 - RNA, 27 nt, synthetic construct
  misc_feature 1..27: note = Exocyst complex component 6B (535-543)
  source 1..27: mol_type = other RNA
gtgtacaaccagatcaaggagttcatc

SEQ ID NO: 47756 - RNA, 27 nt, synthetic construct
  misc_feature 1..27: note = HLA class II histocompatibility antigen, DR beta 5 chain (96-104)
  source 1..27: mol_type = other RNA
gtgtaccccgcccgcacccagaccctg

SEQ ID NO: 47757 - RNA, 27 nt, synthetic construct
  misc_feature 1..27: note = HLA class II histocompatibility antigen, DO beta chain (127-135)
  source 1..27: mol_type = other RNA
gtgtaccccgagcgcaccccgctgctc

SEQ ID NO: 47758 - RNA, 27 nt, synthetic construct
  misc_feature 1..27: note = tRNA-splicing endonuclease subunit Sen34 (246-254)
  source 1..27: mol_type = other RNA
gtgtaccccggcgacccgctgcgcttc

SEQ ID NO: 47759 - RNA, 27 nt, synthetic construct
  misc_feature 1..27: note = Cullin-associated NEDD8-dissociated protein 1 (651-659)
  source 1..27: mol_type = other RNA
gtgtaccccagctccctgagcaagatc

SEQ ID NO: 47760 - RNA, 30 nt, synthetic construct
  misc_feature 1..30: note = Zinc finger protein 529 (226-235)
  source 1..30: mol_type = other RNA
gtgtaccagaagatccacaacgagaagttc

SEQ ID NO: 47761 - RNA, 27 nt, synthetic construct
  misc_feature 1..27: note = DNA-directed RNA polymerase I subunit RPA1 (1314-1322)
  source 1..27: mol_type = other RNA
gtgtaccagctgcgcttccagttcctc

SEQ ID NO: 47762 - RNA, 27 nt, synthetic construct
  misc_feature 1..27: note = Protein CDV3 homolog (66-74)
  source 1..27: mol_type = other RNA
gtgtaccgccccccgggcgcccggctg

SEQ ID NO: 47763 - RNA, 27 nt, synthetic construct
  misc_feature 1..27: note = Polynucleotide 5'-hydroxyl-kinase NOL9 (499-507)
  source 1..27: mol_type = other RNA
gtgtacaccgacttcgccttccgcatc

SEQ ID NO: 47764 - RNA, 27 nt, synthetic construct
  misc_feature 1..27: note = HEAT repeat-containing protein 5A (1098-1106)
  source 1..27: mol_type = other RNA
gtgtacaccgaccgcttccacctgatc

SEQ ID NO: 47765 - RNA, 27 nt, synthetic construct
  misc_feature 1..27: note = Ral GTPase-activating protein subunit beta (89-97)
  source 1..27: mol_type = other RNA
gtgtacaccgactggatcatggccctg

SEQ ID NO: 47766 - RNA, 27 nt, synthetic construct
  misc_feature 1..27: note = Kidney mitochondrial carrier protein 1 (125-133)
  source 1..27: mol_type = other RNA
gtgtacacccacttcctgagctccttc

SEQ ID NO: 47767 - RNA, 27 nt, synthetic construct
  misc_feature 1..27: note = Uncharacterized protein C18orf8 (400-408)
  source 1..27: mol_type = other RNA
gtgtacacccacgtcctgagcgccttc

SEQ ID NO: 47768 - RNA, 27 nt, synthetic construct
  misc_feature 1..27: note = Sprouty-related, EVH1 domain-containing protein 2 (80-88)
  source 1..27: mol_type = other RNA
gtgtacaccaaggccaaccccaccttc

SEQ ID NO: 47769 - RNA, 27 nt, synthetic construct
  misc_feature 1..27: note = 2'-5'-oligoadenylate synthase 3 (909-917)
  source 1..27: mol_type = other RNA
gtgtacgtcgacctgatccacagctac

SEQ ID NO: 47770 - RNA, 24 nt, synthetic construct
  misc_feature 1..24: note = Melanoma-derived growth regulatory protein (70-77)
  source 1..24: mol_type = other RNA
gtgtacgtcttcagcaagctgaag

SEQ ID NO: 47771 - RNA, 30 nt, synthetic construct
  misc_feature 1..30: note = Long-chain fatty acid transport protein 1 (34-43)
  source 1..30: mol_type = other RNA
gtgtacgtcggcagcgggggctggcgcttc

SEQ ID NO: 47772 - RNA, 27 nt, synthetic construct
  misc_feature 1..27: note = Hemicentin-1 (4343-4351)
  source 1..27: mol_type = other RNA
gtgtacgtcaaggagcccccggtgttc

SEQ ID NO: 47773 - RNA, 27 nt, synthetic construct
  misc_feature 1..27: note = AP-3 complex subunit mu-2 (274-282)
  source 1..27: mol_type = other RNA
gtgtacgtcaagcacaacatcagcttc

SEQ ID NO: 47774 - RNA, 30 nt, synthetic construct
  misc_feature 1..30: note = Large neutral amino acids transporter small subunit 1 (22-31)
  source 1..30: mol_type = other RNA
gtgtacgtcctgaccaacctcgcctacttc

SEQ ID NO: 47775 - RNA, 24 nt, synthetic construct
  misc_feature 1..24: note = Histone H2B type 2-F (40-47)
  source 1..24: mol_type = other RNA
gtgtacgtctacaaggtgctgaag

SEQ ID NO: 47776 - RNA, 27 nt, synthetic construct
  misc_feature 1..27: note = Leptin receptor gene-related protein (27-35)
  source 1..27: mol_type = other RNA
gtgtactggcccctgttcgtcctcatc

SEQ ID NO: 47777 - RNA, 27 nt, synthetic construct
  misc_feature 1..27: note = GDP-fucose protein O-fucosyltransferase 1 (6-14)
  source 1..27: mol_type = other RNA
tgggcccgccccctgagcgtgtccttc

SEQ ID NO: 47778 - RNA, 66 nt, synthetic construct
  misc_feature 1..66: note = Modulator of apoptosis 1 (9-30)
  source 1..66: mol_type = other RNA
tggtgccgcggcatggacatgaacccccggaaggccctgctcatcgccgggatcagccagtcctgc

SEQ ID NO: 47779 - RNA, 36 nt, synthetic construct
  misc_feature 1..36: note = Puromycin-sensitive aminopeptidase (479-490)
  source 1..36: mol_type = other RNA
tgggagagcctggagaacgcctccggcaagcccatc

SEQ ID NO: 47780 - RNA, 42 nt, synthetic construct
  misc_feature 1..42: note = Protein CREG1 (68-81)
  source 1..42: mol_type = other RNA
tggggcgccctggccaccatcagcaccctcgaggcggtgcgc

SEQ ID NO: 47781 - RNA, 45 nt, synthetic construct
  misc_feature 1..45: note = Protein CREG1 (68-82)
  source 1..45: mol_type = other RNA
tggggcgccctggccaccatcagcaccctcgaggcggtgcgcggg

SEQ ID NO: 47782 - RNA, 18 nt, synthetic construct
  misc_feature 1..18: note = Dedicator of cytokinesis protein 9 (121-126)
  source 1..18: mol_type = other RNA
tggcacctggtgaactac

SEQ ID NO: 47783 - RNA, 18 nt, synthetic construct
  misc_feature 1..18: note = Dedicator of cytokinesis protein 10 (114-119)
  source 1..18: mol_type = other RNA
tggcacgtggtcaactac

SEQ ID NO: 47784 - RNA, 18 nt, synthetic construct
  misc_feature 1..18: note = Forkhead box protein N2 (51-56)
  source 1..18: mol_type = other RNA
tggatcctggaccacttc

SEQ ID NO: 47785 - RNA, 27 nt, synthetic construct
  misc_feature 1..27: note = Neutral amino acid transporter A (155-163)
  source 1..27: mol_type = other RNA
tggatcgtggaccgcaccaccacggtc

SEQ ID NO: 47786 - RNA, 27 nt, synthetic construct
  misc_feature 1..27: note = Bifunctional glutamate/proline-tRNA ligase (616-624)
  source 1..27: mol_type = other RNA
tggctggccgagaccacccacgccctc

SEQ ID NO: 47787 - RNA, 30 nt, synthetic construct
  misc_feature 1..30: note = 60S ribosomal protein L19 (4-13)
  source 1..30: mol_type = other RNA
tggctggaccccaacgagaccaacgagatc

SEQ ID NO: 47788 - RNA, 30 nt, synthetic construct
  misc_feature 1..30: note = Solute carrier family 12 member 2 (1012-1021)
  source 1..30: mol_type = other RNA
tggctgttcgacgacggcgggctcaccctg

SEQ ID NO: 47789 - RNA, 18 nt, synthetic construct
  misc_feature 1..18: note = Serine/arginine-rich splicing factor 6 (107-112)
  source 1..18: mol_type = other RNA
tggctgttccacaccctc

SEQ ID NO: 47790 - RNA, 27 nt, synthetic construct
  misc_feature 1..27: note = Nuclear migration protein nudC (184-192)
  source 1..27: mol_type = other RNA
tggctgatcgaggacggcaaggtggtc

SEQ ID NO: 47791 - RNA, 18 nt, synthetic construct
  misc_feature 1..18: note = ATP-dependent RNA helicase DHX36 (885-890)
  source 1..18: mol_type = other RNA
tggctgatctaccacctc

SEQ ID NO: 47792 - RNA, 33 nt, synthetic construct
  misc_feature 1..33: note = Liprin-beta-1 (649-659)
  source 1..33: mol_type = other RNA
tggctgatggagcagggcctcgggagctacctg

SEQ ID NO: 47793 - RNA, 30 nt, synthetic construct
  misc_feature 1..30: note = Tuberin (56-65)
  source 1..30: mol_type = other RNA
tggctggtgggcaacaagctcgtcaccgtg

SEQ ID NO: 47794 - RNA, 27 nt, synthetic construct
  misc_feature 1..27: note = Vacuole membrane protein 1 (366-374)
  source 1..27: mol_type = other RNA
tggatgttcgagaagctggtggtcgtg

SEQ ID NO: 47795 - RNA, 27 nt, synthetic construct
  misc_feature 1..27: note = Hemicentin-1 (236-244)
  source 1..27: mol_type = other RNA
tggcgcatccccttcgacccgagcctg

SEQ ID NO: 47796 - RNA, 27 nt, synthetic construct
  misc_feature 1..27: note = Hemicentin-2 (233-241)
  source 1..27: mol_type = other RNA
tggcgcctgcccttcgacccgagcctc

SEQ ID NO: 47797 - RNA, 141 nt, synthetic construct
  misc_feature 1..141: note = ATP synthase subunit epsilon, mitochondrial (5-51)
  source 1..141: mol_type = other RNA
tggcgccaggccggcctgagctacatccggtactcccagatctgcgccaaggcggtgcgcgacgccctcaagaccgagttcaaggccaacgccgagaagaccagcgggtccaacgtcaagatcgtgaaggtgaagaaggag

SEQ ID NO: 47798 - RNA, 27 nt, synthetic construct
  misc_feature 1..27: note = Pleckstrin homology domain-containing family B member 2 (27-35)
  source 1..27: mol_type = other RNA
tggagcgacggccacctgatctactac

SEQ ID NO: 47799 - RNA, 24 nt, synthetic construct
  misc_feature 1..24: note = Low-density lipoprotein receptor-related protein 2 (440-447)
  source 1..24: mol_type = other RNA
tggaccgacaccgtgcagaacaag

SEQ ID NO: 47800 - RNA, 18 nt, synthetic construct
  misc_feature 1..18: note = Importin-7 (450-455)
  source 1..18: mol_type = other RNA
tgggtgctgcactacttc

SEQ ID NO: 47801 - RNA, 27 nt, synthetic construct
  misc_feature 1..27: note = Vimentin (290-298)
  source 1..27: mol_type = other RNA
tggtacaagagcaagttcgccgacctg

SEQ ID NO: 47802 - RNA, 24 nt, synthetic construct
  misc_feature 1..24: note = Suppressor of SWI4 1 homolog (25-32)
  source 1..24: mol_type = other RNA
tacgccgccaacccccacagcttc

SEQ ID NO: 47803 - RNA, 30 nt, synthetic construct
  misc_feature 1..30: note = Putative eukaryotic translation initiation factor 2 subunit 3-like protein (330-339)
  source 1..30: mol_type = other RNA
tacgccgcccccggcgggctgatcggcgtg

SEQ ID NO: 47804 - RNA, 24 nt, synthetic construct
  misc_feature 1..24: note = A-kinase anchor protein 9 (284-291)
  source 1..24: mol_type = other RNA
tacgccgacgagaagaccctgttc

SEQ ID NO: 47805 - RNA, 24 nt, synthetic construct
  misc_feature 1..24: note = E3 SUMO-protein ligase RanBP2 (3010-3017)
  source 1..24: mol_type = other RNA
tacgccgacggcgaggccaaggtg

SEQ ID NO: 47806 - RNA, 24 nt, synthetic construct
  misc_feature 1..24: note = Proteasome subunit beta type-4 (160-167)
  source 1..24: mol_type = other RNA
tacgccgacggcgagagcttcctg

SEQ ID NO: 47807 - RNA, 27 nt, synthetic construct
  misc_feature 1..27: note = ATP-binding cassette sub-family A member 2 (14-22)
  source 1..27: mol_type = other RNA
tacgccgacaagcccgccggcacctac

SEQ ID NO: 47808 - RNA, 27 nt, synthetic construct
  misc_feature 1..27: note = Ankyrin repeat domain-containing protein 17 (1180-1188)
  source 1..27: mol_type = other RNA
tacgccgaggtgggccgcgtcctgctc

SEQ ID NO: 47809 - RNA, 27 nt, synthetic construct
  misc_feature 1..27: note = Protein FAM208B (753-761)
  source 1..27: mol_type = other RNA
tacgccttcagcctggactccaagtac

SEQ ID NO: 47810 - RNA, 30 nt, synthetic construct
  misc_feature 1..30: note = Heterogeneous nuclear ribonucleoprotein L (250-259)
  source 1..30: mol_type = other RNA
tacgccaagcccacccgcctgaacgtgttc

SEQ ID NO: 47811 - RNA, 30 nt, synthetic construct
  misc_feature 1..30: note = Rho GTPase-activating protein 5 (623-632)
  source 1..30: mol_type = other RNA
tacgccctggacggcaagatctacgagctc

SEQ ID NO: 47812 - RNA, 69 nt, synthetic construct
  misc_feature 1..69: note = Keratin, type I cytoskeletal 18 (273-295)
  source 1..69: mol_type = other RNA
tacgccctgcagatggagcagctcaacggcatcctgctgcacctcgagagcgagctggcccagacccgc

SEQ ID NO: 47813 - RNA, 33 nt, synthetic construct
  misc_feature 1..33: note = NAD(P)H dehydrogenase (quinone) 1 (43-53)
  source 1..33: mol_type = other RNA
tacgccatgaacttcaaccccatcatcagccgc

SEQ ID NO: 47814 - RNA, 30 nt, synthetic construct
  misc_feature 1..30: note = Protein FAM73A (152-161)
  source 1..30: mol_type = other RNA
tacgccaacggcgggctgttcagcaagtac

SEQ ID NO: 47815 - RNA, 27 nt, synthetic construct
  misc_feature 1..27: note = Coiled-coil domain-containing protein 34 (296-304)
  source 1..27: mol_type = other RNA
tacgccaacggcaagctgaccgggttc

SEQ ID NO: 47816 - RNA, 24 nt, synthetic construct
  misc_feature 1..24: note = Tubulin alpha-1C chain (173-180)
  source 1..24: mol_type = other RNA
tacgcccgcggccactacaccatc

SEQ ID NO: 47817 - RNA, 33 nt, synthetic construct
  misc_feature 1..33: note = Synaptojanin-2 (4-14)
  source 1..33: mol_type = other RNA
tacgccagcggccccgccccgcccgcggggacc

SEQ ID NO: 47818 - RNA, 30 nt, synthetic construct
  misc_feature 1..30: note = Destrin (117-126)
  source 1..30: mol_type = other RNA
tacgccagctccaaggacgccatcaagaag

SEQ ID NO: 47819 - RNA, 27 nt, synthetic construct
  misc_feature 1..27: note = Tetratricopeptide repeat protein 14 (351-359)
  source 1..27: mol_type = other RNA
tacgccaccaagggcagcctgaacaag

SEQ ID NO: 47820 - RNA, 21 nt, synthetic construct
  misc_feature 1..21: note = Serine/threonine-protein kinase LATS1 (731-737)
  source 1..21: mol_type = other RNA
tacgccaccaagaccctgcgc

SEQ ID NO: 47821 - RNA, 24 nt, synthetic construct
  misc_feature 1..24: note = MAGUK p55 subfamily member 5 (117-124)
  source 1..24: mol_type = other RNA
tacgccgtgaagatcctggagatc

SEQ ID NO: 47822 - RNA, 27 nt, synthetic construct
  misc_feature 1..27: note = 60S ribosomal protein L4 (52-60)
  source 1..27: mol_type = other RNA
tacgccgtgagcgagctggccggccac

SEQ ID NO: 47823 - RNA, 24 nt, synthetic construct
  misc_feature 1..24: note = Melanoma-associated antigen 4 (232-239)
  source 1..24: mol_type = other RNA
tacgacggccgcgagcacaccgtg

SEQ ID NO: 47824 - RNA, 27 nt, synthetic construct
  misc_feature 1..27: note = Neurobeachin-like protein 1 (2364-2372)
  source 1..27: mol_type = other RNA
tacgaccgcaacatcagcaactacttc

SEQ ID NO: 47825 - RNA, 21 nt, synthetic construct
  misc_feature 1..21: note = Signal recognition particle subunit SRP68 (455-461)
  source 1..21: mol_type = other RNA
tacgaccgcgtgctgaagtac

SEQ ID NO: 47826 - RNA, 27 nt, synthetic construct
  misc_feature 1..27: note = DNA topoisomerase 2-alpha (1082-1090)
  source 1..27: mol_type = other RNA
tacgacagcgaccccgtgaaggcctgg

SEQ ID NO: 47827 - RNA, 27 nt, synthetic construct
  misc_feature 1..27: note = Seizure 6-like protein 2 (844-852)
  source 1..27: mol_type = other RNA
tacgaggccggcgacacccgcgagtac

SEQ ID NO: 47828 - RNA, 27 nt, synthetic construct
  misc_feature 1..27: note = Protein SSX5 (55-63)
  source 1..27: mol_type = other RNA
tacgaggccatgaccaagctgggcttc

SEQ ID NO: 47829 - RNA, 27 nt, synthetic construct
  misc_feature 1..27: note = ATP-binding cassette sub-family C member 8 (1326-1334)
  source 1..27: mol_type = other RNA
tacgagggcctgctcgcccccagcctg

SEQ ID NO: 47830 - RNA, 21 nt, synthetic construct
  misc_feature 1..21: note = L-dopachrome tautomerase (303-309)
  source 1..21: mol_type = other RNA
tacgagggcctgctccgccgg

SEQ ID NO: 47831 - RNA, 24 nt, synthetic construct
  misc_feature 1..24: note = Melanophilin (122-129)
  source 1..24: mol_type = other RNA
tacgagcacgtgaaggcccgcttc

SEQ ID NO: 47832 - RNA, 21 nt, synthetic construct
  misc_feature 1..21: note = Annexin A5 (94-100)
  source 1..21: mol_type = other RNA
tacgagctgaagcacgccctc

SEQ ID NO: 47833 - RNA, 27 nt, synthetic construct
  misc_feature 1..27: note = Gamma-secretase C-terminal fragment 59 (647-655)
  source 1..27: mol_type = other RNA
tacgagaaccccacctacaagttcttc

SEQ ID NO: 47834 - RNA, 21 nt, synthetic construct
  misc_feature 1..21: note = 39S ribosomal protein L20, mitochondrial (108-114)
  source 1..21: mol_type = other RNA
tacgagcccaagaccttcaag

SEQ ID NO: 47835 - RNA, 27 nt, synthetic construct
  misc_feature 1..27: note = Migration stimulation factor FN70 (392-400)
  source 1..27: mol_type = other RNA
tacgagcaggaccagaagtacagcttc

SEQ ID NO: 47836 - RNA, 36 nt, synthetic construct
  misc_feature 1..36: note = Spectrin beta chain, non-erythrocytic 5 (750-761)
  source 1..36: mol_type = other RNA
tacttcgccgacgccgcggaggccgccagctggctg

SEQ ID NO: 47837 - RNA, 21 nt, synthetic construct
  misc_feature 1..21: note = Glia-derived nexin (200-206)
  source 1..21: mol_type = other RNA
tacttcaagggcctgtggaag

SEQ ID NO: 47838 - RNA, 27 nt, synthetic construct
  misc_feature 1..27: note = Serine-tRNA ligase, cytoplasmic (194-202)
  source 1..27: mol_type = other RNA
tacttcctgaagggcgtgctcgtcttc

SEQ ID NO: 47839 - RNA, 30 nt, synthetic construct
  misc_feature 1..30: note = Tyrosine-protein kinase receptor (124-133)
  source 1..30: mol_type = other RNA
tacggcgccgccgggggcaagggggcgaag

SEQ ID NO: 47840 - RNA, 30 nt, synthetic construct
  misc_feature 1..30: note = Hemoglobin subunit alpha (25-34)
  source 1..30: mol_type = other RNA
tacggcgccgaggccctggagcgcatgttc

SEQ ID NO: 47841 - RNA, 51 nt, synthetic construct
  misc_feature 1..51: note = Hemoglobin subunit alpha (25-41)
  source 1..51: mol_type = other RNA
tacggcgccgaggccctggagcgcatgttcctcagcttccccaccaccaag

SEQ ID NO: 47842 - RNA, 24 nt, synthetic construct
  misc_feature 1..24: note = Tubulin beta-6 chain (157-164)
  source 1..24: mol_type = other RNA
tacggcgacctgaaccacctcgtg

SEQ ID NO: 47843 - RNA, 24 nt, synthetic construct
  misc_feature 1..24: note = WD repeat-containing protein 3 (588-595)
  source 1..24: mol_type = other RNA
tacggccacaagctgcccgtgatc

SEQ ID NO: 47844 - RNA, 27 nt, synthetic construct
  misc_feature 1..27: note = Translocating chain-associated membrane protein 1 (75-83)
  source 1..27: mol_type = other RNA
tacggcatcaaggacctggccaccgtg

SEQ ID NO: 47845 - RNA, 21 nt, synthetic construct
  misc_feature 1..21: note = U2 small nuclear ribonucleoprotein B'' (75-81)
  source 1..21: mol_type = other RNA
tacggcaagcccatgcgcatc

SEQ ID NO: 47846 - RNA, 21 nt, synthetic construct
  misc_feature 1..21: note = Nucleoporin NUP53 (179-185)
  source 1..21: mol_type = other RNA
tacggcaacatcctgaagcac

SEQ ID NO: 47847 - RNA, 27 nt, synthetic construct
  misc_feature 1..27: note = Filamin-A (1844-1852)
  source 1..27: mol_type = other RNA
tacggccccgggctgacccacggcgtg

SEQ ID NO: 47848 - RNA, 21 nt, synthetic construct
  misc_feature 1..21: note = Vacuolar protein sorting-associated protein 51 homolog (123-129)
  source 1..21: mol_type = other RNA
tacggccaggccgtgcgctac

SEQ ID NO: 47849 - RNA, 21 nt, synthetic construct
  misc_feature 1..21: note = Serine palmitoyltransferase 3 (290-296)
  source 1..21: mol_type = other RNA
tacggccagccccgcacccgg

SEQ ID NO: 47850 - RNA, 21 nt, synthetic construct
  misc_feature 1..21: note = Tyrosine-protein kinase Fyn (385-391)
  source 1..21: mol_type = other RNA
tacggccgcttcaccatcaag

SEQ ID NO: 47851 - RNA, 48 nt, synthetic construct
  misc_feature 1..48: note = Annexin A2 (24-39)
  source 1..48: mol_type = other RNA
tacggcagcgtgaaggcctacaccaacttcgacgccgagcgcgacgcg

SEQ ID NO: 47852 - RNA, 24 nt, synthetic construct
  misc_feature 1..24: note = Band 4.1-like protein 3 (187-194)
  source 1..24: mol_type = other RNA
tacggcgtggacctgcaccacgcc

SEQ ID NO: 47853 - RNA, 21 nt, synthetic construct
  misc_feature 1..21: note = Parafibromin (315-321)
  source 1..21: mol_type = other RNA
taccacggcatgaccctgaag

SEQ ID NO: 47854 - RNA, 18 nt, synthetic construct
  misc_feature 1..18: note = Fibronectin type III domain-containing protein 3B (351-356)
  source 1..18: mol_type = other RNA
taccacgtgcgcgtctac

SEQ ID NO: 47855 - RNA, 33 nt, synthetic construct
  misc_feature 1..33: note = cAMP-responsive element modulator (185-195)
  source 1..33: mol_type = other RNA
tacatcgccatcgcccagggcgggaccatccag

SEQ ID NO: 47856 - RNA, 27 nt, synthetic construct
  misc_feature 1..27: note = HEAT repeat-containing protein 1 (1013-1021)
  source 1..27: mol_type = other RNA
tacatcgccaaggacctgatgaaggtg

SEQ ID NO: 47857 - RNA, 27 nt, synthetic construct
  misc_feature 1..27: note = Gamma-tubulin complex component 6 (1683-1691)
  source 1..27: mol_type = other RNA
tacatcgccaaccagatcctgcacgtg

SEQ ID NO: 47858 - RNA, 27 nt, synthetic construct
  misc_feature 1..27: note = CAAX prenyl protease 1 homolog (218-226)
  source 1..27: mol_type = other RNA
tacatcgcccccctgttcgacaagttc

SEQ ID NO: 47859 - RNA, 36 nt, synthetic construct
  misc_feature 1..36: note = Serum albumin (287-298)
  source 1..36: mol_type = other RNA
tacatctgcgagaaccaggacagcatctccagcaag

SEQ ID NO: 47860 - RNA, 27 nt, synthetic construct
  misc_feature 1..27: note = Ankyrin-2 (1793-1801)
  source 1..27: mol_type = other RNA
tacatcgacgagcacggccacaccgtg

SEQ ID NO: 47861 - RNA, 18 nt, synthetic construct
  misc_feature 1..18: note = E3 ubiquitin-protein ligase RNF216 (59-64)
  source 1..18: mol_type = other RNA
tacatcgacttcaagttc

SEQ ID NO: 47862 - RNA, 27 nt, synthetic construct
  misc_feature 1..27: note = Ribonuclease 3 (577-585)
  source 1..27: mol_type = other RNA
tacatcgacaaggacctggagtacgtg

SEQ ID NO: 47863 - RNA, 27 nt, synthetic construct
  misc_feature 1..27: note = Eukaryotic translation initiation factor 3 subunit L (522-530)
  source 1..27: mol_type = other RNA
tacatcgacaaggacatgatccacatc

SEQ ID NO: 47864 - RNA, 24 nt, synthetic construct
  misc_feature 1..24: note = Receptor tyrosine-protein kinase erbB-3 (148-155)
  source 1..24: mol_type = other RNA
tacatcgagaagaacgacaagctg

SEQ ID NO: 47865 - RNA, 27 nt, synthetic construct
  misc_feature 1..27: note = Laminin subunit beta-1 (396-404)
  source 1..27: mol_type = other RNA
tacatcgagaaggtggtctacaccgtg

SEQ ID NO: 47866 - RNA, 24 nt, synthetic construct
  misc_feature 1..24: note = 26S proteasome non-ATPase regulatory subunit 8 (132-139)
  source 1..24: mol_type = other RNA
tacatcaagcaccccgtgagcctg

SEQ ID NO: 47867 - RNA, 24 nt, synthetic construct
  misc_feature 1..24: note = Retinoblastoma-like protein 2 (1013-1020)
  source 1..24: mol_type = other RNA
tacatcaagcagatcaagaccttc

SEQ ID NO: 47868 - RNA, 27 nt, synthetic construct
  misc_feature 1..27: note = Exostosin-2 (348-356)
  source 1..27: mol_type = other RNA
tacatcctgcccttcagcgaggtgctc

SEQ ID NO: 47869 - RNA, 30 nt, synthetic construct
  misc_feature 1..30: note = E3 ubiquitin-protein ligase RNF114 (116-125)
  source 1..30: mol_type = other RNA
tacatcatggagggcgtgaaggccaccatc

SEQ ID NO: 47870 - RNA, 27 nt, synthetic construct
  misc_feature 1..27: note = Cytoplasmic dynein 1 heavy chain 1 (2489-2497)
  source 1..27: mol_type = other RNA
tacatccagcgctacctggtgtacgcc

SEQ ID NO: 47871 - RNA, 27 nt, synthetic construct
  misc_feature 1..27: note = Ceramide synthase 2 (78-86)
  source 1..27: mol_type = other RNA
tacatccgcgccggcaccctgatcatg

SEQ ID NO: 47872 - RNA, 27 nt, synthetic construct
  misc_feature 1..27: note = Kinesin-like protein KIF11 (399-407)
  source 1..27: mol_type = other RNA
tacatcagcgaggagaacttccgcgtg

SEQ ID NO: 47873 - RNA, 24 nt, synthetic construct
  misc_feature 1..24: note = Cleft lip and palate transmembrane protein 1 (108-115)
  source 1..24: mol_type = other RNA
tacatcagcgagcacgagcacttc

SEQ ID NO: 47874 - RNA, 27 nt, synthetic construct
  misc_feature 1..27: note = V-type proton ATPase subunit B, brain isoform (266-274)
  source 1..27: mol_type = other RNA
tacatcaccgagggccagatctacgtg

SEQ ID NO: 47875 - RNA, 30 nt, synthetic construct
  misc_feature 1..30: note = E3 ubiquitin-protein ligase HERC2 (1123-1132)
  source 1..30: mol_type = other RNA
tacatcgtggagggcgacttcaccggggtc

SEQ ID NO: 47876 - RNA, 30 nt, synthetic construct
  misc_feature 1..30: note = Dedicator of cytokinesis protein 7 (457-466)
  source 1..30: mol_type = other RNA
tacatctacccccagagcctgaacttcgcc

SEQ ID NO: 47877 - RNA, 21 nt, synthetic construct
  misc_feature 1..21: note = Eukaryotic peptide chain release factor GTP-binding subunit ERF3A (309-315)
  source 1..21: mol_type = other RNA
tacaaggacatgggcaccgtg

SEQ ID NO: 47878 - RNA, 21 nt, synthetic construct
  misc_feature 1..21: note = Store-operated calcium entry-associated regulatory factor (105-111)
  source 1..21: mol_type = other RNA
tacaagttcggcaagaccgtg

SEQ ID NO: 47879 - RNA, 21 nt, synthetic construct
  misc_feature 1..21: note = Ras-related protein Rab-20 (158-164)
  source 1..21: mol_type = other RNA
tacaagaagatcctgaagtac

SEQ ID NO: 47880 - RNA, 30 nt, synthetic construct
  misc_feature 1..30: note = Cytochrome c oxidase subunit 5B, mitochondrial (120-129)
  source 1..30: mol_type = other RNA
tacaagctggtgccccagcagctcgcccac

SEQ ID NO: 47881 - RNA, 24 nt, synthetic construct
  misc_feature 1..24: note = Alpha-2-macroglobulin (163-170)
  source 1..24: mol_type = other RNA
tacaagcccggccagaccgtgaag

SEQ ID NO: 47882 - RNA, 24 nt, synthetic construct
  misc_feature 1..24: note = Fanconi anemia group I protein (1039-1046)
  source 1..24: mol_type = other RNA
tacaagagccccgtgatcctgctc

SEQ ID NO: 47883 - RNA, 27 nt, synthetic construct
  misc_feature 1..27: note = Thioredoxin-interacting protein (221-229)
  source 1..27: mol_type = other RNA
tacctggccaacggccagaccaaggtg

SEQ ID NO: 47884 - RNA, 30 nt, synthetic construct
  misc_feature 1..30: note = Laminin subunit gamma-1 (667-676)
  source 1..30: mol_type = other RNA
tacctggacgacgtgaccctcgccagcgcc

SEQ ID NO: 47885 - RNA, 27 nt, synthetic construct
  misc_feature 1..27: note = Dedicator of cytokinesis protein 7 (628-636)
  source 1..27: mol_type = other RNA
tacctggacaagttcttcgccctcgtg

SEQ ID NO: 47886 - RNA, 27 nt, synthetic construct
  misc_feature 1..27: note = Dedicator of cytokinesis protein 6 (723-731)
  source 1..27: mol_type = other RNA
tacctggacaagttcttcaccctcgtg

SEQ ID NO: 47887 - RNA, 27 nt, synthetic construct
  misc_feature 1..27: note = Zinc finger protein 573 (42-50)
  source 1..27: mol_type = other RNA
tacctggaccccaaccagcgcgacctc

SEQ ID NO: 47888 - RNA, 27 nt, synthetic construct
  misc_feature 1..27: note = Kinesin-like protein KIF13B (1105-1113)
  source 1..27: mol_type = other RNA
tacctggaccagcagctccagaagctg

SEQ ID NO: 47889 - RNA, 24 nt, synthetic construct
  misc_feature 1..24: note = ATP-binding cassette sub-family E member 1 (491-498)
  source 1..24: mol_type = other RNA
tacctggacagcgagcagcgcctc

SEQ ID NO: 47890 - RNA, 27 nt, synthetic construct
  misc_feature 1..27: note = Laminin subunit beta-1 (1753-1761)
  source 1..27: mol_type = other RNA
tacctggaggacaaggcccaggagctc

SEQ ID NO: 47891 - RNA, 27 nt, synthetic construct
  misc_feature 1..27: note = Enhancer of mRNA-decapping protein 4 (906-914)
  source 1..27: mol_type = other RNA
tacctggaggaggccgtgatgcacctc

SEQ ID NO: 47892 - RNA, 27 nt, synthetic construct
  misc_feature 1..27: note = Inositol-trisphosphate 3-kinase A (270-278)
  source 1..27: mol_type = other RNA
tacctggaggaggagctcaccaaggcc

SEQ ID NO: 47893 - RNA, 24 nt, synthetic construct
  misc_feature 1..24: note = Ubiquitin carboxyl-terminal hydrolase 7 (1093-1100)
  source 1..24: mol_type = other RNA
tacctggagaaggccatcaagatc

SEQ ID NO: 47894 - RNA, 24 nt, synthetic construct
  misc_feature 1..24: note = Plectin (1070-1077)
  source 1..24: mol_type = other RNA
tacctggagaagctcaagaccatc

SEQ ID NO: 47895 - RNA, 27 nt, synthetic construct
  misc_feature 1..27: note = Heparan-sulfate 6-O-sulfotransferase 2 (442-450)
  source 1..27: mol_type = other RNA
tacctgttcgagaagaccttcaacatg

SEQ ID NO: 47896 - RNA, 27 nt, synthetic construct
  misc_feature 1..27: note = Thioredoxin domain-containing protein 16 (103-111)
  source 1..27: mol_type = other RNA
tacctgttcaagggcaacatcctcctg

SEQ ID NO: 47897 - RNA, 27 nt, synthetic construct
  misc_feature 1..27: note = Bax inhibitor 1 (186-194)
  source 1..27: mol_type = other RNA
tacctgttcctcggcgggatcctgatg

SEQ ID NO: 47898 - RNA, 27 nt, synthetic construct
  misc_feature 1..27: note = T-box transcription factor TBX3 (251-259)
  source 1..27: mol_type = other RNA
tacctgttccccgagaccgagttcatc

SEQ ID NO: 47899 - RNA, 27 nt, synthetic construct
  misc_feature 1..27: note = Cyclin-dependent kinase 2 (107-115)
  source 1..27: mol_type = other RNA
tacctgttccagctcctgcagggcctg

SEQ ID NO: 47900 - RNA, 27 nt, synthetic construct
  misc_feature 1..27: note = Electroneutral sodium bicarbonate exchanger 1 (1036-1044)
  source 1..27: mol_type = other RNA
tacctgggcgccagcaactaccgcacc

SEQ ID NO: 47901 - RNA, 27 nt, synthetic construct
  misc_feature 1..27: note = Hexokinase-1 (749-757)
  source 1..27: mol_type = other RNA
tacctgggcgagatcgtgcgcaacatc

SEQ ID NO: 47902 - RNA, 24 nt, synthetic construct
  misc_feature 1..24: note = Clustered mitochondria protein homolog (510-517)
  source 1..24: mol_type = other RNA
tacctgggcaaggtgctcgagctg

SEQ ID NO: 47903 - RNA, 27 nt, synthetic construct
  misc_feature 1..27: note = Putative ATP-dependent RNA helicase DHX33 (179-187)
  source 1..27: mol_type = other RNA
tacctgcacgccgccctcgtgagcgtc

SEQ ID NO: 47904 - RNA, 21 nt, synthetic construct
  misc_feature 1..21: note = Rho-related BTB domain-containing protein 3 (560-566)
  source 1..21: mol_type = other RNA
tacctgatcttcagccagaag

SEQ ID NO: 47905 - RNA, 27 nt, synthetic construct
  misc_feature 1..27: note = E3 ubiquitin-protein ligase TRIM36 (266-274)
  source 1..27: mol_type = other RNA
tacctgatcggcaaggagagccaggtg

SEQ ID NO: 47906 - RNA, 27 nt, synthetic construct
  misc_feature 1..27: note = ER membrane protein complex subunit 4 (136-144)
  source 1..27: mol_type = other RNA
tacctgatcggcaacctcatggggctg

SEQ ID NO: 47907 - RNA, 27 nt, synthetic construct
  misc_feature 1..27: note = F-box only protein 21 (364-372)
  source 1..27: mol_type = other RNA
tacctgatcggccagcacgtgaccgcc

SEQ ID NO: 47908 - RNA, 27 nt, synthetic construct
  misc_feature 1..27: note Dolichyl-diphosphooligosaccharide-proteinosyltransferase subunit 2 (343-351)
  source 1..27: mol_type = other RNA
tacctgatcatcggcgacgccaccctc

SEQ ID NO: 47909 - RNA, 30 nt, synthetic construct
  misc_feature 1..30: note = Nuclear export mediator factor NEMF (539-548)
  source 1..30: mol_type = other RNA
tacctgatcatcggcgggcgcgaccagcag

SEQ ID NO: 47910 - RNA, 27 nt, synthetic construct
  misc_feature 1..27: note = 60S ribosomal protein L3 (286-294)
  source 1..27: mol_type = other RNA
tacctgatcaaggacggcaagctcatc

SEQ ID NO: 47911 - RNA, 27 nt, synthetic construct
  misc_feature 1..27: note = WD repeat-containing protein 6 (703-711)
  source 1..27: mol_type = other RNA
tacctgaaggacggcgacgtgatgctc

SEQ ID NO: 47912 - RNA, 21 nt, synthetic construct
  misc_feature 1..21: note = SFRS17A protein (23-29)
  source 1..21: mol_type = other RNA
tacctgaagcccatcaccaag

SEQ ID NO: 47913 - RNA, 30 nt, synthetic construct
  misc_feature 1..30: note = TRPM8 channel-associated factor 2 (446-455)
  source 1..30: mol_type = other RNA
tacctgctcgagggccagaacgccgaggtg

SEQ ID NO: 47914 - RNA, 27 nt, synthetic construct
  misc_feature 1..27: note = Maestro heat-like repeat-containing protein family member 7 (965-973)
  source 1..27: mol_type = other RNA
tacctgctcatccccctgctggagcgc

SEQ ID NO: 47915 - RNA, 30 nt, synthetic construct
  misc_feature 1..30: note = Translocating chain-associated membrane protein 1 (211-220)
  source 1..30: mol_type = other RNA
tacctgctcaacctgaaccacctgggcctc

SEQ ID NO: 47916 - RNA, 30 nt, synthetic construct
  misc_feature 1..30: note = Synemin (706-715)
  source 1..30: mol_type = other RNA
tacctgctcagcaaggacatcaaggaggtg

SEQ ID NO: 47917 - RNA, 33 nt, synthetic construct
  misc_feature 1..33: note = E3 ubiquitin-protein ligase RNF213 (2078-2088)
  source 1..33: mol_type = other RNA
tacctgatggacatcaacggcaagatgtggctc

SEQ ID NO: 47918 - RNA, 27 nt, synthetic construct
  misc_feature 1..27: note = Nesprin-1 (1560-1568)
  source 1..27: mol_type = other RNA
tacctgatggaggcccgctacagcctc

SEQ ID NO: 47919 - RNA, 27 nt, synthetic construct
  misc_feature 1..27: note = Leucine-rich repeat and calponin homology domain-containing protein 1 (147-155)
  source 1..27: mol_type = other RNA
tacctgaacctcagccgcaaccagctg

SEQ ID NO: 47920 - RNA, 27 nt, synthetic construct
  misc_feature 1..27: note = Kinesin-like protein KIF13B (1450-1458)
  source 1..27: mol_type = other RNA
tacctgaaccccgtgaagagcttcgtc

SEQ ID NO: 47921 - RNA, 27 nt, synthetic construct
  misc_feature 1..27: note = Inactive ubiquitin carboxyl-terminal hydrolase 53 (271-279)
  source 1..27: mol_type = other RNA
tacctgcccggcctcttctaccgcgtg

SEQ ID NO: 47922 - RNA, 27 nt, synthetic construct
  misc_feature 1..27: note = Sterol regulatory element-binding protein 1 (1096-1104)
  source 1..27: mol_type = other RNA
tacctgcccccgggcttcctcagcgcc

SEQ ID NO: 47923 - RNA, 27 nt, synthetic construct
  misc_feature 1..27: note = La-related protein 4 (424-432)
  source 1..27: mol_type = other RNA
tacctgcagaaggagaccagcaccctc

SEQ ID NO: 47924 - RNA, 30 nt, synthetic construct
  misc_feature 1..30: note = Calcium/calmodulin-dependent 3',5'-cyclic nucleotide phosphodiesterase 1C (18-27)
  source 1..30: mol_type = other RNA
tacctgcagcccgagcagatcgagaagatc

SEQ ID NO: 47925 - RNA, 18 nt, synthetic construct
  misc_feature 1..18: note = Tyrosine-protein phosphatase non-receptor type 23 (30-35)
  source 1..18: mol_type = other RNA
tacctgcgcgagcacttc

SEQ ID NO: 47926 - RNA, 30 nt, synthetic construct
  misc_feature 1..30: note = Ubiquitin-like modifier-activating enzyme 7 (247-256)
  source 1..30: mol_type = other RNA
tacctgcgcggcggggccatcaccgaggtg

SEQ ID NO: 47927 - RNA, 33 nt, synthetic construct
  misc_feature 1..33: note = Protein dopey-1 (743-753)
  source 1..33: mol_type = other RNA
tacctgagcgccttcctcgccgcgtgccagctg

SEQ ID NO: 47928 - RNA, 30 nt, synthetic construct
  misc_feature 1..30: note = 2-hydroxyacylsphingosine 1-beta-galactosyltransferase (299-308)
  source 1..30: mol_type = other RNA
tacctgagcgaggacatcgccaacaagctc

SEQ ID NO: 47929 - RNA, 27 nt, synthetic construct
  misc_feature 1..27: note = Trafficking kinesin-binding protein 2 (496-504)
  source 1..27: mol_type = other RNA
tacctgagcgagaagcagttcttcgcc

SEQ ID NO: 47930 - RNA, 27 nt, synthetic construct
  misc_feature 1..27: note = Coatomer subunit beta' (490-498)
  source 1..27: mol_type = other RNA
tacctgagcgagaaggtgctcgccgcc

SEQ ID NO: 47931 - RNA, 27 nt, synthetic construct
  misc_feature 1..27: note = Rho GTPase-activating protein 1 (214-222)
  source 1..27: mol_type = other RNA
tacctgagcgagctctccgagcacgtg

SEQ ID NO: 47932 - RNA, 24 nt, synthetic construct
  misc_feature 1..24: note = Polyadenylate-binding protein-interacting protein 1 (112-119)
  source 1..24: mol_type = other RNA
tacctgagccaccacctcaccatc

SEQ ID NO: 47933 - RNA, 27 nt, synthetic construct
  misc_feature 1..27: note = Alpha-N-acetylglucosaminidase (583-591)
  source 1..27: mol_type = other RNA
tacctgagcaaggagctcgcctccctg

SEQ ID NO: 47934 - RNA, 27 nt, synthetic construct
  misc_feature 1..27: note = Cytoplasmic dynein 1 heavy chain 1 (3552-3560)
  source 1..27: mol_type = other RNA
tacctgagcaacgccgacgagcgcctc

SEQ ID NO: 47935 - RNA, 27 nt, synthetic construct
  misc_feature 1..27: note = Serine/threonine-protein kinase A-Raf (529-537)
  source 1..27: mol_type = other RNA
tacctgagccccgacctctccaagatc

SEQ ID NO: 47936 - RNA, 27 nt, synthetic construct
  misc_feature 1..27: note = UDP-glucose:glycoprotein glucosyltransferase 2 (1269-1277)
  source 1..27: mol_type = other RNA
tacctgagccccaccttcaaggaggtg

SEQ ID NO: 47937 - RNA, 27 nt, synthetic construct
  misc_feature 1..27: note = Cathepsin D (150-158)
  source 1..27: mol_type = other RNA
tacctgagccaggacaccgtgtccgtc

SEQ ID NO: 47938 - RNA, 27 nt, synthetic construct
  misc_feature 1..27: note = Plexin-B3 (1418-1426)
  source 1..27: mol_type = other RNA
tacctgaccgacatcatgcgcaccctc

SEQ ID NO: 47939 - RNA, 42 nt, synthetic construct
  misc_feature 1..42: note = Plexin-B3 (1418-1431)
  source 1..42: mol_type = other RNA
tacctgaccgacatcatgcgcaccctcctgggcgacctggcc

SEQ ID NO: 47940 - RNA, 27 nt, synthetic construct
  misc_feature 1..27: note = Alpha-1,3-mannosyl-glycoprotein 4-beta-N-acetylglucosaminyltransferase B (56-64)
  source 1..27: mol_type = other RNA
tacctgaccgacaccctccacagcctg

SEQ ID NO: 47941 - RNA, 27 nt, synthetic construct
  misc_feature 1..27: note = Apoptosis-associated speck-like protein containing a CARD (184-192)
  source 1..27: mol_type = other RNA
tacctggtggaggacctcgagcgcagc

SEQ ID NO: 47942 - RNA, 27 nt, synthetic construct
  misc_feature 1..27: note = Probable ATP-dependent RNA helicase DDX47 (248-256)
  source 1..27: mol_type = other RNA
tacctggtgtacatcctcaacgagctg

SEQ ID NO: 47943 - RNA, 21 nt, synthetic construct
  misc_feature 1..21: note = Serum albumin (162-168)
  source 1..21: mol_type = other RNA
tacctgtacgagatcgcccgc

SEQ ID NO: 47944 - RNA, 27 nt, synthetic construct
  misc_feature 1..27: note = Protein sel-1 homolog 1 (457-465)
  source 1..27: mol_type = other RNA
tacctgtacggccgcggggtgcaggtc

SEQ ID NO: 47945 - RNA, 30 nt, synthetic construct
  misc_feature 1..30: note = Probable G-protein coupled receptor 158 (82-91)
  source 1..30: mol_type = other RNA
tacctgtacaccggcgacagccaccagctc

SEQ ID NO: 47946 - RNA, 27 nt, synthetic construct
  misc_feature 1..27: note = Cytochrome c oxidase subunit 7A-related protein, mitochondrial (106-114)
  source 1..27: mol_type = other RNA
tacatggccagccagcccaagaacaag

SEQ ID NO: 47947 - RNA, 27 nt, synthetic construct
  misc_feature 1..27: note = Hemicentin-2 (2923-2931)
  source 1..27: mol_type = other RNA
tacatgtgcgtggccgagaaccaggcc

SEQ ID NO: 47948 - RNA, 27 nt, synthetic construct
  misc_feature 1..27: note = Protein shisa-5 (129-137)
  source 1..27: mol_type = other RNA
tacatggacgcccccaaggccgcgctg

SEQ ID NO: 47949 - RNA, 30 nt, synthetic construct
  misc_feature 1..30: note = Lysosomal-trafficking regulator (1891-1900)
  source 1..30: mol_type = other RNA
tacatgaacgagaacggcgagttcaagctg

SEQ ID NO: 47950 - RNA, 27 nt, synthetic construct
  misc_feature 1..27: note = Phosphatidylinositol N-acetylglucosaminyltransferase subunit H (129-137)
  source 1..27: mol_type = other RNA
tacatgcagaaggtgatctactacctg

SEQ ID NO: 47951 - RNA, 24 nt, synthetic construct
  misc_feature 1..24: note = Transmembraneoprotein NMB (37-44)
  source 1..24: mol_type = other RNA
tacatgcgcgagcacaaccagctg

SEQ ID NO: 47952 - RNA, 18 nt, synthetic construct
  misc_feature 1..18: note = Histone-lysine N-methyltransferase ASH1L (2260-2265)
  source 1..18: mol_type = other RNA
tacaacttccacagcttc

SEQ ID NO: 47953 - RNA, 27 nt, synthetic construct
  misc_feature 1..27: note = Actin-related protein 2 (225-233)
  source 1..27: mol_type = other RNA
tacaacatcgagcaggagcagaagctg

SEQ ID NO: 47954 - RNA, 24 nt, synthetic construct
  misc_feature 1..24: note = 26S proteasome non-ATPase regulatory subunit 8 (148-155)
  source 1..24: mol_type = other RNA
tacaacaaggtgttcctggccaag

SEQ ID NO: 47955 - RNA, 24 nt, synthetic construct
  misc_feature 1..24: note = Serine-protein kinase ATM (1148-1155)
  source 1..24: mol_type = other RNA
tacaaccgcaagagcgtgctgctc

SEQ ID NO: 47956 - RNA, 72 nt, synthetic construct
  misc_feature 1..72: note = Alanine-tRNA ligase, cytoplasmic (487-510)
  source 1..72: mol_type = other RNA
tacaactaccacctggacagctccggcagctacgtgttcgagaacaccgtcgccaccgtgatggccctccgc

SEQ ID NO: 47957 - RNA, 24 nt, synthetic construct
  misc_feature 1..24: note = PHD finger protein 20 (103-110)
  source 1..24: mol_type = other RNA
taccccgccaaggtgaccgccgtc

SEQ ID NO: 47958 - RNA, 27 nt, synthetic construct
  misc_feature 1..27: note = Supervillin (1594-1602)
  source 1..27: mol_type = other RNA
taccccgcccgcgccccgagcgtggtc

SEQ ID NO: 47959 - RNA, 30 nt, synthetic construct
  misc_feature 1..30: note = Ras GTPase-activating protein nGAP (628-637)
  source 1..30: mol_type = other RNA
taccccgacgaccgcaccagccggaccctg

SEQ ID NO: 47960 - RNA, 24 nt, synthetic construct
  misc_feature 1..24: note = Splicing factor 3B subunit 3 (520-527)
  source 1..24: mol_type = other RNA
taccccgacggcatccgccacatc

SEQ ID NO: 47961 - RNA, 27 nt, synthetic construct
  misc_feature 1..27: note = Vacuolar protein sorting-associated protein 13B (2316-2324)
  source 1..27: mol_type = other RNA
taccccgagccgcgcgtgctgaccctc

SEQ ID NO: 47962 - RNA, 24 nt, synthetic construct
  misc_feature 1..24: note = Constitutive coactivator of peroxisome proliferator-activated receptor gamma (665-672)
  source 1..24: mol_type = other RNA
taccccggcaacccgctgcgccac

SEQ ID NO: 47963 - RNA, 21 nt, synthetic construct
  misc_feature 1..21: note = Heterogeneous nuclear ribonucleoprotein U-like protein 1 (369-375)
  source 1..21: mol_type = other RNA
tacccccacgtgctggtcaag

SEQ ID NO: 47964 - RNA, 27 nt, synthetic construct
  misc_feature 1..27: note = Actin, cytoplasmic 2 (69-77)
  source 1..27: mol_type = other RNA
taccccatcgagcacggcatcgtgacc

SEQ ID NO: 47965 - RNA, 27 nt, synthetic construct
  misc_feature 1..27: note = Isoleucine-tRNA ligase, cytoplasmic (845-853)
  source 1..27: mol_type = other RNA
taccccctgaaggagatcgtggtcatc

SEQ ID NO: 47966 - RNA, 27 nt, synthetic construct
  misc_feature 1..27: note = Transmembrane protein 98 (147-155)
  source 1..27: mol_type = other RNA
taccccccgctggaccccaagctcctg

SEQ ID NO: 47967 - RNA, 27 nt, synthetic construct
  misc_feature 1..27: note = Fatty aldehyde dehydrogenase (440-448)
  source 1..27: mol_type = other RNA
taccccccgaacagccagtccaaggtg

SEQ ID NO: 47968 - RNA, 33 nt, synthetic construct
  misc_feature 1..33: note = All-trans-retinol 13,14-reductase (15-25)
  source 1..33: mol_type = other RNA
tacccccgcggcgggagctccgagatcgccttc

SEQ ID NO: 47969 - RNA, 24 nt, synthetic construct
  misc_feature 1..24: note = Syntenin-1 (46-53)
  source 1..24: mol_type = other RNA
tacccccgcctgtacccggagctc

SEQ ID NO: 47970 - RNA, 27 nt, synthetic construct
  misc_feature 1..27: note = Protocadherin gamma-C3 (569-577)
  source 1..27: mol_type = other RNA
tacccccgcccgggcgggagctccgtg

SEQ ID NO: 47971 - RNA, 30 nt, synthetic construct
  misc_feature 1..30: note = Phosphatidylcholine translocator ABCB4 (403-412)
  source 1..30: mol_type = other RNA
taccccagccgcgccaacgtgaagatcctg

SEQ ID NO: 47972 - RNA, 30 nt, synthetic construct
  misc_feature 1..30: note = AT-rich interactive domain-containing protein 1A (921-930)
  source 1..30: mol_type = other RNA
tacccctacggcgggccgtacgaccgcgtg

SEQ ID NO: 47973 - RNA, 27 nt, synthetic construct
  misc_feature 1..27: note = Ataxin-2-like protein (1021-1029)
  source 1..27: mol_type = other RNA
tacccctacatcggccacccgcaggtg

SEQ ID NO: 47974 - RNA, 27 nt, synthetic construct
  misc_feature 1..27: note = Desmin (387-395)
  source 1..27: mol_type = other RNA
taccaggacctgctcaacgtgaagatg

SEQ ID NO: 47975 - RNA, 27 nt, synthetic construct
  misc_feature 1..27: note = Laminin subunit beta-1 (934-942)
  source 1..27: mol_type = other RNA
taccaggaccccgtgaccctgcagctc

SEQ ID NO: 47976 - RNA, 24 nt, synthetic construct
  misc_feature 1..24: note = Vimentin (358-365)
  source 1..24: mol_type = other RNA
taccaggacaccatcggccgcctg

SEQ ID NO: 47977 - RNA, 36 nt, synthetic construct
  misc_feature 1..36: note = Regulator of nonsense transcripts 1 (154-165)
  source 1..36: mol_type = other RNA
taccagcacggcggggtgaccggcctgagccagtac

SEQ ID NO: 47978 - RNA, 24 nt, synthetic construct
  misc_feature 1..24: note = AP-5 complex subunit zeta-1 (389-396)
  source 1..24: mol_type = other RNA
taccagcacctgttcacccgcatc

SEQ ID NO: 47979 - RNA, 21 nt, synthetic construct
  misc_feature 1..21: note = Cytoplasmic dynein 1 heavy chain 1 (2959-2965)
  source 1..21: mol_type = other RNA
taccagatcaaggtgcaccgc

SEQ ID NO: 47980 - RNA, 24 nt, synthetic construct
  misc_feature 1..24: note = Bardet-Biedl syndrome 4 protein (46-53)
  source 1..24: mol_type = other RNA
taccagaaggccttcgagcacctg

SEQ ID NO: 47981 - RNA, 27 nt, synthetic construct
  misc_feature 1..27: note = Remodeling and spacing factor 1 (52-60)
  source 1..27: mol_type = other RNA
taccagctggaccaggaccacaacgtg

SEQ ID NO: 47982 - RNA, 27 nt, synthetic construct
  misc_feature 1..27: note = Exportin-7 (341-349)
  source 1..27: mol_type = other RNA
taccagctgggcgagctcgtgaaggtc

SEQ ID NO: 47983 - RNA, 27 nt, synthetic construct
  misc_feature 1..27: note = T-box transcription factor TBX3 (264-272)
  source 1..27: mol_type = other RNA
taccagaacgacaagatcacccagctg

SEQ ID NO: 47984 - RNA, 24 nt, synthetic construct
  misc_feature 1..24: note = Rho GTPase-activating protein 5 (414-421)
  source 1..24: mol_type = other RNA
taccagaaccacgtgcagcacctg

SEQ ID NO: 47985 - RNA, 24 nt, synthetic construct
  misc_feature 1..24: note = Zinc finger MYM-type protein 4 (345-352)
  source 1..24: mol_type = other RNA
taccagaacgtggtccacaagctg

SEQ ID NO: 47986 - RNA, 24 nt, synthetic construct
  misc_feature 1..24: note = Signal transducer and activator of transcription 6 (88-95)
  source 1..24: mol_type = other RNA
taccagcgcgaccccctgaagctc

SEQ ID NO: 47987 - RNA, 27 nt, synthetic construct
  misc_feature 1..27: note = TBC1 domain family member 16 (260-268)
  source 1..27: mol_type = other RNA
taccagaccgactacttccacctgttc

SEQ ID NO: 47988 - RNA, 30 nt, synthetic construct
  misc_feature 1..30: note = Fatty acid synthase (959-968)
  source 1..30: mol_type = other RNA
taccagtgggacgaccccgacccgcgcctg

SEQ ID NO: 47989 - RNA, 24 nt, synthetic construct
  misc_feature 1..24: note = Homeodomain-interacting protein kinase 4 (181-188)
  source 1..24: mol_type = other RNA
taccgcgcccccgagatcctgctc

SEQ ID NO: 47990 - RNA, 24 nt, synthetic construct
  misc_feature 1..24: note = Glycogen synthase kinase-3 beta (222-229)
  source 1..24: mol_type = other RNA
taccgcgcccccgagctgatcttc

SEQ ID NO: 47991 - RNA, 27 nt, synthetic construct
  misc_feature 1..27: note = Protocadherin gamma-C3 (727-735)
  source 1..27: mol_type = other RNA
taccgcgcccccgtgagctccctgtac

SEQ ID NO: 47992 - RNA, 27 nt, synthetic construct
  misc_feature 1..27: note = Proteasome subunit beta type-4 (223-231)
  source 1..27: mol_type = other RNA
taccgcgacgcccggagctacaaccgc

SEQ ID NO: 47993 - RNA, 24 nt, synthetic construct
  misc_feature 1..24: note = Pyruvate kinase PKM (392-399)
  source 1..24: mol_type = other RNA
taccgcggcatcttccccgtgctg

SEQ ID NO: 47994 - RNA, 36 nt, synthetic construct
  misc_feature 1..36: note = Alpha-enolase (33-44)
  source 1..36: mol_type = other RNA
taccgccacatcgccgacctggccggcaacagcgag

SEQ ID NO: 47995 - RNA, 33 nt, synthetic construct
  misc_feature 1..33: note = Chondroitin sulfate proteoglycan 4 (1979-1989)
  source 1..33: mol_type = other RNA
taccgcctgatccagggcccccagtacgggcac

SEQ ID NO: 47996 - RNA, 27 nt, synthetic construct
  misc_feature 1..27: note = SLIT and NTRK-like protein 2 (712-720)
  source 1..27: mol_type = other RNA
taccgcaacctgcaggagttcagctac

SEQ ID NO: 47997 - RNA, 24 nt, synthetic construct
  misc_feature 1..24: note = HIG1 domain family member 2A, mitochondrial (29-36)
  source 1..24: mol_type = other RNA
taccgcaaccccgagagcttcaag

SEQ ID NO: 47998 - RNA, 27 nt, synthetic construct
  misc_feature 1..27: note = Glycogen phosphorylase, brain form (792-800)
  source 1..27: mol_type = other RNA
taccgcaaccccaaggagtggaccaag

SEQ ID NO: 47999 - RNA, 24 nt, synthetic construct
  misc_feature 1..24: note = Dual specificity protein kinase CLK3 (317-324)
  source 1..24: mol_type = other RNA
taccgccccccggaggtgatcctg

SEQ ID NO: 48000 - RNA, 21 nt, synthetic construct
  misc_feature 1..21: note = Chromodomain-helicase-DNA-binding protein 4 (169-175)
  source 1..21: mol_type = other RNA
taccgcaccctgaccaactac

SEQ ID NO: 48001 - RNA, 27 nt, synthetic construct
  misc_feature 1..27: note = ATP-dependent RNA helicase DDX3X (243-251)
  source 1..27: mol_type = other RNA
tacagcgacggccccggggaggccctg

SEQ ID NO: 48002 - RNA, 30 nt, synthetic construct
  misc_feature 1..30: note = Transcription factor SOX-10 (402-411)
  source 1..30: mol_type = other RNA
tacagcgaccaccagccctccggcccgtac

SEQ ID NO: 48003 - RNA, 33 nt, synthetic construct
  misc_feature 1..33: note = Transcription factor SOX-10 (402-412)
  source 1..33: mol_type = other RNA
tacagcgaccaccagccctccggcccgtactac

SEQ ID NO: 48004 - RNA, 27 nt, synthetic construct
  misc_feature 1..27: note = Rab3 effector-like (158-166)
  source 1..27: mol_type = other RNA
tacagcgaccccttcgtgaaggtctac

SEQ ID NO: 48005 - RNA, 36 nt, synthetic construct
  misc_feature 1..36: note = Lysosomal-trafficking regulator (864-875)
  source 1..36: mol_type = other RNA
tacagcgactccccccagagcctgtccaagttctac

SEQ ID NO: 48006 - RNA, 27 nt, synthetic construct
  misc_feature 1..27: note = Unconventional myosin-XVIIIa (454-462)
  source 1..27: mol_type = other RNA
tacagcgagaaggtgatgcacatgttc

SEQ ID NO: 48007 - RNA, 27 nt, synthetic construct
  misc_feature 1..27: note = DNA polymerase alpha catalytic subunit (732-740)
  source 1..27: mol_type = other RNA
tacagcgagtccagccagctgctctac

SEQ ID NO: 48008 - RNA, 30 nt, synthetic construct
  misc_feature 1..30: note = AF4/FMR2 family member 4 (970-979)
  source 1..30: mol_type = other RNA
tacagcgagaccgtggacctgatcaagtac

SEQ ID NO: 48009 - RNA, 24 nt, synthetic construct
  misc_feature 1..24: note = CDK5 regulatory subunit-associated protein 3 (494-501)
  source 1..24: mol_type = other RNA
tacagcggccgccccgtgaacctg

SEQ ID NO: 48010 - RNA, 21 nt, synthetic construct
  misc_feature 1..21: note = SAM and SH3 domain-containing protein 1 (307-313)
  source 1..21: mol_type = other RNA
tacagcggcgtgcacaagaag

SEQ ID NO: 48011 - RNA, 27 nt, synthetic construct
  misc_feature 1..27: note = Nucleolar pre-ribosomal-associated protein 1 (1469-1477)
  source 1..27: mol_type = other RNA
tacagccacctggagggcgcccgcttc

SEQ ID NO: 48012 - RNA, 24 nt, synthetic construct
  misc_feature 1..24: note = Inositol 1,4,5-trisphosphate receptor type 3 (2259-2266)
  source 1..24: mol_type = other RNA
tacagcatccgccccctgatcgtg

SEQ ID NO: 48013 - RNA, 21 nt, synthetic construct
  misc_feature 1..21: note = Rho-associated protein kinase 1 (287-293)
  source 1..21: mol_type = other RNA
tacagcaagatcatgaaccac

SEQ ID NO: 48014 - RNA, 21 nt, synthetic construct
  misc_feature 1..21: note = Proteasome activator complex subunit 4 (40-46)
  source 1..21: mol_type = other RNA
tacagcaagaccgagcacctg

SEQ ID NO: 48015 - RNA, 27 nt, synthetic construct
  misc_feature 1..27: note = Melanoma-associated antigen D2 (326-334)
  source 1..27: mol_type = other RNA
tacagcctggagaaggtgttcggcatc

SEQ ID NO: 48016 - RNA, 48 nt, synthetic construct
  misc_feature 1..48: note = PERQ amino acid-rich with GYF domain-containing protein 1 (739-754)
  source 1..48: mol_type = other RNA
tacagcctgcacggctccagcggggagatcgagtccgtggacgactac

SEQ ID NO: 48017 - RNA, 24 nt, synthetic construct
  misc_feature 1..24: note = 60S ribosomal protein L6 (63-70)
  source 1..24: mol_type = other RNA
tacagccgcaaggccatgtacaag

SEQ ID NO: 48018 - RNA, 24 nt, synthetic construct
  misc_feature 1..24: note = BTB/POZ domain-containing protein KCTD20 (143-150)
  source 1..24: mol_type = other RNA
tacagctccaagctgtaccgcttc

SEQ ID NO: 48019 - RNA, 42 nt, synthetic construct
  misc_feature 1..42: note = Eukaryotic translation initiation factor 3 subunit D (59-72)
  source 1..42: mol_type = other RNA
tacagctcccagttcggcgggggcagccagtacgcctacttc

SEQ ID NO: 48020 - RNA, 27 nt, synthetic construct
  misc_feature 1..27: note = Bromo adjacent homology domain-containing 1 protein (744-752)
  source 1..27: mol_type = other RNA
tacagcacccccccgcaccgcaccgtg

SEQ ID NO: 48021 - RNA, 69 nt, synthetic construct
  misc_feature 1..69: note = Actin, gamma-enteric smooth muscle (295-317)
  source 1..69: mol_type = other RNA
tacagcgtgtggatcggcgggtccatcctggccagcctctccaccttccagcagatgtggatcagcaag

SEQ ID NO: 48022 - RNA, 108 nt, synthetic construct
  misc_feature 1..108: note = Actin, cytoplasmic 2 (337-372)
  source 1..108: mol_type = other RNA
tacagcgtgtggatcggcgggtccatcctggccagcctctccaccttccagcagatgtggatcagcaagcaggagtacgacgagtccggccccagcatcgtccaccgc

SEQ ID NO: 48023 - RNA, 27 nt, synthetic construct
  misc_feature 1..27: note = Uncharacterized protein C5orf34 (326-334)
  source 1..27: mol_type = other RNA
tacagctaccccgagctggtgaagatg

SEQ ID NO: 48024 - RNA, 27 nt, synthetic construct
  misc_feature 1..27: note = Citrate synthase, mitochondrial (189-197)
  source 1..27: mol_type = other RNA
tacaccgaccaccagttcaccgagctg

SEQ ID NO: 48025 - RNA, 24 nt, synthetic construct
  misc_feature 1..24: note = Guanine nucleotide-binding protein subunit beta-2-like 1 (302-309)
  source 1..24: mol_type = other RNA
tacaccgacaacctggtgcgcgtc

SEQ ID NO: 48026 - RNA, 30 nt, synthetic construct
  misc_feature 1..30: note = Transcription factor SOX-10 (369-378)
  source 1..30: mol_type = other RNA
tacaccgaccagcccagcacctcccagatc

SEQ ID NO: 48027 - RNA, 24 nt, synthetic construct
  misc_feature 1..24: note = WD repeat-containing protein 1 (54-61)
  source 1..24: mol_type = other RNA
tacaccgagcacgcccaccaggtg

SEQ ID NO: 48028 - RNA, 21 nt, synthetic construct
  misc_feature 1..21: note = Protocadherin Fat 2 (2518-2524)
  source 1..21: mol_type = other RNA
tacaccatcatcaacaagctg

SEQ ID NO: 48029 - RNA, 24 nt, synthetic construct
  misc_feature 1..24: note = 1,2-dihydroxy-3-keto-5-methylthiopentene dioxygenase (142-149)
  source 1..24: mol_type = other RNA
tacaccaaggccatgcgcctgttc

SEQ ID NO: 48030 - RNA, 39 nt, synthetic construct
  misc_feature 1..39: note = Syndecan-3 (419-431)
  source 1..39: mol_type = other RNA
tacaccctggaggagcccaagcaggccagcgtgacctac

SEQ ID NO: 48031 - RNA, 27 nt, synthetic construct
  misc_feature 1..27: note = Trophinin (94-102)
  source 1..27: mol_type = other RNA
tacaccctggagaagatgttccgcgtg

SEQ ID NO: 48032 - RNA, 27 nt, synthetic construct
  misc_feature 1..27: note = Zinc finger E-box-binding homeobox 2 (504-512)
  source 1..27: mol_type = other RNA
tacaccctggagaaggtgaacgaggcc

SEQ ID NO: 48033 - RNA, 30 nt, synthetic construct
  misc_feature 1..30: note = Probable ATP-dependent RNA helicase DDX5 (540-549)
  source 1..30: mol_type = other RNA
tacaccaacggcagcttcgggtccaacttc

SEQ ID NO: 48034 - RNA, 66 nt, synthetic construct
  misc_feature 1..66: note = Fructose-bisphosphate aldolase A (397-418)
  source 1..66: mol_type = other RNA
tacacccccagcggccaggccggggccgcggcctccgagagcctgttcgtgtccaaccacgcctac

SEQ ID NO: 48035 - RNA, 27 nt, synthetic construct
  misc_feature 1..27: note = DNA replication licensing factor MCM3 (251-259)
  source 1..27: mol_type = other RNA
tacaccagcggcaccttccgcacggtg

SEQ ID NO: 48036 - RNA, 42 nt, synthetic construct
  misc_feature 1..42: note = Melanocyte protein PMEL (265-278)
  source 1..42: mol_type = other RNA
tacacctgggacttcggcgacagctccgggaccctgatcagc

SEQ ID NO: 48037 - RNA, 51 nt, synthetic construct
  misc_feature 1..51: note = Melanocyte protein PMEL (265-281)
  source 1..51: mol_type = other RNA
tacacctgggacttcggcgacagctccgggaccctgatcagccgcgccctc

SEQ ID NO: 48038 - RNA, 30 nt, synthetic construct
  misc_feature 1..30: note = Adenylate cyclase type 6 (111-120)
  source 1..30: mol_type = other RNA
tacgtggcctgcgccctgctcgtcttctgc

SEQ ID NO: 48039 - RNA, 30 nt, synthetic construct
  misc_feature 1..30: note = Lysine-specific histone demethylase 1A (121-130)
  source 1..30: mol_type = other RNA
tacgtggccgacctgggcgccatggtcgtg

SEQ ID NO: 48040 - RNA, 24 nt, synthetic construct
  misc_feature 1..24: note = HLA class I histocompatibility antigen, B-49 alpha chain (51-58)
  source 1..24: mol_type = other RNA
tacgtggacgacaccctgttcgtc

SEQ ID NO: 48041 - RNA, 24 nt, synthetic construct
  misc_feature 1..24: note = HLA class I histocompatibility antigen, B-13 alpha chain (26-33)
  source 1..24: mol_type = other RNA
tacgtggacgacacccagttcgtc

SEQ ID NO: 48042 - RNA, 30 nt, synthetic construct
  misc_feature 1..30: note = HLA class I histocompatibility antigen, Cw-5 alpha chain (51-60)
  source 1..30: mol_type = other RNA
tacgtggacgacacccagttcgtccagttc

SEQ ID NO: 48043 - RNA, 33 nt, synthetic construct
  misc_feature 1..33: note = HLA class I histocompatibility antigen, B-13 alpha chain (26-36)
  source 1..33: mol_type = other RNA
tacgtggacgacacccagttcgtccgcttcgac

SEQ ID NO: 48044 - RNA, 36 nt, synthetic construct
  misc_feature 1..36: note = HLA class I histocompatibility antigen, B-13 alpha chain (26-37)
  source 1..36: mol_type = other RNA
tacgtggacgacacccagttcgtccgcttcgacagc

SEQ ID NO: 48045 - RNA, 30 nt, synthetic construct
  misc_feature 1..30: note = Helicase SKI2W (1066-1075)
  source 1..30: mol_type = other RNA
tacgtggacgaggccggcaccgtcaagctg

SEQ ID NO: 48046 - RNA, 30 nt, synthetic construct
  misc_feature 1..30: note = 40S ribosomal protein S16 (98-107)
  source 1..30: mol_type = other RNA
tacgtggacgaggccagcaagaaggagatc

SEQ ID NO: 48047 - RNA, 24 nt, synthetic construct
  misc_feature 1..24: note = Angiomotin-like protein 1 (605-612)
  source 1..24: mol_type = other RNA
tacgtggagaaggtcgagaagctg

SEQ ID NO: 48048 - RNA, 24 nt, synthetic construct
  misc_feature 1..24: note = Angiomotin-like protein 2 (482-489)
  source 1..24: mol_type = other RNA
tacgtggagaaggtcgagcgcctg

SEQ ID NO: 48049 - RNA, 21 nt, synthetic construct
  misc_feature 1..21: note = Melanoma-derived growth regulatory protein (71-77)
  source 1..21: mol_type = other RNA
tacgtgttcagcaagctgaag

SEQ ID NO: 48050 - RNA, 27 nt, synthetic construct
  misc_feature 1..27: note = Glutamine-tRNA ligase (632-640)
  source 1..27: mol_type = other RNA
tacgtgatcgagctgcagcacgtcgtg

SEQ ID NO: 48051 - RNA, 30 nt, synthetic construct
  misc_feature 1..30: note = E3 ubiquitin-protein ligase Arkadia (683-692)
  source 1..30: mol_type = other RNA
tacgtgatcccccacccggtccacgccttc

SEQ ID NO: 48052 - RNA, 27 nt, synthetic construct
  misc_feature 1..27: note = Apoptosis-resistant E3 ubiquitin protein ligase 1 (356-364)
  source 1..27: mol_type = other RNA
tacgtgagccccaagcagttctccgtc

SEQ ID NO: 48053 - RNA, 24 nt, synthetic construct
  misc_feature 1..24: note = Signal transducer and activator of transcription 2 (829-836)
  source 1..24: mol_type = other RNA
tacgtgagccgcccctcccacttc

SEQ ID NO: 48054 - RNA, 27 nt, synthetic construct
  misc_feature 1..27: note = Serine/threonine-protein kinase SMG1 (424-432)
  source 1..27: mol_type = other RNA
tacgtgaccgacgtcctgtaccgcgtg

SEQ ID NO: 48055 - RNA, 36 nt, synthetic construct
  misc_feature 1..36: note = Filamin-A (2047-2058)
  source 1..36: mol_type = other RNA
tacgtgaccgagatcgaccaggacaagtacgccgtc

SEQ ID NO: 48056 - RNA, 27 nt, synthetic construct
  misc_feature 1..27: note = Fructose-bisphosphate aldolase A (258-266)
  source 1..27: mol_type = other RNA
tacgtgaccgagaaggtcctggccgcc

SEQ ID NO: 48057 - RNA, 27 nt, synthetic construct
  misc_feature 1..27: note = Tensin-1 (17-25)
  source 1..27: mol_type = other RNA
tacgtgaccgagcgcatcatcgccgtc

SEQ ID NO: 48058 - RNA, 27 nt, synthetic construct
  misc_feature 1..27: note = Membrane-associated transporter protein (55-63)
  source 1..27: mol_type = other RNA
tacgtgacccccgtcctgctcagcgtg

SEQ ID NO: 48059 - RNA, 30 nt, synthetic construct
  misc_feature 1..30: note = Attractin (187-196)
  source 1..30: mol_type = other RNA
tacgtgtacgacggcgacagcatctacgcc

SEQ ID NO: 48060 - RNA, 21 nt, synthetic construct
  misc_feature 1..21: note = Histone H2B type 2-F (41-47)
  source 1..21: mol_type = other RNA
tacgtgtacaaggtcctgaag

SEQ ID NO: 48061 - RNA, 21 nt, synthetic construct
  misc_feature 1..21: note = 40S ribosomal protein S29 (7-13)
  source 1..21: mol_type = other RNA
tactggagccacccccgcaag

SEQ ID NO: 48062 - RNA, 96 nt, synthetic construct
  misc_feature 1..96: note = Keratin, type I cytoskeletal 18 (212-243)
  source 1..96: mol_type = other RNA
tactggagccagcagatcgaggagtccaccaccgtggtcacgacccagagcgccgaggtgggcgccgcggagaccaccctgacggagctccgccgg

SEQ ID NO: 48063 - RNA, 27 nt, synthetic construct
  misc_feature 1..27: note = Dual specificity tyrosine-phosphorylation-regulated kinase 1A (471-479)
  source 1..27: mol_type = other RNA
tactacgccctgcagcacagcttcttc

SEQ ID NO: 48064 - RNA, 27 nt, synthetic construct
  misc_feature 1..27: note = Cap-specific mRNAucleoside-2'-O-)-methyltransferase 1 (795-803)
  source 1..27: mol_type = other RNA
tactacggccgcctgttctgggagtgg

SEQ ID NO: 48065 - RNA, 27 nt, synthetic construct
  misc_feature 1..27: note = Motile sperm domain-containing protein 2 (174-182)
  source 1..27: mol_type = other RNA
tactaccccaagtacctgagcaagatc

SEQ ID NO: 48066 - RNA, 27 nt, synthetic construct
  misc_feature 1..27: note = Procollagen-lysine,2-oxoglutarate 5-dioxygenase 2 (114-122)
  source 1..27: mol_type = other RNA
tactacaccaagggcttcgccctgctc

SEQ ID NO: 48067 - RNA, 27 nt, synthetic construct
  misc_feature 1..27: note = Receptor-type protein tyrosine phosphatase beta (1197-1205)
  source 1..27: mol_type = other RNA
tactacaccgtgcgcaacttcaccctg

SEQ ID NO: 48068 - RNA, 27 nt, synthetic construct
  misc_feature 1..27: note = CASP8 and FADD-like apoptosis regulator (367-375)
  source 1..27: mol_type = other RNA
tactacgtgtggctgcagcacaccctc

SEQ ID NO: 48069 - RNA, 27 nt, synthetic construct
  misc_feature 1..27: note = Tyrosine-protein kinase JAK1 (67-75)
  source 1..27: mol_type = other RNA
gccctgtacgacgagaacaccaagctc

SEQ ID NO: 48070 - RNA, 27 nt, synthetic construct
  misc_feature 1..27: note = RNA-binding protein 4 (259-267)
  source 1..27: mol_type = other RNA
gccatggccagccacctgacctccacc

SEQ ID NO: 48071 - RNA, 27 nt, synthetic construct
  misc_feature 1..27: note = Neuroligin-3 (389-397)
  source 1..27: mol_type = other RNA
gagggcctgaagttcgtggagggggtc

SEQ ID NO: 48072 - RNA, 27 nt, synthetic construct
  misc_feature 1..27: note = StAR-related lipid transfer protein 7, mitochondrial (235-243)
  source 1..27: mol_type = other RNA
ggcatgcccgacttcctggagaagctc

SEQ ID NO: 48073 - RNA, 27 nt, synthetic construct
  misc_feature 1..27: note = Katanin p60 ATPase-containing subunit A1 (77-85)
  source 1..27: mol_type = other RNA
aagctggacagcacccccctcaaggcc

SEQ ID NO: 48074 - RNA, 27 nt, synthetic construct
  misc_feature 1..27: note = YrdC domain-containing protein, mitochondrial (184-192)
  source 1..27: mol_type = other RNA
cagatgttcgagggccccctggccctc

SEQ ID NO: 48075 - RNA, 27 nt, synthetic construct
  misc_feature 1..27: note = Protein FAM72C (114-122)
  source 1..27: mol_type = other RNA
cgcctggacagcaccggcgtgaacgtc

SEQ ID NO: 48076 - RNA, 33 nt, synthetic construct
  misc_feature 1..33: note = ATP-dependent RNA helicase DHX36 (643-653)
  source 1..33: mol_type = other RNA
cgcctgatggaccccccgagcaacgaggccgtg

SEQ ID NO: 48077 - RNA, 27 nt, synthetic construct
  misc_feature 1..27: note = Serine/arginine repetitive matrix protein 2 (2370-2378)
  source 1..27: mol_type = other RNA
cgcatggcccccgccctgagcggcgcg

SEQ ID NO: 48078 - RNA, 27 nt, synthetic construct
  misc_feature 1..27: note = Nuclear receptor coactivator 1 (835-843)
  source 1..27: mol_type = other RNA
cgcatggacggcgccgtgaccagcgtc

SEQ ID NO: 48079 - RNA, 27 nt, synthetic construct
  misc_feature 1..27: note = Ethanolamine kinase 1 (232-240)
  source 1..27: mol_type = other RNA
cgccagctggccaagatccacgccatc

SEQ ID NO: 48080 - RNA, 27 nt, synthetic construct
  misc_feature 1..27: note = Clathrin heavy chain 1 (1039-1047)
  source 1..27: mol_type = other RNA
cgcgtgatggagtacatcaaccggctg

SEQ ID NO: 48081 - RNA, 27 nt, synthetic construct
  misc_feature 1..27: note = Large proline-rich protein BAG6 (530-538)
  source 1..27: mol_type = other RNA
agcctggcccagatggtgtccggcctc

SEQ ID NO: 48082 - RNA, 27 nt, synthetic construct
  misc_feature 1..27: note = Mediator of RNA polymerase II transcription subunit 8 (11-19)
  source 1..27: mol_type = other RNA
agcctggacgccctcctgtcccaggtg

SEQ ID NO: 48083 - RNA, 33 nt, synthetic construct
  misc_feature 1..33: note = Cathepsin L1 (247-257)
  source 1..33: mol_type = other RNA
gtggccatcgacgccggccacgagagcttcctg

SEQ ID NO: 48084 - RNA, 27 nt, synthetic construct
  misc_feature 1..27: note = UDP-glucose:glycoprotein glucosyltransferase 2 (187-195)
  source 1..27: mol_type = other RNA
tacgccgagatgggcacccgcaccttc

SEQ ID NO: 48085 - RNA, 30 nt, synthetic construct
  misc_feature 1..30: note = Alkyldihydroxyacetonephosphate synthase, peroxisomal (308-317)
  source 1..30: mol_type = other RNA
agcaccgtgggcgggtgggtctccacccgc

SEQ ID NO: 48086 - RNA, 54 nt, synthetic construct
  misc_feature 1..54: note = Paired box protein Pax-2 (160-177)
  source 1..54: mol_type = other RNA
gcccccggccacaccatcgtgccgagcaccgcctccccccccgtcagctccgcg

SEQ ID NO: 48087 - RNA, 45 nt, synthetic construct
  misc_feature 1..45: note = Glutamyl aminopeptidase (290-304)
  source 1..45: mol_type = other RNA
gccgtgcaccagttcgacagcgtcaagcgcatctccaacagcggc

SEQ ID NO: 48088 - RNA, 24 nt, synthetic construct
  misc_feature 1..24: note = Inositol 1,4,5-trisphosphate receptor type 3 (333-340)
  source 1..24: mol_type = other RNA
gacatcctgatccgcaccgagctc

SEQ ID NO: 48089 - RNA, 27 nt, synthetic construct
  misc_feature 1..27: note = Fatty acid synthase (1644-1652)
  source 1..27: mol_type = other RNA
gaggccgccagcgtgcccgtcgtgtac

SEQ ID NO: 48090 - RNA, 36 nt, synthetic construct
  misc_feature 1..36: note = POTE ankyrin domain family member E (1064-1075)
  source 1..36: mol_type = other RNA
gagagcggcccctccatcgtgcaccgcaagtgcttc

SEQ ID NO: 48091 - RNA, 27 nt, synthetic construct
  misc_feature 1..27: note = Beta-1-syntrophin (163-171)
  source 1..27: mol_type = other RNA
ctggccgaccccgagaaccgccagctc

SEQ ID NO: 48092 - RNA, 27 nt, synthetic construct
  misc_feature 1..27: note = Egl nine homolog 3 (194-202)
  source 1..27: mol_type = other RNA
aacccccacgaggtgcagccgagctac

SEQ ID NO: 48093 - RNA, 24 nt, synthetic construct
  misc_feature 1..24: note = GRB2-related adapter protein (34-41)
  source 1..24: mol_type = other RNA
cagaactggtacaaggccgagctg

SEQ ID NO: 48094 - RNA, 27 nt, synthetic construct
  misc_feature 1..27: note = Protein-lysine 6-oxidase (86-94)
  source 1..27: mol_type = other RNA
cagccccgcaccccgatcctgctcatc

SEQ ID NO: 48095 - RNA, 24 nt, synthetic construct
  misc_feature 1..24: note = Adenomatous polyposis coli protein (222-229)
  source 1..24: mol_type = other RNA
cagcagatcgagaaggacatcctg

SEQ ID NO: 48096 - RNA, 27 nt, synthetic construct
  misc_feature 1..27: note = Insulin-like growth factor-binding protein 3 (5-13)
  source 1..27: mol_type = other RNA
cgccccaccctgtgggccgccgcgctc

SEQ ID NO: 48097 - RNA, 42 nt, synthetic construct
  misc_feature 1..42: note = Thrombospondin-1 (56-69)
  source 1..42: mol_type = other RNA
agccccgccttccgcatcgaggacgccaacctgatcccgccc

SEQ ID NO: 48098 - RNA, 30 nt, synthetic construct
  misc_feature 1..30: note = Epidermal growth factor receptor (1026-1035)
  source 1..30: mol_type = other RNA
agcccctccaccagccgcaccccgctgctc

SEQ ID NO: 48099 - RNA, 48 nt, synthetic construct
  misc_feature 1..48: note = Thrombospondin-2 (96-111)
  source 1..48: mol_type = other RNA
agccgcggcaccctgctcgccctggaggggcccggcctgtcccagcgg

SEQ ID NO: 48100 - RNA, 27 nt, synthetic construct
  misc_feature 1..27: note = Transforming growth factor beta-1 (263-271)
  source 1..27: mol_type = other RNA
acccccctggagcgcgcccagcacctc

SEQ ID NO: 48101 - RNA, 51 nt, synthetic construct
  misc_feature 1..51: note = Transforming growth factor-beta-induced protein ig-h3 (579-595)
  source 1..51: mol_type = other RNA
gtgagcggcgggatcggcgccctggtccgcctcaagtccctgcagggggac

SEQ ID NO: 48102 - RNA, 30 nt, synthetic construct
  misc_feature 1..30: note = Matrilysin (167-176)
  source 1..30: mol_type = other RNA
taccccttcgacggcccggggaacaccctg

SEQ ID NO: 48103 - RNA, 30 nt, synthetic construct
  misc_feature 1..30: note = Cytochrome b-c1 complex subunit Rieske, mitochondrial (82-91)
  source 1..30: mol_type = other RNA
gacatcaaggtgcccgacttcagcgagtac

SEQ ID NO: 48104 - RNA, 36 nt, synthetic construct
  misc_feature 1..36: note = Thioredoxin-related transmembrane protein 4 (92-103)
  source 1..36: mol_type = other RNA
gacgtgatccaggagcccggcctgagcgggcgcttc

SEQ ID NO: 48105 - RNA, 36 nt, synthetic construct
  misc_feature 1..36: note = Keratin, type I cytoskeletal 9 (29-40)
  source 1..36: mol_type = other RNA
gaggaggccaacaacgacctggagaacaagatccag

SEQ ID NO: 48106 - RNA, 42 nt, synthetic construct
  misc_feature 1..42: note = POTE ankyrin domain family member E (805-818)
  source 1..42: mol_type = other RNA
ctgaccgaggcccccctcaacccgaaggccaaccgcgagaag

SEQ ID NO: 48107 - RNA, 51 nt, synthetic construct
  misc_feature 1..51: note = POTE ankyrin domain family member E (805-821)
  source 1..51: mol_type = other RNA
ctgaccgaggcccccctcaacccgaaggccaaccgcgagaagatgacccag

SEQ ID NO: 48108 - RNA, 36 nt, synthetic construct
  misc_feature 1..36: note = 40S ribosomal protein S21 (35-46)
  source 1..36: mol_type = other RNA
aacgtggccgaggtcgacaaggtgaccggccgcttc

SEQ ID NO: 48109 - RNA, 27 nt, synthetic construct
  misc_feature 1..27: note = Keratin, type II cytoskeletal 2 epidermal (170-178)
  source 1..27: mol_type = other RNA
aacgtgaaggtcgaccccgagatccag

SEQ ID NO: 48110 - RNA, 54 nt, synthetic construct
  misc_feature 1..54: note = Heat shock protein beta-1 (188-205)
  source 1..54: mol_type = other RNA
cgcgcccagctgggcgggcccgaggccgcgaagagcgacgagaccgccgccaag

SEQ ID NO: 48111 - RNA, 33 nt, synthetic construct
  misc_feature 1..33: note = Actin, alpha skeletal muscle (2-12)
  source 1..33: mol_type = other RNA
cgcgagatcgtgcgggacatcaaggagaagctg

SEQ ID NO: 48112 - RNA, 42 nt, synthetic construct
  misc_feature 1..42: note = ATP synthase subunit gamma, mitochondrial (176-189)
  source 1..42: mol_type = other RNA
agcggctacgagttcgacgaggggtccatcatcttcaacaag

SEQ ID NO: 48113 - RNA, 36 nt, synthetic construct
  misc_feature 1..36: note = Fibronectin (1340-1351)
  source 1..36: mol_type = other RNA
agcgtgtacgagcagcacgagtccacccccctgcgc

SEQ ID NO: 48114 - RNA, 48 nt, synthetic construct
  misc_feature 1..48: note = Vimentin (38-53)
  source 1..48: mol_type = other RNA
tacagcctgggctccgccctccgccccagcacctcccggagcctgtac

SEQ ID NO: 48115 - RNA, 27 nt, synthetic construct
  misc_feature 1..27: note = Guanylate kinase (10-18)
  source 1..27: mol_type = other RNA
gccgccgcggccctgggccgcgccccc

SEQ ID NO: 48116 - RNA, 27 nt, synthetic construct
  misc_feature 1..27: note = T-box transcription factor TBX2 (59-67)
  source 1..27: mol_type = other RNA
gccgccgcggaggccggcctgcacgtg

SEQ ID NO: 48117 - RNA, 36 nt, synthetic construct
  misc_feature 1..36: note = Heterogeneous nuclear ribonucleoprotein L (36-47)
  source 1..36: mol_type = other RNA
gccgccgcgggcgggggcgggggcgggggccgctac

SEQ ID NO: 48118 - RNA, 39 nt, synthetic construct
  misc_feature 1..39: note = Heterogeneous nuclear ribonucleoprotein L (36-48)
  source 1..39: mol_type = other RNA
gccgccgcgggcgggggcgggggcgggggccgctactac

SEQ ID NO: 48119 - RNA, 24 nt, synthetic construct
  misc_feature 1..24: note = Exocyst complex component 4 (16-23)
  source 1..24: mol_type = other RNA
gccgccgcgcacagcgtggtcctg

SEQ ID NO: 48120 - RNA, 27 nt, synthetic construct
  misc_feature 1..27: note = Fumarate hydratase, mitochondrial (155-163)
  source 1..27: mol_type = other RNA
gccgccgcgatcgaggtgcacgaggtc

SEQ ID NO: 48121 - RNA, 27 nt, synthetic construct
  misc_feature 1..27: note = Calcium-binding mitochondrial carrier protein Aralar2 (2-10)
  source 1..27: mol_type = other RNA
gccgccgcgaaggtggccctgaccaag

SEQ ID NO: 48122 - RNA, 27 nt, synthetic construct
  misc_feature 1..27: note = ATP-binding cassette sub-family B member 10, mitochondrial (226-234)
  source 1..27: mol_type = other RNA
gccgccgcgaacgccatccgcgtgtac

SEQ ID NO: 48123 - RNA, 33 nt, synthetic construct
  misc_feature 1..33: note = Iroquois-class homeodomain protein IRX-2 (414-424)
  source 1..33: mol_type = other RNA
gccgccgcgcccggcgaggccctgcacaccgcc

SEQ ID NO: 48124 - RNA, 24 nt, synthetic construct
  misc_feature 1..24: note = Bcl-2-binding component 3 (195-202)
  source 1..24: mol_type = other RNA
gccgccgcgcccccgctgaccctc

SEQ ID NO: 48125 - RNA, 27 nt, synthetic construct
  misc_feature 1..27: note = Polyadenylate-binding protein 4 (547-555)
  source 1..27: mol_type = other RNA
gccgccgcgcccccgcaggagcagaag

SEQ ID NO: 48126 - RNA, 27 nt, synthetic construct
  misc_feature 1..27: note = Protein Shroom2 (289-297)
  source 1..27: mol_type = other RNA
gccgccgcgcagcacttcaccgccctg

SEQ ID NO: 48127 - RNA, 27 nt, synthetic construct
  misc_feature 1..27: note = LRRN4 C-terminal-like protein (230-238)
  source 1..27: mol_type = other RNA
gccgccgcgcgcgccgccggcgccctg

SEQ ID NO: 48128 - RNA, 30 nt, synthetic construct
  misc_feature 1..30: note = Pyridoxal-dependent decarboxylase domain-containing protein 1 (179-188)
  source 1..30: mol_type = other RNA
gccgccgcgcgccccggcctggggcagtac

SEQ ID NO: 48129 - RNA, 27 nt, synthetic construct
  misc_feature 1..27: note = T-complex protein 1 subunit alpha (24-32)
  source 1..27: mol_type = other RNA
gccgccgcgagcatcgccaacatcgtg

SEQ ID NO: 48130 - RNA, 27 nt, synthetic construct
  misc_feature 1..27: note = Neuronal pentraxin receptor (38-46)
  source 1..27: mol_type = other RNA
gccgccgcgagccccggcccgcagcgc

SEQ ID NO: 48131 - RNA, 27 nt, synthetic construct
  misc_feature 1..27: note = Disco-interacting protein 2 homolog C (25-33)
  source 1..27: mol_type = other RNA
gccgccgcggtggacgtccgcacctgg

SEQ ID NO: 48132 - RNA, 33 nt, synthetic construct
  misc_feature 1..33: note = Tubulin beta-4B chain (10-20)
  source 1..33: mol_type = other RNA
gccgcctgcgacccccgccacggccggtacctg

SEQ ID NO: 48133 - RNA, 27 nt, synthetic construct
  misc_feature 1..27: note = Cartilage-associated protein (245-253)
  source 1..27: mol_type = other RNA
gccgcctgcgagggcagccgcgagatc

SEQ ID NO: 48134 - RNA, 27 nt, synthetic construct
  misc_feature 1..27: note = Phenylalanine-tRNA ligase alpha subunit (118-126)
  source 1..27: mol_type = other RNA
gccgccgacggcccccgcgtgttccgg

SEQ ID NO: 48135 - RNA, 27 nt, synthetic construct
  misc_feature 1..27: note = Importin-4 (48-56)
  source 1..27: mol_type = other RNA
gccgccgacccccagatccgccagttc

SEQ ID NO: 48136 - RNA, 24 nt, synthetic construct
  misc_feature 1..24: note = UBA-like domain-containing protein 1 (24-31)
  source 1..24: mol_type = other RNA
gccgccgaccaggcgaagcagctg

SEQ ID NO: 48137 - RNA, 33 nt, synthetic construct
  misc_feature 1..33: note = Melanoma antigen preferentially expressed in tumors (59-69)
  source 1..33: mol_type = other RNA
gccgccttcgacggccgccacagccagaccctg

SEQ ID NO: 48138 - RNA, 27 nt, synthetic construct
  misc_feature 1..27: note = Cleavage and polyadenylation specificity factor subunit 2 (121-129)
  source 1..27: mol_type = other RNA
gccgccttcgacaagatccagcagctg

SEQ ID NO: 48139 - RNA, 27 nt, synthetic construct
  misc_feature 1..27: note = Splicing factor 3B subunit 1 (744-752)
  source 1..27: mol_type = other RNA
gccgccttcctgaaggcgatcggctac

SEQ ID NO: 48140 - RNA, 27 nt, synthetic construct
  misc_feature 1..27: note = V-type proton ATPase subunit H (287-295)
  source 1..27: mol_type = other RNA
gccgccttccgcaacttcctggagaag

SEQ ID NO: 48141 - RNA, 27 nt, synthetic construct
  misc_feature 1..27: note = Macrophage-capping protein (134-142)
  source 1..27: mol_type = other RNA
gccgccatcaagaagctgtaccaggtg

SEQ ID NO: 48142 - RNA, 27 nt, synthetic construct
  misc_feature 1..27: note = Ferritin heavy chain (81-89)
  source 1..27: mol_type = other RNA
gccgccatcaaccgccagatcaacctg

SEQ ID NO: 48143 - RNA, 27 nt, synthetic construct
  misc_feature 1..27: note = Growth arrest-specific protein 8 (268-276)
  source 1..27: mol_type = other RNA
gccgccatccaggaggtgcagcagaag

SEQ ID NO: 48144 - RNA, 27 nt, synthetic construct
  misc_feature 1..27: note = Malate dehydrogenase, cytoplasmic (114-122)
  source 1..27: mol_type = other RNA
gccgccctggacaagtacgcgaagaag

SEQ ID NO: 48145 - RNA, 33 nt, synthetic construct
  misc_feature 1..33: note = Numb-like protein (541-551)
  source 1..33: mol_type = other RNA
gccgccctggagggcaaggcgaccgtggagaag

SEQ ID NO: 48146 - RNA, 27 nt, synthetic construct
  misc_feature 1..27: note = Leucine-rich repeat-containing protein 41 (525-533)
  source 1..27: mol_type = other RNA
gccgccatgaagggcaacagcaccctg

SEQ ID NO: 48147 - RNA, 30 nt, synthetic construct
  misc_feature 1..30: note = Alkyldihydroxyacetonephosphate synthase, peroxisomal (76-85)
  source 1..30: mol_type = other RNA
gccgcccaggagagcggcaccatccccaag

SEQ ID NO: 48148 - RNA, 27 nt, synthetic construct
  misc_feature 1..27: note = HEAT repeat-containing protein 5B (541-549)
  source 1..27: mol_type = other RNA
gccgcccagaacagccgcctgtccctc

SEQ ID NO: 48149 - RNA, 27 nt, synthetic construct
  misc_feature 1..27: note = cAMP-dependent protein kinase type I-alpha regulatory subunit (7-15)
  source 1..27: mol_type = other RNA
gccgccagcgaggaggcgcgctccctg

SEQ ID NO: 48150 - RNA, 27 nt, synthetic construct
  misc_feature 1..27: note = WD repeat-containing protein 54 (75-83)
  source 1..27: mol_type = other RNA
gccgccagcggccacttcatctgcgtg

SEQ ID NO: 48151 - RNA, 27 nt, synthetic construct
  misc_feature 1..27: note = Sterol regulatory element-binding protein 2 (104-112)
  source 1..27: mol_type = other RNA
gccgccagcccccaggcgccgaccctg

SEQ ID NO: 48152 - RNA, 27 nt, synthetic construct
  misc_feature 1..27: note = Vesicle transport through interaction with t-SNAREs homolog 1B (5-13)
  source 1..27: mol_type = other RNA
gccgccagctccgagcacttcgagaag

SEQ ID NO: 48153 - RNA, 27 nt, synthetic construct
  misc_feature 1..27: note = Actin, cytoplasmic 2 (21-29)
  source 1..27: mol_type = other RNA
gccgccagctccagctccctggagaag

SEQ ID NO: 48154 - RNA, 27 nt, synthetic construct
  misc_feature 1..27: note = Talin-1 (770-778)
  source 1..27: mol_type = other RNA
gccgccaccgcggtgacccaggccctg

SEQ ID NO: 48155 - RNA, 27 nt, synthetic construct
  misc_feature 1..27: note = Serine/threonine-protein phosphatase 4 regulatory subunit 3B (382-390)
  source 1..27: mol_type = other RNA
gccgccaccgacatcttcagctacctg

SEQ ID NO: 48156 - RNA, 27 nt, synthetic construct
  misc_feature 1..27: note = Long-chain fatty acid transport protein 1 (241-249)
  source 1..27: mol_type = other RNA
gccgccgtggcggacccccacagcctg

SEQ ID NO: 48157 - RNA, 27 nt, synthetic construct
  misc_feature 1..27: note = Bifunctional apoptosis regulator (156-164)
  source 1..27: mol_type = other RNA
gccgccgtgaaccccggccgcagcctg

SEQ ID NO: 48158 - RNA, 33 nt, synthetic construct
  misc_feature 1..33: note = Ligand-dependent nuclear receptor-interacting factor 1 (176-186)
  source 1..33: mol_type = other RNA
gccgcctacgagcagagccacttcttcaacaag

SEQ ID NO: 48159 - RNA, 27 nt, synthetic construct
  misc_feature 1..27: note = Drebrin (97-105)
  source 1..27: mol_type = other RNA
gcctgcgccagccacgtggcgaaggtc

SEQ ID NO: 48160 - RNA, 27 nt, synthetic construct
  misc_feature 1..27: note = WASH complex subunit strumpellin (384-392)
  source 1..27: mol_type = other RNA
gcctgcgaccccaacaacaagcgcctg

SEQ ID NO: 48161 - RNA, 27 nt, synthetic construct
  misc_feature 1..27: note = Zinc finger protein 106 (941-949)
  source 1..27: mol_type = other RNA
gcctgcctggacaagttcgtgcgcgtc

SEQ ID NO: 48162 - RNA, 33 nt, synthetic construct
  misc_feature 1..33: note = Fructose-bisphosphate aldolase A (33-43)
  source 1..33: mol_type = other RNA
gccgacgagagcaccggctccatcgccaagcgc

SEQ ID NO: 48163 - RNA, 33 nt, synthetic construct
  misc_feature 1..33: note = Selenoprotein N (53-63)
  source 1..33: mol_type = other RNA
gccgaggcccaggcggccgcccgccaggagctg

SEQ ID NO: 48164 - RNA, 33 nt, synthetic construct
  misc_feature 1..33: note = Myosin-11 (2-12)
  source 1..33: mol_type = other RNA
gccgaggcccgcgagaaggagaccaaggcgctg

SEQ ID NO: 48165 - RNA, 27 nt, synthetic construct
  misc_feature 1..27: note = Tetratricopeptide repeat protein 37 (1248-1256)
  source 1..27: mol_type = other RNA
gccgaggacgagaagaacaccgccctg

SEQ ID NO: 48166 - RNA, 27 nt, synthetic construct
  misc_feature 1..27: note = Heat shock factor protein 1 (137-145)
  source 1..27: mol_type = other RNA
gccgaggaccccaccatcagcctgctc

SEQ ID NO: 48167 - RNA, 30 nt, synthetic construct
  misc_feature 1..30: note = Melanoma antigen recognized by T-cells 1 (24-33)
  source 1..30: mol_type = other RNA
gccgaggaggccgcgggcatcgggatcctg

SEQ ID NO: 48168 - RNA, 27 nt, synthetic construct
  misc_feature 1..27: note = Protein SFI1 homolog (356-364)
  source 1..27: mol_type = other RNA
gccgaggagccccacgccctggagctc

SEQ ID NO: 48169 - RNA, 33 nt, synthetic construct
  misc_feature 1..33: note = Metalloproteinase inhibitor 2 (114-124)
  source 1..33: mol_type = other RNA
gccgagggcgacgggaagatgcacatcaccctg

SEQ ID NO: 48170 - RNA, 27 nt, synthetic construct
  misc_feature 1..27: note = T-complex protein 1 subunit zeta (326-334)
  source 1..27: mol_type = other RNA
gccgagcacagcgagtccggccagctg

SEQ ID NO: 48171 - RNA, 33 nt, synthetic construct
  misc_feature 1..33: note = ALK tyrosine kinase receptor (403-413)
  source 1..33: mol_type = other RNA
gccgagatcaagaccaccaacgaggtggtcctg

SEQ ID NO: 48172 - RNA, 33 nt, synthetic construct
  misc_feature 1..33: note = Junction plakoglobin (137-147)
  source 1..33: mol_type = other RNA
gccgagctggccacccgcgcgctccccgagctg

SEQ ID NO: 48173 - RNA, 27 nt, synthetic construct
  misc_feature 1..27: note = E3 ubiquitin-protein ligase BRE1A (672-680)
  source 1..27: mol_type = other RNA
gccgagctggaggacctccgccagcgg

SEQ ID NO: 48174 - RNA, 30 nt, synthetic construct
  misc_feature 1..30: note = Disheveled-associated activator of morphogenesis 2 (875-884)
  source 1..30: mol_type = other RNA
gccgagctggagaaggaggtgggcaacctc

SEQ ID NO: 48175 - RNA, 30 nt, synthetic construct
  misc_feature 1..30: note = MAD2L1-binding protein (129-138)
  source 1..30: mol_type = other RNA
gccgagctggagagcgtgctctcccacctg

SEQ ID NO: 48176 - RNA, 30 nt, synthetic construct
  misc_feature 1..30: note = Inactive ubiquitin carboxyl-terminal hydrolase 54 (1171-1180)
  source 1..30: mol_type = other RNA
gccgagcccgacatctaccaggagaagctg

SEQ ID NO: 48177 - RNA, 33 nt, synthetic construct
  misc_feature 1..33: note = Stathmin-3 (108-118)
  source 1..33: mol_type = other RNA
gccgagcgccgggagcacgagcgcgaggtgctg

SEQ ID NO: 48178 - RNA, 24 nt, synthetic construct
  misc_feature 1..24: note = Cytoplasmic dynein 1 light intermediate chain 2 (86-93)
  source 1..24: mol_type = other RNA
gccgagagcctgcccgagaccctc

SEQ ID NO: 48179 - RNA, 30 nt, synthetic construct
  misc_feature 1..30: note = Neurosecretory protein VGF (183-192)
  source 1..30: mol_type = other RNA
gccgagaccgagacccgcacgcacaccctg

SEQ ID NO: 48180 - RNA, 27 nt, synthetic construct
  misc_feature 1..27: note = Gamma-interferon-inducible protein 16 (79-87)
  source 1..27: mol_type = other RNA
gccgagaccctgaagaaggagaagctc

SEQ ID NO: 48181 - RNA, 30 nt, synthetic construct
  misc_feature 1..30: note = Formin-binding protein 1-like (452-461)
  source 1..30: mol_type = other RNA
gccgagaccatgaacaacatcgaccgcctg

SEQ ID NO: 48182 - RNA, 30 nt, synthetic construct
  misc_feature 1..30: note = Tumor susceptibility gene 101 protein (282-291)
  source 1..30: mol_type = other RNA
gccgaggtggacaagaacatcgagctgctc

SEQ ID NO: 48183 - RNA, 27 nt, synthetic construct
  misc_feature 1..27: note = Consortin (611-619)
  source 1..27: mol_type = other RNA
gccgaggtggtccccaccgagggcctg

SEQ ID NO: 48184 - RNA, 27 nt, synthetic construct
  misc_feature 1..27: note = Nuclear mitotic apparatus protein 1 (857-865)
  source 1..27: mol_type = other RNA
gccggcatcgagagccactccgagctg

SEQ ID NO: 48185 - RNA, 27 nt, synthetic construct
  misc_feature 1..27: note = Nuclear receptor corepressor 2 (1168-1176)
  source 1..27: mol_type = other RNA
gccggccccccggagagcctgggggtg

SEQ ID NO: 48186 - RNA, 33 nt, synthetic construct
  misc_feature 1..33: note = Hermansky-Pudlak syndrome 5 protein (284-294)
  source 1..33: mol_type = other RNA
gccggcagctcccagagcctgtccttccccaag

SEQ ID NO: 48187 - RNA, 27 nt, synthetic construct
  misc_feature 1..27: note = Actin-related protein 2/3 complex subunit 1B (24-32)
  source 1..27: mol_type = other RNA
gccatctgccccaacaaccacgaggtg

SEQ ID NO: 48188 - RNA, 42 nt, synthetic construct
  misc_feature 1..42: note = Syndecan-3 (292-305)
  source 1..42: mol_type = other RNA
gccatcgacagcggctccagcgccgcgcagctgccccagaag

SEQ ID NO: 48189 - RNA, 27 nt, synthetic construct
  misc_feature 1..27: note = Ewing's tumor-associated antigen 1 (284-292)
  source 1..27: mol_type = other RNA
gccatcttcgacggcagcacccagaag

SEQ ID NO: 48190 - RNA, 33 nt, synthetic construct
  misc_feature 1..33: note = Tectonic-3 (478-488)
  source 1..33: mol_type = other RNA
gccatcttcggcaacgccgaccccgcgcagaag

SEQ ID NO: 48191 - RNA, 27 nt, synthetic construct
  misc_feature 1..27: note = Kinesin-like protein KIF20B (640-648)
  source 1..27: mol_type = other RNA
gccatcttcaaggacctggtgggcaag

SEQ ID NO: 48192 - RNA, 27 nt, synthetic construct
  misc_feature 1..27: note = Rho-related GTP-binding protein RhoQ (186-194)
  source 1..27: mol_type = other RNA
gccatcatcgccatcctgacccccaag

SEQ ID NO: 48193 - RNA, 27 nt, synthetic construct
  misc_feature 1..27: note = Protein wntless homolog (4-12)
  source 1..27: mol_type = other RNA
gccatcatcgagaacatgagcaccaag

SEQ ID NO: 48194 - RNA, 27 nt, synthetic construct
  misc_feature 1..27: note = Eukaryotic translation initiation factor 3 subunit C-like protein (482-490)
  source 1..27: mol_type = other RNA
gccatcatcgagcgcgtgcagcggtac

SEQ ID NO: 48195 - RNA, 33 nt, synthetic construct
  misc_feature 1..33: note = 40S ribosomal protein S17 (39-49)
  source 1..33: mol_type = other RNA
gccatcatccccagcaagaagctgcgcaacaag

SEQ ID NO: 48196 - RNA, 30 nt, synthetic construct
  misc_feature 1..30: note = Ribulose-phosphate 3-epimerase (118-127)
  source 1..30: mol_type = other RNA
gccatcaagcccggcaccagcgtggagtac

SEQ ID NO: 48197 - RNA, 33 nt, synthetic construct
  misc_feature 1..33: note = Serine/threonine-protein kinase Sgk1 (47-57)
  source 1..33: mol_type = other RNA
gccatcaagcccccgctgaaggccttcatgaag

SEQ ID NO: 48198 - RNA, 27 nt, synthetic construct
  misc_feature 1..27: note = NF-kappa-B inhibitor beta (102-110)
  source 1..27: mol_type = other RNA
gccatcctgggcgagaccagcaccgtg

SEQ ID NO: 48199 - RNA, 30 nt, synthetic construct
  misc_feature 1..30: note = GTP-binding protein Rheb (10-19)
  source 1..30: mol_type = other RNA
gccatcctgggctaccgcagcgtggggaag

SEQ ID NO: 48200 - RNA, 33 nt, synthetic construct
  misc_feature 1..33: note = Fibroblast growth factor 14 isoform 6 (201-211)
  source 1..33: mol_type = other RNA
gccatcatgaacggcgggaagcccgtgaacaag

SEQ ID NO: 48201 - RNA, 27 nt, synthetic construct
  misc_feature 1..27: note = Puratrophin-1 (1020-1028)
  source 1..27: mol_type = other RNA
gccatcaacgaccgcaccgtgaactac

SEQ ID NO: 48202 - RNA, 27 nt, synthetic construct
  misc_feature 1..27: note = Mitotic spindle assembly checkpoint protein MAD2A (123-131)
  source 1..27: mol_type = other RNA
gccatccaggacgagatccgcagcgtg

SEQ ID NO: 48203 - RNA, 27 nt, synthetic construct
  misc_feature 1..27: note = Radixin (19-27)
  source 1..27: mol_type = other RNA
gccatccagcccaacaccaccggcaag

SEQ ID NO: 48204 - RNA, 33 nt, synthetic construct
  misc_feature 1..33: note = ATP-dependent 6-phosphofructokinase, platelet type (229-239)
  source 1..33: mol_type = other RNA
gccatctacgacggcttcgacgggttcgccaag

SEQ ID NO: 48205 - RNA, 39 nt, synthetic construct
  misc_feature 1..39: note = Cytochrome b-c1 complex subunit 9 (42-54)
  source 1..39: mol_type = other RNA
gccatctacgaccacatcaacgagggcaagctgtggaag

SEQ ID NO: 48206 - RNA, 36 nt, synthetic construct
  misc_feature 1..36: note = Transcription initiation factor IIB (257-268)
  source 1..36: mol_type = other RNA
gccatctacatggccagccaggcgtccgccgagaag

SEQ ID NO: 48207 - RNA, 27 nt, synthetic construct
  misc_feature 1..27: note = Serine dehydratase-like (282-290)
  source 1..27: mol_type = other RNA
gccatctacagcggcctgctccgccgg

SEQ ID NO: 48208 - RNA, 39 nt, synthetic construct
  misc_feature 1..39: note = Keratin, type II cytoskeletal 1 (303-315)
  source 1..39: mol_type = other RNA
gccaagctggacaacctccagcaggagatcgacttcctg

SEQ ID NO: 48209 - RNA, 24 nt, synthetic construct
  misc_feature 1..24: note = Kv channel-interacting protein 2 (72-79)
  source 1..24: mol_type = other RNA
gccctggccgcgcccgccagcctc

SEQ ID NO: 48210 - RNA, 27 nt, synthetic construct
  misc_feature 1..27: note = GPI ethanolamine phosphate transferase 3 (917-925)
  source 1..27: mol_type = other RNA
gccctggccgcgagcatcctccgccgg

SEQ ID NO: 48211 - RNA, 33 nt, synthetic construct
  misc_feature 1..33: note = Core histone macro-H2A.1 (296-306)
  source 1..33: mol_type = other RNA
gccctggccgacgacaagaagctcaagagcatc

SEQ ID NO: 48212 - RNA, 33 nt, synthetic construct
  misc_feature 1..33: note = Phosphatidylinositol 3-kinase regulatory subunit beta (169-179)
  source 1..33: mol_type = other RNA
gccctggccgacggcatcaagagcttcctcctg

SEQ ID NO: 48213 - RNA, 33 nt, synthetic construct
  misc_feature 1..33: note = Basement membrane-specific heparan sulfate proteoglycan core protein (1484-1494)
  source 1..33: mol_type = other RNA
gccctggccgacctcgacgagctgctgatccgc

SEQ ID NO: 48214 - RNA, 33 nt, synthetic construct
  misc_feature 1..33: note = Protein SHQ1 homolog (400-410)
  source 1..33: mol_type = other RNA
gccctggccgaggcgctcaaggaggtgagcctg

SEQ ID NO: 48215 - RNA, 33 nt, synthetic construct
  misc_feature 1..33: note = Tropomodulin-1 (243-253)
  source 1..33: mol_type = other RNA
gccctggccgagatgctcaaggagaacaaggtg

SEQ ID NO: 48216 - RNA, 30 nt, synthetic construct
  misc_feature 1..30: note = Beta-1,4-glucuronyltransferase 1 (66-75)
  source 1..30: mol_type = other RNA
gccctggccagcggcggggtgctcgacgcg

SEQ ID NO: 48217 - RNA, 27 nt, synthetic construct
  misc_feature 1..27: note = Zinc finger FYVE domain-containing protein 16 (1461-1469)
  source 1..27: mol_type = other RNA
gccctgtgcccccacctcaagaccctg

SEQ ID NO: 48218 - RNA, 27 nt, synthetic construct
  misc_feature 1..27: note = V-type proton ATPase subunit F (77-85)
  source 1..27: mol_type = other RNA
gccctggacgcccaccagcagagcatc

SEQ ID NO: 48219 - RNA, 27 nt, synthetic construct
  misc_feature 1..27: note = 17-beta-hydroxysteroid dehydrogenase 14 (169-177)
  source 1..27: mol_type = other RNA
gccctggacgagagcccctacggcgtg

SEQ ID NO: 48220 - RNA, 33 nt, synthetic construct
  misc_feature 1..33: note = 17-beta-hydroxysteroid dehydrogenase 14 (169-179)
  source 1..33: mol_type = other RNA
gccctggacgagagcccctacggcgtgcgcgtc

SEQ ID NO: 48221 - RNA, 27 nt, synthetic construct
  misc_feature 1..27: note = Arf-GAP with SH3 domain, ANK repeat and PH domain-containing protein 1 (493-501)
  source 1..27: mol_type = other RNA
gccctggacatcgccaagcgcctcaag

SEQ ID NO: 48222 - RNA, 27 nt, synthetic construct
  misc_feature 1..27: note = TATA box-binding protein-like protein 1 (8-16)
  source 1..27: mol_type = other RNA
gccctggacatcctcatcaccaacgtg

SEQ ID NO: 48223 - RNA, 27 nt, synthetic construct
  misc_feature 1..27: note = Glutaminyl-peptide cyclotransferase (173-181)
  source 1..27: mol_type = other RNA
gccctggacaagaagctcctgagcctg

SEQ ID NO: 48224 - RNA, 33 nt, synthetic construct
  misc_feature 1..33: note = Pre-mRNA-processing factor 17 (138-148)
  source 1..33: mol_type = other RNA
gccctggaccccagcctcgacaaccaccaggtg

SEQ ID NO: 48225 - RNA, 33 nt, synthetic construct
  misc_feature 1..33: note = 60S ribosomal protein L7a (86-96)
  source 1..33: mol_type = other RNA
gccctggaccgccagaccgccacccagctcctg

SEQ ID NO: 48226 - RNA, 33 nt, synthetic construct
  misc_feature 1..33: note = Chromodomain-helicase-DNA-binding protein 1-like (822-832)
  source 1..33: mol_type = other RNA
gccctggaggagggcctcaagaagatcttcctg

SEQ ID NO: 48227 - RNA, 30 nt, synthetic construct
  misc_feature 1..30: note = Keratin, type I cytoskeletal 10 (217-226)
  source 1..30: mol_type = other RNA
gccctggaggagcagctccagcagatccgc

SEQ ID NO: 48228 - RNA, 27 nt, synthetic construct
  misc_feature 1..27: note = Ribonuclease pancreatic (2-10)
  source 1..27: mol_type = other RNA
gccctggagaagagcctcgtgcgcctg

SEQ ID NO: 48229 - RNA, 33 nt, synthetic construct
  misc_feature 1..33: note = Ribonuclease pancreatic (2-12)
  source 1..33: mol_type = other RNA
gccctggagaagagcctcgtgcgcctgctgctc

SEQ ID NO: 48230 - RNA, 39 nt, synthetic construct
  misc_feature 1..39: note = NADPH oxidase 5 (49-61)
  source 1..39: mol_type = other RNA
gccctgttcgacagcgaccgctccggcaccatcaccctc

SEQ ID NO: 48231 - RNA, 33 nt, synthetic construct
  misc_feature 1..33: note = Ankyrin repeat and SAM domain-containing protein 1A (255-265)
  source 1..33: mol_type = other RNA
gccctgttcggcaagaccgacgtggtccagatc

SEQ ID NO: 48232 - RNA, 36 nt, synthetic construct
  misc_feature 1..36: note = Alpha-1,6-mannosylglycoprotein 6-beta-N-acetylglucosaminyltransferase A (2-13)
  source 1..36: mol_type = other RNA
gccctgttcaccccctggaagctcagctcccagaag

SEQ ID NO: 48233 - RNA, 33 nt, synthetic construct
  misc_feature 1..33: note = Cell division cycle protein 16 homolog (22-32)
  source 1..33: mol_type = other RNA
gccctgttctgggccgacaaggtggcgagcctc

SEQ ID NO: 48234 - RNA, 27 nt, synthetic construct
  misc_feature 1..27: note = Cleft lip and palate transmembrane protein 1 (123-131)
  source 1..27: mol_type = other RNA
gccctgttctgggagcagcacgacctc

SEQ ID NO: 48235 - RNA, 36 nt, synthetic construct
  misc_feature 1..36: note = Ras-related protein Rab-27A (14-25)
  source 1..36: mol_type = other RNA
gccctgggcgacagcggggtgggcaagacctccgtc

SEQ ID NO: 48236 - RNA, 27 nt, synthetic construct
  misc_feature 1..27: note = Membrane-associated transporter protein (129-137)
  source 1..27: mol_type = other RNA
gccctgatcgccaacccccgccggaag

SEQ ID NO: 48237 - RNA, 36 nt, synthetic construct
  misc_feature 1..36: note = E3 ubiquitin-protein ligase CBL-B (341-352)
  source 1..36: mol_type = other RNA
gccctgatcgacggcagccgcgaggggttctacctc

SEQ ID NO: 48238 - RNA, 30 nt, synthetic construct
  misc_feature 1..30: note = Polypyrimidine tract-binding protein 1 (173-182)
  source 1..30: mol_type = other RNA
gccctgatcgacctccacaaccacgacctg

SEQ ID NO: 48239 - RNA, 27 nt, synthetic construct
  misc_feature 1..27: note = Protein S100-B (10-18)
  source 1..27: mol_type = other RNA
gccctgatcgacgtgttccaccagtac

SEQ ID NO: 48240 - RNA, 33 nt, synthetic construct
  misc_feature 1..33: note = Melanoma-associated antigen C2 (196-206)
  source 1..33: mol_type = other RNA
gccctgatcgaggtgggccccgaccacttctgc

SEQ ID NO: 48241 - RNA, 30 nt, synthetic construct
  misc_feature 1..30: note = Coatomer subunit zeta-1 (3-12)
  source 1..30: mol_type = other RNA
gccctgatcctcgagcccagcctgtacacc

SEQ ID NO: 48242 - RNA, 27 nt, synthetic construct
  misc_feature 1..27: note = S-adenosylmethionine synthase isoform type-2 (221-229)
  source 1..27: mol_type = other RNA
gccctgaaggagaaggtgatcaaggcc

SEQ ID NO: 48243 - RNA, 30 nt, synthetic construct
  misc_feature 1..30: note = Zinc finger protein 318 (262-271)
  source 1..30: mol_type = other RNA
gccctgaaggagccccagggcaacctctac

SEQ ID NO: 48244 - RNA, 27 nt, synthetic construct
  misc_feature 1..27: note = Spliceosome-associated protein CWC15 homolog (128-136)
  source 1..27: mol_type = other RNA
gccctgctcgccgagctggagaagatc

SEQ ID NO: 48245 - RNA, 21 nt, synthetic construct
  misc_feature 1..21: note = Protein DGCR6L (54-60)
  source 1..21: mol_type = other RNA
gccctgctcgacggcaccgtg

SEQ ID NO: 48246 - RNA, 36 nt, synthetic construct
  misc_feature 1..36: note = Eukaryotic translation initiation factor 3 subunit C-like protein (633-644)
  source 1..36: mol_type = other RNA
gccctgctcgacatccagagctccggccgcgccaag

SEQ ID NO: 48247 - RNA, 36 nt, synthetic construct
  misc_feature 1..36: note = Neural Wiskott-Aldrich syndrome protein (408-419)
  source 1..36: mol_type = other RNA
gccctgctcgaccagatccgcgagggcgcccagctg

SEQ ID NO: 48248 - RNA, 36 nt, synthetic construct
  misc_feature 1..36: note = Wiskott-Aldrich syndrome protein (433-444)
  source 1..36: mol_type = other RNA
gccctgctcgaccagatccgccagggcatccagctg

SEQ ID NO: 48249 - RNA, 33 nt, synthetic construct
  misc_feature 1..33: note = Serine/threonine-protein kinase PRP4 homolog (104-114)
  source 1..33: mol_type = other RNA
gccctgctcgaggacctggagaagcagcgcgcc

SEQ ID NO: 48250 - RNA, 30 nt, synthetic construct
  misc_feature 1..30: note = Melanoma antigen preferentially expressed in tumors (371-380)
  source 1..30: mol_type = other RNA
gccctgctcgagcgcgccagcgcgaccctg

SEQ ID NO: 48251 - RNA, 30 nt, synthetic construct
  misc_feature 1..30: note = Cleft lip and palate transmembrane protein 1 (348-357)
  source 1..30: mol_type = other RNA
gccctgctcgagaccaacccctacctgctg

SEQ ID NO: 48252 - RNA, 45 nt, synthetic construct
  misc_feature 1..45: note = Proteasome subunit alpha type-7 (194-208)
  source 1..45: mol_type = other RNA
gccctgctcgaggtggtccagagcggcgggaagaacatcgagctg

SEQ ID NO: 48253 - RNA, 30 nt, synthetic construct
  misc_feature 1..30: note = Ankyrin repeat domain-containing protein 17 (368-377)
  source 1..30: mol_type = other RNA
gccctgctcatcgagcgcggcgccagcctg

SEQ ID NO: 48254 - RNA, 27 nt, synthetic construct
  misc_feature 1..27: note = Down syndrome critical region protein 3 (171-179)
  source 1..27: mol_type = other RNA
gccctgctccccaagttcctgctgcgc

SEQ ID NO: 48255 - RNA, 27 nt, synthetic construct
  misc_feature 1..27: note = Melanoma antigen preferentially expressed in tumors (397-405)
  source 1..27: mol_type = other RNA
gccctgctccccagcctgtcccactgc

SEQ ID NO: 48256 - RNA, 27 nt, synthetic construct
  misc_feature 1..27: note = Neuronal membraneoprotein M6-b (96-104)
  source 1..27: mol_type = other RNA
gccctgctcagcgaggtgatccagctg

SEQ ID NO: 48257 - RNA, 27 nt, synthetic construct
  misc_feature 1..27: note = Ragulator complex protein LAMTOR1 (52-60)
  source 1..27: mol_type = other RNA
gccctgctcagctccatcctggccaag

SEQ ID NO: 48258 - RNA, 27 nt, synthetic construct
  misc_feature 1..27: note = Sulfate transporter (523-531)
  source 1..27: mol_type = other RNA
gccctgctcagcaccgagatcggcctg

SEQ ID NO: 48259 - RNA, 30 nt, synthetic construct
  misc_feature 1..30: note = Activator of 90 kDa heat shock protein ATPase homolog 1 (58-67)
  source 1..30: mol_type = other RNA
gccctgatgaaggaggagggcgtgaagctc

SEQ ID NO: 48260 - RNA, 27 nt, synthetic construct
  misc_feature 1..27: note = rRNA 2'-O-methyltransferase fibrillarin (244-252)
  source 1..27: mol_type = other RNA
gccctgaacgcccacaccttcctccgc

SEQ ID NO: 48261 - RNA, 33 nt, synthetic construct
  misc_feature 1..33: note = Catenin alpha-1 (363-373)
  source 1..33: mol_type = other RNA
gccctgaacagcgccatcgacaagatgaccaag

SEQ ID NO: 48262 - RNA, 27 nt, synthetic construct
  misc_feature 1..27: note = Cytoglobin (88-96)
  source 1..27: mol_type = other RNA
gccctgaacaccgtggtcgagaacctc

SEQ ID NO: 48263 - RNA, 27 nt, synthetic construct
  misc_feature 1..27: note = Growth/differentiation factor 15 (96-104)
  source 1..27: mol_type = other RNA
gccctgcccgagggcctcccggaggcc

SEQ ID NO: 48264 - RNA, 27 nt, synthetic construct
  misc_feature 1..27: note = Homer protein homolog 3 (191-199)
  source 1..27: mol_type = other RNA
gccctgcaggacagcaacaacaagctc

SEQ ID NO: 48265 - RNA, 33 nt, synthetic construct
  misc_feature 1..33: note = Metastasis suppressor protein 1 (165-175)
  source 1..33: mol_type = other RNA
gccctgcaggacgtgaacgacaagtacctcctg

SEQ ID NO: 48266 - RNA, 27 nt, synthetic construct
  misc_feature 1..27: note = 1-acyl-sn-glycerol-3-phosphate acyltransferase gamma (283-291)
  source 1..27: mol_type = other RNA
gccctgcaggagatctacaaccagaag

SEQ ID NO: 48267 - RNA, 30 nt, synthetic construct
  misc_feature 1..30: note = Neuralized-like protein 4 (559-568)
  source 1..30: mol_type = other RNA
gccctgcgcgacggcgaggtgttccaggtc

SEQ ID NO: 48268 - RNA, 27 nt, synthetic construct
  misc_feature 1..27: note = Neurosecretory protein VGF (3-11)
  source 1..27: mol_type = other RNA
gccctgcgcctcagcgcctccgcgctg

SEQ ID NO: 48269 - RNA, 27 nt, synthetic construct
  misc_feature 1..27: note = Dystonin (375-383)
  source 1..27: mol_type = other RNA
gccctgcgccccgaggtggagcggctc

SEQ ID NO: 48270 - RNA, 36 nt, synthetic construct
  misc_feature 1..36: note = Vimentin (308-319)
  source 1..36: mol_type = other RNA
gccctgcgccaggccaagcaggagagcaccgagtac

SEQ ID NO: 48271 - RNA, 27 nt, synthetic construct
  misc_feature 1..27: note = Coiled-coil domain-containing protein 154 (502-510)
  source 1..27: mol_type = other RNA
gccctgcgccaggagctcgccaccctg

SEQ ID NO: 48272 - RNA, 45 nt, synthetic construct
  misc_feature 1..45: note = 60S ribosomal protein L36 (2-16)
  source 1..45: mol_type = other RNA
gccctgcgctaccccatggccgtgggcctcaacaaggggcacaag

SEQ ID NO: 48273 - RNA, 30 nt, synthetic construct
  misc_feature 1..30: note = Integrin alpha-V (893-902)
  source 1..30: mol_type = other RNA
gccctgagcgagggcgacatccacaccctc

SEQ ID NO: 48274 - RNA, 27 nt, synthetic construct
  misc_feature 1..27: note = Kinesin-like protein KIF20B (1148-1156)
  source 1..27: mol_type = other RNA
gccctgagcgagctcacccagggcgtg

SEQ ID NO: 48275 - RNA, 27 nt, synthetic construct
  misc_feature 1..27: note = Ankycorbin (690-698)
  source 1..27: mol_type = other RNA
gccctgagcgagatgaagtcccagtac

SEQ ID NO: 48276 - RNA, 27 nt, synthetic construct
  misc_feature 1..27: note = Lysine-specific demethylase 5A (119-127)
  source 1..27: mol_type = other RNA
gccctgagcaagatcgtggcctccaag

SEQ ID NO: 48277 - RNA, 27 nt, synthetic construct
  misc_feature 1..27: note = Probable phospholipid-transporting ATPase IIA (685-693)
  source 1..27: mol_type = other RNA
gccctgagccagttcgtgatccaccgc

SEQ ID NO: 48278 - RNA, 27 nt, synthetic construct
  misc_feature 1..27: note = Chondroitin sulfate proteoglycan 4 (45-53)
  source 1..27: mol_type = other RNA
gccctgaccgacatcgacctccagctg

SEQ ID NO: 48279 - RNA, 27 nt, synthetic construct
  misc_feature 1..27: note = HRAS-like suppressor 3 (84-92)
  source 1..27: mol_type = other RNA
gccctgaccgacaaggccatcgtgaag

SEQ ID NO: 48280 - RNA, 27 nt, synthetic construct
  misc_feature 1..27: note = Neuroblastoma breakpoint family member 6 (396-404)
  source 1..27: mol_type = other RNA
gccctggtggacaagatcaagaaggac

SEQ ID NO: 48281 - RNA, 30 nt, synthetic construct
  misc_feature 1..30: note = Glycosylphosphatidylinositol anchor attachment 1 protein (38-47)
  source 1..30: mol_type = other RNA
gccctggtgttccccccgctcacccagcgc

SEQ ID NO: 48282 - RNA, 36 nt, synthetic construct
  misc_feature 1..36: note = Nuclear nucleic acid-binding protein C1D (121-132)
  source 1..36: mol_type = other RNA
gccctgtgggagcccaagagcaagaacgcctccaag

SEQ ID NO: 48283 - RNA, 27 nt, synthetic construct
  misc_feature 1..27: note = Separin (752-760)
  source 1..27: mol_type = other RNA
gccctgtggaaggagctcctgaccaag

SEQ ID NO: 48284 - RNA, 27 nt, synthetic construct
  misc_feature 1..27: note = Fucose mutarotase (91-99)
  source 1..27: mol_type = other RNA
gccctgtacggcaacctcatcctgcgc

SEQ ID NO: 48285 - RNA, 27 nt, synthetic construct
  misc_feature 1..27: note = Proteasome subunit beta type-4 (6-14)
  source 1..27: mol_type = other RNA
gccctgtaccgcggccccatcacccgg

SEQ ID NO: 48286 - RNA, 27 nt, synthetic construct
  misc_feature 1..27: note = Mitofusin-2 (433-441)
  source 1..27: mol_type = other RNA
gccatggccgaggagatccgccggctg

SEQ ID NO: 48287 - RNA, 33 nt, synthetic construct
  misc_feature 1..33: note = Methionine synthase (1208-1218)
  source 1..33: mol_type = other RNA
gccatggcccccgcgagcgccgtgtccggcctg

SEQ ID NO: 48288 - RNA, 27 nt, synthetic construct
  misc_feature 1..27: note = Basement membrane-specific heparan sulfate proteoglycan core protein (3206-3214)
  source 1..27: mol_type = other RNA
gccatggcccccggcgcgccgcaggtg

SEQ ID NO: 48289 - RNA, 30 nt, synthetic construct
  misc_feature 1..30: note = Unconventional myosin-IXa (1913-1922)
  source 1..30: mol_type = other RNA
gccatggacgacggcaagagcatccgctac

SEQ ID NO: 48290 - RNA, 33 nt, synthetic construct
  misc_feature 1..33: note = Ubiquitin carboxyl-terminal hydrolase 4 (692-702)
  source 1..33: mol_type = other RNA
gccatggactgggacagcgagacccgccggctg

SEQ ID NO: 48291 - RNA, 30 nt, synthetic construct
  misc_feature 1..30: note = Myosin regulatory light polypeptide 9 (24-33)
  source 1..30: mol_type = other RNA
gccatgttcgaccagagccagatccaggag

SEQ ID NO: 48292 - RNA, 36 nt, synthetic construct
  misc_feature 1..36: note = Eukaryotic translation initiation factor 3 subunit K (2-13)
  source 1..36: mol_type = other RNA
gccatgttcgagcagatgcgcgccaacgtgggcaag

SEQ ID NO: 48293 - RNA, 36 nt, synthetic construct
  misc_feature 1..36: note = Exportin-4 (248-259)
  source 1..36: mol_type = other RNA
gccatgttcgagagctcccagaacgtgctgctcaag

SEQ ID NO: 48294 - RNA, 27 nt, synthetic construct
  misc_feature 1..27: note = Ankyrin repeat domain-containing protein SOWAHC (349-357)
  source 1..27: mol_type = other RNA
gccatgcacggccacgtggaggtcgtg

SEQ ID NO: 48295 - RNA, 27 nt, synthetic construct
  misc_feature 1..27: note = Calpain-7 (409-417)
  source 1..27: mol_type = other RNA
gccatgcacagcgactcccagaccttc

SEQ ID NO: 48296 - RNA, 27 nt, synthetic construct
  misc_feature 1..27: note = Cytoplasmic FMR1-interacting protein 1 (490-498)
  source 1..27: mol_type = other RNA
gccatgatcaagggcctgcaggtgctc

SEQ ID NO: 48297 - RNA, 27 nt, synthetic construct
  misc_feature 1..27: note = DNA repair protein RAD50 (657-665)
  source 1..27: mol_type = other RNA
gccatgctggccggcgcgaccgccgtg

SEQ ID NO: 48298 - RNA, 36 nt, synthetic construct
  misc_feature 1..36: note = Melanocyte protein PMEL (184-195)
  source 1..36: mol_type = other RNA
gccatgctgggcacccacaccatggaggtgacggtc

SEQ ID NO: 48299 - RNA, 24 nt, synthetic construct
  misc_feature 1..24: note = Protein AAR2 homolog (287-294)
  source 1..24: mol_type = other RNA
gccatgatgaagcaccacaccctg

SEQ ID NO: 48300 - RNA, 33 nt, synthetic construct
  misc_feature 1..33: note = Atherin (156-166)
  source 1..33: mol_type = other RNA
gccatgaacaaggagggcgggaccgccagcgtg

SEQ ID NO: 48301 - RNA, 30 nt, synthetic construct
  misc_feature 1..30: note = Guanine nucleotide-binding protein G(s) subunit alpha isoforms short (95-104)
  source 1..30: mol_type = other RNA
gccatgagcaacctggtgcccccggtcgag

SEQ ID NO: 48302 - RNA, 30 nt, synthetic construct
  misc_feature 1..30: note = Ubiquitin-conjugating enzyme E2 H (97-106)
  source 1..30: mol_type = other RNA
gccatgtacctgcaccgccccgaggagtac

SEQ ID NO: 48303 - RNA, 36 nt, synthetic construct
  misc_feature 1..36: note = Copine-1 (72-83)
  source 1..36: mol_type = other RNA
gcccaggccgcgcaccagggcaccgccagccagtac

SEQ ID NO: 48304 - RNA, 33 nt, synthetic construct
  misc_feature 1..33: note = Copine-1 (403-413)
  source 1..33: mol_type = other RNA
gcccaggccgcgcaccagggcaccgccagctac

SEQ ID NO: 48305 - RNA, 30 nt, synthetic construct
  misc_feature 1..30: note = Fatty acid synthase (1283-1292)
  source 1..30: mol_type = other RNA
gcccaggccgagctgcagcagcacgacgtg

SEQ ID NO: 48306 - RNA, 27 nt, synthetic construct
  misc_feature 1..27: note = Catenin beta-1 (702-710)
  source 1..27: mol_type = other RNA
gcccagggcgagcccctggggtaccgc

SEQ ID NO: 48307 - RNA, 27 nt, synthetic construct
  misc_feature 1..27: note = Protein tyrosine phosphatase type IVA 1 (36-44)
  source 1..27: mol_type = other RNA
gcccagcacgacctgtacgccgacaag

SEQ ID NO: 48308 - RNA, 24 nt, synthetic construct
  misc_feature 1..24: note = Glutathione S-transferase A4 (32-39)
  source 1..24: mol_type = other RNA
gcccagaaggccatcatccgctac

SEQ ID NO: 48309 - RNA, 27 nt, synthetic construct
  misc_feature 1..27: note = Patatin-like phospholipase domain-containing protein 7 (872-880)
  source 1..27: mol_type = other RNA
gcccagaagcagctgatcctcctgcac

SEQ ID NO: 48310 - RNA, 27 nt, synthetic construct
  misc_feature 1..27: note = Vigilin (548-556)
  source 1..27: mol_type = other RNA
gcccagaagagcgacatcgtgcagctg

SEQ ID NO: 48311 - RNA, 24 nt, synthetic construct
  misc_feature 1..24: note = CD276 antigen (61-68)
  source 1..24: mol_type = other RNA
gcccagctgaacctcatctggcag

SEQ ID NO: 48312 - RNA, 30 nt, synthetic construct
  misc_feature 1..30: note = Zinc finger protein 507 (116-125)
  source 1..30: mol_type = other RNA
gcccagaacgagggcaaggccatgagctac

SEQ ID NO: 48313 - RNA, 27 nt, synthetic construct
  misc_feature 1..27: note = Hemicentin-1 (4060-4068)
  source 1..27: mol_type = other RNA
gcccagaaccccgccggcaccgcgctg

SEQ ID NO: 48314 - RNA, 27 nt, synthetic construct
  misc_feature 1..27: note = NAD(P) transhydrogenase, mitochondrial (158-166)
  source 1..27: mol_type = other RNA
gcccagaaccccgagctgctcaacaag

SEQ ID NO: 48315 - RNA, 27 nt, synthetic construct
  misc_feature 1..27: note = Elongator complex protein 2 (42-50)
  source 1..27: mol_type = other RNA
gcccagcagaacgaccagttccagaag

SEQ ID NO: 48316 - RNA, 27 nt, synthetic construct
  misc_feature 1..27: note = Microphthalmia-associated transcription factor (118-126)
  source 1..27: mol_type = other RNA
gcccagcgccagcaggtgaagcagtac

SEQ ID NO: 48317 - RNA, 27 nt, synthetic construct
  misc_feature 1..27: note = Cytoplasmic polyadenylation element-binding protein 1 (45-53)
  source 1..27: mol_type = other RNA
gcccagagctccacccacagcgtgctg

SEQ ID NO: 48318 - RNA, 27 nt, synthetic construct
  misc_feature 1..27: note = GMP synthase (glutamine-hydrolyzing) (130-138)
  source 1..27: mol_type = other RNA
gcccagtacggcaaggtgatcgaccgc

SEQ ID NO: 48319 - RNA, 27 nt, synthetic construct
  misc_feature 1..27: note = 1,2-dihydroxy-3-keto-5-methylthiopentene dioxygenase (181-189)
  source 1..27: mol_type = other RNA
gcccgcggccagtacgtgaagttcctg

SEQ ID NO: 48320 - RNA, 27 nt, synthetic construct
  misc_feature 1..27: note = Ankyrin repeat and LEM domain-containing protein 2 (211-219)
  source 1..27: mol_type = other RNA
gcccgcaacgagcggatctacgtgtac

SEQ ID NO: 48321 - RNA, 27 nt, synthetic construct
  misc_feature 1..27: note Dolichyl-diphosphooligosaccharide-proteinosyltransferase subunit 2 (256-264)
  source 1..27: mol_type = other RNA
gccagcgccgcggccgtgctgtcccac

SEQ ID NO: 48322 - RNA, 30 nt, synthetic construct
  misc_feature 1..30: note = Probable RNA-binding protein 19 (488-497)
  source 1..30: mol_type = other RNA
gccagcgccctgggctccagctcctacaag

SEQ ID NO: 48323 - RNA, 27 nt, synthetic construct
  misc_feature 1..27: note = E3 ubiquitin-protein ligase MSL2 (294-302)
  source 1..27: mol_type = other RNA
gccagcgcccccgtgaccgtcaagcgc

SEQ ID NO: 48324 - RNA, 27 nt, synthetic construct
  misc_feature 1..27: note = Gelsolin (362-370)
  source 1..27: mol_type = other RNA
gccagcgacttcatcaccaagatggac

SEQ ID NO: 48325 - RNA, 33 nt, synthetic construct
  misc_feature 1..33: note = Transient receptor potential cation channel subfamily M member 1 (215-225)
  source 1..33: mol_type = other RNA
gccagcgacatcctgtccttcgcccacaagtac

SEQ ID NO: 48326 - RNA, 30 nt, synthetic construct
  misc_feature 1..30: note = Suppressor of IKBKE 1 (58-67)
  source 1..30: mol_type = other RNA
gccagcgacatgaaggacatgtccaagtac

SEQ ID NO: 48327 - RNA, 30 nt, synthetic construct
  misc_feature 1..30: note = FERM domain-containing protein 4A (516-525)
  source 1..30: mol_type = other RNA
gccagcgaccccaacgtgtccaagaagctg

SEQ ID NO: 48328 - RNA, 33 nt, synthetic construct
  misc_feature 1..33: note = FERM domain-containing protein 4A (483-493)
  source 1..33: mol_type = other RNA
gccagcgaccccaacgtgtccaagaagctgaag

SEQ ID NO: 48329 - RNA, 30 nt, synthetic construct
  misc_feature 1..30: note = Centrosomal protein of 68 kDa (12-21)
  source 1..30: mol_type = other RNA
gccagcgaggacaccaaggcccagtcctac

SEQ ID NO: 48330 - RNA, 30 nt, synthetic construct
  misc_feature 1..30: note = Nucleoside diphosphate kinase (158-167)
  source 1..30: mol_type = other RNA
gccagcgaggagcacctgaagcagcactac

SEQ ID NO: 48331 - RNA, 36 nt, synthetic construct
  misc_feature 1..36: note = Unconventional myosin-Ic (842-853)
  source 1..36: mol_type = other RNA
gccagcgagatcttcaagggcaagaaggacaactac

SEQ ID NO: 48332 - RNA, 33 nt, synthetic construct
  misc_feature 1..33: note = Amino-terminal enhancer of split (51-61)
  source 1..33: mol_type = other RNA
gccagcgagaagtccgagatgcagcgccactac

SEQ ID NO: 48333 - RNA, 27 nt, synthetic construct
  misc_feature 1..27: note = Retinal dehydrogenase 1 (82-90)
  source 1..27: mol_type = other RNA
gccagcgagcgcggccggctgctctac

SEQ ID NO: 48334 - RNA, 30 nt, synthetic construct
  misc_feature 1..30: note = Macrophage metalloelastase (13-22)
  source 1..30: mol_type = other RNA
gccagcggcgccctgcccctcaactccagc

SEQ ID NO: 48335 - RNA, 33 nt, synthetic construct
  misc_feature 1..33: note = Nuclear factor interleukin-3-regulated protein (14-24)
  source 1..33: mol_type = other RNA
gccagcctggacgcctccagcaacgtggacaag

SEQ ID NO: 48336 - RNA, 33 nt, synthetic construct
  misc_feature 1..33: note = Melanocyte protein PMEL (619-629)
  source 1..33: mol_type = other RNA
gccagcctgatctaccgccggcgcctcatgaag

SEQ ID NO: 48337 - RNA, 33 nt, synthetic construct
  misc_feature 1..33: note = SH2B adapter protein 3 (209-219)
  source 1..33: mol_type = other RNA
gccagcatggactccggcgcccgctggcagcgg

SEQ ID NO: 48338 - RNA, 30 nt, synthetic construct
  misc_feature 1..30: note = Protein argonaute-1 (168-177)
  source 1..30: mol_type = other RNA
gccagcatgcgctacacccccgtgggccgg

SEQ ID NO: 48339 - RNA, 27 nt, synthetic construct
  misc_feature 1..27: note = 5'-3' exoribonuclease 2 (454-462)
  source 1..27: mol_type = other RNA
gccagcaacccccgccaggccgcgtac

SEQ ID NO: 48340 - RNA, 45 nt, synthetic construct
  misc_feature 1..45: note = PERQ amino acid-rich with GYF domain-containing protein 2 (1277-1291)
  source 1..45: mol_type = other RNA
gccagctccgagcgcctgaacatgggcgagatcgagaccctcgac

SEQ ID NO: 48341 - RNA, 48 nt, synthetic construct
  misc_feature 1..48: note = PERQ amino acid-rich with GYF domain-containing protein 2 (1277-1292)
  source 1..48: mol_type = other RNA
gccagctccgagcgcctgaacatgggcgagatcgagaccctcgacgac

SEQ ID NO: 48342 - RNA, 51 nt, synthetic construct
  misc_feature 1..51: note = PERQ amino acid-rich with GYF domain-containing protein 2 (1277-1293)
  source 1..51: mol_type = other RNA
gccagctccgagcgcctgaacatgggcgagatcgagaccctcgacgactac

SEQ ID NO: 48343 - RNA, 54 nt, synthetic construct
  misc_feature 1..54: note = Vimentin (54-71)
  source 1..54: mol_type = other RNA
gccagctcccccggcggggtgtacgccacccgcagctccgcggtccggctgcgc

SEQ ID NO: 48344 - RNA, 42 nt, synthetic construct
  misc_feature 1..42: note = Chondroitin sulfate proteoglycan 4 (1607-1620)
  source 1..42: mol_type = other RNA
gccagctccagcgccggcaccgacccccagctgctcctgtac

SEQ ID NO: 48345 - RNA, 27 nt, synthetic construct
  misc_feature 1..27: note = Contactin-associated protein-like 3B (2-10)
  source 1..27: mol_type = other RNA
gccagcgtggcctgggcggtcctgaag

SEQ ID NO: 48346 - RNA, 27 nt, synthetic construct
  misc_feature 1..27: note = Sister chromatid cohesion protein PDS5 homolog B (520-528)
  source 1..27: mol_type = other RNA
gccagcgtgaaggccatcttctccaag

SEQ ID NO: 48347 - RNA, 45 nt, synthetic construct
  misc_feature 1..45: note = RNA-binding protein 14 (526-540)
  source 1..45: mol_type = other RNA
gccagctacgccgcgcagcagcacccccaggccgccgcctcctac

SEQ ID NO: 48348 - RNA, 33 nt, synthetic construct
  misc_feature 1..33: note = N6-adenosine-methyltransferase subunit METTL14 (53-63)
  source 1..33: mol_type = other RNA
gccagctacgacacctccgcccccaacgcgaag

SEQ ID NO: 48349 - RNA, 30 nt, synthetic construct
  misc_feature 1..30: note = Origin recognition complex subunit 5 (316-325)
  source 1..30: mol_type = other RNA
gccagctacaaccccgcccgcaccgacaag

SEQ ID NO: 48350 - RNA, 36 nt, synthetic construct
  misc_feature 1..36: note = SPRY domain-containing SOCS box protein 1 (216-227)
  source 1..36: mol_type = other RNA
gccaccgccgacgcgcccctgcacagcgtgggctac

SEQ ID NO: 48351 - RNA, 27 nt, synthetic construct
  misc_feature 1..27: note = Laminin subunit beta-2 (265-273)
  source 1..27: mol_type = other RNA
gccaccgccgacctggcgctcggccgc

SEQ ID NO: 48352 - RNA, 30 nt, synthetic construct
  misc_feature 1..30: note = Oxidative stress-induced growth inhibitor 1 (253-262)
  source 1..30: mol_type = other RNA
gccaccgccggcgacatcgcgcactactac

SEQ ID NO: 48353 - RNA, 27 nt, synthetic construct
  misc_feature 1..27: note = Uncharacterized protein KIAA0355 (675-683)
  source 1..27: mol_type = other RNA
gccaccgccatggtgaccgagcagaag

SEQ ID NO: 48354 - RNA, 27 nt, synthetic construct
  misc_feature 1..27: note = E1A-binding protein p400 (1093-1101)
  source 1..27: mol_type = other RNA
gccaccgcccaggtggtccagcagaag

SEQ ID NO: 48355 - RNA, 33 nt, synthetic construct
  misc_feature 1..33: note = Huntingtin-interacting protein 1 (499-509)
  source 1..33: mol_type = other RNA
gccaccgcccgcatcgaggagatgctgagcaag

SEQ ID NO: 48356 - RNA, 36 nt, synthetic construct
  misc_feature 1..36: note = Coatomer subunit beta' (703-714)
  source 1..36: mol_type = other RNA
gccaccgccagcggcaacgcgaacatggtgaacaag

SEQ ID NO: 48357 - RNA, 30 nt, synthetic construct
  misc_feature 1..30: note = Vacuolar protein sorting-associated protein 18 homolog (854-863)
  source 1..30: mol_type = other RNA
gccacctgcgacttccccctgctcaaccgc

SEQ ID NO: 48358 - RNA, 24 nt, synthetic construct
  misc_feature 1..24: note = PH domain leucine-rich repeat-containing protein phosphatase 1 (536-543)
  source 1..24: mol_type = other RNA
gccaccgacgcccccctgcgcaag

SEQ ID NO: 48359 - RNA, 27 nt, synthetic construct
  misc_feature 1..27: note = Myomegalin (2167-2175)
  source 1..27: mol_type = other RNA
gccaccgacggcagcttcgccaacaag

SEQ ID NO: 48360 - RNA, 33 nt, synthetic construct
  misc_feature 1..33: note = Slit homolog 3 protein (1187-1197)
  source 1..33: mol_type = other RNA
gccaccgacaaggacaacggcatcctgctctac

SEQ ID NO: 48361 - RNA, 33 nt, synthetic construct
  misc_feature 1..33: note = Protocadherin Fat 2 (739-749)
  source 1..33: mol_type = other RNA
gccaccgaccccgacgccggcttcaacgggaag

SEQ ID NO: 48362 - RNA, 33 nt, synthetic construct
  misc_feature 1..33: note = DNA-dependent protein kinase catalytic subunit (4080-4090)
  source 1..33: mol_type = other RNA
gccaccgaccccaacatcctgggccgcacctgg

SEQ ID NO: 48363 - RNA, 30 nt, synthetic construct
  misc_feature 1..30: note = Apolipoprotein D (122-131)
  source 1..30: mol_type = other RNA
gccaccgactacgagaactacgccctggtg

SEQ ID NO: 48364 - RNA, 33 nt, synthetic construct
  misc_feature 1..33: note = Apolipoprotein D (122-132)
  source 1..33: mol_type = other RNA
gccaccgactacgagaactacgccctggtgtac

SEQ ID NO: 48365 - RNA, 27 nt, synthetic construct
  misc_feature 1..27: note = Semaphorin-5A (423-431)
  source 1..27: mol_type = other RNA
gccaccgactacggcaccatcaagaag

SEQ ID NO: 48366 - RNA, 21 nt, synthetic construct
  misc_feature 1..21: note = Fibronectin type III domain-containing protein 3B (348-354)
  source 1..21: mol_type = other RNA
gccaccgactaccacgtgcgc

SEQ ID NO: 48367 - RNA, 33 nt, synthetic construct
  misc_feature 1..33: note = Zinc finger MYM-type protein 3 (76-86)
  source 1..33: mol_type = other RNA
gccaccgagctgctcggcctggggggcctgctc

SEQ ID NO: 48368 - RNA, 27 nt, synthetic construct
  misc_feature 1..27: note = B-cell CLL/lymphoma 9 protein (163-171)
  source 1..27: mol_type = other RNA
gccaccgagcccaccccggcccagaag

SEQ ID NO: 48369 - RNA, 33 nt, synthetic construct
  misc_feature 1..33: note = Ribosome-binding protein 1 (277-287)
  source 1..33: mol_type = other RNA
gccaccgagcaggaggacgccgcggtggccaag

SEQ ID NO: 48370 - RNA, 39 nt, synthetic construct
  misc_feature 1..39: note = Centrosome-associated protein 350 (621-633)
  source 1..39: mol_type = other RNA
gccaccgagcagaagaacaagcgcctgcaggagctctac

SEQ ID NO: 48371 - RNA, 33 nt, synthetic construct
  misc_feature 1..33: note = Uncharacterized aarF domain-containing protein kinase 2 (137-147)
  source 1..33: mol_type = other RNA
gccaccgagaccagcggccccacgtacatcaag

SEQ ID NO: 48372 - RNA, 36 nt, synthetic construct
  misc_feature 1..36: note = Protein Tob1 (180-191)
  source 1..36: mol_type = other RNA
gccaccttcgccgcgaccaagttcggcagcacgaag

SEQ ID NO: 48373 - RNA, 30 nt, synthetic construct
  misc_feature 1..30: note = FAST kinase domain-containing protein 2 (426-435)
  source 1..30: mol_type = other RNA
gccaccttcgacatctggaagttccgcaag

SEQ ID NO: 48374 - RNA, 33 nt, synthetic construct
  misc_feature 1..33: note = Nephrocystin-3 (43-53)
  source 1..33: mol_type = other RNA
gccaccttcgagcacgaccgcgacaaggtgaag

SEQ ID NO: 48375 - RNA, 30 nt, synthetic construct
  misc_feature 1..30: note = Calcium-binding protein 39 (186-195)
  source 1..30: mol_type = other RNA
gccaccttcaaggacctgctcacccgccac

SEQ ID NO: 48376 - RNA, 27 nt, synthetic construct
  misc_feature 1..27: note = cAMP-specific 3',5'-cyclic phosphodiesterase 4B (107-115)
  source 1..27: mol_type = other RNA
gccaccttccccggccacagccagcgc

SEQ ID NO: 48377 - RNA, 27 nt, synthetic construct
  misc_feature 1..27: note = Kynurenine-oxoglutarate transaminase 3 (99-107)
  source 1..27: mol_type = other RNA
gccaccttccccggcatgtgggagcgc

SEQ ID NO: 48378 - RNA, 27 nt, synthetic construct
  misc_feature 1..27: note = Pleckstrin homology domain-containing family H member 1 (733-741)
  source 1..27: mol_type = other RNA
gccaccggccccccggccctgctccgc

SEQ ID NO: 48379 - RNA, 33 nt, synthetic construct
  misc_feature 1..33: note = von Willebrand factor A domain-containing protein 5A (184-194)
  source 1..33: mol_type = other RNA
gccaccatcgacagccagcacggcatcgagaag

SEQ ID NO: 48380 - RNA, 33 nt, synthetic construct
  misc_feature 1..33: note = General transcription factor IIH subunit 2 (32-42)
  source 1..33: mol_type = other RNA
gccaccatcgaggacatcctgttcaaggccaag

SEQ ID NO: 48381 - RNA, 27 nt, synthetic construct
  misc_feature 1..27: note = F-BAR domain only protein 2 (41-49)
  source 1..27: mol_type = other RNA
gccaccatcgaggaggcctacagccgc

SEQ ID NO: 48382 - RNA, 39 nt, synthetic construct
  misc_feature 1..39: note = DNA-binding protein RFX7 (683-695)
  source 1..39: mol_type = other RNA
gccaccatcgagggccagaagcaggggagcgtgaagaag

SEQ ID NO: 48383 - RNA, 27 nt, synthetic construct
  misc_feature 1..27: note = Mitochondrial Rho GTPase 2 (88-96)
  source 1..27: mol_type = other RNA
gccaccatcgagaagatccgcaccaag

SEQ ID NO: 48384 - RNA, 33 nt, synthetic construct
  misc_feature 1..33: note = Transformation/transcription domain-associated protein (1416-1426)
  source 1..33: mol_type = other RNA
gccaccatcgaggtggaccagatccacacccac

SEQ ID NO: 48385 - RNA, 36 nt, synthetic construct
  misc_feature 1..36: note = Vacuolar-sorting protein SNF8 (73-84)
  source 1..36: mol_type = other RNA
gccaccatcggcgtggaccccctggccagcgggaag

SEQ ID NO: 48386 - RNA, 27 nt, synthetic construct
  misc_feature 1..27: note = Inhibitor of Bruton tyrosine kinase (45-53)
  source 1..27: mol_type = other RNA
gccaccatcaaggacgtgttcggccgc

SEQ ID NO: 48387 - RNA, 33 nt, synthetic construct
  misc_feature 1..33: note = Probable ATP-dependent RNA helicase DDX60-like (899-909)
  source 1..33: mol_type = other RNA
gccaccatcaacaaccccaacctgctcaccaag

SEQ ID NO: 48388 - RNA, 30 nt, synthetic construct
  misc_feature 1..30: note = Ankyrin repeat domain-containing protein 17 (1306-1315)
  source 1..30: mol_type = other RNA
gccaccatcaccgacaaggagatgctgaag

SEQ ID NO: 48389 - RNA, 27 nt, synthetic construct
  misc_feature 1..27: note = Signal recognition particle 54 kDa protein (152-160)
  source 1..27: mol_type = other RNA
gccaccaaggcccgcatccccttctac

SEQ ID NO: 48390 - RNA, 27 nt, synthetic construct
  misc_feature 1..27: note = Fanconi anemia group I protein (138-146)
  source 1..27: mol_type = other RNA
gccaccaagaaggagaacctggcctac

SEQ ID NO: 48391 - RNA, 30 nt, synthetic construct
  misc_feature 1..30: note = Gephyrin (610-619)
  source 1..30: mol_type = other RNA
gccaccctggacatcgacggcgtgcgcaag

SEQ ID NO: 48392 - RNA, 27 nt, synthetic construct
  misc_feature 1..27: note = Histone deacetylase 10 (469-477)
  source 1..27: mol_type = other RNA
gccaccctggacgtggccgtccgccgg

SEQ ID NO: 48393 - RNA, 30 nt, synthetic construct
  misc_feature 1..30: note = MOB kinase activator 1A (76-85)
  source 1..30: mol_type = other RNA
gccaccctgggcagcgggaacctccgccag

SEQ ID NO: 48394 - RNA, 27 nt, synthetic construct
  misc_feature 1..27: note = ADP-ribosylation factor-like protein 2 (118-126)
  source 1..27: mol_type = other RNA
gccaccctgctcatcttcgccaacaag

SEQ ID NO: 48395 - RNA, 33 nt, synthetic construct
  misc_feature 1..33: note = Telomerase protein component 1 (53-63)
  source 1..33: mol_type = other RNA
gccaccctgcccgacctcaagaccatggagaag

SEQ ID NO: 48396 - RNA, 27 nt, synthetic construct
  misc_feature 1..27: note = Septin-4 (109-117)
  source 1..27: mol_type = other RNA
gccaccctgcccaaccaggtgcaccgc

SEQ ID NO: 48397 - RNA, 30 nt, synthetic construct
  misc_feature 1..30: note = Glycogen phosphorylase, muscle form (303-312)
  source 1..30: mol_type = other RNA
gccaccctgcaggacatcatccgccggttc

SEQ ID NO: 48398 - RNA, 33 nt, synthetic construct
  misc_feature 1..33: note = PH domain leucine-rich repeat-containing protein phosphatase 1 (228-238)
  source 1..33: mol_type = other RNA
gccaccctgagcgaggagaccaactccatcctc

SEQ ID NO: 48399 - RNA, 27 nt, synthetic construct
  misc_feature 1..27: note = Kazrin (140-148)
  source 1..27: mol_type = other RNA
gccaccctgaccaaggacgtgcccaag

SEQ ID NO: 48400 - RNA, 33 nt, synthetic construct
  misc_feature 1..33: note = BUB3-interacting and GLEBS motif-containing protein ZNF207 (352-362)
  source 1..33: mol_type = other RNA
gccaccctgaccacgaccagcgccacctccaag

SEQ ID NO: 48401 - RNA, 30 nt, synthetic construct
  misc_feature 1..30: note = Eukaryotic initiation factor 4A-III (5-14)
  source 1..30: mol_type = other RNA
gccaccatggccaccagcggctccgcgcgc

SEQ ID NO: 48402 - RNA, 39 nt, synthetic construct
  misc_feature 1..39: note = Eukaryotic translation initiation factor 3 subunit J (234-246)
  source 1..39: mol_type = other RNA
gccaccatgaaggacgacctggccgactacggcgggtac

SEQ ID NO: 48403 - RNA, 48 nt, synthetic construct
  misc_feature 1..48: note = Eukaryotic translation initiation factor 3 subunit J (234-249)
  source 1..48: mol_type = other RNA
gccaccatgaaggacgacctggccgactacggcgggtacgacggcggg

SEQ ID NO: 48404 - RNA, 30 nt, synthetic construct
  misc_feature 1..30: note = Growth hormone-inducible transmembrane protein (334-343)
  source 1..30: mol_type = other RNA
gccaccatgctggccaccggcgggaaccgc

SEQ ID NO: 48405 - RNA, 36 nt, synthetic construct
  misc_feature 1..36: note = Growth hormone-inducible transmembrane protein (334-345)
  source 1..36: mol_type = other RNA
gccaccatgctggccaccggcgggaaccgcaagaag

SEQ ID NO: 48406 - RNA, 33 nt, synthetic construct
  misc_feature 1..33: note = Signal recognition particle subunit SRP68 (260-270)
  source 1..33: mol_type = other RNA
gccaccatgagcgaggtggagtggcgcggccgg

SEQ ID NO: 48407 - RNA, 33 nt, synthetic construct
  misc_feature 1..33: note = Protein phosphatase 1G (149-159)
  source 1..33: mol_type = other RNA
gccaccatgaccatcgaggagctgctcacgcgc

SEQ ID NO: 48408 - RNA, 27 nt, synthetic construct
  misc_feature 1..27: note = E3 ubiquitin-protein ligase HECTD1 (175-183)
  source 1..27: mol_type = other RNA
gccaccaacaacatgaacctgagccgc

SEQ ID NO: 48409 - RNA, 30 nt, synthetic construct
  misc_feature 1..30: note = X-ray repair cross-complementing protein 6 (454-463)
  source 1..30: mol_type = other RNA
gccacccccgagcaggtgggcaagatgaag

SEQ ID NO: 48410 - RNA, 30 nt, synthetic construct
  misc_feature 1..30: note = Cytoplasmic dynein 1 heavy chain 1 (3980-3989)
  source 1..30: mol_type = other RNA
gccacccccatcggccaggccatccaccgc

SEQ ID NO: 48411 - RNA, 27 nt, synthetic construct
  misc_feature 1..27: note = Estradiol 17-beta-dehydrogenase 11 (131-139)
  source 1..27: mol_type = other RNA
gccacccaggacccccagatcgagaag

SEQ ID NO: 48412 - RNA, 45 nt, synthetic construct
  misc_feature 1..45: note = Calsyntenin-1 (947-961)
  source 1..45: mol_type = other RNA
gccacccgccagcagcagctggagtgggacgacagcaccctctcc

SEQ ID NO: 48413 - RNA, 48 nt, synthetic construct
  misc_feature 1..48: note = Calsyntenin-1 (947-962)
  source 1..48: mol_type = other RNA
gccacccgccagcagcagctggagtgggacgacagcaccctctcctac

SEQ ID NO: 48414 - RNA, 27 nt, synthetic construct
  misc_feature 1..27: note = Intron-binding protein aquarius (1477-1485)
  source 1..27: mol_type = other RNA
gccaccagcgcccccgaggagaccaag

SEQ ID NO: 48415 - RNA, 27 nt, synthetic construct
  misc_feature 1..27: note = Kelch repeat and BTB domain-containing protein 4 (535-543)
  source 1..27: mol_type = other RNA
gccaccagcgccgtgaccgtcacgcgc

SEQ ID NO: 48416 - RNA, 33 nt, synthetic construct
  misc_feature 1..33: note = Basement membrane-specific heparan sulfate proteoglycan core protein (2027-2037)
  source 1..33: mol_type = other RNA
gccaccagccccgccggcaccgcgcaggcccgc

SEQ ID NO: 48417 - RNA, 27 nt, synthetic construct
  misc_feature 1..27: note = Neural cell adhesion molecule L1 (1237-1245)
  source 1..27: mol_type = other RNA
gccaccagccccatcaacccggccgtg

SEQ ID NO: 48418 - RNA, 27 nt, synthetic construct
  misc_feature 1..27: note = G-protein coupled receptor 143 (61-69)
  source 1..27: mol_type = other RNA
gccaccagccccccggcctccgtgcgc

SEQ ID NO: 48419 - RNA, 30 nt, synthetic construct
  misc_feature 1..30: note = Melanoma-associated antigen D1 (132-141)
  source 1..30: mol_type = other RNA
gccaccaccggcgagctggccgcgaacaag

SEQ ID NO: 48420 - RNA, 33 nt, synthetic construct
  misc_feature 1..33: note = Sterol regulatory element-binding protein 1 (957-967)
  source 1..33: mol_type = other RNA
gccaccacccccgccagctccagcatcgacaag

SEQ ID NO: 48421 - RNA, 27 nt, synthetic construct
  misc_feature 1..27: note = Helicase SKI2W (127-135)
  source 1..27: mol_type = other RNA
gccaccaccagcctgtccctccgccgg

SEQ ID NO: 48422 - RNA, 27 nt, synthetic construct
  misc_feature 1..27: note = E3 ubiquitin-protein ligase RING1 (290-298)
  source 1..27: mol_type = other RNA
gccaccgtggaccacctgagcaagtac

SEQ ID NO: 48423 - RNA, 33 nt, synthetic construct
  misc_feature 1..33: note = ATP-dependent RNA helicase DHX29 (735-745)
  source 1..33: mol_type = other RNA
gccaccgtggacagcgagaagttctccacctac

SEQ ID NO: 48424 - RNA, 27 nt, synthetic construct
  misc_feature 1..27: note = Multidrug resistance-associated protein 4 (364-372)
  source 1..27: mol_type = other RNA
gccaccgtgctgttcggcatcgcccgc

SEQ ID NO: 48425 - RNA, 27 nt, synthetic construct
  misc_feature 1..27: note = FACT complex subunit SPT16 (415-423)
  source 1..27: mol_type = other RNA
gccaccgtgctgaccagcgtcaagaag

SEQ ID NO: 48426 - RNA, 30 nt, synthetic construct
  misc_feature 1..30: note = Putative phospholipase B-like 2 (360-369)
  source 1..30: mol_type = other RNA
gccacctgggccgacatcttcaagcgcttc

SEQ ID NO: 48427 - RNA, 27 nt, synthetic construct
  misc_feature 1..27: note = Arf-GAP with GTPase, ANK repeat and PH domain-containing protein 3 (232-240)
  source 1..27: mol_type = other RNA
gccacctacggcctgaacgtggagcgc

SEQ ID NO: 48428 - RNA, 27 nt, synthetic construct
  misc_feature 1..27: note = Histone acetyltransferase p300 (1189-1197)
  source 1..27: mol_type = other RNA
gccacctactacagctaccagaaccgc

SEQ ID NO: 48429 - RNA, 27 nt, synthetic construct
  misc_feature 1..27: note = Girdin (155-163)
  source 1..27: mol_type = other RNA
gccgtggccgcgcacatccaggaggtc

SEQ ID NO: 48430 - RNA, 39 nt, synthetic construct
  misc_feature 1..39: note = Sodium/potassium-transporting ATPase subunit alpha-1 (249-261)
  source 1..39: mol_type = other RNA
gccgtggccggcgacgcgagcgagtccgccctgctcaag

SEQ ID NO: 48431 - RNA, 36 nt, synthetic construct
  misc_feature 1..36: note = RanBP-type and C3HC4-type zinc finger-containing protein 1 (18-29)
  source 1..36: mol_type = other RNA
gccgtggccggcggggacgagcaggtcgcgatgaag

SEQ ID NO: 48432 - RNA, 33 nt, synthetic construct
  misc_feature 1..33: note = Mitochondrial import inner membrane translocase subunit Tim13 (31-41)
  source 1..33: mol_type = other RNA
gccgtggccaacgcgcaggagctgctccagcgc

SEQ ID NO: 48433 - RNA, 33 nt, synthetic construct
  misc_feature 1..33: note = cDNA FLJ78342 (66-76)
  source 1..33: mol_type = other RNA
gccgtggcccagatggacttcatcaagctgtac

SEQ ID NO: 48434 - RNA, 30 nt, synthetic construct
  misc_feature 1..30: note = Serine/threonine-protein kinase ATR (1642-1651)
  source 1..30: mol_type = other RNA
gccgtggccagcttccgctccaaggcgtac

SEQ ID NO: 48435 - RNA, 27 nt, synthetic construct
  misc_feature 1..27: note = G-protein coupled receptor 143 (219-227)
  source 1..27: mol_type = other RNA
gccgtggccagcctgctcaagggccgc

SEQ ID NO: 48436 - RNA, 27 nt, synthetic construct
  misc_feature 1..27: note = Cadherin EGF LAG seven-pass G-type receptor 2 (2176-2184)
  source 1..27: mol_type = other RNA
gccgtggccagcgtcatcatctaccgc

SEQ ID NO: 48437 - RNA, 27 nt, synthetic construct
  misc_feature 1..27: note = Signal peptidase complex catalytic subunit SEC11A (119-127)
  source 1..27: mol_type = other RNA
gccgtggacgaccgcggcctgtacaag

SEQ ID NO: 48438 - RNA, 33 nt, synthetic construct
  misc_feature 1..33: note = MICOS complex subunit MIC60 (276-286)
  source 1..33: mol_type = other RNA
gccgtggacgaggccgcggacgccctgctcaag

SEQ ID NO: 48439 - RNA, 30 nt, synthetic construct
  misc_feature 1..30: note = Multivesicular body subunit 12A (118-127)
  source 1..30: mol_type = other RNA
gccgtgttcgacgtccgcctgagcggcaag

SEQ ID NO: 48440 - RNA, 27 nt, synthetic construct
  misc_feature 1..27: note = Peroxisomal multifunctional enzyme type 2 (271-279)
  source 1..27: mol_type = other RNA
gccgtgttcgagtggcacatcaccaag

SEQ ID NO: 48441 - RNA, 48 nt, synthetic construct
  misc_feature 1..48: note = Peroxisomal multifunctional enzyme type 2 (648-663)
  source 1..48: mol_type = other RNA
gccgtgttcgagtggcacatcaccaagggcgggaacatcggcgccaag

SEQ ID NO: 48442 - RNA, 30 nt, synthetic construct
  misc_feature 1..30: note = Transmembraneoprotein NMB (550-559)
  source 1..30: mol_type = other RNA
gccgtgttcttccccggcaaccaggagaag

SEQ ID NO: 48443 - RNA, 27 nt, synthetic construct
  misc_feature 1..27: note = Transmembrane protein 50A (132-140)
  source 1..27: mol_type = other RNA
gccgtgttcttccagaacgccttcatc

SEQ ID NO: 48444 - RNA, 27 nt, synthetic construct
  misc_feature 1..27: note = tRNA-splicing endonuclease subunit Sen2 (4-12)
  source 1..27: mol_type = other RNA
gccgtgttccacgcccccaagcgcaag

SEQ ID NO: 48445 - RNA, 27 nt, synthetic construct
  misc_feature 1..27: note = Kinesin-like protein KIF13B (224-232)
  source 1..27: mol_type = other RNA
gccgtgttcaagatcaccctgacccac

SEQ ID NO: 48446 - RNA, 30 nt, synthetic construct
  misc_feature 1..30: note = Kinesin-like protein KIF1B (252-261)
  source 1..30: mol_type = other RNA
gccgtgttcaccatcgtcttcacccagaag

SEQ ID NO: 48447 - RNA, 33 nt, synthetic construct
  misc_feature 1..33: note = GMP synthase (glutamine-hydrolyzing) (400-410)
  source 1..33: mol_type = other RNA
gccgtgcacatcgacaacggcttcatgcgcaag

SEQ ID NO: 48448 - RNA, 27 nt, synthetic construct
  misc_feature 1..27: note = Lysosomal-trafficking regulator (2018-2026)
  source 1..27: mol_type = other RNA
gccgtgcaccccccgaccaacacctac

SEQ ID NO: 48449 - RNA, 27 nt, synthetic construct
  misc_feature 1..27: note = Disintegrin and metalloproteinase domain-containing protein 10 (184-192)
  source 1..27: mol_type = other RNA
gccgtgatcgcccagatcagctcccac

SEQ ID NO: 48450 - RNA, 36 nt, synthetic construct
  misc_feature 1..36: note = UDP-N-acetylglucosamine-peptide N-acetylglucosaminyltransferase 110 kDa subunit (593-604)
  source 1..36: mol_type = other RNA
gccgtgatcgacttcaagagcaacggccacatctac

SEQ ID NO: 48451 - RNA, 30 nt, synthetic construct
  misc_feature 1..30: note = Armadillo repeat-containing X-linked protein 5 (128-137)
  source 1..30: mol_type = other RNA
gccgtgatcgaggccaacatccgcagctac

SEQ ID NO: 48452 - RNA, 30 nt, synthetic construct
  misc_feature 1..30: note = Cytoplasmic dynein 1 heavy chain 1 (3288-3297)
  source 1..30: mol_type = other RNA
gccgtgatcgaggcccagaacgcggtcaag

SEQ ID NO: 48453 - RNA, 30 nt, synthetic construct
  misc_feature 1..30: note = Tyrosine-protein phosphatase non-receptor type 1 (109-118)
  source 1..30: mol_type = other RNA
gccgtgatcgagggcgccaagttcatcatg

SEQ ID NO: 48454 - RNA, 27 nt, synthetic construct
  misc_feature 1..27: note = Adenosine 3'-phospho 5'-phosphosulfate transporter 2 (240-248)
  source 1..27: mol_type = other RNA
gccgtgatcggcaacgtccaggagaag

SEQ ID NO: 48455 - RNA, 30 nt, synthetic construct
  misc_feature 1..30: note = Protocadherin Fat 4 (1541-1550)
  source 1..30: mol_type = other RNA
gccgtgatcggcagcgtcctgaccaccatc

SEQ ID NO: 48456 - RNA, 30 nt, synthetic construct
  misc_feature 1..30: note = Kinesin-like protein KIF1B (391-400)
  source 1..30: mol_type = other RNA
gccgtgatcaacgaggaccccaacgccaag

SEQ ID NO: 48457 - RNA, 39 nt, synthetic construct
  misc_feature 1..39: note = RING finger protein 37 (351-363)
  source 1..39: mol_type = other RNA
gccgtgatccccagctccatcgtcctgccgagccagaag

SEQ ID NO: 48458 - RNA, 27 nt, synthetic construct
  misc_feature 1..27: note = DNA repair protein SWI5 homolog isoform 2 (175-183)
  source 1..27: mol_type = other RNA
gccgtgatccgcggcgtcaccaccaag

SEQ ID NO: 48459 - RNA, 30 nt, synthetic construct
  misc_feature 1..30: note = Zinc finger protein 28 homolog (116-125)
  source 1..30: mol_type = other RNA
gccgtgatcaccgagcgcctgaccagctac

SEQ ID NO: 48460 - RNA, 30 nt, synthetic construct
  misc_feature 1..30: note = Eukaryotic translation initiation factor 3 subunit E (260-269)
  source 1..30: mol_type = other RNA
gccgtgatcaccaacaaggacgtccgcaag

SEQ ID NO: 48461 - RNA, 30 nt, synthetic construct
  misc_feature 1..30: note = Proline-rich protein 13 (52-61)
  source 1..30: mol_type = other RNA
gccgtgatcgtcgacaagaagatgcagaag

SEQ ID NO: 48462 - RNA, 27 nt, synthetic construct
  misc_feature 1..27: note = Heat shock 70 kDa protein 4 (349-357)
  source 1..27: mol_type = other RNA
gccgtgaaggagaagatcagcaagttc

SEQ ID NO: 48463 - RNA, 27 nt, synthetic construct
  misc_feature 1..27: note = Very long-chain specific acyl-CoA dehydrogenase, mitochondrial (252-260)
  source 1..27: mol_type = other RNA
gccgtgaaggagaagatcaccgccttc

SEQ ID NO: 48464 - RNA, 27 nt, synthetic construct
  misc_feature 1..27: note = Heat shock protein 105 kDa (349-357)
  source 1..27: mol_type = other RNA
gccgtgaaggagcgcatcgccaagttc

SEQ ID NO: 48465 - RNA, 27 nt, synthetic construct
  misc_feature 1..27: note = Hermansky-Pudlak syndrome 5 protein (25-33)
  source 1..27: mol_type = other RNA
gccgtgaaggagagcgtctccagcttc

SEQ ID NO: 48466 - RNA, 33 nt, synthetic construct
  misc_feature 1..33: note = Interleukin-1 receptor accessory protein (505-515)
  source 1..33: mol_type = other RNA
gccgtgaaggagaccaaggtcaaggagctgaag

SEQ ID NO: 48467 - RNA, 30 nt, synthetic construct
  misc_feature 1..30: note = Actin-related protein 2/3 complex subunit 4 (75-84)
  source 1..30: mol_type = other RNA
gccgtgaagcaggccgacgagatcgagaag

SEQ ID NO: 48468 - RNA, 27 nt, synthetic construct
  misc_feature 1..27: note = Phosphatidylinositol 4,5-bisphosphate 3-kinase catalytic subunit beta isoform (406-414)
  source 1..27: mol_type = other RNA
gccgtgctggacaaggtcaagaccaag

SEQ ID NO: 48469 - RNA, 27 nt, synthetic construct
  misc_feature 1..27: note = Periodic tryptophan protein 1 homolog (46-54)
  source 1..27: mol_type = other RNA
gccgtgctggacctcagctggaacaag

SEQ ID NO: 48470 - RNA, 27 nt, synthetic construct
  misc_feature 1..27: note = Glutamate receptor ionotropic, NMDA 2A (236-244)
  source 1..27: mol_type = other RNA
gccgtgctgatcctcagcgaggcccgc

SEQ ID NO: 48471 - RNA, 27 nt, synthetic construct
  misc_feature 1..27: note = ADP-ribosylation factor 5 (119-127)
  source 1..27: mol_type = other RNA
gccgtgctgctcgtcttcgccaacaag

SEQ ID NO: 48472 - RNA, 33 nt, synthetic construct
  misc_feature 1..33: note = Casein kinase II subunit alpha' (340-350)
  source 1..33: mol_type = other RNA
gccgtgctgagctccggcctcaccgccgcgcgc

SEQ ID NO: 48473 - RNA, 36 nt, synthetic construct
  misc_feature 1..36: note = COP9 signalosome complex subunit 8 (4-15)
  source 1..36: mol_type = other RNA
gccgtgatggccgagagcgcgttctccttcaagaag

SEQ ID NO: 48474 - RNA, 30 nt, synthetic construct
  misc_feature 1..30: note = FACT complex subunit SPT16 (328-337)
  source 1..30: mol_type = other RNA
gccgtgatggacgtcgtgaagaagcagaag

SEQ ID NO: 48475 - RNA, 27 nt, synthetic construct
  misc_feature 1..27: note = Prefoldin subunit 5 (143-151)
  source 1..27: mol_type = other RNA
gccgtgatggagatgatgagccagaag

SEQ ID NO: 48476 - RNA, 33 nt, synthetic construct
  misc_feature 1..33: note = DNA-directed RNA polymerase I subunit RPA1 (330-340)
  source 1..33: mol_type = other RNA
gccgtgatgaaggacgtcgtgctgatccgcaag

SEQ ID NO: 48477 - RNA, 27 nt, synthetic construct
  misc_feature 1..27: note = Pleckstrin homology domain-containing family A member 1 (203-211)
  source 1..27: mol_type = other RNA
gccgtgatgaagaactggaagcgccgg

SEQ ID NO: 48478 - RNA, 27 nt, synthetic construct
  misc_feature 1..27: note = Catenin beta-1 (172-180)
  source 1..27: mol_type = other RNA
gccgtgatggtccaccagctgagcaag

SEQ ID NO: 48479 - RNA, 30 nt, synthetic construct
  misc_feature 1..30: note = Galectin-3 (212-221)
  source 1..30: mol_type = other RNA
gccgtgaacgacgcccacctgctccagtac

SEQ ID NO: 48480 - RNA, 27 nt, synthetic construct
  misc_feature 1..27: note = CDC42 small effector protein 1 (56-64)
  source 1..27: mol_type = other RNA
gccgtgcaggagcagatgcgcagcaag

SEQ ID NO: 48481 - RNA, 30 nt, synthetic construct
  misc_feature 1..30: note = Transforming growth factor-beta-induced protein ig-h3 (50-59)
  source 1..30: mol_type = other RNA
gccgtgcagaaggtcatcggcaccaaccgc

SEQ ID NO: 48482 - RNA, 30 nt, synthetic construct
  misc_feature 1..30: note = 26S proteasome non-ATPase regulatory subunit 6 (44-53)
  source 1..30: mol_type = other RNA
gccgtgcgcgacaacaacatggccccctac

SEQ ID NO: 48483 - RNA, 27 nt, synthetic construct
  misc_feature 1..27: note = Amidophosphoribosyltransferase (196-204)
  source 1..27: mol_type = other RNA
gccgtgcgcgacccctacggcaaccgg

SEQ ID NO: 48484 - RNA, 30 nt, synthetic construct
  misc_feature 1..30: note = WD repeat-containing protein 63 (83-92)
  source 1..30: mol_type = other RNA
gccgtgagcgacttccaccccgtcaagaag

SEQ ID NO: 48485 - RNA, 27 nt, synthetic construct
  misc_feature 1..27: note = GRAM domain-containing protein 4 (475-483)
  source 1..27: mol_type = other RNA
gccgtgagcaccccctccacccagaag

SEQ ID NO: 48486 - RNA, 27 nt, synthetic construct
  misc_feature 1..27: note = Hyaluronidase-2 (16-24)
  source 1..27: mol_type = other RNA
gccgtgagctgggccatggagctgaag

SEQ ID NO: 48487 - RNA, 36 nt, synthetic construct
  misc_feature 1..36: note = 72 kDa type IV collagenase (603-614)
  source 1..36: mol_type = other RNA
gccgtggtcgacctgcagggcgggggccacagctac

SEQ ID NO: 48488 - RNA, 27 nt, synthetic construct
  misc_feature 1..27: note = Folliculin-interacting protein 1 (548-556)
  source 1..27: mol_type = other RNA
gccgtggtcgaccagatcacccgccac

SEQ ID NO: 48489 - RNA, 30 nt, synthetic construct
  misc_feature 1..30: note = Calcineurin subunit B type 1 (155-164)
  source 1..30: mol_type = other RNA
gccgtggtcggcgggctggacatccacaag

SEQ ID NO: 48490 - RNA, 33 nt, synthetic construct
  misc_feature 1..33: note = Calcineurin subunit B type 1 (155-165)
  source 1..33: mol_type = other RNA
gccgtggtcggcgggctggacatccacaagaag

SEQ ID NO: 48491 - RNA, 27 nt, synthetic construct
  misc_feature 1..27: note Dolichyl-diphosphooligosaccharide-proteinosyltransferase subunit STT3A (152-160)
  source 1..27: mol_type = other RNA
gccgtggtccccggctacatcagccgc

SEQ ID NO: 48492 - RNA, 33 nt, synthetic construct
  misc_feature 1..33: note = Nodal modulator 3 (366-376)
  source 1..33: mol_type = other RNA
gccgtggtcagcggcgagtcctgccccgggaag

SEQ ID NO: 48493 - RNA, 30 nt, synthetic construct
  misc_feature 1..30: note = Protein phosphatase 1B (57-66)
  source 1..30: mol_type = other RNA
gccgtgtacgacggccacgccgggagccgc

SEQ ID NO: 48494 - RNA, 33 nt, synthetic construct
  misc_feature 1..33: note = Biotinidase (61-71)
  source 1..33: mol_type = other RNA
gccgtgtacgagcaccccagcatcctgtccctc

SEQ ID NO: 48495 - RNA, 30 nt, synthetic construct
  misc_feature 1..30: note = Protein-lysine N-methyltransferase METTL10 (40-49)
  source 1..30: mol_type = other RNA
gccgtgtacgagcgcgagctgcagaccttc

SEQ ID NO: 48496 - RNA, 33 nt, synthetic construct
  misc_feature 1..33: note = Carbonic anhydrase 14 (307-317)
  source 1..33: mol_type = other RNA
gccgtgtacttcatcgcccgcaagatccggaag

SEQ ID NO: 48497 - RNA, 27 nt, synthetic construct
  misc_feature 1..27: note = TBC1 domain family member 16 (146-154)
  source 1..27: mol_type = other RNA
gccgtgtacaaccccgccgtcggctac

SEQ ID NO: 48498 - RNA, 27 nt, synthetic construct
  misc_feature 1..27: note = Tetraspanin-4 (42-50)
  source 1..27: mol_type = other RNA
gcctacaccgacaagatcgaccgctac

SEQ ID NO: 48499 - RNA, 33 nt, synthetic construct
  misc_feature 1..33: note = Protein HIRA (749-759)
  source 1..33: mol_type = other RNA
tgcgtggcctgcgagaagcgcatgctgagcgtc

SEQ ID NO: 48500 - RNA, 33 nt, synthetic construct
  misc_feature 1..33: note = Heterogeneous nuclear ribonucleoprotein A0 (150-160)
  source 1..33: mol_type = other RNA
gacgccgccgacaaggcggccgtggtcaagttc

SEQ ID NO: 48501 - RNA, 33 nt, synthetic construct
  misc_feature 1..33: note = Gelsolin (291-301)
  source 1..33: mol_type = other RNA
gacgccgccaaccgcaagctggcgaagctctac

SEQ ID NO: 48502 - RNA, 33 nt, synthetic construct
  misc_feature 1..33: note = Thimet oligopeptidase (401-411)
  source 1..33: mol_type = other RNA
gacgccgccagcggcgaggtggtcgggaagttc

SEQ ID NO: 48503 - RNA, 27 nt, synthetic construct
  misc_feature 1..27: note = WD repeat-containing protein 61 (85-93)
  source 1..27: mol_type = other RNA
gacgcccacatccgcctgtgggacctc

SEQ ID NO: 48504 - RNA, 27 nt, synthetic construct
  misc_feature 1..27: note = Delta-1-pyrroline-5-carboxylate synthase (648-656)
  source 1..27: mol_type = other RNA
gacgccatcgaccacatccacaagtac

SEQ ID NO: 48505 - RNA, 27 nt, synthetic construct
  misc_feature 1..27: note = Serine/arginine-rich splicing factor 9 (67-75)
  source 1..27: mol_type = other RNA
gacgccatctacggccgcaacgggtac

SEQ ID NO: 48506 - RNA, 33 nt, synthetic construct
  misc_feature 1..33: note = DNA-directed RNA polymerases I, II, and III subunit RPABC5 (33-43)
  source 1..33: mol_type = other RNA
gacgccctggacgccctcggcctgaagcgctac

SEQ ID NO: 48507 - RNA, 33 nt, synthetic construct
  misc_feature 1..33: note = Cell division cycle protein 16 homolog (140-150)
  source 1..33: mol_type = other RNA
gacgccctggacaaccgcaccctcgccacctac

SEQ ID NO: 48508 - RNA, 27 nt, synthetic construct
  misc_feature 1..27: note = Mitogen-activated protein kinase kinase kinase 1 (693-701)
  source 1..27: mol_type = other RNA
gacgccaacagccgcacctcccagctg

SEQ ID NO: 48509 - RNA, 27 nt, synthetic construct
  misc_feature 1..27: note = 28S ribosomal protein S22, mitochondrial (296-304)
  source 1..27: mol_type = other RNA
gacgccaccaacctggtgcagctctac

SEQ ID NO: 48510 - RNA, 30 nt, synthetic construct
  misc_feature 1..30: note = Kinase D-interacting substrate of 220 kDa (264-273)
  source 1..30: mol_type = other RNA
gacgcctaccgcgagtacatcgcccagatg

SEQ ID NO: 48511 - RNA, 33 nt, synthetic construct
  misc_feature 1..33: note = Actin, aortic smooth muscle (58-68)
  source 1..33: mol_type = other RNA
gacgaggcccagagcaagcgcggcatcctgacc

SEQ ID NO: 48512 - RNA, 27 nt, synthetic construct
  misc_feature 1..27: note = Remodeling and spacing factor 1 (1413-1421)
  source 1..27: mol_type = other RNA
gacgagctgctccgcgtgaccgacctg

SEQ ID NO: 48513 - RNA, 27 nt, synthetic construct
  misc_feature 1..27: note = 28S ribosomal protein S14, mitochondrial (49-57)
  source 1..27: mol_type = other RNA
gacgagcgcctgcggatcaacagcctc

SEQ ID NO: 48514 - RNA, 27 nt, synthetic construct
  misc_feature 1..27: note = Kinesin-like protein KIF15 (1289-1297)
  source 1..27: mol_type = other RNA
gacgaggtggagcgcacccagaccctg

SEQ ID NO: 48515 - RNA, 27 nt, synthetic construct
  misc_feature 1..27: note = CAP-Gly domain-containing linker protein 1 (519-527)
  source 1..27: mol_type = other RNA
gaccaccagcgcgagatcaccagcctg

SEQ ID NO: 48516 - RNA, 27 nt, synthetic construct
  misc_feature 1..27: note = Peroxisome proliferator-activated receptor gamma coactivator-related protein 1 (1261-1269)
  source 1..27: mol_type = other RNA
gaccactaccagcgccagcgggtgctg

SEQ ID NO: 48517 - RNA, 27 nt, synthetic construct
  misc_feature 1..27: note = Poly (ADP-ribose) polymerase 1 (993-1001)
  source 1..27: mol_type = other RNA
gacatcgcccaggtgaacctgaagtac

SEQ ID NO: 48518 - RNA, 30 nt, synthetic construct
  misc_feature 1..30: note = RILP-like protein 1 (29-38)
  source 1..30: mol_type = other RNA
gacatcgccagcctggtgggccacgagttc

SEQ ID NO: 48519 - RNA, 30 nt, synthetic construct
  misc_feature 1..30: note = Probable ATP-dependent RNA helicase DDX58 (896-905)
  source 1..30: mol_type = other RNA
gacatcgccaccggcgtgcagaccctgtac

SEQ ID NO: 48520 - RNA, 27 nt, synthetic construct
  misc_feature 1..27: note = RNA-binding protein 8A (72-80)
  source 1..27: mol_type = other RNA
gacatccacgacaagttcgccgagtac

SEQ ID NO: 48521 - RNA, 30 nt, synthetic construct
  misc_feature 1..30: note = Filamin-A (897-906)
  source 1..30: mol_type = other RNA
gacatcatcgaccaccacgacaacacctac

SEQ ID NO: 48522 - RNA, 36 nt, synthetic construct
  misc_feature 1..36: note = SURP and G-patch domain-containing protein 2 (265-276)
  source 1..36: mol_type = other RNA
gacatcatcgacaagagcgacgtgttctcccgcttc

SEQ ID NO: 48523 - RNA, 27 nt, synthetic construct
  misc_feature 1..27: note = Lymphocyte cytosolic protein 2 (500-508)
  source 1..27: mol_type = other RNA
gacatcatcgactacttccgcaagatg

SEQ ID NO: 48524 - RNA, 30 nt, synthetic construct
  misc_feature 1..30: note = Cytoplasmic dynein 2 heavy chain 1 (253-262)
  source 1..30: mol_type = other RNA
gacatcatcggcgggagcttcggccgcttc

SEQ ID NO: 48525 - RNA, 33 nt, synthetic construct
  misc_feature 1..33: note = Protein farnesyltransferase subunit beta (120-130)
  source 1..33: mol_type = other RNA
gacatcatcaaccgcgagaagctgctccagtac

SEQ ID NO: 48526 - RNA, 39 nt, synthetic construct
  misc_feature 1..39: note = Delta(24)-sterol reductase (252-264)
  source 1..39: mol_type = other RNA
gacatcatccccttcggcaacaacccgatcttccgctac

SEQ ID NO: 48527 - RNA, 39 nt, synthetic construct
  misc_feature 1..39: note = Putative annexin A2-like protein (158-170)
  source 1..39: mol_type = other RNA
gacatcatcagcgacacctccggcgacttccgcaagctg

SEQ ID NO: 48528 - RNA, 27 nt, synthetic construct
  misc_feature 1..27: note = Nucleophosmin (246-254)
  source 1..27: mol_type = other RNA
gacatcaaggccaagatgcaggccagc

SEQ ID NO: 48529 - RNA, 27 nt, synthetic construct
  misc_feature 1..27: note = Actin, alpha skeletal muscle (7-15)
  source 1..27: mol_type = other RNA
gacatcaaggagaagctgtgctacgtg

SEQ ID NO: 48530 - RNA, 27 nt, synthetic construct
  misc_feature 1..27: note = Ubiquitin fusion degradation protein 1 homolog (289-297)
  source 1..27: mol_type = other RNA
gacatcaagcgcggcatccccaactac

SEQ ID NO: 48531 - RNA, 30 nt, synthetic construct
  misc_feature 1..30: note = POZ-, AT hook-, and zinc finger-containing protein 1 (116-125)
  source 1..30: mol_type = other RNA
gacatcctggacttcgcctacaccagccgc

SEQ ID NO: 48532 - RNA, 27 nt, synthetic construct
  misc_feature 1..27: note = Pre-mRNA-processing-splicing factor 8 (298-306)
  source 1..27: mol_type = other RNA
gacatcaacaagatcatcatccgccag

SEQ ID NO: 48533 - RNA, 27 nt, synthetic construct
  misc_feature 1..27: note = Trimethyllysine dioxygenase, mitochondrial (352-360)
  source 1..27: mol_type = other RNA
gacatccccgagcgcatcctgacctac

SEQ ID NO: 48534 - RNA, 30 nt, synthetic construct
  misc_feature 1..30: note = 5'-nucleotidase domain-containing protein 1 (161-170)
  source 1..30: mol_type = other RNA
gacatcgtggccgccatccagcacaactac

SEQ ID NO: 48535 - RNA, 27 nt, synthetic construct
  misc_feature 1..27: note = Integrin-linked protein kinase (81-89)
  source 1..27: mol_type = other RNA
gacatcgtgcagaagctgctccagtac

SEQ ID NO: 48536 - RNA, 30 nt, synthetic construct
  misc_feature 1..30: note = Calcium/calmodulin-dependent protein kinase type 1 (83-92)
  source 1..30: mol_type = other RNA
gacatctacgagagcggcgggcacctgtac

SEQ ID NO: 48537 - RNA, 30 nt, synthetic construct
  misc_feature 1..30: note = Pantothenate kinase 2, mitochondrial (45-54)
  source 1..30: mol_type = other RNA
gacatctacggcggggactacgagcgcttc

SEQ ID NO: 48538 - RNA, 30 nt, synthetic construct
  misc_feature 1..30: note = F-box only protein 11 (39-48)
  source 1..30: mol_type = other RNA
gacatctacaaccacatgtacagcggcgtg

SEQ ID NO: 48539 - RNA, 27 nt, synthetic construct
  misc_feature 1..27: note = Translin-associated protein X (51-59)
  source 1..27: mol_type = other RNA
gacaagtacgagcgcctggtgaagctc

SEQ ID NO: 48540 - RNA, 27 nt, synthetic construct
  misc_feature 1..27: note = R3H and coiled-coil domain-containing protein 1 (315-323)
  source 1..27: mol_type = other RNA
gacctggcccacgtggtcgagatctac

SEQ ID NO: 48541 - RNA, 27 nt, synthetic construct
  misc_feature 1..27: note = CUGBP Elav-like family member 5 (41-49)
  source 1..27: mol_type = other RNA
gacctggacgccatcaagctcttcgtg

SEQ ID NO: 48542 - RNA, 36 nt, synthetic construct
  misc_feature 1..36: note = Lanosterol 14-alpha demethylase (473-484)
  source 1..36: mol_type = other RNA
gacctgatcgacggctacttccccaccgtgaactac

SEQ ID NO: 48543 - RNA, 27 nt, synthetic construct
  misc_feature 1..27: note = Heterogeneous nuclear ribonucleoprotein A0 (113-121)
  source 1..27: mol_type = other RNA
gacctgatcgagcacttcagccagttc

SEQ ID NO: 48544 - RNA, 27 nt, synthetic construct
  misc_feature 1..27: note = DNA polymerase zeta catalytic subunit (2457-2465)
  source 1..27: mol_type = other RNA
gacctgatcggcaagaccagcgagatg

SEQ ID NO: 48545 - RNA, 33 nt, synthetic construct
  misc_feature 1..33: note = Probable fibrosin-1 (455-465)
  source 1..33: mol_type = other RNA
gacctgatcggccaggacctcaacagccgctac

SEQ ID NO: 48546 - RNA, 36 nt, synthetic construct
  misc_feature 1..36: note = DNA repair endonuclease XPF (720-731)
  source 1..36: mol_type = other RNA
gacctgatcggcagcctcaacaacgggcgcctgtac

SEQ ID NO: 48547 - RNA, 27 nt, synthetic construct
  misc_feature 1..27: note = Alpha-catulin (622-630)
  source 1..27: mol_type = other RNA
gacctgatccaccagctcgaggtgttc

SEQ ID NO: 48548 - RNA, 27 nt, synthetic construct
  misc_feature 1..27: note = Spermidine synthase (215-223)
  source 1..27: mol_type = other RNA
gacctgatcaaggagatgcgccagttc

SEQ ID NO: 48549 - RNA, 27 nt, synthetic construct
  misc_feature 1..27: note = Reticulon-4 (494-502)
  source 1..27: mol_type = other RNA
gacctgatcaaggagaccaagctcagc

SEQ ID NO: 48550 - RNA, 33 nt, synthetic construct
  misc_feature 1..33: note = Rho guanine nucleotide exchange factor 1 (77-87)
  source 1..33: mol_type = other RNA
gacctgatcagcgaggacgtgcagcgccggttc

SEQ ID NO: 48551 - RNA, 30 nt, synthetic construct
  misc_feature 1..30: note = Microtubule-associated serine/threonine-protein kinase 4 (1003-1012)
  source 1..30: mol_type = other RNA
gacctgatcacccacatcaacggcgagccc

SEQ ID NO: 48552 - RNA, 27 nt, synthetic construct
  misc_feature 1..27: note = Calcium/calmodulin-dependent protein kinase kinase 2 (186-194)
  source 1..27: mol_type = other RNA
gacctgaaggacctcatcacccgcatg

SEQ ID NO: 48553 - RNA, 27 nt, synthetic construct
  misc_feature 1..27: note = Heterogeneous nuclear ribonucleoprotein A/B (85-93)
  source 1..27: mol_type = other RNA
gacctgaaggactacttcaccaagttc

SEQ ID NO: 48554 - RNA, 27 nt, synthetic construct
  misc_feature 1..27: note = Mediator of RNA polymerase II transcription subunit 8 (21-29)
  source 1..27: mol_type = other RNA
gacctgaagaacagcctcggctccttc

SEQ ID NO: 48555 - RNA, 27 nt, synthetic construct
  misc_feature 1..27: note = CASP8 and FADD-like apoptosis regulator (163-171)
  source 1..27: mol_type = other RNA
gacctgaagaccaagatccagaagtac

SEQ ID NO: 48556 - RNA, 33 nt, synthetic construct
  misc_feature 1..33: note = Glycogen (starch) synthase, muscle (593-603)
  source 1..33: mol_type = other RNA
gacctgctcgactggaagtacctgggccgctac

SEQ ID NO: 48557 - RNA, 30 nt, synthetic construct
  misc_feature 1..30: note = Fez family zinc finger protein 1 isoform 2 (119-128)
  source 1..30: mol_type = other RNA
gacctgctcaactgcgccctgagcctgaag

SEQ ID NO: 48558 - RNA, 27 nt, synthetic construct
  misc_feature 1..27: note = EPM2A-interacting protein 1 (205-213)
  source 1..27: mol_type = other RNA
gacctgctcaccatcatcaacctgacc

SEQ ID NO: 48559 - RNA, 30 nt, synthetic construct
  misc_feature 1..30: note = Sorting nexin-17 (151-160)
  source 1..30: mol_type = other RNA
gacctgcccgacgacctcatcggctacttc

SEQ ID NO: 48560 - RNA, 27 nt, synthetic construct
  misc_feature 1..27: note = UBAP1-MVB12-associated (UMA)-domain containing protein 1 isoform b (71-79)
  source 1..27: mol_type = other RNA
gacctgcccgaccacctcctgagctac

SEQ ID NO: 48561 - RNA, 30 nt, synthetic construct
  misc_feature 1..30: note = Rap guanine nucleotide exchange factor 2 (604-613)
  source 1..30: mol_type = other RNA
gacctgcccgaccaggtgctccgcgtcttc

SEQ ID NO: 48562 - RNA, 33 nt, synthetic construct
  misc_feature 1..33: note = Class E basic helix-loop-helix protein 40 (21-31)
  source 1..33: mol_type = other RNA
gacctgcccggcatgtacccggcccacatgtac

SEQ ID NO: 48563 - RNA, 27 nt, synthetic construct
  misc_feature 1..27: note = Coiled-coil domain-containing protein 22 (96-104)
  source 1..27: mol_type = other RNA
gacctgcgcgacctcctgctgttcctc

SEQ ID NO: 48564 - RNA, 33 nt, synthetic construct
  misc_feature 1..33: note = Transient receptor potential cation channel subfamily M member 1 (109-119)
  source 1..33: mol_type = other RNA
gacctggtgggcaaggacgtcacccgcgtgtac

SEQ ID NO: 48565 - RNA, 30 nt, synthetic construct
  misc_feature 1..30: note = Regulatory-associated protein of mTOR (292-301)
  source 1..30: mol_type = other RNA
gacctggtgaaggacaacggccacaagtac

SEQ ID NO: 48566 - RNA, 30 nt, synthetic construct
  misc_feature 1..30: note = Holliday junction recognition protein (177-186)
  source 1..30: mol_type = other RNA
gacctgtacgccggcatgctccacagcatg

SEQ ID NO: 48567 - RNA, 27 nt, synthetic construct
  misc_feature 1..27: note = Zinc finger protein 1 homolog (74-82)
  source 1..27: mol_type = other RNA
gacctgtacgagaagaccctcaagtac

SEQ ID NO: 48568 - RNA, 27 nt, synthetic construct
  misc_feature 1..27: note = Cytoplasmic FMR1-interacting protein 1 (703-711)
  source 1..27: mol_type = other RNA
gacctgtacaacgacagcgcccactac

SEQ ID NO: 48569 - RNA, 30 nt, synthetic construct
  misc_feature 1..30: note = DNA (cytosine-5)-methyltransferase 1 (862-871)
  source 1..30: mol_type = other RNA
gacctgtaccccgagcactaccgcaagtac

SEQ ID NO: 48570 - RNA, 27 nt, synthetic construct
  misc_feature 1..27: note = Phosphoglycerate kinase 1 (52-60)
  source 1..27: mol_type = other RNA
gacaacggcgccaagagcgtggtcctg

SEQ ID NO: 48571 - RNA, 27 nt, synthetic construct
  misc_feature 1..27: note = 60S ribosomal protein L23 (30-38)
  source 1..27: mol_type = other RNA
gacaacaccggcgccaagaacctgtac

SEQ ID NO: 48572 - RNA, 27 nt, synthetic construct
  misc_feature 1..27: note = Nuclear pore complex protein Nup88 (194-202)
  source 1..27: mol_type = other RNA
gacaacgtgatccgcatctacagcctg

SEQ ID NO: 48573 - RNA, 36 nt, synthetic construct
  misc_feature 1..36: note = KAT8 regulatory NSL complex subunit 2 (176-187)
  source 1..36: mol_type = other RNA
gaccaggaggaccccctgaagcacgccggcgtgtac

SEQ ID NO: 48574 - RNA, 36 nt, synthetic construct
  misc_feature 1..36: note = EH domain-containing protein 1 (222-233)
  source 1..36: mol_type = other RNA
gaccagatcgagacccagcagctgatgcgcgtgtac

SEQ ID NO: 48575 - RNA, 39 nt, synthetic construct
  misc_feature 1..39: note = Eukaryotic translation initiation factor 3 subunit C-like protein (888-900)
  source 1..39: mol_type = other RNA
gaccagaaggacggctaccgcaagaacgaggggtacatg

SEQ ID NO: 48576 - RNA, 27 nt, synthetic construct
  misc_feature 1..27: note = Isoleucine-tRNA ligase, cytoplasmic (424-432)
  source 1..27: mol_type = other RNA
gaccagctgctccgcaacaacgacctg

SEQ ID NO: 48577 - RNA, 27 nt, synthetic construct
  misc_feature 1..27: note = V-type proton ATPase subunit H (445-453)
  source 1..27: mol_type = other RNA
gaccagcaggtgcgctacaacgccctg

SEQ ID NO: 48578 - RNA, 27 nt, synthetic construct
  misc_feature 1..27: note = Neuroblastoma-amplified sequence (1664-1672)
  source 1..27: mol_type = other RNA
gaccagtacaagcgcgagaccatcctg

SEQ ID NO: 48579 - RNA, 30 nt, synthetic construct
  misc_feature 1..30: note = GTPase KRas (69-78)
  source 1..30: mol_type = other RNA
gaccagtacatgcgcaccggcgaggggttc

SEQ ID NO: 48580 - RNA, 27 nt, synthetic construct
  misc_feature 1..27: note = Vigilin (368-376)
  source 1..27: mol_type = other RNA
gaccgcgccctgcggagcttcaagctc

SEQ ID NO: 48581 - RNA, 27 nt, synthetic construct
  misc_feature 1..27: note = Tyrosine-protein kinase BAZ1B (189-197)
  source 1..27: mol_type = other RNA
gaccgcgaggacaagcggagcgccctg

SEQ ID NO: 48582 - RNA, 27 nt, synthetic construct
  misc_feature 1..27: note = Clathrin heavy chain 1 (779-787)
  source 1..27: mol_type = other RNA
gaccgcttcgacttcgtgcacgacctg

SEQ ID NO: 48583 - RNA, 27 nt, synthetic construct
  misc_feature 1..27: note = KxDL motif-containing protein 1 (43-51)
  source 1..27: mol_type = other RNA
gaccgcttcgagaagaccaacgagatg

SEQ ID NO: 48584 - RNA, 27 nt, synthetic construct
  misc_feature 1..27: note = PAB-dependent poly(A)-specific ribonuclease subunit PAN2 (264-272)
  source 1..27: mol_type = other RNA
gaccgcttcctgaaggtgtacgacctc

SEQ ID NO: 48585 - RNA, 27 nt, synthetic construct
  misc_feature 1..27: note = Monofunctional C1-tetrahydrofolate synthase, mitochondrial (503-511)
  source 1..27: mol_type = other RNA
gaccgcttcctgcggaagatcaccatc

SEQ ID NO: 48586 - RNA, 27 nt, synthetic construct
  misc_feature 1..27: note = Cyclin-G1 (81-89)
  source 1..27: mol_type = other RNA
gaccgcttcctgagcaagatgaaggtg

SEQ ID NO: 48587 - RNA, 27 nt, synthetic construct
  misc_feature 1..27: note = Lanosterol synthase (287-295)
  source 1..27: mol_type = other RNA
gaccgcttcaccaagagcatctccatc

SEQ ID NO: 48588 - RNA, 27 nt, synthetic construct
  misc_feature 1..27: note = Vacuolar protein sorting-associated protein 51 homolog (86-94)
  source 1..27: mol_type = other RNA
gaccgccacgagcggatcaccaagctg

SEQ ID NO: 48589 - RNA, 27 nt, synthetic construct
  misc_feature 1..27: note = Endoplasmin (716-724)
  source 1..27: mol_type = other RNA
gaccgcatcgagcggatgctgcgcctc

SEQ ID NO: 48590 - RNA, 27 nt, synthetic construct
  misc_feature 1..27: note = Transcription elongation factor SPT5 (314-322)
  source 1..27: mol_type = other RNA
gaccgcatcaaggcccggatgagcctg

SEQ ID NO: 48591 - RNA, 27 nt, synthetic construct
  misc_feature 1..27: note = Regulator of nonsense transcripts 3B (254-262)
  source 1..27: mol_type = other RNA
gaccgcatccccgagcgggacaagctg

SEQ ID NO: 48592 - RNA, 30 nt, synthetic construct
  misc_feature 1..30: note = Coatomer subunit epsilon (160-169)
  source 1..30: mol_type = other RNA
gaccgcctggacctcgcccggaaggagctg

SEQ ID NO: 48593 - RNA, 27 nt, synthetic construct
  misc_feature 1..27: note = DNA-dependent protein kinase catalytic subunit (2537-2545)
  source 1..27: mol_type = other RNA
gaccgcctgctcgccctgaacagcctg

SEQ ID NO: 48594 - RNA, 27 nt, synthetic construct
  misc_feature 1..27: note = DNA replication complex GINS protein PSF1 (82-90)
  source 1..27: mol_type = other RNA
gaccgcctgctccggatccgcgccctg

SEQ ID NO: 48595 - RNA, 27 nt, synthetic construct
  misc_feature 1..27: note = Telomerase-binding protein EST1A (484-492)
  source 1..27: mol_type = other RNA
gaccgcaacctgcgggtgaaggccctc

SEQ ID NO: 48596 - RNA, 27 nt, synthetic construct
  misc_feature 1..27: note = SUMO-activating enzyme subunit 1 (20-28)
  source 1..27: mol_type = other RNA
gaccgccagatccggctgtggggcctc

SEQ ID NO: 48597 - RNA, 27 nt, synthetic construct
  misc_feature 1..27: note = Phenylalanine-tRNA ligase alpha subunit (353-361)
  source 1..27: mol_type = other RNA
gaccgcgtgttccggaacgagaccctg

SEQ ID NO: 48598 - RNA, 27 nt, synthetic construct
  misc_feature 1..27: note = T-complex protein 1 subunit zeta (127-135)
  source 1..27: mol_type = other RNA
gaccgcgtgaagaagatcatcgagctg

SEQ ID NO: 48599 - RNA, 27 nt, synthetic construct
  misc_feature 1..27: note = 39S ribosomal protein L20, mitochondrial (16-24)
  source 1..27: mol_type = other RNA
gaccgctacttccggatccaggaggtg

SEQ ID NO: 48600 - RNA, 27 nt, synthetic construct
  misc_feature 1..27: note = Spectrin alpha chain, non-erythrocytic 1 (24-32)
  source 1..27: mol_type = other RNA
gaccgctaccaccggttcaaggagctg

SEQ ID NO: 48601 - RNA, 27 nt, synthetic construct
  misc_feature 1..27: note = Small nuclear ribonucleoprotein Sm D2 (93-101)
  source 1..27: mol_type = other RNA
gaccgctacatcagcaagatgttcctg

SEQ ID NO: 48602 - RNA, 27 nt, synthetic construct
  misc_feature 1..27: note = Nuclear factor of activated T-cells, cytoplasmic 3 (487-495)
  source 1..27: mol_type = other RNA
gaccgctacctgcggccccacgccttc

SEQ ID NO: 48603 - RNA, 27 nt, synthetic construct
  misc_feature 1..27: note = 60S ribosomal protein L27 (47-55)
  source 1..27: mol_type = other RNA
gaccgctacccccggaaggtgaccgcc

SEQ ID NO: 48604 - RNA, 27 nt, synthetic construct
  misc_feature 1..27: note = Ubiquitin carboxyl-terminal hydrolase 45 (410-418)
  source 1..27: mol_type = other RNA
gaccgctacagcggcaacgtgaccatc

SEQ ID NO: 48605 - RNA, 27 nt, synthetic construct
  misc_feature 1..27: note = Major prion protein (147-155)
  source 1..27: mol_type = other RNA
gaccgctactaccgggagaacatgcac

SEQ ID NO: 48606 - RNA, 30 nt, synthetic construct
  misc_feature 1..30: note = Nucleolar protein 4-like (309-318)
  source 1..30: mol_type = other RNA
gacagcgccgccatcacccactccacctac

SEQ ID NO: 48607 - RNA, 30 nt, synthetic construct
  misc_feature 1..30: note = Splicing factor U2AF 65 kDa subunit (293-302)
  source 1..30: mol_type = other RNA
gacagcgccaccggcctgtccaaggggtac

SEQ ID NO: 48608 - RNA, 30 nt, synthetic construct
  misc_feature 1..30: note = Eukaryotic translation initiation factor 4 gamma 3 (1501-1510)
  source 1..30: mol_type = other RNA
gacagcgacaccgagaaggagctgcaggcc

SEQ ID NO: 48609 - RNA, 30 nt, synthetic construct
  misc_feature 1..30: note = Gamma-glutamylaminecyclotransferase (138-147)
  source 1..30: mol_type = other RNA
gacagcgagggcccccacgggctgcgctac

SEQ ID NO: 48610 - RNA, 36 nt, synthetic construct
  misc_feature 1..36: note = Bromodomain and WD repeat-containing protein 1 (1792-1803)
  source 1..36: mol_type = other RNA
gacagcgagcccggccgctccgggggccggaagtac

SEQ ID NO: 48611 - RNA, 30 nt, synthetic construct
  misc_feature 1..30: note = RNA-binding protein 39 (262-271)
  source 1..30: mol_type = other RNA
gacagcgagaccggccgctccaaggggtac

SEQ ID NO: 48612 - RNA, 27 nt, synthetic construct
  misc_feature 1..27: note = Bcl-2-like protein 12 (183-191)
  source 1..27: mol_type = other RNA
gacagcttcgcccgcctggtggagctc

SEQ ID NO: 48613 - RNA, 27 nt, synthetic construct
  misc_feature 1..27: note = Melanophilin (443-451)
  source 1..27: mol_type = other RNA
gacagcttcgaccgcaagtccgtgtac

SEQ ID NO: 48614 - RNA, 27 nt, synthetic construct
  misc_feature 1..27: note = TBC1 domain family member 4 (590-598)
  source 1..27: mol_type = other RNA
gacagcttcgagcgctccaacagcctg

SEQ ID NO: 48615 - RNA, 30 nt, synthetic construct
  misc_feature 1..30: note = Signal transducer and activator of transcription 1-alpha/beta (24-33)
  source 1..30: mol_type = other RNA
gacagcttccccatggagatccgccagtac

SEQ ID NO: 48616 - RNA, 33 nt, synthetic construct
  misc_feature 1..33: note = Signal transducer and activator of transcription 1-alpha/beta (24-34)
  source 1..33: mol_type = other RNA
gacagcttccccatggagatccgccagtacctg

SEQ ID NO: 48617 - RNA, 30 nt, synthetic construct
  misc_feature 1..30: note = Signal transducer and activator of transcription 3 (24-33)
  source 1..30: mol_type = other RNA
gacagcttccccatggagctgcgccagttc

SEQ ID NO: 48618 - RNA, 36 nt, synthetic construct
  misc_feature 1..36: note = Syndecan-3 (294-305)
  source 1..36: mol_type = other RNA
gacagcggctccagcgccgcccagctgccccagaag

SEQ ID NO: 48619 - RNA, 30 nt, synthetic construct
  misc_feature 1..30: note = Protein MON2 homolog (1214-1223)
  source 1..30: mol_type = other RNA
gacagcatcggcgagaagctggggcgctac

SEQ ID NO: 48620 - RNA, 27 nt, synthetic construct
  misc_feature 1..27: note = Disco-interacting protein 2 homolog A (882-890)
  source 1..27: mol_type = other RNA
gacagcatccaccaggtgggcgtctac

SEQ ID NO: 48621 - RNA, 27 nt, synthetic construct
  misc_feature 1..27: note = ATP-dependent RNA helicase DDX54 (547-555)
  source 1..27: mol_type = other RNA
gacagcatcaagaactaccgctcccgg

SEQ ID NO: 48622 - RNA, 27 nt, synthetic construct
  misc_feature 1..27: note = Peptidyl-prolyl cis-trans isomerase FKBP9 (369-377)
  source 1..27: mol_type = other RNA
gacagcatctccatcaccagccactac

SEQ ID NO: 48623 - RNA, 27 nt, synthetic construct
  misc_feature 1..27: note = Methyltransferase-like protein 13 (209-217)
  source 1..27: mol_type = other RNA
gacagcaaggaccccaccctgggcatg

SEQ ID NO: 48624 - RNA, 27 nt, synthetic construct
  misc_feature 1..27: note = Protein AHNAK2 (672-680)
  source 1..27: mol_type = other RNA
gacagcaagttcaagatgcccaagttc

SEQ ID NO: 48625 - RNA, 30 nt, synthetic construct
  misc_feature 1..30: note = Arf-GAP with SH3 domain, ANK repeat and PH domain-containing protein 2 (284-293)
  source 1..30: mol_type = other RNA
gacagccagatccgccagtccaccgcctac

SEQ ID NO: 48626 - RNA, 27 nt, synthetic construct
  misc_feature 1..27: note = RNA-binding protein 3 (119-127)
  source 1..27: mol_type = other RNA
gacagccgccccggcgggtacggctac

SEQ ID NO: 48627 - RNA, 27 nt, synthetic construct
  misc_feature 1..27: note = T-complex protein 1 subunit alpha (459-467)
  source 1..27: mol_type = other RNA
gacagcaccgacctggtggccaagctc

SEQ ID NO: 48628 - RNA, 27 nt, synthetic construct
  misc_feature 1..27: note = Signal-induced proliferation-associated 1-like protein 2 (438-446)
  source 1..27: mol_type = other RNA
gacagcaccggcacccactccctgtac

SEQ ID NO: 48629 - RNA, 33 nt, synthetic construct
  misc_feature 1..33: note = Heterogeneous nuclear ribonucleoprotein A1-like 2 (4-14)
  source 1..33: mol_type = other RNA
gacagcgtggacaagatcgtcatccagaagtac

SEQ ID NO: 48630 - RNA, 33 nt, synthetic construct
  misc_feature 1..33: note = Mitochondrial import inner membrane translocase subunit TIM50 (212-222)
  source 1..33: mol_type = other RNA
gacagcgtggacccccacggcttcatctcctac

SEQ ID NO: 48631 - RNA, 27 nt, synthetic construct
  misc_feature 1..27: note = Basement membrane-specific heparan sulfate proteoglycan core protein (608-616)
  source 1..27: mol_type = other RNA
gacagctacggcgggtccctgcgctac

SEQ ID NO: 48632 - RNA, 27 nt, synthetic construct
  misc_feature 1..27: note = Transmembrane and TPR repeat-containing protein 1 (529-537)
  source 1..27: mol_type = other RNA
gacaccgccgaggccaagatgtactac

SEQ ID NO: 48633 - RNA, 27 nt, synthetic construct
  misc_feature 1..27: note = Methylthioribose-1-phosphate isomerase (208-216)
  source 1..27: mol_type = other RNA
gacaccgccaacaaggtgggcacctac

SEQ ID NO: 48634 - RNA, 30 nt, synthetic construct
  misc_feature 1..30: note = Apoptogenic protein 1, mitochondrial (36-45)
  source 1..30: mol_type = other RNA
gacaccgcccccagcggcgtgtcccgcttc

SEQ ID NO: 48635 - RNA, 39 nt, synthetic construct
  misc_feature 1..39: note = Solute carrier family 35 member B1 (75-87)
  source 1..39: mol_type = other RNA
gacaccgcccgcgtggaccggacccgcagctggctgtac

SEQ ID NO: 48636 - RNA, 42 nt, synthetic construct
  misc_feature 1..42: note = Heterogeneous nuclear ribonucleoproteins A2/B1 (110-123)
  source 1..42: mol_type = other RNA
gacaccgaggagcaccacctgcgcgactacttcgaggagtac

SEQ ID NO: 48637 - RNA, 42 nt, synthetic construct
  misc_feature 1..42: note = Heat shock 70 kDa protein 1-like (48-61)
  source 1..42: mol_type = other RNA
gacaccgagcgcctgatcggcgacgccgccaagaaccaggtg

SEQ ID NO: 48638 - RNA, 27 nt, synthetic construct
  misc_feature 1..27: note = N-acetylglucosamine-1-phosphotransferase subunits alpha/beta (929-937)
  source 1..27: mol_type = other RNA
gacaccttcgccgacagcctgcgctac

SEQ ID NO: 48639 - RNA, 27 nt, synthetic construct
  misc_feature 1..27: note = AT-rich interactive domain-containing protein 5B (227-235)
  source 1..27: mol_type = other RNA
gacaccttcgaccaccccaccctgatc

SEQ ID NO: 48640 - RNA, 33 nt, synthetic construct
  misc_feature 1..33: note = Transcription factor SOX-6 (351-361)
  source 1..33: mol_type = other RNA
gacaccttcgagcacggcgggggccacagctac

SEQ ID NO: 48641 - RNA, 27 nt, synthetic construct
  misc_feature 1..27: note = Triple functional domain protein (2621-2629)
  source 1..27: mol_type = other RNA
gacaccttcgagacccccacgagctac

SEQ ID NO: 48642 - RNA, 33 nt, synthetic construct
  misc_feature 1..33: note Dolichyl-diphosphooligosaccharide-proteinosyltransferase subunit 1 (402-412)
  source 1..33: mol_type = other RNA
gacaccttcggccgccccgtgatcgtcgcctac

SEQ ID NO: 48643 - RNA, 33 nt, synthetic construct
  misc_feature 1..33: note = CTTNBP2 N-terminal-like protein (57-67)
  source 1..33: mol_type = other RNA
gacaccttcatcgaggagcgctacggcaagtac

SEQ ID NO: 48644 - RNA, 30 nt, synthetic construct
  misc_feature 1..30: note = UTP-glucose-1-phosphate uridylyltransferase (237-246)
  source 1..30: mol_type = other RNA
gacaccttcatcggcgaggggaaggagtac

SEQ ID NO: 48645 - RNA, 39 nt, synthetic construct
  misc_feature 1..39: note = Interferon-related developmental regulator 1 (375-387)
  source 1..39: mol_type = other RNA
gacaccttcaaggaggtgctgggcagcgggatgcagtac

SEQ ID NO: 48646 - RNA, 30 nt, synthetic construct
  misc_feature 1..30: note = H2.0-like homeobox protein (254-263)
  source 1..30: mol_type = other RNA
gacaccttccccggcccgtacgccgtgctg

SEQ ID NO: 48647 - RNA, 27 nt, synthetic construct
  misc_feature 1..27: note = G-protein coupled receptor 126 (533-541)
  source 1..27: mol_type = other RNA
gacaccttcagccactccaccaagttc

SEQ ID NO: 48648 - RNA, 27 nt, synthetic construct
  misc_feature 1..27: note = Rhophilin-2 (261-269)
  source 1..27: mol_type = other RNA
gacaccttcacccacacgcccagctac

SEQ ID NO: 48649 - RNA, 27 nt, synthetic construct
  misc_feature 1..27: note = 40S ribosomal protein S14 (39-47)
  source 1..27: mol_type = other RNA
gacaccttcgtgcacgtcaccgacctg

SEQ ID NO: 48650 - RNA, 30 nt, synthetic construct
  misc_feature 1..30: note = Lysosomal glucocerebrosidase precursor (428-437)
  source 1..30: mol_type = other RNA
gacaccttctacaagcagcccatgttctac

SEQ ID NO: 48651 - RNA, 27 nt, synthetic construct
  misc_feature 1..27: note = Zinc finger CCCH-type with G patch domain-containing protein (515-523)
  source 1..27: mol_type = other RNA
gacacccacaagaagatgaccgagttc

SEQ ID NO: 48652 - RNA, 27 nt, synthetic construct
  misc_feature 1..27: note = Utrophin (3189-3197)
  source 1..27: mol_type = other RNA
gacacccacagccgcatcgagcagtac

SEQ ID NO: 48653 - RNA, 30 nt, synthetic construct
  misc_feature 1..30: note = C2 domain-containing protein 5 (611-620)
  source 1..30: mol_type = other RNA
gacaccatcgccaagaacaaggagctgtac

SEQ ID NO: 48654 - RNA, 36 nt, synthetic construct
  misc_feature 1..36: note = Polyadenylate-binding protein 4 (303-314)
  source 1..36: mol_type = other RNA
gacaccatcgacgacgagaagctgcgcaaggagttc

SEQ ID NO: 48655 - RNA, 33 nt, synthetic construct
  misc_feature 1..33: note = Plastin-3 (116-126)
  source 1..33: mol_type = other RNA
gacaccatcgacgagcgcgccatcaacaagaag

SEQ ID NO: 48656 - RNA, 27 nt, synthetic construct
  misc_feature 1..27: note = Kin of IRRE-like protein 1 (277-285)
  source 1..27: mol_type = other RNA
gacaccatcgacacccgcgaggagtac

SEQ ID NO: 48657 - RNA, 42 nt, synthetic construct
  misc_feature 1..42: note = Small ubiquitin-related modifier 2 isoform b precursor (58-71)
  source 1..42: mol_type = other RNA
gacaccatcgacgtgttccagcagcagaccggcggggtctac

SEQ ID NO: 48658 - RNA, 36 nt, synthetic construct
  misc_feature 1..36: note = SUMO-activating enzyme subunit 2 (50-61)
  source 1..36: mol_type = other RNA
gacaccatcgacgtgagcaacctgaaccgccagttc

SEQ ID NO: 48659 - RNA, 27 nt, synthetic construct
  misc_feature 1..27: note = Tryptophan-tRNA ligase, cytoplasmic (382-390)
  source 1..27: mol_type = other RNA
gacaccatcgaggagcaccgccagttc

SEQ ID NO: 48660 - RNA, 39 nt, synthetic construct
  misc_feature 1..39: note = Heterogeneous nuclear ribonucleoproteins A2/B1 (127-139)
  source 1..39: mol_type = other RNA
gacaccatcgagatcatcaccgaccgccagagcggcaag

SEQ ID NO: 48661 - RNA, 27 nt, synthetic construct
  misc_feature 1..27: note = Unconventional myosin-Id (61-69)
  source 1..27: mol_type = other RNA
gacaccatcgagcagtacaagggccgc

SEQ ID NO: 48662 - RNA, 36 nt, synthetic construct
  misc_feature 1..36: note = Ubiquitin-like protein 5 (22-33)
  source 1..36: mol_type = other RNA
gacaccatcggcgacctgaagaagctcatcgccgcc

SEQ ID NO: 48663 - RNA, 30 nt, synthetic construct
  misc_feature 1..30: note = Trifunctional purine biosynthetic protein adenosine-3 (45-54)
  source 1..30: mol_type = other RNA
gacaccatcggccaggacctggtggccatg

SEQ ID NO: 48664 - RNA, 27 nt, synthetic construct
  misc_feature 1..27: note = Cytoplasmic polyadenylation element-binding protein 4 (17-25)
  source 1..27: mol_type = other RNA
gacaccatcaagggccgcctgaactac

SEQ ID NO: 48665 - RNA, 27 nt, synthetic construct
  misc_feature 1..27: note = Mitochondrial dynamics protein MID51 (222-230)
  source 1..27: mol_type = other RNA
gacaccatcatgaacgtgcccggcttc

SEQ ID NO: 48666 - RNA, 33 nt, synthetic construct
  misc_feature 1..33: note = UPF0489 protein C5orf22 (148-158)
  source 1..33: mol_type = other RNA
gacaccatccaggagaaggtgctgaacatgctc

SEQ ID NO: 48667 - RNA, 30 nt, synthetic construct
  misc_feature 1..30: note = Coiled-coil and C2 domain-containing protein 2A (426-435)
  source 1..30: mol_type = other RNA
gacaccatccagaagaccatcaacgagtac

SEQ ID NO: 48668 - RNA, 27 nt, synthetic construct
  misc_feature 1..27: note = Interferon-induced helicase C domain-containing protein 1 (615-623)
  source 1..27: mol_type = other RNA
gacaccatccgcatgatcgacgcctac

SEQ ID NO: 48669 - RNA, 27 nt, synthetic construct
  misc_feature 1..27: note = Zinc finger protein 143 (92-100)
  source 1..27: mol_type = other RNA
gacaccatcagcgccctggagcagtac

SEQ ID NO: 48670 - RNA, 30 nt, synthetic construct
  misc_feature 1..30: note = Gamma-interferon-inducible protein 16 (447-456)
  source 1..30: mol_type = other RNA
gacaccatcagcaagatgaacgacttcatg

SEQ ID NO: 48671 - RNA, 36 nt, synthetic construct
  misc_feature 1..36: note = Gamma-interferon-inducible protein 16 (447-458)
  source 1..36: mol_type = other RNA
gacaccatcagcaagatgaacgacttcatgcgcatg

SEQ ID NO: 48672 - RNA, 27 nt, synthetic construct
  misc_feature 1..27: note = Sphingolipid delta(4)-desaturase DES1 (268-276)
  source 1..27: mol_type = other RNA
gacaccatcagcccctactcccgcatg

SEQ ID NO: 48673 - RNA, 33 nt, synthetic construct
  misc_feature 1..33: note = Pre-mRNA-splicing factor RBM22 (241-251)
  source 1..33: mol_type = other RNA
gacaccatcaccgagacggacctgcgcaaccac

SEQ ID NO: 48674 - RNA, 36 nt, synthetic construct
  misc_feature 1..36: note = Pre-mRNA-splicing factor RBM22 (241-252)
  source 1..36: mol_type = other RNA
gacaccatcaccgagacggacctgcgcaaccacttc

SEQ ID NO: 48675 - RNA, 39 nt, synthetic construct
  misc_feature 1..39: note = Pre-mRNA-splicing factor RBM22 (241-253)
  source 1..39: mol_type = other RNA
gacaccatcaccgagacggacctgcgcaaccacttctac

SEQ ID NO: 48676 - RNA, 33 nt, synthetic construct
  misc_feature 1..33: note = Intermediate filament family orphan 1 (232-242)
  source 1..33: mol_type = other RNA
gacaccatcacccccgagatccgcgccctgtac

SEQ ID NO: 48677 - RNA, 30 nt, synthetic construct
  misc_feature 1..30: note = Condensin complex subunit 1 (61-70)
  source 1..30: mol_type = other RNA
gacaccatctacagcatcctgcaccacttc

SEQ ID NO: 48678 - RNA, 27 nt, synthetic construct
  misc_feature 1..27: note = Protein SCO1 homolog, mitochondrial (97-105)
  source 1..27: mol_type = other RNA
gacaccaaggaggccatcgccaactac

SEQ ID NO: 48679 - RNA, 27 nt, synthetic construct
  misc_feature 1..27: note = Amyloid beta A4 protein (64-72)
  source 1..27: mol_type = other RNA
gacaccaaggagggcatcctgcagtac

SEQ ID NO: 48680 - RNA, 27 nt, synthetic construct
  misc_feature 1..27: note = Intraflagellar transport protein 74 homolog (328-336)
  source 1..27: mol_type = other RNA
gacaccaaggagaagatcaaccagttc

SEQ ID NO: 48681 - RNA, 27 nt, synthetic construct
  misc_feature 1..27: note = Charged multivesicular body protein 5 (21-29)
  source 1..27: mol_type = other RNA
gacaccaagaccacggtggacgccatg

SEQ ID NO: 48682 - RNA, 27 nt, synthetic construct
  misc_feature 1..27: note = DNA-directed RNA polymerase II subunit RPB2 (738-746)
  source 1..27: mol_type = other RNA
gacaccctggcccacgtgctctactac

SEQ ID NO: 48683 - RNA, 27 nt, synthetic construct
  misc_feature 1..27: note = Presenilin-2 (439-447)
  source 1..27: mol_type = other RNA
gacaccctggccagccaccagctctac

SEQ ID NO: 48684 - RNA, 27 nt, synthetic construct
  misc_feature 1..27: note = Acidic fibroblast growth factor intracellular-binding protein (55-63)
  source 1..27: mol_type = other RNA
gacaccatggaccactaccgcaccttc

SEQ ID NO: 48685 - RNA, 27 nt, synthetic construct
  misc_feature 1..27: note = Parafibromin (134-142)
  source 1..27: mol_type = other RNA
gacaccatgggcacctaccacgggatg

SEQ ID NO: 48686 - RNA, 30 nt, synthetic construct
  misc_feature 1..30: note = Dual specificity protein phosphatase 10 (341-350)
  source 1..30: mol_type = other RNA
gacaccatgcagcgcctgaacatcggctac

SEQ ID NO: 48687 - RNA, 27 nt, synthetic construct
  misc_feature 1..27: note = FRAS1-related extracellular matrix protein 2 (1562-1570)
  source 1..27: mol_type = other RNA
gacacccccgacaagctgctcaagttc

SEQ ID NO: 48688 - RNA, 27 nt, synthetic construct
  misc_feature 1..27: note = Translin-associated protein X (212-220)
  source 1..27: mol_type = other RNA
gacacccccttcgaggtgagccagttc

SEQ ID NO: 48689 - RNA, 30 nt, synthetic construct
  misc_feature 1..30: note = Translation factor GUF1, mitochondrial (140-149)
  source 1..30: mol_type = other RNA
gacacccccggccacgtggacttcagctac

SEQ ID NO: 48690 - RNA, 27 nt, synthetic construct
  misc_feature 1..27: note = Protein KIAA0100 (293-301)
  source 1..27: mol_type = other RNA
gacacccccccgttcgccctgggcttc

SEQ ID NO: 48691 - RNA, 27 nt, synthetic construct
  misc_feature 1..27: note = Nuclear receptor subfamily 4 group A member 2 (395-403)
  source 1..27: mol_type = other RNA
gacacccagcacatccagcagttctac

SEQ ID NO: 48692 - RNA, 27 nt, synthetic construct
  misc_feature 1..27: note = Nuclear protein localization protein 4 homolog (319-327)
  source 1..27: mol_type = other RNA
gacacccgcaagggcaccgtgcggtac

SEQ ID NO: 48693 - RNA, 27 nt, synthetic construct
  misc_feature 1..27: note = Nuclear pore complex protein Nup205 (1075-1083)
  source 1..27: mol_type = other RNA
gacaccagcggccccaccatgcgctac

SEQ ID NO: 48694 - RNA, 27 nt, synthetic construct
  misc_feature 1..27: note = Disintegrin and metalloproteinase domain-containing protein 10 (98-106)
  source 1..27: mol_type = other RNA
gacaccagccacatctacaccggccac

SEQ ID NO: 48695 - RNA, 30 nt, synthetic construct
  misc_feature 1..30: note = Protein YIF1B (38-47)
  source 1..30: mol_type = other RNA
gacaccagctccgcccagagccgcggctac

SEQ ID NO: 48696 - RNA, 27 nt, synthetic construct
  misc_feature 1..27: note = NHS-like protein 1 (768-776)
  source 1..27: mol_type = other RNA
gacaccagctccgtgaagagcgagtac

SEQ ID NO: 48697 - RNA, 27 nt, synthetic construct
  misc_feature 1..27: note = Peptidyl-glycine alpha-amidating monooxygenase (99-107)
  source 1..27: mol_type = other RNA
gacaccgtgcaccacatgctgctcttc

SEQ ID NO: 48698 - RNA, 27 nt, synthetic construct
  misc_feature 1..27: note = E3 SUMO-protein ligase RanBP2 (3197-3205)
  source 1..27: mol_type = other RNA
gacaccgtgaagaagatcgagagcttc

SEQ ID NO: 48699 - RNA, 27 nt, synthetic construct
  misc_feature 1..27: note = Nodal modulator 3 (6-14)
  source 1..27: mol_type = other RNA
gacaccgtgaagcagatgaacaagtac

SEQ ID NO: 48700 - RNA, 27 nt, synthetic construct
  misc_feature 1..27: note = Rho GTPase-activating protein 31 (892-900)
  source 1..27: mol_type = other RNA
gacaccgtgaccgacatcgcccagcac

SEQ ID NO: 48701 - RNA, 33 nt, synthetic construct
  misc_feature 1..33: note = E3 ubiquitin-protein ligase MYLIP (278-288)
  source 1..33: mol_type = other RNA
gacaccgtgaccagcgccgtcatgatgcagtac

SEQ ID NO: 48702 - RNA, 33 nt, synthetic construct
  misc_feature 1..33: note = Eukaryotic translation initiation factor 4H (5-15)
  source 1..33: mol_type = other RNA
gacacctacgacgaccgcgcctacagctccttc

SEQ ID NO: 48703 - RNA, 33 nt, synthetic construct
  misc_feature 1..33: note = Vacuolar fusion protein CCZ1 homolog (308-318)
  source 1..33: mol_type = other RNA
gacacctacgaggagctgcacctcatcgtgtac

SEQ ID NO: 48704 - RNA, 36 nt, synthetic construct
  misc_feature 1..36: note = Ethanolamine-phosphate cytidylyltransferase (124-135)
  source 1..36: mol_type = other RNA
gacacctacgaggaggtgaagcaggccggccgctac

SEQ ID NO: 48705 - RNA, 36 nt, synthetic construct
  misc_feature 1..36: note = Beta-secretase 2 (127-138)
  source 1..36: mol_type = other RNA
gacacctacttcgacaccgagcgcagctccacgtac

SEQ ID NO: 48706 - RNA, 30 nt, synthetic construct
  misc_feature 1..30: note = Glycoprotein endo-alpha-1,2-mannosidase-like protein (245-254)
  source 1..30: mol_type = other RNA
gacacctacggcagccacggggccttctac

SEQ ID NO: 48707 - RNA, 30 nt, synthetic construct
  misc_feature 1..30: note = Mid1-interacting protein 1 (5-14)
  source 1..30: mol_type = other RNA
gacacctacaaccagaagcacagcctgttc

SEQ ID NO: 48708 - RNA, 30 nt, synthetic construct
  misc_feature 1..30: note = Tetratricopeptide repeat protein 37 (1017-1026)
  source 1..30: mol_type = other RNA
gacacctacaacgtggccatccgcaactac

SEQ ID NO: 48709 - RNA, 30 nt, synthetic construct
  misc_feature 1..30: note = Zinc finger CCCH domain-containing protein 13 (520-529)
  source 1..30: mol_type = other RNA
gacacctaccccgaggagagccgctcctac

SEQ ID NO: 48710 - RNA, 33 nt, synthetic construct
  misc_feature 1..33: note = Cartilage acidic protein 1 (17-27)
  source 1..33: mol_type = other RNA
gacgtggccgccgaggcgggcgtcagcaagtac

SEQ ID NO: 48711 - RNA, 33 nt, synthetic construct
  misc_feature 1..33: note = Putative GTP-binding protein 6 (258-268)
  source 1..33: mol_type = other RNA
gacgtggcccacagcgacctgatcctccacgtc

SEQ ID NO: 48712 - RNA, 27 nt, synthetic construct
  misc_feature 1..27: note = Polynucleotide 5'-hydroxyl-kinase NOL9 (563-571)
  source 1..27: mol_type = other RNA
gacgtggcccccacccacatcctgtac

SEQ ID NO: 48713 - RNA, 36 nt, synthetic construct
  misc_feature 1..36: note = Hsc70-interacting protein (337-348)
  source 1..36: mol_type = other RNA
gacgtggcccagaaccccgccaacatgagcaagtac

SEQ ID NO: 48714 - RNA, 33 nt, synthetic construct
  misc_feature 1..33: note = WD repeat domain-containing protein 83 (95-105)
  source 1..33: mol_type = other RNA
gacgtggccagcggccaggtcgtgcgcaagttc

SEQ ID NO: 48715 - RNA, 27 nt, synthetic construct
  misc_feature 1..27: note = Protein S100-B (13-21)
  source 1..27: mol_type = other RNA
gacgtgttccaccagtacagcggccgc

SEQ ID NO: 48716 - RNA, 30 nt, synthetic construct
  misc_feature 1..30: note = Sentrin-specific protease 5 (531-540)
  source 1..30: mol_type = other RNA
gacgtgttcaacgaggacttcagcaaccgc

SEQ ID NO: 48717 - RNA, 30 nt, synthetic construct
  misc_feature 1..30: note = Nicotinamide phosphoribosyltransferase (94-103)
  source 1..30: mol_type = other RNA
gacgtgttcaacgagaagggctggaactac

SEQ ID NO: 48718 - RNA, 30 nt, synthetic construct
  misc_feature 1..30: note = DNA excision repair protein ERCC-8 (78-87)
  source 1..30: mol_type = other RNA
gacgtgttcaacttcgaggagaccgtctac

SEQ ID NO: 48719 - RNA, 33 nt, synthetic construct
  misc_feature 1..33: note = Phosphomannomutase 1 (190-200)
  source 1..33: mol_type = other RNA
gacgtgttccccgagggctgggacaagcgctac

SEQ ID NO: 48720 - RNA, 30 nt, synthetic construct
  misc_feature 1..30: note = Serine/threonine-protein kinase N3 (654-663)
  source 1..30: mol_type = other RNA
gacgtgttccccgagccgcaggcccgcttc

SEQ ID NO: 48721 - RNA, 30 nt, synthetic construct
  misc_feature 1..30: note = Solute carrier family 23 member 2 (334-343)
  source 1..30: mol_type = other RNA
gacgtgttccccccggacagcaccaagtac

SEQ ID NO: 48722 - RNA, 39 nt, synthetic construct
  misc_feature 1..39: note = Solute carrier family 23 member 2 (334-346)
  source 1..39: mol_type = other RNA
gacgtgttccccccggacagcaccaagtacggcttctac

SEQ ID NO: 48723 - RNA, 33 nt, synthetic construct
  misc_feature 1..33: note = MOB kinase activator 2 (126-136)
  source 1..33: mol_type = other RNA
gacgtgttccccaccaagtacggccgcgagttc

SEQ ID NO: 48724 - RNA, 30 nt, synthetic construct
  misc_feature 1..30: note = U4/U6.U5 tri-snRNP-associated protein 2 (186-195)
  source 1..30: mol_type = other RNA
gacgtgttccagggcagcatgcgcatcttc

SEQ ID NO: 48725 - RNA, 27 nt, synthetic construct
  misc_feature 1..27: note = Ankyrin repeat and BTB/POZ domain-containing protein 1 (59-67)
  source 1..27: mol_type = other RNA
gacgtgttcacccacgtcctgtactac

SEQ ID NO: 48726 - RNA, 39 nt, synthetic construct
  misc_feature 1..39: note = General transcription factor II-I (53-65)
  source 1..39: mol_type = other RNA
gacgtgttcgtcgtgggcaccgagcgcgggcgggccttc

SEQ ID NO: 48727 - RNA, 36 nt, synthetic construct
  misc_feature 1..36: note = HLA class I histocompatibility antigen, A-1 alpha chain (101-112)
  source 1..36: mol_type = other RNA
gacgtgggccccgacgggcgcttcctgcggggctac

SEQ ID NO: 48728 - RNA, 30 nt, synthetic construct
  misc_feature 1..30: note = Histone deacetylase 6 (104-113)
  source 1..30: mol_type = other RNA
gacgtgcaccacggccaggggacccagttc

SEQ ID NO: 48729 - RNA, 30 nt, synthetic construct
  misc_feature 1..30: note = Kaptin (205-214)
  source 1..30: mol_type = other RNA
gacgtgcacaacttccccggcaccagccgc

SEQ ID NO: 48730 - RNA, 30 nt, synthetic construct
  misc_feature 1..30: note = Neutral alpha-glucosidase AB (329-338)
  source 1..30: mol_type = other RNA
gacgtgcacaacatctacggcctgtacgtc

SEQ ID NO: 48731 - RNA, 27 nt, synthetic construct
  misc_feature 1..27: note = Speriolin-like protein (115-123)
  source 1..27: mol_type = other RNA
gacgtgcaccccgccttcagcgagttc

SEQ ID NO: 48732 - RNA, 36 nt, synthetic construct
  misc_feature 1..36: note = Caveolin-1 (5-16)
  source 1..36: mol_type = other RNA
gacgtgatcgccgagcccgagggcacccacagcttc

SEQ ID NO: 48733 - RNA, 33 nt, synthetic construct
  misc_feature 1..33: note = Death effector domain-containing protein (51-61)
  source 1..33: mol_type = other RNA
gacgtgatcgacgaccacgagcgcggcctgatc

SEQ ID NO: 48734 - RNA, 27 nt, synthetic construct
  misc_feature 1..27: note = Protein LDOC1L (24-32)
  source 1..27: mol_type = other RNA
gacgtgatcgacaccctgaccagcctc

SEQ ID NO: 48735 - RNA, 27 nt, synthetic construct
  misc_feature 1..27: note = Uncharacterized protein C20orf194 (832-840)
  source 1..27: mol_type = other RNA
gacgtgatcgacgtcgtgcaggccctg

SEQ ID NO: 48736 - RNA, 27 nt, synthetic construct
  misc_feature 1..27: note = ATP-dependent RNA helicase DHX36 (400-408)
  source 1..27: mol_type = other RNA
gacgtgatcgagaagatccgctacgtc

SEQ ID NO: 48737 - RNA, 33 nt, synthetic construct
  misc_feature 1..33: note = E3 ubiquitin-protein ligase RNF213 (1304-1314)
  source 1..33: mol_type = other RNA
gacgtgatcttcaaggacttcgtcaacaagtac

SEQ ID NO: 48738 - RNA, 27 nt, synthetic construct
  misc_feature 1..27: note = 60S ribosomal protein L3 (213-221)
  source 1..27: mol_type = other RNA
gacgtgatcggcgtcaccaaggggaag

SEQ ID NO: 48739 - RNA, 33 nt, synthetic construct
  misc_feature 1..33: note = 60S ribosomal protein L3 (213-223)
  source 1..33: mol_type = other RNA
gacgtgatcggcgtcaccaaggggaagggctac

SEQ ID NO: 48740 - RNA, 36 nt, synthetic construct
  misc_feature 1..36: note = Triple functional domain protein (785-796)
  source 1..36: mol_type = other RNA
gacgtgatccaccagggccaggacctgctccagtac

SEQ ID NO: 48741 - RNA, 27 nt, synthetic construct
  misc_feature 1..27: note = Ran GTPase-activating protein 1 (40-48)
  source 1..27: mol_type = other RNA
gacgtgatcaaggagatcgaggacttc

SEQ ID NO: 48742 - RNA, 27 nt, synthetic construct
  misc_feature 1..27: note = Spindle and kinetochore-associated protein 1 (163-171)
  source 1..27: mol_type = other RNA
gacgtgatcaaggagatcaacaaggcc

SEQ ID NO: 48743 - RNA, 30 nt, synthetic construct
  misc_feature 1..30: note = Cytoplasmic dynein 2 heavy chain 1 (2609-2618)
  source 1..30: mol_type = other RNA
gacgtgatcaagaagggcctgatccactac

SEQ ID NO: 48744 - RNA, 27 nt, synthetic construct
  misc_feature 1..27: note = Fanconi anemia group D2 protein (348-356)
  source 1..27: mol_type = other RNA
gacgtgatcaagagcgccatccgctac

SEQ ID NO: 48745 - RNA, 27 nt, synthetic construct
  misc_feature 1..27: note = Elongation factor G, mitochondrial (730-738)
  source 1..27: mol_type = other RNA
gacgtgatcaacaagtacctggaggcc

SEQ ID NO: 48746 - RNA, 39 nt, synthetic construct
  misc_feature 1..39: note = Thioredoxin-related transmembrane protein 4 (92-104)
  source 1..39: mol_type = other RNA
gacgtgatccaggagcccggcctgagcgggcgcttcttc

SEQ ID NO: 48747 - RNA, 27 nt, synthetic construct
  misc_feature 1..27: note = WD repeat-containing protein 26 (126-134)
  source 1..27: mol_type = other RNA
gacgtgatccgcctgatcggccagcac

SEQ ID NO: 48748 - RNA, 27 nt, synthetic construct
  misc_feature 1..27: note = Coenzyme Q-binding protein COQ10 homolog B, mitochondrial (62-70)
  source 1..27: mol_type = other RNA
gacgtgatcagcaagcgctccggctac

SEQ ID NO: 48749 - RNA, 27 nt, synthetic construct
  misc_feature 1..27: note = Mediator of RNA polymerase II transcription subunit 27 (126-134)
  source 1..27: mol_type = other RNA
gacgtgatcagccgcatcgaccggatg

SEQ ID NO: 48750 - RNA, 30 nt, synthetic construct
  misc_feature 1..30: note = Antigen KI-67 (86-95)
  source 1..30: mol_type = other RNA
gacgtgatcaccatcatcgaccgcagcttc

SEQ ID NO: 48751 - RNA, 36 nt, synthetic construct
  misc_feature 1..36: note = Antigen KI-67 (86-97)
  source 1..36: mol_type = other RNA
gacgtgatcaccatcatcgaccgcagcttccggtac

SEQ ID NO: 48752 - RNA, 36 nt, synthetic construct
  misc_feature 1..36: note = ER membrane protein complex subunit 1 (96-107)
  source 1..36: mol_type = other RNA
gacgtgatcaccgtcagcaacggcgggcgcatcatg

SEQ ID NO: 48753 - RNA, 30 nt, synthetic construct
  misc_feature 1..30: note = 40S ribosomal protein S18 (89-98)
  source 1..30: mol_type = other RNA
gacgtgaaggacggcaagtacagccaggtc

SEQ ID NO: 48754 - RNA, 27 nt, synthetic construct
  misc_feature 1..27: note = Cell cycle progression protein 1 (703-711)
  source 1..27: mol_type = other RNA
gacgtgaaggactacctgcgcaacatg

SEQ ID NO: 48755 - RNA, 27 nt, synthetic construct
  misc_feature 1..27: note = Transmembrane protein 168 (117-125)
  source 1..27: mol_type = other RNA
gacgtgaaggaggagagcaccaagtac

SEQ ID NO: 48756 - RNA, 27 nt, synthetic construct
  misc_feature 1..27: note = Nuclear pore complex protein Nup107 (812-820)
  source 1..27: mol_type = other RNA
gacgtgaaggagaagatgtacaacgtc

SEQ ID NO: 48757 - RNA, 30 nt, synthetic construct
  misc_feature 1..30: note = UTP-glucose-1-phosphate uridylyltransferase (289-298)
  source 1..30: mol_type = other RNA
gacgtgaagggcgggaccctgacccagtac

SEQ ID NO: 48758 - RNA, 27 nt, synthetic construct
  misc_feature 1..27: note = Lon protease homolog, mitochondrial (277-285)
  source 1..27: mol_type = other RNA
gacgtgaagaagcgcatcctggagttc

SEQ ID NO: 48759 - RNA, 27 nt, synthetic construct
  misc_feature 1..27: note = DDB1- and CUL4-associated factor 4 (130-138)
  source 1..27: mol_type = other RNA
gacgtgaaggtcggcgggagcaagtac

SEQ ID NO: 48760 - RNA, 39 nt, synthetic construct
  misc_feature 1..39: note = Lon protease homolog, mitochondrial (129-141)
  source 1..39: mol_type = other RNA
gacgtgctggaggagaccaacatccccaagcgcctctac

SEQ ID NO: 48761 - RNA, 27 nt, synthetic construct
  misc_feature 1..27: note = AP-2 complex subunit mu (176-184)
  source 1..27: mol_type = other RNA
gacgtgctggagagcgtcaacctcctg

SEQ ID NO: 48762 - RNA, 51 nt, synthetic construct
  misc_feature 1..51: note = PRKR-interacting protein 1 (66-82)
  source 1..51: mol_type = other RNA
gacgtgatgggcagctccgccggggccggcagcggggagttccacgtctac

SEQ ID NO: 48763 - RNA, 27 nt, synthetic construct
  misc_feature 1..27: note = Rho-associated protein kinase 2 (99-107)
  source 1..27: mol_type = other RNA
gacgtgcccgagaagtgggccaagttc

SEQ ID NO: 48764 - RNA, 27 nt, synthetic construct
  misc_feature 1..27: note = Rho-associated protein kinase 1 (169-177)
  source 1..27: mol_type = other RNA
gacgtgcccgagaagtgggcccgcttc

SEQ ID NO: 48765 - RNA, 27 nt, synthetic construct
  misc_feature 1..27: note = Protein diaphanous homolog 2 (54-62)
  source 1..27: mol_type = other RNA
gacgtgcgcgaccggatcaccagcttc

SEQ ID NO: 48766 - RNA, 27 nt, synthetic construct
  misc_feature 1..27: note = RIB43A-like with coiled-coils protein 2 (62-70)
  source 1..27: mol_type = other RNA
gacgtgcgcaacaccatcagcggcatg

SEQ ID NO: 48767 - RNA, 27 nt, synthetic construct
  misc_feature 1..27: note = Dipeptidyl peptidase 1 (107-115)
  source 1..27: mol_type = other RNA
gacgtgaccgacttcatcagccacctg

SEQ ID NO: 48768 - RNA, 27 nt, synthetic construct
  misc_feature 1..27: note = RANBP2-like and GRIP domain-containing protein 2 (107-115)
  source 1..27: mol_type = other RNA
gacgtgaccgacggccgcgccaagtac

SEQ ID NO: 48769 - RNA, 27 nt, synthetic construct
  misc_feature 1..27: note = TATA box-binding protein-associated factor RNA polymerase I subunit C (102-110)
  source 1..27: mol_type = other RNA
gacgtgaccgagcagatcagccgcttc

SEQ ID NO: 48770 - RNA, 30 nt, synthetic construct
  misc_feature 1..30: note = Zinc finger protein 552 (41-50)
  source 1..30: mol_type = other RNA
gacgtgaccctggagaacctcgccctgatg

SEQ ID NO: 48771 - RNA, 27 nt, synthetic construct
  misc_feature 1..27: note = Bromodomain adjacent to zinc finger domain protein 1A (531-539)
  source 1..27: mol_type = other RNA
gacgtgaccagcgccaacgccaagtac

SEQ ID NO: 48772 - RNA, 30 nt, synthetic construct
  misc_feature 1..30: note = Trafficking protein particle complex subunit 2-like protein (7-16)
  source 1..30: mol_type = other RNA
gacgtggtcgacgagaagatcagcgccatg

SEQ ID NO: 48773 - RNA, 27 nt, synthetic construct
  misc_feature 1..27: note = Sorting nexin-8 (312-320)
  source 1..27: mol_type = other RNA
gacgtggtcgagaagctgaacctcttc

SEQ ID NO: 48774 - RNA, 33 nt, synthetic construct
  misc_feature 1..33: note = DCN1-like protein 4 (58-68)
  source 1..33: mol_type = other RNA
gacgtggtcggccccgaggggatggagaagttc

SEQ ID NO: 48775 - RNA, 27 nt, synthetic construct
  misc_feature 1..27: note = Inositol-trisphosphate 3-kinase B (718-726)
  source 1..27: mol_type = other RNA
gacgtggtcaaggacggcgagcgctac

SEQ ID NO: 48776 - RNA, 27 nt, synthetic construct
  misc_feature 1..27: note = Cold shock domain-containing protein E1 (173-181)
  source 1..27: mol_type = other RNA
gacgtggtcaaggagatcttcttccac

SEQ ID NO: 48777 - RNA, 30 nt, synthetic construct
  misc_feature 1..30: note = Cold shock domain-containing protein E1 (173-182)
  source 1..30: mol_type = other RNA
gacgtggtcaaggagatcttcttccactac

SEQ ID NO: 48778 - RNA, 39 nt, synthetic construct
  misc_feature 1..39: note = Peptidyl-prolyl cis-trans isomerase H (34-46)
  source 1..39: mol_type = other RNA
gacgtggtccccaagaccgccgagaacttccgccagttc

SEQ ID NO: 48779 - RNA, 27 nt, synthetic construct
  misc_feature 1..27: note = Glypican-1 (232-240)
  source 1..27: mol_type = other RNA
gacgtggtccgcaaggtggcccaggtg

SEQ ID NO: 48780 - RNA, 30 nt, synthetic construct
  misc_feature 1..30: note = F-box only protein 31 (25-34)
  source 1..30: mol_type = other RNA
gacgtgtacgccaagctgctccaccgctac

SEQ ID NO: 48781 - RNA, 33 nt, synthetic construct
  misc_feature 1..33: note = 26S proteasome non-ATPase regulatory subunit 1 (492-502)
  source 1..33: mol_type = other RNA
gacgtgtacgacctgctcaagaccaacctgtac

SEQ ID NO: 48782 - RNA, 33 nt, synthetic construct
  misc_feature 1..33: note = RNA polymerase II-associated factor 1 homolog (252-262)
  source 1..33: mol_type = other RNA
gacgtgtacgactacaagatcgcccgcgagtac

SEQ ID NO: 48783 - RNA, 33 nt, synthetic construct
  misc_feature 1..33: note = Cat eye syndrome critical region protein 5 (318-328)
  source 1..33: mol_type = other RNA
gacgtgtacggcgccaacctgttccaccagtac

SEQ ID NO: 48784 - RNA, 27 nt, synthetic construct
  misc_feature 1..27: note = Cystathionine gamma-lyase (112-120)
  source 1..27: mol_type = other RNA
gacgtgtacggcgggaccaaccgctac

SEQ ID NO: 48785 - RNA, 30 nt, synthetic construct
  misc_feature 1..30: note = Cystathionine gamma-lyase (112-121)
  source 1..30: mol_type = other RNA
gacgtgtacggcgggaccaaccgctacttc

SEQ ID NO: 48786 - RNA, 30 nt, synthetic construct
  misc_feature 1..30: note = Transcription elongation factor SPT6 (339-348)
  source 1..30: mol_type = other RNA
gacgtgtacaaccacttcctgctctactac

SEQ ID NO: 48787 - RNA, 30 nt, synthetic construct
  misc_feature 1..30: note = Inactive tyrosine-protein kinase 7 (954-963)
  source 1..30: mol_type = other RNA
gacgtgtacaacagcgagtactaccacttc

SEQ ID NO: 48788 - RNA, 30 nt, synthetic construct
  misc_feature 1..30: note = Melanoma-associated antigen D1 (507-516)
  source 1..30: mol_type = other RNA
gacgtgtaccccgagatcatcgagcgcgcc

SEQ ID NO: 48789 - RNA, 36 nt, synthetic construct
  misc_feature 1..36: note = Melanoma-associated antigen D2 (315-326)
  source 1..36: mol_type = other RNA
gacgtgtaccccgagatcatcgagcgcgccggctac

SEQ ID NO: 48790 - RNA, 33 nt, synthetic construct
  misc_feature 1..33: note = ATP synthase mitochondrial F1 complex assembly factor 1 (232-242)
  source 1..33: mol_type = other RNA
gaggccgccgcgagccagctgatcctctaccac

SEQ ID NO: 48791 - RNA, 33 nt, synthetic construct
  misc_feature 1..33: note = Uncharacterized protein C20orf194 (141-151)
  source 1..33: mol_type = other RNA
gaggccgccgaggagttcaagatcaccagcttc

SEQ ID NO: 48792 - RNA, 36 nt, synthetic construct
  misc_feature 1..36: note = Calpain small subunit 1 (199-210)
  source 1..36: mol_type = other RNA
gaggccgccggcttccacctgaacgagcacctctac

SEQ ID NO: 48793 - RNA, 27 nt, synthetic construct
  misc_feature 1..27: note = Protein GREB1 (686-694)
  source 1..27: mol_type = other RNA
gaggccgcccccgacatcatgcactac

SEQ ID NO: 48794 - RNA, 33 nt, synthetic construct
  misc_feature 1..33: note = ATP-dependent DNA helicase Q4 (32-42)
  source 1..33: mol_type = other RNA
gaggccgcccccgaggagacccgcgcgctgtac

SEQ ID NO: 48795 - RNA, 33 nt, synthetic construct
  misc_feature 1..33: note = Metal transporter CNNM3 (26-36)
  source 1..33: mol_type = other RNA
gaggccgcccccggcccgcgcgtgctggggttc

SEQ ID NO: 48796 - RNA, 33 nt, synthetic construct
  misc_feature 1..33: note = Nucleoside diphosphate kinase, mitochondrial (131-141)
  source 1..33: mol_type = other RNA
gaggccgcccccggcaccatccgcggggacttc

SEQ ID NO: 48797 - RNA, 27 nt, synthetic construct
  misc_feature 1..27: note = 3-hydroxy-3-methylglutaryl-coenzyme A reductase (567-575)
  source 1..27: mol_type = other RNA
gaggccttcgacagcacctcccgcttc

SEQ ID NO: 48798 - RNA, 30 nt, synthetic construct
  misc_feature 1..30: note = Isovaleryl-CoA dehydrogenase, mitochondrial (310-319)
  source 1..30: mol_type = other RNA
gaggccttcggccagaagatcgggcacttc

SEQ ID NO: 48799 - RNA, 33 nt, synthetic construct
  misc_feature 1..33: note = Proteasome activator complex subunit 3 (94-104)
  source 1..33: mol_type = other RNA
gaggccttccagggcaccaaggtgttcgtcatg

SEQ ID NO: 48800 - RNA, 30 nt, synthetic construct
  misc_feature 1..30: note = Proteasome activator complex subunit 2 (158-167)
  source 1..30: mol_type = other RNA
gaggccttccagaccaccatcagcaagtac

SEQ ID NO: 48801 - RNA, 27 nt, synthetic construct
  misc_feature 1..27: note = Chloride intracellular channel protein 1 (201-209)
  source 1..27: mol_type = other RNA
gaggccttccgcggcgtgcaccggtac

SEQ ID NO: 48802 - RNA, 30 nt, synthetic construct
  misc_feature 1..30: note = Growth arrest-specific protein 8 (145-154)
  source 1..30: mol_type = other RNA
gaggccttcaccgacatcaagaactactac

SEQ ID NO: 48803 - RNA, 27 nt, synthetic construct
  misc_feature 1..27: note = Ras-related protein Rab-27A (147-155)
  source 1..27: mol_type = other RNA
gaggccatcgccctggcggagaagtac

SEQ ID NO: 48804 - RNA, 30 nt, synthetic construct
  misc_feature 1..30: note = Alpha-actinin-4 (524-533)
  source 1..30: mol_type = other RNA
gaggccatcgaccagctgcacctcgagtac

SEQ ID NO: 48805 - RNA, 30 nt, synthetic construct
  misc_feature 1..30: note = Small integral membrane protein 8 (79-88)
  source 1..30: mol_type = other RNA
gaggccatcgacagcgagggccactcctac

SEQ ID NO: 48806 - RNA, 33 nt, synthetic construct
  misc_feature 1..33: note = Small integral membrane protein 8 (79-89)
  source 1..33: mol_type = other RNA
gaggccatcgacagcgagggccactcctacatg

SEQ ID NO: 48807 - RNA, 33 nt, synthetic construct
  misc_feature 1..33: note = Condensin complex subunit 1 (636-646)
  source 1..33: mol_type = other RNA
gaggccatcggcatcatcagcaagatgatgtac

SEQ ID NO: 48808 - RNA, 33 nt, synthetic construct
  misc_feature 1..33: note = Nuclear pore complex protein Nup133 (332-342)
  source 1..33: mol_type = other RNA
gaggccatcaaggagggcgtgaacatccgctac

SEQ ID NO: 48809 - RNA, 30 nt, synthetic construct
  misc_feature 1..30: note = Synergin gamma (170-179)
  source 1..30: mol_type = other RNA
gaggccatcaagggcaacctggacgggttc

SEQ ID NO: 48810 - RNA, 27 nt, synthetic construct
  misc_feature 1..27: note = N-lysine methyltransferase SMYD2 (289-297)
  source 1..27: mol_type = other RNA
gaggccatccgcgacatggtgcggtac

SEQ ID NO: 48811 - RNA, 33 nt, synthetic construct
  misc_feature 1..33: note = Trabeculin-alpha (3748-3758)
  source 1..33: mol_type = other RNA
gaggccatcagcctgctcaactccgagcgctac

SEQ ID NO: 48812 - RNA, 30 nt, synthetic construct
  misc_feature 1..30: note = KN motif and ankyrin repeat domain-containing protein 1 (1144-1153)
  source 1..30: mol_type = other RNA
gaggccatcagccccgacgtgctgcgctac

SEQ ID NO: 48813 - RNA, 39 nt, synthetic construct
  misc_feature 1..39: note = E3 ubiquitin-protein ligase Praja-1 (266-278)
  source 1..39: mol_type = other RNA
gaggccatcagctacgtggacccccagttcctgacctac

SEQ ID NO: 48814 - RNA, 27 nt, synthetic construct
  misc_feature 1..27: note = DNA replication licensing factor MCM5 (614-622)
  source 1..27: mol_type = other RNA
gaggccatcgtgcgcatcgccgaggcg

SEQ ID NO: 48815 - RNA, 30 nt, synthetic construct
  misc_feature 1..30: note = Nucleoporin Nup43 (370-379)
  source 1..30: mol_type = other RNA
gaggccatctacgtgacccgccacctgttc

SEQ ID NO: 48816 - RNA, 33 nt, synthetic construct
  misc_feature 1..33: note = UDP-glucose 6-dehydrogenase (76-86)
  source 1..33: mol_type = other RNA
gaggccctgaacctccccgaggtggcccgctac

SEQ ID NO: 48817 - RNA, 27 nt, synthetic construct
  misc_feature 1..27: note = Centromere protein F (1214-1222)
  source 1..27: mol_type = other RNA
gaggccatgctgcgcaacaaggagctc

SEQ ID NO: 48818 - RNA, 27 nt, synthetic construct
  misc_feature 1..27: note = Heme-binding protein 1 (57-65)
  source 1..27: mol_type = other RNA
gaggccatgcccaaggtggccaagtac

SEQ ID NO: 48819 - RNA, 30 nt, synthetic construct
  misc_feature 1..30: note = Cytoskeleton-associated protein 5 (1575-1584)
  source 1..30: mol_type = other RNA
gaggccatgagcggccacatcgaccagttc

SEQ ID NO: 48820 - RNA, 27 nt, synthetic construct
  misc_feature 1..27: note = Pre-mRNA-processing-splicing factor 8 (1105-1113)
  source 1..27: mol_type = other RNA
gaggcccgcgacctgatccagcggtac

SEQ ID NO: 48821 - RNA, 39 nt, synthetic construct
  misc_feature 1..39: note = Syntenin-1 (34-46)
  source 1..39: mol_type = other RNA
gaggccagcgcccccatcccgcacgacggcaacctgtac

SEQ ID NO: 48822 - RNA, 27 nt, synthetic construct
  misc_feature 1..27: note = Lysine-specific demethylase 7A (449-457)
  source 1..27: mol_type = other RNA
gaggccaccagcccctaccactcccgc

SEQ ID NO: 48823 - RNA, 33 nt, synthetic construct
  misc_feature 1..33: note = TNF receptor-associated factor 5 (400-410)
  source 1..33: mol_type = other RNA
gaggccgtggacggccacaccgtcagcatcttc

SEQ ID NO: 48824 - RNA, 36 nt, synthetic construct
  misc_feature 1..36: note = Mitochondrial-processing peptidase subunit alpha (283-294)
  source 1..36: mol_type = other RNA
gaggccgtggacatcgaccgcagcgtcgcccagtac

SEQ ID NO: 48825 - RNA, 27 nt, synthetic construct
  misc_feature 1..27: note = Transcriptional enhancer factor TEF-3 (263-271)
  source 1..27: mol_type = other RNA
gaggccgtggacatccgccagatctac

SEQ ID NO: 48826 - RNA, 30 nt, synthetic construct
  misc_feature 1..30: note = LIX1-like protein (28-37)
  source 1..30: mol_type = other RNA
gaggccgtggaggccgtcgtgcgcagcttc

SEQ ID NO: 48827 - RNA, 30 nt, synthetic construct
  misc_feature 1..30: note = Integrin alpha-7 (432-441)
  source 1..30: mol_type = other RNA
gaggccgtgggcatcaagagcttcgggtac

SEQ ID NO: 48828 - RNA, 30 nt, synthetic construct
  misc_feature 1..30: note = Phosphatidylinositol 3-kinase regulatory subunit alpha (173-182)
  source 1..30: mol_type = other RNA
gaggccgtgggcaagaagctgcacgagtac

SEQ ID NO: 48829 - RNA, 30 nt, synthetic construct
  misc_feature 1..30: note = 26S protease regulatory subunit 7 (411-420)
  source 1..30: mol_type = other RNA
gaggccgtgaacaaggtcatcaagagctac

SEQ ID NO: 48830 - RNA, 27 nt, synthetic construct
  misc_feature 1..27: note = Methyltransferase-like protein 13 (244-252)
  source 1..27: mol_type = other RNA
gaggccgtgcaggagcgccagcagtac

SEQ ID NO: 48831 - RNA, 27 nt, synthetic construct
  misc_feature 1..27: note = Renalase (186-194)
  source 1..27: mol_type = other RNA
gaggccgtgagctactccagccgctac

SEQ ID NO: 48832 - RNA, 30 nt, synthetic construct
  misc_feature 1..30: note = Poly (ADP-ribose) polymerase 4 (695-704)
  source 1..30: mol_type = other RNA
gaggccgtgacccagggccacggggcctac

SEQ ID NO: 48833 - RNA, 27 nt, synthetic construct
  misc_feature 1..27: note = Importin subunit alpha-1 (396-404)
  source 1..27: mol_type = other RNA
gaggccgtgtgggccgtcaccaactac

SEQ ID NO: 48834 - RNA, 30 nt, synthetic construct
  misc_feature 1..30: note = DNA replication licensing factor MCM4 (656-665)
  source 1..30: mol_type = other RNA
gaggcctacgaccgccggctggcccaccac

SEQ ID NO: 48835 - RNA, 27 nt, synthetic construct
  misc_feature 1..27: note = Trafficking protein particle complex subunit 12 (300-308)
  source 1..27: mol_type = other RNA
gaggcctaccacagcgtgatcaagtac

SEQ ID NO: 48836 - RNA, 30 nt, synthetic construct
  misc_feature 1..30: note = Leucine-rich PPR motif-containing protein, mitochondrial (1198-1207)
  source 1..30: mol_type = other RNA
gaggcctacaacagcctgatgaagtcctac

SEQ ID NO: 48837 - RNA, 27 nt, synthetic construct
  misc_feature 1..27: note = Protein mago nashi homolog 2 (5-13)
  source 1..27: mol_type = other RNA
gaggcctacgtgcacaagagcgtcatg

SEQ ID NO: 48838 - RNA, 27 nt, synthetic construct
  misc_feature 1..27: note = Coatomer subunit beta (79-87)
  source 1..27: mol_type = other RNA
gaggcctacgtgcacgtcaaccagtac

SEQ ID NO: 48839 - RNA, 33 nt, synthetic construct
  misc_feature 1..33: note = Sorting and assembly machinery component 50 homolog (365-375)
  source 1..33: mol_type = other RNA
gaggcctactgggccggcgggctgcacctctac

SEQ ID NO: 48840 - RNA, 27 nt, synthetic construct
  misc_feature 1..27: note = Superkiller viralicidic activity 2-like 2 (938-946)
  source 1..27: mol_type = other RNA
gagtgcgccaagcgcatcgccaaggtg

SEQ ID NO: 48841 - RNA, 30 nt, synthetic construct
  misc_feature 1..30: note = Vimentin (180-189)
  source 1..30: mol_type = other RNA
gaggacatcatgcgcctgcgggagaagctc

SEQ ID NO: 48842 - RNA, 27 nt, synthetic construct
  misc_feature 1..27: note = U3 small nucleolar ribonucleoprotein protein IMP3 (43-51)
  source 1..27: mol_type = other RNA
gaggactacacccgctacaaccagctg

SEQ ID NO: 48843 - RNA, 27 nt, synthetic construct
  misc_feature 1..27: note = Ataxin-10 (298-306)
  source 1..27: mol_type = other RNA
gaggaggccctggccaccatccgcctc

SEQ ID NO: 48844 - RNA, 30 nt, synthetic construct
  misc_feature 1..30: note = Transmembrane protein 150C (126-135)
  source 1..30: mol_type = other RNA
gaggagatccacaacgtgggcaccagcctg

SEQ ID NO: 48845 - RNA, 27 nt, synthetic construct
  misc_feature 1..27: note = Zinc finger FYVE domain-containing protein 16 (415-423)
  source 1..27: mol_type = other RNA
gaggagatccagaacagcgtggtcctg

SEQ ID NO: 48846 - RNA, 27 nt, synthetic construct
  misc_feature 1..27: note = Cofilin-1 (141-149)
  source 1..27: mol_type = other RNA
gaggaggtgaaggaccgctgcaccctg

SEQ ID NO: 48847 - RNA, 42 nt, synthetic construct
  misc_feature 1..42: note = Phosphoglycerate kinase 1 (404-417)
  source 1..42: mol_type = other RNA
gagggcaaggtgctgcccggggtcgacgccctcagcaacatc

SEQ ID NO: 48848 - RNA, 27 nt, synthetic construct
  misc_feature 1..27: note = NADH dehydrogenase (ubiquinone) 1 alpha subcomplex subunit 11 (51-59)
  source 1..27: mol_type = other RNA
gagggcgtggccaaggtcgggcagtac

SEQ ID NO: 48849 - RNA, 27 nt, synthetic construct
  misc_feature 1..27: note = (Pyruvate dehydrogenase (acetyl-transferring)) kinase isozyme 4, mitochondrial (229-237)
  source 1..27: mol_type = other RNA
gagcaccaggagaaccagcccagcctg

SEQ ID NO: 48850 - RNA, 30 nt, synthetic construct
  misc_feature 1..30: note = Intraflagellar transport protein 172 homolog (6-15)
  source 1..30: mol_type = other RNA
gagatcgccgaccaggtgagccgcgagtac

SEQ ID NO: 48851 - RNA, 27 nt, synthetic construct
  misc_feature 1..27: note = Alpha- and gamma-adaptin-binding protein p34 (72-80)
  source 1..27: mol_type = other RNA
gagatcgccgagagcgtgcaggccttc

SEQ ID NO: 48852 - RNA, 27 nt, synthetic construct
  misc_feature 1..27: note = Cleavage and polyadenylation specificity factor subunit 3 (29-37)
  source 1..27: mol_type = other RNA
gagatcgccggcgtgaagctgctctac

SEQ ID NO: 48853 - RNA, 30 nt, synthetic construct
  misc_feature 1..30: note = Carbohydrate sulfotransferase 10 (216-225)
  source 1..30: mol_type = other RNA
gagatcgcccccggcatcatccgcaagtac

SEQ ID NO: 48854 - RNA, 30 nt, synthetic construct
  misc_feature 1..30: note = Fatty acid synthase (760-769)
  source 1..30: mol_type = other RNA
gagatcgccccccacgccctgctccaggcg

SEQ ID NO: 48855 - RNA, 30 nt, synthetic construct
  misc_feature 1..30: note = Cullin-7 (1259-1268)
  source 1..30: mol_type = other RNA
gagatcgccaccaccttcgagcactactac

SEQ ID NO: 48856 - RNA, 30 nt, synthetic construct
  misc_feature 1..30: note = Exportin-2 (752-761)
  source 1..30: mol_type = other RNA
gagatcttcgacggcatccagcccaagatg

SEQ ID NO: 48857 - RNA, 33 nt, synthetic construct
  misc_feature 1..33: note = Exportin-2 (752-762)
  source 1..33: mol_type = other RNA
gagatcttcgacggcatccagcccaagatgttc

SEQ ID NO: 48858 - RNA, 27 nt, synthetic construct
  misc_feature 1..27: note = Utrophin (1655-1663)
  source 1..27: mol_type = other RNA
gagatcttcgacggcaacgtggcccac

SEQ ID NO: 48859 - RNA, 27 nt, synthetic construct
  misc_feature 1..27: note = Cold shock domain-containing protein E1 (177-185)
  source 1..27: mol_type = other RNA
gagatcttcttccactacagcgagttc

SEQ ID NO: 48860 - RNA, 33 nt, synthetic construct
  misc_feature 1..33: note = Neuron navigator 2 (2237-2247)
  source 1..33: mol_type = other RNA
gagatcttcaacggcctgctcaactgcaagtac

SEQ ID NO: 48861 - RNA, 30 nt, synthetic construct
  misc_feature 1..30: note = F-box only protein 25 (53-62)
  source 1..30: mol_type = other RNA
gagatcttcaacaacgaggagcacgagtac

SEQ ID NO: 48862 - RNA, 30 nt, synthetic construct
  misc_feature 1..30: note = Ubiquitin-protein ligase E3A (558-567)
  source 1..30: mol_type = other RNA
gagatcttcaaccccgacatcggcatgttc

SEQ ID NO: 48863 - RNA, 30 nt, synthetic construct
  misc_feature 1..30: note = Exportin-4 (988-997)
  source 1..30: mol_type = other RNA
gagatcttccccgagaagatcccgcagctg

SEQ ID NO: 48864 - RNA, 27 nt, synthetic construct
  misc_feature 1..27: note = Interferon-induced GTP-binding protein Mx1 (576-584)
  source 1..27: mol_type = other RNA
gagatcttccagcacctgatggcctac

SEQ ID NO: 48865 - RNA, 27 nt, synthetic construct
  misc_feature 1..27: note = Zinc finger CCCH-type antiviral protein 1 (57-65)
  source 1..27: mol_type = other RNA
gagatccaccacctgcaccccgagtac

SEQ ID NO: 48866 - RNA, 39 nt, synthetic construct
  misc_feature 1..39: note = Nuclear pore complex protein Nup205 (794-806)
  source 1..39: mol_type = other RNA
gagatcatcgcctacaagcccccgggcttcagcctgatg

SEQ ID NO: 48867 - RNA, 30 nt, synthetic construct
  misc_feature 1..30: note = Caseinolytic peptidase B protein homolog (651-660)
  source 1..30: mol_type = other RNA
gagatcatcgacaaggacagcaagacccgc

SEQ ID NO: 48868 - RNA, 30 nt, synthetic construct
  misc_feature 1..30: note = Mitogen-activated protein kinase kinase kinase 6 (286-295)
  source 1..30: mol_type = other RNA
gagatcatcgaccagggcccccgcgggtac

SEQ ID NO: 48869 - RNA, 27 nt, synthetic construct
  misc_feature 1..27: note = Leucine-rich repeat and coiled-coil domain-containing protein 1 (237-245)
  source 1..27: mol_type = other RNA
gagatcatcgaccgcatgcccgtgatc

SEQ ID NO: 48870 - RNA, 30 nt, synthetic construct
  misc_feature 1..30: note = Brefeldin A-inhibited guanine nucleotide-exchange protein 2 (645-654)
  source 1..30: mol_type = other RNA
gagatcatcgagcacggcatcgagctgttc

SEQ ID NO: 48871 - RNA, 27 nt, synthetic construct
  misc_feature 1..27: note = Nuclear envelope integral membrane protein 1 (143-151)
  source 1..27: mol_type = other RNA
gagatcatcgagaaggacaccaagtac

SEQ ID NO: 48872 - RNA, 27 nt, synthetic construct
  misc_feature 1..27: note = Complex I assembly factor TMEM126B, mitochondrial (25-33)
  source 1..27: mol_type = other RNA
gagatcatcgagaagaacttcgactac

SEQ ID NO: 48873 - RNA, 27 nt, synthetic construct
  misc_feature 1..27: note = MAGUK p55 subfamily member 5 (623-631)
  source 1..27: mol_type = other RNA
gagatcatcgagaagacccgcgagatg

SEQ ID NO: 48874 - RNA, 30 nt, synthetic construct
  misc_feature 1..30: note = Nucleolar pre-ribosomal-associated protein 1 (606-615)
  source 1..30: mol_type = other RNA
gagatcatcggcggggagcgcagcgtgttc

SEQ ID NO: 48875 - RNA, 33 nt, synthetic construct
  misc_feature 1..33: note = Ribosome-releasing factor 2, mitochondrial (541-551)
  source 1..33: mol_type = other RNA
gagatcatccacgaccgcatcaagcgggagtac

SEQ ID NO: 48876 - RNA, 36 nt, synthetic construct
  misc_feature 1..36: note = ATP-dependent RNA helicase DDX3X (189-200)
  source 1..36: mol_type = other RNA
gagatcatcatgggcaacatcgagctgacccgctac

SEQ ID NO: 48877 - RNA, 30 nt, synthetic construct
  misc_feature 1..30: note = Bifunctional 3'-phosphoadenosine 5'-phosphosulfate synthase 2 (546-555)
  source 1..30: mol_type = other RNA
gagatcatccccttccgcgtggccgcctac

SEQ ID NO: 48878 - RNA, 30 nt, synthetic construct
  misc_feature 1..30: note = Zinc finger protein 322 (34-43)
  source 1..30: mol_type = other RNA
gagatcatccagatcgacggccacatctac

SEQ ID NO: 48879 - RNA, 33 nt, synthetic construct
  misc_feature 1..33: note = Tuftelin-interacting protein 11 (334-344)
  source 1..33: mol_type = other RNA
gagatcatccagaacgaccgccagctgcagtac

SEQ ID NO: 48880 - RNA, 27 nt, synthetic construct
  misc_feature 1..27: note = Polyadenylate-binding protein-interacting protein 1 (232-240)
  source 1..27: mol_type = other RNA
gagatcatccagcgcatcgagaacgtg

SEQ ID NO: 48881 - RNA, 27 nt, synthetic construct
  misc_feature 1..27: note = AF4/FMR2 family member 3 (304-312)
  source 1..27: mol_type = other RNA
gagatcatccgcgagatgacctggctg

SEQ ID NO: 48882 - RNA, 36 nt, synthetic construct
  misc_feature 1..36: note = Centrosomal protein of 95 kDa (16-27)
  source 1..36: mol_type = other RNA
gagatcatccgcctgggcgacaccgcccacaccttc

SEQ ID NO: 48883 - RNA, 33 nt, synthetic construct
  misc_feature 1..33: note = Plectin (3616-3626)
  source 1..33: mol_type = other RNA
gagatcatccgccagcagggcctggccagctac

SEQ ID NO: 48884 - RNA, 30 nt, synthetic construct
  misc_feature 1..30: note = Shugoshin-like 2 (621-630)
  source 1..30: mol_type = other RNA
gagatcatcagcggcatgaaccacatgtac

SEQ ID NO: 48885 - RNA, 27 nt, synthetic construct
  misc_feature 1..27: note = Serine/threonine-protein phosphatase 2A 55 kDa regulatory subunit B alpha isoform (283-291)
  source 1..27: mol_type = other RNA
gagatcatcagctccatcagcgacgtg

SEQ ID NO: 48886 - RNA, 30 nt, synthetic construct
  misc_feature 1..30: note = Mitochondrial-processing peptidase subunit alpha (407-416)
  source 1..30: mol_type = other RNA
gagatcatcaccaaggagttcatcctgatg

SEQ ID NO: 48887 - RNA, 30 nt, synthetic construct
  misc_feature 1..30: note = NEDD4-binding protein 1 (737-746)
  source 1..30: mol_type = other RNA
gagatcatcaccaagcgcctgctccagtac

SEQ ID NO: 48888 - RNA, 27 nt, synthetic construct
  misc_feature 1..27: note = Arf-GAP with Rho-GAP domain, ANK repeat and PH domain-containing protein 2 (579-587)
  source 1..27: mol_type = other RNA
gagatcatcaccccctaccgcagcttc

SEQ ID NO: 48889 - RNA, 27 nt, synthetic construct
  misc_feature 1..27: note = 40S ribosomal protein S16 (106-114)
  source 1..27: mol_type = other RNA
gagatcaaggacatcctgatccagtac

SEQ ID NO: 48890 - RNA, 27 nt, synthetic construct
  misc_feature 1..27: note = Peroxisomal NADH pyrophosphatase NUDT12 (204-212)
  source 1..27: mol_type = other RNA
gagatcaaggacaagctgctcaactac

SEQ ID NO: 48891 - RNA, 27 nt, synthetic construct
  misc_feature 1..27: note = Double-stranded RNA-specific adenosine deaminase (298-306)
  source 1..27: mol_type = other RNA
gagatcaaggagaagatctgcgactac

SEQ ID NO: 48892 - RNA, 27 nt, synthetic construct
  misc_feature 1..27: note = Ras association domain-containing protein 3 (53-61)
  source 1..27: mol_type = other RNA
gagatcaaggagaaggtgcacaagtac

SEQ ID NO: 48893 - RNA, 27 nt, synthetic construct
  misc_feature 1..27: note = Hsc70-interacting protein (246-254)
  source 1..27: mol_type = other RNA
gagatcaaggagcgcatcgagcgggtg

SEQ ID NO: 48894 - RNA, 27 nt, synthetic construct
  misc_feature 1..27: note = Mixed lineage kinase domain-like protein (171-179)
  source 1..27: mol_type = other RNA
gagatcaaggagaccctgcgccagtac

SEQ ID NO: 48895 - RNA, 30 nt, synthetic construct
  misc_feature 1..30: note = Radixin (207-216)
  source 1..30: mol_type = other RNA
gagatcaagaacaagaagggcaccgagctg

SEQ ID NO: 48896 - RNA, 30 nt, synthetic construct
  misc_feature 1..30: note = 40S ribosomal protein S15 (106-115)
  source 1..30: mol_type = other RNA
gagatcaagcccgagatgatcggccactac

SEQ ID NO: 48897 - RNA, 27 nt, synthetic construct
  misc_feature 1..27: note = G1/S-specific cyclin-D3 (51-59)
  source 1..27: mol_type = other RNA
gagatcaagccccacatgcgcaagatg

SEQ ID NO: 48898 - RNA, 27 nt, synthetic construct
  misc_feature 1..27: note = Coiled-coil domain-containing protein 93 (285-293)
  source 1..27: mol_type = other RNA
gagatcaagcagatcgtgagcgagtac

SEQ ID NO: 48899 - RNA, 27 nt, synthetic construct
  misc_feature 1..27: note = Ras association domain-containing protein 5 (16-24)
  source 1..27: mol_type = other RNA
gagatcaagcagaagatcgacagctac

SEQ ID NO: 48900 - RNA, 30 nt, synthetic construct
  misc_feature 1..30: note = Heterogeneous nuclear ribonucleoprotein Q (352-361)
  source 1..30: mol_type = other RNA
gagatcctggagaaggccttcagccagttc

SEQ ID NO: 48901 - RNA, 30 nt, synthetic construct
  misc_feature 1..30: note = Heterogeneous nuclear ribonucleoprotein R (257-266)
  source 1..30: mol_type = other RNA
gagatcctggagaagagcttctccgagttc

SEQ ID NO: 48902 - RNA, 36 nt, synthetic construct
  misc_feature 1..36: note = MRG/MORF4L-binding protein (94-105)
  source 1..36: mol_type = other RNA
gagatcctgcccttcccgaaccccgagcgcaacttc

SEQ ID NO: 48903 - RNA, 30 nt, synthetic construct
  misc_feature 1..30: note = Vacuolar protein sorting-associated protein 13A (700-709)
  source 1..30: mol_type = other RNA
gagatcatggaccgcgcctacgacagcttc

SEQ ID NO: 48904 - RNA, 30 nt, synthetic construct
  misc_feature 1..30: note = Structural maintenance of chromosomes protein 6 (921-930)
  source 1..30: mol_type = other RNA
gagatcatggagcaccgcttcaagacctac

SEQ ID NO: 48905 - RNA, 33 nt, synthetic construct
  misc_feature 1..33: note = Tyrosine-protein phosphatase non-receptor type 3 (704-714)
  source 1..33: mol_type = other RNA
gagatccccgccgccaacctggtgaacaagtac

SEQ ID NO: 48906 - RNA, 36 nt, synthetic construct
  misc_feature 1..36: note = Transmembrane emp24 domain-containing protein 4 (45-56)
  source 1..36: mol_type = other RNA
gagatccccgacgagaccatggtgatcggcaactac

SEQ ID NO: 48907 - RNA, 30 nt, synthetic construct
  misc_feature 1..30: note = Prostacyclin synthase (472-481)
  source 1..30: mol_type = other RNA
gagatccccgagttcgacctgagccgctac

SEQ ID NO: 48908 - RNA, 27 nt, synthetic construct
  misc_feature 1..27: note = 5,6-dihydroxyindole-2-carboxylic acid oxidase (465-473)
  source 1..27: mol_type = other RNA
gagatccagtggcccagccgcgagttc

SEQ ID NO: 48909 - RNA, 33 nt, synthetic construct
  misc_feature 1..33: note = Fibronectin type III domain-containing protein 3B (823-833)
  source 1..33: mol_type = other RNA
gagatccgcgacctgctccccgccgcccagtac

SEQ ID NO: 48910 - RNA, 27 nt, synthetic construct
  misc_feature 1..27: note = Elongation factor Tu, mitochondrial (198-206)
  source 1..27: mol_type = other RNA
gagatccgcgagctgctcaccgagttc

SEQ ID NO: 48911 - RNA, 30 nt, synthetic construct
  misc_feature 1..30: note = Protein FAM46D (230-239)
  source 1..30: mol_type = other RNA
gagatccgcggcgggggcctgctcaagtac

SEQ ID NO: 48912 - RNA, 30 nt, synthetic construct
  misc_feature 1..30: note = Transcriptional repressor NF-X1 (64-73)
  source 1..30: mol_type = other RNA
gagatcagcgccgtgcaccagcactcctac

SEQ ID NO: 48913 - RNA, 27 nt, synthetic construct
  misc_feature 1..27: note = DNA replication licensing factor MCM3 (496-504)
  source 1..27: mol_type = other RNA
gagatcagcgaccacgtgctgcgcatg

SEQ ID NO: 48914 - RNA, 27 nt, synthetic construct
  misc_feature 1..27: note = Phospholipase D2 (660-668)
  source 1..27: mol_type = other RNA
gagatcgtggaccgcatcctgaaggcc

SEQ ID NO: 48915 - RNA, 27 nt, synthetic construct
  misc_feature 1..27: note = DNA-directed RNA polymerase III subunit RPC3 (19-27)
  source 1..27: mol_type = other RNA
gagatcgtggagaagatcggcgtccac

SEQ ID NO: 48916 - RNA, 30 nt, synthetic construct
  misc_feature 1..30: note = BRCA1-associated protein (136-145)
  source 1..30: mol_type = other RNA
gagatcgtgcacggcatcatgcacctgtac

SEQ ID NO: 48917 - RNA, 27 nt, synthetic construct
  misc_feature 1..27: note = DNA mismatch repair protein Msh2 (580-588)
  source 1..27: mol_type = other RNA
gagatcgtgaacatcagctccggctac

SEQ ID NO: 48918 - RNA, 27 nt, synthetic construct
  misc_feature 1..27: note = DNA-directed RNA polymerase III subunit RPC3 (265-273)
  source 1..27: mol_type = other RNA
gagatcgtgcgcaccatgctgcggatg

SEQ ID NO: 48919 - RNA, 30 nt, synthetic construct
  misc_feature 1..30: note = Nuclear pore complex protein Nup160 (917-926)
  source 1..30: mol_type = other RNA
gagatcgtgagcaccccccgcctgcagtac

SEQ ID NO: 48920 - RNA, 30 nt, synthetic construct
  misc_feature 1..30: note = Alpha-soluble NSF attachment protein (43-52)
  source 1..30: mol_type = other RNA
gagatctacgcccgcgccgcgaacatgttc

SEQ ID NO: 48921 - RNA, 30 nt, synthetic construct
  misc_feature 1..30: note = Isocitrate dehydrogenase (NADP) cytoplasmic (130-139)
  source 1..30: mol_type = other RNA
gagatctacgacaagcagtacaagagccag

SEQ ID NO: 48922 - RNA, 30 nt, synthetic construct
  misc_feature 1..30: note = Oligodendrocyte transcription factor 2 (209-218)
  source 1..30: mol_type = other RNA
gagatctacggcgggcaccacgccggcttc

SEQ ID NO: 48923 - RNA, 39 nt, synthetic construct
  misc_feature 1..39: note = Splicing factor 3B subunit 1 (42-54)
  source 1..39: mol_type = other RNA
gagatctacggcgggagcgactcccgcttcgccggctac

SEQ ID NO: 48924 - RNA, 27 nt, synthetic construct
  misc_feature 1..27: note = Plexin-C1 (1523-1531)
  source 1..27: mol_type = other RNA
gagatctacaagtacatcgtgaagtac

SEQ ID NO: 48925 - RNA, 30 nt, synthetic construct
  misc_feature 1..30: note = Kinesin-like protein KIF2C (403-412)
  source 1..30: mol_type = other RNA
gagatctacaacggcaagctgttcgacctc

SEQ ID NO: 48926 - RNA, 30 nt, synthetic construct
  misc_feature 1..30: note = Cyclin E variant ex7del (18-27)
  source 1..30: mol_type = other RNA
gagatctaccccccgaagctgcaccagttc

SEQ ID NO: 48927 - RNA, 27 nt, synthetic construct
  misc_feature 1..27: note = Coatomer subunit beta' (352-360)
  source 1..27: mol_type = other RNA
gagatctacccccagaccatccagcac

SEQ ID NO: 48928 - RNA, 27 nt, synthetic construct
  misc_feature 1..27: note = Replication factor C subunit 2 (159-167)
  source 1..27: mol_type = other RNA
gagatctacagcaagaccacccgcttc

SEQ ID NO: 48929 - RNA, 27 nt, synthetic construct
  misc_feature 1..27: note = Alpha-soluble NSF attachment protein (109-117)
  source 1..27: mol_type = other RNA
gagatctacaccgacatgggccgcttc

SEQ ID NO: 48930 - RNA, 27 nt, synthetic construct
  misc_feature 1..27: note = FYVE and coiled-coil domain-containing protein 1 (1096-1104)
  source 1..27: mol_type = other RNA
gagaaggccaccaccaagatccaggag

SEQ ID NO: 48931 - RNA, 27 nt, synthetic construct
  misc_feature 1..27: note = Tripartite motif-containing protein 42 (167-175)
  source 1..27: mol_type = other RNA
gagaagtgcctgcgccagctccagaag

SEQ ID NO: 48932 - RNA, 30 nt, synthetic construct
  misc_feature 1..30: note = Protein Mis18-beta (196-205)
  source 1..30: mol_type = other RNA
gagaagatcgccgagctgaaggagaagatc

SEQ ID NO: 48933 - RNA, 30 nt, synthetic construct
  misc_feature 1..30: note = E3 ubiquitin-protein ligase TRIM13 (190-199)
  source 1..30: mol_type = other RNA
gagaagctgcagcacaccctcgaccagaag

SEQ ID NO: 48934 - RNA, 27 nt, synthetic construct
  misc_feature 1..27: note = AP-2 complex subunit alpha-1 (36-44)
  source 1..27: mol_type = other RNA
gagctggccaacatccgcagcaagttc

SEQ ID NO: 48935 - RNA, 33 nt, synthetic construct
  misc_feature 1..33: note = L-dopachrome tautomerase (109-119)
  source 1..33: mol_type = other RNA
gagctggcccccatcggccacaaccgcatgtac

SEQ ID NO: 48936 - RNA, 27 nt, synthetic construct
  misc_feature 1..27: note = Prelamin-A/C (122-130)
  source 1..27: mol_type = other RNA
gagctggacttccagaagaacatctac

SEQ ID NO: 48937 - RNA, 33 nt, synthetic construct
  misc_feature 1..33: note = Unconventional myosin-Va (1068-1078)
  source 1..33: mol_type = other RNA
gagctggacctcaacgacgagcgcctgcggtac

SEQ ID NO: 48938 - RNA, 30 nt, synthetic construct
  misc_feature 1..30: note = Centrosomal protein of 112 kDa (922-931)
  source 1..30: mol_type = other RNA
gagctggaggacaccatcagctccctcaag

SEQ ID NO: 48939 - RNA, 30 nt, synthetic construct
  misc_feature 1..30: note = Coatomer subunit epsilon (18-27)
  source 1..30: mol_type = other RNA
gagctgttcgacgtgaagaacgccttctac

SEQ ID NO: 48940 - RNA, 30 nt, synthetic construct
  misc_feature 1..30: note = Histone H2A deubiquitinase MYSM1 (25-34)
  source 1..30: mol_type = other RNA
gagctgttcgagcagggcctcgccaagttc

SEQ ID NO: 48941 - RNA, 30 nt, synthetic construct
  misc_feature 1..30: note = General transcription factor II-I (326-335)
  source 1..30: mol_type = other RNA
gagctgttcgagcgcaagtacgcccaggcc

SEQ ID NO: 48942 - RNA, 30 nt, synthetic construct
  misc_feature 1..30: note = Vacuolar protein sorting-associated protein 13A (890-899)
  source 1..30: mol_type = other RNA
gagctgttccacaaggacatcgaggccttc

SEQ ID NO: 48943 - RNA, 36 nt, synthetic construct
  misc_feature 1..36: note = THO complex subunit 3 (40-51)
  source 1..36: mol_type = other RNA
gagctgttccgcggccacagcaagacccgggagttc

SEQ ID NO: 48944 - RNA, 27 nt, synthetic construct
  misc_feature 1..27: note = Integrator complex subunit 8 (283-291)
  source 1..27: mol_type = other RNA
gagctgatcgccgagatcggcagcctc

SEQ ID NO: 48945 - RNA, 33 nt, synthetic construct
  misc_feature 1..33: note = Influenza virus NS1A-binding protein (345-355)
  source 1..33: mol_type = other RNA
gagctgatcgagaagcccatgagcccgatgcag

SEQ ID NO: 48946 - RNA, 33 nt, synthetic construct
  misc_feature 1..33: note = Switch-associated protein 70 (177-187)
  source 1..33: mol_type = other RNA
gagctgatcgagctcatcggcaacgggcagttc

SEQ ID NO: 48947 - RNA, 27 nt, synthetic construct
  misc_feature 1..27: note = Uncharacterized protein C20orf96 (128-136)
  source 1..27: mol_type = other RNA
gagctgatcgagaccatccaggagatg

SEQ ID NO: 48948 - RNA, 33 nt, synthetic construct
  misc_feature 1..33: note = Derlin-1 (173-183)
  source 1..33: mol_type = other RNA
gagctgatcggcaacctcgtggggcacctgtac

SEQ ID NO: 48949 - RNA, 33 nt, synthetic construct
  misc_feature 1..33: note = Endoplasmin (169-179)
  source 1..33: mol_type = other RNA
gagctgatcggccagttcggggtgggcttctac

SEQ ID NO: 48950 - RNA, 30 nt, synthetic construct
  misc_feature 1..30: note = High affinity cationic amino acid transporter 1 (138-147)
  source 1..30: mol_type = other RNA
gagctgatcggccgccccatcggggagttc

SEQ ID NO: 48951 - RNA, 27 nt, synthetic construct
  misc_feature 1..27: note = F-BAR domain only protein 2 (94-102)
  source 1..27: mol_type = other RNA
gagctgatcaaggaggtgcagaagtac

SEQ ID NO: 48952 - RNA, 27 nt, synthetic construct
  misc_feature 1..27: note = Regulatory-associated protein of mTOR (80-88)
  source 1..27: mol_type = other RNA
gagctgatcaacaacatcaagtactac

SEQ ID NO: 48953 - RNA, 27 nt, synthetic construct
  misc_feature 1..27: note = Heat shock protein HSP 90-alpha (498-506)
  source 1..27: mol_type = other RNA
gagctgatccccgagtacctcaacttc

SEQ ID NO: 48954 - RNA, 24 nt, synthetic construct
  misc_feature 1..24: note = ATP-dependent DNA helicase Q1 (34-41)
  source 1..24: mol_type = other RNA
gagctgatccagaagaagaaggtg

SEQ ID NO: 48955 - RNA, 27 nt, synthetic construct
  misc_feature 1..27: note = LisH domain-containing protein FOPNL (55-63)
  source 1..27: mol_type = other RNA
gagctgatccgcgagtacctcgagttc

SEQ ID NO: 48956 - RNA, 27 nt, synthetic construct
  misc_feature 1..27: note = Condensin complex subunit 1 (994-1002)
  source 1..27: mol_type = other RNA
gagctgatccgcggcatctgcgagatg

SEQ ID NO: 48957 - RNA, 27 nt, synthetic construct
  misc_feature 1..27: note = Inositol-tetrakisphosphate 1-kinase (111-119)
  source 1..27: mol_type = other RNA
gagctgatccgcaagatcgaggcctac

SEQ ID NO: 48958 - RNA, 27 nt, synthetic construct
  misc_feature 1..27: note = Probable ubiquitin carboxyl-terminal hydrolase FAF-X (1964-1972)
  source 1..27: mol_type = other RNA
gagctgatccgctacatcagcgagctc

SEQ ID NO: 48959 - RNA, 27 nt, synthetic construct
  misc_feature 1..27: note = Cyclin-dependent kinase 17 (448-456)
  source 1..27: mol_type = other RNA
gagctgatcaccaagttcctccagtac

SEQ ID NO: 48960 - RNA, 33 nt, synthetic construct
  misc_feature 1..33: note = AP-1 complex subunit sigma-1A (76-86)
  source 1..33: mol_type = other RNA
gagctgatcaccctcgagctgatccaccgctac

SEQ ID NO: 48961 - RNA, 27 nt, synthetic construct
  misc_feature 1..27: note = Ras GTPase-activating protein-binding protein 1 (355-363)
  source 1..27: mol_type = other RNA
gagctgaaggacttcttccagagctac

SEQ ID NO: 48962 - RNA, 27 nt, synthetic construct
  misc_feature 1..27: note = Polypeptide N-acetylgalactosaminyltransferase 18 (200-208)
  source 1..27: mol_type = other RNA
gagctgaaggagaagctcaccgagtac

SEQ ID NO: 48963 - RNA, 27 nt, synthetic construct
  misc_feature 1..27: note = Zinc finger CCCH domain-containing protein 13 (909-917)
  source 1..27: mol_type = other RNA
gagctgaaggagaaggtgagctccgtc

SEQ ID NO: 48964 - RNA, 27 nt, synthetic construct
  misc_feature 1..27: note = Ankyrin repeat and LEM domain-containing protein 2 (463-471)
  source 1..27: mol_type = other RNA
gagctgaaggagcgcatccgggagtac

SEQ ID NO: 48965 - RNA, 27 nt, synthetic construct
  misc_feature 1..27: note = Histone-lysine N-methyltransferase SUV420H1 (136-144)
  source 1..27: mol_type = other RNA
gagctgaaggaggtgatcgagcgcttc

SEQ ID NO: 48966 - RNA, 27 nt, synthetic construct
  misc_feature 1..27: note = Glyceraldehyde-3-phosphate dehydrogenase, testis-specific (295-303)
  source 1..27: mol_type = other RNA
gagctgaagggcaagctcaccgggatg

SEQ ID NO: 48967 - RNA, 27 nt, synthetic construct
  misc_feature 1..27: note = Periphilin-1 (355-363)
  source 1..27: mol_type = other RNA
gagctgaagcacttcatcgccgagtac

SEQ ID NO: 48968 - RNA, 27 nt, synthetic construct
  misc_feature 1..27: note = Probable ATP-dependent RNA helicase DDX46 (184-192)
  source 1..27: mol_type = other RNA
gagctgaagaaggagatcgaggagatg

SEQ ID NO: 48969 - RNA, 27 nt, synthetic construct
  misc_feature 1..27: note = Serine/threonine-protein kinase Nek2 (90-98)
  source 1..27: mol_type = other RNA
gagctgaagctcaaggagatccagctg

SEQ ID NO: 48970 - RNA, 27 nt, synthetic construct
  misc_feature 1..27: note = Golgin subfamily A member 4 (1075-1083)
  source 1..27: mol_type = other RNA
gagctgaagcagaagatcctcctgttc

SEQ ID NO: 48971 - RNA, 27 nt, synthetic construct
  misc_feature 1..27: note = CAP-Gly domain-containing linker protein 1 (612-620)
  source 1..27: mol_type = other RNA
gagctgaagacccagatcgagaagatg

SEQ ID NO: 48972 - RNA, 36 nt, synthetic construct
  misc_feature 1..36: note = Stromal cell-derived factor 2 (200-211)
  source 1..36: mol_type = other RNA
gagctgctcaaggccgaggcccaccacgcggagctg

SEQ ID NO: 48973 - RNA, 24 nt, synthetic construct
  misc_feature 1..24: note = Heat shock protein 105 kDa (312-319)
  source 1..24: mol_type = other RNA
gagctgctccagaagatcgaggtg

SEQ ID NO: 48974 - RNA, 33 nt, synthetic construct
  misc_feature 1..33: note = 26S proteasome non-ATPase regulatory subunit 6 (212-222)
  source 1..33: mol_type = other RNA
gagctgatggactacaagaccttcgtgacctac

SEQ ID NO: 48975 - RNA, 30 nt, synthetic construct
  misc_feature 1..30: note = Centrosomal protein CEP57L1 (4-13)
  source 1..30: mol_type = other RNA
gagctgatgcacagcatcgtgggctcctac

SEQ ID NO: 48976 - RNA, 30 nt, synthetic construct
  misc_feature 1..30: note = ATP-dependent RNA helicase DDX18 (213-222)
  source 1..30: mol_type = other RNA
gagctgatgacccaccacgtgcacacctac

SEQ ID NO: 48977 - RNA, 30 nt, synthetic construct
  misc_feature 1..30: note = Puromycin-sensitive aminopeptidase (151-160)
  source 1..30: mol_type = other RNA
gagctgaacgacaagatgaagggcttctac

SEQ ID NO: 48978 - RNA, 27 nt, synthetic construct
  misc_feature 1..27: note = Vimentin (109-117)
  source 1..27: mol_type = other RNA
gagctgaacgaccgcttcgccaactac

SEQ ID NO: 48979 - RNA, 27 nt, synthetic construct
  misc_feature 1..27: note = Serine/threonine-protein kinase Nek2 (28-36)
  source 1..27: mol_type = other RNA
gagctgaacgagatcatcacccgcatg

SEQ ID NO: 48980 - RNA, 27 nt, synthetic construct
  misc_feature 1..27: note = Semaphorin-4C (385-393)
  source 1..27: mol_type = other RNA
gagctgcccgacaacatcctcaacttc

SEQ ID NO: 48981 - RNA, 27 nt, synthetic construct
  misc_feature 1..27: note = RNA polymerase II elongation factor ELL2 (524-532)
  source 1..27: mol_type = other RNA
gagctgcccgactacctcatcaagtac

SEQ ID NO: 48982 - RNA, 24 nt, synthetic construct
  misc_feature 1..24: note = Zinc finger CCCH domain-containing protein 4 (417-424)
  source 1..24: mol_type = other RNA
gagctgcccaagaagcgcgagctc

SEQ ID NO: 48983 - RNA, 27 nt, synthetic construct
  misc_feature 1..27: note = Nuclear pore complex protein Nup205 (523-531)
  source 1..27: mol_type = other RNA
gagctgcagggccacatcgggcgcttc

SEQ ID NO: 48984 - RNA, 30 nt, synthetic construct
  misc_feature 1..30: note = Alpha-enolase (15-24)
  source 1..30: mol_type = other RNA
gagctgcgcgacaacgacaagacccggtac

SEQ ID NO: 48985 - RNA, 27 nt, synthetic construct
  misc_feature 1..27: note = TAR DNA-binding protein 43 (206-214)
  source 1..27: mol_type = other RNA
gagctgcgcgagttcttcagccagtac

SEQ ID NO: 48986 - RNA, 27 nt, synthetic construct
  misc_feature 1..27: note = Serine/threonine-protein kinase TAO3 (456-464)
  source 1..27: mol_type = other RNA
gagctgcgcgagcagatgagcggctac

SEQ ID NO: 48987 - RNA, 27 nt, synthetic construct
  misc_feature 1..27: note = Rho guanine nucleotide exchange factor 2 (258-266)
  source 1..27: mol_type = other RNA
gagctgagcgacatccacacccgcttc

SEQ ID NO: 48988 - RNA, 27 nt, synthetic construct
  misc_feature 1..27: note = dCTP pyrophosphatase 1 (95-103)
  source 1..27: mol_type = other RNA
gagctgagcgacgtgctcatctacctg

SEQ ID NO: 48989 - RNA, 27 nt, synthetic construct
  misc_feature 1..27: note = Protein phosphatase 1 regulatory subunit 12A (956-964)
  source 1..27: mol_type = other RNA
gagctgaccgacctcaagctgcagctg

SEQ ID NO: 48990 - RNA, 33 nt, synthetic construct
  misc_feature 1..33: note = Clustered mitochondria protein homolog (607-617)
  source 1..33: mol_type = other RNA
gagctggtggacgccttcgtcgagcaccgctac

SEQ ID NO: 48991 - RNA, 27 nt, synthetic construct
  misc_feature 1..27: note = Splicing factor 3B subunit 2 (26-34)
  source 1..27: mol_type = other RNA
gagctggtggagcgcctccagagctac

SEQ ID NO: 48992 - RNA, 36 nt, synthetic construct
  misc_feature 1..36: note = F-box only protein 34 (410-421)
  source 1..36: mol_type = other RNA
gagctggtgggcctccccttcagctcccacacctac

SEQ ID NO: 48993 - RNA, 27 nt, synthetic construct
  misc_feature 1..27: note = Inositol-tetrakisphosphate 1-kinase (76-84)
  source 1..27: mol_type = other RNA
gagctggtgcaccgcttccaggagtac

SEQ ID NO: 48994 - RNA, 27 nt, synthetic construct
  misc_feature 1..27: note = Protein DEK (174-182)
  source 1..27: mol_type = other RNA
gagctggtgaagcgcatcctcaacttc

SEQ ID NO: 48995 - RNA, 30 nt, synthetic construct
  misc_feature 1..30: note = Sorting nexin-4 (344-353)
  source 1..30: mol_type = other RNA
gagctggtgaccggcaccgtccgcacgttc

SEQ ID NO: 48996 - RNA, 27 nt, synthetic construct
  misc_feature 1..27: note = DNA replication complex GINS protein PSF2 (13-21)
  source 1..27: mol_type = other RNA
gagctggtgaccatcatccccaacttc

SEQ ID NO: 48997 - RNA, 30 nt, synthetic construct
  misc_feature 1..30: note = U3 small nucleolar RNA-associated protein 15 homolog (362-371)
  source 1..30: mol_type = other RNA
gagctgtacgaccgcgacctcaagcacttc

SEQ ID NO: 48998 - RNA, 30 nt, synthetic construct
  misc_feature 1..30: note = Pumilio homolog 3 (274-283)
  source 1..30: mol_type = other RNA
gagctgtacggcaacaccttccagctctac

SEQ ID NO: 48999 - RNA, 27 nt, synthetic construct
  misc_feature 1..27: note = TELO2-interacting protein 1 homolog (510-518)
  source 1..27: mol_type = other RNA
gagctgtaccaccagagcgtggtctac

SEQ ID NO: 49000 - RNA, 30 nt, synthetic construct
  misc_feature 1..30: note = Protein RRP5 homolog (1712-1721)
  source 1..30: mol_type = other RNA
gagctgtacaaccgcatgctcaagcggttc

SEQ ID NO: 49001 - RNA, 30 nt, synthetic construct
  misc_feature 1..30: note = Tetratricopeptide repeat protein 37 (950-959)
  source 1..30: mol_type = other RNA
gagctgtaccagtacaacatcctccagatg

SEQ ID NO: 49002 - RNA, 27 nt, synthetic construct
  misc_feature 1..27: note = Vacuolar fusion protein CCZ1 homolog (448-456)
  source 1..27: mol_type = other RNA
gagctgtacgtgatcctcaaccagaag

SEQ ID NO: 49003 - RNA, 30 nt, synthetic construct
  misc_feature 1..30: note = Clathrin heavy chain 1 (1402-1411)
  source 1..30: mol_type = other RNA
gagctgtactaccgcgccatccagttctac

SEQ ID NO: 49004 - RNA, 27 nt, synthetic construct
  misc_feature 1..27: note = Dedicator of cytokinesis protein 7 (167-175)
  source 1..27: mol_type = other RNA
gagatgaaggaccgcatcacctacttc

SEQ ID NO: 49005 - RNA, 27 nt, synthetic construct
  misc_feature 1..27: note = Kinetochore-associated protein DSN1 homolog (194-202)
  source 1..27: mol_type = other RNA
gagatgaaggagtacatcaccaagttc

SEQ ID NO: 49006 - RNA, 27 nt, synthetic construct
  misc_feature 1..27: note = Actin-related protein 5 (513-521)
  source 1..27: mol_type = other RNA
gagatgcgccccttccggagctccttc

SEQ ID NO: 49007 - RNA, 33 nt, synthetic construct
  misc_feature 1..33: note = 5,6-dihydroxyindole-2-carboxylic acid oxidase (428-438)
  source 1..33: mol_type = other RNA
gagaacgcccccatcggccacaaccgccagtac

SEQ ID NO: 49008 - RNA, 33 nt, synthetic construct
  misc_feature 1..33: note = Eukaryotic translation initiation factor 3 subunit L (295-305)
  source 1..33: mol_type = other RNA
gagaacatcgagctgaacaagaagagcatgtac

SEQ ID NO: 49009 - RNA, 27 nt, synthetic construct
  misc_feature 1..27: note = Inositol-3-phosphate synthase 1 (246-254)
  source 1..27: mol_type = other RNA
gagaacctgctccgcaccatcgagctg

SEQ ID NO: 49010 - RNA, 27 nt, synthetic construct
  misc_feature 1..27: note = 15-hydroxyprostaglandin dehydrogenase (NAD(+)) (198-206)
  source 1..27: mol_type = other RNA
gagaacatgggccagtacatcgagtac

SEQ ID NO: 49011 - RNA, 27 nt, synthetic construct
  misc_feature 1..27: note = Mitogen-activated protein kinase 8 (261-269)
  source 1..27: mol_type = other RNA
gagaaccgccccaagtacgccggctac

SEQ ID NO: 49012 - RNA, 27 nt, synthetic construct
  misc_feature 1..27: note = THO complex subunit 1 (70-78)
  source 1..27: mol_type = other RNA
gagaacgtgctggccatcatcagcctc

SEQ ID NO: 49013 - RNA, 30 nt, synthetic construct
  misc_feature 1..30: note = Protein-methionine sulfoxide oxidase MICAL1 (261-270)
  source 1..30: mol_type = other RNA
gagcagcaccccggcgacgggcacttctac

SEQ ID NO: 49014 - RNA, 27 nt, synthetic construct
  misc_feature 1..27: note = Gamma-tubulin complex component 2 (486-494)
  source 1..27: mol_type = other RNA
gagcagatcgagaaggccttcaactac

SEQ ID NO: 49015 - RNA, 27 nt, synthetic construct
  misc_feature 1..27: note = Dual specificity protein phosphatase 19 (169-177)
  source 1..27: mol_type = other RNA
gagcagaccagcttcacctccgccttc

SEQ ID NO: 49016 - RNA, 27 nt, synthetic construct
  misc_feature 1..27: note = Semaphorin-4C (402-410)
  source 1..27: mol_type = other RNA
gagcaggtgggcccccgctggagccgg

SEQ ID NO: 49017 - RNA, 27 nt, synthetic construct
  misc_feature 1..27: note = Eukaryotic translation initiation factor 3 subunit A (577-585)
  source 1..27: mol_type = other RNA
gagcgcaaggagcggctggagagcctc

SEQ ID NO: 49018 - RNA, 27 nt, synthetic construct
  misc_feature 1..27: note = Protein enabled homolog (159-167)
  source 1..27: mol_type = other RNA
gagcgcctggagcggcaggagcgcctc

SEQ ID NO: 49019 - RNA, 24 nt, synthetic construct
  misc_feature 1..24: note = Endoplasmin (719-726)
  source 1..24: mol_type = other RNA
gagcgcatgctgcggctcagcctg

SEQ ID NO: 49020 - RNA, 27 nt, synthetic construct
  misc_feature 1..27: note = Nuclear factor NF-kappa-B p100 subunit (588-596)
  source 1..27: mol_type = other RNA
gagcgccagggcgggcggaccgccctg

SEQ ID NO: 49021 - RNA, 27 nt, synthetic construct
  misc_feature 1..27: note = Dual specificity protein phosphatase 4 (110-118)
  source 1..27: mol_type = other RNA
gagcgcagcccccgggccgagtccctg

SEQ ID NO: 49022 - RNA, 27 nt, synthetic construct
  misc_feature 1..27: note = Zinc finger protein 264 (382-390)
  source 1..27: mol_type = other RNA
gagagcgccgccctgatccaccactac

SEQ ID NO: 49023 - RNA, 27 nt, synthetic construct
  misc_feature 1..27: note = Histone acetyltransferase p300 (621-629)
  source 1..27: mol_type = other RNA
gagagcgccaacaaccgcgccgagtac

SEQ ID NO: 49024 - RNA, 33 nt, synthetic construct
  misc_feature 1..33: note = Glutamine and serine-rich protein 1 (139-149)
  source 1..33: mol_type = other RNA
gagagcgccccccacctgctccagccgcagttc

SEQ ID NO: 49025 - RNA, 30 nt, synthetic construct
  misc_feature 1..30: note = Chromodomain-helicase-DNA-binding protein 9 (1356-1365)
  source 1..30: mol_type = other RNA
gagagcgcctacatcctgcagggcgggtac

SEQ ID NO: 49026 - RNA, 30 nt, synthetic construct
  misc_feature 1..30: note = Protein fem-1 homolog B (29-38)
  source 1..30: mol_type = other RNA
gagagcgacatccgctacctgctcggctac

SEQ ID NO: 49027 - RNA, 33 nt, synthetic construct
  misc_feature 1..33: note = ER membrane protein complex subunit 1 (169-179)
  source 1..33: mol_type = other RNA
gagagcgactccatccactaccagatggtgtac

SEQ ID NO: 49028 - RNA, 30 nt, synthetic construct
  misc_feature 1..30: note = Prolyl endopeptidase FAP (88-97)
  source 1..30: mol_type = other RNA
gagagcgactactccaagctgtggcgctac

SEQ ID NO: 49029 - RNA, 30 nt, synthetic construct
  misc_feature 1..30: note = 28S ribosomal protein S18b, mitochondrial (60-69)
  source 1..30: mol_type = other RNA
gagagcgaggagtaccaggagcgctacggc

SEQ ID NO: 49030 - RNA, 36 nt, synthetic construct
  misc_feature 1..36: note = CD109 antigen (1076-1087)
  source 1..36: mol_type = other RNA
gagagcgagttctcccgcggcatcagcgacaactac

SEQ ID NO: 49031 - RNA, 24 nt, synthetic construct
  misc_feature 1..24: note = Asparagine synthetase (glutamine-hydrolyzing) (389-396)
  source 1..24: mol_type = other RNA
gagagcgagcgcctgctccgggag

SEQ ID NO: 49032 - RNA, 30 nt, synthetic construct
  misc_feature 1..30: note = Serine/threonine-protein kinase Nek3 (67-76)
  source 1..30: mol_type = other RNA
gagagcttcgaggccgagggccacctgtac

SEQ ID NO: 49033 - RNA, 27 nt, synthetic construct
  misc_feature 1..27: note = Sestrin-3 (9-17)
  source 1..27: mol_type = other RNA
gagagcttcctgcgctcccagttctac

SEQ ID NO: 49034 - RNA, 33 nt, synthetic construct
  misc_feature 1..33: note = Torsin-1A-interacting protein 2 (368-378)
  source 1..33: mol_type = other RNA
gagagcttccccgccggctccaccctgatcttc

SEQ ID NO: 49035 - RNA, 36 nt, synthetic construct
  misc_feature 1..36: note = Torsin-1A-interacting protein 2 (368-379)
  source 1..36: mol_type = other RNA
gagagcttccccgccggctccaccctgatcttctac

SEQ ID NO: 49036 - RNA, 30 nt, synthetic construct
  misc_feature 1..30: note = Cell division cycle-associated protein 7 (137-146)
  source 1..30: mol_type = other RNA
gagagcttccccggctccttccgcgggcgg

SEQ ID NO: 49037 - RNA, 36 nt, synthetic construct
  misc_feature 1..36: note = Putative elongation factor 1-alpha-like 3 (413-424)
  source 1..36: mol_type = other RNA
gagagcttctccgactaccccccgctgggccgcttc

SEQ ID NO: 49038 - RNA, 30 nt, synthetic construct
  misc_feature 1..30: note = Dual specificity protein kinase TTK (197-206)
  source 1..30: mol_type = other RNA
gagagcttctccggcagcctggggcacctc

SEQ ID NO: 49039 - RNA, 27 nt, synthetic construct
  misc_feature 1..27: note = ER degradation-enhancing alpha-mannosidase-like protein 2 (361-369)
  source 1..27: mol_type = other RNA
gagagcatcgagaagatctccaaggtg

SEQ ID NO: 49040 - RNA, 33 nt, synthetic construct
  misc_feature 1..33: note = E3 ubiquitin-protein ligase HECTD1 (531-541)
  source 1..33: mol_type = other RNA
gagagcatcgagcgcctgcccctccacctgtac

SEQ ID NO: 49041 - RNA, 27 nt, synthetic construct
  misc_feature 1..27: note = Zinc-binding alcohol dehydrogenase domain-containing protein 2 (347-355)
  source 1..27: mol_type = other RNA
gagagcatcttccgcgccgtgaactac

SEQ ID NO: 49042 - RNA, 30 nt, synthetic construct
  misc_feature 1..30: note = GATA zinc finger domain-containing protein 1 (140-149)
  source 1..30: mol_type = other RNA
gagagcatcttctacaagggcgtgtactac

SEQ ID NO: 49043 - RNA, 27 nt, synthetic construct
  misc_feature 1..27: note = Abnormal spindle-like microcephaly-associated protein (62-70)
  source 1..27: mol_type = other RNA
gagagcatcctgaccatccagaagtac

SEQ ID NO: 49044 - RNA, 39 nt, synthetic construct
  misc_feature 1..39: note = Ceramide synthase 4 (291-303)
  source 1..39: mol_type = other RNA
gagagcatctccaaccgcggccccttcttcgggtactac

SEQ ID NO: 49045 - RNA, 39 nt, synthetic construct
  misc_feature 1..39: note = Leucine-rich repeat-containing protein 9 (566-578)
  source 1..39: mol_type = other RNA
gagagcatctcccagagcaactaccccatggtgaactcc

SEQ ID NO: 49046 - RNA, 30 nt, synthetic construct
  misc_feature 1..30: note = Cytochrome b5 domain-containing protein 1 (157-166)
  source 1..30: mol_type = other RNA
gagagcatctgggagatcctgcaccgctac

SEQ ID NO: 49047 - RNA, 27 nt, synthetic construct
  misc_feature 1..27: note = Poly (ADP-ribose) polymerase 9 (164-172)
  source 1..27: mol_type = other RNA
gagagcaagcagttcgtggcccgctac

SEQ ID NO: 49048 - RNA, 27 nt, synthetic construct
  misc_feature 1..27: note = Coiled-coil domain-containing protein 158 (458-466)
  source 1..27: mol_type = other RNA
gagagcctggagaaggtgtccagcctc

SEQ ID NO: 49049 - RNA, 33 nt, synthetic construct
  misc_feature 1..33: note = Leucine-rich repeat-containing protein 57 (51-61)
  source 1..33: mol_type = other RNA
gagagcctgcccccgctcctgatcggcaagttc

SEQ ID NO: 49050 - RNA, 30 nt, synthetic construct
  misc_feature 1..30: note = N-acetylglucosamine-1-phosphotransferase subunits alpha/beta (1173-1182)
  source 1..30: mol_type = other RNA
gagagcatgttccccatcccgtcccagttc

SEQ ID NO: 49051 - RNA, 33 nt, synthetic construct
  misc_feature 1..33: note = Protein disulfide-isomerase A3 (36-46)
  source 1..33: mol_type = other RNA
gagagccgcatctccgacaccggcagcgccggg

SEQ ID NO: 49052 - RNA, 27 nt, synthetic construct
  misc_feature 1..27: note = BRCA1-A complex subunit BRE (134-142)
  source 1..27: mol_type = other RNA
gagagctcccgcctgatgttcgagtac

SEQ ID NO: 49053 - RNA, 27 nt, synthetic construct
  misc_feature 1..27: note = Protein FAM135A (825-833)
  source 1..27: mol_type = other RNA
gagagcacctccgccatcagcgagatc

SEQ ID NO: 49054 - RNA, 27 nt, synthetic construct
  misc_feature 1..27: note = Transcriptional enhancer factor TEF-1 (240-248)
  source 1..27: mol_type = other RNA
gagagcgtggacatccgccagatctac

SEQ ID NO: 49055 - RNA, 30 nt, synthetic construct
  misc_feature 1..30: note = OTU domain-containing protein 7B (579-588)
  source 1..30: mol_type = other RNA
gagagcgtgggcaacgggggctccaagtac

SEQ ID NO: 49056 - RNA, 27 nt, synthetic construct
  misc_feature 1..27: note = Scm-like with four MBT domains protein 1 (492-500)
  source 1..27: mol_type = other RNA
gagagcgtgatgatcaacggcaagtac

SEQ ID NO: 49057 - RNA, 27 nt, synthetic construct
  misc_feature 1..27: note = Tensin-1 (839-847)
  source 1..27: mol_type = other RNA
gagagcgtgcccccgggccgctcctac

SEQ ID NO: 49058 - RNA, 30 nt, synthetic construct
  misc_feature 1..30: note = Zinc transporter ZIP6 (242-251)
  source 1..30: mol_type = other RNA
gagagcgtgtccgagccccgcaagggcttc

SEQ ID NO: 49059 - RNA, 30 nt, synthetic construct
  misc_feature 1..30: note = 26S proteasome non-ATPase regulatory subunit 6 (309-318)
  source 1..30: mol_type = other RNA
gagagctaccgctccctgaccctcggctac

SEQ ID NO: 49060 - RNA, 30 nt, synthetic construct
  misc_feature 1..30: note = Exonuclease 1 (584-593)
  source 1..30: mol_type = other RNA
gagagctactccttcgagagctccaagttc

SEQ ID NO: 49061 - RNA, 24 nt, synthetic construct
  misc_feature 1..24: note = Lactosylceramide alpha-2,3-sialyltransferase (260-267)
  source 1..24: mol_type = other RNA
gagaccgccttcgacatcctgcag

SEQ ID NO: 49062 - RNA, 33 nt, synthetic construct
  misc_feature 1..33: note = Transcription factor SOX-10 (359-369)
  source 1..33: mol_type = other RNA
gagaccgccggcccccaggggccgccccactac

SEQ ID NO: 49063 - RNA, 27 nt, synthetic construct
  misc_feature 1..27: note = DNA-directed RNA polymerases I, II, and III subunit RPABC1 (198-206)
  source 1..27: mol_type = other RNA
gagaccgccggccgctacatcacctac

SEQ ID NO: 49064 - RNA, 36 nt, synthetic construct
  misc_feature 1..36: note = HLA class I histocompatibility antigen, A-66 alpha chain (147-158)
  source 1..36: mol_type = other RNA
gagaccgcccacgaggccgagcagtggcgcgcgtac

SEQ ID NO: 49065 - RNA, 30 nt, synthetic construct
  misc_feature 1..30: note = Actin-related protein 3 (171-180)
  source 1..30: mol_type = other RNA
gagaccgccaaggccgtgaaggagcgctac

SEQ ID NO: 49066 - RNA, 33 nt, synthetic construct
  misc_feature 1..33: note = Protein S100-A1 (6-16)
  source 1..33: mol_type = other RNA
gagaccgccatggagaccctgatcaacgtgttc

SEQ ID NO: 49067 - RNA, 33 nt, synthetic construct
  misc_feature 1..33: note = ATP-binding cassette sub-family E member 1 (335-345)
  source 1..33: mol_type = other RNA
gagaccgccaacgaggaggaggtgaagaagatg

SEQ ID NO: 49068 - RNA, 30 nt, synthetic construct
  misc_feature 1..30: note = YLP motif-containing protein 1 (228-237)
  source 1..30: mol_type = other RNA
gagaccgccccccgccacatgatgcggctg

SEQ ID NO: 49069 - RNA, 33 nt, synthetic construct
  misc_feature 1..33: note = Ataxin-10 (40-50)
  source 1..33: mol_type = other RNA
gagaccgccccccgcaccatcttccagcgggtg

SEQ ID NO: 49070 - RNA, 27 nt, synthetic construct
  misc_feature 1..27: note = Protein cordon-bleu (683-691)
  source 1..27: mol_type = other RNA
gagaccgccccccgcgtgaccagcttc

SEQ ID NO: 49071 - RNA, 27 nt, synthetic construct
  misc_feature 1..27: note = Alpha-1,3-mannosyl-glycoprotein 2-beta-N-acetylglucosaminyltransferase (147-155)
  source 1..27: mol_type = other RNA
gagaccgcccaggccatcgcgagctac

SEQ ID NO: 49072 - RNA, 27 nt, synthetic construct
  misc_feature 1..27: note = Exocyst complex component 8 (72-80)
  source 1..27: mol_type = other RNA
gagaccgcccgcgagatcagctacctg

SEQ ID NO: 49073 - RNA, 27 nt, synthetic construct
  misc_feature 1..27: note = Tudor domain-containing protein 7 (5-13)
  source 1..27: mol_type = other RNA
gagaccgcccgcatcgcccagctggtg

SEQ ID NO: 49074 - RNA, 30 nt, synthetic construct
  misc_feature 1..30: note = Spectrin beta chain, non-erythrocytic 1 (1262-1271)
  source 1..30: mol_type = other RNA
gagaccgccagcgagctgctcatgcgcctg

SEQ ID NO: 49075 - RNA, 30 nt, synthetic construct
  misc_feature 1..30: note = E3 ubiquitin-protein ligase RNF213 (3983-3992)
  source 1..30: mol_type = other RNA
gagaccgccagcaagaccctgtcccgcttc

SEQ ID NO: 49076 - RNA, 33 nt, synthetic construct
  misc_feature 1..33: note = Kinesin-like protein KIF2C (317-327)
  source 1..33: mol_type = other RNA
gagaccgccagcaacgaggtggtctaccgcttc

SEQ ID NO: 49077 - RNA, 27 nt, synthetic construct
  misc_feature 1..27: note = Protein furry homolog-like (371-379)
  source 1..27: mol_type = other RNA
gagaccgccagccgcatcgccaaggtg

SEQ ID NO: 49078 - RNA, 27 nt, synthetic construct
  misc_feature 1..27: note = Endoplasmin (698-706)
  source 1..27: mol_type = other RNA
gagaccgccaccctgcgcagcggctac

SEQ ID NO: 49079 - RNA, 33 nt, synthetic construct
  misc_feature 1..33: note = 2'-5'-oligoadenylate synthase 1 (355-365)
  source 1..33: mol_type = other RNA
gagaccgacgacccccgccggtaccagaagtac

SEQ ID NO: 49080 - RNA, 27 nt, synthetic construct
  misc_feature 1..27: note = Putative pre-mRNA-splicing factor ATP-dependent RNA helicase DHX32 (324-332)
  source 1..27: mol_type = other RNA
gagaccgagaagcgctgccaggtgtac

SEQ ID NO: 49081 - RNA, 42 nt, synthetic construct
  misc_feature 1..42: note = Sorting nexin-17 (7-20)
  source 1..42: mol_type = other RNA
gagaccgagagccgctccggcgacagcgggggctccgcctac

SEQ ID NO: 49082 - RNA, 33 nt, synthetic construct
  misc_feature 1..33: note = Caldesmon (164-174)
  source 1..33: mol_type = other RNA
gagaccgagaccgtgacgaagagctaccagaag

SEQ ID NO: 49083 - RNA, 30 nt, synthetic construct
  misc_feature 1..30: note = Deoxyhypusine synthase (353-362)
  source 1..30: mol_type = other RNA
gagaccttcgcccagaagatggacgccttc

SEQ ID NO: 49084 - RNA, 30 nt, synthetic construct
  misc_feature 1..30: note = Cytoplasmic dynein 1 heavy chain 1 (1934-1943)
  source 1..30: mol_type = other RNA
gagaccttcgacttccaggccatgggccgc

SEQ ID NO: 49085 - RNA, 33 nt, synthetic construct
  misc_feature 1..33: note = Protein FAM127B (29-39)
  source 1..33: mol_type = other RNA
gagaccttcgacggcgacaccgaccgcctgccc

SEQ ID NO: 49086 - RNA, 39 nt, synthetic construct
  misc_feature 1..39: note = Nicastrin (333-345)
  source 1..39: mol_type = other RNA
gagaccttcgactacatcggcagctcccgcatggtgtac

SEQ ID NO: 49087 - RNA, 27 nt, synthetic construct
  misc_feature 1..27: note = CAAX prenyl protease 1 homolog (62-70)
  source 1..27: mol_type = other RNA
gagaccttcgagaagagccgcctgtac

SEQ ID NO: 49088 - RNA, 33 nt, synthetic construct
  misc_feature 1..33: note = Ceramide glucosyltransferase (71-81)
  source 1..33: mol_type = other RNA
gagaccttcttcgagctggactaccccaagtac

SEQ ID NO: 49089 - RNA, 30 nt, synthetic construct
  misc_feature 1..30: note = Mediator of RNA polymerase II transcription subunit 13-like (1814-1823)
  source 1..30: mol_type = other RNA
gagaccttcggcgaggccagccagaagtac

SEQ ID NO: 49090 - RNA, 27 nt, synthetic construct
  misc_feature 1..27: note = Eukaryotic peptide chain release factor GTP-binding subunit ERF3A (465-473)
  source 1..27: mol_type = other RNA
gagaccttcaaggacttcccccagatg

SEQ ID NO: 49091 - RNA, 36 nt, synthetic construct
  misc_feature 1..36: note = Eukaryotic peptide chain release factor GTP-binding subunit ERF3A (465-476)
  source 1..36: mol_type = other RNA
gagaccttcaaggacttcccccagatgggccgcttc

SEQ ID NO: 49092 - RNA, 30 nt, synthetic construct
  misc_feature 1..30: note = Kv channel-interacting protein 4 isoform 5 (81-90)
  source 1..30: mol_type = other RNA
gagaccttcaaggagatctacagccagttc

SEQ ID NO: 49093 - RNA, 30 nt, synthetic construct
  misc_feature 1..30: note = Dephospho-CoA kinase domain-containing protein (98-107)
  source 1..30: mol_type = other RNA
gagaccttcaagtacttcctgcgcggctac

SEQ ID NO: 49094 - RNA, 33 nt, synthetic construct
  misc_feature 1..33: note = Proteasome-associated protein ECM29 homolog (349-359)
  source 1..33: mol_type = other RNA
gagaccttccccgccaacatccaggtggtctac

SEQ ID NO: 49095 - RNA, 30 nt, synthetic construct
  misc_feature 1..30: note = Telomeric repeat-binding factor 2 (175-184)
  source 1..30: mol_type = other RNA
gagaccttccagcagaagatgctgcgcttc

SEQ ID NO: 49096 - RNA, 27 nt, synthetic construct
  misc_feature 1..27: note = E3 ubiquitin-protein ligase RNF213 (2162-2170)
  source 1..27: mol_type = other RNA
gagaccttccagcgcccctaccagtac

SEQ ID NO: 49097 - RNA, 30 nt, synthetic construct
  misc_feature 1..30: note = Uncharacterized protein C7orf43 (200-209)
  source 1..30: mol_type = other RNA
gagaccttccgcggcgagcagagcgccttc

SEQ ID NO: 49098 - RNA, 30 nt, synthetic construct
  misc_feature 1..30: note = 40S ribosomal protein S7 (169-178)
  source 1..30: mol_type = other RNA
gagaccttcagcggcgtgtacaagaagctg

SEQ ID NO: 49099 - RNA, 27 nt, synthetic construct
  misc_feature 1..27: note = Protein SGT1 homolog (78-86)
  source 1..27: mol_type = other RNA
gagaccttcaccgagggccagaagctg

SEQ ID NO: 49100 - RNA, 27 nt, synthetic construct
  misc_feature 1..27: note = Mitotic spindle assembly checkpoint protein MAD2A (41-49)
  source 1..27: mol_type = other RNA
gagaccttcacccgcgtgcagaagtac

SEQ ID NO: 49101 - RNA, 30 nt, synthetic construct
  misc_feature 1..30: note = Src substrate cortactin (75-84)
  source 1..30: mol_type = other RNA
gagaccggccccaaggccagccacgggtac

SEQ ID NO: 49102 - RNA, 33 nt, synthetic construct
  misc_feature 1..33: note = Tetratricopeptide repeat protein 17 (861-871)
  source 1..33: mol_type = other RNA
gagaccggccagatcgagaacgggcaccgctac

SEQ ID NO: 49103 - RNA, 27 nt, synthetic construct
  misc_feature 1..27: note = Inositol 1,4,5-trisphosphate receptor type 2 (1301-1309)
  source 1..27: mol_type = other RNA
gagacccacggccgccacgtggagtac

SEQ ID NO: 49104 - RNA, 27 nt, synthetic construct
  misc_feature 1..27: note = L-dopachrome tautomerase (196-204)
  source 1..27: mol_type = other RNA
gagacccacctgagctccaagcgctac

SEQ ID NO: 49105 - RNA, 33 nt, synthetic construct
  misc_feature 1..33: note = Nucleoside diphosphate kinase homolog 5 (107-117)
  source 1..33: mol_type = other RNA
gagacccaccccgacagcctgcgcgccatctac

SEQ ID NO: 49106 - RNA, 30 nt, synthetic construct
  misc_feature 1..30: note = Conserved oligomeric Golgi complex subunit 4 (61-70)
  source 1..30: mol_type = other RNA
gagacccaccagcccatcgtggagacctac

SEQ ID NO: 49107 - RNA, 30 nt, synthetic construct
  misc_feature 1..30: note = Nuclear autoantigenic sperm protein (246-255)
  source 1..30: mol_type = other RNA
gagacccactaccagctgggcctcgcctac

SEQ ID NO: 49108 - RNA, 27 nt, synthetic construct
  misc_feature 1..27: note = Glutamine-fructose-6-phosphate aminotransferase (isomerizing) 1 (27-35)
  source 1..27: mol_type = other RNA
gagaccatcgccaagctggtgaagtac

SEQ ID NO: 49109 - RNA, 36 nt, synthetic construct
  misc_feature 1..36: note = Splicing factor 3A subunit 2 (36-47)
  source 1..36: mol_type = other RNA
gagaccatcgacatcaacaaggacccctacttcatg

SEQ ID NO: 49110 - RNA, 27 nt, synthetic construct
  misc_feature 1..27: note = Alpha-aminoadipic semialdehyde synthase, mitochondrial (614-622)
  source 1..27: mol_type = other RNA
gagaccatcgacaaggccaaggaggtg

SEQ ID NO: 49111 - RNA, 30 nt, synthetic construct
  misc_feature 1..30: note = HEAT repeat-containing protein 5B (1515-1524)
  source 1..30: mol_type = other RNA
gagaccatcgacaccgcccgcctgcactac

SEQ ID NO: 49112 - RNA, 33 nt, synthetic construct
  misc_feature 1..33: note = Methylsterol monooxygenase 1 (92-102)
  source 1..33: mol_type = other RNA
gagaccatcgacgtgcacagcggctacgacatc

SEQ ID NO: 49113 - RNA, 27 nt, synthetic construct
  misc_feature 1..27: note = Threonine-tRNA ligase, cytoplasmic (692-700)
  source 1..27: mol_type = other RNA
gagaccatcgagcgcctgcagcagctc

SEQ ID NO: 49114 - RNA, 27 nt, synthetic construct
  misc_feature 1..27: note = TBC1 domain family member 10A (329-337)
  source 1..27: mol_type = other RNA
gagaccatcgagcgcctgcggagcctc

SEQ ID NO: 49115 - RNA, 39 nt, synthetic construct
  misc_feature 1..39: note = GRIP and coiled-coil domain-containing protein 1 (19-31)
  source 1..39: mol_type = other RNA
gagaccatcgagacccagaagaagcagctgctccagtac

SEQ ID NO: 49116 - RNA, 27 nt, synthetic construct
  misc_feature 1..27: note = DNA-directed RNA polymerase III subunit RPC3 (517-525)
  source 1..27: mol_type = other RNA
gagaccatcttcctgctcgagagctac

SEQ ID NO: 49117 - RNA, 27 nt, synthetic construct
  misc_feature 1..27: note = Dynamin-like 120 kDa protein, mitochondrial (435-443)
  source 1..27: mol_type = other RNA
gagaccatcttcagcatctccaaggcc

SEQ ID NO: 49118 - RNA, 33 nt, synthetic construct
  misc_feature 1..33: note = Regulatory-associated protein of mTOR (100-110)
  source 1..33: mol_type = other RNA
gagaccatcggcgccaacctgcagaagcagtac

SEQ ID NO: 49119 - RNA, 27 nt, synthetic construct
  misc_feature 1..27: note = Heterogeneous nuclear ribonucleoprotein K (95-103)
  source 1..27: mol_type = other RNA
gagaccatcggcgagatcctgaagaag

SEQ ID NO: 49120 - RNA, 27 nt, synthetic construct
  misc_feature 1..27: note = X-ray repair cross-complementing protein 5 (17-25)
  source 1..27: mol_type = other RNA
gagaccatcggcaagaagttcgagaag

SEQ ID NO: 49121 - RNA, 36 nt, synthetic construct
  misc_feature 1..36: note = Superkiller viralicidic activity 2-like 2 (269-280)
  source 1..36: mol_type = other RNA
gagaccatcatcctgctccccgacaacgtgcactac

SEQ ID NO: 49122 - RNA, 33 nt, synthetic construct
  misc_feature 1..33: note = Golgi-specific brefeldin A-resistance guanine nucleotide exchange factor 1 (948-958)
  source 1..33: mol_type = other RNA
gagaccatcatccagaaggccatcagcggcttc

SEQ ID NO: 49123 - RNA, 30 nt, synthetic construct
  misc_feature 1..30: note = Inositol polyphosphate multikinase (205-214)
  source 1..30: mol_type = other RNA
gagaccatcaaggacggcgtgagccgcttc

SEQ ID NO: 49124 - RNA, 30 nt, synthetic construct
  misc_feature 1..30: note = Cyclin-dependent kinase 4 (41-50)
  source 1..30: mol_type = other RNA
gagaccatcaaggacctgatgcgccagttc

SEQ ID NO: 49125 - RNA, 36 nt, synthetic construct
  misc_feature 1..36: note = Ral GTPase-activating protein subunit beta (590-601)
  source 1..36: mol_type = other RNA
gagaccatcctgcccgaccgcgagctcagcaagttc

SEQ ID NO: 49126 - RNA, 30 nt, synthetic construct
  misc_feature 1..30: note = Mitochondrial Rho GTPase 1 (129-138)
  source 1..30: mol_type = other RNA
gagaccatcctgcccatcatgaaccagtac

SEQ ID NO: 49127 - RNA, 27 nt, synthetic construct
  misc_feature 1..27: note = Sodium-dependent neutral amino acid transporter B(0)AT2 (81-89)
  source 1..27: mol_type = other RNA
gagaccatcatgaagttcctgaagatg

SEQ ID NO: 49128 - RNA, 27 nt, synthetic construct
  misc_feature 1..27: note = Rab GDP dissociation inhibitor beta (124-132)
  source 1..27: mol_type = other RNA
gagaccatcaaccgcatcaagctgtac

SEQ ID NO: 49129 - RNA, 27 nt, synthetic construct
  misc_feature 1..27: note = cAMP-specific 3',5'-cyclic phosphodiesterase 4B (104-112)
  source 1..27: mol_type = other RNA
gagaccatccagacctaccgcagcgtg

SEQ ID NO: 49130 - RNA, 30 nt, synthetic construct
  misc_feature 1..30: note = Platelet-derived growth factor D (54-63)
  source 1..30: mol_type = other RNA
gagaccatccaggtgaagggcaacgggtac

SEQ ID NO: 49131 - RNA, 27 nt, synthetic construct
  misc_feature 1..27: note = Vacuolar protein-sorting-associated protein 36 (204-212)
  source 1..27: mol_type = other RNA
gagaccatccgcttcaagagctacctg

SEQ ID NO: 49132 - RNA, 27 nt, synthetic construct
  misc_feature 1..27: note = Transmembrane protein 260 (666-674)
  source 1..27: mol_type = other RNA
gagaccatccgccacttccggctgtac

SEQ ID NO: 49133 - RNA, 30 nt, synthetic construct
  misc_feature 1..30: note = Probable ATP-dependent RNA helicase DDX41 (307-316)
  source 1..30: mol_type = other RNA
gagaccatccgccacggcgtgcacatgatg

SEQ ID NO: 49134 - RNA, 27 nt, synthetic construct
  misc_feature 1..27: note = Lysophospholipid acyltransferase 7 (297-305)
  source 1..27: mol_type = other RNA
gagaccatccgcaacatcgactgctac

SEQ ID NO: 49135 - RNA, 27 nt, synthetic construct
  misc_feature 1..27: note = HAUS augmin-like complex subunit 2 (20-28)
  source 1..27: mol_type = other RNA
gagaccatccgcaacatcccccacctg

SEQ ID NO: 49136 - RNA, 30 nt, synthetic construct
  misc_feature 1..30: note = Dynamin-2 (654-663)
  source 1..30: mol_type = other RNA
gagaccatccgcaacctggtggacagctac

SEQ ID NO: 49137 - RNA, 27 nt, synthetic construct
  misc_feature 1..27: note = Basic leucine zipper and W2 domain-containing protein 2 (106-114)
  source 1..27: mol_type = other RNA
gagaccatccgcaactacgcccaggtg

SEQ ID NO: 49138 - RNA, 27 nt, synthetic construct
  misc_feature 1..27: note = T-complex protein 1 subunit alpha (15-23)
  source 1..27: mol_type = other RNA
gagaccatccgcagccagaacgtgatg

SEQ ID NO: 49139 - RNA, 27 nt, synthetic construct
  misc_feature 1..27: note = Zinc finger FYVE domain-containing protein 16 (802-810)
  source 1..27: mol_type = other RNA
gagaccatcagcaaggcccaggccttc

SEQ ID NO: 49140 - RNA, 27 nt, synthetic construct
  misc_feature 1..27: note = dTDP-D-glucose 4,6-dehydratase (30-38)
  source 1..27: mol_type = other RNA
gagaccatcagcaacaagcagaactac

SEQ ID NO: 49141 - RNA, 36 nt, synthetic construct
  misc_feature 1..36: note = Lysosomal glucocerebrosidase (500-511)
  source 1..36: mol_type = other RNA
gagaccatcagccccggctactccatccacacctac

SEQ ID NO: 49142 - RNA, 27 nt, synthetic construct
  misc_feature 1..27: note = Delta(14)-sterol reductase (327-335)
  source 1..27: mol_type = other RNA
gagaccatcagcaccgccacgggccgc

SEQ ID NO: 49143 - RNA, 33 nt, synthetic construct
  misc_feature 1..33: note = UDP-N-acetylhexosamine pyrophosphorylase (460-470)
  source 1..33: mol_type = other RNA
gagaccatcaccgccgacgtgaaccacaacctg

SEQ ID NO: 49144 - RNA, 27 nt, synthetic construct
  misc_feature 1..27: note = THO complex subunit 2 (857-865)
  source 1..27: mol_type = other RNA
gagaccatcaccaagttcctgcagctc

SEQ ID NO: 49145 - RNA, 33 nt, synthetic construct
  misc_feature 1..33: note = S-phase kinase-associated protein 2 (283-293)
  source 1..33: mol_type = other RNA
gagaccatcacccagctgaacctcagcggctac

SEQ ID NO: 49146 - RNA, 33 nt, synthetic construct
  misc_feature 1..33: note = Minor histocompatibility antigen H13 (68-78)
  source 1..33: mol_type = other RNA
gagaccatcaccagccgcgacgccgcccggttc

SEQ ID NO: 49147 - RNA, 27 nt, synthetic construct
  misc_feature 1..27: note = DNA repair protein complementing XP-A cells (180-188)
  source 1..27: mol_type = other RNA
gagaccatcgtgcaccagcacgagtac

SEQ ID NO: 49148 - RNA, 27 nt, synthetic construct
  misc_feature 1..27: note = Disco-interacting protein 2 homolog B (143-151)
  source 1..27: mol_type = other RNA
gagaccatcgtgaacgtcctggacttc

SEQ ID NO: 49149 - RNA, 30 nt, synthetic construct
  misc_feature 1..30: note = Tumor suppressor candidate 2 (66-75)
  source 1..30: mol_type = other RNA
gagaccatcgtgaccaagaacggccagaag

SEQ ID NO: 49150 - RNA, 30 nt, synthetic construct
  misc_feature 1..30: note = RuvB-like 2 (169-178)
  source 1..30: mol_type = other RNA
gagaccatctacgacctgggcaccaagatg

SEQ ID NO: 49151 - RNA, 33 nt, synthetic construct
  misc_feature 1..33: note = Mediator of RNA polymerase II transcription subunit 23 (553-563)
  source 1..33: mol_type = other RNA
gagaccatctacggcaacgggatcatgcgcatc

SEQ ID NO: 49152 - RNA, 27 nt, synthetic construct
  misc_feature 1..27: note = Peroxisome biogenesis factor 1 (491-499)
  source 1..27: mol_type = other RNA
gagaccaaggacggcctgaaggagttc

SEQ ID NO: 49153 - RNA, 27 nt, synthetic construct
  misc_feature 1..27: note = F-box only protein 38 (25-33)
  source 1..27: mol_type = other RNA
gagaccaaggactacatgaaccagctg

SEQ ID NO: 49154 - RNA, 33 nt, synthetic construct
  misc_feature 1..33: note = Destrin (90-100)
  source 1..33: mol_type = other RNA
gagaccaaggagagccgcaaggaggagctgatg

SEQ ID NO: 49155 - RNA, 27 nt, synthetic construct
  misc_feature 1..27: note = Dynein light chain 1, cytoplasmic (69-77)
  source 1..27: mol_type = other RNA
gagaccaagcacttcatctacttctac

SEQ ID NO: 49156 - RNA, 27 nt, synthetic construct
  misc_feature 1..27: note = ATP-dependent RNA helicase DDX50 (83-91)
  source 1..27: mol_type = other RNA
gagaccaagaagaacgtgaccgagatg

SEQ ID NO: 49157 - RNA, 27 nt, synthetic construct
  misc_feature 1..27: note = Protein LTV1 homolog (235-243)
  source 1..27: mol_type = other RNA
gagaccaagagccgcttcaccgagtac

SEQ ID NO: 49158 - RNA, 27 nt, synthetic construct
  misc_feature 1..27: note = UPF0462 protein C4orf33 (111-119)
  source 1..27: mol_type = other RNA
gagaccaagtgggagggcaaggcctac

SEQ ID NO: 49159 - RNA, 30 nt, synthetic construct
  misc_feature 1..30: note = Alpha-centractin (232-241)
  source 1..30: mol_type = other RNA
gagaccctggagaccgagaaggcccagtac

SEQ ID NO: 49160 - RNA, 33 nt, synthetic construct
  misc_feature 1..33: note = Alpha-centractin (232-242)
  source 1..33: mol_type = other RNA
gagaccctggagaccgagaaggcccagtactac

SEQ ID NO: 49161 - RNA, 27 nt, synthetic construct
  misc_feature 1..27: note = Heterogeneous nuclear ribonucleoprotein L (557-565)
  source 1..27: mol_type = other RNA
gagaccctgggcttcctcaaccactac

SEQ ID NO: 49162 - RNA, 30 nt, synthetic construct
  misc_feature 1..30: note = Truncated extracellular matrix protein 1 (208-217)
  source 1..30: mol_type = other RNA
gagaccctgaacttcctcgagatcggctac

SEQ ID NO: 49163 - RNA, 33 nt, synthetic construct
  misc_feature 1..33: note = HEAT repeat-containing protein 1 (1769-1779)
  source 1..33: mol_type = other RNA
gagaccctgccccacttcatcagcccgtacctc

SEQ ID NO: 49164 - RNA, 27 nt, synthetic construct
  misc_feature 1..27: note = Neuron navigator 2 (931-939)
  source 1..27: mol_type = other RNA
gagaccctgcagcgcaacaccagcctc

SEQ ID NO: 49165 - RNA, 30 nt, synthetic construct
  misc_feature 1..30: note = LIM domain-binding protein 3 (205-214)
  source 1..30: mol_type = other RNA
gagaccctgcgcgagatggcccagatgtac

SEQ ID NO: 49166 - RNA, 30 nt, synthetic construct
  misc_feature 1..30: note = Transient receptor potential cation channel subfamily M member 7 (239-248)
  source 1..30: mol_type = other RNA
gagaccatggccatgaagctgctcacctac

SEQ ID NO: 49167 - RNA, 39 nt, synthetic construct
  misc_feature 1..39: note = Nucleoporin NUP188 homolog (30-42)
  source 1..39: mol_type = other RNA
gagaccatggaccccttcgtggaccgcatcggctacttc

SEQ ID NO: 49168 - RNA, 39 nt, synthetic construct
  misc_feature 1..39: note = Aldehyde dehydrogenase family 1 member A3 (118-130)
  source 1..39: mol_type = other RNA
gagaccatggacaccggcaagcccttcctgcacgccttc

SEQ ID NO: 49169 - RNA, 33 nt, synthetic construct
  misc_feature 1..33: note = Myosin-10 (328-338)
  source 1..33: mol_type = other RNA
gagaccatggaggccatgcacatcatgggcttc

SEQ ID NO: 49170 - RNA, 30 nt, synthetic construct
  misc_feature 1..30: note = Heterogeneous nuclear ribonucleoprotein H (76-85)
  source 1..30: mol_type = other RNA
gagaccatgggccaccgctacgtggaggtc

SEQ ID NO: 49171 - RNA, 27 nt, synthetic construct
  misc_feature 1..27: note = ETS-related transcription factor Elf-2 (173-181)
  source 1..27: mol_type = other RNA
gagaccatgggccgcgccctgcggtac

SEQ ID NO: 49172 - RNA, 27 nt, synthetic construct
  misc_feature 1..27: note = Serine/threonine-protein phosphatase 4 regulatory subunit 2 (37-45)
  source 1..27: mol_type = other RNA
gagaccatgatccagtggagccagttc

SEQ ID NO: 49173 - RNA, 27 nt, synthetic construct
  misc_feature 1..27: note = Apolipoprotein E (84-92)
  source 1..27: mol_type = other RNA
gagaccatgaaggagctgaaggcctac

SEQ ID NO: 49174 - RNA, 27 nt, synthetic construct
  misc_feature 1..27: note = Ribosome-recycling factor, mitochondrial (153-161)
  source 1..27: mol_type = other RNA
gagaccatgaagcagatcaagcagtac

SEQ ID NO: 49175 - RNA, 30 nt, synthetic construct
  misc_feature 1..30: note = Interferon-induced protein with tetratricopeptide repeats 1 (375-384)
  source 1..30: mol_type = other RNA
gagaccatgcaggacatccacttccactac

SEQ ID NO: 49176 - RNA, 33 nt, synthetic construct
  misc_feature 1..33: note = Inositol 1,4,5-trisphosphate receptor type 3 (1262-1272)
  source 1..33: mol_type = other RNA
gagaccatgcagcacatcttcctgaacaactac

SEQ ID NO: 49177 - RNA, 30 nt, synthetic construct
  misc_feature 1..30: note = TRPM8 channel-associated factor 1 (132-141)
  source 1..30: mol_type = other RNA
gagaccatgaccgagaagctggtgaagttc

SEQ ID NO: 49178 - RNA, 30 nt, synthetic construct
  misc_feature 1..30: note = Carnitine O-acetyltransferase (515-524)
  source 1..30: mol_type = other RNA
gagaccaacgccgcccgcctggcgcactac

SEQ ID NO: 49179 - RNA, 27 nt, synthetic construct
  misc_feature 1..27: note = Trafficking kinesin-binding protein 2 (258-266)
  source 1..27: mol_type = other RNA
gagaccaacgcccagatgagccgcatg

SEQ ID NO: 49180 - RNA, 27 nt, synthetic construct
  misc_feature 1..27: note = BTB/POZ domain-containing protein 3 (304-312)
  source 1..27: mol_type = other RNA
gagaccaacgacatcttcctgtggtac

SEQ ID NO: 49181 - RNA, 27 nt, synthetic construct
  misc_feature 1..27: note = Myotubularin (266-274)
  source 1..27: mol_type = other RNA
gagaccaacaagcagatcagcaagctg

SEQ ID NO: 49182 - RNA, 36 nt, synthetic construct
  misc_feature 1..36: note = Serine-tRNA ligase, mitochondrial (334-345)
  source 1..36: mol_type = other RNA
gagaccaacaccggccaggagccccgcgggctgtac

SEQ ID NO: 49183 - RNA, 27 nt, synthetic construct
  misc_feature 1..27: note = E3 ubiquitin-protein ligase RFWD3 (353-361)
  source 1..27: mol_type = other RNA
gagaccaacaccgtggtccagacgtac

SEQ ID NO: 49184 - RNA, 30 nt, synthetic construct
  misc_feature 1..30: note = Protein bicaudal D homolog 2 (309-318)
  source 1..30: mol_type = other RNA
gagacccccaaccgcgtgatgctggactac

SEQ ID NO: 49185 - RNA, 27 nt, synthetic construct
  misc_feature 1..27: note = Splicing factor, proline- and glutamine-rich (475-483)
  source 1..27: mol_type = other RNA
gagacccccccgcgcttcgcccagcac

SEQ ID NO: 49186 - RNA, 30 nt, synthetic construct
  misc_feature 1..30: note = Histone-lysine N-methyltransferase 2C (4271-4280)
  source 1..30: mol_type = other RNA
gagacccccagcaaggccttccaccagtac

SEQ ID NO: 49187 - RNA, 33 nt, synthetic construct
  misc_feature 1..33: note = Tetratricopeptide repeat protein 4 (310-320)
  source 1..33: mol_type = other RNA
gagacccccagctgggacctggagcagaagtac

SEQ ID NO: 49188 - RNA, 27 nt, synthetic construct
  misc_feature 1..27: note = T-complex protein 1 subunit eta (146-154)
  source 1..27: mol_type = other RNA
gagacccagatcggcggggagcgctac

SEQ ID NO: 49189 - RNA, 27 nt, synthetic construct
  misc_feature 1..27: note = Proteasome subunit alpha type-5 (37-45)
  source 1..27: mol_type = other RNA
gagacccagaaccactggttcacctac

SEQ ID NO: 49190 - RNA, 30 nt, synthetic construct
  misc_feature 1..30: note = Zinc finger MIZ domain-containing protein 1 (308-317)
  source 1..30: mol_type = other RNA
gagacccagaacaaggacatcaaccagtac

SEQ ID NO: 49191 - RNA, 27 nt, synthetic construct
  misc_feature 1..27: note = Histone-lysine N-methyltransferase NSD3 (50-58)
  source 1..27: mol_type = other RNA
gagacccagaccaagtaccagagctac

SEQ ID NO: 49192 - RNA, 27 nt, synthetic construct
  misc_feature 1..27: note = Elongation factor 1-gamma (326-334)
  source 1..27: mol_type = other RNA
gagacccagaccctggtgcgcgagtac

SEQ ID NO: 49193 - RNA, 30 nt, synthetic construct
  misc_feature 1..30: note = Calcipressin-1 (27-36)
  source 1..30: mol_type = other RNA
gagacccgcgccaagttcgagagcctgttc

SEQ ID NO: 49194 - RNA, 27 nt, synthetic construct
  misc_feature 1..27: note = Protein FAM184A (53-61)
  source 1..27: mol_type = other RNA
gagacccgcgagaagatcctgcagtac

SEQ ID NO: 49195 - RNA, 33 nt, synthetic construct
  misc_feature 1..33: note = Zinc finger protein 428 (46-56)
  source 1..33: mol_type = other RNA
gagacccgcgagcccgccgagaccggcgggtac

SEQ ID NO: 49196 - RNA, 33 nt, synthetic construct
  misc_feature 1..33: note = Rho GTPase-activating protein 26 (401-411)
  source 1..33: mol_type = other RNA
gagacccgcggcatcaacgagcaggggctgtac

SEQ ID NO: 49197 - RNA, 36 nt, synthetic construct
  misc_feature 1..36: note = A-kinase anchor protein 2 (904-915)
  source 1..36: mol_type = other RNA
gagacccgccccgagggcagctacttctccaagtac

SEQ ID NO: 49198 - RNA, 27 nt, synthetic construct
  misc_feature 1..27: note = Pre-mRNA-splicing regulator WTAP (228-236)
  source 1..27: mol_type = other RNA
gagacccgccagcagctggcccagtac

SEQ ID NO: 49199 - RNA, 27 nt, synthetic construct
  misc_feature 1..27: note = F-box/WD repeat-containing protein 11 (431-439)
  source 1..27: mol_type = other RNA
gagacccgcagcccctcccggacctac

SEQ ID NO: 49200 - RNA, 33 nt, synthetic construct
  misc_feature 1..33: note = F-box/WD repeat-containing protein 11 (431-441)
  source 1..33: mol_type = other RNA
gagacccgcagcccctcccggacctacacgtac

SEQ ID NO: 49201 - RNA, 27 nt, synthetic construct
  misc_feature 1..27: note = Zinc finger CCCH domain-containing protein 13 (597-605)
  source 1..27: mol_type = other RNA
gagacccgcagctcctaccccgagcgg

SEQ ID NO: 49202 - RNA, 36 nt, synthetic construct
  misc_feature 1..36: note = Zinc finger CCCH domain-containing protein 13 (597-608)
  source 1..36: mol_type = other RNA
gagacccgcagctcctaccccgagcgggaccgctac

SEQ ID NO: 49203 - RNA, 27 nt, synthetic construct
  misc_feature 1..27: note = Serine/threonine-protein kinase TBK1 (301-309)
  source 1..27: mol_type = other RNA
gagaccagcgacatcctgcaccgcatg

SEQ ID NO: 49204 - RNA, 30 nt, synthetic construct
  misc_feature 1..30: note = Vimentin (457-466)
  source 1..30: mol_type = other RNA
gagaccagccagcaccacgacgacctggag

SEQ ID NO: 49205 - RNA, 27 nt, synthetic construct
  misc_feature 1..27: note = Centromere protein F (880-888)
  source 1..27: mol_type = other RNA
gagaccagccagcgcatctccaagctg

SEQ ID NO: 49206 - RNA, 33 nt, synthetic construct
  misc_feature 1..33: note = Peptidyl-glycine alpha-amidating monooxygenase (904-914)
  source 1..33: mol_type = other RNA
gagaccagctccggccgcgtgctggggcggttc

SEQ ID NO: 49207 - RNA, 33 nt, synthetic construct
  misc_feature 1..33: note = Heterogeneous nuclear ribonucleoprotein A1 (24-34)
  source 1..33: mol_type = other RNA
gagaccaccgacgagagcctgcgctcccacttc

SEQ ID NO: 49208 - RNA, 27 nt, synthetic construct
  misc_feature 1..27: note = Exportin-7 (20-28)
  source 1..27: mol_type = other RNA
gagaccaccgacacgaccacccgcctg

SEQ ID NO: 49209 - RNA, 27 nt, synthetic construct
  misc_feature 1..27: note = Poly (ADP-ribose) polymerase 4 (422-430)
  source 1..27: mol_type = other RNA
gagaccaccgagttcctgagcaagctc

SEQ ID NO: 49210 - RNA, 30 nt, synthetic construct
  misc_feature 1..30: note = Flap endonuclease 1 (59-68)
  source 1..30: mol_type = other RNA
gagaccaccagccacctgatgggcatgttc

SEQ ID NO: 49211 - RNA, 33 nt, synthetic construct
  misc_feature 1..33: note = Flap endonuclease 1 (59-69)
  source 1..33: mol_type = other RNA
gagaccaccagccacctgatgggcatgttctac

SEQ ID NO: 49212 - RNA, 27 nt, synthetic construct
  misc_feature 1..27: note = Zinc finger MYM-type protein 3 (161-169)
  source 1..27: mol_type = other RNA
gagaccaccagcatcgccacggcccgc

SEQ ID NO: 49213 - RNA, 27 nt, synthetic construct
  misc_feature 1..27: note = Transcription initiation factor TFIID subunit 4B (139-147)
  source 1..27: mol_type = other RNA
gagaccaccagcaacatcacgtcccgc

SEQ ID NO: 49214 - RNA, 27 nt, synthetic construct
  misc_feature 1..27: note = Uncharacterized protein C1orf112 (237-245)
  source 1..27: mol_type = other RNA
gagaccaccacgcgcatcagcctgctc

SEQ ID NO: 49215 - RNA, 27 nt, synthetic construct
  misc_feature 1..27: note = TM2 domain-containing protein 2 isoform b (68-76)
  source 1..27: mol_type = other RNA
gagaccaccacgtgggagcgcaagtac

SEQ ID NO: 49216 - RNA, 27 nt, synthetic construct
  misc_feature 1..27: note = Ubiquitin-like protein FUBI (19-27)
  source 1..27: mol_type = other RNA
gagaccgtggcccagatcaaggcccac

SEQ ID NO: 49217 - RNA, 27 nt, synthetic construct
  misc_feature 1..27: note = Dynactin subunit 1 (38-46)
  source 1..27: mol_type = other RNA
gagaccgtgggcgacctggaggccatg

SEQ ID NO: 49218 - RNA, 33 nt, synthetic construct
  misc_feature 1..33: note = Interferon-induced GTP-binding protein Mx1 (394-404)
  source 1..33: mol_type = other RNA
gagaccgtgggcgaggaggacatccgcctgttc

SEQ ID NO: 49219 - RNA, 27 nt, synthetic construct
  misc_feature 1..27: note = Glycerol-3-phosphate acyltransferase 1, mitochondrial (479-487)
  source 1..27: mol_type = other RNA
gagaccgtgggcaagttcatccagtac

SEQ ID NO: 49220 - RNA, 27 nt, synthetic construct
  misc_feature 1..27: note = 28S ribosomal protein S23, mitochondrial (7-15)
  source 1..27: mol_type = other RNA
gagaccgtgggcagcatcttctcccgc

SEQ ID NO: 49221 - RNA, 30 nt, synthetic construct
  misc_feature 1..30: note = Structural maintenance of chromosomes flexible hinge domain-containing protein 1 (89-98)
  source 1..30: mol_type = other RNA
gagaccgtgaaggacggcgtcaccctgtac

SEQ ID NO: 49222 - RNA, 27 nt, synthetic construct
  misc_feature 1..27: note = Phosphoprotein associated withosphingolipid-enriched microdomains 1 (182-190)
  source 1..27: mol_type = other RNA
gagaccgtgaaggagatcaaggaggtc

SEQ ID NO: 49223 - RNA, 30 nt, synthetic construct
  misc_feature 1..30: note = Developmentally-regulated GTP-binding protein 1 (203-212)
  source 1..30: mol_type = other RNA
gagaccgtgaagagcatcctggccgagtac

SEQ ID NO: 49224 - RNA, 27 nt, synthetic construct
  misc_feature 1..27: note = Ribosomal RNA small subunit methyltransferase NEP1 (48-56)
  source 1..27: mol_type = other RNA
gagaccgtgaaggtcggcaagacctac

SEQ ID NO: 49225 - RNA, 27 nt, synthetic construct
  misc_feature 1..27: note = ADP-ribosylation factor GTPase-activating protein 3 (388-396)
  source 1..27: mol_type = other RNA
gagaccgtgctgaagaccacgggctac

SEQ ID NO: 49226 - RNA, 30 nt, synthetic construct
  misc_feature 1..30: note = Zinc finger protein 574 (7-16)
  source 1..30: mol_type = other RNA
gagaccgtgctgtacatcgagcaccgctac

SEQ ID NO: 49227 - RNA, 33 nt, synthetic construct
  misc_feature 1..33: note = Ankyrin repeat and LEM domain-containing protein 2 (291-301)
  source 1..33: mol_type = other RNA
gagaccgtgaacaaggagcgcgccaacagctac

SEQ ID NO: 49228 - RNA, 30 nt, synthetic construct
  misc_feature 1..30: note = Absent in melanoma 1 protein (1522-1531)
  source 1..30: mol_type = other RNA
gagaccgtgaacctgcgcagcctcggcttc

SEQ ID NO: 49229 - RNA, 27 nt, synthetic construct
  misc_feature 1..27: note = Rab GDP dissociation inhibitor alpha (74-82)
  source 1..27: mol_type = other RNA
gagaccgtgaaccgcatcaagctgtac

SEQ ID NO: 49230 - RNA, 27 nt, synthetic construct
  misc_feature 1..27: note = Tumor susceptibility gene 101 protein (24-32)
  source 1..27: mol_type = other RNA
gagaccgtgaacgtcatcaccctgtac

SEQ ID NO: 49231 - RNA, 27 nt, synthetic construct
  misc_feature 1..27: note = Peroxisome proliferator-activated receptor delta (255-263)
  source 1..27: mol_type = other RNA
gagaccgtgcgcgagctgaccgagttc

SEQ ID NO: 49232 - RNA, 27 nt, synthetic construct
  misc_feature 1..27: note = Trafficking kinesin-binding protein 1 (346-354)
  source 1..27: mol_type = other RNA
gagaccgtgcgcaacatcaaccaggtc

SEQ ID NO: 49233 - RNA, 27 nt, synthetic construct
  misc_feature 1..27: note = T-complex protein 1 subunit delta (524-532)
  source 1..27: mol_type = other RNA
gagaccgtgcgcagcatcctgaagatc

SEQ ID NO: 49234 - RNA, 30 nt, synthetic construct
  misc_feature 1..30: note = Golgin subfamily A member 7 (45-54)
  source 1..30: mol_type = other RNA
gagaccgtgcgcaccctgaacaacctctac

SEQ ID NO: 49235 - RNA, 27 nt, synthetic construct
  misc_feature 1..27: note = Nuclear receptor 2C2-associated protein (9-17)
  source 1..27: mol_type = other RNA
gagaccgtgagccgcgtctccagcgtg

SEQ ID NO: 49236 - RNA, 27 nt, synthetic construct
  misc_feature 1..27: note = Transitional endoplasmic reticulum ATPase (94-102)
  source 1..27: mol_type = other RNA
gagaccgtggtcgaggtgccccaggtg

SEQ ID NO: 49237 - RNA, 27 nt, synthetic construct
  misc_feature 1..27: note = Exportin-T (504-512)
  source 1..27: mol_type = other RNA
gagaccgtggtccgctacgagaagttc

SEQ ID NO: 49238 - RNA, 27 nt, synthetic construct
  misc_feature 1..27: note = HLA class II histocompatibility antigen, DP alpha 1 chain (71-79)
  source 1..27: mol_type = other RNA
gagaccgtgtggcacctggaggagttc

SEQ ID NO: 49239 - RNA, 36 nt, synthetic construct
  misc_feature 1..36: note = 28S ribosomal protein S33, mitochondrial (47-58)
  source 1..36: mol_type = other RNA
gagacctacgactggtaccccaaccaccacacctac

SEQ ID NO: 49240 - RNA, 30 nt, synthetic construct
  misc_feature 1..30: note = Dedicator of cytokinesis protein 1 (40-49)
  source 1..30: mol_type = other RNA
gagacctacgagggctggtaccgcgggtac

SEQ ID NO: 49241 - RNA, 27 nt, synthetic construct
  misc_feature 1..27: note = Pre-mRNA-processing factor 6 (444-452)
  source 1..27: mol_type = other RNA
gagacctacgagaacgcccgcaaggtg

SEQ ID NO: 49242 - RNA, 27 nt, synthetic construct
  misc_feature 1..27: note = Transcription elongation factor SPT6 (938-946)
  source 1..27: mol_type = other RNA
gagacctacgagtgggcccgcaagatg

SEQ ID NO: 49243 - RNA, 30 nt, synthetic construct
  misc_feature 1..30: note = Exocyst complex component 7 (575-584)
  source 1..30: mol_type = other RNA
gagacctacggcgccttcctgcagaagttc

SEQ ID NO: 49244 - RNA, 27 nt, synthetic construct
  misc_feature 1..27: note = C-C motif chemokine 28 (119-127)
  source 1..27: mol_type = other RNA
gagacctacggccacaagaccccctac

SEQ ID NO: 49245 - RNA, 27 nt, synthetic construct
  misc_feature 1..27: note = Myotonin-protein kinase (311-319)
  source 1..27: mol_type = other RNA
gagacctacggcaagatcgtgcactac

SEQ ID NO: 49246 - RNA, 27 nt, synthetic construct
  misc_feature 1..27: note = Quinone oxidoreductase (51-59)
  source 1..27: mol_type = other RNA
gagacctacatccgcagcggcacctac

SEQ ID NO: 49247 - RNA, 30 nt, synthetic construct
  misc_feature 1..30: note = RNA-binding protein 8A (106-115)
  source 1..30: mol_type = other RNA
gagacctacaaggaggcccaggccgcgatg

SEQ ID NO: 49248 - RNA, 27 nt, synthetic construct
  misc_feature 1..27: note = Aurora kinase A (336-344)
  source 1..27: mol_type = other RNA
gagacctacaagcgcatcagccgggtg

SEQ ID NO: 49249 - RNA, 27 nt, synthetic construct
  misc_feature 1..27: note = 60 kDa SS-A/Ro ribonucleoprotein (329-337)
  source 1..27: mol_type = other RNA
gagacctacaagaccggccacgggctg

SEQ ID NO: 49250 - RNA, 30 nt, synthetic construct
  misc_feature 1..30: note = U6 snRNA-associated Sm-like protein LSm4 (23-32)
  source 1..30: mol_type = other RNA
gagacctacaacggccacctggtgagctgc

SEQ ID NO: 49251 - RNA, 30 nt, synthetic construct
  misc_feature 1..30: note = Centromere protein J (230-239)
  source 1..30: mol_type = other RNA
gagacctaccccagcaacatcctgtcccac

SEQ ID NO: 49252 - RNA, 30 nt, synthetic construct
  misc_feature 1..30: note = Arf-GAP with coiled-coil, ANK repeat and PH domain-containing protein 2 (748-757)
  source 1..30: mol_type = other RNA
gagacctaccaggacatcttccgcgacttc

SEQ ID NO: 49253 - RNA, 27 nt, synthetic construct
  misc_feature 1..27: note = Bifunctional coenzyme A synthase (290-298)
  source 1..27: mol_type = other RNA
gagacctaccgcggcgggatggccatc

SEQ ID NO: 49254 - RNA, 36 nt, synthetic construct
  misc_feature 1..36: note = Vacuolar protein sorting-associated protein 13B (522-533)
  source 1..36: mol_type = other RNA
gagacctacaccgagatcgccggcatgcagcgcttc

SEQ ID NO: 49255 - RNA, 27 nt, synthetic construct
  misc_feature 1..27: note = CD81 antigen (34-42)
  source 1..27: mol_type = other RNA
gaggtggccgccggcatctgggggttc

SEQ ID NO: 49256 - RNA, 36 nt, synthetic construct
  misc_feature 1..36: note = Transforming acidic coiled-coil-containing protein 3 (321-332)
  source 1..36: mol_type = other RNA
gaggtggccgccggccagatggcgagctccagccgc

SEQ ID NO: 49257 - RNA, 33 nt, synthetic construct
  misc_feature 1..33: note = Condensin complex subunit 2 (680-690)
  source 1..33: mol_type = other RNA
gaggtggccgacgagaagatgctgagcggcctc

SEQ ID NO: 49258 - RNA, 30 nt, synthetic construct
  misc_feature 1..30: note = Rootletin (1797-1806)
  source 1..30: mol_type = other RNA
gaggtggccgacctggagctccagcgcgtc

SEQ ID NO: 49259 - RNA, 27 nt, synthetic construct
  misc_feature 1..27: note = KN motif and ankyrin repeat domain-containing protein 2 (488-496)
  source 1..27: mol_type = other RNA
gaggtggccgaccccaccgcccaccgc

SEQ ID NO: 49260 - RNA, 27 nt, synthetic construct
  misc_feature 1..27: note = Protein phosphatase 1H (361-369)
  source 1..27: mol_type = other RNA
gaggtggccgaggccatcacccagttc

SEQ ID NO: 49261 - RNA, 27 nt, synthetic construct
  misc_feature 1..27: note = Geminin (143-151)
  source 1..27: mol_type = other RNA
gaggtggccgagcacgtccagtacatg

SEQ ID NO: 49262 - RNA, 27 nt, synthetic construct
  misc_feature 1..27: note = Tankyrase-2 (672-680)
  source 1..27: mol_type = other RNA
gaggtggccgagctgctcgtcaagcac

SEQ ID NO: 49263 - RNA, 30 nt, synthetic construct
  misc_feature 1..30: note = Abnormal spindle-like microcephaly-associated protein (73-82)
  source 1..30: mol_type = other RNA
gaggtggccgaggtcaagatcagccacttc

SEQ ID NO: 49264 - RNA, 27 nt, synthetic construct
  misc_feature 1..27: note = Tankyrase-1 (618-626)
  source 1..27: mol_type = other RNA
gaggtggccgagtacctgctcgagcac

SEQ ID NO: 49265 - RNA, 33 nt, synthetic construct
  misc_feature 1..33: note = HRAS-like suppressor 3 (72-82)
  source 1..33: mol_type = other RNA
gaggtggccggcgccggggcggccagcgtcatg

SEQ ID NO: 49266 - RNA, 27 nt, synthetic construct
  misc_feature 1..27: note = CAD protein (1287-1295)
  source 1..27: mol_type = other RNA
gaggtggccggcttcggggagagccgc

SEQ ID NO: 49267 - RNA, 27 nt, synthetic construct
  misc_feature 1..27: note = 5'-nucleotidase (100-108)
  source 1..27: mol_type = other RNA
gaggtggcccacttcatgaacgccctg

SEQ ID NO: 49268 - RNA, 33 nt, synthetic construct
  misc_feature 1..33: note = 5'-nucleotidase (100-110)
  source 1..33: mol_type = other RNA
gaggtggcccacttcatgaacgccctgcgctac

SEQ ID NO: 49269 - RNA, 27 nt, synthetic construct
  misc_feature 1..27: note = Protein disulfide-isomerase A4 (440-448)
  source 1..27: mol_type = other RNA
gaggtggccaaggacttccccgagtac

SEQ ID NO: 49270 - RNA, 33 nt, synthetic construct
  misc_feature 1..33: note = Eukaryotic translation initiation factor 2-alpha kinase 1 (153-163)
  source 1..33: mol_type = other RNA
gaggtggccctggaggcccagaccagccgctac

SEQ ID NO: 49271 - RNA, 27 nt, synthetic construct
  misc_feature 1..27: note = Amyloid protein-binding protein 2 (469-477)
  source 1..27: mol_type = other RNA
gaggtggccctgagcgtcggccacctc

SEQ ID NO: 49272 - RNA, 33 nt, synthetic construct
  misc_feature 1..33: note = Microtubule-associated protein 4 (341-351)
  source 1..33: mol_type = other RNA
gaggtggcccccgccaaggacgtcaccctgctc

SEQ ID NO: 49273 - RNA, 27 nt, synthetic construct
  misc_feature 1..27: note = Striatin (575-583)
  source 1..27: mol_type = other RNA
gaggtggcccccgccctgagcgtcttc

SEQ ID NO: 49274 - RNA, 33 nt, synthetic construct
  misc_feature 1..33: note = cDNA FLJ60317, highly similar to Aminoacylase-1 (EC 3.5.1.14) (143-153)
  source 1..33: mol_type = other RNA
gaggtggcccccggctacgtcgtgaccgtgctg

SEQ ID NO: 49275 - RNA, 27 nt, synthetic construct
  misc_feature 1..27: note = E3 ubiquitin-protein ligase TRIM63 (155-163)
  source 1..27: mol_type = other RNA
gaggtggcccccctgcagagcgtcttc

SEQ ID NO: 49276 - RNA, 33 nt, synthetic construct
  misc_feature 1..33: note = Kelch-like protein 21 (364-374)
  source 1..33: mol_type = other RNA
gaggtggcccccatgctgaaggcccgcgagtac

SEQ ID NO: 49277 - RNA, 30 nt, synthetic construct
  misc_feature 1..30: note = Endophilin-B2 (59-68)
  source 1..30: mol_type = other RNA
gaggtggcccccccggccagcggcacccgc

SEQ ID NO: 49278 - RNA, 33 nt, synthetic construct
  misc_feature 1..33: note = Niemann-Pick C1 protein (730-740)
  source 1..33: mol_type = other RNA
gaggtggcccccagcatgttcctgtccagcttc

SEQ ID NO: 49279 - RNA, 27 nt, synthetic construct
  misc_feature 1..27: note = E3 ubiquitin-protein ligase Topors (578-586)
  source 1..27: mol_type = other RNA
gaggtggcccagcccagccgcgagttc

SEQ ID NO: 49280 - RNA, 33 nt, synthetic construct
  misc_feature 1..33: note = Zinc finger protein 131 (41-51)
  source 1..33: mol_type = other RNA
gaggtggccagcgccaagcagtccgtcaagtac

SEQ ID NO: 49281 - RNA, 27 nt, synthetic construct
  misc_feature 1..27: note = Autophagy-related protein 9A (160-168)
  source 1..27: mol_type = other RNA
gaggtggccagcgccctgcgctccttc

SEQ ID NO: 49282 - RNA, 27 nt, synthetic construct
  misc_feature 1..27: note = Methyltransferase-like protein 13 (163-171)
  source 1..27: mol_type = other RNA
gaggtggccacccagtggttcggcttc

SEQ ID NO: 49283 - RNA, 27 nt, synthetic construct
  misc_feature 1..27: note = D-3-phosphoglycerate dehydrogenase (159-167)
  source 1..27: mol_type = other RNA
gaggtggccacccgcatgcagagcttc

SEQ ID NO: 49284 - RNA, 27 nt, synthetic construct
  misc_feature 1..27: note = DNA-dependent protein kinase catalytic subunit (713-721)
  source 1..27: mol_type = other RNA
gaggtggccgtcaagatgaagcagtac

SEQ ID NO: 49285 - RNA, 33 nt, synthetic construct
  misc_feature 1..33: note = Ribonuclease H2 subunit C (72-82)
  source 1..33: mol_type = other RNA
gaggtggccgtccccccgggcctggtggggtac

SEQ ID NO: 49286 - RNA, 33 nt, synthetic construct
  misc_feature 1..33: note = Endoplasmic reticulum lectin 1 (124-134)
  source 1..33: mol_type = other RNA
gaggtgtgccacggcaagcacatccgccagtac

SEQ ID NO: 49287 - RNA, 27 nt, synthetic construct
  misc_feature 1..27: note = Serine/threonine-protein phosphatase 4 regulatory subunit 2 (20-28)
  source 1..27: mol_type = other RNA
gaggtgtgccccgtcctggaccagttc

SEQ ID NO: 49288 - RNA, 27 nt, synthetic construct
  misc_feature 1..27: note = FRAS1-related extracellular matrix protein 1 (1345-1353)
  source 1..27: mol_type = other RNA
gaggtggacctgaacctcctgcgctac

SEQ ID NO: 49289 - RNA, 33 nt, synthetic construct
  misc_feature 1..33: note = Melanoma-associated antigen 3 (168-178)
  source 1..33: mol_type = other RNA
gaggtggaccccatcggccacctgtacatcttc

SEQ ID NO: 49290 - RNA, 27 nt, synthetic construct
  misc_feature 1..27: note = SET domain-containing protein 5 (26-34)
  source 1..27: mol_type = other RNA
gaggtggaggccccctacctgagccgc

SEQ ID NO: 49291 - RNA, 30 nt, synthetic construct
  misc_feature 1..30: note = DENN domain-containing protein 5A (179-188)
  source 1..30: mol_type = other RNA
gaggtgttcgccaaccgcttcacccagatg

SEQ ID NO: 49292 - RNA, 30 nt, synthetic construct
  misc_feature 1..30: note = Nck-associated protein 1 (479-488)
  source 1..30: mol_type = other RNA
gaggtgttcgacttccgcggcatgcggctg

SEQ ID NO: 49293 - RNA, 30 nt, synthetic construct
  misc_feature 1..30: note = Probable ubiquitin carboxyl-terminal hydrolase FAF-X (1928-1937)
  source 1..30: mol_type = other RNA
gaggtgttcgaccacatgatgaagcgcatg

SEQ ID NO: 49294 - RNA, 30 nt, synthetic construct
  misc_feature 1..30: note = Disheveled-associated activator of morphogenesis 2 (1033-1042)
  source 1..30: mol_type = other RNA
gaggtgttcgacaaggacctgtgcaagctc

SEQ ID NO: 49295 - RNA, 30 nt, synthetic construct
  misc_feature 1..30: note = Ribosomal RNA processing protein 36 homolog (132-141)
  source 1..30: mol_type = other RNA
gaggtgttcgacaagacctaccagttcctg

SEQ ID NO: 49296 - RNA, 36 nt, synthetic construct
  misc_feature 1..36: note = FAST kinase domain-containing protein 5 (107-118)
  source 1..36: mol_type = other RNA
gaggtgttcgacagcttcgagaacatgcgcgtcttc

SEQ ID NO: 49297 - RNA, 33 nt, synthetic construct
  misc_feature 1..33: note = Melanoma-associated antigen 2 (229-239)
  source 1..33: mol_type = other RNA
gaggtgttcgagggccgcgaggacagcgtcttc

SEQ ID NO: 49298 - RNA, 30 nt, synthetic construct
  misc_feature 1..30: note = Protein arginine N-methyltransferase 5 (308-317)
  source 1..30: mol_type = other RNA
gaggtgttcgagaaggaccccatcaagtac

SEQ ID NO: 49299 - RNA, 30 nt, synthetic construct
  misc_feature 1..30: note = Presenilin-2 (337-346)
  source 1..30: mol_type = other RNA
gaggtgttcgagcccccgctgaccggctac

SEQ ID NO: 49300 - RNA, 30 nt, synthetic construct
  misc_feature 1..30: note = GMP reductase 1 (254-263)
  source 1..30: mol_type = other RNA
gaggtgttcgagcgcaacggccggaagctg

SEQ ID NO: 49301 - RNA, 27 nt, synthetic construct
  misc_feature 1..27: note = Lanosterol synthase (479-487)
  source 1..27: mol_type = other RNA
gaggtgttcggcgacatcatgatcgac

SEQ ID NO: 49302 - RNA, 30 nt, synthetic construct
  misc_feature 1..30: note = Monocarboxylate transporter 7 (340-349)
  source 1..30: mol_type = other RNA
gaggtgttcggccgcatcggggccggcttc

SEQ ID NO: 49303 - RNA, 27 nt, synthetic construct
  misc_feature 1..27: note = Zinc finger protein ZIC 2 (187-195)
  source 1..27: mol_type = other RNA
gaggtgttcggccgcagcgagcagtac

SEQ ID NO: 49304 - RNA, 27 nt, synthetic construct
  misc_feature 1..27: note = Nesprin-2 (6334-6342)
  source 1..27: mol_type = other RNA
gaggtgttcggccgcgtcagccggttc

SEQ ID NO: 49305 - RNA, 27 nt, synthetic construct
  misc_feature 1..27: note = Trifunctional purine biosynthetic protein adenosine-3 (10-18)
  source 1..27: mol_type = other RNA
gaggtgttccacgccggcaccgccctg

SEQ ID NO: 49306 - RNA, 30 nt, synthetic construct
  misc_feature 1..30: note = Ribosomal protein S6 kinase alpha-5 (267-276)
  source 1..30: mol_type = other RNA
gaggtgttccacgaccagctgcacaccttc

SEQ ID NO: 49307 - RNA, 30 nt, synthetic construct
  misc_feature 1..30: note = Non-POU domain-containing octamer-binding protein (13-22)
  source 1..30: mol_type = other RNA
gaggtgttcatccacaaggacaagggcttc

SEQ ID NO: 49308 - RNA, 27 nt, synthetic construct
  misc_feature 1..27: note = DNA-directed RNA polymerase II subunit RPB4 (59-67)
  source 1..27: mol_type = other RNA
gaggtgttcatgaagaccctgaactac

SEQ ID NO: 49309 - RNA, 30 nt, synthetic construct
  misc_feature 1..30: note = Quinone oxidoreductase (196-205)
  source 1..30: mol_type = other RNA
gaggtgttcaaccaccgcgaggtcaactac

SEQ ID NO: 49310 - RNA, 30 nt, synthetic construct
  misc_feature 1..30: note = FACT complex subunit SPT16 (192-201)
  source 1..30: mol_type = other RNA
gaggtgttcaacaagttcttcaaggagcgc

SEQ ID NO: 49311 - RNA, 30 nt, synthetic construct
  misc_feature 1..30: note = UDP-N-acetylglucosamine-peptide N-acetylglucosaminyltransferase 110 kDa subunit (229-238)
  source 1..30: mol_type = other RNA
gaggtgttccccgagttcgccgccgcgcac

SEQ ID NO: 49312 - RNA, 30 nt, synthetic construct
  misc_feature 1..30: note = Serine/threonine-protein kinase LATS2 (719-728)
  source 1..30: mol_type = other RNA
gaggtgttccccgagcacctggcccgcttc

SEQ ID NO: 49313 - RNA, 33 nt, synthetic construct
  misc_feature 1..33: note = Serine/threonine-protein phosphatase 6 regulatory ankyrin repeat subunit A (779-789)
  source 1..33: mol_type = other RNA
gaggtgttccagaagaccgagggcaacgccttc

SEQ ID NO: 49314 - RNA, 33 nt, synthetic construct
  misc_feature 1..33: note = Replication protein A 70 kDa DNA-binding subunit (560-570)
  source 1..33: mol_type = other RNA
gaggtgttccagaacgccaacttccgcagcttc

SEQ ID NO: 49315 - RNA, 30 nt, synthetic construct
  misc_feature 1..30: note = F-box/LRR-repeat protein 5 (115-124)
  source 1..30: mol_type = other RNA
gaggtgttccagcccatgctgatggagtac

SEQ ID NO: 49316 - RNA, 30 nt, synthetic construct
  misc_feature 1..30: note = Histone-lysine N-methyltransferase SETD2 (2472-2481)
  source 1..30: mol_type = other RNA
gaggtgttccgcaaggagatgagccagttc

SEQ ID NO: 49317 - RNA, 30 nt, synthetic construct
  misc_feature 1..30: note = Zinc finger and SCAN domain-containing protein 30 (45-54)
  source 1..30: mol_type = other RNA
gaggtgttccgccagaagttccggcagttc

SEQ ID NO: 49318 - RNA, 30 nt, synthetic construct
  misc_feature 1..30: note = WD repeat and FYVE domain-containing protein 3 (667-676)
  source 1..30: mol_type = other RNA
gaggtgttcagcggcgacgggcgcaactac

SEQ ID NO: 49319 - RNA, 30 nt, synthetic construct
  misc_feature 1..30: note = Coiled-coil domain-containing protein 136 (105-114)
  source 1..30: mol_type = other RNA
gaggtgttcaccaagcagatccagcagctg

SEQ ID NO: 49320 - RNA, 30 nt, synthetic construct
  misc_feature 1..30: note = RCC1 and BTB domain-containing protein 2 (124-133)
  source 1..30: mol_type = other RNA
gaggtgttcacctggggccacaacgcctac

SEQ ID NO: 49321 - RNA, 33 nt, synthetic construct
  misc_feature 1..33: note = Pre-mRNA-splicing factor ATP-dependent RNA helicase DHX15 (379-389)
  source 1..33: mol_type = other RNA
gaggtgggcgacatcaagatcatccccctgtac

SEQ ID NO: 49322 - RNA, 27 nt, synthetic construct
  misc_feature 1..27: note = Protein AAR2 homolog (40-48)
  source 1..27: mol_type = other RNA
gaggtgggccccaagttccgcggggtc

SEQ ID NO: 49323 - RNA, 30 nt, synthetic construct
  misc_feature 1..30: note = Adipocyte plasma membrane-associated protein (403-412)
  source 1..30: mol_type = other RNA
gaggtgcacgagcacgacggccacctgtac

SEQ ID NO: 49324 - RNA, 33 nt, synthetic construct
  misc_feature 1..33: note = Adipocyte plasma membrane-associated protein (403-413)
  source 1..33: mol_type = other RNA
gaggtgcacgagcacgacggccacctgtacctc

SEQ ID NO: 49325 - RNA, 36 nt, synthetic construct
  misc_feature 1..36: note = Phosphatase and actin regulator 1 (636-647)
  source 1..36: mol_type = other RNA
gaggtgcacgagctgagccgccacctcacccggttc

SEQ ID NO: 49326 - RNA, 30 nt, synthetic construct
  misc_feature 1..30: note = GPI transamidase component PIG-T (291-300)
  source 1..30: mol_type = other RNA
gaggtgcaccccccgcccaccaccacgtac

SEQ ID NO: 49327 - RNA, 33 nt, synthetic construct
  misc_feature 1..33: note = Aryl hydrocarbon receptor nuclear translocator 2 (438-448)
  source 1..33: mol_type = other RNA
gaggtgcaccagcgcgacggcctgagctcctac

SEQ ID NO: 49328 - RNA, 30 nt, synthetic construct
  misc_feature 1..30: note = Uncharacterized protein C1orf131 (173-182)
  source 1..30: mol_type = other RNA
gaggtgcaccgcttcggcatcaccgggtac

SEQ ID NO: 49329 - RNA, 36 nt, synthetic construct
  misc_feature 1..36: note = 2-methoxy-6-polyprenyl-1,4-benzoquinol methylase, mitochondrial (272-283)
  source 1..36: mol_type = other RNA
gaggtgatcgccggcgactggaagagctaccagtac

SEQ ID NO: 49330 - RNA, 27 nt, synthetic construct
  misc_feature 1..27: note = DNA mismatch repair protein Msh2 (914-922)
  source 1..27: mol_type = other RNA
gaggtgatcgccaagaacaacagcttc

SEQ ID NO: 49331 - RNA, 36 nt, synthetic construct
  misc_feature 1..36: note = Protein CutA (104-115)
  source 1..36: mol_type = other RNA
gaggtgatcgccctgcccgtcgagcagggcaacttc

SEQ ID NO: 49332 - RNA, 33 nt, synthetic construct
  misc_feature 1..33: note = Drebrin-like protein (403-413)
  source 1..33: mol_type = other RNA
gaggtgatcgacgagggctggtggcgcgggtac

SEQ ID NO: 49333 - RNA, 33 nt, synthetic construct
  misc_feature 1..33: note = Alpha/beta hydrolase domain-containing protein 17B (236-246)
  source 1..33: mol_type = other RNA
gaggtgatcgacttcagccacggcctggccctc

SEQ ID NO: 49334 - RNA, 36 nt, synthetic construct
  misc_feature 1..36: note = Alpha/beta hydrolase domain-containing protein 17A (256-267)
  source 1..36: mol_type = other RNA
gaggtgatcgacttcagccacggcctggccctctac

SEQ ID NO: 49335 - RNA, 33 nt, synthetic construct
  misc_feature 1..33: note = Alpha/beta hydrolase domain-containing protein 17C (277-287)
  source 1..33: mol_type = other RNA
gaggtgatcgacttcagccacggcctggccatg

SEQ ID NO: 49336 - RNA, 36 nt, synthetic construct
  misc_feature 1..36: note = Alpha/beta hydrolase domain-containing protein 17C (277-288)
  source 1..36: mol_type = other RNA
gaggtgatcgacttcagccacggcctggccatgtac

SEQ ID NO: 49337 - RNA, 36 nt, synthetic construct
  misc_feature 1..36: note = SH3 and PX domain-containing protein 2A (332-343)
  source 1..36: mol_type = other RNA
gaggtgatcgacaagaacagcggcgggtggtggtac

SEQ ID NO: 49338 - RNA, 27 nt, synthetic construct
  misc_feature 1..27: note = XK-related protein 9 (123-131)
  source 1..27: mol_type = other RNA
gaggtgatcgaccgcgtcaccgacctg

SEQ ID NO: 49339 - RNA, 30 nt, synthetic construct
  misc_feature 1..30: note = Histidine-tRNA ligase, cytoplasmic (90-99)
  source 1..30: mol_type = other RNA
gaggtgatcgacacccccgtcttcgagctg

SEQ ID NO: 49340 - RNA, 27 nt, synthetic construct
  misc_feature 1..27: note = SNF-related serine/threonine-protein kinase (80-88)
  source 1..27: mol_type = other RNA
gaggtgatcgacacccagaccaagctg

SEQ ID NO: 49341 - RNA, 27 nt, synthetic construct
  misc_feature 1..27: note = Mitochondrial ribonuclease P protein 3 (193-201)
  source 1..27: mol_type = other RNA
gaggtgatcgacgtcttcgagatcatg

SEQ ID NO: 49342 - RNA, 33 nt, synthetic construct
  misc_feature 1..33: note = Mitochondrial ribonuclease P protein 3 (193-203)
  source 1..33: mol_type = other RNA
gaggtgatcgacgtcttcgagatcatgaaggcc

SEQ ID NO: 49343 - RNA, 30 nt, synthetic construct
  misc_feature 1..30: note = N-terminal Xaa-Pro-Lys N-methyltransferase 1 (4-13)
  source 1..30: mol_type = other RNA
gaggtgatcgaggacgagaagcagttctac

SEQ ID NO: 49344 - RNA, 27 nt, synthetic construct
  misc_feature 1..27: note = T-complex protein 1 subunit theta (127-135)
  source 1..27: mol_type = other RNA
gaggtgatcgagggctacgagatcgcc

SEQ ID NO: 49345 - RNA, 30 nt, synthetic construct
  misc_feature 1..30: note = Phosphatidate phosphatase LPIN1 (766-775)
  source 1..30: mol_type = other RNA
gaggtgatcgagaagaagcccgagaagttc

SEQ ID NO: 49346 - RNA, 30 nt, synthetic construct
  misc_feature 1..30: note = SH3 and PX domain-containing protein 2B (396-405)
  source 1..30: mol_type = other RNA
gaggtgatcgagaagaacctgagcggctgg

SEQ ID NO: 49347 - RNA, 30 nt, synthetic construct
  misc_feature 1..30: note = Dynamin-1-like protein (634-643)
  source 1..30: mol_type = other RNA
gaggtgatcgagcgcctgatcaagagctac

SEQ ID NO: 49348 - RNA, 27 nt, synthetic construct
  misc_feature 1..27: note = Asparagine synthetase (glutamine-hydrolyzing) (326-334)
  source 1..27: mol_type = other RNA
gaggtgatcttcagcctggagacctac

SEQ ID NO: 49349 - RNA, 30 nt, synthetic construct
  misc_feature 1..30: note = Dynamin-like 120 kDa protein, mitochondrial (156-165)
  source 1..30: mol_type = other RNA
gaggtgatcggcgccagcgacctgctcctg

SEQ ID NO: 49350 - RNA, 33 nt, synthetic construct
  misc_feature 1..33: note = Dynamin-like 120 kDa protein, mitochondrial (156-166)
  source 1..33: mol_type = other RNA
gaggtgatcggcgccagcgacctgctcctgctg

SEQ ID NO: 49351 - RNA, 27 nt, synthetic construct
  misc_feature 1..27: note = Protein phosphatase 1 regulatory subunit 37 (75-83)
  source 1..27: mol_type = other RNA
gaggtgatcggcgcctacaagcaggcc

SEQ ID NO: 49352 - RNA, 33 nt, synthetic construct
  misc_feature 1..33: note = Protein TMEPAI (199-209)
  source 1..33: mol_type = other RNA
gaggtgatcggccactaccccgggagctccttc

SEQ ID NO: 49353 - RNA, 36 nt, synthetic construct
  misc_feature 1..36: note = Mitogen-activated protein kinase kinase kinase 11 (121-132)
  source 1..36: mol_type = other RNA
gaggtgatcggcatcgggggcttcgggaaggtctac

SEQ ID NO: 49354 - RNA, 33 nt, synthetic construct
  misc_feature 1..33: note = Ropporin-1B (190-200)
  source 1..33: mol_type = other RNA
gaggtgatcggccccgacgggctgatcaccgtc

SEQ ID NO: 49355 - RNA, 36 nt, synthetic construct
  misc_feature 1..36: note = Hepatocyte growth factor receptor (215-226)
  source 1..36: mol_type = other RNA
gaggtgatcggccgcgggcacttcggctgcgtctac

SEQ ID NO: 49356 - RNA, 33 nt, synthetic construct
  misc_feature 1..33: note = Inositol-trisphosphate 3-kinase B (875-885)
  source 1..33: mol_type = other RNA
gaggtgatcggcagctccctgctcttcatccac

SEQ ID NO: 49357 - RNA, 33 nt, synthetic construct
  misc_feature 1..33: note = Protein furry homolog-like (141-151)
  source 1..33: mol_type = other RNA
gaggtgatcggcgtcctggcccagagcaagttc

SEQ ID NO: 49358 - RNA, 30 nt, synthetic construct
  misc_feature 1..30: note = Transportin-3 (359-368)
  source 1..30: mol_type = other RNA
gaggtgatccacggcatcttcaaggcctac

SEQ ID NO: 49359 - RNA, 27 nt, synthetic construct
  misc_feature 1..27: note = ELAV-like protein 1 (101-109)
  source 1..27: mol_type = other RNA
gaggtgatcaaggacgccaacctgtac

SEQ ID NO: 49360 - RNA, 36 nt, synthetic construct
  misc_feature 1..36: note = Exocyst complex component 3 (390-401)
  source 1..36: mol_type = other RNA
gaggtgatcaagctgaccgaccccagcctcctgtac

SEQ ID NO: 49361 - RNA, 30 nt, synthetic construct
  misc_feature 1..30: note = Eukaryotic translation initiation factor 3 subunit L (50-59)
  source 1..30: mol_type = other RNA
gaggtgatcaagaacttcatccagtacttc

SEQ ID NO: 49362 - RNA, 30 nt, synthetic construct
  misc_feature 1..30: note = Ribosome maturation protein SBDS (156-165)
  source 1..30: mol_type = other RNA
gaggtgatcaagcagctgaaggagaagatg

SEQ ID NO: 49363 - RNA, 27 nt, synthetic construct
  misc_feature 1..27: note = Myosin-10 (1642-1650)
  source 1..27: mol_type = other RNA
gaggtgatcaagcagctgcgcaagctc

SEQ ID NO: 49364 - RNA, 27 nt, synthetic construct
  misc_feature 1..27: note = Exosome complex component RRP43 (268-276)
  source 1..27: mol_type = other RNA
gaggtgatcaagagcatgaagcccaag

SEQ ID NO: 49365 - RNA, 27 nt, synthetic construct
  misc_feature 1..27: note = Cofilin-2 (10-18)
  source 1..27: mol_type = other RNA
gaggtgatcaaggtcttcaacgacatg

SEQ ID NO: 49366 - RNA, 27 nt, synthetic construct
  misc_feature 1..27: note = T-complex protein 1 subunit beta (512-520)
  source 1..27: mol_type = other RNA
gaggtgatcctgcgcgtcgacaacatc

SEQ ID NO: 49367 - RNA, 30 nt, synthetic construct
  misc_feature 1..30: note = E3 ubiquitin-protein ligase TRIM63 (81-90)
  source 1..30: mol_type = other RNA
gaggtgatcatggaccgccacggcgtctac

SEQ ID NO: 49368 - RNA, 33 nt, synthetic construct
  misc_feature 1..33: note = Nucleosome-remodeling factor subunit BPTF (564-574)
  source 1..33: mol_type = other RNA
gaggtgatcatgaagggcaacatcaacaactac

SEQ ID NO: 49369 - RNA, 27 nt, synthetic construct
  misc_feature 1..27: note = Gamma-interferon-inducible protein 16 (15-23)
  source 1..27: mol_type = other RNA
gaggtgatcaacgactaccacttccgc

SEQ ID NO: 49370 - RNA, 33 nt, synthetic construct
  misc_feature 1..33: note = Rho guanine nucleotide exchange factor 12 (790-800)
  source 1..33: mol_type = other RNA
gaggtgatcaacgagctgttctacaccgagcgc

SEQ ID NO: 49371 - RNA, 30 nt, synthetic construct
  misc_feature 1..30: note = Eukaryotic translation initiation factor 3 subunit G (58-67)
  source 1..30: mol_type = other RNA
gaggtgatcaacggcaacatcaagaccgtc

SEQ ID NO: 49372 - RNA, 27 nt, synthetic construct
  misc_feature 1..27: note = Isoleucine-tRNA ligase, cytoplasmic (989-997)
  source 1..27: mol_type = other RNA
gaggtgatcaaccgcatccagaagctg

SEQ ID NO: 49373 - RNA, 27 nt, synthetic construct
  misc_feature 1..27: note = Trafficking protein particle complex subunit 9 (680-688)
  source 1..27: mol_type = other RNA
gaggtgatccccgccctgccgcgcctc

SEQ ID NO: 49374 - RNA, 30 nt, synthetic construct
  misc_feature 1..30: note = Dynactin subunit 6 (135-144)
  source 1..30: mol_type = other RNA
gaggtgatccccgagaacaccgtcatctac

SEQ ID NO: 49375 - RNA, 27 nt, synthetic construct
  misc_feature 1..27: note = Transcriptional adapter 1 (289-297)
  source 1..27: mol_type = other RNA
gaggtgatccccacccacaccgtctac

SEQ ID NO: 49376 - RNA, 33 nt, synthetic construct
  misc_feature 1..33: note = Heme oxygenase 1 (103-113)
  source 1..33: mol_type = other RNA
gaggtgatcccctacaccccggccatgcagcgc

SEQ ID NO: 49377 - RNA, 36 nt, synthetic construct
  misc_feature 1..36: note = Heme oxygenase 1 (103-114)
  source 1..36: mol_type = other RNA
gaggtgatcccctacaccccggccatgcagcgctac

SEQ ID NO: 49378 - RNA, 39 nt, synthetic construct
  misc_feature 1..39: note = MAX gene-associated protein (214-226)
  source 1..39: mol_type = other RNA
gaggtgatccagctgaacggccccggggtccacaccttc

SEQ ID NO: 49379 - RNA, 36 nt, synthetic construct
  misc_feature 1..36: note = Kalirin (827-838)
  source 1..36: mol_type = other RNA
gaggtgatccagcagggccaggacctgcaccagtac

SEQ ID NO: 49380 - RNA, 27 nt, synthetic construct
  misc_feature 1..27: note = Cyclin-I (47-55)
  source 1..27: mol_type = other RNA
gaggtgatccagtggctggccaagctc

SEQ ID NO: 49381 - RNA, 27 nt, synthetic construct
  misc_feature 1..27: note = Protein dopey-2 (236-244)
  source 1..27: mol_type = other RNA
gaggtgatccgcgccttctacagctac

SEQ ID NO: 49382 - RNA, 27 nt, synthetic construct
  misc_feature 1..27: note = Inositol-tetrakisphosphate 1-kinase (260-268)
  source 1..27: mol_type = other RNA
gaggtgatccgcgagctgagccgggcc

SEQ ID NO: 49383 - RNA, 30 nt, synthetic construct
  misc_feature 1..30: note = Serine/threonine-protein kinase ICK (67-76)
  source 1..30: mol_type = other RNA
gaggtgatccgcgagaacgaccacctgtac

SEQ ID NO: 49384 - RNA, 39 nt, synthetic construct
  misc_feature 1..39: note = Peptidyl-prolyl cis-trans isomerase FKBP1A (55-67)
  source 1..39: mol_type = other RNA
gaggtgatccgcggctgggaggagggggtcgcccagatg

SEQ ID NO: 49385 - RNA, 27 nt, synthetic construct
  misc_feature 1..27: note = BCL2/adenovirus E1B 19 kDa protein-interacting protein 2 (170-178)
  source 1..27: mol_type = other RNA
gaggtgatccgcaagggcagcatcacc

SEQ ID NO: 49386 - RNA, 33 nt, synthetic construct
  misc_feature 1..33: note = BCL2/adenovirus E1B 19 kDa protein-interacting protein 2 (170-180)
  source 1..33: mol_type = other RNA
gaggtgatccgcaagggcagcatcaccgagtac

SEQ ID NO: 49387 - RNA, 33 nt, synthetic construct
  misc_feature 1..33: note = General vesicular transport factor p115 (180-190)
  source 1..33: mol_type = other RNA
gaggtgatccgcaacgacggcgtcctgctcctg

SEQ ID NO: 49388 - RNA, 36 nt, synthetic construct
  misc_feature 1..36: note = Mitogen-activated protein kinase kinase kinase 3 (568-579)
  source 1..36: mol_type = other RNA
gaggtgatcagcggcgaggggtacggccgcaaggcc

SEQ ID NO: 49389 - RNA, 30 nt, synthetic construct
  misc_feature 1..30: note = Protein FRA10AC1 (165-174)
  source 1..30: mol_type = other RNA
gaggtgatcagcggcaaggggcagttcttc

SEQ ID NO: 49390 - RNA, 30 nt, synthetic construct
  misc_feature 1..30: note = Ectonucleoside triphosphate diphosphohydrolase 4 (216-225)
  source 1..30: mol_type = other RNA
gaggtgatcagcggcaagcaggagggggtc

SEQ ID NO: 49391 - RNA, 33 nt, synthetic construct
  misc_feature 1..33: note = Ectonucleoside triphosphate diphosphohydrolase 4 (216-226)
  source 1..33: mol_type = other RNA
gaggtgatcagcggcaagcaggagggggtctac

SEQ ID NO: 49392 - RNA, 36 nt, synthetic construct
  misc_feature 1..36: note = Protein CIP2A (34-45)
  source 1..36: mol_type = other RNA
gaggtgatcagcggccagaagctgacccgcctcttc

SEQ ID NO: 49393 - RNA, 27 nt, synthetic construct
  misc_feature 1..27: note = Syntaxin-18 (55-63)
  source 1..27: mol_type = other RNA
gaggtgatcagccacatcggcaagctg

SEQ ID NO: 49394 - RNA, 27 nt, synthetic construct
  misc_feature 1..27: note = CREB3 regulatory factor (131-139)
  source 1..27: mol_type = other RNA
gaggtgatcagcaagacccccaccctg

SEQ ID NO: 49395 - RNA, 27 nt, synthetic construct
  misc_feature 1..27: note = Cullin-9 (584-592)
  source 1..27: mol_type = other RNA
gaggtgatcagcaagtacgagaaggcc

SEQ ID NO: 49396 - RNA, 27 nt, synthetic construct
  misc_feature 1..27: note = FAS-associated factor 2 (195-203)
  source 1..27: mol_type = other RNA
gaggtgatcagcctgatcaacacccgc

SEQ ID NO: 49397 - RNA, 30 nt, synthetic construct
  misc_feature 1..30: note = Pseudopodium-enriched atypical kinase 1 (20-29)
  source 1..30: mol_type = other RNA
gaggtgatcagcaacgagggcgggcgcttc

SEQ ID NO: 49398 - RNA, 30 nt, synthetic construct
  misc_feature 1..30: note = Alpha-1,3-mannosyl-glycoprotein 4-beta-N-acetylglucosaminyltransferase B (111-120)
  source 1..30: mol_type = other RNA
gaggtgatcagcccctccccgcacttctac

SEQ ID NO: 49399 - RNA, 27 nt, synthetic construct
  misc_feature 1..27: note = ATP-binding cassette sub-family A member 5 (1411-1419)
  source 1..27: mol_type = other RNA
gaggtgatcagccgcatcacccacgcc

SEQ ID NO: 49400 - RNA, 36 nt, synthetic construct
  misc_feature 1..36: note = Importin subunit alpha-5 (120-131)
  source 1..36: mol_type = other RNA
gaggtgatcagcacccccggcgtcgtggcccgcttc

SEQ ID NO: 49401 - RNA, 27 nt, synthetic construct
  misc_feature 1..27: note = Ankycorbin (933-941)
  source 1..27: mol_type = other RNA
gaggtgatcagcgtctaccgcatgcac

SEQ ID NO: 49402 - RNA, 27 nt, synthetic construct
  misc_feature 1..27: note = Ataxin-2 (291-299)
  source 1..27: mol_type = other RNA
gaggtgatcagctggggctccgggcgc

SEQ ID NO: 49403 - RNA, 33 nt, synthetic construct
  misc_feature 1..33: note = Unconventional myosin-X (308-318)
  source 1..33: mol_type = other RNA
gaggtgatcaccgccatggacgtcatgcagttc

SEQ ID NO: 49404 - RNA, 33 nt, synthetic construct
  misc_feature 1..33: note = Ras GTPase-activating protein 3 (134-144)
  source 1..33: mol_type = other RNA
gaggtgatcaccgacaccggcgtcgtgtgccac

SEQ ID NO: 49405 - RNA, 30 nt, synthetic construct
  misc_feature 1..30: note = Nuclear export mediator factor NEMF (306-315)
  source 1..30: mol_type = other RNA
gaggtgatcacccacgagctgcaggacttc

SEQ ID NO: 49406 - RNA, 33 nt, synthetic construct
  misc_feature 1..33: note = Phospholipid scramblase 2 (86-96)
  source 1..33: mol_type = other RNA
gaggtgatcaccctggagcgccccctccggtgc

SEQ ID NO: 49407 - RNA, 30 nt, synthetic construct
  misc_feature 1..30: note = A-kinase anchor protein 9 (1601-1610)
  source 1..30: mol_type = other RNA
gaggtgatcaccaaccgccccaagggcttc

SEQ ID NO: 49408 - RNA, 36 nt, synthetic construct
  misc_feature 1..36: note = Translation initiation factor eIF-2B subunit gamma (272-283)
  source 1..36: mol_type = other RNA
gaggtgatcgtcggcaacgaccagctgatggagatc

SEQ ID NO: 49409 - RNA, 27 nt, synthetic construct
  misc_feature 1..27: note = Methylmalonyl-CoA mutase, mitochondrial (484-492)
  source 1..27: mol_type = other RNA
gaggtgatcgtcggcgtgaacaagtac

SEQ ID NO: 49410 - RNA, 27 nt, synthetic construct
  misc_feature 1..27: note = Insulin-like growth factor 2 mRNA-binding protein 2 (555-563)
  source 1..27: mol_type = other RNA
gaggtgatcgtccgcatcatcggccac

SEQ ID NO: 49411 - RNA, 27 nt, synthetic construct
  misc_feature 1..27: note = Dynactin subunit 4 (424-432)
  source 1..27: mol_type = other RNA
gaggtgatctggctgacccagcacgtc

SEQ ID NO: 49412 - RNA, 33 nt, synthetic construct
  misc_feature 1..33: note = Actin-related protein 8 (209-219)
  source 1..33: mol_type = other RNA
gaggtgatctggagccacgccatccagaagtac

SEQ ID NO: 49413 - RNA, 27 nt, synthetic construct
  misc_feature 1..27: note = BTB/POZ domain-containing protein 10 (398-406)
  source 1..27: mol_type = other RNA
gaggtgatctacaactacgtccagcgc

SEQ ID NO: 49414 - RNA, 27 nt, synthetic construct
  misc_feature 1..27: note = Ras GTPase-activating-like protein IQGAP1 (1602-1610)
  source 1..27: mol_type = other RNA
gaggtgaaggccaagttcatgggcgtc

SEQ ID NO: 49415 - RNA, 27 nt, synthetic construct
  misc_feature 1..27: note = E3 ubiquitin-protein ligase CBL-B (290-298)
  source 1..27: mol_type = other RNA
gaggtgaaggcccgcctgcagaagtac

SEQ ID NO: 49416 - RNA, 33 nt, synthetic construct
  misc_feature 1..33: note = F-box only protein 22 (380-390)
  source 1..33: mol_type = other RNA
gaggtgaaggacgacgacctgttccacagctac

SEQ ID NO: 49417 - RNA, 33 nt, synthetic construct
  misc_feature 1..33: note = Cation-independent mannose-6-phosphate receptor (1228-1238)
  source 1..33: mol_type = other RNA
gaggtgaaggacccccgccacggcaacctgtac

SEQ ID NO: 49418 - RNA, 30 nt, synthetic construct
  misc_feature 1..30: note = Centromere protein F (1197-1206)
  source 1..30: mol_type = other RNA
gaggtgaaggagatcagcctggactcctac

SEQ ID NO: 49419 - RNA, 27 nt, synthetic construct
  misc_feature 1..27: note = Apolipoprotein E (249-257)
  source 1..27: mol_type = other RNA
gaggtgaaggagcaggtcgccgaggtg

SEQ ID NO: 49420 - RNA, 27 nt, synthetic construct
  misc_feature 1..27: note = Ras association domain-containing protein 8 (290-298)
  source 1..27: mol_type = other RNA
gaggtgaagggcaagatcgggaaggtc

SEQ ID NO: 49421 - RNA, 30 nt, synthetic construct
  misc_feature 1..30: note = Prolyl endopeptidase-like (114-123)
  source 1..30: mol_type = other RNA
gaggtgaagcacggcgggttcgtctactac

SEQ ID NO: 49422 - RNA, 27 nt, synthetic construct
  misc_feature 1..27: note = Ras association domain-containing protein 2 (297-305)
  source 1..27: mol_type = other RNA
gaggtgaagaagctgatgcgcaagtac

SEQ ID NO: 49423 - RNA, 27 nt, synthetic construct
  misc_feature 1..27: note = Ethylmalonyl-CoA decarboxylase (36-44)
  source 1..27: mol_type = other RNA
gaggtgaagaagaccctgcagcagttc

SEQ ID NO: 49424 - RNA, 27 nt, synthetic construct
  misc_feature 1..27: note = Proteasome activator complex subunit 3 (10-18)
  source 1..27: mol_type = other RNA
gaggtgaagctgaaggtcgacagcttc

SEQ ID NO: 49425 - RNA, 27 nt, synthetic construct
  misc_feature 1..27: note = Integrator complex subunit 11 (350-358)
  source 1..27: mol_type = other RNA
gaggtgaagatgcaggtcgagtacatg

SEQ ID NO: 49426 - RNA, 27 nt, synthetic construct
  misc_feature 1..27: note = Elongator complex protein 1 (50-58)
  source 1..27: mol_type = other RNA
gaggtgaagaacgaggtcagcctggtg

SEQ ID NO: 49427 - RNA, 45 nt, synthetic construct
  misc_feature 1..45: note = Delta-1-pyrroline-5-carboxylate synthase (320-334)
  source 1..45: mol_type = other RNA
gaggtgaagcccgccggcccgaccgtcgagcagcagggggagatg

SEQ ID NO: 49428 - RNA, 48 nt, synthetic construct
  misc_feature 1..48: note = Delta-1-pyrroline-5-carboxylate synthase (320-335)
  source 1..48: mol_type = other RNA
gaggtgaagcccgccggcccgaccgtcgagcagcagggggagatggcc

SEQ ID NO: 49429 - RNA, 27 nt, synthetic construct
  misc_feature 1..27: note = Ras-related GTP-binding protein D (60-68)
  source 1..27: mol_type = other RNA
gaggtgaagccccgcatcctgctcatg

SEQ ID NO: 49430 - RNA, 27 nt, synthetic construct
  misc_feature 1..27: note = Histone deacetylase 9 (142-150)
  source 1..27: mol_type = other RNA
gaggtgaagcagaagctgcaggagttc

SEQ ID NO: 49431 - RNA, 27 nt, synthetic construct
  misc_feature 1..27: note = Periodic tryptophan protein 1 homolog (31-39)
  source 1..27: mol_type = other RNA
gaggtgaagcgcctgatcgccgaggcc

SEQ ID NO: 49432 - RNA, 27 nt, synthetic construct
  misc_feature 1..27: note = Pachytene checkpoint protein 2 homolog (146-154)
  source 1..27: mol_type = other RNA
gaggtgaagagccacctgctcgactac

SEQ ID NO: 49433 - RNA, 27 nt, synthetic construct
  misc_feature 1..27: note = Apoptosis-inducing factor 1, mitochondrial (276-284)
  source 1..27: mol_type = other RNA
gaggtgaagagccgcaccaccctgttc

SEQ ID NO: 49434 - RNA, 27 nt, synthetic construct
  misc_feature 1..27: note = Chloride intracellular channel protein 4 (83-91)
  source 1..27: mol_type = other RNA
gaggtgaagaccgacgtcaacaagatc

SEQ ID NO: 49435 - RNA, 27 nt, synthetic construct
  misc_feature 1..27: note = Kinetochore-associated protein DSN1 homolog (235-243)
  source 1..27: mol_type = other RNA
gaggtgaaggtcgagcccatgacctac

SEQ ID NO: 49436 - RNA, 27 nt, synthetic construct
  misc_feature 1..27: note = Glycerol-3-phosphate dehydrogenase, mitochondrial (410-418)
  source 1..27: mol_type = other RNA
gaggtgaagtacggcatcaaggagtac

SEQ ID NO: 49437 - RNA, 27 nt, synthetic construct
  misc_feature 1..27: note = Bifunctional coenzyme A synthase (63-71)
  source 1..27: mol_type = other RNA
gaggtgctggacttcatcacccacctc

SEQ ID NO: 49438 - RNA, 30 nt, synthetic construct
  misc_feature 1..30: note = Insulin-like growth factor 2 mRNA-binding protein 2 (95-104)
  source 1..30: mol_type = other RNA
gaggtgctggacggcctcctggcccagtac

SEQ ID NO: 49439 - RNA, 30 nt, synthetic construct
  misc_feature 1..30: note = Serine/threonine-protein kinase PRP4 homolog (170-179)
  source 1..30: mol_type = other RNA
gaggtgctggacaagcgctacaacgtctac

SEQ ID NO: 49440 - RNA, 33 nt, synthetic construct
  misc_feature 1..33: note = Estradiol 17-beta-dehydrogenase 1 (203-213)
  source 1..33: mol_type = other RNA
gaggtgctggaccgcaccgacatccacaccttc

SEQ ID NO: 49441 - RNA, 30 nt, synthetic construct
  misc_feature 1..30: note = Receptor-type protein tyrosine phosphatase beta (1332-1341)
  source 1..30: mol_type = other RNA
gaggtgctggacagccacatccacgcctac

SEQ ID NO: 49442 - RNA, 30 nt, synthetic construct
  misc_feature 1..30: note = Insulin-like growth factor 2 mRNA-binding protein 3 (95-104)
  source 1..30: mol_type = other RNA
gaggtgctggacagcctcctggtccagtac

SEQ ID NO: 49443 - RNA, 27 nt, synthetic construct
  misc_feature 1..27: note = StAR-related lipid transfer protein 7, mitochondrial (136-144)
  source 1..27: mol_type = other RNA
gaggtgctgcactgggtcacccacttc

SEQ ID NO: 49444 - RNA, 30 nt, synthetic construct
  misc_feature 1..30: note = Ubiquitin-associated protein 1-like (34-43)
  source 1..30: mol_type = other RNA
gaggtgctgctcggcagcatgcacgacttc

SEQ ID NO: 49445 - RNA, 30 nt, synthetic construct
  misc_feature 1..30: note = Mitofusin-2 (308-317)
  source 1..30: mol_type = other RNA
gaggtgctgaacgcccgcatccagaaggcc

SEQ ID NO: 49446 - RNA, 30 nt, synthetic construct
  misc_feature 1..30: note = Exportin-6 (272-281)
  source 1..30: mol_type = other RNA
gaggtgctgaaccgcatccagttccggtac

SEQ ID NO: 49447 - RNA, 30 nt, synthetic construct
  misc_feature 1..30: note = Ancient ubiquitous protein 1 (306-315)
  source 1..30: mol_type = other RNA
gaggtgctgccccacgtcccgctcggcgtg

SEQ ID NO: 49448 - RNA, 30 nt, synthetic construct
  misc_feature 1..30: note = Spectrin alpha chain, non-erythrocytic 1 (185-194)
  source 1..30: mol_type = other RNA
gaggtgctgcagaagaagttcgaggagttc

SEQ ID NO: 49449 - RNA, 27 nt, synthetic construct
  misc_feature 1..27: note = Importin-7 (378-386)
  source 1..27: mol_type = other RNA
gaggtgctgcagaagaccatgggcttc

SEQ ID NO: 49450 - RNA, 27 nt, synthetic construct
  misc_feature 1..27: note = Class E basic helix-loop-helix protein 41 (141-149)
  source 1..27: mol_type = other RNA
gaggtgctgcagtacctcagccgcttc

SEQ ID NO: 49451 - RNA, 27 nt, synthetic construct
  misc_feature 1..27: note = MAGEC3 protein (192-200)
  source 1..27: mol_type = other RNA
gaggtgctgagcgccatcggcgtctgc

SEQ ID NO: 49452 - RNA, 33 nt, synthetic construct
  misc_feature 1..33: note = Serine/threonine-protein kinase Nek2 (9-19)
  source 1..33: mol_type = other RNA
gaggtgctgtacaccatcggcaccgggagctac

SEQ ID NO: 49453 - RNA, 33 nt, synthetic construct
  misc_feature 1..33: note = Ly6/PLAUR domain-containing protein 1 isoform c (73-83)
  source 1..33: mol_type = other RNA
gaggtgatggagcagagcgccggcatcatgtac

SEQ ID NO: 49454 - RNA, 30 nt, synthetic construct
  misc_feature 1..30: note = Protein FAM118A (215-224)
  source 1..30: mol_type = other RNA
gaggtgatggaggtcctgcagaacctctac

SEQ ID NO: 49455 - RNA, 36 nt, synthetic construct
  misc_feature 1..36: note = Proteasome maturation protein (125-136)
  source 1..36: mol_type = other RNA
gaggtgatgggcgagccccacctgatggtcgagtac

SEQ ID NO: 49456 - RNA, 30 nt, synthetic construct
  misc_feature 1..30: note = Isoprenoid synthase domain-containing protein isoform X7 (103-112)
  source 1..30: mol_type = other RNA
gaggtgatgaagagcatcatccagaagtac

SEQ ID NO: 49457 - RNA, 30 nt, synthetic construct
  misc_feature 1..30: note = Alkyldihydroxyacetonephosphate synthase, peroxisomal (89-98)
  source 1..30: mol_type = other RNA
gaggtgatgaagtggaacggctgggggtac

SEQ ID NO: 49458 - RNA, 33 nt, synthetic construct
  misc_feature 1..33: note = Protein-L-isoaspartate(D-aspartate) O-methyltransferase (30-40)
  source 1..33: mol_type = other RNA
gaggtgatgctggccaccgaccgcagccactac

SEQ ID NO: 49459 - RNA, 30 nt, synthetic construct
  misc_feature 1..30: note = Prolyl 3-hydroxylase 1 (335-344)
  source 1..30: mol_type = other RNA
gaggtgatgaaccagaacctggcctactac

SEQ ID NO: 49460 - RNA, 27 nt, synthetic construct
  misc_feature 1..27: note = tRNA-dihydrouridine(20) synthase (NAD(P)+)-like (227-235)
  source 1..27: mol_type = other RNA
gaggtgatgcagaagtacatccgctac

SEQ ID NO: 49461 - RNA, 30 nt, synthetic construct
  misc_feature 1..30: note = Actin-related protein 2/3 complex subunit 3 (127-136)
  source 1..30: mol_type = other RNA
gaggtgatgcgcgcctacctgcagcagctc

SEQ ID NO: 49462 - RNA, 27 nt, synthetic construct
  misc_feature 1..27: note = Transcription factor SOX-10 (284-292)
  source 1..27: mol_type = other RNA
gaggtgatgagcaacatggagaccttc

SEQ ID NO: 49463 - RNA, 30 nt, synthetic construct
  misc_feature 1..30: note = Mitofusin-2 (23-32)
  source 1..30: mol_type = other RNA
gaggtgaacgccagccccctgaagcacttc

SEQ ID NO: 49464 - RNA, 33 nt, synthetic construct
  misc_feature 1..33: note = Procollagen C-endopeptidase enhancer 2 (220-230)
  source 1..33: mol_type = other RNA
gaggtgaacgacgcccgccggatcggcaagtac

SEQ ID NO: 49465 - RNA, 27 nt, synthetic construct
  misc_feature 1..27: note = Ankycorbin (840-848)
  source 1..27: mol_type = other RNA
gaggtgaacgagctgctccagaagttc

SEQ ID NO: 49466 - RNA, 27 nt, synthetic construct
  misc_feature 1..27: note = mRNA turnover protein 4 homolog (111-119)
  source 1..27: mol_type = other RNA
gaggtgaacgagtggttcaccaagtac

SEQ ID NO: 49467 - RNA, 30 nt, synthetic construct
  misc_feature 1..30: note = Ethanolamine-phosphate cytidylyltransferase (254-263)
  source 1..30: mol_type = other RNA
gaggtgaaccactacaagggcaagaactac

SEQ ID NO: 49468 - RNA, 27 nt, synthetic construct
  misc_feature 1..27: note = Long-chain-fatty-acid-CoA ligase 4 (89-97)
  source 1..27: mol_type = other RNA
gaggtgaaccgccgggtcaacaacttc

SEQ ID NO: 49469 - RNA, 27 nt, synthetic construct
  misc_feature 1..27: note = Serpin B8 (76-84)
  source 1..27: mol_type = other RNA
gaggtgaaccgcaccggcacccagtac

SEQ ID NO: 49470 - RNA, 27 nt, synthetic construct
  misc_feature 1..27: note = T-complex protein 1 subunit zeta (101-109)
  source 1..27: mol_type = other RNA
gaggtgaacagcggcttcttctacaag

SEQ ID NO: 49471 - RNA, 27 nt, synthetic construct
  misc_feature 1..27: note = Sodium/potassium/calcium exchanger 5 (372-380)
  source 1..27: mol_type = other RNA
gaggtgaacagccgcggcctgacctac

SEQ ID NO: 49472 - RNA, 30 nt, synthetic construct
  misc_feature 1..30: note = Putative PIP5K1A and PSMD4-like protein (632-641)
  source 1..30: mol_type = other RNA
gaggtgaacaccgagaagctgaccgccttc

SEQ ID NO: 49473 - RNA, 33 nt, synthetic construct
  misc_feature 1..33: note = FAST kinase domain-containing protein 1 (204-214)
  source 1..33: mol_type = other RNA
gaggtgaacgtcgccaagagcatcgccaagttc

SEQ ID NO: 49474 - RNA, 27 nt, synthetic construct
  misc_feature 1..27: note = Protein NATD1 (59-67)
  source 1..27: mol_type = other RNA
gaggtgcccgacgcctaccgcggccgg

SEQ ID NO: 49475 - RNA, 27 nt, synthetic construct
  misc_feature 1..27: note = Thioredoxin-like protein 4A (65-73)
  source 1..27: mol_type = other RNA
gaggtgcccgacttcaacaagatgtac

SEQ ID NO: 49476 - RNA, 36 nt, synthetic construct
  misc_feature 1..36: note = Cyclin-A2 (174-185)
  source 1..36: mol_type = other RNA
gaggtgcccgactaccacgaggacatccacacctac

SEQ ID NO: 49477 - RNA, 30 nt, synthetic construct
  misc_feature 1..30: note = Protein FAM135B (80-89)
  source 1..30: mol_type = other RNA
gaggtgcccatcaacgacgccgtcgtgttc

SEQ ID NO: 49478 - RNA, 27 nt, synthetic construct
  misc_feature 1..27: note = Serine/threonine-protein kinase 36 (1232-1240)
  source 1..27: mol_type = other RNA
gaggtgccccagcgcctgctcgagatg

SEQ ID NO: 49479 - RNA, 30 nt, synthetic construct
  misc_feature 1..30: note = La-related protein 1 (262-271)
  source 1..30: mol_type = other RNA
gaggtgccccgcgagaagctggccagccgg

SEQ ID NO: 49480 - RNA, 30 nt, synthetic construct
  misc_feature 1..30: note = Meckel syndrome type 1 protein (150-159)
  source 1..30: mol_type = other RNA
gaggtgcccagcttcctggtcgagcgcatg

SEQ ID NO: 49481 - RNA, 30 nt, synthetic construct
  misc_feature 1..30: note = Copine-1 (173-182)
  source 1..30: mol_type = other RNA
gaggtgcccacccagctggtcagctacttc

SEQ ID NO: 49482 - RNA, 39 nt, synthetic construct
  misc_feature 1..39: note = Macrophage-capping protein (97-109)
  source 1..39: mol_type = other RNA
gaggtgcagggcaacgagagcgacctgttcatgtcctac

SEQ ID NO: 49483 - RNA, 27 nt, synthetic construct
  misc_feature 1..27: note = 26S protease regulatory subunit 8 (142-150)
  source 1..27: mol_type = other RNA
gaggtgcagcgcaccatgctggagctc

SEQ ID NO: 49484 - RNA, 27 nt, synthetic construct
  misc_feature 1..27: note = Coatomer subunit gamma-2 (523-531)
  source 1..27: mol_type = other RNA
gaggtgcgcgaccgggccaccttctac

SEQ ID NO: 49485 - RNA, 30 nt, synthetic construct
  misc_feature 1..30: note = Ubiquitin-protein ligase E3C (567-576)
  source 1..30: mol_type = other RNA
gaggtgcgcgaggagtacatcaccgccttc

SEQ ID NO: 49486 - RNA, 30 nt, synthetic construct
  misc_feature 1..30: note = Lactadherin (36-45)
  source 1..30: mol_type = other RNA
gaggtgcgcggcgacgtcttccccagctac

SEQ ID NO: 49487 - RNA, 27 nt, synthetic construct
  misc_feature 1..27: note = Spindle and kinetochore-associated protein 1 (243-251)
  source 1..27: mol_type = other RNA
gaggtgcgcggcgggggcctgacccgg

SEQ ID NO: 49488 - RNA, 30 nt, synthetic construct
  misc_feature 1..30: note = Spindle and kinetochore-associated protein 1 (243-252)
  source 1..30: mol_type = other RNA
gaggtgcgcggcgggggcctgacccggtac

SEQ ID NO: 49489 - RNA, 30 nt, synthetic construct
  misc_feature 1..30: note = GTP-binding protein 1 (445-454)
  source 1..30: mol_type = other RNA
gaggtgcgcggcgggcagaccgccagcttc

SEQ ID NO: 49490 - RNA, 27 nt, synthetic construct
  misc_feature 1..27: note = Glutaredoxin-3 (140-148)
  source 1..27: mol_type = other RNA
gaggtgcgccagggcctgaaggcctac

SEQ ID NO: 49491 - RNA, 30 nt, synthetic construct
  misc_feature 1..30: note = Fatty acid synthase (674-683)
  source 1..30: mol_type = other RNA
gaggtgcgcaccggcgggatggccttccac

SEQ ID NO: 49492 - RNA, 27 nt, synthetic construct
  misc_feature 1..27: note = Putative butyrophilin subfamily 2 member A3 (62-70)
  source 1..27: mol_type = other RNA
gaggtgcgctggttccagagccagttc

SEQ ID NO: 49493 - RNA, 27 nt, synthetic construct
  misc_feature 1..27: note = Butyrophilin subfamily 2 member A1 (63-71)
  source 1..27: mol_type = other RNA
gaggtgcgctggttccggagccagttc

SEQ ID NO: 49494 - RNA, 30 nt, synthetic construct
  misc_feature 1..30: note = Interleukin-1 receptor-associated kinase 4 (159-168)
  source 1..30: mol_type = other RNA
gaggtgagcgacacccgcttccactccttc

SEQ ID NO: 49495 - RNA, 27 nt, synthetic construct
  misc_feature 1..27: note = E3 ubiquitin-protein ligase UBR5 (24-32)
  source 1..27: mol_type = other RNA
gaggtgagcgagaagctgaacaagtac

SEQ ID NO: 49496 - RNA, 27 nt, synthetic construct
  misc_feature 1..27: note = Protein FAM111B (228-236)
  source 1..27: mol_type = other RNA
gaggtgagcggcaaggtcctggagatg

SEQ ID NO: 49497 - RNA, 33 nt, synthetic construct
  misc_feature 1..33: note = Cytosolic carboxypeptidase 1 (764-774)
  source 1..33: mol_type = other RNA
gaggtgagcggcatgcgccccggggtcgcctac

SEQ ID NO: 49498 - RNA, 27 nt, synthetic construct
  misc_feature 1..27: note = Alpha-actinin-1 (574-582)
  source 1..27: mol_type = other RNA
gaggtgagcaagatcgtccagacctac

SEQ ID NO: 49499 - RNA, 27 nt, synthetic construct
  misc_feature 1..27: note = cGMP-inhibited 3',5'-cyclic phosphodiesterase B (656-664)
  source 1..27: mol_type = other RNA
gaggtgagcctggacctcatcctggtc

SEQ ID NO: 49500 - RNA, 33 nt, synthetic construct
  misc_feature 1..33: note = Growth hormone-inducible transmembrane protein (303-313)
  source 1..33: mol_type = other RNA
gaggtgagccccatgtacggcgtccagaagtac

SEQ ID NO: 49501 - RNA, 27 nt, synthetic construct
  misc_feature 1..27: note = NADH-ubiquinone oxidoreductase 75 kDa subunit, mitochondrial (537-545)
  source 1..27: mol_type = other RNA
gaggtgagccccaacctggtccgctac

SEQ ID NO: 49502 - RNA, 30 nt, synthetic construct
  misc_feature 1..30: note = Proton myo-inositol cotransporter (179-188)
  source 1..30: mol_type = other RNA
gaggtgagccccccgaacctgcgcggccgg

SEQ ID NO: 49503 - RNA, 27 nt, synthetic construct
  misc_feature 1..27: note = Abnormal spindle-like microcephaly-associated protein (322-330)
  source 1..27: mol_type = other RNA
gaggtgagcccccgcatcccggagtgc

SEQ ID NO: 49504 - RNA, 30 nt, synthetic construct
  misc_feature 1..30: note = AP-1 complex subunit beta-1 (934-943)
  source 1..30: mol_type = other RNA
gaggtgagccagcacgtctaccaggcctac

SEQ ID NO: 49505 - RNA, 27 nt, synthetic construct
  misc_feature 1..27: note = Transcription factor TFIIIB component B'' homolog (1376-1384)
  source 1..27: mol_type = other RNA
gaggtgagctcccacttcagccacttc

SEQ ID NO: 49506 - RNA, 30 nt, synthetic construct
  misc_feature 1..30: note = Retinoblastoma-like protein 1 (130-139)
  source 1..30: mol_type = other RNA
gaggtgagcaccgtcatcttcaagaagtac

SEQ ID NO: 49507 - RNA, 33 nt, synthetic construct
  misc_feature 1..33: note = Xenotropic and polytropic retrovirus receptor 1 (40-50)
  source 1..33: mol_type = other RNA
gaggtgaccgacgaggacaccgtcaagcgctac

SEQ ID NO: 49508 - RNA, 30 nt, synthetic construct
  misc_feature 1..30: note = U3 small nucleolar ribonucleoprotein protein IMP3 (22-31)
  source 1..30: mol_type = other RNA
gaggtgaccgaccacaacctgcacgagctc

SEQ ID NO: 49509 - RNA, 27 nt, synthetic construct
  misc_feature 1..27: note = Ankyrin repeat domain-containing protein 54 (279-287)
  source 1..27: mol_type = other RNA
gaggtgaccgacctgctcgccagcttc

SEQ ID NO: 49510 - RNA, 36 nt, synthetic construct
  misc_feature 1..36: note = Protein SET (111-122)
  source 1..36: mol_type = other RNA
gaggtgaccgagttcgaggacatcaagagcggctac

SEQ ID NO: 49511 - RNA, 27 nt, synthetic construct
  misc_feature 1..27: note = Prostaglandin E synthase 2 (201-209)
  source 1..27: mol_type = other RNA
gaggtgaccgagttcggcaacaagtac

SEQ ID NO: 49512 - RNA, 27 nt, synthetic construct
  misc_feature 1..27: note = Zinc finger CCHC domain-containing protein 14 (136-144)
  source 1..27: mol_type = other RNA
gaggtgaccgagttcatcagcaagctg

SEQ ID NO: 49513 - RNA, 27 nt, synthetic construct
  misc_feature 1..27: note = Beta-parvin (274-282)
  source 1..27: mol_type = other RNA
gaggtgaccgagctggagacccagttc

SEQ ID NO: 49514 - RNA, 27 nt, synthetic construct
  misc_feature 1..27: note = Tankyrase-2 (358-366)
  source 1..27: mol_type = other RNA
gaggtgaccgagctgctcgtcaagcac

SEQ ID NO: 49515 - RNA, 27 nt, synthetic construct
  misc_feature 1..27: note = RNA-binding protein 26 (806-814)
  source 1..27: mol_type = other RNA
gaggtgaccgagctgcgccggaagtac

SEQ ID NO: 49516 - RNA, 27 nt, synthetic construct
  misc_feature 1..27: note = Ribonucleoprotein PTB-binding 2 (177-185)
  source 1..27: mol_type = other RNA
gaggtgaccggccacagcaaggggtac

SEQ ID NO: 49517 - RNA, 30 nt, synthetic construct
  misc_feature 1..30: note = Integrin alpha-X (448-457)
  source 1..30: mol_type = other RNA
gaggtgaccggcacccagatcgggagctac

SEQ ID NO: 49518 - RNA, 27 nt, synthetic construct
  misc_feature 1..27: note = Catalase (10-18)
  source 1..27: mol_type = other RNA
gaggtgacccacgacatcaccaagtac

SEQ ID NO: 49519 - RNA, 27 nt, synthetic construct
  misc_feature 1..27: note = Plectin (3906-3914)
  source 1..27: mol_type = other RNA
gaggtgaccaagaacctgcagaagttc

SEQ ID NO: 49520 - RNA, 27 nt, synthetic construct
  misc_feature 1..27: note = EH domain-binding protein 1 (186-194)
  source 1..27: mol_type = other RNA
gaggtgaccaagaactaccgcggcgtc

SEQ ID NO: 49521 - RNA, 27 nt, synthetic construct
  misc_feature 1..27: note = Apoptosis-inducing factor 2 (169-177)
  source 1..27: mol_type = other RNA
gaggtgaccctgatccacagccaggtc

SEQ ID NO: 49522 - RNA, 33 nt, synthetic construct
  misc_feature 1..33: note = Ankyrin repeat and KH domain-containing protein 1 (1670-1680)
  source 1..33: mol_type = other RNA
gaggtgacccccaacagcctgtccaccagctac

SEQ ID NO: 49523 - RNA, 30 nt, synthetic construct
  misc_feature 1..30: note = Teneurin-4 (87-96)
  source 1..30: mol_type = other RNA
gaggtgacccccccgcacggcaccctgtac

SEQ ID NO: 49524 - RNA, 27 nt, synthetic construct
  misc_feature 1..27: note = Translocon-associated protein subunit gamma (99-107)
  source 1..27: mol_type = other RNA
gaggtgacccgcaagctgagcgaggcc

SEQ ID NO: 49525 - RNA, 27 nt, synthetic construct
  misc_feature 1..27: note = FAD synthase (63-71)
  source 1..27: mol_type = other RNA
gaggtgaccagcttctccaaccgcttc

SEQ ID NO: 49526 - RNA, 27 nt, synthetic construct
  misc_feature 1..27: note = Probable ATP-dependent RNA helicase DDX5 (30-38)
  source 1..27: mol_type = other RNA
gaggtgaccaccgcccgcagccagttc

SEQ ID NO: 49527 - RNA, 27 nt, synthetic construct
  misc_feature 1..27: note = EH domain-binding protein 1-like protein 1 (1049-1057)
  source 1..27: mol_type = other RNA
gaggtgaccaccggctaccgcggggtc

SEQ ID NO: 49528 - RNA, 27 nt, synthetic construct
  misc_feature 1..27: note = Formin-binding protein 4 (242-250)
  source 1..27: mol_type = other RNA
gaggtgacctgggagctgccccagtac

SEQ ID NO: 49529 - RNA, 27 nt, synthetic construct
  misc_feature 1..27: note = NGFI-A-binding protein 1 (307-315)
  source 1..27: mol_type = other RNA
gaggtgacctacaagtacacctaccgc

SEQ ID NO: 49530 - RNA, 30 nt, synthetic construct
  misc_feature 1..30: note = Serine/threonine-protein kinase TAO2 (52-61)
  source 1..30: mol_type = other RNA
gaggtggtcgccatcaagaagatgagctac

SEQ ID NO: 49531 - RNA, 30 nt, synthetic construct
  misc_feature 1..30: note = Phosphatidate phosphatase LPIN1 (844-853)
  source 1..30: mol_type = other RNA
gaggtggtcgaccacgtgttccccctgctc

SEQ ID NO: 49532 - RNA, 27 nt, synthetic construct
  misc_feature 1..27: note = Glutamate decarboxylase 1 (118-126)
  source 1..27: mol_type = other RNA
gaggtggtcgacatcctgctcaactac

SEQ ID NO: 49533 - RNA, 30 nt, synthetic construct
  misc_feature 1..30: note = Nardilysin (988-997)
  source 1..30: mol_type = other RNA
gaggtggtcgacaagaagatcgaggagttc

SEQ ID NO: 49534 - RNA, 27 nt, synthetic construct
  misc_feature 1..27: note = Lethal(3)malignant brain tumor-like protein 3 (457-465)
  source 1..27: mol_type = other RNA
gaggtggtcgacaagcgcaaccccatg

SEQ ID NO: 49535 - RNA, 39 nt, synthetic construct
  misc_feature 1..39: note = Contactin-associated protein-like 4 (182-194)
  source 1..39: mol_type = other RNA
gaggtggtcgacctggacggcaagagctccctcctgtac

SEQ ID NO: 49536 - RNA, 27 nt, synthetic construct
  misc_feature 1..27: note = Translation initiation factor eIF-2B subunit gamma (116-124)
  source 1..27: mol_type = other RNA
gaggtggtcgacctgttccgcgcctac

SEQ ID NO: 49537 - RNA, 33 nt, synthetic construct
  misc_feature 1..33: note = Translation initiation factor eIF-2B subunit gamma (116-126)
  source 1..33: mol_type = other RNA
gaggtggtcgacctgttccgcgcctacgacgcc

SEQ ID NO: 49538 - RNA, 27 nt, synthetic construct
  misc_feature 1..27: note = Collagen triple helix repeat-containing protein 1 (46-54)
  source 1..27: mol_type = other RNA
gaggtggtcgacctgtacaacggcatg

SEQ ID NO: 49539 - RNA, 33 nt, synthetic construct
  misc_feature 1..33: note = Unconventional myosin-X (2025-2035)
  source 1..33: mol_type = other RNA
gaggtggtcgacgtggccaagctgatgaaggcc

SEQ ID NO: 49540 - RNA, 36 nt, synthetic construct
  misc_feature 1..36: note = Unconventional myosin-X (2025-2036)
  source 1..36: mol_type = other RNA
gaggtggtcgacgtggccaagctgatgaaggcctac

SEQ ID NO: 49541 - RNA, 33 nt, synthetic construct
  misc_feature 1..33: note = Gephyrin (726-736)
  source 1..33: mol_type = other RNA
gaggtggtcgacgtgatggtgatcggccgcctg

SEQ ID NO: 49542 - RNA, 27 nt, synthetic construct
  misc_feature 1..27: note = Guanine nucleotide-binding protein-like 3-like protein (181-189)
  source 1..27: mol_type = other RNA
gaggtggtcgagaagtggctggactac

SEQ ID NO: 49543 - RNA, 27 nt, synthetic construct
  misc_feature 1..27: note = Kinetochore protein Nuf2 (271-279)
  source 1..27: mol_type = other RNA
gaggtggtcgagaagtacgagatctac

SEQ ID NO: 49544 - RNA, 27 nt, synthetic construct
  misc_feature 1..27: note = TBC1 domain family member 13 (209-217)
  source 1..27: mol_type = other RNA
gaggtggtcgagcgcatcctgttcatc

SEQ ID NO: 49545 - RNA, 33 nt, synthetic construct
  misc_feature 1..33: note = Putative ATP-dependent RNA helicase TDRD9 (906-916)
  source 1..33: mol_type = other RNA
gaggtggtcgaggtgggccacttctgggggtac

SEQ ID NO: 49546 - RNA, 30 nt, synthetic construct
  misc_feature 1..30: note = Cytosolic non-specific dipeptidase (351-360)
  source 1..30: mol_type = other RNA
gaggtggtcggcgagcaggtgaccagctac

SEQ ID NO: 49547 - RNA, 27 nt, synthetic construct
  misc_feature 1..27: note = Nuclear pore complex protein Nup160 (1025-1033)
  source 1..27: mol_type = other RNA
gaggtggtcggcatcatcgagagccgc

SEQ ID NO: 49548 - RNA, 27 nt, synthetic construct
  misc_feature 1..27: note = Pseudopodium-enriched atypical kinase 1 (303-311)
  source 1..27: mol_type = other RNA
gaggtggtcggcaagatccgcagcctg

SEQ ID NO: 49549 - RNA, 33 nt, synthetic construct
  misc_feature 1..33: note = DCN1-like protein 5 (65-75)
  source 1..33: mol_type = other RNA
gaggtggtcggccccgaggggatggagaagttc

SEQ ID NO: 49550 - RNA, 30 nt, synthetic construct
  misc_feature 1..30: note = 3 beta-hydroxysteroid dehydrogenase type 7 (131-140)
  source 1..30: mol_type = other RNA
gaggtggtcggccccaacaccaaggggcac

SEQ ID NO: 49551 - RNA, 27 nt, synthetic construct
  misc_feature 1..27: note = Tetratricopeptide repeat protein 5 (59-67)
  source 1..27: mol_type = other RNA
gaggtggtcggcagcgtgcaggggaag

SEQ ID NO: 49552 - RNA, 33 nt, synthetic construct
  misc_feature 1..33: note = Diacylglycerol kinase theta (848-858)
  source 1..33: mol_type = other RNA
gaggtggtcggcgtgaccggggtggtccacatg

SEQ ID NO: 49553 - RNA, 27 nt, synthetic construct
  misc_feature 1..27: note = WD repeat-containing protein 35 (735-743)
  source 1..27: mol_type = other RNA
gaggtggtcggctacttcgggcgcttc

SEQ ID NO: 49554 - RNA, 27 nt, synthetic construct
  misc_feature 1..27: note = Signal transducer and activator of transcription 1-alpha/beta (212-220)
  source 1..27: mol_type = other RNA
gaggtggtccacaagatcatcgagctg

SEQ ID NO: 49555 - RNA, 27 nt, synthetic construct
  misc_feature 1..27: note = Hemicentin-1 (5-13)
  source 1..27: mol_type = other RNA
gaggtggtccacaccgtgttcctgttc

SEQ ID NO: 49556 - RNA, 36 nt, synthetic construct
  misc_feature 1..36: note = Midasin (1181-1192)
  source 1..36: mol_type = other RNA
gaggtggtcaaggcccacccccgcttcatgctgttc

SEQ ID NO: 49557 - RNA, 27 nt, synthetic construct
  misc_feature 1..27: note = Heat shock protein HSP 90-beta (126-134)
  source 1..27: mol_type = other RNA
gaggtggtcaagaagcacagccagttc

SEQ ID NO: 49558 - RNA, 27 nt, synthetic construct
  misc_feature 1..27: note = Peroxisomal multifunctional enzyme type 2 (641-649)
  source 1..27: mol_type = other RNA
gaggtggtcaagaaggtgaacgccgtg

SEQ ID NO: 49559 - RNA, 27 nt, synthetic construct
  misc_feature 1..27: note = 39S ribosomal protein L21, mitochondrial (78-86)
  source 1..27: mol_type = other RNA
gaggtggtcaagaaggtgaacgagatg

SEQ ID NO: 49560 - RNA, 27 nt, synthetic construct
  misc_feature 1..27: note = Non-canonical poly(A) RNA polymerase PAPD7 (53-61)
  source 1..27: mol_type = other RNA
gaggtggtcaagcgcatcgagaccgtg

SEQ ID NO: 49561 - RNA, 39 nt, synthetic construct
  misc_feature 1..39: note = Radial spoke head 10 homolog B2 (158-170)
  source 1..39: mol_type = other RNA
gaggtggtcaacggcatgcgcaacgggttcggcatgttc

SEQ ID NO: 49562 - RNA, 33 nt, synthetic construct
  misc_feature 1..33: note = DNA replication licensing factor MCM7 (92-102)
  source 1..33: mol_type = other RNA
gaggtggtcaacaaggacgtgctggacgtgtac

SEQ ID NO: 49563 - RNA, 27 nt, synthetic construct
  misc_feature 1..27: note = Unconventional myosin-Ib (290-298)
  source 1..27: mol_type = other RNA
gaggtggtcaacaagatcaaccgcgcc

SEQ ID NO: 49564 - RNA, 42 nt, synthetic construct
  misc_feature 1..42: note = Protein ELYS (55-68)
  source 1..42: mol_type = other RNA
gaggtggtcaacagcatcaccggcgagcgcctgtccgcctac

SEQ ID NO: 49565 - RNA, 27 nt, synthetic construct
  misc_feature 1..27: note = Transcription factor SOX-13 (110-118)
  source 1..27: mol_type = other RNA
gaggtggtccccgccatcgagaagctg

SEQ ID NO: 49566 - RNA, 27 nt, synthetic construct
  misc_feature 1..27: note = Cathepsin K (85-93)
  source 1..27: mol_type = other RNA
gaggtggtccagaagatgaccggcctg

SEQ ID NO: 49567 - RNA, 27 nt, synthetic construct
  misc_feature 1..27: note = Protein C12orf4 (366-374)
  source 1..27: mol_type = other RNA
gaggtggtccagcaggtggtgctgtac

SEQ ID NO: 49568 - RNA, 27 nt, synthetic construct
  misc_feature 1..27: note = Peptidylprolyl isomerase domain and WD repeat-containing protein 1 (616-624)
  source 1..27: mol_type = other RNA
gaggtggtccagcgcatcagcaacgtg

SEQ ID NO: 49569 - RNA, 45 nt, synthetic construct
  misc_feature 1..45: note = Proteasome subunit alpha type-7 (197-211)
  source 1..45: mol_type = other RNA
gaggtggtccagagcggcgggaagaacatcgagctggccgtgatg

SEQ ID NO: 49570 - RNA, 27 nt, synthetic construct
  misc_feature 1..27: note = E3 ubiquitin-protein ligase BRE1B (40-48)
  source 1..27: mol_type = other RNA
gaggtggtccgcgagaccggcgagtac

SEQ ID NO: 49571 - RNA, 27 nt, synthetic construct
  misc_feature 1..27: note = Melanoma-associated antigen 12 (168-176)
  source 1..27: mol_type = other RNA
gaggtggtccgcatcggccacctgtac

SEQ ID NO: 49572 - RNA, 27 nt, synthetic construct
  misc_feature 1..27: note = Unconventional myosin-IXb (955-963)
  source 1..27: mol_type = other RNA
gaggtggtccgcaagatcctgctcctg

SEQ ID NO: 49573 - RNA, 30 nt, synthetic construct
  misc_feature 1..30: note = Cytoskeleton-associated protein 5 (88-97)
  source 1..30: mol_type = other RNA
gaggtggtcagcggcgtggtgtccaaggtc

SEQ ID NO: 49574 - RNA, 27 nt, synthetic construct
  misc_feature 1..27: note = Ubiquitin-conjugating enzyme E2 variant 3 (232-240)
  source 1..27: mol_type = other RNA
gaggtggtcagccacacctcccaggtg

SEQ ID NO: 49575 - RNA, 33 nt, synthetic construct
  misc_feature 1..33: note = RNA demethylase ALKBH5 (109-119)
  source 1..33: mol_type = other RNA
gaggtggtcagccgcgccgagaagggcctgtac

SEQ ID NO: 49576 - RNA, 30 nt, synthetic construct
  misc_feature 1..30: note = Integrator complex subunit 1 (1714-1723)
  source 1..30: mol_type = other RNA
gaggtggtcagctccaccgtgcgcgccgtg

SEQ ID NO: 49577 - RNA, 33 nt, synthetic construct
  misc_feature 1..33: note = Cullin-3 (55-65)
  source 1..33: mol_type = other RNA
gaggtggtcaccgagcacctgatcaacaaggtg

SEQ ID NO: 49578 - RNA, 33 nt, synthetic construct
  misc_feature 1..33: note = Ankyrin repeat and zinc finger domain-containing protein 1 (16-26)
  source 1..33: mol_type = other RNA
gaggtggtcacccacaagaccttccaccgctac

SEQ ID NO: 49579 - RNA, 30 nt, synthetic construct
  misc_feature 1..30: note = Cyclin-dependent kinase 2 (224-233)
  source 1..30: mol_type = other RNA
gaggtggtctggcccggcgtgaccagcatg

SEQ ID NO: 49580 - RNA, 39 nt, synthetic construct
  misc_feature 1..39: note = Contactin-associated protein-like 3B (182-194)
  source 1..39: mol_type = other RNA
gaggtggtctacttcgacggccagagcgccctgctctac

SEQ ID NO: 49581 - RNA, 27 nt, synthetic construct
  misc_feature 1..27: note = DDB1- and CUL4-associated factor 7 (176-184)
  source 1..27: mol_type = other RNA
gaggtgtacgacatcgccttcagccgc

SEQ ID NO: 49582 - RNA, 30 nt, synthetic construct
  misc_feature 1..30: note = DDB1- and CUL4-associated factor 7 (176-185)
  source 1..30: mol_type = other RNA
gaggtgtacgacatcgccttcagccgcgcc

SEQ ID NO: 49583 - RNA, 36 nt, synthetic construct
  misc_feature 1..36: note = Melanotransferrin (97-108)
  source 1..36: mol_type = other RNA
gaggtgtacgaccaggaggtcggcaccagctactac

SEQ ID NO: 49584 - RNA, 30 nt, synthetic construct
  misc_feature 1..30: note = Nuclear pore complex protein Nup155 (1301-1310)
  source 1..30: mol_type = other RNA
gaggtgtacgaccagctgttcaagagccgc

SEQ ID NO: 49585 - RNA, 27 nt, synthetic construct
  misc_feature 1..27: note = Protein polybromo-1 (670-678)
  source 1..27: mol_type = other RNA
gaggtgtacgaggccgtcaagaactac

SEQ ID NO: 49586 - RNA, 30 nt, synthetic construct
  misc_feature 1..30: note = DNA-directed RNA polymerase, mitochondrial (459-468)
  source 1..30: mol_type = other RNA
gaggtgtacgagggccgcttcagcctgtac

SEQ ID NO: 49587 - RNA, 33 nt, synthetic construct
  misc_feature 1..33: note = DNA-directed RNA polymerase, mitochondrial (459-469)
  source 1..33: mol_type = other RNA
gaggtgtacgagggccgcttcagcctgtacccc

SEQ ID NO: 49588 - RNA, 30 nt, synthetic construct
  misc_feature 1..30: note = Tyrosine-protein kinase ABL1 (255-264)
  source 1..30: mol_type = other RNA
gaggtgtacgagggcgtctggaagaagtac

SEQ ID NO: 49589 - RNA, 30 nt, synthetic construct
  misc_feature 1..30: note = Protein lin-7 homolog C (52-61)
  source 1..30: mol_type = other RNA
gaggtgtacgagcacgtctacgagaccgtg

SEQ ID NO: 49590 - RNA, 27 nt, synthetic construct
  misc_feature 1..27: note = Zinc finger protein 292 (337-345)
  source 1..27: mol_type = other RNA
gaggtgtacgagaaggtcgtggactac

SEQ ID NO: 49591 - RNA, 33 nt, synthetic construct
  misc_feature 1..33: note = Muscular LMNA-interacting protein (350-360)
  source 1..33: mol_type = other RNA
gaggtgtacgagcccaacccgttcagcaagtac

SEQ ID NO: 49592 - RNA, 27 nt, synthetic construct
  misc_feature 1..27: note = rRNA methyltransferase 2, mitochondrial (229-237)
  source 1..27: mol_type = other RNA
gaggtgtacttcctggccacccagtac

SEQ ID NO: 49593 - RNA, 30 nt, synthetic construct
  misc_feature 1..30: note = Large neutral amino acids transporter small subunit 1 (122-131)
  source 1..30: mol_type = other RNA
gaggtgtacggcagcctgcccgccttcctc

SEQ ID NO: 49594 - RNA, 36 nt, synthetic construct
  misc_feature 1..36: note = Procollagen-lysine,2-oxoglutarate 5-dioxygenase 2 (336-347)
  source 1..36: mol_type = other RNA
gaggtgtaccacgagaaggacatcaaggtcttcttc

SEQ ID NO: 49595 - RNA, 30 nt, synthetic construct
  misc_feature 1..30: note = Nucleoside diphosphate kinase 7 (250-259)
  source 1..30: mol_type = other RNA
gaggtgtacaagggcgtcgtgaccgagtac

SEQ ID NO: 49596 - RNA, 33 nt, synthetic construct
  misc_feature 1..33: note = Ras GTPase-activating-like protein IQGAP3 (1166-1176)
  source 1..33: mol_type = other RNA
gaggtgtacaaggtcgtgggcaacctgctctac

SEQ ID NO: 49597 - RNA, 30 nt, synthetic construct
  misc_feature 1..30: note = Kinesin-like protein KIF14 (5-14)
  source 1..30: mol_type = other RNA
gaggtgtacaacgagaagatccacgacctg

SEQ ID NO: 49598 - RNA, 30 nt, synthetic construct
  misc_feature 1..30: note = Kinesin-like protein KIF18B (166-175)
  source 1..30: mol_type = other RNA
gaggtgtacaacgagcagatccacgacctg

SEQ ID NO: 49599 - RNA, 30 nt, synthetic construct
  misc_feature 1..30: note = Kinesin-like protein KIF18A (161-170)
  source 1..30: mol_type = other RNA
gaggtgtacaacgagcagatccgcgacctg

SEQ ID NO: 49600 - RNA, 27 nt, synthetic construct
  misc_feature 1..27: note = F-box only protein 32 (44-52)
  source 1..27: mol_type = other RNA
gaggtgtacaacaaggagaacctgttc

SEQ ID NO: 49601 - RNA, 39 nt, synthetic construct
  misc_feature 1..39: note = Tyrosinase (409-421)
  source 1..39: mol_type = other RNA
gaggtgtaccccgaggccaacgccccgatcggccacaac

SEQ ID NO: 49602 - RNA, 36 nt, synthetic construct
  misc_feature 1..36: note = Ubiquitin carboxyl-terminal hydrolase 11 (150-161)
  source 1..36: mol_type = other RNA
gaggtgtaccccgtcgagctgctcctggtgcgccac

SEQ ID NO: 49603 - RNA, 27 nt, synthetic construct
  misc_feature 1..27: note = E3 ubiquitin-protein ligase UBR2 (37-45)
  source 1..27: mol_type = other RNA
gaggtgtaccagcacctggcccactac

SEQ ID NO: 49604 - RNA, 30 nt, synthetic construct
  misc_feature 1..30: note = Small nuclear ribonucleoprotein Sm D3 (26-35)
  source 1..30: mol_type = other RNA
gaggtgtaccgcggcaagctgatcgaggcc

SEQ ID NO: 49605 - RNA, 30 nt, synthetic construct
  misc_feature 1..30: note = Transmembrane protein 201 (151-160)
  source 1..30: mol_type = other RNA
gaggtgtaccgccaccacctggagcagatg

SEQ ID NO: 49606 - RNA, 33 nt, synthetic construct
  misc_feature 1..33: note = Pre-mRNA-processing-splicing factor 8 (2324-2334)
  source 1..33: mol_type = other RNA
gaggtgtacagcgccgaccgcgaggacctgtac

SEQ ID NO: 49607 - RNA, 33 nt, synthetic construct
  misc_feature 1..33: note = Semaphorin-7A (114-124)
  source 1..33: mol_type = other RNA
gaggtgtacagcaccatccgcaagcaggagtac

SEQ ID NO: 49608 - RNA, 33 nt, synthetic construct
  misc_feature 1..33: note = cAMP-dependent protein kinase type I-alpha regulatory subunit (103-113)
  source 1..33: mol_type = other RNA
gaggtgtacaccgaggaggacgccgccagctac

SEQ ID NO: 49609 - RNA, 30 nt, synthetic construct
  misc_feature 1..30: note = Arf-GAP with Rho-GAP domain, ANK repeat and PH domain-containing protein 1 (574-583)
  source 1..30: mol_type = other RNA
gaggtgtacaccgagggcgagcgcctgtac

SEQ ID NO: 49610 - RNA, 30 nt, synthetic construct
  misc_feature 1..30: note = DNA repair endonuclease XPF (99-108)
  source 1..30: mol_type = other RNA
gaggtgtacacccagggcggggtcatcttc

SEQ ID NO: 49611 - RNA, 30 nt, synthetic construct
  misc_feature 1..30: note = Signal transducer and activator of transcription 2 (831-840)
  source 1..30: mol_type = other RNA
gaggtgtacgtcagccgcccctcccacttc

SEQ ID NO: 49612 - RNA, 33 nt, synthetic construct
  misc_feature 1..33: note = Signal transducer and activator of transcription 2 (831-841)
  source 1..33: mol_type = other RNA
gaggtgtacgtcagccgcccctcccacttctac

SEQ ID NO: 49613 - RNA, 27 nt, synthetic construct
  misc_feature 1..27: note = Phospholipase A-2-activating protein (168-176)
  source 1..27: mol_type = other RNA
gaggtgtactacggccacaccaactac

SEQ ID NO: 49614 - RNA, 33 nt, synthetic construct
  misc_feature 1..33: note = Phospholipase A-2-activating protein (168-178)
  source 1..33: mol_type = other RNA
gaggtgtactacggccacaccaactacatctac

SEQ ID NO: 49615 - RNA, 27 nt, synthetic construct
  misc_feature 1..27: note = Protein virilizer homolog (485-493)
  source 1..27: mol_type = other RNA
ttcgccgaccacgtgagctccagcctg

SEQ ID NO: 49616 - RNA, 27 nt, synthetic construct
  misc_feature 1..27: note = CLIP-associating protein 1 (877-885)
  source 1..27: mol_type = other RNA
ttcgccgacccccacagcaagcgcgtg

SEQ ID NO: 49617 - RNA, 30 nt, synthetic construct
  misc_feature 1..30: note = CLIP-associating protein 1 (877-886)
  source 1..30: mol_type = other RNA
ttcgccgacccccacagcaagcgcgtgttc

SEQ ID NO: 49618 - RNA, 27 nt, synthetic construct
  misc_feature 1..27: note = Calmodulin-regulated spectrin-associated protein 2 (673-681)
  source 1..27: mol_type = other RNA
ttcgccgagcagaagttccgcaagctg

SEQ ID NO: 49619 - RNA, 30 nt, synthetic construct
  misc_feature 1..30: note = Sorting nexin-17 (460-469)
  source 1..30: mol_type = other RNA
ttcgccttcgagggcatcggggacgaggac

SEQ ID NO: 49620 - RNA, 27 nt, synthetic construct
  misc_feature 1..27: note = Melanoma-associated antigen C1 (1035-1043)
  source 1..27: mol_type = other RNA
ttcgccttcggcgagccccgcgagctg

SEQ ID NO: 49621 - RNA, 48 nt, synthetic construct
  misc_feature 1..48: note = POTE ankyrin domain family member F (721-736)
  source 1..48: mol_type = other RNA
ttcgccggcgacgacgccccccgcgcggtgttcccgagcatcgtcggg

SEQ ID NO: 49622 - RNA, 33 nt, synthetic construct
  misc_feature 1..33: note = Up-regulator of cell proliferation (600-610)
  source 1..33: mol_type = other RNA
ttcgcccacttccccggcctggccagcgagctc

SEQ ID NO: 49623 - RNA, 27 nt, synthetic construct
  misc_feature 1..27: note = Glycerol-3-phosphate dehydrogenase, mitochondrial (27-35)
  source 1..27: mol_type = other RNA
ttcgcccactaccgccggaagcagatg

SEQ ID NO: 49624 - RNA, 24 nt, synthetic construct
  misc_feature 1..24: note = Alpha-catulin (24-31)
  source 1..24: mol_type = other RNA
ttcgccctggacagcggcctcgag

SEQ ID NO: 49625 - RNA, 33 nt, synthetic construct
  misc_feature 1..33: note = Melanocyte protein PMEL (247-257)
  source 1..33: mol_type = other RNA
ttcgccctgcagctccacgaccccagcggctac

SEQ ID NO: 49626 - RNA, 30 nt, synthetic construct
  misc_feature 1..30: note = Eukaryotic translation initiation factor 3 subunit E (53-62)
  source 1..30: mol_type = other RNA
ttcgccatggacgtgtacaagaacctgtac

SEQ ID NO: 49627 - RNA, 27 nt, synthetic construct
  misc_feature 1..27: note = NHL repeat-containing protein 2 (407-415)
  source 1..27: mol_type = other RNA
ttcgcccagcccagcggcctgtccctc

SEQ ID NO: 49628 - RNA, 27 nt, synthetic construct
  misc_feature 1..27: note = Dynactin subunit 1 (1206-1214)
  source 1..27: mol_type = other RNA
ttcgccaccttccccagctccgccttc

SEQ ID NO: 49629 - RNA, 24 nt, synthetic construct
  misc_feature 1..24: note = Translocon-associated protein subunit gamma (75-82)
  source 1..24: mol_type = other RNA
ttcgcctacaagaacgtgaagttc

SEQ ID NO: 49630 - RNA, 36 nt, synthetic construct
  misc_feature 1..36: note = Protein disulfide-isomerase A3 (160-171)
  source 1..36: mol_type = other RNA
ttcgacgacagcttctccgaggcccacagcgagttc

SEQ ID NO: 49631 - RNA, 27 nt, synthetic construct
  misc_feature 1..27: note = Phosphatidylinositol 3,4,5-trisphosphate 3-phosphatase and dual-specificity protein phosphatase PTEN (90-98)
  source 1..27: mol_type = other RNA
ttcgaggaccacaaccccccgcagctg

SEQ ID NO: 49632 - RNA, 45 nt, synthetic construct
  misc_feature 1..45: note = Keratin, type I cytoskeletal 9 (465-479)
  source 1..45: mol_type = other RNA
ttcgagagctccggcgccgggaagatcggcctggggggccgcggg

SEQ ID NO: 49633 - RNA, 48 nt, synthetic construct
  misc_feature 1..48: note = Keratin, type I cytoskeletal 9 (465-480)
  source 1..48: mol_type = other RNA
ttcgagagctccggcgccgggaagatcggcctggggggccgcgggggc

SEQ ID NO: 49634 - RNA, 36 nt, synthetic construct
  misc_feature 1..36: note = Interleukin enhancer-binding factor 3 (693-704)
  source 1..36: mol_type = other RNA
ttcttcaccgactgctacggctaccacgacttcggg

SEQ ID NO: 49635 - RNA, 42 nt, synthetic construct
  misc_feature 1..42: note = Interleukin enhancer-binding factor 3 (693-706)
  source 1..42: mol_type = other RNA
ttcttcaccgactgctacggctaccacgacttcgggagctcc

SEQ ID NO: 49636 - RNA, 30 nt, synthetic construct
  misc_feature 1..30: note = Apolipoprotein B-100 (2396-2405)
  source 1..30: mol_type = other RNA
ttcatcgacgacgccgtgaagaagctgaac

SEQ ID NO: 49637 - RNA, 27 nt, synthetic construct
  misc_feature 1..27: note = Probable tRNA (uracil-O(2)-)-methyltransferase (608-616)
  source 1..27: mol_type = other RNA
ttcatcgaccaggtggtcctgcaggtg

SEQ ID NO: 49638 - RNA, 33 nt, synthetic construct
  misc_feature 1..33: note = Plexin-A2 (789-799)
  source 1..33: mol_type = other RNA
ttcatcatcgacaacccccaggacctgaaggtg

SEQ ID NO: 49639 - RNA, 39 nt, synthetic construct
  misc_feature 1..39: note = Filamin-A (2041-2053)
  source 1..39: mol_type = other RNA
ttcatcatcgacacccgcgacgccggctacgggggcctg

SEQ ID NO: 49640 - RNA, 45 nt, synthetic construct
  misc_feature 1..45: note = Filamin-A (2041-2055)
  source 1..45: mol_type = other RNA
ttcatcatcgacacccgcgacgccggctacgggggcctgagcctc

SEQ ID NO: 49641 - RNA, 27 nt, synthetic construct
  misc_feature 1..27: note = Uncharacterized protein CXorf57 (552-560)
  source 1..27: mol_type = other RNA
ttcatcctgttcttctacggcagcgac

SEQ ID NO: 49642 - RNA, 33 nt, synthetic construct
  misc_feature 1..33: note = Sorting nexin-14 (234-244)
  source 1..33: mol_type = other RNA
ttcctggccgaccccgacaccgtgaaccacctc

SEQ ID NO: 49643 - RNA, 36 nt, synthetic construct
  misc_feature 1..36: note = Protein YIF1B (69-80)
  source 1..36: mol_type = other RNA
ttcctggccgaccccgtgagcaacatggccatggcg

SEQ ID NO: 49644 - RNA, 30 nt, synthetic construct
  misc_feature 1..30: note = Class E basic helix-loop-helix protein 41 (366-375)
  source 1..30: mol_type = other RNA
ttcctggacaagagcggcctcgagaagtac

SEQ ID NO: 49645 - RNA, 36 nt, synthetic construct
  misc_feature 1..36: note = Class E basic helix-loop-helix protein 41 (366-377)
  source 1..36: mol_type = other RNA
ttcctggacaagagcggcctcgagaagtacctgtac

SEQ ID NO: 49646 - RNA, 30 nt, synthetic construct
  misc_feature 1..30: note = Ceramide synthase 1 (207-216)
  source 1..30: mol_type = other RNA
ttcctgcacgacatcagcgacgtgcagctc

SEQ ID NO: 49647 - RNA, 27 nt, synthetic construct
  misc_feature 1..27: note = Exostosin-2 (253-261)
  source 1..27: mol_type = other RNA
ttcctgctcagctcccaggtgggcctg

SEQ ID NO: 49648 - RNA, 33 nt, synthetic construct
  misc_feature 1..33: note = Uncharacterized protein C15orf61 (147-157)
  source 1..33: mol_type = other RNA
ttcctgaacaaggaggacgagggcgccatgtac

SEQ ID NO: 49649 - RNA, 27 nt, synthetic construct
  misc_feature 1..27: note = Spatacsin (617-625)
  source 1..27: mol_type = other RNA
ttcctgaacaaccagatcaaggagctc

SEQ ID NO: 49650 - RNA, 27 nt, synthetic construct
  misc_feature 1..27: note = 2',3'-cyclic-nucleotide 3'-phosphodiesterase (12-20)
  source 1..27: mol_type = other RNA
ttcctgcccaagatcttcttccgcaag

SEQ ID NO: 49651 - RNA, 33 nt, synthetic construct
  misc_feature 1..33: note = Polyphosphoinositide phosphatase (404-414)
  source 1..33: mol_type = other RNA
ttcctgcccccggagcacaccatcgtgtacatc

SEQ ID NO: 49652 - RNA, 30 nt, synthetic construct
  misc_feature 1..30: note = Alpha/beta hydrolase domain-containing protein 17C (35-44)
  source 1..30: mol_type = other RNA
ttcctgcccccggagcccacctacaccgtg

SEQ ID NO: 49653 - RNA, 33 nt, synthetic construct
  misc_feature 1..33: note = Zinc finger protein with KRAB and SCAN domains 1 (104-114)
  source 1..33: mol_type = other RNA
ttcctgagcatcctccccaaggagctgcaggtg

SEQ ID NO: 49654 - RNA, 30 nt, synthetic construct
  misc_feature 1..30: note = Presenilin-2 (437-446)
  source 1..30: mol_type = other RNA
ttcatggacaccctggccagccaccagctc

SEQ ID NO: 49655 - RNA, 33 nt, synthetic construct
  misc_feature 1..33: note = Presenilin-2 (437-447)
  source 1..33: mol_type = other RNA
ttcatggacaccctggccagccaccagctctac

SEQ ID NO: 49656 - RNA, 36 nt, synthetic construct
  misc_feature 1..36: note = Presenilin-2 (437-448)
  source 1..36: mol_type = other RNA
ttcatggacaccctggccagccaccagctctacatc

SEQ ID NO: 49657 - RNA, 33 nt, synthetic construct
  misc_feature 1..33: note = Protein tyrosine phosphatase type IVA 1 (23-33)
  source 1..33: mol_type = other RNA
ttcatggagttcctgaagggcagcggggactac

SEQ ID NO: 49658 - RNA, 27 nt, synthetic construct
  misc_feature 1..27: note = SHC-transforming protein 4 (33-41)
  source 1..27: mol_type = other RNA
ttccgcaacgagagcatcacctccctg

SEQ ID NO: 49659 - RNA, 30 nt, synthetic construct
  misc_feature 1..30: note = Caprin-1 (656-665)
  source 1..30: mol_type = other RNA
ttcagcgccccccgcgactactccggctac

SEQ ID NO: 49660 - RNA, 27 nt, synthetic construct
  misc_feature 1..27: note = Uncharacterized protein CXorf23 (6-14)
  source 1..27: mol_type = other RNA
ttcagcgacggccgcacccagaagtac

SEQ ID NO: 49661 - RNA, 36 nt, synthetic construct
  misc_feature 1..36: note = DNA-directed RNA polymerase I subunit RPA2 (493-504)
  source 1..36: mol_type = other RNA
ttcagcgaccacaaccagtccccccgcaacatgtac

SEQ ID NO: 49662 - RNA, 33 nt, synthetic construct
  misc_feature 1..33: note = Serine/threonine-protein kinase RIO2 (416-426)
  source 1..33: mol_type = other RNA
ttcagcgaggagaagaaccgcaccgagaactac

SEQ ID NO: 49663 - RNA, 30 nt, synthetic construct
  misc_feature 1..30: note = Tubulin alpha-1C chain (18-27)
  source 1..30: mol_type = other RNA
ttcagcgagaccggcgccgggaagcacgtg

SEQ ID NO: 49664 - RNA, 24 nt, synthetic construct
  misc_feature 1..24: note = Nucleosome assembly protein 1-like 1 (245-252)
  source 1..24: mol_type = other RNA
ttcagcttcgacggccccgagatc

SEQ ID NO: 49665 - RNA, 30 nt, synthetic construct
  misc_feature 1..30: note = RNA-binding protein EWS (285-294)
  source 1..30: mol_type = other RNA
ttcagcggccccggggagaaccgctccatg

SEQ ID NO: 49666 - RNA, 27 nt, synthetic construct
  misc_feature 1..27: note = 40S ribosomal protein S27 (111-119)
  source 1..27: mol_type = other RNA
ttcagccacgcccagaccgtggtcctg

SEQ ID NO: 49667 - RNA, 27 nt, synthetic construct
  misc_feature 1..27: note = ADP-ribose pyrophosphatase, mitochondrial (257-265)
  source 1..27: mol_type = other RNA
ttcagccaggaccacctggtgatctac

SEQ ID NO: 49668 - RNA, 51 nt, synthetic construct
  misc_feature 1..51: note = PERQ amino acid-rich with GYF domain-containing protein 2 (1273-1289)
  source 1..51: mol_type = other RNA
ttcagcgtgaacgcctccagcgagcgcctgaacatgggcgagatcgagacc

SEQ ID NO: 49669 - RNA, 33 nt, synthetic construct
  misc_feature 1..33: note = Serine/threonine-protein kinase Sgk1 (516-526)
  source 1..33: mol_type = other RNA
ttcagctacgcccccccgaccgactccttcctg

SEQ ID NO: 49670 - RNA, 33 nt, synthetic construct
  misc_feature 1..33: note = Transcription factor SOX-10 (425-435)
  source 1..33: mol_type = other RNA
ttcagctacatgggcccctcccagcgcccgctg

SEQ ID NO: 49671 - RNA, 33 nt, synthetic construct
  misc_feature 1..33: note = Protein argonaute-3 (775-785)
  source 1..33: mol_type = other RNA
ttcaccgccgacgagctgcagctcctgacctac

SEQ ID NO: 49672 - RNA, 27 nt, synthetic construct
  misc_feature 1..27: note = Protein FAM102B (9-17)
  source 1..27: mol_type = other RNA
ttcaccgccgagagctcccgcgaggtg

SEQ ID NO: 49673 - RNA, 27 nt, synthetic construct
  misc_feature 1..27: note = Dipeptidyl peptidase 2 (373-381)
  source 1..27: mol_type = other RNA
ttcaccgacgagctgcgccagcggtac

SEQ ID NO: 49674 - RNA, 27 nt, synthetic construct
  misc_feature 1..27: note = Membrane-associated transporter protein (338-346)
  source 1..27: mol_type = other RNA
ttcaccgacttcatgggccagatcgtg

SEQ ID NO: 49675 - RNA, 30 nt, synthetic construct
  misc_feature 1..30: note = Membrane-associated transporter protein (338-347)
  source 1..30: mol_type = other RNA
ttcaccgacttcatgggccagatcgtgtac

SEQ ID NO: 49676 - RNA, 24 nt, synthetic construct
  misc_feature 1..24: note = Probable guanine nucleotide exchange factor MCF2L2 (62-69)
  source 1..24: mol_type = other RNA
ttcaccgacatcggcatcaagtac

SEQ ID NO: 49677 - RNA, 30 nt, synthetic construct
  misc_feature 1..30: note = Testis-expressed sequence 10 protein (107-116)
  source 1..30: mol_type = other RNA
ttcaccgacaaggacgccaacgtgcgcctg

SEQ ID NO: 49678 - RNA, 27 nt, synthetic construct
  misc_feature 1..27: note = Semaphorin-5A (1065-1073)
  source 1..27: mol_type = other RNA
ttcaccgacctgaacaactacgacgag

SEQ ID NO: 49679 - RNA, 30 nt, synthetic construct
  misc_feature 1..30: note = Semaphorin-5A (1065-1074)
  source 1..30: mol_type = other RNA
ttcaccgacctgaacaactacgacgagtac

SEQ ID NO: 49680 - RNA, 27 nt, synthetic construct
  misc_feature 1..27: note = Tubulin polyglutamylase complex subunit 1 (17-25)
  source 1..27: mol_type = other RNA
ttcaccgacagcggccgccagtccgtg

SEQ ID NO: 49681 - RNA, 33 nt, synthetic construct
  misc_feature 1..33: note = Leucine-rich repeat-containing protein 42 (128-138)
  source 1..33: mol_type = other RNA
ttcaccgagcccggcgccgggctgcgcgccctc

SEQ ID NO: 49682 - RNA, 27 nt, synthetic construct
  misc_feature 1..27: note = AF4/FMR2 family member 1 (3-11)
  source 1..27: mol_type = other RNA
ttcaccgagcgcgtgaacagctccggc

SEQ ID NO: 49683 - RNA, 21 nt, synthetic construct
  misc_feature 1..21: note = von Willebrand factor A domain-containing protein 9 (129-135)
  source 1..21: mol_type = other RNA
ttcaccatcgacggccccctg

SEQ ID NO: 49684 - RNA, 27 nt, synthetic construct
  misc_feature 1..27: note = Elongator complex protein 1 (934-942)
  source 1..27: mol_type = other RNA
ttcaccatcgacaagtacctgaagcgc

SEQ ID NO: 49685 - RNA, 51 nt, synthetic construct
  misc_feature 1..51: note = Melanocyte protein PMEL (214-230)
  source 1..51: mol_type = other RNA
ttcaccatcaccgaccaggtgcccttcagcgtctccgtgagccagctgcgc

SEQ ID NO: 49686 - RNA, 33 nt, synthetic construct
  misc_feature 1..33: note = Hypoxia-inducible factor 1-alpha (295-305)
  source 1..33: mol_type = other RNA
ttcaccaagggccaggtgaccacggggcagtac

SEQ ID NO: 49687 - RNA, 27 nt, synthetic construct
  misc_feature 1..27: note = Ropporin-1B (203-211)
  source 1..27: mol_type = other RNA
ttcacccagaacccccgcgtgtggctg

SEQ ID NO: 49688 - RNA, 24 nt, synthetic construct
  misc_feature 1..24: note = Nephrocystin-4 (1264-1271)
  source 1..24: mol_type = other RNA
ttcaccagccacccccaggagctg

SEQ ID NO: 49689 - RNA, 27 nt, synthetic construct
  misc_feature 1..27: note = Very-long-chain enoyl-CoA reductase (119-127)
  source 1..27: mol_type = other RNA
ttcaccagctcccgccacaccgtggtc

SEQ ID NO: 49690 - RNA, 27 nt, synthetic construct
  misc_feature 1..27: note = Cytoplasmic dynein 2 heavy chain 1 (2484-2492)
  source 1..27: mol_type = other RNA
ttcaccgtggacgactacagccactac

SEQ ID NO: 49691 - RNA, 45 nt, synthetic construct
  misc_feature 1..45: note = Cleft lip and palate transmembrane protein 1-like protein (157-171)
  source 1..45: mol_type = other RNA
ttcgtgttcgacggcagctccctgcccgccgacgtccaccgctac

SEQ ID NO: 49692 - RNA, 33 nt, synthetic construct
  misc_feature 1..33: note = TNF receptor-associated factor 4 (202-212)
  source 1..33: mol_type = other RNA
ttcgtgttcgacaccatccagagccaccagtac

SEQ ID NO: 49693 - RNA, 27 nt, synthetic construct
  misc_feature 1..27: note = NADH dehydrogenase (ubiquinone) 1 beta subcomplex subunit 1 (32-40)
  source 1..27: mol_type = other RNA
ttcgtgatcggctgctacctggaccgc

SEQ ID NO: 49694 - RNA, 33 nt, synthetic construct
  misc_feature 1..33: note = FAD-dependent oxidoreductase domain-containing protein 2 (493-503)
  source 1..33: mol_type = other RNA
ttcgtgatcaacatggagtacggccgcaacttc

SEQ ID NO: 49695 - RNA, 27 nt, synthetic construct
  misc_feature 1..27: note = Ran GTPase-activating protein 1 (562-570)
  source 1..27: mol_type = other RNA
ttcgtgaccaagcccaacagcgccctg

SEQ ID NO: 49696 - RNA, 27 nt, synthetic construct
  misc_feature 1..27: note = Long-chain-fatty-acid-CoA ligase 3 (624-632)
  source 1..27: mol_type = other RNA
ttcgtggtccccaaccagaaggagctg

SEQ ID NO: 49697 - RNA, 30 nt, synthetic construct
  misc_feature 1..30: note = Mitochondrial folate transporter/carrier (297-306)
  source 1..30: mol_type = other RNA
ttcgtggtctacgagaacgtgagccacttc

SEQ ID NO: 49698 - RNA, 30 nt, synthetic construct
  misc_feature 1..30: note = F-box only protein 21 (602-611)
  source 1..30: mol_type = other RNA
ttcgtgtacgagaccgtccagaacatctac

SEQ ID NO: 49699 - RNA, 33 nt, synthetic construct
  misc_feature 1..33: note = Transmembrane protein 181 (554-564)
  source 1..33: mol_type = other RNA
ttcgtgtacagcccctccaagaacgccctgtac

SEQ ID NO: 49700 - RNA, 27 nt, synthetic construct
  misc_feature 1..27: note = GDP-fucose protein O-fucosyltransferase 1 (2-10)
  source 1..27: mol_type = other RNA
ggcgccgccgcgtgggcccgccccctg

SEQ ID NO: 49701 - RNA, 27 nt, synthetic construct
  misc_feature 1..27: note = Zinc finger and BTB domain-containing protein 7A (137-145)
  source 1..27: mol_type = other RNA
ggcgccgacgccgggcagctggacctc

SEQ ID NO: 49702 - RNA, 30 nt, synthetic construct
  misc_feature 1..30: note = 3'(2'),5'-bisphosphate nucleotidase 1 (176-185)
  source 1..30: mol_type = other RNA
ggcgccttcgggttccagctgaaggaggtg

SEQ ID NO: 49703 - RNA, 27 nt, synthetic construct
  misc_feature 1..27: note = X-ray repair cross-complementing protein 5 (469-477)
  source 1..27: mol_type = other RNA
ggcgcccacttcagcgtgtccagcctg

SEQ ID NO: 49704 - RNA, 27 nt, synthetic construct
  misc_feature 1..27: note = Replication protein A 70 kDa DNA-binding subunit (8-16)
  source 1..27: mol_type = other RNA
ggcgccatcgccgcgatcatgcagaag

SEQ ID NO: 49705 - RNA, 27 nt, synthetic construct
  misc_feature 1..27: note = WD repeat-containing protein 89 (351-359)
  source 1..27: mol_type = other RNA
ggcgccatcgagaagaccttcaccaag

SEQ ID NO: 49706 - RNA, 33 nt, synthetic construct
  misc_feature 1..33: note = Elongation factor 2 (190-200)
  source 1..33: mol_type = other RNA
ggcgccctgtgcgaggagaacatgcgcggggtg

SEQ ID NO: 49707 - RNA, 27 nt, synthetic construct
  misc_feature 1..27: note = NHP2-like protein 1 (38-46)
  source 1..27: mol_type = other RNA
ggcgccaacgaggccaccaagaccctg

SEQ ID NO: 49708 - RNA, 39 nt, synthetic construct
  misc_feature 1..39: note = Nestin (515-527)
  source 1..39: mol_type = other RNA
ggcgcccccgtgcacctggggcagggccagttcctcaag

SEQ ID NO: 49709 - RNA, 51 nt, synthetic construct
  misc_feature 1..51: note = Galectin-1 (66-82)
  source 1..51: mol_type = other RNA
ggcgcctgggggaccgagcagcgcgaggccgtgttccccttccagccgggc

SEQ ID NO: 49710 - RNA, 27 nt, synthetic construct
  misc_feature 1..27: note = Calcium-transporting ATPase type 2C member 1 (481-489)
  source 1..27: mol_type = other RNA
ggcgcctacgagcaggtgatcaagtac

SEQ ID NO: 49711 - RNA, 27 nt, synthetic construct
  misc_feature 1..27: note = Delta(24)-sterol reductase (349-357)
  source 1..27: mol_type = other RNA
ggcgcctacggggagccccgcgtgaag

SEQ ID NO: 49712 - RNA, 27 nt, synthetic construct
  misc_feature 1..27: note = Ribosomal protein S6 kinase alpha-5 (58-66)
  source 1..27: mol_type = other RNA
ggcgcctacgggaaggtgttcctggtc

SEQ ID NO: 49713 - RNA, 45 nt, synthetic construct
  misc_feature 1..45: note = Heterogeneous nuclear ribonucleoprotein F (26-40)
  source 1..45: mol_type = other RNA
ggcgcctacagctcccaggtgatgcaggggatgggcgtcagcgcc

SEQ ID NO: 49714 - RNA, 27 nt, synthetic construct
  misc_feature 1..27: note = Complement factor H-related protein 2 (34-42)
  source 1..27: mol_type = other RNA
ggcgacatcaccagcttcctgctctcc

SEQ ID NO: 49715 - RNA, 27 nt, synthetic construct
  misc_feature 1..27: note = Protein SMG8 (168-176)
  source 1..27: mol_type = other RNA
ggcgaggccgggggcgggctgagcctc

SEQ ID NO: 49716 - RNA, 36 nt, synthetic construct
  misc_feature 1..36: note = Cytoplasmic dynein 1 heavy chain 1 (2969-2980)
  source 1..36: mol_type = other RNA
ggcgaggacttcgacgaggacctgcgcaccgtgctc

SEQ ID NO: 49717 - RNA, 30 nt, synthetic construct
  misc_feature 1..30: note = Cytoplasmic dynein 1 light intermediate chain 1 (74-83)
  source 1..30: mol_type = other RNA
ggcgaggacggggccggcaagaccagcctg

SEQ ID NO: 49718 - RNA, 27 nt, synthetic construct
  misc_feature 1..27: note = Neural cell adhesion molecule L1 (1050-1058)
  source 1..27: mol_type = other RNA
ggcgaggagaaggggggcgccagcctg

SEQ ID NO: 49719 - RNA, 27 nt, synthetic construct
  misc_feature 1..27: note = HEAT repeat-containing protein 5B (1966-1974)
  source 1..27: mol_type = other RNA
ggcgaggagcagaaccgcgtgcagctg

SEQ ID NO: 49720 - RNA, 33 nt, synthetic construct
  misc_feature 1..33: note = Rho guanine nucleotide exchange factor 2 (798-808)
  source 1..33: mol_type = other RNA
ggcgaggagcgcgccaccgaggccgggagcctg

SEQ ID NO: 49721 - RNA, 27 nt, synthetic construct
  misc_feature 1..27: note = Chondroitin sulfate synthase 2 (169-177)
  source 1..27: mol_type = other RNA
ggcgaggagcgccccatcgggcacctg

SEQ ID NO: 49722 - RNA, 30 nt, synthetic construct
  misc_feature 1..30: note = CD276 antigen (290-299)
  source 1..30: mol_type = other RNA
ggcgagggggagggcagcaagaccgccctg

SEQ ID NO: 49723 - RNA, 27 nt, synthetic construct
  misc_feature 1..27: note = Ras GTPase-activating-like protein IQGAP1 (1300-1308)
  source 1..27: mol_type = other RNA
ggcgagatcatcaacacccacaccctg

SEQ ID NO: 49724 - RNA, 27 nt, synthetic construct
  misc_feature 1..27: note = Bifunctional 3'-phosphoadenosine 5'-phosphosulfate synthase 2 (170-178)
  source 1..27: mol_type = other RNA
ggcgagatcaaggggttcaccggcatc

SEQ ID NO: 49725 - RNA, 33 nt, synthetic construct
  misc_feature 1..33: note = Serine/threonine-protein kinase TBK1 (496-506)
  source 1..33: mol_type = other RNA
ggcgagatcagcgacatccacaccaagctgctc

SEQ ID NO: 49726 - RNA, 30 nt, synthetic construct
  misc_feature 1..30: note = Leucine zipper putative tumor suppressor 2 (448-457)
  source 1..30: mol_type = other RNA
ggcgagatcagcctgctcaagcagcagctg

SEQ ID NO: 49727 - RNA, 33 nt, synthetic construct
  misc_feature 1..33: note = DNA-directed RNA polymerase III subunit RPC3 (18-28)
  source 1..33: mol_type = other RNA
ggcgagatcgtggagaagatcggggtccacctg

SEQ ID NO: 49728 - RNA, 27 nt, synthetic construct
  misc_feature 1..27: note = Coatomer subunit beta' (652-660)
  source 1..27: mol_type = other RNA
ggcgagctgaagatcgcctaccagctc

SEQ ID NO: 49729 - RNA, 27 nt, synthetic construct
  misc_feature 1..27: note = DNA topoisomerase 3-beta-1 (168-176)
  source 1..27: mol_type = other RNA
ggcgagcccgaccacaacgaggccctg

SEQ ID NO: 49730 - RNA, 36 nt, synthetic construct
  misc_feature 1..36: note = Ras-related protein Rab-5A (27-38)
  source 1..36: mol_type = other RNA
ggcgagagcgccgtggggaagtccagcctggtcctc

SEQ ID NO: 49731 - RNA, 27 nt, synthetic construct
  misc_feature 1..27: note = Hemicentin-1 (1905-1913)
  source 1..27: mol_type = other RNA
ggcgagacccagcagcacatccagctg

SEQ ID NO: 49732 - RNA, 27 nt, synthetic construct
  misc_feature 1..27: note = NF-kappa-B inhibitor beta (105-113)
  source 1..27: mol_type = other RNA
ggcgagaccagcaccgtggagaagctg

SEQ ID NO: 49733 - RNA, 27 nt, synthetic construct
  misc_feature 1..27: note = Probable N-acetyltransferase 16 (116-124)
  source 1..27: mol_type = other RNA
ggcgagaccgtgctggtcgaggggctc

SEQ ID NO: 49734 - RNA, 39 nt, synthetic construct
  misc_feature 1..39: note = 5,6-dihydroxyindole-2-carboxylic acid oxidase (209-221)
  source 1..39: mol_type = other RNA
ggcgaggtggacttcagccacgaggggcccgccttcctg

SEQ ID NO: 49735 - RNA, 33 nt, synthetic construct
  misc_feature 1..33: note = Unconventional myosin-X (1723-1733)
  source 1..33: mol_type = other RNA
ggcgaggtggtcgagaagctgatccgcgggctc

SEQ ID NO: 49736 - RNA, 30 nt, synthetic construct
  misc_feature 1..30: note = Ornithine aminotransferase, mitochondrial (121-130)
  source 1..30: mol_type = other RNA
ggcgagtacgaggagtacatcaccaagctg

SEQ ID NO: 49737 - RNA, 27 nt, synthetic construct
  misc_feature 1..27: note = Carbonic anhydrase-related protein (45-53)
  source 1..27: mol_type = other RNA
ggcgagtaccagagccccatcaacctg

SEQ ID NO: 49738 - RNA, 51 nt, synthetic construct
  misc_feature 1..51: note = Peptidyl-prolyl cis-trans isomerase A (64-80)
  source 1..51: mol_type = other RNA
ggcggggacttcacccgccacaacggcaccgggggcaagagcatctacggg

SEQ ID NO: 49739 - RNA, 42 nt, synthetic construct
  misc_feature 1..42: note = NEDD8-conjugating enzyme Ubc12 (170-183)
  source 1..42: mol_type = other RNA
ggcgggtacatcggcagcacctacttcgagcgctgcctgaag

SEQ ID NO: 49740 - RNA, 30 nt, synthetic construct
  misc_feature 1..30: note = Fibrocystin-L (2531-2540)
  source 1..30: mol_type = other RNA
ggcatcgagcacgggaacatcctgcagtac

SEQ ID NO: 49741 - RNA, 27 nt, synthetic construct
  misc_feature 1..27: note = Polypeptide N-acetylgalactosaminyltransferase 16 (295-303)
  source 1..27: mol_type = other RNA
ggcatcttcgtgatcgacaagagctgg

SEQ ID NO: 49742 - RNA, 30 nt, synthetic construct
  misc_feature 1..30: note = 2'-5'-oligoadenylate synthase-like protein (493-502)
  source 1..30: mol_type = other RNA
ggcatccaggacagcgacaccctgatcctc

SEQ ID NO: 49743 - RNA, 27 nt, synthetic construct
  misc_feature 1..27: note = 60S ribosomal protein L37a (8-16)
  source 1..27: mol_type = other RNA
ggcatcgtggggaagtacggcacccgc

SEQ ID NO: 49744 - RNA, 27 nt, synthetic construct
  misc_feature 1..27: note = Intraflagellar transport protein 172 homolog (129-137)
  source 1..27: mol_type = other RNA
ggcctggccgaggggaaggtgcgcctc

SEQ ID NO: 49745 - RNA, 27 nt, synthetic construct
  misc_feature 1..27: note = Pre-B-cell leukemia transcription factor-interacting protein 1 (428-436)
  source 1..27: mol_type = other RNA
ggcctggccgagctcgggcaccgcctg

SEQ ID NO: 49746 - RNA, 27 nt, synthetic construct
  misc_feature 1..27: note = NADH dehydrogenase (ubiquinone) 1 alpha subcomplex subunit 1 (20-28)
  source 1..27: mol_type = other RNA
ggcctggccaccgcctacatccaccgc

SEQ ID NO: 49747 - RNA, 27 nt, synthetic construct
  misc_feature 1..27: note = Selenocysteine insertion sequence-binding protein 2-like (751-759)
  source 1..27: mol_type = other RNA
ggcctggacgaggccctctacaacgtg

SEQ ID NO: 49748 - RNA, 27 nt, synthetic construct
  misc_feature 1..27: note = Solute carrier family 25 member 33 (93-101)
  source 1..27: mol_type = other RNA
ggcctggggcccaacctcgtgggcgtc

SEQ ID NO: 49749 - RNA, 24 nt, synthetic construct
  misc_feature 1..24: note = Lysine-specific demethylase 3A (124-131)
  source 1..24: mol_type = other RNA
ggcctggggagcatcacctccgtg

SEQ ID NO: 49750 - RNA, 27 nt, synthetic construct
  misc_feature 1..27: note = Membrane-associated transporter protein (409-417)
  source 1..27: mol_type = other RNA
ggcctggggaccggcttcatcgggctc

SEQ ID NO: 49751 - RNA, 27 nt, synthetic construct
  misc_feature 1..27: note = Plectin (546-554)
  source 1..27: mol_type = other RNA
ggcctgcaccagagcatcgaggagttc

SEQ ID NO: 49752 - RNA, 27 nt, synthetic construct
  misc_feature 1..27: note = Filamin-A (1300-1308)
  source 1..27: mol_type = other RNA
ggcctgcacagcgtggacgtcacctac

SEQ ID NO: 49753 - RNA, 36 nt, synthetic construct
  misc_feature 1..36: note = Ubiquitin-conjugating enzyme E2 G1 (28-39)
  source 1..36: mol_type = other RNA
ggcctgatcgacgacaacgacctctaccgctgggag

SEQ ID NO: 49754 - RNA, 27 nt, synthetic construct
  misc_feature 1..27: note = Dedicator of cytokinesis protein 11 (1172-1180)
  source 1..27: mol_type = other RNA
ggcctgctcctggagaacatccagcgc

SEQ ID NO: 49755 - RNA, 33 nt, synthetic construct
  misc_feature 1..33: note = ATP-dependent RNA helicase DDX1 (121-131)
  source 1..33: mol_type = other RNA
ggcctgatgaaggggaagcactactacgaggtg

SEQ ID NO: 49756 - RNA, 27 nt, synthetic construct
  misc_feature 1..27: note = U7 snRNA-associated Sm-like protein LSm10 (23-31)
  source 1..27: mol_type = other RNA
ggcctgcaggggcgcgtgaccaccgtc

SEQ ID NO: 49757 - RNA, 27 nt, synthetic construct
  misc_feature 1..27: note = Mortality factor 4-like protein 1 (100-108)
  source 1..27: mol_type = other RNA
ggcctgcagcagaagaacgtggaggtc

SEQ ID NO: 49758 - RNA, 21 nt, synthetic construct
  misc_feature 1..21: note = Microtubule-associated protein 1B (225-231)
  source 1..21: mol_type = other RNA
ggcctgagcgagttcaccgag

SEQ ID NO: 49759 - RNA, 27 nt, synthetic construct
  misc_feature 1..27: note = Pterin-4-alpha-carbinolamine dehydratase (12-20)
  source 1..27: mol_type = other RNA
ggcctgagcgagcgcgacatcaacctc

SEQ ID NO: 49760 - RNA, 27 nt, synthetic construct
  misc_feature 1..27: note = Protein-methionine sulfoxide oxidase MICAL3 (1054-1062)
  source 1..27: mol_type = other RNA
ggcctgagcgaggtgctcgtccagatc

SEQ ID NO: 49761 - RNA, 27 nt, synthetic construct
  misc_feature 1..27: note = Probable E3 ubiquitin-protein ligase HERC1 (3214-3222)
  source 1..27: mol_type = other RNA
ggcctgaccgacatccgcaccctcgtg

SEQ ID NO: 49762 - RNA, 33 nt, synthetic construct
  misc_feature 1..33: note = Zinc transporter ZIP14 (20-30)
  source 1..33: mol_type = other RNA
ggcctgtggcgcaccacccccgaggcccacgcc

SEQ ID NO: 49763 - RNA, 33 nt, synthetic construct
  misc_feature 1..33: note = Prolyl 3-hydroxylase 2 (87-97)
  source 1..33: mol_type = other RNA
ggcctgtacgaggccatcgccgaccactacatg

SEQ ID NO: 49764 - RNA, 30 nt, synthetic construct
  misc_feature 1..30: note = Guanine nucleotide-binding protein-like 3-like protein (377-386)
  source 1..30: mol_type = other RNA
ggcctgtacagccaggagcaggccgccaag

SEQ ID NO: 49765 - RNA, 27 nt, synthetic construct
  misc_feature 1..27: note = Tuberin (1302-1310)
  source 1..27: mol_type = other RNA
ggcatggaccgccggaccgacgcctac

SEQ ID NO: 49766 - RNA, 33 nt, synthetic construct
  misc_feature 1..33: note = Unconventional myosin-Va (1628-1638)
  source 1..33: mol_type = other RNA
ggcatgctggagcacgagaccatccagggggtg

SEQ ID NO: 49767 - RNA, 51 nt, synthetic construct
  misc_feature 1..51: note = Spectrin alpha chain, non-erythrocytic 1 (367-383)
  source 1..51: mol_type = other RNA
ggcatgatgccccgcgacgagaccgacagcaagaccgcctccccgtggaag

SEQ ID NO: 49768 - RNA, 27 nt, synthetic construct
  misc_feature 1..27: note = Solute carrier family 35 member E1 (21-29)
  source 1..27: mol_type = other RNA
ggcatgatgaccgccatcctgggggtg

SEQ ID NO: 49769 - RNA, 27 nt, synthetic construct
  misc_feature 1..27: note = Catenin beta-1 (106-114)
  source 1..27: mol_type = other RNA
ggcatgcagatccccagcacccagttc

SEQ ID NO: 49770 - RNA, 51 nt, synthetic construct
  misc_feature 1..51: note = Autophagy-related protein 2 homolog A (1914-1930)
  source 1..51: mol_type = other RNA
ggcatgcgcaaccagatcgtgcccgacgcccacaaggaccacgccctgaag

SEQ ID NO: 49771 - RNA, 27 nt, synthetic construct
  misc_feature 1..27: note = Synaptic vesicle membrane protein VAT-1 homolog (137-145)
  source 1..27: mol_type = other RNA
ggcatgtggcaggaggaggtgaccgtc

SEQ ID NO: 49772 - RNA, 36 nt, synthetic construct
  misc_feature 1..36: note = BMP and activin membrane-bound inhibitor homolog (249-260)
  source 1..36: mol_type = other RNA
ggcatgtacagcgggcacggcaagctggagttcgtg

SEQ ID NO: 49773 - RNA, 30 nt, synthetic construct
  misc_feature 1..30: note = Bifunctional lysine-specific demethylase and histidyl-hydroxylase MINA (93-102)
  source 1..30: mol_type = other RNA
ggcatgtactacgggcgcgacgtgaacgtc

SEQ ID NO: 49774 - RNA, 51 nt, synthetic construct
  misc_feature 1..51: note = Heterogeneous nuclear ribonucleoprotein A1-like 2 (126-142)
  source 1..51: mol_type = other RNA
ggcaacttcgggggccgcagctccgggccctacggcgggggcggccagtac

SEQ ID NO: 49775 - RNA, 27 nt, synthetic construct
  misc_feature 1..27: note = Uncharacterized protein KIAA1841 (80-88)
  source 1..27: mol_type = other RNA
ggcaacgtgatcagcatcctgatctcc

SEQ ID NO: 49776 - RNA, 48 nt, synthetic construct
  misc_feature 1..48: note = Vimentin (17-32)
  source 1..48: mol_type = other RNA
ggccccgggaccgccagccgcccgtccagctcccggagctacgtgacc

SEQ ID NO: 49777 - RNA, 51 nt, synthetic construct
  misc_feature 1..51: note = Vimentin (17-33)
  source 1..51: mol_type = other RNA
ggccccgggaccgccagccgcccgtccagctcccggagctacgtgaccacg

SEQ ID NO: 49778 - RNA, 42 nt, synthetic construct
  misc_feature 1..42: note = Stromal membrane-associated protein 2 (336-349)
  source 1..42: mol_type = other RNA
ggccaggccgccaaccagaccctgagcccccagatgtggaag

SEQ ID NO: 49779 - RNA, 33 nt, synthetic construct
  misc_feature 1..33: note = Integrin beta-3 (297-307)
  source 1..33: mol_type = other RNA
ggccagtgccacgtggggagcgacaaccactac

SEQ ID NO: 49780 - RNA, 30 nt, synthetic construct
  misc_feature 1..30: note = Anaphase-promoting complex subunit 7 (149-158)
  source 1..30: mol_type = other RNA
ggccaggagcgccccagcgtgacctcctac

SEQ ID NO: 49781 - RNA, 27 nt, synthetic construct
  misc_feature 1..27: note = Protein FAM98A (492-500)
  source 1..27: mol_type = other RNA
ggccagttcgagcagcacttccagcac

SEQ ID NO: 49782 - RNA, 30 nt, synthetic construct
  misc_feature 1..30: note = UPF0428 protein CXorf56 (123-132)
  source 1..30: mol_type = other RNA
ggccaggggttcggcaagaccaacatctac

SEQ ID NO: 49783 - RNA, 27 nt, synthetic construct
  misc_feature 1..27: note = Melanoma antigen preferentially expressed in tumors (89-97)
  source 1..27: mol_type = other RNA
ggccagcacctgcacctcgagaccttc

SEQ ID NO: 49784 - RNA, 27 nt, synthetic construct
  misc_feature 1..27: note = Sodium-dependent neutral amino acid transporter B(0)AT2 (281-289)
  source 1..27: mol_type = other RNA
ggccagatcacccacaacaccagcttc

SEQ ID NO: 49785 - RNA, 27 nt, synthetic construct
  misc_feature 1..27: note = Class E basic helix-loop-helix protein 41 (208-216)
  source 1..27: mol_type = other RNA
ggccagaagctggagcccctcgcctac

SEQ ID NO: 49786 - RNA, 42 nt, synthetic construct
  misc_feature 1..42: note = Heterogeneous nuclear ribonucleoprotein U (692-705)
  source 1..42: mol_type = other RNA
ggccagaagccctggagccagcactaccaccaggggtactac

SEQ ID NO: 49787 - RNA, 27 nt, synthetic construct
  misc_feature 1..27: note = CAP-Gly domain-containing linker protein 3 (317-325)
  source 1..27: mol_type = other RNA
ggccagaagcaggggatcgtgcgcttc

SEQ ID NO: 49788 - RNA, 30 nt, synthetic construct
  misc_feature 1..30: note = Protein SCAI (271-280)
  source 1..30: mol_type = other RNA
ggccagctgagcctcgccgacgccctgatc

SEQ ID NO: 49789 - RNA, 33 nt, synthetic construct
  misc_feature 1..33: note = Ras GTPase-activating protein-binding protein 2 (102-112)
  source 1..33: mol_type = other RNA
ggccagcccgagcgcaagttcatgcagaccttc

SEQ ID NO: 49790 - RNA, 27 nt, synthetic construct
  misc_feature 1..27: note = Clathrin heavy chain 1 (26-34)
  source 1..27: mol_type = other RNA
ggccagccccagccggggttcggctac

SEQ ID NO: 49791 - RNA, 27 nt, synthetic construct
  misc_feature 1..27: note = Kinesin-like protein KIF3C (89-97)
  source 1..27: mol_type = other RNA
ggccagaccgggaccggcaagacgtac

SEQ ID NO: 49792 - RNA, 30 nt, synthetic construct
  misc_feature 1..30: note = F-box only protein 7 (137-146)
  source 1..30: mol_type = other RNA
ggccaggtgccccacagcctggagaccctc

SEQ ID NO: 49793 - RNA, 27 nt, synthetic construct
  misc_feature 1..27: note = Protein FAM13A (81-89)
  source 1..27: mol_type = other RNA
ggccgcgacaaggggctgatcaacaag

SEQ ID NO: 49794 - RNA, 57 nt, synthetic construct
  misc_feature 1..57: note = Nucleolar and spindle-associated protein 1 (253-271)
  source 1..57: mol_type = other RNA
ggccgcagctgcgggcccgcctcccagagcaccctgggcctcaaggggtccctgaag

SEQ ID NO: 49795 - RNA, 27 nt, synthetic construct
  misc_feature 1..27: note = Phosphatidylinositide phosphatase SAC2 (738-746)
  source 1..27: mol_type = other RNA
ggcagcgacctgcccatcatcgagaag

SEQ ID NO: 49796 - RNA, 33 nt, synthetic construct
  misc_feature 1..33: note = Anoctamin-4 (845-855)
  source 1..33: mol_type = other RNA
ggcagcgagttctccgggacccccctgaagtac

SEQ ID NO: 49797 - RNA, 42 nt, synthetic construct
  misc_feature 1..42: note = Keratin, type II cytoskeletal 1 (603-616)
  source 1..42: mol_type = other RNA
ggcagcgggggcgggtccagcggcgggtccatcggcggccgc

SEQ ID NO: 49798 - RNA, 27 nt, synthetic construct
  misc_feature 1..27: note = HLA class I histocompatibility antigen, B-50 alpha chain (25-33)
  source 1..27: mol_type = other RNA
ggcagccactccatgcgctacttccac

SEQ ID NO: 49799 - RNA, 27 nt, synthetic construct
  misc_feature 1..27: note = LIM and calponin homology domains-containing protein 1 (610-618)
  source 1..27: mol_type = other RNA
ggcagcatcgagatcaacatcaagaag

SEQ ID NO: 49800 - RNA, 36 nt, synthetic construct
  misc_feature 1..36: note = Poly(rC)-binding protein 1 (26-37)
  source 1..36: mol_type = other RNA
ggcagcatcatcgggaagaagggcgagtccgtgaag

SEQ ID NO: 49801 - RNA, 39 nt, synthetic construct
  misc_feature 1..39: note = Poly(rC)-binding protein 2 (26-38)
  source 1..39: mol_type = other RNA
ggcagcatcatcgggaagaagggcgagtccgtgaagaag

SEQ ID NO: 49802 - RNA, 27 nt, synthetic construct
  misc_feature 1..27: note = Parkinson disease 7 domain-containing protein 1 (55-63)
  source 1..27: mol_type = other RNA
ggcagcctggcccgcatcctccagcac

SEQ ID NO: 49803 - RNA, 27 nt, synthetic construct
  misc_feature 1..27: note = Integrator complex subunit 4 (30-38)
  source 1..27: mol_type = other RNA
ggcagcctggagaagtccgtgaccaag

SEQ ID NO: 49804 - RNA, 30 nt, synthetic construct
  misc_feature 1..30: note = Phytanoyl-CoA dioxygenase, peroxisomal (117-126)
  source 1..30: mol_type = other RNA
ggcagcctgaagccccacgactacccgaag

SEQ ID NO: 49805 - RNA, 27 nt, synthetic construct
  misc_feature 1..27: note = Signal peptidase complex catalytic subunit SEC11A (55-63)
  source 1..27: mol_type = other RNA
ggcagcatggagcccgccttccaccgc

SEQ ID NO: 49806 - RNA, 27 nt, synthetic construct
  misc_feature 1..27: note = ER membrane protein complex subunit 1 (351-359)
  source 1..27: mol_type = other RNA
ggcagcatggggtccttcagcgagaag

SEQ ID NO: 49807 - RNA, 33 nt, synthetic construct
  misc_feature 1..33: note = SLAIN motif-containing protein 2 (286-296)
  source 1..33: mol_type = other RNA
ggcagcatgaaggacgactcctggaaggacggg

SEQ ID NO: 49808 - RNA, 27 nt, synthetic construct
  misc_feature 1..27: note = Dynein heavy chain 14, axonemal (154-162)
  source 1..27: mol_type = other RNA
ggcagctccaagatcgccatccagaag

SEQ ID NO: 49809 - RNA, 33 nt, synthetic construct
  misc_feature 1..33: note = Dyslexia-associated protein KIAA0319-like protein (680-690)
  source 1..33: mol_type = other RNA
ggcagcgtgcccaacgggcagaccccgctgaag

SEQ ID NO: 49810 - RNA, 39 nt, synthetic construct
  misc_feature 1..39: note = 28S ribosomal protein S16, mitochondrial (52-64)
  source 1..39: mol_type = other RNA
ggcagctacgaccccctgccgaactcccacggggagaag

SEQ ID NO: 49811 - RNA, 27 nt, synthetic construct
  misc_feature 1..27: note = Transcription factor SOX-10 (199-207)
  source 1..27: mol_type = other RNA
ggcaccgccgccatccaggcgcactac

SEQ ID NO: 49812 - RNA, 30 nt, synthetic construct
  misc_feature 1..30: note = 5,6-dihydroxyindole-2-carboxylic acid oxidase (495-504)
  source 1..30: mol_type = other RNA
ggcaccgccagctacctgatccgcgcccgg

SEQ ID NO: 49813 - RNA, 24 nt, synthetic construct
  misc_feature 1..24: note = FRAS1-related extracellular matrix protein 1 (1422-1429)
  source 1..24: mol_type = other RNA
ggcaccgacaagcccgaggagctg

SEQ ID NO: 49814 - RNA, 27 nt, synthetic construct
  misc_feature 1..27: note = Retinol dehydrogenase 8 (207-215)
  source 1..27: mol_type = other RNA
ggcaccgaccccgagaccctgcactac

SEQ ID NO: 49815 - RNA, 27 nt, synthetic construct
  misc_feature 1..27: note = Receptor-type tyrosine-protein phosphatase gamma isoform X5 (1086-1094)
  source 1..27: mol_type = other RNA
ggcaccgactacatcaacgccagctac

SEQ ID NO: 49816 - RNA, 27 nt, synthetic construct
  misc_feature 1..27: note = Fibronectin (331-339)
  source 1..27: mol_type = other RNA
ggcaccgactacaagatctacctgtac

SEQ ID NO: 49817 - RNA, 27 nt, synthetic construct
  misc_feature 1..27: note = Myelin proteolipid protein (42-50)
  source 1..27: mol_type = other RNA
ggcaccgagaagctgatcgagacctac

SEQ ID NO: 49818 - RNA, 36 nt, synthetic construct
  misc_feature 1..36: note = Fructose-bisphosphate aldolase A (48-59)
  source 1..36: mol_type = other RNA
ggcaccgagaacaccgaggagaaccgccggttctac

SEQ ID NO: 49819 - RNA, 36 nt, synthetic construct
  misc_feature 1..36: note = Activating signal cointegrator 1 complex subunit 3 (1388-1399)
  source 1..36: mol_type = other RNA
ggcaccgagtactacgacgggaagacccgccggtac

SEQ ID NO: 49820 - RNA, 30 nt, synthetic construct
  misc_feature 1..30: note = 39S ribosomal protein L41, mitochondrial (18-27)
  source 1..30: mol_type = other RNA
ggcaccttcgaccccgacaacctggagaag

SEQ ID NO: 49821 - RNA, 36 nt, synthetic construct
  misc_feature 1..36: note = Fibronectin (567-578)
  source 1..36: mol_type = other RNA
ggcaccttctaccagatcggggacagctgggagaag

SEQ ID NO: 49822 - RNA, 27 nt, synthetic construct
  misc_feature 1..27: note = NHS-like protein 1 (375-383)
  source 1..27: mol_type = other RNA
ggcaccgggaccctgctccgccccaag

SEQ ID NO: 49823 - RNA, 30 nt, synthetic construct
  misc_feature 1..30: note = Receptor-interacting serine/threonine-protein kinase 4 (183-192)
  source 1..30: mol_type = other RNA
ggcaccatcgcctacctgcccccggagcgc

SEQ ID NO: 49824 - RNA, 30 nt, synthetic construct
  misc_feature 1..30: note = Centromere protein F (3155-3164)
  source 1..30: mol_type = other RNA
ggcaccatcctgcgcgagcccaccacgaag

SEQ ID NO: 49825 - RNA, 27 nt, synthetic construct
  misc_feature 1..27: note = SWI/SNF-related matrix-associated actin-dependent regulator of chromatin subfamily E member 1-related (80-88)
  source 1..27: mol_type = other RNA
ggcaccctggacttctacatggcccgc

SEQ ID NO: 49826 - RNA, 36 nt, synthetic construct
  misc_feature 1..36: note = Translocating chain-associated membrane protein 1 (356-367)
  source 1..36: mol_type = other RNA
ggcaccctgaccagcaacgtggccgactccccccgc

SEQ ID NO: 49827 - RNA, 30 nt, synthetic construct
  misc_feature 1..30: note = Anaphase-promoting complex subunit 1 (1218-1227)
  source 1..30: mol_type = other RNA
ggcaccatggacatgagcatcacccgcctg

SEQ ID NO: 49828 - RNA, 33 nt, synthetic construct
  misc_feature 1..33: note = F-actin-capping protein subunit beta (211-221)
  source 1..33: mol_type = other RNA
ggcaccatgaacctggggggcagcctcacccgc

SEQ ID NO: 49829 - RNA, 30 nt, synthetic construct
  misc_feature 1..30: note = Mitochondrial intermediate peptidase (222-231)
  source 1..30: mol_type = other RNA
ggcaccaacttccccaacaagatcgagaag

SEQ ID NO: 49830 - RNA, 27 nt, synthetic construct
  misc_feature 1..27: note = Synaptobrevin homolog YKT6 (178-186)
  source 1..27: mol_type = other RNA
ggcacccagagcaaggccttctacaag

SEQ ID NO: 49831 - RNA, 27 nt, synthetic construct
  misc_feature 1..27: note = Protein FAM83D (419-427)
  source 1..27: mol_type = other RNA
ggcacccagaccgccgtgatcacgcgc

SEQ ID NO: 49832 - RNA, 27 nt, synthetic construct
  misc_feature 1..27: note = Neuron navigator 2 (769-777)
  source 1..27: mol_type = other RNA
ggcacccaggtgacccacagcacgctg

SEQ ID NO: 49833 - RNA, 27 nt, synthetic construct
  misc_feature 1..27: note = MpV17 transgene, murine homolog, glomerulosclerosis, isoform CRA_f (79-87)
  source 1..27: mol_type = other RNA
ggcaccaccaaggtggacgccctgaag

SEQ ID NO: 49834 - RNA, 30 nt, synthetic construct
  misc_feature 1..30: note = Sorcin (118-127)
  source 1..30: mol_type = other RNA
ggcaccgtggacccccaggagctgcagaag

SEQ ID NO: 49835 - RNA, 36 nt, synthetic construct
  misc_feature 1..36: note = Galectin-3 (136-147)
  source 1..36: mol_type = other RNA
ggcaccgtgaagcccaacgccaaccgcatcgccctg

SEQ ID NO: 49836 - RNA, 33 nt, synthetic construct
  misc_feature 1..33: note = Putative germ cell-less protein-like 1-like (82-92)
  source 1..33: mol_type = other RNA
ggcacctacgggctggacagcgtgaagaagaag

SEQ ID NO: 49837 - RNA, 48 nt, synthetic construct
  misc_feature 1..48: note = Chromobox protein homolog 6 (397-412)
  source 1..48: mol_type = other RNA
ggcgtggccggggccgcgggcgggggcgggagcatcggcgcctccaag

SEQ ID NO: 49838 - RNA, 27 nt, synthetic construct
  misc_feature 1..27: note = WD repeat-containing protein 1 (324-332)
  source 1..27: mol_type = other RNA
ggcgtggacgggaacgtccgcctgtac

SEQ ID NO: 49839 - RNA, 27 nt, synthetic construct
  misc_feature 1..27: note = Zinc finger protein 106 (750-758)
  source 1..27: mol_type = other RNA
ggcgtgttcgaggggcacaccagcaag

SEQ ID NO: 49840 - RNA, 30 nt, synthetic construct
  misc_feature 1..30: note = Scavenger receptor class B member 1 (291-300)
  source 1..30: mol_type = other RNA
ggcgtgttcgaggggatccccacctaccgc

SEQ ID NO: 49841 - RNA, 30 nt, synthetic construct
  misc_feature 1..30: note = Vacuolar-sorting protein SNF8 (5-14)
  source 1..30: mol_type = other RNA
ggcgtgggggccggcgccatcgcgaagaag

SEQ ID NO: 49842 - RNA, 42 nt, synthetic construct
  misc_feature 1..42: note = Dedicator of cytokinesis protein 4 (591-604)
  source 1..42: mol_type = other RNA
ggcgtgatcgacgccgccgtcaacgggggcgtgagccgctac

SEQ ID NO: 49843 - RNA, 27 nt, synthetic construct
  misc_feature 1..27: note = Ribosomal protein S6 kinase delta-1 (332-340)
  source 1..27: mol_type = other RNA
ggcgtgatcgacaaggtcctgctcgtg

SEQ ID NO: 49844 - RNA, 27 nt, synthetic construct
  misc_feature 1..27: note = Disabled homolog 2 (110-118)
  source 1..27: mol_type = other RNA
ggcgtgatcgagcacgagcaccccgtc

SEQ ID NO: 49845 - RNA, 33 nt, synthetic construct
  misc_feature 1..33: note = Probable ATP-dependent RNA helicase DDX58 (746-756)
  source 1..33: mol_type = other RNA
ggcgtgatcgagaaggagcagatcaacatgtac

SEQ ID NO: 49846 - RNA, 33 nt, synthetic construct
  misc_feature 1..33: note = Regulator of chromosome condensation (182-192)
  source 1..33: mol_type = other RNA
ggcgtgatcgggctgctcgagcccatgaagaag

SEQ ID NO: 49847 - RNA, 30 nt, synthetic construct
  misc_feature 1..30: note = Interleukin enhancer-binding factor 3 (91-100)
  source 1..30: mol_type = other RNA
ggcgtgatgcgcgtcgggctggtggccaag

SEQ ID NO: 49848 - RNA, 27 nt, synthetic construct
  misc_feature 1..27: note = Chromodomain-helicase-DNA-binding protein 4 (1522-1530)
  source 1..27: mol_type = other RNA
ggcgtgatgagcctgatccgcaagaag

SEQ ID NO: 49849 - RNA, 27 nt, synthetic construct
  misc_feature 1..27: note = Non-structural maintenance of chromosomes element 1 homolog (3-11)
  source 1..27: mol_type = other RNA
ggcgtgatgaccgacgtccaccgccgg

SEQ ID NO: 49850 - RNA, 36 nt, synthetic construct
  misc_feature 1..36: note = POTE ankyrin domain family member I (75-86)
  source 1..36: mol_type = other RNA
ggcgtgacccacaccgtccccatctacgaggggtac

SEQ ID NO: 49851 - RNA, 30 nt, synthetic construct
  misc_feature 1..30: note = Protein-glutamine gamma-glutamyltransferase 6 (232-241)
  source 1..30: mol_type = other RNA
ggcgtggtccaggggcagtggcagggcaag

SEQ ID NO: 49852 - RNA, 36 nt, synthetic construct
  misc_feature 1..36: note = Copine-3 (78-89)
  source 1..36: mol_type = other RNA
ggcgtgtacgacatcgacaacaagaccatcgagctg

SEQ ID NO: 49853 - RNA, 30 nt, synthetic construct
  misc_feature 1..30: note = Hyccin (107-116)
  source 1..30: mol_type = other RNA
ggcgtgtacaacctggagatcgtcgacaag

SEQ ID NO: 49854 - RNA, 33 nt, synthetic construct
  misc_feature 1..33: note = Alpha-actinin-4 (5-15)
  source 1..33: mol_type = other RNA
cacgccgccaaccagagctaccagtacggcccc

SEQ ID NO: 49855 - RNA, 48 nt, synthetic construct
  misc_feature 1..48: note = Alpha-actinin-4 (5-20)
  source 1..48: mol_type = other RNA
cacgccgccaaccagagctaccagtacggcccctccagcgcggggaac

SEQ ID NO: 49856 - RNA, 27 nt, synthetic construct
  misc_feature 1..27: note = Transforming growth factor-beta receptor-associated protein 1 (725-733)
  source 1..27: mol_type = other RNA
cacgccggccccaccgcccacgagctg

SEQ ID NO: 49857 - RNA, 30 nt, synthetic construct
  misc_feature 1..30: note = Leucine-rich repeat-containing protein 1 (515-524)
  source 1..30: mol_type = other RNA
cacgccatcgaccgcgtgaccaccagcgtc

SEQ ID NO: 49858 - RNA, 27 nt, synthetic construct
  misc_feature 1..27: note = Coatomer subunit beta (447-455)
  source 1..27: mol_type = other RNA
cacgccatcaagagcgtgaagatctac

SEQ ID NO: 49859 - RNA, 27 nt, synthetic construct
  misc_feature 1..27: note = G-protein coupled receptor 143 (190-198)
  source 1..27: mol_type = other RNA
cacgccatcccccactacgtgaccatg

SEQ ID NO: 49860 - RNA, 27 nt, synthetic construct
  misc_feature 1..27: note = ATP-dependent RNA helicase DDX3X (209-217)
  source 1..27: mol_type = other RNA
cacgccatccccatcatcaaggagaag

SEQ ID NO: 49861 - RNA, 27 nt, synthetic construct
  misc_feature 1..27: note = Protein Smaug homolog 2 (682-690)
  source 1..27: mol_type = other RNA
cacgccctgggcggggagcacttcctc

SEQ ID NO: 49862 - RNA, 27 nt, synthetic construct
  misc_feature 1..27: note = Protein GREB1 (566-574)
  source 1..27: mol_type = other RNA
cacgccatggacggcgccagccacctg

SEQ ID NO: 49863 - RNA, 27 nt, synthetic construct
  misc_feature 1..27: note = Mothers against decapentaplegic homolog 4 (405-413)
  source 1..27: mol_type = other RNA
cacgccgtgttcgtccagagctactac

SEQ ID NO: 49864 - RNA, 27 nt, synthetic construct
  misc_feature 1..27: note = U4/U6.U5 tri-snRNP-associated protein 2 (151-159)
  source 1..27: mol_type = other RNA
cacgcctacatccacagcgtgcagttc

SEQ ID NO: 49865 - RNA, 27 nt, synthetic construct
  misc_feature 1..27: note = Helicase SRCAP (102-110)
  source 1..27: mol_type = other RNA
cacgaggccgagatcgagacccgcatc

SEQ ID NO: 49866 - RNA, 30 nt, synthetic construct
  misc_feature 1..30: note = Zinc finger FYVE domain-containing protein 16 (414-423)
  source 1..30: mol_type = other RNA
cacgaggagatccagaacagcgtggtcctg

SEQ ID NO: 49867 - RNA, 45 nt, synthetic construct
  misc_feature 1..45: note = Phospholipid hydroperoxide glutathione peroxidase, mitochondrial (42-56)
  source 1..45: mol_type = other RNA
cacgagttcagcgccaaggacatcgacggccacatggtgaacctg

SEQ ID NO: 49868 - RNA, 30 nt, synthetic construct
  misc_feature 1..30: note = Activin receptor type-1B isoform X3 (285-294)
  source 1..30: mol_type = other RNA
cacgagcacggcagcctgttcgactacctc

SEQ ID NO: 49869 - RNA, 27 nt, synthetic construct
  misc_feature 1..27: note = Sex comb on midleg-like protein 4 (131-139)
  source 1..27: mol_type = other RNA
cacgagatcgacggcaacgccctgctc

SEQ ID NO: 49870 - RNA, 39 nt, synthetic construct
  misc_feature 1..39: note = Insulin-like growth factor-binding protein 7 (270-282)
  source 1..39: mol_type = other RNA
cacgagatccccgtgaagaagggcgagggggccgagctg

SEQ ID NO: 49871 - RNA, 27 nt, synthetic construct
  misc_feature 1..27: note = Major facilitator superfamily domain-containing protein 12 (161-169)
  source 1..27: mol_type = other RNA
cacgagaaggtggagctgaccgccctc

SEQ ID NO: 49872 - RNA, 30 nt, synthetic construct
  misc_feature 1..30: note = Putative RNA-binding protein Luc7-like 1 (110-119)
  source 1..30: mol_type = other RNA
cacgagctgaacgaggagatcggcaagctc

SEQ ID NO: 49873 - RNA, 27 nt, synthetic construct
  misc_feature 1..27: note = Alpha-parvin (245-253)
  source 1..27: mol_type = other RNA
cacgagcgcgacgccttcgacaccctg

SEQ ID NO: 49874 - RNA, 24 nt, synthetic construct
  misc_feature 1..24: note = Monocarboxylate transporter 5 (168-175)
  source 1..24: mol_type = other RNA
cacgagaccgaggagagcaccatc

SEQ ID NO: 49875 - RNA, 30 nt, synthetic construct
  misc_feature 1..30: note = Cadherin-19 (309-318)
  source 1..30: mol_type = other RNA
cacgagacccaggagggcatcgtgatcctg

SEQ ID NO: 49876 - RNA, 30 nt, synthetic construct
  misc_feature 1..30: note = Liprin-alpha-1 (69-78)
  source 1..30: mol_type = other RNA
cacgaggtgggccacgagcgcgacagcctg

SEQ ID NO: 49877 - RNA, 30 nt, synthetic construct
  misc_feature 1..30: note = 60S ribosomal protein L36a-like (90-99)
  source 1..30: mol_type = other RNA
cacttcgagctgggcggggacaagaagcgc

SEQ ID NO: 49878 - RNA, 36 nt, synthetic construct
  misc_feature 1..36: note = 60S ribosomal protein L36a-like (90-101)
  source 1..36: mol_type = other RNA
cacttcgagctgggcggggacaagaagcgcaagggc

SEQ ID NO: 49879 - RNA, 39 nt, synthetic construct
  misc_feature 1..39: note = 60S ribosomal protein L36a-like (90-102)
  source 1..39: mol_type = other RNA
cacttcgagctgggcggggacaagaagcgcaagggccag

SEQ ID NO: 49880 - RNA, 51 nt, synthetic construct
  misc_feature 1..51: note = 60S ribosomal protein L36a-like (90-106)
  source 1..51: mol_type = other RNA
cacttcgagctgggcggggacaagaagcgcaagggccaggtgatccagttc

SEQ ID NO: 49881 - RNA, 39 nt, synthetic construct
  misc_feature 1..39: note = Interleukin enhancer-binding factor 3 (666-678)
  source 1..39: mol_type = other RNA
cacggcgggtacatgaacgccggcgccgggtacggcagc

SEQ ID NO: 49882 - RNA, 27 nt, synthetic construct
  misc_feature 1..27: note = Tubulin beta-2A chain (21-29)
  source 1..27: mol_type = other RNA
cacggcatcgaccccaccgggagctac

SEQ ID NO: 49883 - RNA, 39 nt, synthetic construct
  misc_feature 1..39: note = Dyslexia-associated protein KIAA0319-like protein (676-688)
  source 1..39: mol_type = other RNA
cacggccagaacgggagcgtgcccaacggccagaccccg

SEQ ID NO: 49884 - RNA, 30 nt, synthetic construct
  misc_feature 1..30: note = Putative heat shock protein HSP 90-beta-3 (6-15)
  source 1..30: mol_type = other RNA
caccacggcgaggaggaggtggagaccttc

SEQ ID NO: 49885 - RNA, 48 nt, synthetic construct
  misc_feature 1..48: note = G protein-coupled receptor kinase 5 (575-590)
  source 1..48: mol_type = other RNA
caccacatcaacagcaaccacgtgtccagcaactccaccggcagctcc

SEQ ID NO: 49886 - RNA, 51 nt, synthetic construct
  misc_feature 1..51: note = Non-POU domain-containing octamer-binding protein (28-44)
  source 1..51: mol_type = other RNA
caccaccagcagcagcagcagcagcccccgcccccccccatcccggccaac

SEQ ID NO: 49887 - RNA, 27 nt, synthetic construct
  misc_feature 1..27: note = F-box/WD repeat-containing protein 11 (32-40)
  source 1..27: mol_type = other RNA
cacatcgccgagaacatcctgagctac

SEQ ID NO: 49888 - RNA, 27 nt, synthetic construct
  misc_feature 1..27: note = 60S ribosomal protein L8 (172-180)
  source 1..27: mol_type = other RNA
cacatcggcaagcccagcaccatccgc

SEQ ID NO: 49889 - RNA, 27 nt, synthetic construct
  misc_feature 1..27: note = Retinol dehydrogenase 14 (257-265)
  source 1..27: mol_type = other RNA
cacatccacatccccctgctcgtgaag

SEQ ID NO: 49890 - RNA, 27 nt, synthetic construct
  misc_feature 1..27: note = HMG box-containing protein 1 (138-146)
  source 1..27: mol_type = other RNA
cacatcatcgccaccagcaagtccctg

SEQ ID NO: 49891 - RNA, 30 nt, synthetic construct
  misc_feature 1..30: note = NADH-ubiquinone oxidoreductase chain 5 (394-403)
  source 1..30: mol_type = other RNA
cacatcatcgagaccgccaacatgagctac

SEQ ID NO: 49892 - RNA, 27 nt, synthetic construct
  misc_feature 1..27: note = UBX domain-containing protein 2A (198-206)
  source 1..27: mol_type = other RNA
cacatcaaggacttcatcgagaagtac

SEQ ID NO: 49893 - RNA, 30 nt, synthetic construct
  misc_feature 1..30: note = Tyrosine-protein kinase JAK1 (584-593)
  source 1..30: mol_type = other RNA
cacatctacagcggcaccctgatggactac

SEQ ID NO: 49894 - RNA, 30 nt, synthetic construct
  misc_feature 1..30: note = Disintegrin and metalloproteinase domain-containing protein 10 (101-110)
  source 1..30: mol_type = other RNA
cacatctacaccggccacatctacgactac

SEQ ID NO: 49895 - RNA, 27 nt, synthetic construct
  misc_feature 1..27: note = Cyclin-L2 (129-137)
  source 1..27: mol_type = other RNA
cacctggccagcaagatcgaggaggcc

SEQ ID NO: 49896 - RNA, 27 nt, synthetic construct
  misc_feature 1..27: note = Nesprin-1 (1108-1116)
  source 1..27: mol_type = other RNA
cacctggacgaggaccagcaggagctc

SEQ ID NO: 49897 - RNA, 21 nt, synthetic construct
  misc_feature 1..21: note = UDP-N-acetylglucosamine-dolichyl-phosphate N-acetylglucosaminephosphotransferase (55-61)
  source 1..21: mol_type = other RNA
cacctggacctcggcatcctg

SEQ ID NO: 49898 - RNA, 24 nt, synthetic construct
  misc_feature 1..24: note = UDP-N-acetylglucosamine-dolichyl-phosphate N-acetylglucosaminephosphotransferase (55-62)
  source 1..24: mol_type = other RNA
cacctggacctcggcatcctgtac

SEQ ID NO: 49899 - RNA, 24 nt, synthetic construct
  misc_feature 1..24: note = Histone H3-like centromeric protein A (104-111)
  source 1..24: mol_type = other RNA
cacctgttcgaggacgcctacctc

SEQ ID NO: 49900 - RNA, 27 nt, synthetic construct
  misc_feature 1..27: note = Histone H3-like centromeric protein A (104-112)
  source 1..27: mol_type = other RNA
cacctgttcgaggacgcctacctcctg

SEQ ID NO: 49901 - RNA, 30 nt, synthetic construct
  misc_feature 1..30: note = WD repeat-containing protein 43 (142-151)
  source 1..30: mol_type = other RNA
cacctgttcgagcacatcctcaacggctac

SEQ ID NO: 49902 - RNA, 27 nt, synthetic construct
  misc_feature 1..27: note = UPF0536 protein C12orf66 (239-247)
  source 1..27: mol_type = other RNA
cacctgttcggcgggcagagccagaag

SEQ ID NO: 49903 - RNA, 30 nt, synthetic construct
  misc_feature 1..30: note = Protein Shroom4 (1371-1380)
  source 1..30: mol_type = other RNA
cacctgttcgtgggcgacctcgacaaggtc

SEQ ID NO: 49904 - RNA, 30 nt, synthetic construct
  misc_feature 1..30: note = cDNA FLJ60317, highly similar to Aminoacylase-1 (EC 3.5.1.14) (332-341)
  source 1..30: mol_type = other RNA
cacctgaaggagggcagcgtgacctccgtc

SEQ ID NO: 49905 - RNA, 33 nt, synthetic construct
  misc_feature 1..33: note = Homeodomain-interacting protein kinase 2 (531-541)
  source 1..33: mol_type = other RNA
cacctgctcgacttcccccacagcacccacgtg

SEQ ID NO: 49906 - RNA, 27 nt, synthetic construct
  misc_feature 1..27: note = Pre-mRNA-processing-splicing factor 8 (1875-1883)
  source 1..27: mol_type = other RNA
cacctgctcgacttccccaacatcgtg

SEQ ID NO: 49907 - RNA, 33 nt, synthetic construct
  misc_feature 1..33: note = Adenylosuccinate lyase (442-452)
  source 1..33: mol_type = other RNA
cacctgctcgaccccagctccttcaccggccgc

SEQ ID NO: 49908 - RNA, 33 nt, synthetic construct
  misc_feature 1..33: note = Mitotic checkpoint serine/threonine-protein kinase BUB1 (791-801)
  source 1..33: mol_type = other RNA
cacctgctcggcgagggggccttcgcccaggtg

SEQ ID NO: 49909 - RNA, 27 nt, synthetic construct
  misc_feature 1..27: note = Superkiller viralicidic activity 2-like 2 (735-743)
  source 1..27: mol_type = other RNA
cacctgctcagcgccatctccagcgtg

SEQ ID NO: 49910 - RNA, 27 nt, synthetic construct
  misc_feature 1..27: note = Glutamine synthetase (8-16)
  source 1..27: mol_type = other RNA
cacctgaacaagggcatcaagcaggtg

SEQ ID NO: 49911 - RNA, 27 nt, synthetic construct
  misc_feature 1..27: note = Integrator complex subunit 11 (516-524)
  source 1..27: mol_type = other RNA
cacctgcccgacggcagcgtgaccgtc

SEQ ID NO: 49912 - RNA, 27 nt, synthetic construct
  misc_feature 1..27: note = Putative ATP-dependent RNA helicase TDRD12 (984-992)
  source 1..27: mol_type = other RNA
cacctgcccgagcacttccacaccctc

SEQ ID NO: 49913 - RNA, 27 nt, synthetic construct
  misc_feature 1..27: note = Unconventional myosin-Id (220-228)
  source 1..27: mol_type = other RNA
cacctgcagaagagcctctccagctac

SEQ ID NO: 49914 - RNA, 27 nt, synthetic construct
  misc_feature 1..27: note = Testis-expressed sequence 10 protein (95-103)
  source 1..27: mol_type = other RNA
cacctgagcaacatcctctccgaggtg

SEQ ID NO: 49915 - RNA, 27 nt, synthetic construct
  misc_feature 1..27: note = NADH-ubiquinone oxidoreductase chain 4 (83-91)
  source 1..27: mol_type = other RNA
cacctgagctccgagcccctcagccgc

SEQ ID NO: 49916 - RNA, 27 nt, synthetic construct
  misc_feature 1..27: note = RAD50-interacting protein 1 (429-437)
  source 1..27: mol_type = other RNA
cacctggtggacgaggtcctcctgttc

SEQ ID NO: 49917 - RNA, 27 nt, synthetic construct
  misc_feature 1..27: note = Thiamin pyrophosphokinase 1 (34-42)
  source 1..27: mol_type = other RNA
cacctgtggaacaaggccctcctgcgc

SEQ ID NO: 49918 - RNA, 30 nt, synthetic construct
  misc_feature 1..30: note = Proline-rich nuclear receptor coactivator 1 (204-213)
  source 1..30: mol_type = other RNA
cacctgtacgagcagcccaagatcaaccgc

SEQ ID NO: 49919 - RNA, 27 nt, synthetic construct
  misc_feature 1..27: note = 60S ribosomal protein L19 (99-107)
  source 1..27: mol_type = other RNA
cacatgtaccacagcctgtacctcaag

SEQ ID NO: 49920 - RNA, 27 nt, synthetic construct
  misc_feature 1..27: note = COP9 signalosome complex subunit 8 (47-55)
  source 1..27: mol_type = other RNA
cacaacgacatgaacaacgcccgctac

SEQ ID NO: 49921 - RNA, 36 nt, synthetic construct
  misc_feature 1..36: note = Probable ATP-dependent RNA helicase DDX5 (585-596)
  source 1..36: mol_type = other RNA
cacaacggcatgaaccagcaggcctacgcctacccc

SEQ ID NO: 49922 - RNA, 24 nt, synthetic construct
  misc_feature 1..24: note = Ankycorbin (931-938)
  source 1..24: mol_type = other RNA
caccaggaggtgatcagcgtctac

SEQ ID NO: 49923 - RNA, 42 nt, synthetic construct
  misc_feature 1..42: note = Protein FAM98A (489-502)
  source 1..42: mol_type = other RNA
caccagggcgggcagttcgagcagcacttccagcacggcggg

SEQ ID NO: 49924 - RNA, 24 nt, synthetic construct
  misc_feature 1..24: note = WD repeat-containing protein 70 (230-237)
  source 1..24: mol_type = other RNA
caccagatcaagagcctgcagtac

SEQ ID NO: 49925 - RNA, 30 nt, synthetic construct
  misc_feature 1..30: note = Sulfotransferase 1C2 (198-207)
  source 1..30: mol_type = other RNA
caccagatcctgttcctcttctacgaggac

SEQ ID NO: 49926 - RNA, 33 nt, synthetic construct
  misc_feature 1..33: note = Melanocyte protein PMEL (562-572)
  source 1..33: mol_type = other RNA
caccagatcctgaagggcgggagcggcacctac

SEQ ID NO: 49927 - RNA, 24 nt, synthetic construct
  misc_feature 1..24: note = Kinesin-1 heavy chain (712-719)
  source 1..24: mol_type = other RNA
caccagaagcagatcagctccctg

SEQ ID NO: 49928 - RNA, 27 nt, synthetic construct
  misc_feature 1..27: note = Zinc finger SWIM domain-containing protein 3 (499-507)
  source 1..27: mol_type = other RNA
caccagagcggctccgagctggcctac

SEQ ID NO: 49929 - RNA, 30 nt, synthetic construct
  misc_feature 1..30: note = Catenin delta-2 (274-283)
  source 1..30: mol_type = other RNA
caccgccccccggccagcgagtacaccatg

SEQ ID NO: 49930 - RNA, 39 nt, synthetic construct
  misc_feature 1..39: note = RNMT-activating mini protein (94-106)
  source 1..39: mol_type = other RNA
caccgccaggagccctactacccgcagcagtacggccac

SEQ ID NO: 49931 - RNA, 27 nt, synthetic construct
  misc_feature 1..27: note = Biorientation of chromosomes in cell division protein 1-like 1 (75-83)
  source 1..27: mol_type = other RNA
cacagcgccctgcccaaccagtccctc

SEQ ID NO: 49932 - RNA, 30 nt, synthetic construct
  misc_feature 1..30: note = Monoacylglycerol lipase ABHD12 (365-374)
  source 1..30: mol_type = other RNA
cacagcgacctgggctaccgccacaagtac

SEQ ID NO: 49933 - RNA, 33 nt, synthetic construct
  misc_feature 1..33: note = Transient receptor potential cation channel subfamily A member 1 (758-768)
  source 1..33: mol_type = other RNA
cacagcgagatcctggacaccaccaactcctac

SEQ ID NO: 49934 - RNA, 27 nt, synthetic construct
  misc_feature 1..27: note = Alstrom syndrome protein 1 (958-966)
  source 1..27: mol_type = other RNA
cacagcgagaagtccagcgtgttctac

SEQ ID NO: 49935 - RNA, 27 nt, synthetic construct
  misc_feature 1..27: note = Glycine dehydrogenase (decarboxylating), mitochondrial (529-537)
  source 1..27: mol_type = other RNA
cacagcgagaccaacatcgtgcgctac

SEQ ID NO: 49936 - RNA, 30 nt, synthetic construct
  misc_feature 1..30: note = Dedicator of cytokinesis protein 9 (1147-1156)
  source 1..30: mol_type = other RNA
cacagcttcgacgaccgctacgcctcccgg

SEQ ID NO: 49937 - RNA, 33 nt, synthetic construct
  misc_feature 1..33: note = Tubulin alpha-3C/D chain (138-148)
  source 1..33: mol_type = other RNA
cacagcttcggcgggggcaccgggtccggcttc

SEQ ID NO: 49938 - RNA, 36 nt, synthetic construct
  misc_feature 1..36: note = Tubulin alpha-1C chain (104-115)
  source 1..36: mol_type = other RNA
cacagcttcggcgggggcaccgggtccggcttcacc

SEQ ID NO: 49939 - RNA, 24 nt, synthetic construct
  misc_feature 1..24: note = E3 ubiquitin-protein ligase TRIM33 (605-612)
  source 1..24: mol_type = other RNA
cacagcggcccccagtactccatg

SEQ ID NO: 49940 - RNA, 42 nt, synthetic construct
  misc_feature 1..42: note = Tubulin gamma-1 chain (139-152)
  source 1..42: mol_type = other RNA
cacagcatcgccggcgggaccggctccgggctgggcagctac

SEQ ID NO: 49941 - RNA, 36 nt, synthetic construct
  misc_feature 1..36: note = Macrophage migration inhibitory factor (61-72)
  source 1..36: mol_type = other RNA
cacagcatcggcaagatcgggggcgcccagaaccgc

SEQ ID NO: 49942 - RNA, 33 nt, synthetic construct
  misc_feature 1..33: note = Rho-related BTB domain-containing protein 3 (176-186)
  source 1..33: mol_type = other RNA
cacagcctggacgacttctacatcggcaagtac

SEQ ID NO: 49943 - RNA, 33 nt, synthetic construct
  misc_feature 1..33: note = Copper transport protein ATOX1 (46-56)
  source 1..33: mol_type = other RNA
cacagcatggacaccctgctcgccaccctgaag

SEQ ID NO: 49944 - RNA, 24 nt, synthetic construct
  misc_feature 1..24: note = 40S ribosomal protein S20 (92-99)
  source 1..24: mol_type = other RNA
cacagcccctccgagatcgtgaag

SEQ ID NO: 49945 - RNA, 36 nt, synthetic construct
  misc_feature 1..36: note = Transcriptional regulator Kaiso (573-584)
  source 1..36: mol_type = other RNA
cacagccaggacccctccggcgacagcaagctgtac

SEQ ID NO: 49946 - RNA, 30 nt, synthetic construct
  misc_feature 1..30: note = FERM domain-containing protein 4A (823-832)
  source 1..30: mol_type = other RNA
cacagccagtcccagcccagctcccagtac

SEQ ID NO: 49947 - RNA, 27 nt, synthetic construct
  misc_feature 1..27: note = Nipped-B-like protein (134-142)
  source 1..27: mol_type = other RNA
cacagctcccccgccagctccaactac

SEQ ID NO: 49948 - RNA, 30 nt, synthetic construct
  misc_feature 1..30: note = Melanocyte protein PMEL (639-648)
  source 1..30: mol_type = other RNA
cacagctccagccactggctgcgcctcccc

SEQ ID NO: 49949 - RNA, 27 nt, synthetic construct
  misc_feature 1..27: note = Transformation/transcription domain-associated protein (3009-3017)
  source 1..27: mol_type = other RNA
cacagctccagcatcgtgaccgcctac

SEQ ID NO: 49950 - RNA, 33 nt, synthetic construct
  misc_feature 1..33: note = PERQ amino acid-rich with GYF domain-containing protein 2 (1230-1240)
  source 1..33: mol_type = other RNA
cacagcaccctgcactccgtgttccagaccaac

SEQ ID NO: 49951 - RNA, 45 nt, synthetic construct
  misc_feature 1..45: note = PERQ amino acid-rich with GYF domain-containing protein 2 (1230-1244)
  source 1..45: mol_type = other RNA
cacagcaccctgcactccgtgttccagaccaaccagagcaacaac

SEQ ID NO: 49952 - RNA, 27 nt, synthetic construct
  misc_feature 1..27: note = Ribosome maturation protein SBDS (54-62)
  source 1..27: mol_type = other RNA
cacagcgtgttcgtcaacgtgtccaag

SEQ ID NO: 49953 - RNA, 24 nt, synthetic construct
  misc_feature 1..24: note = Proteasome assembly chaperone 2 (85-92)
  source 1..24: mol_type = other RNA
cacagctaccagcgcaacgacctg

SEQ ID NO: 49954 - RNA, 27 nt, synthetic construct
  misc_feature 1..27: note = Adenine DNAosylase (479-487)
  source 1..27: mol_type = other RNA
cacaccgccgccgtgagcaccgcgatg

SEQ ID NO: 49955 - RNA, 27 nt, synthetic construct
  misc_feature 1..27: note = Protein archease (38-46)
  source 1..27: mol_type = other RNA
cacaccgccgacgtgcacggcctgtac

SEQ ID NO: 49956 - RNA, 30 nt, synthetic construct
  misc_feature 1..30: note = Protein archease (38-47)
  source 1..30: mol_type = other RNA
cacaccgccgacgtgcacggcctgtactac

SEQ ID NO: 49957 - RNA, 30 nt, synthetic construct
  misc_feature 1..30: note = Protein O-linked-mannose beta-1,2-N-acetylglucosaminyltransferase 1 (410-419)
  source 1..30: mol_type = other RNA
cacaccgccgaggaccccgccctgctctac

SEQ ID NO: 49958 - RNA, 27 nt, synthetic construct
  misc_feature 1..27: note = Proton myo-inositol cotransporter (546-554)
  source 1..27: mol_type = other RNA
cacaccgccgagtacctgacctactac

SEQ ID NO: 49959 - RNA, 27 nt, synthetic construct
  misc_feature 1..27: note = Hydroxyacylglutathione hydrolase-like protein (110-118)
  source 1..27: mol_type = other RNA
cacaccgccggccacatgagctacttc

SEQ ID NO: 49960 - RNA, 27 nt, synthetic construct
  misc_feature 1..27: note = Tensin-1 (628-636)
  source 1..27: mol_type = other RNA
cacaccgcccccatgcgcccgagctac

SEQ ID NO: 49961 - RNA, 27 nt, synthetic construct
  misc_feature 1..27: note = CD63 antigen (131-139)
  source 1..27: mol_type = other RNA
cacaccgccagcatcctggaccgcatg

SEQ ID NO: 49962 - RNA, 27 nt, synthetic construct
  misc_feature 1..27: note = Alanine-tRNA ligase, cytoplasmic (605-613)
  source 1..27: mol_type = other RNA
cacaccgccacccacatcctgaacttc

SEQ ID NO: 49963 - RNA, 24 nt, synthetic construct
  misc_feature 1..24: note = U3 small nucleolar RNA-associated protein 6 homolog (267-274)
  source 1..24: mol_type = other RNA
cacaccgacgaccccctgacctgg

SEQ ID NO: 49964 - RNA, 24 nt, synthetic construct
  misc_feature 1..24: note = Mitochondrial enolase superfamily member 1 (29-36)
  source 1..24: mol_type = other RNA
cacaccgaccccgactacagcgcc

SEQ ID NO: 49965 - RNA, 30 nt, synthetic construct
  misc_feature 1..30: note = Ras GTPase-activating protein 3 (501-510)
  source 1..30: mol_type = other RNA
cacaccgacccccagaccagccgcacgctg

SEQ ID NO: 49966 - RNA, 30 nt, synthetic construct
  misc_feature 1..30: note = Zinc finger protein DZIP1 (221-230)
  source 1..30: mol_type = other RNA
cacaccgaggagaacagccacttcgagtac

SEQ ID NO: 49967 - RNA, 27 nt, synthetic construct
  misc_feature 1..27: note = Protein FAM214A (1013-1021)
  source 1..27: mol_type = other RNA
cacaccgaggagcgcctgctccggtac

SEQ ID NO: 49968 - RNA, 36 nt, synthetic construct
  misc_feature 1..36: note = Melanophilin (469-480)
  source 1..36: mol_type = other RNA
cacaccttcgccaagcccgtggtcgcccaccagagc

SEQ ID NO: 49969 - RNA, 33 nt, synthetic construct
  misc_feature 1..33: note = Cytochrome c oxidase subunit 1 (503-513)
  source 1..33: mol_type = other RNA
cacaccttcgaggagcccgtgtacatgaagagc

SEQ ID NO: 49970 - RNA, 39 nt, synthetic construct
  misc_feature 1..39: note = Protein tyrosine phosphatase type IVA 1 (21-33)
  source 1..39: mol_type = other RNA
cacaccttcatggagttcctgaagggcagcggggactac

SEQ ID NO: 49971 - RNA, 30 nt, synthetic construct
  misc_feature 1..30: note = GRB2-associated-binding protein 2 (554-563)
  source 1..30: mol_type = other RNA
cacaccttcaacagctccagctcccagtac

SEQ ID NO: 49972 - RNA, 27 nt, synthetic construct
  misc_feature 1..27: note = Discoidin, CUB and LCCL domain-containing protein 1 (613-621)
  source 1..27: mol_type = other RNA
cacaccttcagcgcccagtccggctac

SEQ ID NO: 49973 - RNA, 27 nt, synthetic construct
  misc_feature 1..27: note = Importin-8 (408-416)
  source 1..27: mol_type = other RNA
cacaccatcgacaccatcctgacggtg

SEQ ID NO: 49974 - RNA, 33 nt, synthetic construct
  misc_feature 1..33: note = Protein pelota homolog (100-110)
  source 1..33: mol_type = other RNA
cacaccatcgagctggagcccaaccgccagttc

SEQ ID NO: 49975 - RNA, 27 nt, synthetic construct
  misc_feature 1..27: note = Tubulin polyglutamylase TTLL5 (968-976)
  source 1..27: mol_type = other RNA
cacaccatcggccccttcagctccttc

SEQ ID NO: 49976 - RNA, 30 nt, synthetic construct
  misc_feature 1..30: note = Nuclear pore complex protein Nup107 (862-871)
  source 1..30: mol_type = other RNA
cacaccatcctgcacagcaccggccagtac

SEQ ID NO: 49977 - RNA, 30 nt, synthetic construct
  misc_feature 1..30: note = S-methyl-5'-thioadenosine phosphorylase (65-74)
  source 1..30: mol_type = other RNA
cacaccatcatgcccagcaaggtgaactac

SEQ ID NO: 49978 - RNA, 27 nt, synthetic construct
  misc_feature 1..27: note = Serologically defined colon cancer antigen 8 (120-128)
  source 1..27: mol_type = other RNA
cacaccatcaacgaccagagccagtac

SEQ ID NO: 49979 - RNA, 27 nt, synthetic construct
  misc_feature 1..27: note = Minor histocompatibility antigen H13 (119-127)
  source 1..27: mol_type = other RNA
cacaccatcagccccttcatgaacaag

SEQ ID NO: 49980 - RNA, 42 nt, synthetic construct
  misc_feature 1..42: note = Tyrosinase (143-156)
  source 1..42: mol_type = other RNA
cacaccatcagctccgactacgtgatccccatcggcacctac

SEQ ID NO: 49981 - RNA, 27 nt, synthetic construct
  misc_feature 1..27: note = Cytoskeleton-associated protein 2 (499-507)
  source 1..27: mol_type = other RNA
cacaccatcgtggacatcctgaccatg

SEQ ID NO: 49982 - RNA, 30 nt, synthetic construct
  misc_feature 1..30: note = Cytoplasmic protein NCK2 (351-360)
  source 1..30: mol_type = other RNA
cacaccatggacgagctggtggagcactac

SEQ ID NO: 49983 - RNA, 36 nt, synthetic construct
  misc_feature 1..36: note = U3 small nucleolar RNA-associated protein 18 homolog (362-373)
  source 1..36: mol_type = other RNA
cacaccatggacttcagcccccgctccggctacttc

SEQ ID NO: 49984 - RNA, 33 nt, synthetic construct
  misc_feature 1..33: note = Queuine tRNA-ribosyltransferase subunit QTRTD1 (26-36)
  source 1..33: mol_type = other RNA
cacaccatggacatccccggctgcctgctctac

SEQ ID NO: 49985 - RNA, 27 nt, synthetic construct
  misc_feature 1..27: note = Syntaxin-18 (80-88)
  source 1..27: mol_type = other RNA
cacaccatgagcgagtacggccgcatg

SEQ ID NO: 49986 - RNA, 30 nt, synthetic construct
  misc_feature 1..30: note = Histone-lysine N-methyltransferase setd3 (279-288)
  source 1..30: mol_type = other RNA
cacaccaacggcctgatcaccacggggtac

SEQ ID NO: 49987 - RNA, 33 nt, synthetic construct
  misc_feature 1..33: note = Alpha-adducin (241-251)
  source 1..33: mol_type = other RNA
cacacccccgccggcgccgcggtgagcgccatg

SEQ ID NO: 49988 - RNA, 30 nt, synthetic construct
  misc_feature 1..30: note = Alpha-1,6-mannosylglycoprotein 6-beta-N-acetylglucosaminyltransferase B (424-433)
  source 1..30: mol_type = other RNA
cacacccccgacaacagcttcatgggcttc

SEQ ID NO: 49989 - RNA, 30 nt, synthetic construct
  misc_feature 1..30: note = Lanosterol 14-alpha demethylase (489-498)
  source 1..30: mol_type = other RNA
cacacccccgagaacccggtgatccgctac

SEQ ID NO: 49990 - RNA, 33 nt, synthetic construct
  misc_feature 1..33: note = Iroquois-class homeodomain protein IRX-5 (89-99)
  source 1..33: mol_type = other RNA
cacacccccggcatggccgggagcctgggctac

SEQ ID NO: 49991 - RNA, 27 nt, synthetic construct
  misc_feature 1..27: note = Ligand of Numb protein X 2 (443-451)
  source 1..27: mol_type = other RNA
cacacccccccgccctactacagccgc

SEQ ID NO: 49992 - RNA, 33 nt, synthetic construct
  misc_feature 1..33: note = Tensin-1 (410-420)
  source 1..33: mol_type = other RNA
cacacccagggccccctggacgggagcctctac

SEQ ID NO: 49993 - RNA, 30 nt, synthetic construct
  misc_feature 1..30: note = Succinate dehydrogenase (ubiquinone) flavoprotein subunit, mitochondrial (270-279)
  source 1..30: mol_type = other RNA
cacaccagcaccggcgacgggacggccatg

SEQ ID NO: 49994 - RNA, 27 nt, synthetic construct
  misc_feature 1..27: note = Very-long-chain (3R)-3-hydroxyacyl-CoA dehydratase 3 (185-193)
  source 1..27: mol_type = other RNA
cacaccgtggccgacatgatgtacttc

SEQ ID NO: 49995 - RNA, 27 nt, synthetic construct
  misc_feature 1..27: note = Tetratricopeptide repeat protein 38 (218-226)
  source 1..27: mol_type = other RNA
cacaccgtggcccacatccacgagatg

SEQ ID NO: 49996 - RNA, 30 nt, synthetic construct
  misc_feature 1..30: note = U3 small nucleolar RNA-associated protein 15 homolog (126-135)
  source 1..30: mol_type = other RNA
cacaccgtggacttcaccgccgacaagtac

SEQ ID NO: 49997 - RNA, 33 nt, synthetic construct
  misc_feature 1..33: note = Aprataxin (170-180)
  source 1..33: mol_type = other RNA
cacaccgtgggcgagaaggtcatcgtggacttc

SEQ ID NO: 49998 - RNA, 30 nt, synthetic construct
  misc_feature 1..30: note = Sodium-dependent phosphate transporter 1 (379-388)
  source 1..30: mol_type = other RNA
cacaccgtgcacaaggacagcggcctgtac

SEQ ID NO: 49999 - RNA, 30 nt, synthetic construct
  misc_feature 1..30: note = Heterogeneous nuclear ribonucleoprotein A1-like 2 (15-24)
  source 1..30: mol_type = other RNA
cacaccgtgaacggccacaactgcgaggtc

SEQ ID NO: 50000 - RNA, 36 nt, synthetic construct
  misc_feature 1..36: note = Melanocyte protein PMEL (285-296)
  source 1..36: mol_type = other RNA
cacacctacctggagcccggcccggtgaccgcccag

SEQ ID NO: 50001 - RNA, 30 nt, synthetic construct
  misc_feature 1..30: note = Oxidoreductase-like domain-containing protein 1 (115-124)
  source 1..30: mol_type = other RNA
cacgtggccgacgagaacctgaaggccttc

SEQ ID NO: 50002 - RNA, 30 nt, synthetic construct
  misc_feature 1..30: note = Condensin complex subunit 2 (196-205)
  source 1..30: mol_type = other RNA
cacgtggccgacggcagcgccaccgagatg

SEQ ID NO: 50003 - RNA, 30 nt, synthetic construct
  misc_feature 1..30: note = 1-phosphatidylinositol 4,5-bisphosphate phosphodiesterase beta-4 (428-437)
  source 1..30: mol_type = other RNA
cacgtggccgaggagcgcaacatccactac

SEQ ID NO: 50004 - RNA, 30 nt, synthetic construct
  misc_feature 1..30: note = Protein FAN (292-301)
  source 1..30: mol_type = other RNA
cacgtggccgagcacaccgccgagagctac

SEQ ID NO: 50005 - RNA, 27 nt, synthetic construct
  misc_feature 1..27: note = GPI-anchor transamidase (62-70)
  source 1..27: mol_type = other RNA
cacgtggccaacaccctgagcgtctac

SEQ ID NO: 50006 - RNA, 30 nt, synthetic construct
  misc_feature 1..30: note = RNA polymerase-associated protein CTR9 homolog (745-754)
  source 1..30: mol_type = other RNA
cacgtggcccccagcgacaccgtcctgatg

SEQ ID NO: 50007 - RNA, 33 nt, synthetic construct
  misc_feature 1..33: note = RNA polymerase-associated protein CTR9 homolog (745-755)
  source 1..33: mol_type = other RNA
cacgtggcccccagcgacaccgtcctgatgttc

SEQ ID NO: 50008 - RNA, 27 nt, synthetic construct
  misc_feature 1..27: note = 40S ribosomal protein S16 (76-84)
  source 1..27: mol_type = other RNA
cacgtggcccagatctacgccatccgc

SEQ ID NO: 50009 - RNA, 27 nt, synthetic construct
  misc_feature 1..27: note = F-box only protein 31 (181-189)
  source 1..27: mol_type = other RNA
cacgtggacgaccccatgcgcttcaag

SEQ ID NO: 50010 - RNA, 27 nt, synthetic construct
  misc_feature 1..27: note = tRNA wybutosine-synthesizing protein 2 homolog (192-200)
  source 1..27: mol_type = other RNA
cacgtggacaacggcatccgctacaag

SEQ ID NO: 50011 - RNA, 24 nt, synthetic construct
  misc_feature 1..24: note = P protein (222-229)
  source 1..24: mol_type = other RNA
cacgtggacagcaccctgctccag

SEQ ID NO: 50012 - RNA, 27 nt, synthetic construct
  misc_feature 1..27: note = P protein (222-230)
  source 1..27: mol_type = other RNA
cacgtggacagcaccctgctccaggtc

SEQ ID NO: 50013 - RNA, 30 nt, synthetic construct
  misc_feature 1..30: note = PRELI domain containing protein 3B (8-17)
  source 1..30: mol_type = other RNA
cacgtgttcgaccacccctgggagaccgtc

SEQ ID NO: 50014 - RNA, 30 nt, synthetic construct
  misc_feature 1..30: note = RNA polymerase II subunit A C-terminal domain phosphatase (243-252)
  source 1..30: mol_type = other RNA
cacgtgttcaccttcggcagccgcctgtac

SEQ ID NO: 50015 - RNA, 27 nt, synthetic construct
  misc_feature 1..27: note = Neuropilin-2 (221-229)
  source 1..27: mol_type = other RNA
cacgtgggccccctgatcgggaagtac

SEQ ID NO: 50016 - RNA, 27 nt, synthetic construct
  misc_feature 1..27: note = Filamin-A (138-146)
  source 1..27: mol_type = other RNA
cacgtgggcagccgcctgtactccgtc

SEQ ID NO: 50017 - RNA, 27 nt, synthetic construct
  misc_feature 1..27: note = Endoribonuclease Dicer (1769-1777)
  source 1..27: mol_type = other RNA
cacgtgatcgacgacttcgtccagttc

SEQ ID NO: 50018 - RNA, 33 nt, synthetic construct
  misc_feature 1..33: note = TRAF2 and NCK-interacting protein kinase (370-380)
  source 1..33: mol_type = other RNA
cacgtgatcgacgtcgacagcggcaactcctac

SEQ ID NO: 50019 - RNA, 33 nt, synthetic construct
  misc_feature 1..33: note = Activity-dependent neuroprotector homeobox protein (210-220)
  source 1..33: mol_type = other RNA
cacgtgatcgaggaccacgagcgcatcggctac

SEQ ID NO: 50020 - RNA, 27 nt, synthetic construct
  misc_feature 1..27: note = Interferon-induced helicase C domain-containing protein 1 (921-929)
  source 1..27: mol_type = other RNA
cacgtgatcgagaagatgcaccacgtc

SEQ ID NO: 50021 - RNA, 33 nt, synthetic construct
  misc_feature 1..33: note = Cytochrome b-c1 complex subunit 2, mitochondrial (172-182)
  source 1..33: mol_type = other RNA
cacgtgatcgagaacctgcacgccgccgcgtac

SEQ ID NO: 50022 - RNA, 27 nt, synthetic construct
  misc_feature 1..27: note = Myomegalin (2179-2187)
  source 1..27: mol_type = other RNA
cacgtgatcggccacatcgacgactac

SEQ ID NO: 50023 - RNA, 33 nt, synthetic construct
  misc_feature 1..33: note = Protein bicaudal C homolog 1 (746-756)
  source 1..33: mol_type = other RNA
cacgtgatcggcaaggggggcaacaacatcaag

SEQ ID NO: 50024 - RNA, 30 nt, synthetic construct
  misc_feature 1..30: note = 116 kDa U5 small nuclear ribonucleoprotein component (627-636)
  source 1..30: mol_type = other RNA
cacgtgatcctgggcaccggggagctctac

SEQ ID NO: 50025 - RNA, 30 nt, synthetic construct
  misc_feature 1..30: note = Voltage-gated potassium channel subunit beta-1 (216-225)
  source 1..30: mol_type = other RNA
cacgtgatcaaccagggcatggccatgtac

SEQ ID NO: 50026 - RNA, 27 nt, synthetic construct
  misc_feature 1..27: note = Regulator of telomere elongation helicase 1 (740-748)
  source 1..27: mol_type = other RNA
cacgtgatccgcgacgtcgcccagttc

SEQ ID NO: 50027 - RNA, 30 nt, synthetic construct
  misc_feature 1..30: note = BTB/POZ domain-containing protein KCTD1 (197-206)
  source 1..30: mol_type = other RNA
cacgtgatccgcttccccctgaacggctac

SEQ ID NO: 50028 - RNA, 36 nt, synthetic construct
  misc_feature 1..36: note = DNA-directed RNA polymerase II subunit RPB1 (1384-1395)
  source 1..36: mol_type = other RNA
cacgtgatcagcttcgacggctcctacgtcaactac

SEQ ID NO: 50029 - RNA, 30 nt, synthetic construct
  misc_feature 1..30: note = Disco-interacting protein 2 homolog C (561-570)
  source 1..30: mol_type = other RNA
cacgtgatcagcatcccctactccctgatg

SEQ ID NO: 50030 - RNA, 27 nt, synthetic construct
  misc_feature 1..27: note = E3 SUMO-protein ligase RanBP2 (2985-2993)
  source 1..27: mol_type = other RNA
cacgtgatcaccaagaccatggagctg

SEQ ID NO: 50031 - RNA, 30 nt, synthetic construct
  misc_feature 1..30: note = 40S ribosomal protein S4, Y isoform 1 (208-217)
  source 1..30: mol_type = other RNA
cacgtgaaggacgccaacggcaacagcttc

SEQ ID NO: 50032 - RNA, 30 nt, synthetic construct
  misc_feature 1..30: note = Nodal modulator 3 (252-261)
  source 1..30: mol_type = other RNA
cacgtgctgggcaccatcaccacggacaag

SEQ ID NO: 50033 - RNA, 30 nt, synthetic construct
  misc_feature 1..30: note = Pecanex-like protein 1 (113-122)
  source 1..30: mol_type = other RNA
cacgtgatggacgacggcaccaacgagtac

SEQ ID NO: 50034 - RNA, 30 nt, synthetic construct
  misc_feature 1..30: note = Pleckstrin homology domain-containing family G member 3 (497-506)
  source 1..30: mol_type = other RNA
cacgtgatggacagccacgtctccgagcgc

SEQ ID NO: 50035 - RNA, 33 nt, synthetic construct
  misc_feature 1..33: note = Elongation factor G, mitochondrial (445-455)
  source 1..33: mol_type = other RNA
cacgtgcccgacccggtcatcagcatcgccatg

SEQ ID NO: 50036 - RNA, 27 nt, synthetic construct
  misc_feature 1..27: note = Probable phospholipid-transporting ATPase IIB (501-509)
  source 1..27: mol_type = other RNA
cacgtgcgcgacagctactcccagatg

SEQ ID NO: 50037 - RNA, 27 nt, synthetic construct
  misc_feature 1..27: note = Sideroflexin-1 (171-179)
  source 1..27: mol_type = other RNA
cacgtgagccccctgatcggccgcttc

SEQ ID NO: 50038 - RNA, 27 nt, synthetic construct
  misc_feature 1..27: note = Long-chain-fatty-acid-CoA ligase 3 (4-12)
  source 1..27: mol_type = other RNA
cacgtgagctccaagcccagcaccatg

SEQ ID NO: 50039 - RNA, 33 nt, synthetic construct
  misc_feature 1..33: note = Zinc finger protein 451 (549-559)
  source 1..33: mol_type = other RNA
cacgtgaccgagttccacaacggccaccgctac

SEQ ID NO: 50040 - RNA, 27 nt, synthetic construct
  misc_feature 1..27: note = Deoxyribose-phosphate aldolase (322-330)
  source 1..27: mol_type = other RNA
cacgtgaccggccgctacgccgcctac

SEQ ID NO: 50041 - RNA, 27 nt, synthetic construct
  misc_feature 1..27: note = Phosphoribosylformylglycinamidine synthase (342-350)
  source 1..27: mol_type = other RNA
cacgtggtcgccggcaccgccgggtac

SEQ ID NO: 50042 - RNA, 30 nt, synthetic construct
  misc_feature 1..30: note = Jouberin (369-378)
  source 1..30: mol_type = other RNA
cacgtggtcgacgagcacaccggccagtac

SEQ ID NO: 50043 - RNA, 27 nt, synthetic construct
  misc_feature 1..27: note = Nephrocystin-4 (1128-1136)
  source 1..27: mol_type = other RNA
cacgtggtcgaccaggtgttccgcttc

SEQ ID NO: 50044 - RNA, 33 nt, synthetic construct
  misc_feature 1..33: note = Tetratricopeptide repeat protein 39B (542-552)
  source 1..33: mol_type = other RNA
cacgtggtcgagagcgagaagctgctcaagtac

SEQ ID NO: 50045 - RNA, 30 nt, synthetic construct
  misc_feature 1..30: note = Dedicator of cytokinesis protein 10 (121-130)
  source 1..30: mol_type = other RNA
cacgtggtcaactacaagtacgagcagtac

SEQ ID NO: 50046 - RNA, 27 nt, synthetic construct
  misc_feature 1..27: note = Large proline-rich protein BAG6 (350-358)
  source 1..27: mol_type = other RNA
cacgtggtccgccccatgagccactac

SEQ ID NO: 50047 - RNA, 27 nt, synthetic construct
  misc_feature 1..27: note = HEAT repeat-containing protein 5A (373-381)
  source 1..27: mol_type = other RNA
cacgtggtcagctccgtgagctccttc

SEQ ID NO: 50048 - RNA, 36 nt, synthetic construct
  misc_feature 1..36: note = WD repeat-containing protein 74 (10-21)
  source 1..36: mol_type = other RNA
cacgtgtgggtcggcaccgagaccgggatcctgaag

SEQ ID NO: 50049 - RNA, 33 nt, synthetic construct
  misc_feature 1..33: note = Vesicle-associated membrane protein 7 (159-169)
  source 1..33: mol_type = other RNA
cacgtgtacgaggagccccaggcccactactac

SEQ ID NO: 50050 - RNA, 30 nt, synthetic construct
  misc_feature 1..30: note = Regulator of chromosome condensation (291-300)
  source 1..30: mol_type = other RNA
cacgtgtacggcttcgggctgagcaactac

SEQ ID NO: 50051 - RNA, 27 nt, synthetic construct
  misc_feature 1..27: note = Transmembrane protein 209 (513-521)
  source 1..27: mol_type = other RNA
cacgtgtacaacctgcccaagggccgc

SEQ ID NO: 50052 - RNA, 30 nt, synthetic construct
  misc_feature 1..30: note = Bcl-2 homologous antagonist/killer (141-150)
  source 1..30: mol_type = other RNA
cacgtgtaccagcacggcctgaccgggttc

SEQ ID NO: 50053 - RNA, 27 nt, synthetic construct
  misc_feature 1..27: note = Little elongation complex subunit 1 (1936-1944)
  source 1..27: mol_type = other RNA
cacgtgtacgtcggcaacatcagcaag

SEQ ID NO: 50054 - RNA, 30 nt, synthetic construct
  misc_feature 1..30: note = Neutral amino acid transporter B(0) (523-532)
  source 1..30: mol_type = other RNA
cactaccgcggccccgccggggacgccacc

SEQ ID NO: 50055 - RNA, 30 nt, synthetic construct
  misc_feature 1..30: note = UPF0568 protein C14orf166 (230-239)
  source 1..30: mol_type = other RNA
atcgccgaccccaagaccgaccaccgcctg

SEQ ID NO: 50056 - RNA, 27 nt, synthetic construct
  misc_feature 1..27: note = Endoplasmin (212-220)
  source 1..27: mol_type = other RNA
atcgccgacccccgcggcaacaccctg

SEQ ID NO: 50057 - RNA, 36 nt, synthetic construct
  misc_feature 1..36: note = 40S ribosomal protein S19 (134-145)
  source 1..36: mol_type = other RNA
atcgccggccaggtggccgcggccaacaagaagcac

SEQ ID NO: 50058 - RNA, 27 nt, synthetic construct
  misc_feature 1..27: note = Tensin-1 (1325-1333)
  source 1..27: mol_type = other RNA
atcgccagccccggctccccgagcctg

SEQ ID NO: 50059 - RNA, 27 nt, synthetic construct
  misc_feature 1..27: note = Hemicentin-1 (4090-4098)
  source 1..27: mol_type = other RNA
atcgccgtggacaagcccatcaccctg

SEQ ID NO: 50060 - RNA, 27 nt, synthetic construct
  misc_feature 1..27: note = Uncharacterized protein KIAA1210 (412-420)
  source 1..27: mol_type = other RNA
atcgccgtggagcgcgtcatcagcgtg

SEQ ID NO: 50061 - RNA, 27 nt, synthetic construct
  misc_feature 1..27: note = Protein SDE2 homolog (286-294)
  source 1..27: mol_type = other RNA
atcgacaaggagaccatcgacctgctc

SEQ ID NO: 50062 - RNA, 39 nt, synthetic construct
  misc_feature 1..39: note = Syndecan-3 (293-305)
  source 1..39: mol_type = other RNA
atcgacagcggctccagcgccgcccagctgccccagaag

SEQ ID NO: 50063 - RNA, 30 nt, synthetic construct
  misc_feature 1..30: note = Cullin-3 (721-730)
  source 1..30: mol_type = other RNA
atcgagggcctgatcgagcgcgagtacctc

SEQ ID NO: 50064 - RNA, 24 nt, synthetic construct
  misc_feature 1..24: note Dolichyl-diphosphooligosaccharide-proteinosyltransferase subunit 1 (381-388)
  source 1..24: mol_type = other RNA
atcgagatcgacagcccctacgag

SEQ ID NO: 50065 - RNA, 33 nt, synthetic construct
  misc_feature 1..33: note = Complex I assembly factor TMEM126B, mitochondrial (24-34)
  source 1..33: mol_type = other RNA
atcgagatcatcgagaagaacttcgactacctg

SEQ ID NO: 50066 - RNA, 30 nt, synthetic construct
  misc_feature 1..30: note = Copper transport protein ATOX1 (42-51)
  source 1..30: mol_type = other RNA
atcgagagcgagcactccatggacaccctg

SEQ ID NO: 50067 - RNA, 33 nt, synthetic construct
  misc_feature 1..33: note = Copper transport protein ATOX1 (42-52)
  source 1..33: mol_type = other RNA
atcgagagcgagcactccatggacaccctgctc

SEQ ID NO: 50068 - RNA, 24 nt, synthetic construct
  misc_feature 1..24: note = N-acyl-aromatic-L-amino acid amidohydrolase (carboxylate-forming) (191-198)
  source 1..24: mol_type = other RNA
atcttcagccgcatgcggaccctg

SEQ ID NO: 50069 - RNA, 30 nt, synthetic construct
  misc_feature 1..30: note = Cadherin-19 (91-100)
  source 1..30: mol_type = other RNA
atcatcgacgagcgcaccggcgacatctac

SEQ ID NO: 50070 - RNA, 27 nt, synthetic construct
  misc_feature 1..27: note = 40S ribosomal protein S17 (95-103)
  source 1..27: mol_type = other RNA
atcatcgaggtggaccccgacaccaag

SEQ ID NO: 50071 - RNA, 30 nt, synthetic construct
  misc_feature 1..30: note = FACT complex subunit SSRP1 (30-39)
  source 1..30: mol_type = other RNA
atcatcttcaagaacagcaagaccggcaag

SEQ ID NO: 50072 - RNA, 27 nt, synthetic construct
  misc_feature 1..27: note = Neuron navigator 2 (2224-2232)
  source 1..27: mol_type = other RNA
atcatcctggacaacctccaccacgtg

SEQ ID NO: 50073 - RNA, 42 nt, synthetic construct
  misc_feature 1..42: note = Putative heat shock 70 kDa protein 7 (30-43)
  source 1..42: mol_type = other RNA
atcctggccaacgaccagggcaaccgcaccacccccagctac

SEQ ID NO: 50074 - RNA, 30 nt, synthetic construct
  misc_feature 1..30: note = Fer-1-like protein 5 (1201-1210)
  source 1..30: mol_type = other RNA
atcctggccagctgcgagctcatcctgcag

SEQ ID NO: 50075 - RNA, 30 nt, synthetic construct
  misc_feature 1..30: note = U6 snRNA-associated Sm-like protein LSm8 (16-25)
  source 1..30: mol_type = other RNA
atcctggacgagagccacgagcgcgtgttc

SEQ ID NO: 50076 - RNA, 30 nt, synthetic construct
  misc_feature 1..30: note = Cleft lip and palate transmembrane protein 1 (410-419)
  source 1..30: mol_type = other RNA
atcctggacaacgagaccaacttcgtggtc

SEQ ID NO: 50077 - RNA, 27 nt, synthetic construct
  misc_feature 1..27: note = Vesicle transport protein USE1 (249-257)
  source 1..27: mol_type = other RNA
atcctgttcatccgcatcatgcccaag

SEQ ID NO: 50078 - RNA, 30 nt, synthetic construct
  misc_feature 1..30: note = TELO2-interacting protein 1 homolog (52-61)
  source 1..30: mol_type = other RNA
atcctgttccccctccgcttcaccctgaag

SEQ ID NO: 50079 - RNA, 51 nt, synthetic construct
  misc_feature 1..51: note = Transforming growth factor beta receptor type 3 (374-390)
  source 1..51: mol_type = other RNA
atcctgctcgaccccggcgccctgccggccctgcagaacccccccatccgc

SEQ ID NO: 50080 - RNA, 33 nt, synthetic construct
  misc_feature 1..33: note = Serine/threonine-protein kinase Sgk1 (323-333)
  source 1..33: mol_type = other RNA
atcctgctcgacagccagggccacatcgtgctg

SEQ ID NO: 50081 - RNA, 33 nt, synthetic construct
  misc_feature 1..33: note = Eukaryotic translation initiation factor 3 subunit A (542-552)
  source 1..33: mol_type = other RNA
atcctgcaggagaaggaggagcagcaccagctc

SEQ ID NO: 50082 - RNA, 27 nt, synthetic construct
  misc_feature 1..27: note = Inositol-trisphosphate 3-kinase B (133-141)
  source 1..27: mol_type = other RNA
atcctgcagcgcgagctccagaacgtg

SEQ ID NO: 50083 - RNA, 30 nt, synthetic construct
  misc_feature 1..30: note = Myotubularin-related protein 6 isoform X4 (104-113)
  source 1..30: mol_type = other RNA
atcctgaccaaggagctcctgcacagcgtg

SEQ ID NO: 50084 - RNA, 39 nt, synthetic construct
  misc_feature 1..39: note = Sodium/potassium/calcium exchanger 5 (18-30)
  source 1..39: mol_type = other RNA
atcctgtgggccaccgcccacctccccctgagcggcacc

SEQ ID NO: 50085 - RNA, 33 nt, synthetic construct
  misc_feature 1..33: note = Chromosome transmission fidelity protein 8 homolog (58-68)
  source 1..33: mol_type = other RNA
atcctgtacggcaagatcatccacctcgagaag

SEQ ID NO: 50086 - RNA, 30 nt, synthetic construct
  misc_feature 1..30: note = 40S ribosomal protein S3 (188-197)
  source 1..30: mol_type = other RNA
atcatgctgccctgggacccgaccggcaag

SEQ ID NO: 50087 - RNA, 24 nt, synthetic construct
  misc_feature 1..24: note = Vimentin (182-189)
  source 1..24: mol_type = other RNA
atcatgcgcctgcgggagaagctc

SEQ ID NO: 50088 - RNA, 36 nt, synthetic construct
  misc_feature 1..36: note = MAGUK p55 subfamily member 2 (395-406)
  source 1..36: mol_type = other RNA
atcatgtgggaccccgaccgctacggcaccaccgtg

SEQ ID NO: 50089 - RNA, 27 nt, synthetic construct
  misc_feature 1..27: note = Bromodomain adjacent to zinc finger domain protein 1A (730-738)
  source 1..27: mol_type = other RNA
atcaactgcgtgacccgcgagcccctg

SEQ ID NO: 50090 - RNA, 27 nt, synthetic construct
  misc_feature 1..27: note = Sarcospan (117-125)
  source 1..27: mol_type = other RNA
atccagttcagcatgaagctgctctac

SEQ ID NO: 50091 - RNA, 30 nt, synthetic construct
  misc_feature 1..30: note = Catalase (347-356)
  source 1..30: mol_type = other RNA
atccagtacagcggcgaggtgcgccggttc

SEQ ID NO: 50092 - RNA, 51 nt, synthetic construct
  misc_feature 1..51: note = Calmodulin (126-142)
  source 1..51: mol_type = other RNA
atccgcgaggccgacatcgacggcgacgggcaggtgaactacgaggagttc

SEQ ID NO: 50093 - RNA, 27 nt, synthetic construct
  misc_feature 1..27: note = 60S ribosomal protein L32 (21-29)
  source 1..27: mol_type = other RNA
atccgccaccagagcgaccggtacgtg

SEQ ID NO: 50094 - RNA, 27 nt, synthetic construct
  misc_feature 1..27: note = ATP-citrate synthase (6-14)
  source 1..27: mol_type = other RNA
atcagcgagcagaccggcaaggagctg

SEQ ID NO: 50095 - RNA, 27 nt, synthetic construct
  misc_feature 1..27: note = XAGE1D protein (105-113)
  source 1..27: mol_type = other RNA
atcagccagacccccggcatcaacctg

SEQ ID NO: 50096 - RNA, 24 nt, synthetic construct
  misc_feature 1..24: note = Metalloproteinase inhibitor 4 (52-59)
  source 1..24: mol_type = other RNA
atcagctccgagaaggtggtcccc

SEQ ID NO: 50097 - RNA, 36 nt, synthetic construct
  misc_feature 1..36: note = Transmembraneoprotein NMB (483-494)
  source 1..36: mol_type = other RNA
atcagcgtgcccgaccgcgacccggcctcccccctg

SEQ ID NO: 50098 - RNA, 33 nt, synthetic construct
  misc_feature 1..33: note = 40S ribosomal protein S18 (30-40)
  source 1..33: mol_type = other RNA
atcaccgccatcaagggcgtggggcgccggtac

SEQ ID NO: 50099 - RNA, 27 nt, synthetic construct
  misc_feature 1..27: note = Melanoma-associated antigen D4 (549-557)
  source 1..27: mol_type = other RNA
atcaccgacgacttcgtgaagcagaag

SEQ ID NO: 50100 - RNA, 45 nt, synthetic construct
  misc_feature 1..45: note = Melanocyte protein PMEL (216-230)
  source 1..45: mol_type = other RNA
atcaccgaccaggtgcccttcagcgtctccgtgagccagctgcgc

SEQ ID NO: 50101 - RNA, 33 nt, synthetic construct
  misc_feature 1..33: note = Voltage-dependent L-type calcium channel subunit alpha-1C (1300-1310)
  source 1..33: mol_type = other RNA
atcaccgagaacgccgaggagaacagccgcatc

SEQ ID NO: 50102 - RNA, 30 nt, synthetic construct
  misc_feature 1..30: note = Beta-adrenergic receptor kinase 2 (53-62)
  source 1..30: mol_type = other RNA
atcaccttcgacaagatcttcaaccagaag

SEQ ID NO: 50103 - RNA, 39 nt, synthetic construct
  misc_feature 1..39: note = Galectin-3 (132-144)
  source 1..39: mol_type = other RNA
atcaccatcctgggcaccgtgaagcccaacgccaaccgc

SEQ ID NO: 50104 - RNA, 45 nt, synthetic construct
  misc_feature 1..45: note = Galectin-3 (132-146)
  source 1..45: mol_type = other RNA
atcaccatcctgggcaccgtgaagcccaacgccaaccgcatcgcc

SEQ ID NO: 50105 - RNA, 27 nt, synthetic construct
  misc_feature 1..27: note = Catalase (42-50)
  source 1..27: mol_type = other RNA
atcaccgtgggcccccgcgggccgctg

SEQ ID NO: 50106 - RNA, 27 nt, synthetic construct
  misc_feature 1..27: note = Dipeptidyl peptidase 4 (185-193)
  source 1..27: mol_type = other RNA
atcacctggaccggcaaggaggacatc

SEQ ID NO: 50107 - RNA, 33 nt, synthetic construct
  misc_feature 1..33: note = Galectin-8 (91-101)
  source 1..33: mol_type = other RNA
atcacctacgacacccccttcaagcgcgagaag

SEQ ID NO: 50108 - RNA, 36 nt, synthetic construct
  misc_feature 1..36: note = Proteasome subunit alpha type-7 (133-144)
  source 1..36: mol_type = other RNA
atcgtgggcttcgacttcgacgggaccccccgcctg

SEQ ID NO: 50109 - RNA, 27 nt, synthetic construct
  misc_feature 1..27: note = F-box only protein 11 (19-27)
  source 1..27: mol_type = other RNA
atcgtgcacaccaacttcgtcgagaag

SEQ ID NO: 50110 - RNA, 27 nt, synthetic construct
  misc_feature 1..27: note = Protein SMG5 (881-889)
  source 1..27: mol_type = other RNA
atcgtgatcatcccccgcaccgtcatc

SEQ ID NO: 50111 - RNA, 39 nt, synthetic construct
  misc_feature 1..39: note = Zinc finger CCHC domain-containing protein 10 (33-45)
  source 1..39: mol_type = other RNA
atcgtgatccgcgacagcgtcgcccaggccggcctgaag

SEQ ID NO: 50112 - RNA, 30 nt, synthetic construct
  misc_feature 1..30: note = Teneurin-4 (347-356)
  source 1..30: mol_type = other RNA
atcgtgatcagcgccaccctggtcatcctc

SEQ ID NO: 50113 - RNA, 27 nt, synthetic construct
  misc_feature 1..27: note = U4/U6 small nuclear ribonucleoprotein Prp31 (462-470)
  source 1..27: mol_type = other RNA
atcgtgaacccccaggccgccgagaag

SEQ ID NO: 50114 - RNA, 27 nt, synthetic construct
  misc_feature 1..27: note = P antigen family member 5 (47-55)
  source 1..27: mol_type = other RNA
atcgtgcagcagcccaccgaggagaag

SEQ ID NO: 50115 - RNA, 30 nt, synthetic construct
  misc_feature 1..30: note = Carbohydrate sulfotransferase 9 (266-275)
  source 1..30: mol_type = other RNA
atctacacccgcctgaacacctacacgaag

SEQ ID NO: 50116 - RNA, 39 nt, synthetic construct
  misc_feature 1..39: note = Cap-specific mRNAucleoside-2'-O-)-methyltransferase 1 (72-84)
  source 1..39: mol_type = other RNA
aaggccgacagcctggtggagggcacctccagccgctac

SEQ ID NO: 50117 - RNA, 27 nt, synthetic construct
  misc_feature 1..27: note = Antigen KI-67 (793-801)
  source 1..27: mol_type = other RNA
aaggccgacgtggaggaggagttcctg

SEQ ID NO: 50118 - RNA, 30 nt, synthetic construct
  misc_feature 1..30: note = Coatomer subunit zeta-1 (19-28)
  source 1..30: mol_type = other RNA
aaggccttcgagaagaacatcttcaacaag

SEQ ID NO: 50119 - RNA, 33 nt, synthetic construct
  misc_feature 1..33: note = Zinc finger and SCAN domain-containing protein 21 (278-288)
  source 1..33: mol_type = other RNA
aaggccttcggccagagctccgacctgctcaag

SEQ ID NO: 50120 - RNA, 27 nt, synthetic construct
  misc_feature 1..27: note = Estradiol 17-beta-dehydrogenase 11 (153-161)
  source 1..27: mol_type = other RNA
aaggccttcctgcccgccatgaccaag

SEQ ID NO: 50121 - RNA, 30 nt, synthetic construct
  misc_feature 1..30: note = Antigen KI-67 (828-837)
  source 1..30: mol_type = other RNA
aaggccttcatgggcacccccgtgcagaag

SEQ ID NO: 50122 - RNA, 27 nt, synthetic construct
  misc_feature 1..27: note = Zinc finger protein 7 (98-106)
  source 1..27: mol_type = other RNA
aaggccttcagccagtccagctccctg

SEQ ID NO: 50123 - RNA, 33 nt, synthetic construct
  misc_feature 1..33: note = Zinc finger protein 430 (519-529)
  source 1..33: mol_type = other RNA
aaggccttcagccagtccagcaccctgaccaag

SEQ ID NO: 50124 - RNA, 30 nt, synthetic construct
  misc_feature 1..30: note = Xaa-Pro dipeptidase (484-493)
  source 1..30: mol_type = other RNA
aaggccttcacccccttcagcggcccgaag

SEQ ID NO: 50125 - RNA, 33 nt, synthetic construct
  misc_feature 1..33: note = Zinc finger protein 721 (184-194)
  source 1..33: mol_type = other RNA
aaggccttcaccagctccaccacgctgaccaag

SEQ ID NO: 50126 - RNA, 27 nt, synthetic construct
  misc_feature 1..27: note = Dynactin subunit 1 (141-149)
  source 1..27: mol_type = other RNA
aaggcccacgccaaggcgatcgagatg

SEQ ID NO: 50127 - RNA, 27 nt, synthetic construct
  misc_feature 1..27: note = Histone-binding protein RBBP7 (263-271)
  source 1..27: mol_type = other RNA
aaggccatcttcaccggccacagcgcc

SEQ ID NO: 50128 - RNA, 27 nt, synthetic construct
  misc_feature 1..27: note = Protein ECT2 (595-603)
  source 1..27: mol_type = other RNA
aaggccatcggcagcctgaaggaggtg

SEQ ID NO: 50129 - RNA, 27 nt, synthetic construct
  misc_feature 1..27: note = Nitrogen permease regulator 3-like protein (253-261)
  source 1..27: mol_type = other RNA
aaggccatccgcccctaccacgccctg

SEQ ID NO: 50130 - RNA, 27 nt, synthetic construct
  misc_feature 1..27: note = Elongation factor 1-gamma (193-201)
  source 1..27: mol_type = other RNA
aaggccaaggaccccttcgcccacctg

SEQ ID NO: 50131 - RNA, 33 nt, synthetic construct
  misc_feature 1..33: note = Dynamin-like 120 kDa protein, mitochondrial (154-164)
  source 1..33: mol_type = other RNA
aaggccctgcccagctccgaggacctcgtgaag

SEQ ID NO: 50132 - RNA, 30 nt, synthetic construct
  misc_feature 1..30: note = Annexin A1 (98-107)
  source 1..30: mol_type = other RNA
aaggccctgaccggccacctcgaggaggtg

SEQ ID NO: 50133 - RNA, 27 nt, synthetic construct
  misc_feature 1..27: note = Phosphoinositide 3-kinase regulatory subunit 4 (572-580)
  source 1..27: mol_type = other RNA
aaggccaacgacgtgctgctcagccac

SEQ ID NO: 50134 - RNA, 27 nt, synthetic construct
  misc_feature 1..27: note = UDP-glucose:glycoprotein glucosyltransferase 2 (1135-1143)
  source 1..27: mol_type = other RNA
aaggccaaccccggcgcctggatcctg

SEQ ID NO: 50135 - RNA, 27 nt, synthetic construct
  misc_feature 1..27: note = Importin subunit alpha-1 (486-494)
  source 1..27: mol_type = other RNA
aaggccagcctgtccctcatcgagaag

SEQ ID NO: 50136 - RNA, 27 nt, synthetic construct
  misc_feature 1..27: note = Ectonucleoside triphosphate diphosphohydrolase 6 (156-164)
  source 1..27: mol_type = other RNA
aaggccacccccctggtgctcaaggcc

SEQ ID NO: 50137 - RNA, 27 nt, synthetic construct
  misc_feature 1..27: note = Protein FAM161A (564-572)
  source 1..27: mol_type = other RNA
aaggcctacgacagccaccagtccctg

SEQ ID NO: 50138 - RNA, 33 nt, synthetic construct
  misc_feature 1..33: note = Gamma-soluble NSF attachment protein (76-86)
  source 1..33: mol_type = other RNA
aaggcctacgagcaggccggcatgatgctgaag

SEQ ID NO: 50139 - RNA, 27 nt, synthetic construct
  misc_feature 1..27: note = Cell division cycle protein 23 homolog (85-93)
  source 1..27: mol_type = other RNA
aaggcctacttcgacgtgaaggagtac

SEQ ID NO: 50140 - RNA, 33 nt, synthetic construct
  misc_feature 1..33: note = 28S ribosomal protein S29, mitochondrial (321-331)
  source 1..33: mol_type = other RNA
aaggcctacctgccccaggagctcctgggcaag

SEQ ID NO: 50141 - RNA, 27 nt, synthetic construct
  misc_feature 1..27: note = NF-kappa-B inhibitor zeta (545-553)
  source 1..27: mol_type = other RNA
aaggcctacaacggcaacaccgccctg

SEQ ID NO: 50142 - RNA, 27 nt, synthetic construct
  misc_feature 1..27: note = Protein phosphatase Slingshot homolog 1 (418-426)
  source 1..27: mol_type = other RNA
aaggcctacaactacgtgaagcagaag

SEQ ID NO: 50143 - RNA, 27 nt, synthetic construct
  misc_feature 1..27: note = Integrator complex subunit 11 (122-130)
  source 1..27: mol_type = other RNA
aaggcctactacgccggccacgtgctg

SEQ ID NO: 50144 - RNA, 27 nt, synthetic construct
  misc_feature 1..27: note = Switch-associated protein 70 (278-286)
  source 1..27: mol_type = other RNA
aagtgcttcgacaagaccttcgagatc

SEQ ID NO: 50145 - RNA, 30 nt, synthetic construct
  misc_feature 1..30: note = Zinc finger protein 860 (39-48)
  source 1..30: mol_type = other RNA
aagtgcctggaccccacccagcgcgccctc

SEQ ID NO: 50146 - RNA, 30 nt, synthetic construct
  misc_feature 1..30: note = Keratin, type II cytoskeletal 1 (289-298)
  source 1..30: mol_type = other RNA
aaggacgtggacggcgcctacatgaccaag

SEQ ID NO: 50147 - RNA, 30 nt, synthetic construct
  misc_feature 1..30: note = Little elongation complex subunit 1 (521-530)
  source 1..30: mol_type = other RNA
aaggaggccgcccccggcaagagcgagctg

SEQ ID NO: 50148 - RNA, 30 nt, synthetic construct
  misc_feature 1..30: note = Rho guanine nucleotide exchange factor 40 (405-414)
  source 1..30: mol_type = other RNA
aaggaggacgccagccaccaggaggccctg

SEQ ID NO: 50149 - RNA, 27 nt, synthetic construct
  misc_feature 1..27: note = Ras-related protein Ral-A (118-126)
  source 1..27: mol_type = other RNA
aaggaggacgagaacgtgcccttcctg

SEQ ID NO: 50150 - RNA, 27 nt, synthetic construct
  misc_feature 1..27: note = DNA ligase 3 (389-397)
  source 1..27: mol_type = other RNA
aaggaggacgagcagcagcaggccctg

SEQ ID NO: 50151 - RNA, 27 nt, synthetic construct
  misc_feature 1..27: note = Protein SOGA1 (625-633)
  source 1..27: mol_type = other RNA
aaggaggaccagcagcgcgccctgctc

SEQ ID NO: 50152 - RNA, 27 nt, synthetic construct
  misc_feature 1..27: note Dolichyl-diphosphooligosaccharide-proteinosyltransferase subunit 2 (229-237)
  source 1..27: mol_type = other RNA
aaggaggaccaggtgatccagctgatg

SEQ ID NO: 50153 - RNA, 30 nt, synthetic construct
  misc_feature 1..30: note = DNA replication licensing factor MCM7 (259-268)
  source 1..30: mol_type = other RNA
aaggaggacgtgaacgaggccatccgcctg

SEQ ID NO: 50154 - RNA, 30 nt, synthetic construct
  misc_feature 1..30: note = Spermine synthase (169-178)
  source 1..30: mol_type = other RNA
aaggaggactacaccggcaaggacgtgctg

SEQ ID NO: 50155 - RNA, 27 nt, synthetic construct
  misc_feature 1..27: note = Integrin alpha-7 (1092-1100)
  source 1..27: mol_type = other RNA
aaggaggagaagaccggcaccatcctg

SEQ ID NO: 50156 - RNA, 27 nt, synthetic construct
  misc_feature 1..27: note = Eukaryotic translation initiation factor 3 subunit A (105-113)
  source 1..27: mol_type = other RNA
aaggaggagagccagcagatggtgctg

SEQ ID NO: 50157 - RNA, 39 nt, synthetic construct
  misc_feature 1..39: note = Solute carrier family 43 member 3 (268-280)
  source 1..39: mol_type = other RNA
aaggaggagacccccggcgccgggcagaagcaggagctg

SEQ ID NO: 50158 - RNA, 27 nt, synthetic construct
  misc_feature 1..27: note = Ras-related protein Rab-17 (148-156)
  source 1..27: mol_type = other RNA
aaggagttcgccgacagccagaagctg

SEQ ID NO: 50159 - RNA, 36 nt, synthetic construct
  misc_feature 1..36: note = Exportin-1 (1023-1034)
  source 1..36: mol_type = other RNA
aaggagttcgccggcgaggacaccagcgacctgttc

SEQ ID NO: 50160 - RNA, 24 nt, synthetic construct
  misc_feature 1..24: note = Heat shock protein HSP 90-alpha (656-663)
  source 1..24: mol_type = other RNA
aaggagttcgagggcaagaccctg

SEQ ID NO: 50161 - RNA, 27 nt, synthetic construct
  misc_feature 1..27: note = Protein phosphatase Slingshot homolog 1 (292-300)
  source 1..27: mol_type = other RNA
aaggagttcatcgacaacgagatgctg

SEQ ID NO: 50162 - RNA, 30 nt, synthetic construct
  misc_feature 1..30: note = Oxidative stress-induced growth inhibitor 1 (196-205)
  source 1..30: mol_type = other RNA
aaggagcacgccatcccccacgtggtcctg

SEQ ID NO: 50163 - RNA, 27 nt, synthetic construct
  misc_feature 1..27: note = Trophinin (105-113)
  source 1..27: mol_type = other RNA
aaggagatcgacaagcagagctccctg

SEQ ID NO: 50164 - RNA, 30 nt, synthetic construct
  misc_feature 1..30: note = Heat shock 70 kDa protein 4 (766-775)
  source 1..30: mol_type = other RNA
aaggagatcgaggccaagatcaaggagctg

SEQ ID NO: 50165 - RNA, 27 nt, synthetic construct
  misc_feature 1..27: note = WASH complex subunit 7 (678-686)
  source 1..27: mol_type = other RNA
aaggagatcgagaaggacctgcgcctc

SEQ ID NO: 50166 - RNA, 30 nt, synthetic construct
  misc_feature 1..30: note = THO complex subunit 5 homolog (217-226)
  source 1..30: mol_type = other RNA
aaggagatcgaggtgaagaaggagtacctg

SEQ ID NO: 50167 - RNA, 30 nt, synthetic construct
  misc_feature 1..30: note = Calcium/calmodulin-dependent protein kinase type IV (135-144)
  source 1..30: mol_type = other RNA
aaggagatcttcgagacccccaccgagatc

SEQ ID NO: 50168 - RNA, 33 nt, synthetic construct
  misc_feature 1..33: note = Kinesin-like protein KIF2C (653-663)
  source 1..33: mol_type = other RNA
aaggagatcatccagcagggccccgactggctg

SEQ ID NO: 50169 - RNA, 30 nt, synthetic construct
  misc_feature 1..30: note = Spectrin beta chain, non-erythrocytic 1 (924-933)
  source 1..30: mol_type = other RNA
aaggagatcaaggcccagcaggacaagctg

SEQ ID NO: 50170 - RNA, 27 nt, synthetic construct
  misc_feature 1..27: note = Eukaryotic translation initiation factor 3 subunit E (29-37)
  source 1..27: mol_type = other RNA
aaggagatctacaacgagaaggagctg

SEQ ID NO: 50171 - RNA, 27 nt, synthetic construct
  misc_feature 1..27: note = Telomere-associated protein RIF1 (519-527)
  source 1..27: mol_type = other RNA
aaggagaagcccggcagcgaggtgctg

SEQ ID NO: 50172 - RNA, 30 nt, synthetic construct
  misc_feature 1..30: note = Beclin-1 (185-194)
  source 1..30: mol_type = other RNA
aaggagctggccctcgaggaggagcgcctg

SEQ ID NO: 50173 - RNA, 27 nt, synthetic construct
  misc_feature 1..27: note = Ras and Rab interactor 1 (172-180)
  source 1..27: mol_type = other RNA
aaggagctggaggccatcagccacctc

SEQ ID NO: 50174 - RNA, 27 nt, synthetic construct
  misc_feature 1..27: note = Liprin-beta-1 (682-690)
  source 1..27: mol_type = other RNA
aaggagctgggcatcaagcacagcctc

SEQ ID NO: 50175 - RNA, 33 nt, synthetic construct
  misc_feature 1..33: note = Protein S100-A1 (32-42)
  source 1..33: mol_type = other RNA
aaggagctgaaggagctcctgcagaccgagctg

SEQ ID NO: 50176 - RNA, 27 nt, synthetic construct
  misc_feature 1..27: note = L-dopachrome tautomerase (418-426)
  source 1..27: mol_type = other RNA
aaggagctgcccagcctccacgtgctg

SEQ ID NO: 50177 - RNA, 30 nt, synthetic construct
  misc_feature 1..30: note = Loss of heterozygosity 12 chromosomal region 1 protein (119-128)
  source 1..30: mol_type = other RNA
aaggagatggacctgagcgtggagaccctc

SEQ ID NO: 50178 - RNA, 27 nt, synthetic construct
  misc_feature 1..27: note = Disabled homolog 2 (652-660)
  source 1..27: mol_type = other RNA
aaggagatgttcaaggacttccagctg

SEQ ID NO: 50179 - RNA, 36 nt, synthetic construct
  misc_feature 1..36: note = T-complex protein 1 subunit epsilon (113-124)
  source 1..36: mol_type = other RNA
aaggagatgaaccccgccctgggcatcgactgcctc

SEQ ID NO: 50180 - RNA, 33 nt, synthetic construct
  misc_feature 1..33: note = Ras-related protein Rab-13 (99-109)
  source 1..33: mol_type = other RNA
aaggagaacgccagcgccggcgtggagcgcctg

SEQ ID NO: 50181 - RNA, 30 nt, synthetic construct
  misc_feature 1..30: note = Ras-related protein Rab-34 (152-161)
  source 1..30: mol_type = other RNA
aaggagaacgaccccagctccgtgctgctc

SEQ ID NO: 50182 - RNA, 30 nt, synthetic construct
  misc_feature 1..30: note = AN1-type zinc finger protein 5 (200-209)
  source 1..30: mol_type = other RNA
aaggagaaccccgtggtcgtggccgagaag

SEQ ID NO: 50183 - RNA, 27 nt, synthetic construct
  misc_feature 1..27: note = Hypoxia-inducible factor 1-alpha (392-400)
  source 1..27: mol_type = other RNA
aaggagcccgacgccctgaccctcctg

SEQ ID NO: 50184 - RNA, 27 nt, synthetic construct
  misc_feature 1..27: note = P protein (539-547)
  source 1..27: mol_type = other RNA
aaggagcccagcgagatcgtggagctg

SEQ ID NO: 50185 - RNA, 33 nt, synthetic construct
  misc_feature 1..33: note = Zinc finger protein 36, C3H1 type-like 2 (102-112)
  source 1..33: mol_type = other RNA
aaggagcccagcggcgggggcgggaccgccctg

SEQ ID NO: 50186 - RNA, 27 nt, synthetic construct
  misc_feature 1..27: note = V-type proton ATPase subunit H (86-94)
  source 1..27: mol_type = other RNA
aaggagcagaccgtgcagtacatcctg

SEQ ID NO: 50187 - RNA, 33 nt, synthetic construct
  misc_feature 1..33: note = Filamin A-interacting protein 1-like (562-572)
  source 1..33: mol_type = other RNA
aaggagcgcgacgacctgaagaacaagctcaag

SEQ ID NO: 50188 - RNA, 30 nt, synthetic construct
  misc_feature 1..30: note = Transcription factor 7-like 2 (348-357)
  source 1..30: mol_type = other RNA
aaggagagcgccgccatcaaccagatcctg

SEQ ID NO: 50189 - RNA, 27 nt, synthetic construct
  misc_feature 1..27: note = Dynactin subunit 2 (127-135)
  source 1..27: mol_type = other RNA
aaggagagcgccaccgaggagaagctg

SEQ ID NO: 50190 - RNA, 27 nt, synthetic construct
  misc_feature 1..27: note = Cullin-1 (229-237)
  source 1..27: mol_type = other RNA
aaggagagcttcgagtcccagttcctg

SEQ ID NO: 50191 - RNA, 30 nt, synthetic construct
  misc_feature 1..30: note = Lysine-specific histone demethylase 1B (522-531)
  source 1..30: mol_type = other RNA
aaggagagcggcatccagttctccgagctg

SEQ ID NO: 50192 - RNA, 27 nt, synthetic construct
  misc_feature 1..27: note = Ras-related GTP-binding protein D (313-321)
  source 1..27: mol_type = other RNA
aaggagagcaccgccatcatcaagctg

SEQ ID NO: 50193 - RNA, 27 nt, synthetic construct
  misc_feature 1..27: note = Ras-related protein Rab-7a (48-56)
  source 1..27: mol_type = other RNA
aaggaggtgatggtcgacgaccgcctg

SEQ ID NO: 50194 - RNA, 27 nt, synthetic construct
  misc_feature 1..27: note = Cold shock domain-containing protein E1 (675-683)
  source 1..27: mol_type = other RNA
aaggaggtgcaggacggcatcgagctg

SEQ ID NO: 50195 - RNA, 24 nt, synthetic construct
  misc_feature 1..24: note = Band 4.1-like protein 2 (195-202)
  source 1..24: mol_type = other RNA
aaggaggtgcagaccaacgagctg

SEQ ID NO: 50196 - RNA, 27 nt, synthetic construct
  misc_feature 1..27: note = Nuclear receptor subfamily 4 group A member 3 (320-328)
  source 1..27: mol_type = other RNA
aaggaggtggtccgcaccgacagcctg

SEQ ID NO: 50197 - RNA, 33 nt, synthetic construct
  misc_feature 1..33: note = RuvB-like 1 (68-78)
  source 1..33: mol_type = other RNA
aaggaggtgtacgagggcgaggtcaccgagctg

SEQ ID NO: 50198 - RNA, 27 nt, synthetic construct
  misc_feature 1..27: note = F-box only protein 32 (43-51)
  source 1..27: mol_type = other RNA
aaggaggtgtacaacaaggagaacctg

SEQ ID NO: 50199 - RNA, 27 nt, synthetic construct
  misc_feature 1..27: note = Armadillo repeat-containing X-linked protein 1 (379-387)
  source 1..27: mol_type = other RNA
aaggagtgggaccgcgagatcctgctc

SEQ ID NO: 50200 - RNA, 27 nt, synthetic construct
  misc_feature 1..27: note = Sentrin-specific protease 6 (154-162)
  source 1..27: mol_type = other RNA
aaggagtaccccccgcacgtgcagaag

SEQ ID NO: 50201 - RNA, 33 nt, synthetic construct
  misc_feature 1..33: note = Iron-responsive element-binding protein 2 (24-34)
  source 1..33: mol_type = other RNA
aagttcttcgacgtgagcaagctgggcaccaag

SEQ ID NO: 50202 - RNA, 27 nt, synthetic construct
  misc_feature 1..27: note = Nucleolin (110-118)
  source 1..27: mol_type = other RNA
aagggcgccacccccgggaaggccctg

SEQ ID NO: 50203 - RNA, 27 nt, synthetic construct
  misc_feature 1..27: note = PRELI domain-containing protein 1, mitochondrial (160-168)
  source 1..27: mol_type = other RNA
aagggcttcgagtacatcctggccaag

SEQ ID NO: 50204 - RNA, 30 nt, synthetic construct
  misc_feature 1..30: note = CD302 antigen (84-93)
  source 1..30: mol_type = other RNA
aagggccccgacgacatcctgctcgggatg

SEQ ID NO: 50205 - RNA, 27 nt, synthetic construct
  misc_feature 1..27: note = Epithelial discoidin domain-containing receptor 1 (781-789)
  source 1..27: mol_type = other RNA
aagatcgccgacttcggcatgagccgc

SEQ ID NO: 50206 - RNA, 33 nt, synthetic construct
  misc_feature 1..33: note = Merlin (209-219)
  source 1..33: mol_type = other RNA
aagatcgcccaggacctggagatgtacggcgtg

SEQ ID NO: 50207 - RNA, 27 nt, synthetic construct
  misc_feature 1..27: note = Afadin (742-750)
  source 1..27: mol_type = other RNA
aagatcgacgacgtgctgcacaccctc

SEQ ID NO: 50208 - RNA, 27 nt, synthetic construct
  misc_feature 1..27: note = Leucine-rich repeat-containing protein 9 (112-120)
  source 1..27: mol_type = other RNA
aagatcgagaacctggagaagctcatc

SEQ ID NO: 50209 - RNA, 27 nt, synthetic construct
  misc_feature 1..27: note = Gamma-interferon-inducible protein 16 (67-75)
  source 1..27: mol_type = other RNA
aagatcttcgaggacatccccaccctg

SEQ ID NO: 50210 - RNA, 30 nt, synthetic construct
  misc_feature 1..30: note = Palladin (13-22)
  source 1..30: mol_type = other RNA
aagatcttcgagggcatgcccgtgaccttc

SEQ ID NO: 50211 - RNA, 30 nt, synthetic construct
  misc_feature 1..30: note = Cytochrome c oxidase subunit 2 (217-226)
  source 1..30: mol_type = other RNA
aagatcttcgagatgggccccgtgttcacc

SEQ ID NO: 50212 - RNA, 27 nt, synthetic construct
  misc_feature 1..27: note = Small subunit processome component 20 homolog (391-399)
  source 1..27: mol_type = other RNA
aagatcttcgagagccgcttcgagaag

SEQ ID NO: 50213 - RNA, 33 nt, synthetic construct
  misc_feature 1..33: note = Zinc finger protein 141 (290-300)
  source 1..33: mol_type = other RNA
aagatcttcaccagctccagcaacttcgccaag

SEQ ID NO: 50214 - RNA, 27 nt, synthetic construct
  misc_feature 1..27: note = Tudor domain-containing protein 3 (524-532)
  source 1..27: mol_type = other RNA
aagatcttctacaacagcggccccaag

SEQ ID NO: 50215 - RNA, 27 nt, synthetic construct
  misc_feature 1..27: note = Cytoskeleton-associated protein 5 (868-876)
  source 1..27: mol_type = other RNA
aagatcggcgacaagaactggaagatc

SEQ ID NO: 50216 - RNA, 27 nt, synthetic construct
  misc_feature 1..27: note = Neuron navigator 2 (2313-2321)
  source 1..27: mol_type = other RNA
aagatcatcgactggatccccaaggtg

SEQ ID NO: 50217 - RNA, 36 nt, synthetic construct
  misc_feature 1..36: note = RanBP2-like and GRIP domain-containing protein 3 (721-732)
  source 1..36: mol_type = other RNA
aagatcctggacgacagcgactccaacctcagcgtg

SEQ ID NO: 50218 - RNA, 30 nt, synthetic construct
  misc_feature 1..30: note = Creatine kinase S-type, mitochondrial (344-353)
  source 1..30: mol_type = other RNA
aagatcctggagaacctccgcctgcagaag

SEQ ID NO: 50219 - RNA, 27 nt, synthetic construct
  misc_feature 1..27: note = Ankyrin repeat and KH domain-containing protein 1 (866-874)
  source 1..27: mol_type = other RNA
aagatcctgaaggagctccagaaggtg

SEQ ID NO: 50220 - RNA, 27 nt, synthetic construct
  misc_feature 1..27: note = Protein phosphatase 1 regulatory subunit 21 (355-363)
  source 1..27: mol_type = other RNA
aagatcctgccctaccagctcaagcgc

SEQ ID NO: 50221 - RNA, 30 nt, synthetic construct
  misc_feature 1..30: note = Cytoglobin (125-134)
  source 1..30: mol_type = other RNA
aagatcctgagcggcgtgatcctcgaggtc

SEQ ID NO: 50222 - RNA, 27 nt, synthetic construct
  misc_feature 1..27: note = Trimethylguanosine synthase (510-518)
  source 1..27: mol_type = other RNA
aagatcctgagcaaggtggagaagttc

SEQ ID NO: 50223 - RNA, 33 nt, synthetic construct
  misc_feature 1..33: note = X-ray repair cross-complementing protein 6 (451-461)
  source 1..33: mol_type = other RNA
aagatcatggccacccccgagcaggtgggcaag

SEQ ID NO: 50224 - RNA, 27 nt, synthetic construct
  misc_feature 1..27: note = Syntaxin-binding protein 1 (13-21)
  source 1..27: mol_type = other RNA
aagatcatgcacgacgtgatcaagaag

SEQ ID NO: 50225 - RNA, 27 nt, synthetic construct
  misc_feature 1..27: note = Protein S100-A10 (54-62)
  source 1..27: mol_type = other RNA
aagatcatgaaggacctggaccagtgc

SEQ ID NO: 50226 - RNA, 27 nt, synthetic construct
  misc_feature 1..27: note = 60S ribosomal protein L26 (28-36)
  source 1..27: mol_type = other RNA
aagatcatgagctcccccctgagcaag

SEQ ID NO: 50227 - RNA, 27 nt, synthetic construct
  misc_feature 1..27: note = Inversin (350-358)
  source 1..27: mol_type = other RNA
aagatcaaccccaacgtgcaggactac

SEQ ID NO: 50228 - RNA, 33 nt, synthetic construct
  misc_feature 1..33: note = E3 SUMO-protein ligase NSE2 (96-106)
  source 1..33: mol_type = other RNA
aagatccccgacctgaagctcctggtggagaag

SEQ ID NO: 50229 - RNA, 27 nt, synthetic construct
  misc_feature 1..27: note = Arrestin domain-containing protein 4 (273-281)
  source 1..27: mol_type = other RNA
aagatccccccggtgacccccagcatc

SEQ ID NO: 50230 - RNA, 27 nt, synthetic construct
  misc_feature 1..27: note = Utrophin (2159-2167)
  source 1..27: mol_type = other RNA
aagatcagcgagtccctgcgcaccgtg

SEQ ID NO: 50231 - RNA, 30 nt, synthetic construct
  misc_feature 1..30: note = Nucleolar protein 58 (40-49)
  source 1..30: mol_type = other RNA
aagatcgtgaagctgaagcacttcgagaag

SEQ ID NO: 50232 - RNA, 36 nt, synthetic construct
  misc_feature 1..36: note = ATP synthase subunit g, mitochondrial (55-66)
  source 1..36: mol_type = other RNA
aagatcgtgaacagcgcccagaccggctccttcaag

SEQ ID NO: 50233 - RNA, 36 nt, synthetic construct
  misc_feature 1..36: note = Pre-mRNA-processing factor 19 (375-386)
  source 1..36: mol_type = other RNA
aagatctgggacctgaaggagcgcaccaacgtggcc

SEQ ID NO: 50234 - RNA, 30 nt, synthetic construct
  misc_feature 1..30: note = Melanoma-associated antigen 12 (220-229)
  source 1..30: mol_type = other RNA
aagatctgggaggagctgagcgtgctcgag

SEQ ID NO: 50235 - RNA, 27 nt, synthetic construct
  misc_feature 1..27: note = 60S ribosomal protein L3 (278-286)
  source 1..27: mol_type = other RNA
aagatctacaagatcggccaggggtac

SEQ ID NO: 50236 - RNA, 33 nt, synthetic construct
  misc_feature 1..33: note = SWI/SNF-related matrix-associated actin-dependent regulator of chromatin subfamily A member 5 (411-421)
  source 1..33: mol_type = other RNA
aagatctacgtgggcctgagcaagatgcagcgc

SEQ ID NO: 50237 - RNA, 27 nt, synthetic construct
  misc_feature 1..27: note = Dynein heavy chain 5, axonemal (1406-1414)
  source 1..27: mol_type = other RNA
aagaagcagctgaacctcctgcagaag

SEQ ID NO: 50238 - RNA, 27 nt, synthetic construct
  misc_feature 1..27: note = Tubulin alpha-1C chain (89-97)
  source 1..27: mol_type = other RNA
aagctggccgaccagtgcaccggcctc

SEQ ID NO: 50239 - RNA, 27 nt, synthetic construct
  misc_feature 1..27: note = Protein TANC1 (1398-1406)
  source 1..27: mol_type = other RNA
aagctgtgccccaccaaccaggaggtg

SEQ ID NO: 50240 - RNA, 30 nt, synthetic construct
  misc_feature 1..30: note = Golgi-associated PDZ and coiled-coil motif-containing protein (449-458)
  source 1..30: mol_type = other RNA
aagctggacgacctccacaccctgtaccac

SEQ ID NO: 50241 - RNA, 27 nt, synthetic construct
  misc_feature 1..27: note = Dystonin (4697-4705)
  source 1..27: mol_type = other RNA
aagctggacgacatgctcagcgagctg

SEQ ID NO: 50242 - RNA, 27 nt, synthetic construct
  misc_feature 1..27: note = Prefoldin subunit 3 (21-29)
  source 1..27: mol_type = other RNA
aagctggacgagcagtaccagaagtac

SEQ ID NO: 50243 - RNA, 30 nt, synthetic construct
  misc_feature 1..30: note = DNA topoisomerase 2-alpha (278-287)
  source 1..30: mol_type = other RNA
aagctggacgagaccggcaacagcctcaag

SEQ ID NO: 50244 - RNA, 30 nt, synthetic construct
  misc_feature 1..30: note = Cysteine-tRNA ligase, cytoplasmic (716-725)
  source 1..30: mol_type = other RNA
aagctgttcgaggcccaggagaagctctac

SEQ ID NO: 50245 - RNA, 33 nt, synthetic construct
  misc_feature 1..33: note = Pleckstrin homology-like domain family B member 1 (803-813)
  source 1..33: mol_type = other RNA
aagctgttcgaggacctcgagttccagcagctg

SEQ ID NO: 50246 - RNA, 27 nt, synthetic construct
  misc_feature 1..27: note = Protein CASP (544-552)
  source 1..27: mol_type = other RNA
aagctgttcgagaagatcaagttcctc

SEQ ID NO: 50247 - RNA, 30 nt, synthetic construct
  misc_feature 1..30: note = Integrator complex subunit 11 (251-260)
  source 1..30: mol_type = other RNA
aagctgttcatcccctggaccaaccagaag

SEQ ID NO: 50248 - RNA, 27 nt, synthetic construct
  misc_feature 1..27: note = Lathosterol oxidase (289-297)
  source 1..27: mol_type = other RNA
aagctgttcaacggcgagttcaccaag

SEQ ID NO: 50249 - RNA, 33 nt, synthetic construct
  misc_feature 1..33: note = Cytochrome c oxidase subunit 7A2, mitochondrial (33-43)
  source 1..33: mol_type = other RNA
aagctgttccaggaggacgacgagatccccctc

SEQ ID NO: 50250 - RNA, 30 nt, synthetic construct
  misc_feature 1..30: note = Ubiquitin carboxyl-terminal hydrolase 1 (428-437)
  source 1..30: mol_type = other RNA
aagctgttccagggccagctcgtgctgcgc

SEQ ID NO: 50251 - RNA, 33 nt, synthetic construct
  misc_feature 1..33: note = Coatomer subunit gamma-1 (75-85)
  source 1..33: mol_type = other RNA
aagctgttccagagcaacgaccccaccctccgc

SEQ ID NO: 50252 - RNA, 24 nt, synthetic construct
  misc_feature 1..24: note = Probable U3 small nucleolar RNA-associated protein 11 (142-149)
  source 1..24: mol_type = other RNA
aagctgttcgtgatcgcccagaag

SEQ ID NO: 50253 - RNA, 36 nt, synthetic construct
  misc_feature 1..36: note = Thyroid hormone receptor-associated protein 3 (547-558)
  source 1..36: mol_type = other RNA
aagctgggcgccaagggggacttccccaccggcaag

SEQ ID NO: 50254 - RNA, 27 nt, synthetic construct
  misc_feature 1..27: note = F-box only protein 7 (249-257)
  source 1..27: mol_type = other RNA
aagctgggcgagaacgtggccaacatc

SEQ ID NO: 50255 - RNA, 27 nt, synthetic construct
  misc_feature 1..27: note = Vam6/Vps39-like protein (271-279)
  source 1..27: mol_type = other RNA
aagctgggcaccgaccccacccacgtg

SEQ ID NO: 50256 - RNA, 27 nt, synthetic construct
  misc_feature 1..27: note = Zinc finger protein 106 (287-295)
  source 1..27: mol_type = other RNA
aagctgggcaccgtggccacctaccgc

SEQ ID NO: 50257 - RNA, 30 nt, synthetic construct
  misc_feature 1..30: note = Large subunit GTPase 1 homolog (102-111)
  source 1..30: mol_type = other RNA
aagctgcacgaggagaacaagcagttcctc

SEQ ID NO: 50258 - RNA, 27 nt, synthetic construct
  misc_feature 1..27: note = Serine/threonine-protein kinase RIO2 (60-68)
  source 1..27: mol_type = other RNA
aagctgatcgcctgggagcgcaccaag

SEQ ID NO: 50259 - RNA, 36 nt, synthetic construct
  misc_feature 1..36: note = Inter-alpha-trypsin inhibitor heavy chain H5 (795-806)
  source 1..36: mol_type = other RNA
aagctgatcgacggcgagtacaaggactacctcgcc

SEQ ID NO: 50260 - RNA, 27 nt, synthetic construct
  misc_feature 1..27: note = Elongation of very long chain fatty acids protein 5 (120-128)
  source 1..27: mol_type = other RNA
aagctgatcgagttcatggacaccttc

SEQ ID NO: 50261 - RNA, 27 nt, synthetic construct
  misc_feature 1..27: note = Transcription factor E2F4 (96-104)
  source 1..27: mol_type = other RNA
aagctgatcgagctcaaggccgagatc

SEQ ID NO: 50262 - RNA, 27 nt, synthetic construct
  misc_feature 1..27: note = Dedicator of cytokinesis protein 9 (1738-1746)
  source 1..27: mol_type = other RNA
aagctgatcatccccatctacgagaag

SEQ ID NO: 50263 - RNA, 27 nt, synthetic construct
  misc_feature 1..27: note = Amyloid-like protein 2 (10-18)
  source 1..27: mol_type = other RNA
aagctgaaggacctcgccttcctgaag

SEQ ID NO: 50264 - RNA, 27 nt, synthetic construct
  misc_feature 1..27: note = Kinesin-like protein KIF20B (1224-1232)
  source 1..27: mol_type = other RNA
aagctgaaggaggagatcacccagctc

SEQ ID NO: 50265 - RNA, 27 nt, synthetic construct
  misc_feature 1..27: note = Dystonin (2863-2871)
  source 1..27: mol_type = other RNA
aagctgaaggagagcctcgagaaggcc

SEQ ID NO: 50266 - RNA, 27 nt, synthetic construct
  misc_feature 1..27: note = Heat shock 70 kDa protein 4 (124-132)
  source 1..27: mol_type = other RNA
aagctgaaggagaccgccgagagcgtg

SEQ ID NO: 50267 - RNA, 27 nt, synthetic construct
  misc_feature 1..27: note = Lon protease homolog 2, peroxisomal (304-312)
  source 1..27: mol_type = other RNA
aagctgaagaagcgcgtgctcgagtac

SEQ ID NO: 50268 - RNA, 27 nt, synthetic construct
  misc_feature 1..27: note = Cytoplasmic dynein 1 heavy chain 1 (681-689)
  source 1..27: mol_type = other RNA
aagctgaagcaggacggcgacagcttc

SEQ ID NO: 50269 - RNA, 33 nt, synthetic construct
  misc_feature 1..33: note = E3 ubiquitin-protein ligase UBR3 (1192-1202)
  source 1..33: mol_type = other RNA
aagctgctcgccgagttcgccagccgccagaag

SEQ ID NO: 50270 - RNA, 30 nt, synthetic construct
  misc_feature 1..30: note = Cytoplasmic dynein 1 heavy chain 1 (1715-1724)
  source 1..30: mol_type = other RNA
aagctgctcgccgagagcgtgaccgaggtc

SEQ ID NO: 50271 - RNA, 27 nt, synthetic construct
  misc_feature 1..27: note = WD repeat and HMG-box DNA-binding protein 1 (77-85)
  source 1..27: mol_type = other RNA
aagctgctcgccatccccgtggagaag

SEQ ID NO: 50272 - RNA, 36 nt, synthetic construct
  misc_feature 1..36: note = Tight junction-associated protein 1 (150-161)
  source 1..36: mol_type = other RNA
aagctgctcgacgccaagaacaccatcaacaagctg

SEQ ID NO: 50273 - RNA, 30 nt, synthetic construct
  misc_feature 1..30: note = Protein FAM32A (36-45)
  source 1..30: mol_type = other RNA
aagctgctcgaggccatgggcaccagcaag

SEQ ID NO: 50274 - RNA, 30 nt, synthetic construct
  misc_feature 1..30: note = SEC14 domain and spectrin repeat-containing protein 1 (418-427)
  source 1..30: mol_type = other RNA
aagctgctcgaggagaagctgaagagcgtg

SEQ ID NO: 50275 - RNA, 27 nt, synthetic construct
  misc_feature 1..27: note = Probable dimethyladenosine transferase (73-81)
  source 1..27: mol_type = other RNA
aagctgctcgagaaggccaagaaggtg

SEQ ID NO: 50276 - RNA, 27 nt, synthetic construct
  misc_feature 1..27: note = Polymerase I and transcript release factor (109-117)
  source 1..27: mol_type = other RNA
aagctgctcgagaaggtgcgcaaggtc

SEQ ID NO: 50277 - RNA, 27 nt, synthetic construct
  misc_feature 1..27: note = Retinaldehyde-binding protein 1 (261-269)
  source 1..27: mol_type = other RNA
aagctgctcgagcgcgtgttcgtccac

SEQ ID NO: 50278 - RNA, 27 nt, synthetic construct
  misc_feature 1..27: note = Ubiquitin-conjugating enzyme E2 Q1 (46-54)
  source 1..27: mol_type = other RNA
aagctgctcgagagcatcttccaccgc

SEQ ID NO: 50279 - RNA, 27 nt, synthetic construct
  misc_feature 1..27: note = S-adenosylmethionine decarboxylase proenzyme (12-20)
  source 1..27: mol_type = other RNA
aagctgctcgaggtgtggttcagccgc

SEQ ID NO: 50280 - RNA, 30 nt, synthetic construct
  misc_feature 1..30: note = General transcription factor 3C polypeptide 1 (82-91)
  source 1..30: mol_type = other RNA
aagctgctcaaggagttcaagcgcaacgac

SEQ ID NO: 50281 - RNA, 30 nt, synthetic construct
  misc_feature 1..30: note = Enhancer of mRNA-decapping protein 4 (1087-1096)
  source 1..30: mol_type = other RNA
aagctgctcaagagcaagaacctgaccgac

SEQ ID NO: 50282 - RNA, 36 nt, synthetic construct
  misc_feature 1..36: note = Growth arrest and DNA damage-inducible protein GADD45 alpha (45-56)
  source 1..36: mol_type = other RNA
aagctgctcaacgtggaccccgacaacgtcgtgctg

SEQ ID NO: 50283 - RNA, 30 nt, synthetic construct
  misc_feature 1..30: note = Box C/D snoRNA protein 1 (321-330)
  source 1..30: mol_type = other RNA
aagctgctccccaacggcttcaccaagcgc

SEQ ID NO: 50284 - RNA, 27 nt, synthetic construct
  misc_feature 1..27: note = HMG box-containing protein 1 (263-271)
  source 1..27: mol_type = other RNA
aagctgctcagccacgaggagtccgtg

SEQ ID NO: 50285 - RNA, 36 nt, synthetic construct
  misc_feature 1..36: note = Ubiquitin-conjugating enzyme E2 E1 (43-54)
  source 1..36: mol_type = other RNA
aagctgctcagcacctccgccaagcgcatccagaag

SEQ ID NO: 50286 - RNA, 33 nt, synthetic construct
  misc_feature 1..33: note = Junction plakoglobin (325-335)
  source 1..33: mol_type = other RNA
aagctgctctggaccaccagccgcgtgctgaag

SEQ ID NO: 50287 - RNA, 27 nt, synthetic construct
  misc_feature 1..27: note = Mitogen-activated protein kinase 6 (549-557)
  source 1..27: mol_type = other RNA
aagctgaacgacctcaacagctccgtg

SEQ ID NO: 50288 - RNA, 27 nt, synthetic construct
  misc_feature 1..27: note = Platelet-activating factor acetylhydrolase IB subunit alpha (71-79)
  source 1..27: mol_type = other RNA
aagctgaacgaggccaaggaggagttc

SEQ ID NO: 50289 - RNA, 27 nt, synthetic construct
  misc_feature 1..27: note = Structural maintenance of chromosomes protein 1A (1009-1017)
  source 1..27: mol_type = other RNA
aagctgaacgagcagcagagcgtgctc

SEQ ID NO: 50290 - RNA, 33 nt, synthetic construct
  misc_feature 1..33: note = 60S ribosomal protein L4 (327-337)
  source 1..33: mol_type = other RNA
aagctgaacccctacgccaagaccatgcgccgg

SEQ ID NO: 50291 - RNA, 27 nt, synthetic construct
  misc_feature 1..27: note = Pleckstrin homology domain-containing family A member 5 (187-195)
  source 1..27: mol_type = other RNA
aagctgaacagcctcccctccgagtac

SEQ ID NO: 50292 - RNA, 27 nt, synthetic construct
  misc_feature 1..27: note = RUN and FYVE domain-containing protein 2 (250-258)
  source 1..27: mol_type = other RNA
aagctgcaggaggagaaccaccagctc

SEQ ID NO: 50293 - RNA, 27 nt, synthetic construct
  misc_feature 1..27: note = Bardet-Biedl syndrome 5 protein (242-250)
  source 1..27: mol_type = other RNA
aagctgcaggagagcgtgaaggagatc

SEQ ID NO: 50294 - RNA, 30 nt, synthetic construct
  misc_feature 1..30: note = Calponin-3 (64-73)
  source 1..30: mol_type = other RNA
aagctgcagcccggcagcgtgaagaaggtc

SEQ ID NO: 50295 - RNA, 30 nt, synthetic construct
  misc_feature 1..30: note = AP-1 complex subunit beta-1 (876-885)
  source 1..30: mol_type = other RNA
aagctgcagagctccaacatcttcaccgtg

SEQ ID NO: 50296 - RNA, 27 nt, synthetic construct
  misc_feature 1..27: note = RuvB-like 1 (214-222)
  source 1..27: mol_type = other RNA
aagctgcgcggcgagatcaacaaggtg

SEQ ID NO: 50297 - RNA, 30 nt, synthetic construct
  misc_feature 1..30: note = Integrin beta-1 (331-340)
  source 1..30: mol_type = other RNA
aagctgagcgagggcgtgaccatctcctac

SEQ ID NO: 50298 - RNA, 33 nt, synthetic construct
  misc_feature 1..33: note = 3-hydroxy-3-methylglutaryl-coenzyme A reductase (502-512)
  source 1..33: mol_type = other RNA
aagctgagcgagccctccagcctccagtacctg

SEQ ID NO: 50299 - RNA, 27 nt, synthetic construct
  misc_feature 1..27: note = DNA topoisomerase 1 (248-256)
  source 1..27: mol_type = other RNA
aagctgagccccaaggccgaggaggtg

SEQ ID NO: 50300 - RNA, 30 nt, synthetic construct
  misc_feature 1..30: note = Neuron navigator 2 (616-625)
  source 1..30: mol_type = other RNA
aagctgagctccggcctcccccagcagaag

SEQ ID NO: 50301 - RNA, 33 nt, synthetic construct
  misc_feature 1..33: note = Coatomer subunit alpha (619-629)
  source 1..33: mol_type = other RNA
aagctggtgggccagagcatcatcgcctacctc

SEQ ID NO: 50302 - RNA, 27 nt, synthetic construct
  misc_feature 1..27: note = Proteasome activator complex subunit 3 (201-209)
  source 1..27: mol_type = other RNA
aagctggtgagcaagatcgccaagtac

SEQ ID NO: 50303 - RNA, 30 nt, synthetic construct
  misc_feature 1..30: note = Coatomer subunit beta' (124-133)
  source 1..30: mol_type = other RNA
aagctgtgggactgggacaagaagtggagc

SEQ ID NO: 50304 - RNA, 33 nt, synthetic construct
  misc_feature 1..33: note = Treslin (218-228)
  source 1..33: mol_type = other RNA
aagctgtgggagagccccgaccacctcggctac

SEQ ID NO: 50305 - RNA, 30 nt, synthetic construct
  misc_feature 1..30: note = Lambda-crystallin homolog (33-42)
  source 1..30: mol_type = other RNA
aagctgtacgacatcgagcagcagcagatc

SEQ ID NO: 50306 - RNA, 33 nt, synthetic construct
  misc_feature 1..33: note = 26S proteasome non-ATPase regulatory subunit 11 (325-335)
  source 1..33: mol_type = other RNA
aagctgtacgacaacctcctggagcagaacctg

SEQ ID NO: 50307 - RNA, 27 nt, synthetic construct
  misc_feature 1..27: note = Calpain-1 catalytic subunit (654-662)
  source 1..27: mol_type = other RNA
aagctgtacgagctcatcatcacccgc

SEQ ID NO: 50308 - RNA, 30 nt, synthetic construct
  misc_feature 1..30: note = Calpain-1 catalytic subunit (654-663)
  source 1..30: mol_type = other RNA
aagctgtacgagctcatcatcacccgctac

SEQ ID NO: 50309 - RNA, 27 nt, synthetic construct
  misc_feature 1..27: note = Signal recognition particle 9 kDa protein (16-24)
  source 1..27: mol_type = other RNA
aagctgtacctcgccgaccccatgaag

SEQ ID NO: 50310 - RNA, 27 nt, synthetic construct
  misc_feature 1..27: note = Gap junction alpha-3 protein (313-321)
  source 1..27: mol_type = other RNA
aagctgtacaacggccaccaccacctc

SEQ ID NO: 50311 - RNA, 27 nt, synthetic construct
  misc_feature 1..27: note = Dedicator of cytokinesis protein 5 (1299-1307)
  source 1..27: mol_type = other RNA
aagctgtaccaggagatcatcagctac

SEQ ID NO: 50312 - RNA, 30 nt, synthetic construct
  misc_feature 1..30: note = Rab GDP dissociation inhibitor beta (130-139)
  source 1..30: mol_type = other RNA
aagctgtacagcgagtccctcgcccgctac

SEQ ID NO: 50313 - RNA, 27 nt, synthetic construct
  misc_feature 1..27: note = 2',3'-cyclic-nucleotide 3'-phosphodiesterase (351-359)
  source 1..27: mol_type = other RNA
aagctgtacagcctcggcaacgggcgc

SEQ ID NO: 50314 - RNA, 27 nt, synthetic construct
  misc_feature 1..27: note = Cytochrome b-c1 complex subunit 9 (9-17)
  source 1..27: mol_type = other RNA
aagctgtacagcctcctgttccgccgg

SEQ ID NO: 50315 - RNA, 30 nt, synthetic construct
  misc_feature 1..30: note = Dual specificity tyrosine-phosphorylation-regulated kinase 3 (365-374)
  source 1..30: mol_type = other RNA
aagctgtacacctacatccagagccgcttc

SEQ ID NO: 50316 - RNA, 33 nt, synthetic construct
  misc_feature 1..33: note = Something about silencing protein 10 (134-144)
  source 1..33: mol_type = other RNA
aagctgtactacgacaccgactacggcagcaag

SEQ ID NO: 50317 - RNA, 27 nt, synthetic construct
  misc_feature 1..27: note = Stathmin (95-103)
  source 1..27: mol_type = other RNA
aagatggccgaggagaagctgacccac

SEQ ID NO: 50318 - RNA, 33 nt, synthetic construct
  misc_feature 1..33: note = Stathmin (95-105)
  source 1..33: mol_type = other RNA
aagatggccgaggagaagctgacccacaagatg

SEQ ID NO: 50319 - RNA, 33 nt, synthetic construct
  misc_feature 1..33: note = Eukaryotic peptide chain release factor GTP-binding subunit ERF3B (350-360)
  source 1..33: mol_type = other RNA
aagatggacgaccccaccgtgaactggagcatc

SEQ ID NO: 50320 - RNA, 27 nt, synthetic construct
  misc_feature 1..27: note = Dihydropyrimidinase-related protein 1 (341-349)
  source 1..27: mol_type = other RNA
aagatggacgagaaccagttcgtggcc

SEQ ID NO: 50321 - RNA, 27 nt, synthetic construct
  misc_feature 1..27: note = Interferon regulatory factor 9 (369-377)
  source 1..27: mol_type = other RNA
aagatggagcaggccttcgcccgctac

SEQ ID NO: 50322 - RNA, 27 nt, synthetic construct
  misc_feature 1..27: note = Guanine nucleotide-binding protein G(i) subunit alpha-1 (197-205)
  source 1..27: mol_type = other RNA
aagatgttcgacgtgggcgggcagcgc

SEQ ID NO: 50323 - RNA, 39 nt, synthetic construct
  misc_feature 1..39: note = Transketolase (516-528)
  source 1..39: mol_type = other RNA
aagatgttcggcatcgaccgcgacgccatcgcccaggcg

SEQ ID NO: 50324 - RNA, 33 nt, synthetic construct
  misc_feature 1..33: note = Zinc finger FYVE domain-containing protein 16 (254-264)
  source 1..33: mol_type = other RNA
aagatgttccacgccaaggacaagctgcagcac

SEQ ID NO: 50325 - RNA, 24 nt, synthetic construct
  misc_feature 1..24: note = Ubiquitin-associated domain-containing protein 2 (83-90)
  source 1..24: mol_type = other RNA
aagatgttccaggtgcaccaggtc

SEQ ID NO: 50326 - RNA, 33 nt, synthetic construct
  misc_feature 1..33: note = Intraflagellar transport protein 88 homolog (227-237)
  source 1..33: mol_type = other RNA
aagatgttcagcaacgccggcatcctgaagatg

SEQ ID NO: 50327 - RNA, 27 nt, synthetic construct
  misc_feature 1..27: note = Integrin alpha-7 (1061-1069)
  source 1..27: mol_type = other RNA
aagatgggcttcttcaagcgcgccaag

SEQ ID NO: 50328 - RNA, 27 nt, synthetic construct
  misc_feature 1..27: note = FACT complex subunit SPT16 (120-128)
  source 1..27: mol_type = other RNA
aagatgatcgaggccatcaaggagagc

SEQ ID NO: 50329 - RNA, 30 nt, synthetic construct
  misc_feature 1..30: note = BRISC and BRCA1-A complex member 1 (126-135)
  source 1..30: mol_type = other RNA
aagatgatcgagatgttcgtgcgcaccaag

SEQ ID NO: 50330 - RNA, 27 nt, synthetic construct
  misc_feature 1..27: note = Spartin (80-88)
  source 1..27: mol_type = other RNA
aagatgaaggagaccctgcagaacgtg

SEQ ID NO: 50331 - RNA, 30 nt, synthetic construct
  misc_feature 1..30: note = DNA topoisomerase 1 (262-271)
  source 1..30: mol_type = other RNA
aagatgctggaccacgagtacaccaccaag

SEQ ID NO: 50332 - RNA, 30 nt, synthetic construct
  misc_feature 1..30: note = Tropomodulin-3 (307-316)
  source 1..30: mol_type = other RNA
aagatgctggaggagaacaccaacatcctc

SEQ ID NO: 50333 - RNA, 30 nt, synthetic construct
  misc_feature 1..30: note = Enhancer of mRNA-decapping protein 3 (373-382)
  source 1..30: mol_type = other RNA
aagatgctggagagcatcaccaacgagctc

SEQ ID NO: 50334 - RNA, 27 nt, synthetic construct
  misc_feature 1..27: note = Transient receptor potential cation channel subfamily M member 2 (1336-1344)
  source 1..27: mol_type = other RNA
aagatgctggaggtgctcgtcgtgaag

SEQ ID NO: 50335 - RNA, 27 nt, synthetic construct
  misc_feature 1..27: note = MICAL-like protein 1 (843-851)
  source 1..27: mol_type = other RNA
aagatgctgaagctcctgggcaacaag

SEQ ID NO: 50336 - RNA, 30 nt, synthetic construct
  misc_feature 1..30: note = Cofilin-1 (73-82)
  source 1..30: mol_type = other RNA
aagatgctgcccgacaaggactgccgctac

SEQ ID NO: 50337 - RNA, 33 nt, synthetic construct
  misc_feature 1..33: note = Cofilin-1 (73-83)
  source 1..33: mol_type = other RNA
aagatgctgcccgacaaggactgccgctacgcc

SEQ ID NO: 50338 - RNA, 27 nt, synthetic construct
  misc_feature 1..27: note = Leucine-rich repeat-containing protein 40 (539-547)
  source 1..27: mol_type = other RNA
aagatgatggagaacctgaccaccctc

SEQ ID NO: 50339 - RNA, 27 nt, synthetic construct
  misc_feature 1..27: note = U3 small nucleolar ribonucleoprotein protein MPP10 (357-365)
  source 1..27: mol_type = other RNA
aagatgaacgagaagatcgccagcctg

SEQ ID NO: 50340 - RNA, 27 nt, synthetic construct
  misc_feature 1..27: note = Unconventional myosin-X (643-651)
  source 1..27: mol_type = other RNA
aagatgcccgaccagttcgaccaggcc

SEQ ID NO: 50341 - RNA, 27 nt, synthetic construct
  misc_feature 1..27: note = Voltage-dependent calcium channel subunit alpha-2/delta-1 (39-47)
  source 1..27: mol_type = other RNA
aagatgcaggaggacctggtgaccctc

SEQ ID NO: 50342 - RNA, 36 nt, synthetic construct
  misc_feature 1..36: note = Gamma-secretase C-terminal fragment 59 (620-631)
  source 1..36: mol_type = other RNA
aagatgcagcagaacggctacgagaaccccacctac

SEQ ID NO: 50343 - RNA, 33 nt, synthetic construct
  misc_feature 1..33: note = U2 small nuclear ribonucleoprotein B'' (47-57)
  source 1..33: mol_type = other RNA
aagatgcgcggccaggccttcgtgatcttcaag

SEQ ID NO: 50344 - RNA, 27 nt, synthetic construct
  misc_feature 1..27: note = Aryl hydrocarbon receptor nuclear translocator (104-112)
  source 1..27: mol_type = other RNA
aagatgaccgcctacatcaccgagctg

SEQ ID NO: 50345 - RNA, 27 nt, synthetic construct
  misc_feature 1..27: note = Uncharacterized protein C20orf194 (424-432)
  source 1..27: mol_type = other RNA
aagatgaccttccacatccacgccgtg

SEQ ID NO: 50346 - RNA, 27 nt, synthetic construct
  misc_feature 1..27: note = Aryl hydrocarbon receptor nuclear translocator 2 (67-75)
  source 1..27: mol_type = other RNA
aagatgacccagtacatcaccgagctg

SEQ ID NO: 50347 - RNA, 27 nt, synthetic construct
  misc_feature 1..27: note = Dual specificity mitogen-activated protein kinase kinase 7 (221-229)
  source 1..27: mol_type = other RNA
aagatgaccgtggccatcgtcaaggcc

SEQ ID NO: 50348 - RNA, 36 nt, synthetic construct
  misc_feature 1..36: note = A-kinase anchor protein 11 (898-909)
  source 1..36: mol_type = other RNA
aagatggtggacgagcgcaccgactacctgaccaag

SEQ ID NO: 50349 - RNA, 33 nt, synthetic construct
  misc_feature 1..33: note = 5-demethoxyubiquinone hydroxylase, mitochondrial (1-11)
  source 1..33: mol_type = other RNA
aagatgtgggaccaggagaaggaccacctgaag

SEQ ID NO: 50350 - RNA, 36 nt, synthetic construct
  misc_feature 1..36: note = 5-demethoxyubiquinone hydroxylase, mitochondrial (1-12)
  source 1..36: mol_type = other RNA
aagatgtgggaccaggagaaggaccacctgaagaag

SEQ ID NO: 50351 - RNA, 45 nt, synthetic construct
  misc_feature 1..45: note = Neuroblast differentiation-associated protein AHNAK (5087-5101)
  source 1..45: mol_type = other RNA
aagatgtacttccccgacgtggagttcgacatcaagagcccgaag

SEQ ID NO: 50352 - RNA, 33 nt, synthetic construct
  misc_feature 1..33: note = General transcription factor 3C polypeptide 3 (166-176)
  source 1..33: mol_type = other RNA
aagatgtacggctacgtggacaccctgctcacc

SEQ ID NO: 50353 - RNA, 30 nt, synthetic construct
  misc_feature 1..30: note = Round spermatid basic protein 1 (272-281)
  source 1..30: mol_type = other RNA
aagatgtacaacaaggaggtgcagaccgtc

SEQ ID NO: 50354 - RNA, 33 nt, synthetic construct
  misc_feature 1..33: note = 116 kDa U5 small nuclear ribonucleoprotein component (480-490)
  source 1..33: mol_type = other RNA
aagatgtacagcaccgacgacggcgtgcagttc

SEQ ID NO: 50355 - RNA, 27 nt, synthetic construct
  misc_feature 1..27: note = 60S ribosomal protein L17 (96-104)
  source 1..27: mol_type = other RNA
aagaacgccgagagcaacgccgagctg

SEQ ID NO: 50356 - RNA, 27 nt, synthetic construct
  misc_feature 1..27: note = Ras GTPase-activating-like protein IQGAP2 (729-737)
  source 1..27: mol_type = other RNA
aagaacgacctgctcagcgagctgctg

SEQ ID NO: 50357 - RNA, 27 nt, synthetic construct
  misc_feature 1..27: note = FACT complex subunit SPT16 (53-61)
  source 1..27: mol_type = other RNA
aagaacttcgacatggtgatcgtctac

SEQ ID NO: 50358 - RNA, 24 nt, synthetic construct
  misc_feature 1..24: note = Glutathione S-transferase theta-2B (23-30)
  source 1..24: mol_type = other RNA
aagaacggcatccccctggagctc

SEQ ID NO: 50359 - RNA, 45 nt, synthetic construct
  misc_feature 1..45: note = Stromal cell-derived factor 2 (197-211)
  source 1..45: mol_type = other RNA
aagcccagcgagctgctcaaggccgaggcccaccacgcggagctg

SEQ ID NO: 50360 - RNA, 36 nt, synthetic construct
  misc_feature 1..36: note = Spectrin beta chain, non-erythrocytic 1 (1179-1190)
  source 1..36: mol_type = other RNA
aagcaggccgaggccttcctgaacaaccaggagtac

SEQ ID NO: 50361 - RNA, 27 nt, synthetic construct
  misc_feature 1..27: note = Melanocyte protein PMEL (629-637)
  source 1..27: mol_type = other RNA
aagcaggacttcagcgtgccccagctg

SEQ ID NO: 50362 - RNA, 24 nt, synthetic construct
  misc_feature 1..24: note = EF-hand calcium-binding domain-containing protein 14 (264-271)
  source 1..24: mol_type = other RNA
aagcaggacatcctgtacctccac

SEQ ID NO: 50363 - RNA, 27 nt, synthetic construct
  misc_feature 1..27: note = Syntaxin-binding protein 6 (78-86)
  source 1..27: mol_type = other RNA
aagcagttcgagggcagcacctccttc

SEQ ID NO: 50364 - RNA, 27 nt, synthetic construct
  misc_feature 1..27: note = E3 ubiquitin-protein ligase makorin-1 (320-328)
  source 1..27: mol_type = other RNA
aagcagttcgagagcaagatcatcaag

SEQ ID NO: 50365 - RNA, 27 nt, synthetic construct
  misc_feature 1..27: note = Nucleoside diphosphate-linked moiety X motif 19 (337-345)
  source 1..27: mol_type = other RNA
aagcagttccaccgcatcgtgacctac

SEQ ID NO: 50366 - RNA, 30 nt, synthetic construct
  misc_feature 1..30: note = ADP-ribosylation factor GTPase-activating protein 2 (453-462)
  source 1..30: mol_type = other RNA
aagcagggcgtgaagagcgtcgccgggaag

SEQ ID NO: 50367 - RNA, 27 nt, synthetic construct
  misc_feature 1..27: note = Lanosterol 14-alpha demethylase (169-177)
  source 1..27: mol_type = other RNA
aagcagcacgtgagcatcatcgagaag

SEQ ID NO: 50368 - RNA, 30 nt, synthetic construct
  misc_feature 1..30: note = 60 kDa SS-A/Ro ribonucleoprotein (14-23)
  source 1..30: mol_type = other RNA
aagcagatcgccaacagccaggacggctac

SEQ ID NO: 50369 - RNA, 27 nt, synthetic construct
  misc_feature 1..27: note = Cytoplasmic dynein 1 heavy chain 1 (3819-3827)
  source 1..27: mol_type = other RNA
aagcagatccacttcctgtaccagtac

SEQ ID NO: 50370 - RNA, 30 nt, synthetic construct
  misc_feature 1..30: note = Catenin alpha-1 (287-296)
  source 1..30: mol_type = other RNA
aagcagatcatcgtggaccccctgagcttc

SEQ ID NO: 50371 - RNA, 30 nt, synthetic construct
  misc_feature 1..30: note = Cytoplasmic dynein 1 heavy chain 1 (1464-1473)
  source 1..30: mol_type = other RNA
aagcagatccgcgaggtgtggaacacctac

SEQ ID NO: 50372 - RNA, 33 nt, synthetic construct
  misc_feature 1..33: note = Proteasome subunit alpha type-4 (158-168)
  source 1..33: mol_type = other RNA
aagcagaaggaggtggagcagctgatcaagaag

SEQ ID NO: 50373 - RNA, 33 nt, synthetic construct
  misc_feature 1..33: note = Tyrosinase (505-515)
  source 1..33: mol_type = other RNA
aagcagctgcccgaggagaagcagccgctcctg

SEQ ID NO: 50374 - RNA, 30 nt, synthetic construct
  misc_feature 1..30: note = Guanine nucleotide-binding protein G(s) subunit alpha isoforms short (28-37)
  source 1..30: mol_type = other RNA
aagcagctgcagaaggacaagcaggtgtac

SEQ ID NO: 50375 - RNA, 27 nt, synthetic construct
  misc_feature 1..27: note = Small kinetochore-associated protein (228-236)
  source 1..27: mol_type = other RNA
aagcagatggaggagctgcaggccctc

SEQ ID NO: 50376 - RNA, 27 nt, synthetic construct
  misc_feature 1..27: note = DnaJ homolog subfamily C member 4 (151-159)
  source 1..27: mol_type = other RNA
aagcagaacaagcaggtgctgggctac

SEQ ID NO: 50377 - RNA, 27 nt, synthetic construct
  misc_feature 1..27: note = Cytoplasmic dynein 1 heavy chain 1 (3266-3274)
  source 1..27: mol_type = other RNA
aagcagcaggaggtgatcgccgacaag

SEQ ID NO: 50378 - RNA, 27 nt, synthetic construct
  misc_feature 1..27: note = Pyridoxal kinase (29-37)
  source 1..27: mol_type = other RNA
aagcagcagaacccccgcctggtgtac

SEQ ID NO: 50379 - RNA, 27 nt, synthetic construct
  misc_feature 1..27: note = PRELI domain-containing protein 1, mitochondrial (211-219)
  source 1..27: mol_type = other RNA
aagcagcagcagcagcagcagttcgtg

SEQ ID NO: 50380 - RNA, 27 nt, synthetic construct
  misc_feature 1..27: note = Mitochondrial import receptor subunit TOM7 homolog (9-17)
  source 1..27: mol_type = other RNA
aagcagcgcctgcagcagctcttcaag

SEQ ID NO: 50381 - RNA, 27 nt, synthetic construct
  misc_feature 1..27: note = Protein Simiate (164-172)
  source 1..27: mol_type = other RNA
aagcagtacgaggaggtgatggtcaag

SEQ ID NO: 50382 - RNA, 27 nt, synthetic construct
  misc_feature 1..27: note = 60S ribosomal protein L35a (45-53)
  source 1..27: mol_type = other RNA
aagcgctgcgcctacgtgtacaaggcc

SEQ ID NO: 50383 - RNA, 27 nt, synthetic construct
  misc_feature 1..27: note = Fructose-bisphosphate aldolase A (82-90)
  source 1..27: mol_type = other RNA
aagcgctgccagtacgtgaccgagaag

SEQ ID NO: 50384 - RNA, 27 nt, synthetic construct
  misc_feature 1..27: note = Trafficking kinesin-binding protein 2 (839-847)
  source 1..27: mol_type = other RNA
aagcgcctgggcatcgcccgggtggtc

SEQ ID NO: 50385 - RNA, 27 nt, synthetic construct
  misc_feature 1..27: note = Chitinase domain-containing protein 1 (226-234)
  source 1..27: mol_type = other RNA
aagcgcgtgggcctgatccacatgctc

SEQ ID NO: 50386 - RNA, 33 nt, synthetic construct
  misc_feature 1..33: note = Myc proto-oncogene protein (324-334)
  source 1..33: mol_type = other RNA
aagcgcgtgaagctggacagcgtccgggtgctc

SEQ ID NO: 50387 - RNA, 27 nt, synthetic construct
  misc_feature 1..27: note = Msx2-interacting protein (27-35)
  source 1..27: mol_type = other RNA
aagcgctacggccgggtggagagcgtc

SEQ ID NO: 50388 - RNA, 33 nt, synthetic construct
  misc_feature 1..33: note = DmX-like protein 2 (1150-1160)
  source 1..33: mol_type = other RNA
aagagcgacgccctgctctccaaggaccgctac

SEQ ID NO: 50389 - RNA, 33 nt, synthetic construct
  misc_feature 1..33: note = Mitochondrial Rho GTPase 1 (528-538)
  source 1..33: mol_type = other RNA
aagagcgacctgcacgaggtgaagcaggagtac

SEQ ID NO: 50390 - RNA, 42 nt, synthetic construct
  misc_feature 1..42: note = LON peptidase N-terminal domain and RING finger protein 2 (360-373)
  source 1..42: mol_type = other RNA
aagagcgacatgctgggcaacaccaactccagcgtgctctac

SEQ ID NO: 50391 - RNA, 27 nt, synthetic construct
  misc_feature 1..27: note = Transmembrane protein 70, mitochondrial (84-92)
  source 1..27: mol_type = other RNA
aagagcgaggacggccgcctgatctac

SEQ ID NO: 50392 - RNA, 33 nt, synthetic construct
  misc_feature 1..33: note = Coiled-coil domain-containing protein 50 (470-480)
  source 1..33: mol_type = other RNA
aagagcgagtccagccacaagggcttccactac

SEQ ID NO: 50393 - RNA, 30 nt, synthetic construct
  misc_feature 1..30: note = 26S proteasome non-ATPase regulatory subunit 2 (545-554)
  source 1..30: mol_type = other RNA
aagagcgagaccgagctgaaggacacctac

SEQ ID NO: 50394 - RNA, 24 nt, synthetic construct
  misc_feature 1..24: note = Clathrin heavy chain 1 (706-713)
  source 1..24: mol_type = other RNA
aagagcttcgagggcctgttctac

SEQ ID NO: 50395 - RNA, 27 nt, synthetic construct
  misc_feature 1..27: note = Formin-1 (1326-1334)
  source 1..27: mol_type = other RNA
aagagcttcgagaccaccgtgcgctac

SEQ ID NO: 50396 - RNA, 27 nt, synthetic construct
  misc_feature 1..27: note = Ubiquitin-like modifier-activating enzyme 6 (628-636)
  source 1..27: mol_type = other RNA
aagagcttccccgccgccatcgagcac

SEQ ID NO: 50397 - RNA, 30 nt, synthetic construct
  misc_feature 1..30: note = Probable cation-transporting ATPase 13A3 (833-842)
  source 1..30: mol_type = other RNA
aagagcttctccgtgatcctggagcacttc

SEQ ID NO: 50398 - RNA, 30 nt, synthetic construct
  misc_feature 1..30: note = Glutamate-rich WD repeat-containing protein 1 (341-350)
  source 1..30: mol_type = other RNA
aagagcggctcccccgtggccaccttcaag

SEQ ID NO: 50399 - RNA, 33 nt, synthetic construct
  misc_feature 1..33: note = Bifunctional UDP-N-acetylglucosamine 2-epimerase/N-acetylmannosamine kinase (375-385)
  source 1..33: mol_type = other RNA
aagagcatcgacctgcaggagcccctccagaag

SEQ ID NO: 50400 - RNA, 27 nt, synthetic construct
  misc_feature 1..27: note = Retinoblastoma-like protein 1 (69-77)
  source 1..27: mol_type = other RNA
aagagcatcatccccaccgtgggcaag

SEQ ID NO: 50401 - RNA, 30 nt, synthetic construct
  misc_feature 1..30: note = NAD(P)H dehydrogenase (quinone) 1 (259-268)
  source 1..30: mol_type = other RNA
aagagcatccccaccgacaaccagatcaag

SEQ ID NO: 50402 - RNA, 27 nt, synthetic construct
  misc_feature 1..27: note = Small kinetochore-associated protein (70-78)
  source 1..27: mol_type = other RNA
aagagcctgctccccgtgcgctccaag

SEQ ID NO: 50403 - RNA, 33 nt, synthetic construct
  misc_feature 1..33: note = Leucine-rich repeat-containing protein 40 (210-220)
  source 1..33: mol_type = other RNA
aagagcctgcccgccgagatcaaccgcatgaag

SEQ ID NO: 50404 - RNA, 27 nt, synthetic construct
  misc_feature 1..27: note = Putative ATP-dependent RNA helicase DHX57 (635-643)
  source 1..27: mol_type = other RNA
aagagctccgccacccgcctgctctac

SEQ ID NO: 50405 - RNA, 27 nt, synthetic construct
  misc_feature 1..27: note = Ankycorbin (402-410)
  source 1..27: mol_type = other RNA
aagagctcccccagcgtgctgatccac

SEQ ID NO: 50406 - RNA, 30 nt, synthetic construct
  misc_feature 1..30: note = Alternative protein MKKS (31-40)
  source 1..30: mol_type = other RNA
aagagctcccccgtgttccagatcccgaag

SEQ ID NO: 50407 - RNA, 27 nt, synthetic construct
  misc_feature 1..27: note = ATP synthase F(0) complex subunit C2, mitochondrial (31-39)
  source 1..27: mol_type = other RNA
aagagcacctcccagctgctcagccgc

SEQ ID NO: 50408 - RNA, 27 nt, synthetic construct
  misc_feature 1..27: note = Clathrin heavy chain 1 (468-476)
  source 1..27: mol_type = other RNA
aagagcgtggaccccaccctggccctc

SEQ ID NO: 50409 - RNA, 30 nt, synthetic construct
  misc_feature 1..30: note = Programmed cell death 6-interacting protein (574-583)
  source 1..30: mol_type = other RNA
aagagcgtgaacttcgacatgacctccaag

SEQ ID NO: 50410 - RNA, 33 nt, synthetic construct
  misc_feature 1..33: note = Sodium/potassium-transporting ATPase subunit beta-3 (33-43)
  source 1..33: mol_type = other RNA
aagagctggggctcccagtacgtggtcgggaag

SEQ ID NO: 50411 - RNA, 27 nt, synthetic construct
  misc_feature 1..27: note = Arf-GAP with SH3 domain, ANK repeat and PH domain-containing protein 1 (73-81)
  source 1..27: mol_type = other RNA
aagaccgccgacaagctgaagcagtac

SEQ ID NO: 50412 - RNA, 30 nt, synthetic construct
  misc_feature 1..30: note = DNA-directed RNA polymerase II subunit RPB1 (853-862)
  source 1..30: mol_type = other RNA
aagaccgccgagaccggctacatccagcgc

SEQ ID NO: 50413 - RNA, 30 nt, synthetic construct
  misc_feature 1..30: note = DNA-directed RNA polymerase III subunit RPC1 (133-142)
  source 1..30: mol_type = other RNA
aagaccgccgagaccggctacatgcagcgc

SEQ ID NO: 50414 - RNA, 27 nt, synthetic construct
  misc_feature 1..27: note = Chromodomain-helicase-DNA-binding protein 9 (992-1000)
  source 1..27: mol_type = other RNA
aagaccgacgacagcctggagaagtac

SEQ ID NO: 50415 - RNA, 27 nt, synthetic construct
  misc_feature 1..27: note = TBC1 domain family member 15 (379-387)
  source 1..27: mol_type = other RNA
aagaccgacgagtacttccgcatgaag

SEQ ID NO: 50416 - RNA, 27 nt, synthetic construct
  misc_feature 1..27: note = Elongator complex protein 6 (28-36)
  source 1..27: mol_type = other RNA
aagaccgacggcagcttcctggtgcac

SEQ ID NO: 50417 - RNA, 27 nt, synthetic construct
  misc_feature 1..27: note = PHD finger-like domain-containing protein 5A (95-103)
  source 1..27: mol_type = other RNA
aagaccgacctgttctacgagcgcaag

SEQ ID NO: 50418 - RNA, 30 nt, synthetic construct
  misc_feature 1..30: note = EF-hand calcium-binding domain-containing protein 7 (222-231)
  source 1..30: mol_type = other RNA
aagaccgaccccgagaccttcctgaacaag

SEQ ID NO: 50419 - RNA, 33 nt, synthetic construct
  misc_feature 1..33: note = A-kinase anchor protein 13 (287-297)
  source 1..33: mol_type = other RNA
aagaccgacagcaagtccatcatgcgcatgaag

SEQ ID NO: 50420 - RNA, 30 nt, synthetic construct
  misc_feature 1..30: note = Tumor necrosis factor receptor superfamily member 14 (17-26)
  source 1..30: mol_type = other RNA
aagaccgacgtgctgcgcctcgtcctgtac

SEQ ID NO: 50421 - RNA, 27 nt, synthetic construct
  misc_feature 1..27: note = Poly (ADP-ribose) polymerase 14 (1027-1035)
  source 1..27: mol_type = other RNA
aagaccgacgtggtcgtgaacagcgtg

SEQ ID NO: 50422 - RNA, 30 nt, synthetic construct
  misc_feature 1..30: note = Uncharacterized protein C19orf43 (137-146)
  source 1..30: mol_type = other RNA
aagaccgaggacgaggtgctgaccagcaag

SEQ ID NO: 50423 - RNA, 27 nt, synthetic construct
  misc_feature 1..27: note = M-phase phosphoprotein 8 (68-76)
  source 1..27: mol_type = other RNA
aagaccgagggcgggaaggtgctgtac

SEQ ID NO: 50424 - RNA, 33 nt, synthetic construct
  misc_feature 1..33: note = Protein PRR5-ARHGAP8 (76-86)
  source 1..33: mol_type = other RNA
aagaccgagctgggcagcttcttcaccgagtac

SEQ ID NO: 50425 - RNA, 33 nt, synthetic construct
  misc_feature 1..33: note = Switch-associated protein 70 (282-292)
  source 1..33: mol_type = other RNA
aagaccttcgagatcagcgcctccgacaagaag

SEQ ID NO: 50426 - RNA, 30 nt, synthetic construct
  misc_feature 1..30: note = Cytoplasmic dynein 1 heavy chain 1 (872-881)
  source 1..30: mol_type = other RNA
aagaccttcagcgagatcctgaaccgcgtg

SEQ ID NO: 50427 - RNA, 30 nt, synthetic construct
  misc_feature 1..30: note = N-acetylglucosamine-6-sulfatase (191-200)
  source 1..30: mol_type = other RNA
aagaccatcgaccccgagctgctcggcaag

SEQ ID NO: 50428 - RNA, 33 nt, synthetic construct
  misc_feature 1..33: note = DNA/RNA-binding protein KIN17 (231-241)
  source 1..33: mol_type = other RNA
aagaccatcggcagctccgccagcgtgaagcgc

SEQ ID NO: 50429 - RNA, 33 nt, synthetic construct
  misc_feature 1..33: note = FH2 domain-containing protein 1 (90-100)
  source 1..33: mol_type = other RNA
aagaccatccccgaggagcaggtgcgcggcaag

SEQ ID NO: 50430 - RNA, 27 nt, synthetic construct
  misc_feature 1..27: note = Nck-associated protein 1 (635-643)
  source 1..27: mol_type = other RNA
aagaccatcagccaggccgtgaacaag

SEQ ID NO: 50431 - RNA, 27 nt, synthetic construct
  misc_feature 1..27: note = Endoplasmic reticulum-Golgi intermediate compartment protein 3 (4-12)
  source 1..27: mol_type = other RNA
aagaccctggaggacttccgcgtgaag

SEQ ID NO: 50432 - RNA, 30 nt, synthetic construct
  misc_feature 1..30: note = Mitochondrial inner membrane protease ATP23 homolog (100-109)
  source 1..30: mol_type = other RNA
aagaccctggagaccaacccctacgtgaag

SEQ ID NO: 50433 - RNA, 36 nt, synthetic construct
  misc_feature 1..36: note = cAMP-dependent protein kinase type I-alpha regulatory subunit (123-134)
  source 1..36: mol_type = other RNA
aagaccatggccgccctggcgaaggccatcgagaag

SEQ ID NO: 50434 - RNA, 30 nt, synthetic construct
  misc_feature 1..30: note = Arfaptin-2 (216-225)
  source 1..30: mol_type = other RNA
aagaccatggaggacaccctgatgacggtg

SEQ ID NO: 50435 - RNA, 33 nt, synthetic construct
  misc_feature 1..33: note = Telomere-associated protein RIF1 (1915-1925)
  source 1..33: mol_type = other RNA
aagaccatggagctgaacgtgggcaacgaggcc

SEQ ID NO: 50436 - RNA, 33 nt, synthetic construct
  misc_feature 1..33: note = Protein GREB1 (304-314)
  source 1..33: mol_type = other RNA
aagaccatgaccagcacggagcagtccctgtac

SEQ ID NO: 50437 - RNA, 36 nt, synthetic construct
  misc_feature 1..36: note = Protein GREB1 (304-315)
  source 1..36: mol_type = other RNA
aagaccatgaccagcacggagcagtccctgtactac

SEQ ID NO: 50438 - RNA, 27 nt, synthetic construct
  misc_feature 1..27: note = U3 small nucleolar RNA-associated protein 18 homolog (120-128)
  source 1..27: mol_type = other RNA
aagaccaaccccaagatccagagcatc

SEQ ID NO: 50439 - RNA, 27 nt, synthetic construct
  misc_feature 1..27: note = Huntingtin-interacting protein 1-related protein (29-37)
  source 1..27: mol_type = other RNA
aagacccaggccatcagcatctccaag

SEQ ID NO: 50440 - RNA, 27 nt, synthetic construct
  misc_feature 1..27: note = Proteasome subunit alpha type-1 (121-129)
  source 1..27: mol_type = other RNA
aagacccagatccccacccagcgctac

SEQ ID NO: 50441 - RNA, 27 nt, synthetic construct
  misc_feature 1..27: note = F-box only protein 32 (74-82)
  source 1..27: mol_type = other RNA
aagacccagtacttccaccaggagaag

SEQ ID NO: 50442 - RNA, 33 nt, synthetic construct
  misc_feature 1..33: note = Oxysterol-binding protein-related protein 1 (153-163)
  source 1..33: mol_type = other RNA
aagaccaccgagctgacggccctcctgaaccgc

SEQ ID NO: 50443 - RNA, 33 nt, synthetic construct
  misc_feature 1..33: note = G patch domain and KOW motifs-containing protein (49-59)
  source 1..33: mol_type = other RNA
aagaccgtggagggccgcgagctgcagagcgtc

SEQ ID NO: 50444 - RNA, 27 nt, synthetic construct
  misc_feature 1..27: note = Melanocyte protein PMEL (154-162)
  source 1..27: mol_type = other RNA
aagacctgggaccaggtgcccttcagc

SEQ ID NO: 50445 - RNA, 36 nt, synthetic construct
  misc_feature 1..36: note = Melanocyte protein PMEL (154-165)
  source 1..36: mol_type = other RNA
aagacctgggaccaggtgcccttcagcgtctccgtg

SEQ ID NO: 50446 - RNA, 24 nt, synthetic construct
  misc_feature 1..24: note = Melanocyte protein PMEL (154-161)
  source 1..24: mol_type = other RNA
aagacctggggccagtactggcag

SEQ ID NO: 50447 - RNA, 27 nt, synthetic construct
  misc_feature 1..27: note = UDP-glucose 4-epimerase (176-184)
  source 1..27: mol_type = other RNA
aagacctggaacgccgtgctgctccgc

SEQ ID NO: 50448 - RNA, 30 nt, synthetic construct
  misc_feature 1..30: note = UDP-glucose 4-epimerase (176-185)
  source 1..30: mol_type = other RNA
aagacctggaacgccgtgctgctccgctac

SEQ ID NO: 50449 - RNA, 27 nt, synthetic construct
  misc_feature 1..27: note = Transcription factor IIIA (198-206)
  source 1..27: mol_type = other RNA
aagacctggaccgagctgctcaagcac

SEQ ID NO: 50450 - RNA, 33 nt, synthetic construct
  misc_feature 1..33: note = A-kinase anchor protein 8-like (264-274)
  source 1..33: mol_type = other RNA
aagacctggaccacggccgacttccgcaccaag

SEQ ID NO: 50451 - RNA, 33 nt, synthetic construct
  misc_feature 1..33: note = Nuclear pore complex protein Nup107 (574-584)
  source 1..33: mol_type = other RNA
aagacctacatccagctgctcatccgcgagaag

SEQ ID NO: 50452 - RNA, 27 nt, synthetic construct
  misc_feature 1..27: note = Poly(A)-specific ribonuclease PARN-like domain-containing protein 1 (364-372)
  source 1..27: mol_type = other RNA
aaggtggcccacctgctcctgcagaag

SEQ ID NO: 50453 - RNA, 33 nt, synthetic construct
  misc_feature 1..33: note = Mesoderm development candidate 1 (236-246)
  source 1..33: mol_type = other RNA
aaggtggcccccagcgagctggcccgctcccgg

SEQ ID NO: 50454 - RNA, 33 nt, synthetic construct
  misc_feature 1..33: note = Calponin-3 (251-261)
  source 1..33: mol_type = other RNA
aaggtggccagccagaagggcatgtccgtctac

SEQ ID NO: 50455 - RNA, 27 nt, synthetic construct
  misc_feature 1..27: note = Trafficking protein particle complex subunit 11 (134-142)
  source 1..27: mol_type = other RNA
aaggtggccgtcgtgctgatccagaag

SEQ ID NO: 50456 - RNA, 27 nt, synthetic construct
  misc_feature 1..27: note = Poly(A) polymerase gamma (590-598)
  source 1..27: mol_type = other RNA
aaggtggacagcaccgtcaagaccgtg

SEQ ID NO: 50457 - RNA, 36 nt, synthetic construct
  misc_feature 1..36: note = Actin-related protein 2/3 complex subunit 3 (147-158)
  source 1..36: mol_type = other RNA
aaggtgttcgacccccagaacgacaagccgagcaag

SEQ ID NO: 50458 - RNA, 36 nt, synthetic construct
  misc_feature 1..36: note = Myosin regulatory light chain 10 (142-153)
  source 1..36: mol_type = other RNA
aaggtgttcgacaccgagggcaaggggttcgtcaag

SEQ ID NO: 50459 - RNA, 27 nt, synthetic construct
  misc_feature 1..27: note = AP-2 complex subunit mu (405-413)
  source 1..27: mol_type = other RNA
aaggtgttcgagcccaagctgaactac

SEQ ID NO: 50460 - RNA, 27 nt, synthetic construct
  misc_feature 1..27: note = Lysine-specific histone demethylase 1A (228-236)
  source 1..27: mol_type = other RNA
aaggtgttcctgttcatccgcaaccgg

SEQ ID NO: 50461 - RNA, 27 nt, synthetic construct
  misc_feature 1..27: note = Serine/threonine-protein phosphatase 2A activator (141-149)
  source 1..27: mol_type = other RNA
aaggtgttcaaccgctacctggaggtc

SEQ ID NO: 50462 - RNA, 27 nt, synthetic construct
  misc_feature 1..27: note = Long-chain-fatty-acid-CoA ligase 3 (90-98)
  source 1..27: mol_type = other RNA
aaggtgttcacctacgccaagaacaag

SEQ ID NO: 50463 - RNA, 27 nt, synthetic construct
  misc_feature 1..27: note = Caspase-2 (77-85)
  source 1..27: mol_type = other RNA
aaggtgggcagcttctcccagaacgtc

SEQ ID NO: 50464 - RNA, 27 nt, synthetic construct
  misc_feature 1..27: note = Syntaxin-binding protein 1 (125-133)
  source 1..27: mol_type = other RNA
aaggtgatcaagaccctgaccgagatc

SEQ ID NO: 50465 - RNA, 33 nt, synthetic construct
  misc_feature 1..33: note = Zinc finger protein 721 (244-254)
  source 1..33: mol_type = other RNA
aaggtgatcagctccagctccagcttcgccaag

SEQ ID NO: 50466 - RNA, 30 nt, synthetic construct
  misc_feature 1..30: note = Protein kinase C delta type (353-362)
  source 1..30: mol_type = other RNA
aaggtgctgggcaaggggagcttcggcaag

SEQ ID NO: 50467 - RNA, 36 nt, synthetic construct
  misc_feature 1..36: note = Inositol 1,4,5-trisphosphate receptor type 1 (451-462)
  source 1..36: mol_type = other RNA
aaggtgctgggcagcatcgccgggaagctcgagaag

SEQ ID NO: 50468 - RNA, 33 nt, synthetic construct
  misc_feature 1..33: note = Nuclease-sensitive element-binding protein 1 (58-68)
  source 1..33: mol_type = other RNA
aaggtgctgggcaccgtcaagtggttcaacgtg

SEQ ID NO: 50469 - RNA, 27 nt, synthetic construct
  misc_feature 1..27: note = SLIT-ROBO Rho GTPase-activating protein 1 (156-164)
  source 1..27: mol_type = other RNA
aaggtgctgaacgagctctacaccgtc

SEQ ID NO: 50470 - RNA, 33 nt, synthetic construct
  misc_feature 1..33: note = Trafficking protein particle complex subunit 11 (54-64)
  source 1..33: mol_type = other RNA
aaggtgctgcccggcgaccacgagtacccgaag

SEQ ID NO: 50471 - RNA, 33 nt, synthetic construct
  misc_feature 1..33: note = B-cell CLL/lymphoma 7 protein family member B (20-30)
  source 1..33: mol_type = other RNA
aaggtgatggccgccatcgagaaggtccgcaag

SEQ ID NO: 50472 - RNA, 27 nt, synthetic construct
  misc_feature 1..27: note = Uncharacterized protein C10orf88 (295-303)
  source 1..27: mol_type = other RNA
aaggtgatgccccagaaccacagcttc

SEQ ID NO: 50473 - RNA, 27 nt, synthetic construct
  misc_feature 1..27: note = Max-like protein X (158-166)
  source 1..27: mol_type = other RNA
aaggtgaactacgagcagatcgtcaag

SEQ ID NO: 50474 - RNA, 27 nt, synthetic construct
  misc_feature 1..27: note = Mitochondrial antiviral-signaling protein (311-319)
  source 1..27: mol_type = other RNA
aaggtgcccgccaacccggccagcgtc

SEQ ID NO: 50475 - RNA, 30 nt, synthetic construct
  misc_feature 1..30: note = Guanine nucleotide-binding protein G(s) subunit alpha isoforms short (77-86)
  source 1..30: mol_type = other RNA
aaggtgcaggacatcaagaacaacctgaag

SEQ ID NO: 50476 - RNA, 30 nt, synthetic construct
  misc_feature 1..30: note = Kinectin (324-333)
  source 1..30: mol_type = other RNA
aaggtgcaggagctgcagaacctcctgaag

SEQ ID NO: 50477 - RNA, 27 nt, synthetic construct
  misc_feature 1..27: note = Centromere protein F (2787-2795)
  source 1..27: mol_type = other RNA
aaggtgcgcgaggagatcgccgagtac

SEQ ID NO: 50478 - RNA, 27 nt, synthetic construct
  misc_feature 1..27: note = Transcription elongation factor SPT6 (191-199)
  source 1..27: mol_type = other RNA
aaggtgagcgacggcatctaccagcac

SEQ ID NO: 50479 - RNA, 27 nt, synthetic construct
  misc_feature 1..27: note = Peptidyl-prolyl cis-trans isomerase FKBP3 (80-88)
  source 1..27: mol_type = other RNA
aaggtgagcgagcaggtcaagaacgtg

SEQ ID NO: 50480 - RNA, 27 nt, synthetic construct
  misc_feature 1..27: note = Exocyst complex component 7 (506-514)
  source 1..27: mol_type = other RNA
aaggtgaccgactacatcgccgagaag

SEQ ID NO: 50481 - RNA, 27 nt, synthetic construct
  misc_feature 1..27: note = 39S ribosomal protein L51, mitochondrial (1-9)
  source 1..27: mol_type = other RNA
aaggtggtcgaccgctggaacgagaag

SEQ ID NO: 50482 - RNA, 27 nt, synthetic construct
  misc_feature 1..27: note = Zinc finger CCHC-type and RNA-binding motif-containing protein 1 (35-43)
  source 1..27: mol_type = other RNA
aaggtggtcaaggtgaccatcatgaag

SEQ ID NO: 50483 - RNA, 27 nt, synthetic construct
  misc_feature 1..27: note = Liprin-beta-1 (756-764)
  source 1..27: mol_type = other RNA
aaggtggtcagcgtgctgcaccacctc

SEQ ID NO: 50484 - RNA, 27 nt, synthetic construct
  misc_feature 1..27: note = Pre-mRNA-splicing factor SPF27 (136-144)
  source 1..27: mol_type = other RNA
aaggtgtacaacgagaacctggtccac

SEQ ID NO: 50485 - RNA, 27 nt, synthetic construct
  misc_feature 1..27: note = Extended synaptotagmin-2 (225-233)
  source 1..27: mol_type = other RNA
aaggtgtacaccgagaacgtcgacaag

SEQ ID NO: 50486 - RNA, 27 nt, synthetic construct
  misc_feature 1..27: note = DNA helicase MCM8 (563-571)
  source 1..27: mol_type = other RNA
aagtacatcggctacgcccgccagtac

SEQ ID NO: 50487 - RNA, 27 nt, synthetic construct
  misc_feature 1..27: note = Ubiquitin-associated protein 2-like (970-978)
  source 1..27: mol_type = other RNA
aagtaccccccgccctacaagcacttc

SEQ ID NO: 50488 - RNA, 27 nt, synthetic construct
  misc_feature 1..27: note = Fc receptor-like protein 3 (587-595)
  source 1..27: mol_type = other RNA
ctggccgccgcggccgccctcctgcac

SEQ ID NO: 50489 - RNA, 30 nt, synthetic construct
  misc_feature 1..30: note = Nucleosome assembly protein 1-like 1 (320-329)
  source 1..30: mol_type = other RNA
ctggccgccgacttcgagatcggccacttc

SEQ ID NO: 50490 - RNA, 27 nt, synthetic construct
  misc_feature 1..27: note = Lanosterol 14-alpha demethylase (46-54)
  source 1..27: mol_type = other RNA
ctggccgccggccacctcgtgcagctg

SEQ ID NO: 50491 - RNA, 24 nt, synthetic construct
  misc_feature 1..24: note = KIAA1751 protein (14-21)
  source 1..24: mol_type = other RNA
ctggccgacgccctcctgctggag

SEQ ID NO: 50492 - RNA, 27 nt, synthetic construct
  misc_feature 1..27: note = Tripartite motif-containing protein 35 (187-195)
  source 1..27: mol_type = other RNA
ctggccgacgagaagatgaagcagctc

SEQ ID NO: 50493 - RNA, 27 nt, synthetic construct
  misc_feature 1..27: note = Rho GTPase-activating protein 11B (163-171)
  source 1..27: mol_type = other RNA
ctggccgaccacaccgtgcacgtcctc

SEQ ID NO: 50494 - RNA, 30 nt, synthetic construct
  misc_feature 1..30: note = Annexin A1 (198-207)
  source 1..30: mol_type = other RNA
ctggccgacagcgacgcccgcgcgctctac

SEQ ID NO: 50495 - RNA, 33 nt, synthetic construct
  misc_feature 1..33: note = Macrophage migration inhibitory factor (82-92)
  source 1..33: mol_type = other RNA
ctggccgagcgcctccggatcagccccgaccgc

SEQ ID NO: 50496 - RNA, 27 nt, synthetic construct
  misc_feature 1..27: note = MICOS complex subunit MIC10 (43-51)
  source 1..27: mol_type = other RNA
ctggccttcggcagcgggatgggcctc

SEQ ID NO: 50497 - RNA, 27 nt, synthetic construct
  misc_feature 1..27: note = Dedicator of cytokinesis protein 11 (1003-1011)
  source 1..27: mol_type = other RNA
ctggccatcatcccccacgtgaccatc

SEQ ID NO: 50498 - RNA, 33 nt, synthetic construct
  misc_feature 1..33: note = Thioredoxin domain-containing protein 15 (243-253)
  source 1..33: mol_type = other RNA
ctggccctcgacgccagccagcactccagcctg

SEQ ID NO: 50499 - RNA, 27 nt, synthetic construct
  misc_feature 1..27: note = Ribosomal protein S6 kinase alpha-2 (72-80)
  source 1..27: mol_type = other RNA
ctggccctcgaccacctgcacagcctg

SEQ ID NO: 50500 - RNA, 27 nt, synthetic construct
  misc_feature 1..27: note = Breast cancer type 2 susceptibility protein (901-909)
  source 1..27: mol_type = other RNA
ctggccctcggcaacaccaaggagctg

SEQ ID NO: 50501 - RNA, 27 nt, synthetic construct
  misc_feature 1..27: note = Dual specificity protein phosphatase 3 (113-121)
  source 1..27: mol_type = other RNA
ctggcccagaagaacggccgcgtgctc

SEQ ID NO: 50502 - RNA, 27 nt, synthetic construct
  misc_feature 1..27: note = Transmembrane protein 8A (26-34)
  source 1..27: mol_type = other RNA
ctggcccgccccccgcccgccagcgcg

SEQ ID NO: 50503 - RNA, 36 nt, synthetic construct
  misc_feature 1..36: note = Serine protease 56 (350-361)
  source 1..36: mol_type = other RNA
ctggcctgggaccccccgcaggagctccaggccgac

SEQ ID NO: 50504 - RNA, 30 nt, synthetic construct
  misc_feature 1..30: note = Vacuolar protein sorting-associated protein 13B (3150-3159)
  source 1..30: mol_type = other RNA
ctggacgccagcctcctgcagaagcagatc

SEQ ID NO: 50505 - RNA, 39 nt, synthetic construct
  misc_feature 1..39: note = Zinc finger protein castor homolog 1 (1616-1628)
  source 1..39: mol_type = other RNA
ctggacggcagcctctccctgggggccgagcccggcagc

SEQ ID NO: 50506 - RNA, 27 nt, synthetic construct
  misc_feature 1..27: note = Connector enhancer of kinase suppressor of ras 3 (161-169)
  source 1..27: mol_type = other RNA
ctggacctcaccaccacggtgcagaag

SEQ ID NO: 50507 - RNA, 30 nt, synthetic construct
  misc_feature 1..30: note = Coiled-coil domain-containing protein 66 (308-317)
  source 1..30: mol_type = other RNA
ctggaccagagccgcgagaccgtgctcctg

SEQ ID NO: 50508 - RNA, 33 nt, synthetic construct
  misc_feature 1..33: note = Protein S100-A9 (66-76)
  source 1..33: mol_type = other RNA
ctggacaccaacgccgacaagcagctcagcttc

SEQ ID NO: 50509 - RNA, 27 nt, synthetic construct
  misc_feature 1..27: note = Uveal autoantigen with coiled-coil domains and ankyrin repeats (769-777)
  source 1..27: mol_type = other RNA
ctggacgtgacccagaagtacaccgag

SEQ ID NO: 50510 - RNA, 27 nt, synthetic construct
  misc_feature 1..27: note = Actin-binding LIM protein 1 (304-312)
  source 1..27: mol_type = other RNA
ctggactacaaggacctcgccgccatc

SEQ ID NO: 50511 - RNA, 30 nt, synthetic construct
  misc_feature 1..30: note = Uncharacterized protein (163-172)
  source 1..30: mol_type = other RNA
ctggaggagtacaacaagatcctcctggac

SEQ ID NO: 50512 - RNA, 30 nt, synthetic construct
  misc_feature 1..30: note = Tyrosinase (279-288)
  source 1..30: mol_type = other RNA
ctggaggagtacaacagccaccagtccctc

SEQ ID NO: 50513 - RNA, 30 nt, synthetic construct
  misc_feature 1..30: note = Vimentin (404-413)
  source 1..30: mol_type = other RNA
ctggagggcgaggagagccgcatctccctc

SEQ ID NO: 50514 - RNA, 51 nt, synthetic construct
  misc_feature 1..51: note = Keratin, type I cytoskeletal 10 (257-273)
  source 1..51: mol_type = other RNA
ctggagggcgaggggagctccggcgggggcgggcgcggcggcgggagcttc

SEQ ID NO: 50515 - RNA, 30 nt, synthetic construct
  misc_feature 1..30: note = Eukaryotic translation initiation factor 3 subunit M (232-241)
  source 1..30: mol_type = other RNA
ctggagggcgagctcatccacgacctgctg

SEQ ID NO: 50516 - RNA, 27 nt, synthetic construct
  misc_feature 1..27: note = Nestin (589-597)
  source 1..27: mol_type = other RNA
ctggagaaggagaacaaggagctcctg

SEQ ID NO: 50517 - RNA, 33 nt, synthetic construct
  misc_feature 1..33: note = Protein FAM167B (131-141)
  source 1..33: mol_type = other RNA
ctggagctcgagcccggcgccgggctggccctg

SEQ ID NO: 50518 - RNA, 27 nt, synthetic construct
  misc_feature 1..27: note = Nestin (560-568)
  source 1..27: mol_type = other RNA
ctggagaaccagagccacgagaccctc

SEQ ID NO: 50519 - RNA, 30 nt, synthetic construct
  misc_feature 1..30: note = Alpha-actinin-4 (707-716)
  source 1..30: mol_type = other RNA
ctggagcagcagcaccagctcatccaggag

SEQ ID NO: 50520 - RNA, 33 nt, synthetic construct
  misc_feature 1..33: note = Ribosomal protein S6 kinase delta-1 (1025-1035)
  source 1..33: mol_type = other RNA
ctggagcgcctcggcgccggggtggccggcgtc

SEQ ID NO: 50521 - RNA, 27 nt, synthetic construct
  misc_feature 1..27: note = Coiled-coil domain-containing protein 77 (409-417)
  source 1..27: mol_type = other RNA
ctggagcgccggcgcatcctcgaggtg

SEQ ID NO: 50522 - RNA, 27 nt, synthetic construct
  misc_feature 1..27: note = Hydrocephalus-inducing protein homolog (151-159)
  source 1..27: mol_type = other RNA
ctgttcgaccacgtgaccgagcgcgag

SEQ ID NO: 50523 - RNA, 21 nt, synthetic construct
  misc_feature 1..21: note = Nucleoredoxin (9-15)
  source 1..21: mol_type = other RNA
ctgggcgagaagctcgtgacc

SEQ ID NO: 50524 - RNA, 39 nt, synthetic construct
  misc_feature 1..39: note = Protein S100-A9 (26-38)
  source 1..39: mol_type = other RNA
ctgggccaccccgacaccctcaaccagggggagttcaag

SEQ ID NO: 50525 - RNA, 27 nt, synthetic construct
  misc_feature 1..27: note = Serine beta-lactamase-like protein LACTB, mitochondrial (52-60)
  source 1..27: mol_type = other RNA
ctgggcgtgaagctcgccgggggcctg

SEQ ID NO: 50526 - RNA, 33 nt, synthetic construct
  misc_feature 1..33: note = Galectin-1 (43-53)
  source 1..33: mol_type = other RNA
ctgcacttcaacccccgcttcaacgcccacggc

SEQ ID NO: 50527 - RNA, 30 nt, synthetic construct
  misc_feature 1..30: note = Translocon-associated protein subunit gamma (176-185)
  source 1..30: mol_type = other RNA
ctgatcgccctcctgagcaccggctccaag

SEQ ID NO: 50528 - RNA, 30 nt, synthetic construct
  misc_feature 1..30: note = Alpha-actinin-4 (718-727)
  source 1..30: mol_type = other RNA
ctgatcttcgacaacaagcacaccaactac

SEQ ID NO: 50529 - RNA, 30 nt, synthetic construct
  misc_feature 1..30: note = Solute carrier family 40 member 1 (135-144)
  source 1..30: mol_type = other RNA
ctgatcatcaccatcgccaacatcgccaac

SEQ ID NO: 50530 - RNA, 33 nt, synthetic construct
  misc_feature 1..33: note = Prohibitin (163-173)
  source 1..33: mol_type = other RNA
ctgatcctcgacgacgtgagcctgacccacctg

SEQ ID NO: 50531 - RNA, 30 nt, synthetic construct
  misc_feature 1..30: note = Lysosomal-associated transmembrane protein 4B (214-223)
  source 1..30: mol_type = other RNA
ctgatctaccccaacagcatccaggagtac

SEQ ID NO: 50532 - RNA, 27 nt, synthetic construct
  misc_feature 1..27: note = Desmoplakin (486-494)
  source 1..27: mol_type = other RNA
ctgaaggagcaggccatcaagatcacc

SEQ ID NO: 50533 - RNA, 27 nt, synthetic construct
  misc_feature 1..27: note = Histone deacetylase complex subunit SAP30L (60-68)
  source 1..27: mol_type = other RNA
ctgaagctcgacatcgacaagagcctg

SEQ ID NO: 50534 - RNA, 30 nt, synthetic construct
  misc_feature 1..30: note = Lipoxygenase homology domain-containing protein 1 (933-942)
  source 1..30: mol_type = other RNA
ctgaagagctccaagaccaacagcgacaag

SEQ ID NO: 50535 - RNA, 27 nt, synthetic construct
  misc_feature 1..27: note = Alpha-1-antichymotrypsin (12-20)
  source 1..27: mol_type = other RNA
ctgctcgccgccggcttctgccccgcg

SEQ ID NO: 50536 - RNA, 33 nt, synthetic construct
  misc_feature 1..33: note = Granulocyte-macrophage colony-stimulating factor receptor subunit alpha (9-19)
  source 1..33: mol_type = other RNA
ctgctctgcgagctgccccacccggccttcctg

SEQ ID NO: 50537 - RNA, 27 nt, synthetic construct
  misc_feature 1..27: note = Probable serine carboxypeptidase CPVL (258-266)
  source 1..27: mol_type = other RNA
ctgctcgacgagaagcagaagaagtac

SEQ ID NO: 50538 - RNA, 27 nt, synthetic construct
  misc_feature 1..27: note = Teashirt homolog 3 (435-443)
  source 1..27: mol_type = other RNA
ctgctcgacgagaaggtgcagagcgtc

SEQ ID NO: 50539 - RNA, 27 nt, synthetic construct
  misc_feature 1..27: note = Alpha-aminoadipic semialdehyde synthase, mitochondrial (668-676)
  source 1..27: mol_type = other RNA
ctgctcgacggcaaggtggtcaacgtg

SEQ ID NO: 50540 - RNA, 27 nt, synthetic construct
  misc_feature 1..27: note = Catenin delta-1 (315-323)
  source 1..27: mol_type = other RNA
ctgctcgaccaccccaagaaggaggtg

SEQ ID NO: 50541 - RNA, 27 nt, synthetic construct
  misc_feature 1..27: note = Interleukin-13 receptor subunit alpha-2 (164-172)
  source 1..27: mol_type = other RNA
ctgctcgacaccaactacaacctgttc

SEQ ID NO: 50542 - RNA, 30 nt, synthetic construct
  misc_feature 1..30: note = Interleukin-13 receptor subunit alpha-2 (164-173)
  source 1..30: mol_type = other RNA
ctgctcgacaccaactacaacctgttctac

SEQ ID NO: 50543 - RNA, 30 nt, synthetic construct
  misc_feature 1..30: note = RAD50-interacting protein 1 (435-444)
  source 1..30: mol_type = other RNA
ctgctcttcgagcgcgagctgcacagcgtg

SEQ ID NO: 50544 - RNA, 39 nt, synthetic construct
  misc_feature 1..39: note = Sorting nexin-21 (131-143)
  source 1..39: mol_type = other RNA
ctgctcttcgaggtgaccagcgccaacgtcgtgaaggac

SEQ ID NO: 50545 - RNA, 27 nt, synthetic construct
  misc_feature 1..27: note = Complement decay-accelerating factor (14-22)
  source 1..27: mol_type = other RNA
ctgctcggcgagctgccccgcctgctc

SEQ ID NO: 50546 - RNA, 27 nt, synthetic construct
  misc_feature 1..27: note = Torsin-1A-interacting protein 2, isoform IFRG15 (90-98)
  source 1..27: mol_type = other RNA
ctgctcggccccccgctggtgcgcaag

SEQ ID NO: 50547 - RNA, 33 nt, synthetic construct
  misc_feature 1..33: note = Collagen alpha-1(IV) chain (17-27)
  source 1..33: mol_type = other RNA
ctgctccacgaggagcacagccgcgccgccgcg

SEQ ID NO: 50548 - RNA, 27 nt, synthetic construct
  misc_feature 1..27: note = Pescadillo homolog (73-81)
  source 1..27: mol_type = other RNA
ctgctccacgagcccatcgtgaacaag

SEQ ID NO: 50549 - RNA, 24 nt, synthetic construct
  misc_feature 1..24: note = DST protein (851-858)
  source 1..24: mol_type = other RNA
ctgctcaaggacaagctggacgag

SEQ ID NO: 50550 - RNA, 27 nt, synthetic construct
  misc_feature 1..27: note = Inverted formin-2 (76-84)
  source 1..27: mol_type = other RNA
ctgctcctggaggccctggcccgcctc

SEQ ID NO: 50551 - RNA, 33 nt, synthetic construct
  misc_feature 1..33: note = Metastasis suppressor protein 1 (174-184)
  source 1..33: mol_type = other RNA
ctgctcctggaggagaccgagaagcaggccgtg

SEQ ID NO: 50552 - RNA, 33 nt, synthetic construct
  misc_feature 1..33: note = Signal transducer and activator of transcription 6 (550-560)
  source 1..33: mol_type = other RNA
ctgctcctgaacgagcccgacggcaccttcctg

SEQ ID NO: 50553 - RNA, 27 nt, synthetic construct
  misc_feature 1..27: note = Carboxypeptidase N catalytic chain (379-387)
  source 1..27: mol_type = other RNA
ctgctcctgcccggcatctacaccgtg

SEQ ID NO: 50554 - RNA, 27 nt, synthetic construct
  misc_feature 1..27: note = KATNB1-like protein 1 (135-143)
  source 1..27: mol_type = other RNA
ctgctccgcaacatccagatcctgaag

SEQ ID NO: 50555 - RNA, 27 nt, synthetic construct
  misc_feature 1..27: note = Zinc finger protein ubi-d4 (122-130)
  source 1..27: mol_type = other RNA
ctgctccgcaccgaccccctggagaag

SEQ ID NO: 50556 - RNA, 33 nt, synthetic construct
  misc_feature 1..33: note = Cytoplasmic dynein 1 heavy chain 1 (2160-2170)
  source 1..33: mol_type = other RNA
ctgctcagcgacgtgttccccggcgtccagtac

SEQ ID NO: 50557 - RNA, 33 nt, synthetic construct
  misc_feature 1..33: note = Aspartate beta-hydroxylase domain-containing protein 1 (342-352)
  source 1..33: mol_type = other RNA
ctgctcgtggacgacagcttcctgcacaccgtc

SEQ ID NO: 50558 - RNA, 33 nt, synthetic construct
  misc_feature 1..33: note = Lon protease homolog 2, peroxisomal (173-183)
  source 1..33: mol_type = other RNA
ctgctcgtgcgccagatcgagggcctgaagctg

SEQ ID NO: 50559 - RNA, 30 nt, synthetic construct
  misc_feature 1..30: note = Growth hormone-inducible transmembrane protein (291-300)
  source 1..30: mol_type = other RNA
ctgctctacgacacccagaaggtgatcaag

SEQ ID NO: 50560 - RNA, 27 nt, synthetic construct
  misc_feature 1..27: note = Integrin alpha-7 (875-883)
  source 1..27: mol_type = other RNA
ctgctctaccccatgcaggtggagctg

SEQ ID NO: 50561 - RNA, 33 nt, synthetic construct
  misc_feature 1..33: note = Protein FAM69B (179-189)
  source 1..33: mol_type = other RNA
ctgatggccgacttcaacaaggacaaccgcgtg

SEQ ID NO: 50562 - RNA, 27 nt, synthetic construct
  misc_feature 1..27: note = Pre-mRNA-processing factor 6 (250-258)
  source 1..27: mol_type = other RNA
ctgatggacatgcgcctcagccaggtg

SEQ ID NO: 50563 - RNA, 27 nt, synthetic construct
  misc_feature 1..27: note = L-dopachrome tautomerase (194-202)
  source 1..27: mol_type = other RNA
ctgatggagacccacctcagctccaag

SEQ ID NO: 50564 - RNA, 27 nt, synthetic construct
  misc_feature 1..27: note = Hippocampus abundant transcript-like protein 1 (59-67)
  source 1..27: mol_type = other RNA
ctgatgaacggcctcatccagggggtg

SEQ ID NO: 50565 - RNA, 36 nt, synthetic construct
  misc_feature 1..36: note = Vimentin (413-424)
  source 1..36: mol_type = other RNA
ctgcccctcccgaacttcagctccctgaacctgcgc

SEQ ID NO: 50566 - RNA, 30 nt, synthetic construct
  misc_feature 1..30: note = Vimentin (431-440)
  source 1..30: mol_type = other RNA
ctgcccctcgtggacacccacagcaagcgc

SEQ ID NO: 50567 - RNA, 27 nt, synthetic construct
  misc_feature 1..27: note = Ectonucleotide pyrophosphatase/phosphodiesterase family member 1 (605-613)
  source 1..27: mol_type = other RNA
ctgccctacggccgcccgcgggtgctc

SEQ ID NO: 50568 - RNA, 30 nt, synthetic construct
  misc_feature 1..30: note = Eukaryotic translation initiation factor 5A-1 (102-111)
  source 1..30: mol_type = other RNA
ctgcaggacagcggcgaggtgcgcgaggac

SEQ ID NO: 50569 - RNA, 27 nt, synthetic construct
  misc_feature 1..27: note = Coiled-coil domain-containing protein 13 (338-346)
  source 1..27: mol_type = other RNA
ctgcagcgcgagctcgaggagctgaag

SEQ ID NO: 50570 - RNA, 27 nt, synthetic construct
  misc_feature 1..27: note = Zinc finger protein 703 (534-542)
  source 1..27: mol_type = other RNA
ctgcgcaacccccacaccctcggcctg

SEQ ID NO: 50571 - RNA, 30 nt, synthetic construct
  misc_feature 1..30: note = ATP-binding cassette sub-family A member 13 (39-48)
  source 1..30: mol_type = other RNA
ctgagcgccatccagggcgtgaccctcgcc

SEQ ID NO: 50572 - RNA, 33 nt, synthetic construct
  misc_feature 1..33: note = GPI-anchor transamidase (151-161)
  source 1..33: mol_type = other RNA
ctgagcgacgaccgctccaacatcctcatctac

SEQ ID NO: 50573 - RNA, 27 nt, synthetic construct
  misc_feature 1..27: note = General transcription factor 3C polypeptide 2 (596-604)
  source 1..27: mol_type = other RNA
ctgagcgacggctccctcaagctgtac

SEQ ID NO: 50574 - RNA, 27 nt, synthetic construct
  misc_feature 1..27: note = Myotubularin-related protein 5 (501-509)
  source 1..27: mol_type = other RNA
ctgagcgaccccttctaccgcaccctc

SEQ ID NO: 50575 - RNA, 27 nt, synthetic construct
  misc_feature 1..27: note = Low affinity immunoglobulin gamma Fc region receptor II-b (113-121)
  source 1..27: mol_type = other RNA
ctgagcgaccccgtgcacctcaccgtc

SEQ ID NO: 50576 - RNA, 27 nt, synthetic construct
  misc_feature 1..27: note = Tyrosine-protein kinase JAK1 (30-38)
  source 1..27: mol_type = other RNA
ctgagcgaccgcgagcccctccggctg

SEQ ID NO: 50577 - RNA, 27 nt, synthetic construct
  misc_feature 1..27: note = Exportin-5 (689-697)
  source 1..27: mol_type = other RNA
ctgagcgacgtggacgccttcatcgcc

SEQ ID NO: 50578 - RNA, 33 nt, synthetic construct
  misc_feature 1..33: note = DNA polymerase zeta catalytic subunit (2423-2433)
  source 1..33: mol_type = other RNA
ctgagcgactggttcgacaacaagaccgacctc

SEQ ID NO: 50579 - RNA, 27 nt, synthetic construct
  misc_feature 1..27: note = Little elongation complex subunit 1 (1975-1983)
  source 1..27: mol_type = other RNA
ctgagcgagctcaagatccagaagatc

SEQ ID NO: 50580 - RNA, 33 nt, synthetic construct
  misc_feature 1..33: note = Cell surfaceoprotein MUC18 (332-342)
  source 1..33: mol_type = other RNA
ctgagcgagccccaggagctcctggtgaactac

SEQ ID NO: 50581 - RNA, 27 nt, synthetic construct
  misc_feature 1..27: note = Putative stereocilin-like protein (36-44)
  source 1..27: mol_type = other RNA
ctgagcttcctcaagtccctgctgagc

SEQ ID NO: 50582 - RNA, 27 nt, synthetic construct
  misc_feature 1..27: note = Melanocyte protein PMEL (177-185)
  source 1..27: mol_type = other RNA
ctgagcatcggcaccgggcgcgccatg

SEQ ID NO: 50583 - RNA, 27 nt, synthetic construct
  misc_feature 1..27: note = Cytoplasmic dynein 1 heavy chain 1 (746-754)
  source 1..27: mol_type = other RNA
ctgagcaaggaggtgcgcaacctcaag

SEQ ID NO: 50584 - RNA, 27 nt, synthetic construct
  misc_feature 1..27: note = Exophilin-5 (986-994)
  source 1..27: mol_type = other RNA
ctgagcaagaccgagtccatcagcgtg

SEQ ID NO: 50585 - RNA, 30 nt, synthetic construct
  misc_feature 1..30: note = EF-hand calcium-binding domain-containing protein 6 (344-353)
  source 1..30: mol_type = other RNA
ctgagcctccccacccaggagctgcgcccg

SEQ ID NO: 50586 - RNA, 27 nt, synthetic construct
  misc_feature 1..27: note = Methylcrotonoyl-CoA carboxylase subunit alpha, mitochondrial (108-116)
  source 1..27: mol_type = other RNA
ctgagcatggagaagatcatccaggtg

SEQ ID NO: 50587 - RNA, 33 nt, synthetic construct
  misc_feature 1..33: note = Zinc finger and BTB domain-containing protein 34 (63-73)
  source 1..33: mol_type = other RNA
ctgagcaccatgtccggcctcagcatctccgtg

SEQ ID NO: 50588 - RNA, 27 nt, synthetic construct
  misc_feature 1..27: note = Vacuolar protein sorting-associated protein 13B (1713-1721)
  source 1..27: mol_type = other RNA
ctgagcgtggcccaggtccagctcctg

SEQ ID NO: 50589 - RNA, 27 nt, synthetic construct
  misc_feature 1..27: note = PERQ amino acid-rich with GYF domain-containing protein 1 (92-100)
  source 1..27: mol_type = other RNA
ctgagcgtgaactccgtcgccgtgctc

SEQ ID NO: 50590 - RNA, 33 nt, synthetic construct
  misc_feature 1..33: note = Mitogen-activated protein kinase 14 (122-132)
  source 1..33: mol_type = other RNA
ctgaccgacgaccacgtgcagttcctcatctac

SEQ ID NO: 50591 - RNA, 33 nt, synthetic construct
  misc_feature 1..33: note = FAST kinase domain-containing protein 5 (625-635)
  source 1..33: mol_type = other RNA
ctgaccgacgacctcatgaacaagctgctgaag

SEQ ID NO: 50592 - RNA, 33 nt, synthetic construct
  misc_feature 1..33: note = Vacuolar protein sorting-associated protein VTA1 homolog (134-144)
  source 1..33: mol_type = other RNA
ctgaccgacgagaacgtgaagcaccgcaagtac

SEQ ID NO: 50593 - RNA, 30 nt, synthetic construct
  misc_feature 1..30: note = Ectonucleoside triphosphate diphosphohydrolase 4 (199-208)
  source 1..30: mol_type = other RNA
ctgaccgacatccccgtgcacttcgacttc

SEQ ID NO: 50594 - RNA, 21 nt, synthetic construct
  misc_feature 1..21: note = 39S ribosomal protein L52, mitochondrial (43-49)
  source 1..21: mol_type = other RNA
ctgaccgagctccccgactgg

SEQ ID NO: 50595 - RNA, 30 nt, synthetic construct
  misc_feature 1..30: note = Glutathione S-transferase theta-1 (64-73)
  source 1..30: mol_type = other RNA
ctgaccgagagcgtggccatcctcctgtac

SEQ ID NO: 50596 - RNA, 27 nt, synthetic construct
  misc_feature 1..27: note = AFG3-like protein 2 (346-354)
  source 1..27: mol_type = other RNA
ctgaccggccccccggggaccggcaag

SEQ ID NO: 50597 - RNA, 21 nt, synthetic construct
  misc_feature 1..21: note = Keratin, type I cytoskeletal 9 (86-92)
  source 1..21: mol_type = other RNA
ctgaccaagaccctcaacgac

SEQ ID NO: 50598 - RNA, 33 nt, synthetic construct
  misc_feature 1..33: note = Amphoterin-induced protein 1 (187-197)
  source 1..33: mol_type = other RNA
ctgaccctcctggacctgagctccaacaagctc

SEQ ID NO: 50599 - RNA, 27 nt, synthetic construct
  misc_feature 1..27: note = Delta and Notch-like epidermal growth factor-related receptor (632-640)
  source 1..27: mol_type = other RNA
ctgaccaacatgccccgccacagcctc

SEQ ID NO: 50600 - RNA, 36 nt, synthetic construct
  misc_feature 1..36: note = Synaptosomal-associated protein 23 (156-167)
  source 1..36: mol_type = other RNA
ctgacccaggtgggcagcatcctcgggaacctgaag

SEQ ID NO: 50601 - RNA, 33 nt, synthetic construct
  misc_feature 1..33: note = Inactive rhomboid protein 2 (165-175)
  source 1..33: mol_type = other RNA
ctgaccagcttcacctccgtgcgcagcggctac

SEQ ID NO: 50602 - RNA, 27 nt, synthetic construct
  misc_feature 1..27: note = Tubulin beta-4B chain (273-281)
  source 1..27: mol_type = other RNA
ctgaccagccgcggctcccagcagtac

SEQ ID NO: 50603 - RNA, 27 nt, synthetic construct
  misc_feature 1..27: note = Tectonic-3 (319-327)
  source 1..27: mol_type = other RNA
ctgaccgtggagcccggcgccagcctc

SEQ ID NO: 50604 - RNA, 30 nt, synthetic construct
  misc_feature 1..30: note = LON peptidase N-terminal domain and RING finger protein 1 (764-773)
  source 1..30: mol_type = other RNA
ctgacctacttcagccgcgaccagtccaag

SEQ ID NO: 50605 - RNA, 45 nt, synthetic construct
  misc_feature 1..45: note = 60S ribosomal protein L34 (5-19)
  source 1..45: mol_type = other RNA
ctgacctaccgccggcgcctcagctacaacaccgcctccaacaag

SEQ ID NO: 50606 - RNA, 30 nt, synthetic construct
  misc_feature 1..30: note = Aspartate beta-hydroxylase domain-containing protein 1 (343-352)
  source 1..30: mol_type = other RNA
ctggtggacgacagcttcctccacaccgtc

SEQ ID NO: 50607 - RNA, 24 nt, synthetic construct
  misc_feature 1..24: note = Cytosolic non-specific dipeptidase (250-257)
  source 1..24: mol_type = other RNA
ctggtggacaagcgcggcaacatc

SEQ ID NO: 50608 - RNA, 30 nt, synthetic construct
  misc_feature 1..30: note = Thymidine phosphorylase (223-232)
  source 1..30: mol_type = other RNA
ctggtggagggcctcagcgccctggtcgtg

SEQ ID NO: 50609 - RNA, 27 nt, synthetic construct
  misc_feature 1..27: note = Matrin-3 (461-469)
  source 1..27: mol_type = other RNA
ctggtgttcggcaagcccgtccgcgtg

SEQ ID NO: 50610 - RNA, 33 nt, synthetic construct
  misc_feature 1..33: note = POTE ankyrin domain family member F (708-718)
  source 1..33: mol_type = other RNA
ctggtgatcgacaacggcagcgggatgtgcaag

SEQ ID NO: 50611 - RNA, 33 nt, synthetic construct
  misc_feature 1..33: note = Phospholipid hydroperoxide glutathione peroxidase, mitochondrial (187-197)
  source 1..33: mol_type = other RNA
ctggtgatcgagaaggacctcccccactacttc

SEQ ID NO: 50612 - RNA, 33 nt, synthetic construct
  misc_feature 1..33: note = Roquin-2 (100-110)
  source 1..33: mol_type = other RNA
ctggtgatcgagagcatccccgtcctcggcacc

SEQ ID NO: 50613 - RNA, 27 nt, synthetic construct
  misc_feature 1..27: note = Probable ATP-dependent RNA helicase DDX17 (248-256)
  source 1..27: mol_type = other RNA
ctggtgctcgcccccacccgcgagctg

SEQ ID NO: 50614 - RNA, 27 nt, synthetic construct
  misc_feature 1..27: note = Melanocyte protein PMEL (10-18)
  source 1..27: mol_type = other RNA
ctggtgctcaagcgctgcctgctgcac

SEQ ID NO: 50615 - RNA, 39 nt, synthetic construct
  misc_feature 1..39: note = Beta-actin-like protein 2 (9-21)
  source 1..39: mol_type = other RNA
ctggtggtcgacaacggcagcgggatgtgcaaggccggc

SEQ ID NO: 50616 - RNA, 27 nt, synthetic construct
  misc_feature 1..27: note = DNA mismatch repair protein Msh6 (111-119)
  source 1..27: mol_type = other RNA
ctgtacagccaggccggcctcctggcc

SEQ ID NO: 50617 - RNA, 33 nt, synthetic construct
  misc_feature 1..33: note = Olfactory receptor 4M2 (122-132)
  source 1..33: mol_type = other RNA
ctgtacaccgccatctgccgccccctccactac

SEQ ID NO: 50618 - RNA, 39 nt, synthetic construct
  misc_feature 1..39: note = Heterogeneous nuclear ribonucleoprotein L (35-47)
  source 1..39: mol_type = other RNA
atggccgccgcgggcgggggcgggggcgggggccgctac

SEQ ID NO: 50619 - RNA, 30 nt, synthetic construct
  misc_feature 1..30: note = Exocyst complex component 4 (1-10)
  source 1..30: mol_type = other RNA
atggccgccgaggcggccggcgggaagtac

SEQ ID NO: 50620 - RNA, 27 nt, synthetic construct
  misc_feature 1..27: note = Liprin-alpha-1 (538-546)
  source 1..27: mol_type = other RNA
atggccgacggccacaccgacagctac

SEQ ID NO: 50621 - RNA, 27 nt, synthetic construct
  misc_feature 1..27: note = Cystatin-C (1-9)
  source 1..27: mol_type = other RNA
atggccggccccctgcgcgccccgctc

SEQ ID NO: 50622 - RNA, 30 nt, synthetic construct
  misc_feature 1..30: note = WD repeat-containing protein 7 (1479-1488)
  source 1..30: mol_type = other RNA
atggcccacgacggcaaggagcaccgcttc

SEQ ID NO: 50623 - RNA, 33 nt, synthetic construct
  misc_feature 1..33: note = WD repeat-containing protein 7 (1479-1489)
  source 1..33: mol_type = other RNA
atggcccacgacggcaaggagcaccgcttcatg

SEQ ID NO: 50624 - RNA, 27 nt, synthetic construct
  misc_feature 1..27: note = Tubulin polyglutamylase complex subunit 2 (33-41)
  source 1..27: mol_type = other RNA
atggccatcaacagcatctccaagctg

SEQ ID NO: 50625 - RNA, 33 nt, synthetic construct
  misc_feature 1..33: note = Intron-binding protein aquarius (867-877)
  source 1..33: mol_type = other RNA
atggccctggacatcgacgagcgccacctcctg

SEQ ID NO: 50626 - RNA, 33 nt, synthetic construct
  misc_feature 1..33: note = Ribonuclease pancreatic (1-11)
  source 1..33: mol_type = other RNA
atggccctggagaagagcctcgtgcgcctgctg

SEQ ID NO: 50627 - RNA, 36 nt, synthetic construct
  misc_feature 1..36: note = Actin, cytoplasmic 2 (18-29)
  source 1..36: mol_type = other RNA
atggccaccgccgcgagctccagctccctggagaag

SEQ ID NO: 50628 - RNA, 27 nt, synthetic construct
  misc_feature 1..27: note = STE20-related kinase adapter protein alpha (113-121)
  source 1..27: mol_type = other RNA
atggcctacggcagcgccaaggacctg

SEQ ID NO: 50629 - RNA, 30 nt, synthetic construct
  misc_feature 1..30: note = High mobility group protein 20A (131-140)
  source 1..30: mol_type = other RNA
atggagttcgaggagcgcaacgccgccctg

SEQ ID NO: 50630 - RNA, 33 nt, synthetic construct
  misc_feature 1..33: note = Squalene synthase (112-122)
  source 1..33: mol_type = other RNA
atggagagcaaggagaaggaccgccaggtgctg

SEQ ID NO: 50631 - RNA, 27 nt, synthetic construct
  misc_feature 1..27: note = A-kinase anchor protein 11 (545-553)
  source 1..27: mol_type = other RNA
atgatcaaggacagcatccagaagttc

SEQ ID NO: 50632 - RNA, 27 nt, synthetic construct
  misc_feature 1..27: note = Protein mago nashi homolog (45-53)
  source 1..27: mol_type = other RNA
atgatccgcaaggaggagctggagatc

SEQ ID NO: 50633 - RNA, 30 nt, synthetic construct
  misc_feature 1..30: note = Hypoxia-inducible factor 1-alpha (109-118)
  source 1..30: mol_type = other RNA
atgatctacatcagcgacaacgtgaacaag

SEQ ID NO: 50634 - RNA, 33 nt, synthetic construct
  misc_feature 1..33: note = Nidogen-1 (1-11)
  source 1..33: mol_type = other RNA
atgctggccagctccagccgcatccgggccgcg

SEQ ID NO: 50635 - RNA, 33 nt, synthetic construct
  misc_feature 1..33: note = Spectrin beta chain, non-erythrocytic 1 (1424-1434)
  source 1..33: mol_type = other RNA
atgctggagaaccagatggaggtgcgcaagaag

SEQ ID NO: 50636 - RNA, 33 nt, synthetic construct
  misc_feature 1..33: note = Prostate tumor-overexpressed gene 1 protein (184-194)
  source 1..33: mol_type = other RNA
atgctgttcccccacatcagcccgtgcgaggtg

SEQ ID NO: 50637 - RNA, 27 nt, synthetic construct
  misc_feature 1..27: note = Melanoma-associated antigen D2 (305-313)
  source 1..27: mol_type = other RNA
atgctgaaggacatcatcaaggagtac

SEQ ID NO: 50638 - RNA, 33 nt, synthetic construct
  misc_feature 1..33: note = DNA-directed RNA polymerases I, II, and III subunit RPABC5 (48-58)
  source 1..33: mol_type = other RNA
atgctgctcgcccacgtggacctgatcgagaag

SEQ ID NO: 50639 - RNA, 30 nt, synthetic construct
  misc_feature 1..30: note = Coatomer subunit gamma-1 (404-413)
  source 1..30: mol_type = other RNA
atgctgcgcgaggagggcgggttcgagtac

SEQ ID NO: 50640 - RNA, 27 nt, synthetic construct
  misc_feature 1..27: note = G-protein coupled receptor 143 (175-183)
  source 1..27: mol_type = other RNA
atgctgtactaccccagcgtgtcccgc

SEQ ID NO: 50641 - RNA, 54 nt, synthetic construct
  misc_feature 1..54: note = G-protein coupled receptor 143 (175-192)
  source 1..54: mol_type = other RNA
atgctgtactaccccagcgtgtcccgcaagctcctggagtacatcgaggagatc

SEQ ID NO: 50642 - RNA, 36 nt, synthetic construct
  misc_feature 1..36: note = LIM domain and actin-binding protein 1 (101-112)
  source 1..36: mol_type = other RNA
atgatgttcgagaagggcgagcccacccagaccaag

SEQ ID NO: 50643 - RNA, 24 nt, synthetic construct
  misc_feature 1..24: note = T-complex protein 1 subunit eta (172-179)
  source 1..24: mol_type = other RNA
atgatgctggacgacctcctgcag

SEQ ID NO: 50644 - RNA, 27 nt, synthetic construct
  misc_feature 1..27: note = Neuroblast differentiation-associated protein AHNAK (2771-2779)
  source 1..27: mol_type = other RNA
atgcccaagatcagcatgccgggcttc

SEQ ID NO: 50645 - RNA, 27 nt, synthetic construct
  misc_feature 1..27: note = Neuroblast differentiation-associated protein AHNAK (749-757)
  source 1..27: mol_type = other RNA
atgcccaagatgaagatgccgaagttc

SEQ ID NO: 50646 - RNA, 27 nt, synthetic construct
  misc_feature 1..27: note = Neuroblast differentiation-associated protein AHNAK (1382-1390)
  source 1..27: mol_type = other RNA
atgcccaaggtgaagatgccgaagttc

SEQ ID NO: 50647 - RNA, 24 nt, synthetic construct
  misc_feature 1..24: note = ATP-dependent RNA helicase DDX24 (584-591)
  source 1..24: mol_type = other RNA
atgcagtaccccggccgcagcctg

SEQ ID NO: 50648 - RNA, 39 nt, synthetic construct
  misc_feature 1..39: note = Leucine zipper putative tumor suppressor 1 (179-191)
  source 1..39: mol_type = other RNA
atgagctccctgcccacccacagcacctccagctcctac

SEQ ID NO: 50649 - RNA, 27 nt, synthetic construct
  misc_feature 1..27: note = Liprin-alpha-1 (1170-1178)
  source 1..27: mol_type = other RNA
atgagctcccccagcatgcagccgaag

SEQ ID NO: 50650 - RNA, 33 nt, synthetic construct
  misc_feature 1..33: note = Vimentin (1-11)
  source 1..33: mol_type = other RNA
atgagcacccgctccgtgagctccagctcctac

SEQ ID NO: 50651 - RNA, 27 nt, synthetic construct
  misc_feature 1..27: note = ADP-ribosylation factor-like protein 5B (133-141)
  source 1..27: mol_type = other RNA
atgaccgccgccgagatcagcaagtac

SEQ ID NO: 50652 - RNA, 39 nt, synthetic construct
  misc_feature 1..39: note = CD44 antigen (412-424)
  source 1..39: mol_type = other RNA
atgaccgccgacgagacccgcaacctgcagaacgtggac

SEQ ID NO: 50653 - RNA, 27 nt, synthetic construct
  misc_feature 1..27: note = RNA-binding protein 14 (266-274)
  source 1..27: mol_type = other RNA
atgaccgcccaggccgcgagctaccgc

SEQ ID NO: 50654 - RNA, 42 nt, synthetic construct
  misc_feature 1..42: note = TBC1 domain family member 7 (1-14)
  source 1..42: mol_type = other RNA
atgaccgaggacagccagcgcaacttccggtccgtgtactac

SEQ ID NO: 50655 - RNA, 21 nt, synthetic construct
  misc_feature 1..21: note = E3 ubiquitin-protein ligase UBR5 (2723-2729)
  source 1..21: mol_type = other RNA
atgaccgagcgccaggacctg

SEQ ID NO: 50656 - RNA, 30 nt, synthetic construct
  misc_feature 1..30: note = SEC14-like protein 2 (333-342)
  source 1..30: mol_type = other RNA
atgaccgaggtgctgcccaaccagcgctac

SEQ ID NO: 50657 - RNA, 27 nt, synthetic construct
  misc_feature 1..27: note = Cleavage and polyadenylation specificity factor subunit 3 (99-107)
  source 1..27: mol_type = other RNA
atgacccacgccaccaaggccatctac

SEQ ID NO: 50658 - RNA, 30 nt, synthetic construct
  misc_feature 1..30: note = Protein phosphatase 1G (151-160)
  source 1..30: mol_type = other RNA
atgaccatcgaggagctgctcacccgctac

SEQ ID NO: 50659 - RNA, 39 nt, synthetic construct
  misc_feature 1..39: note = E3 ubiquitin-protein ligase RNF13 (5-17)
  source 1..39: mol_type = other RNA
atgaccagcctggcctgggaccccaccacgctccgctac

SEQ ID NO: 50660 - RNA, 27 nt, synthetic construct
  misc_feature 1..27: note = L-dopachrome tautomerase (30-38)
  source 1..27: mol_type = other RNA
atgaccgtggacagcctggtcaacaag

SEQ ID NO: 50661 - RNA, 51 nt, synthetic construct
  misc_feature 1..51: note = 2-oxoisovalerate dehydrogenase subunit alpha, mitochondrial (262-278)
  source 1..51: mol_type = other RNA
atgacctaccgcatcggccaccacagcacctccgacgacagctccgcctac

SEQ ID NO: 50662 - RNA, 30 nt, synthetic construct
  misc_feature 1..30: note = Ubiquitin carboxyl-terminal hydrolase 11 (498-507)
  source 1..30: mol_type = other RNA
atggtggccgacgtcttcagccaccgcttc

SEQ ID NO: 50663 - RNA, 30 nt, synthetic construct
  misc_feature 1..30: note = DnaJ homolog subfamily C member 3 (1-10)
  source 1..30: mol_type = other RNA
atggtggcccccggcagcgtcacctcccgc

SEQ ID NO: 50664 - RNA, 42 nt, synthetic construct
  misc_feature 1..42: note = Proteasome subunit beta type-4 (84-97)
  source 1..42: mol_type = other RNA
atggtgatcgacgaggagctgctcggcgacgggcacagctac

SEQ ID NO: 50665 - RNA, 24 nt, synthetic construct
  misc_feature 1..24: note = Adenylate kinase 9 (1518-1525)
  source 1..24: mol_type = other RNA
atggtgatcttcgagctgagcgtc

SEQ ID NO: 50666 - RNA, 33 nt, synthetic construct
  misc_feature 1..33: note = Zinc transporter ZIP6 (217-227)
  source 1..33: mol_type = other RNA
atggtgatcatgggcgacgggctgcacaacttc

SEQ ID NO: 50667 - RNA, 27 nt, synthetic construct
  misc_feature 1..27: note = Vigilin (427-435)
  source 1..27: mol_type = other RNA
atggtgaaggacctgatcaaccgcatg

SEQ ID NO: 50668 - RNA, 27 nt, synthetic construct
  misc_feature 1..27: note = Helicase with zinc finger domain 2 (1524-1532)
  source 1..27: mol_type = other RNA
atggtgaaggagtacatgatccagttc

SEQ ID NO: 50669 - RNA, 27 nt, synthetic construct
  misc_feature 1..27: note = Major centromere autoantigen B (13-21)
  source 1..27: mol_type = other RNA
atggtgaagcgctacctgaccagcttc

SEQ ID NO: 50670 - RNA, 51 nt, synthetic construct
  misc_feature 1..51: note = ATP synthase subunit e, mitochondrial (1-17)
  source 1..51: mol_type = other RNA
atggtgcccccggtccaggtgagccccctgatcaagctcggccgctactcc

SEQ ID NO: 50671 - RNA, 30 nt, synthetic construct
  misc_feature 1..30: note = UV excision repair protein RAD23 homolog B (172-181)
  source 1..30: mol_type = other RNA
atggtgaccgagatcatgagcatgggctac

SEQ ID NO: 50672 - RNA, 30 nt, synthetic construct
  misc_feature 1..30: note = NGFI-A-binding protein 2 (244-253)
  source 1..30: mol_type = other RNA
atggtggtcgagagcgtggagcgcatcttc

SEQ ID NO: 50673 - RNA, 39 nt, synthetic construct
  misc_feature 1..39: note = Peptidase inhibitor 15 (91-103)
  source 1..39: mol_type = other RNA
atggtgtgggacgagaacctggccaagagcgccgaggcg

SEQ ID NO: 50674 - RNA, 27 nt, synthetic construct
  misc_feature 1..27: note = AT-rich interactive domain-containing protein 2 (84-92)
  source 1..27: mol_type = other RNA
aacgccgccttcgcgctgaagcagtac

SEQ ID NO: 50675 - RNA, 27 nt, synthetic construct
  misc_feature 1..27: note = Sphingomyelin phosphodiesterase 4 (248-256)
  source 1..27: mol_type = other RNA
aacgccgaccccgccagccacgagatc

SEQ ID NO: 50676 - RNA, 24 nt, synthetic construct
  misc_feature 1..24: note = 60S ribosomal protein L17 (97-104)
  source 1..24: mol_type = other RNA
aacgccgagagcaacgccgagctg

SEQ ID NO: 50677 - RNA, 27 nt, synthetic construct
  misc_feature 1..27: note = Ethylmalonyl-CoA decarboxylase (70-78)
  source 1..27: mol_type = other RNA
aacgccttcagcggcgtgatgatgctg

SEQ ID NO: 50678 - RNA, 45 nt, synthetic construct
  misc_feature 1..45: note = Syndecan-3 (291-305)
  source 1..45: mol_type = other RNA
aacgccatcgacagcggctccagcgccgcgcagctgccccagaag

SEQ ID NO: 50679 - RNA, 27 nt, synthetic construct
  misc_feature 1..27: note = Importin subunit alpha-5 (231-239)
  source 1..27: mol_type = other RNA
aacgccgtgtgggccctgagcaacctc

SEQ ID NO: 50680 - RNA, 30 nt, synthetic construct
  misc_feature 1..30: note = EGF domain-specific O-linked N-acetylglucosamine transferase (20-29)
  source 1..30: mol_type = other RNA
aacgaggcccccccgaacacccacagcatc

SEQ ID NO: 50681 - RNA, 27 nt, synthetic construct
  misc_feature 1..27: note = Coatomer subunit beta (113-121)
  source 1..27: mol_type = other RNA
aacgagttcatccgcggcagcaccctg

SEQ ID NO: 50682 - RNA, 33 nt, synthetic construct
  misc_feature 1..33: note = Prefoldin subunit 2 (68-78)
  source 1..33: mol_type = other RNA
aacgagttccgcgagaagcacaacatccggctg

SEQ ID NO: 50683 - RNA, 27 nt, synthetic construct
  misc_feature 1..27: note = GCN1 general control of amino-acid synthesis 1-like 1 (1511-1519)
  source 1..27: mol_type = other RNA
aacgagttcgtgcgcgacaccgccctg

SEQ ID NO: 50684 - RNA, 30 nt, synthetic construct
  misc_feature 1..30: note = Dynamin-like 120 kDa protein, mitochondrial (618-627)
  source 1..30: mol_type = other RNA
aacgagatcctggacgaggtgatcagcctc

SEQ ID NO: 50685 - RNA, 27 nt, synthetic construct
  misc_feature 1..27: note = Vimentin (102-110)
  source 1..27: mol_type = other RNA
aacgagaaggtggagctgcaggagctc

SEQ ID NO: 50686 - RNA, 36 nt, synthetic construct
  misc_feature 1..36: note = Keratin, type I cytoskeletal 10 (90-101)
  source 1..36: mol_type = other RNA
aaccacgaggaggagatgaaggacctgcgcaacgtg

SEQ ID NO: 50687 - RNA, 36 nt, synthetic construct
  misc_feature 1..36: note = Calponin-3 (250-261)
  source 1..36: mol_type = other RNA
aacaaggtggccagccagaagggcatgtccgtctac

SEQ ID NO: 50688 - RNA, 33 nt, synthetic construct
  misc_feature 1..33: note = Guanine nucleotide-binding protein-like 3-like protein (343-353)
  source 1..33: mol_type = other RNA
aacctggaggagatcagcaactactacggcgtg

SEQ ID NO: 50689 - RNA, 33 nt, synthetic construct
  misc_feature 1..33: note = Peroxisomal acyl-coenzyme A oxidase 1 (631-641)
  source 1..33: mol_type = other RNA
aacctgttcgagtgggccaagaacagccccctc

SEQ ID NO: 50690 - RNA, 27 nt, synthetic construct
  misc_feature 1..27: note = Galectin-1 (33-41)
  source 1..27: mol_type = other RNA
aacctgggcaaggacagcaacaacctc

SEQ ID NO: 50691 - RNA, 33 nt, synthetic construct
  misc_feature 1..33: note = Glycogenin-2 (64-74)
  source 1..33: mol_type = other RNA
aacctgatcgacagcgccgactacatccacctc

SEQ ID NO: 50692 - RNA, 36 nt, synthetic construct
  misc_feature 1..36: note = Putative ATP-dependent RNA helicase DDX11-like protein 8 (397-408)
  source 1..36: mol_type = other RNA
aacctgatcgacaccatcaccggcatgcacagcgtg

SEQ ID NO: 50693 - RNA, 27 nt, synthetic construct
  misc_feature 1..27: note = Glutathione S-transferase Mu 2 (180-188)
  source 1..27: mol_type = other RNA
aacctgaaggacttcatcagccgcttc

SEQ ID NO: 50694 - RNA, 27 nt, synthetic construct
  misc_feature 1..27: note = SAM and SH3 domain-containing protein 1 (646-654)
  source 1..27: mol_type = other RNA
aacctgaaggagcacatgcccaccttc

SEQ ID NO: 50695 - RNA, 27 nt, synthetic construct
  misc_feature 1..27: note = Abelson tyrosine-protein kinase 2 (353-361)
  source 1..27: mol_type = other RNA
aacctgctcgactacctgcgcgagtgc

SEQ ID NO: 50696 - RNA, 39 nt, synthetic construct
  misc_feature 1..39: note = Multidrug resistance-associated protein 7 (339-351)
  source 1..39: mol_type = other RNA
aacctgctcggcaccgacagcgagcgcctgctgaacttc

SEQ ID NO: 50697 - RNA, 30 nt, synthetic construct
  misc_feature 1..30: note = Catenin alpha-1 (815-824)
  source 1..30: mol_type = other RNA
aacctgatgaacgccgtggtccagaccgtg

SEQ ID NO: 50698 - RNA, 33 nt, synthetic construct
  misc_feature 1..33: note = Small glutamine-rich tetratricopeptide repeat-containing protein alpha (236-246)
  source 1..33: mol_type = other RNA
aacctgatgaacaacccccagatccagcagctc

SEQ ID NO: 50699 - RNA, 24 nt, synthetic construct
  misc_feature 1..24: note = Leucine-rich repeat-containing protein 4C (125-132)
  source 1..24: mol_type = other RNA
aacctgaacaccctcgagctgttc

SEQ ID NO: 50700 - RNA, 27 nt, synthetic construct
  misc_feature 1..27: note = N-terminal Xaa-Pro-Lys N-methyltransferase 1 (210-218)
  source 1..27: mol_type = other RNA
aacctgcccgacgagatctaccacgtg

SEQ ID NO: 50701 - RNA, 30 nt, synthetic construct
  misc_feature 1..30: note = N-terminal Xaa-Pro-Lys N-methyltransferase 1 (210-219)
  source 1..30: mol_type = other RNA
aacctgcccgacgagatctaccacgtgtac

SEQ ID NO: 50702 - RNA, 27 nt, synthetic construct
  misc_feature 1..27: note = DNA repair protein RAD51 homolog 3 (205-213)
  source 1..27: mol_type = other RNA
aacctgcgcgacctcgagatcctgctg

SEQ ID NO: 50703 - RNA, 27 nt, synthetic construct
  misc_feature 1..27: note = MIT domain-containing protein 1 (60-68)
  source 1..27: mol_type = other RNA
aacctgcgcgagaagatcagcaagtac

SEQ ID NO: 50704 - RNA, 27 nt, synthetic construct
  misc_feature 1..27: note = Negative regulator of reactive oxygen species (622-630)
  source 1..27: mol_type = other RNA
aacctgagctccaagatcatccgcgtg

SEQ ID NO: 50705 - RNA, 33 nt, synthetic construct
  misc_feature 1..33: note = Galectin-3-binding protein (51-61)
  source 1..33: mol_type = other RNA
aacctgtgggacctcaccgacgccagcgtggtc

SEQ ID NO: 50706 - RNA, 27 nt, synthetic construct
  misc_feature 1..27: note = 2'-5'-oligoadenylate synthase 3 (990-998)
  source 1..27: mol_type = other RNA
aacatggccgagggcttccgcaccgtg

SEQ ID NO: 50707 - RNA, 27 nt, synthetic construct
  misc_feature 1..27: note = X-ray repair cross-complementing protein 5 (410-418)
  source 1..27: mol_type = other RNA
aacatgctgaaccccccggccgaggtg

SEQ ID NO: 50708 - RNA, 27 nt, synthetic construct
  misc_feature 1..27: note = Heterogeneous nuclear ribonucleoprotein H (351-359)
  source 1..27: mol_type = other RNA
aacatgcagcaccgctacgtggagctg

SEQ ID NO: 50709 - RNA, 27 nt, synthetic construct
  misc_feature 1..27: note = Monocarboxylate transporter 7 (86-94)
  source 1..27: mol_type = other RNA
aaccgcttcggccaccggctggtggtc

SEQ ID NO: 50710 - RNA, 27 nt, synthetic construct
  misc_feature 1..27: note = Leucine-rich repeat-containing protein C10orf11 (190-198)
  source 1..27: mol_type = other RNA
aaccgcttcatccgggacgaccagctg

SEQ ID NO: 50711 - RNA, 24 nt, synthetic construct
  misc_feature 1..24: note = Proteasome subunit beta type-4 (230-237)
  source 1..24: mol_type = other RNA
aaccgcttccagatcgccaccgtg

SEQ ID NO: 50712 - RNA, 27 nt, synthetic construct
  misc_feature 1..27: note = Vacuolar protein sorting-associated protein 16 homolog (30-38)
  source 1..27: mol_type = other RNA
aaccgcggcgacttcttcatgaccctg

SEQ ID NO: 50713 - RNA, 27 nt, synthetic construct
  misc_feature 1..27: note = Transcription factor MafF (38-46)
  source 1..27: mol_type = other RNA
aaccgccacctgcggggcctcagcgcc

SEQ ID NO: 50714 - RNA, 27 nt, synthetic construct
  misc_feature 1..27: note = RNA polymerase-associated protein RTF1 homolog (202-210)
  source 1..27: mol_type = other RNA
aaccgcatcgagaagcgggaggtgctg

SEQ ID NO: 50715 - RNA, 24 nt, synthetic construct
  misc_feature 1..24: note = Catenin beta-1 (586-593)
  source 1..24: mol_type = other RNA
aaccgcatcgtgatccggggcctg

SEQ ID NO: 50716 - RNA, 27 nt, synthetic construct
  misc_feature 1..27: note = Zinc finger and BTB domain-containing protein 38 (384-392)
  source 1..27: mol_type = other RNA
aaccgcctggaccggcacgagcagatc

SEQ ID NO: 50717 - RNA, 27 nt, synthetic construct
  misc_feature 1..27: note = 40S ribosomal protein S24 (15-23)
  source 1..27: mol_type = other RNA
aaccgcctgctccagcggaagcagatg

SEQ ID NO: 50718 - RNA, 24 nt, synthetic construct
  misc_feature 1..24: note = Cytoplasmic FMR1-interacting protein 1 (839-846)
  source 1..24: mol_type = other RNA
aaccgcatgacccacaagctgctc

SEQ ID NO: 50719 - RNA, 27 nt, synthetic construct
  misc_feature 1..27: note = Transcription initiation factor IIA subunit 2 (54-62)
  source 1..27: mol_type = other RNA
aaccgcgtgaacttccggggcagcctg

SEQ ID NO: 50720 - RNA, 27 nt, synthetic construct
  misc_feature 1..27: note = Pseudouridine-5'-phosphatase (35-43)
  source 1..27: mol_type = other RNA
aaccgctacgacaagaagtacagctgg

SEQ ID NO: 50721 - RNA, 39 nt, synthetic construct
  misc_feature 1..39: note = Ribonucleoside-diphosphate reductase large subunit (35-47)
  source 1..39: mol_type = other RNA
aacagcgccatcatctacgaccgcgacttctcctacaac

SEQ ID NO: 50722 - RNA, 27 nt, synthetic construct
  misc_feature 1..27: note = Rho-related BTB domain-containing protein 3 (241-249)
  source 1..27: mol_type = other RNA
aacagcgacctgaacaacctcctgttc

SEQ ID NO: 50723 - RNA, 36 nt, synthetic construct
  misc_feature 1..36: note = SAM and SH3 domain-containing protein 1 (424-435)
  source 1..36: mol_type = other RNA
aacagcgaccccatgggcaaggagggggacttcgtg

SEQ ID NO: 50724 - RNA, 39 nt, synthetic construct
  misc_feature 1..39: note = SAM and SH3 domain-containing protein 1 (424-436)
  source 1..39: mol_type = other RNA
aacagcgaccccatgggcaaggagggggacttcgtgtac

SEQ ID NO: 50725 - RNA, 30 nt, synthetic construct
  misc_feature 1..30: note = Schlafen family member 5 (601-610)
  source 1..30: mol_type = other RNA
aacagcgaccgcaaggcccagtccgtgtac

SEQ ID NO: 50726 - RNA, 33 nt, synthetic construct
  misc_feature 1..33: note = RELT-like protein 1 (113-123)
  source 1..33: mol_type = other RNA
aacagcgacaccgtgggccagatcgtccactac

SEQ ID NO: 50727 - RNA, 33 nt, synthetic construct
  misc_feature 1..33: note = Peptidyl-prolyl cis-trans isomerase FKBP9 (143-153)
  source 1..33: mol_type = other RNA
aacagcgaggaccaggtgcagatccacacctac

SEQ ID NO: 50728 - RNA, 33 nt, synthetic construct
  misc_feature 1..33: note = Zinc finger protein 583 (85-95)
  source 1..33: mol_type = other RNA
aacagcgagttctccagcaagcaggagacctac

SEQ ID NO: 50729 - RNA, 21 nt, synthetic construct
  misc_feature 1..21: note = Thymidylate synthase (205-211)
  source 1..21: mol_type = other RNA
aacagcgagctgtcctgccag

SEQ ID NO: 50730 - RNA, 27 nt, synthetic construct
  misc_feature 1..27: note = Zinc finger protein 280D (611-619)
  source 1..27: mol_type = other RNA
aacaccgccctgcgcaacctccggtac

SEQ ID NO: 50731 - RNA, 27 nt, synthetic construct
  misc_feature 1..27: note = DNA-directed RNA polymerase III subunit RPC10 (26-34)
  source 1..27: mol_type = other RNA
aacacctgcccctacgtgcacaacatc

SEQ ID NO: 50732 - RNA, 33 nt, synthetic construct
  misc_feature 1..33: note = Heterogeneous nuclear ribonucleoprotein L-like (153-163)
  source 1..33: mol_type = other RNA
aacaccgacgaccccagcggcgggaacaaggtg

SEQ ID NO: 50733 - RNA, 30 nt, synthetic construct
  misc_feature 1..30: note = Ubiquitin-like protein 5 (19-28)
  source 1..30: mol_type = other RNA
aacaccgacgacaccatcggcgacctgaag

SEQ ID NO: 50734 - RNA, 27 nt, synthetic construct
  misc_feature 1..27: note = Lysosomal-trafficking regulator (2269-2277)
  source 1..27: mol_type = other RNA
aacaccgacgactgggagaacttcgcc

SEQ ID NO: 50735 - RNA, 27 nt, synthetic construct
  misc_feature 1..27: note = Serine/threonine-protein kinase 4 (95-103)
  source 1..27: mol_type = other RNA
aacaccgacctgtggatcgtgatggag

SEQ ID NO: 50736 - RNA, 54 nt, synthetic construct
  misc_feature 1..54: note = Selenoprotein O (185-202)
  source 1..54: mol_type = other RNA
aacaccgacaacatgagcatcctgggcctcaccatcgactacgggcccttcggc

SEQ ID NO: 50737 - RNA, 30 nt, synthetic construct
  misc_feature 1..30: note = DNA-binding protein inhibitor ID-4 (141-150)
  source 1..30: mol_type = other RNA
aacaccgaccccgccggcgccgtgaacaag

SEQ ID NO: 50738 - RNA, 30 nt, synthetic construct
  misc_feature 1..30: note = ADP-ribosylation factor-binding protein GGA2 (54-63)
  source 1..30: mol_type = other RNA
aacaccgaccccaacggcccgacccacgcc

SEQ ID NO: 50739 - RNA, 27 nt, synthetic construct
  misc_feature 1..27: note = Phenylalanine-tRNA ligase beta subunit (486-494)
  source 1..27: mol_type = other RNA
aacaccgacgtgggcgccaagaactac

SEQ ID NO: 50740 - RNA, 27 nt, synthetic construct
  misc_feature 1..27: note = Fructose-bisphosphate aldolase A (51-59)
  source 1..27: mol_type = other RNA
aacaccgaggagaaccgccggttctac

SEQ ID NO: 50741 - RNA, 27 nt, synthetic construct
  misc_feature 1..27: note = Fructose-bisphosphate aldolase C (85-93)
  source 1..27: mol_type = other RNA
aacaccgaggagaaccgccggctgtac

SEQ ID NO: 50742 - RNA, 33 nt, synthetic construct
  misc_feature 1..33: note = Dynamin-1 (590-600)
  source 1..33: mol_type = other RNA
aacaccgagcagcgcaacgtgtacaaggactac

SEQ ID NO: 50743 - RNA, 27 nt, synthetic construct
  misc_feature 1..27: note = Neuron navigator 2 (838-846)
  source 1..27: mol_type = other RNA
aacaccgagagcggccgctacgtgtac

SEQ ID NO: 50744 - RNA, 27 nt, synthetic construct
  misc_feature 1..27: note = WW domain-binding protein 2 (24-32)
  source 1..27: mol_type = other RNA
aacaccgagagcatcctgatgtcctac

SEQ ID NO: 50745 - RNA, 33 nt, synthetic construct
  misc_feature 1..33: note = Short/branched chain specific acyl-CoA dehydrogenase, mitochondrial (422-432)
  source 1..33: mol_type = other RNA
aacaccatcgccaagcacatcgacgccgagtac

SEQ ID NO: 50746 - RNA, 36 nt, synthetic construct
  misc_feature 1..36: note = Mothers against decapentaplegic homolog 2 (91-102)
  source 1..36: mol_type = other RNA
aacaccatcgaccagtgggacaccacgggcctgtac

SEQ ID NO: 50747 - RNA, 36 nt, synthetic construct
  misc_feature 1..36: note = CDK5 and ABL1 enzyme substrate 1 (7-18)
  source 1..36: mol_type = other RNA
aacaccatcgacagcacctccagcttctcccagttc

SEQ ID NO: 50748 - RNA, 27 nt, synthetic construct
  misc_feature 1..27: note = H(+)/Cl(-) exchange transporter 5 (18-26)
  source 1..27: mol_type = other RNA
aacaccatcgactgggtgcgcgagaag

SEQ ID NO: 50749 - RNA, 27 nt, synthetic construct
  misc_feature 1..27: note = Coiled-coil domain-containing protein 93 (523-531)
  source 1..27: mol_type = other RNA
aacaccctggacgacaagaaggtgtac

SEQ ID NO: 50750 - RNA, 27 nt, synthetic construct
  misc_feature 1..27: note = COP9 signalosome complex subunit 6 (300-308)
  source 1..27: mol_type = other RNA
aacaccatgaaccagttcgtgaacaag

SEQ ID NO: 50751 - RNA, 27 nt, synthetic construct
  misc_feature 1..27: note = Protein FAM50A (156-164)
  source 1..27: mol_type = other RNA
aacaccatgcagcagttcctgcagaag

SEQ ID NO: 50752 - RNA, 27 nt, synthetic construct
  misc_feature 1..27: note = 26S proteasome non-ATPase regulatory subunit 8 (201-209)
  source 1..27: mol_type = other RNA
aacacccccaagaagatgaccgactac

SEQ ID NO: 50753 - RNA, 27 nt, synthetic construct
  misc_feature 1..27: note = G-protein coupled receptor 98 (3795-3803)
  source 1..27: mol_type = other RNA
aacaccaccacgctgcagctccagatc

SEQ ID NO: 50754 - RNA, 30 nt, synthetic construct
  misc_feature 1..30: note = Calsyntenin-1 (464-473)
  source 1..30: mol_type = other RNA
aacgtggagttccccagcgtcaccctgtac

SEQ ID NO: 50755 - RNA, 36 nt, synthetic construct
  misc_feature 1..36: note = 39S ribosomal protein L2, mitochondrial (195-206)
  source 1..36: mol_type = other RNA
aacgtggagagcgagcccggccgcggggcccagtac

SEQ ID NO: 50756 - RNA, 33 nt, synthetic construct
  misc_feature 1..33: note = Geranylgeranyl transferase type-2 subunit beta (112-122)
  source 1..33: mol_type = other RNA
aacgtgatcgacgtcaacaaggtggtggagtac

SEQ ID NO: 50757 - RNA, 33 nt, synthetic construct
  misc_feature 1..33: note = Zinc finger protein 638 (207-217)
  source 1..33: mol_type = other RNA
aacgtgatcgactacggccacgccagcaagtac

SEQ ID NO: 50758 - RNA, 30 nt, synthetic construct
  misc_feature 1..30: note = Neuropathy target esterase (1252-1261)
  source 1..30: mol_type = other RNA
aacgtgatcgagaagatgctgaccgaccgc

SEQ ID NO: 50759 - RNA, 30 nt, synthetic construct
  misc_feature 1..30: note = Protein MMS22-like (799-808)
  source 1..30: mol_type = other RNA
aacgtgatcgagcagtacatcggccgcttc

SEQ ID NO: 50760 - RNA, 27 nt, synthetic construct
  misc_feature 1..27: note = Syndetin (606-614)
  source 1..27: mol_type = other RNA
aacgtgatccgcctggtcggcaagtac

SEQ ID NO: 50761 - RNA, 27 nt, synthetic construct
  misc_feature 1..27: note = tRNA (guanine(37)-N1)-methyltransferase (163-171)
  source 1..27: mol_type = other RNA
aacgtgagcccccagatctccaagtac

SEQ ID NO: 50762 - RNA, 33 nt, synthetic construct
  misc_feature 1..33: note = Probable crossover junction endonuclease EME2 (356-366)
  source 1..33: mol_type = other RNA
cccgacctgagccgccggatctgcctcttcctg

SEQ ID NO: 50763 - RNA, 33 nt, synthetic construct
  misc_feature 1..33: note = Neuronal acetylcholine receptor subunit alpha-3 (433-443)
  source 1..33: mol_type = other RNA
cccgagatcaaggaggccatccagagcgtgaag

SEQ ID NO: 50764 - RNA, 27 nt, synthetic construct
  misc_feature 1..27: note = Ribosomal L1 domain-containing protein 1 (244-252)
  source 1..27: mol_type = other RNA
cccgagaagtgggagagcgtgaagctg

SEQ ID NO: 50765 - RNA, 27 nt, synthetic construct
  misc_feature 1..27: note = Galectin-3 (191-199)
  source 1..27: mol_type = other RNA
cccttcgagagcggcaagccgttcaag

SEQ ID NO: 50766 - RNA, 33 nt, synthetic construct
  misc_feature 1..33: note = 40S ribosomal protein S19 (2-12)
  source 1..33: mol_type = other RNA
cccggcgtgaccgtcaaggacgtgaaccagcag

SEQ ID NO: 50767 - RNA, 24 nt, synthetic construct
  misc_feature 1..24: note = Carbohydrate sulfotransferase 5 (259-266)
  source 1..24: mol_type = other RNA
ccccacctgcgcctcatccgggag

SEQ ID NO: 50768 - RNA, 30 nt, synthetic construct
  misc_feature 1..30: note = Myosin regulatory light chain 12A (152-161)
  source 1..30: mol_type = other RNA
cccatcgacaagaagggcaacttcaactac

SEQ ID NO: 50769 - RNA, 33 nt, synthetic construct
  misc_feature 1..33: note = A-kinase anchor protein 11 (107-117)
  source 1..33: mol_type = other RNA
cccctggacatcagctccgacccgctcaaccag

SEQ ID NO: 50770 - RNA, 27 nt, synthetic construct
  misc_feature 1..27: note = SYTL2 protein (325-333)
  source 1..27: mol_type = other RNA
cccctgcgcatgctcctgatcgccaag

SEQ ID NO: 50771 - RNA, 33 nt, synthetic construct
  misc_feature 1..33: note = Titin (13404-13414)
  source 1..33: mol_type = other RNA
cccccggtggaggagcgcgagatcgagaagtac

SEQ ID NO: 50772 - RNA, 27 nt, synthetic construct
  misc_feature 1..27: note = Translation initiation factor eIF-2B subunit delta (205-213)
  source 1..27: mol_type = other RNA
ccccagtacagccgccagaactccctg

SEQ ID NO: 50773 - RNA, 27 nt, synthetic construct
  misc_feature 1..27: note = Ubiquitin-associated protein 2-like (957-965)
  source 1..27: mol_type = other RNA
cccagcggctacgggtcccacggctac

SEQ ID NO: 50774 - RNA, 36 nt, synthetic construct
  misc_feature 1..36: note = Enhancer of filamentation 1 (121-132)
  source 1..36: mol_type = other RNA
cccaccggccacgggacccaggagcaggaggtgtac

SEQ ID NO: 50775 - RNA, 36 nt, synthetic construct
  misc_feature 1..36: note = Phosphatidylethanolamine-binding protein 1 (2-13)
  source 1..36: mol_type = other RNA
cccgtggacctgagcaagtggtccggcccgctcagc

SEQ ID NO: 50776 - RNA, 27 nt, synthetic construct
  misc_feature 1..27: note = DNA ligase 3 (547-555)
  source 1..27: mol_type = other RNA
caggccttccccggcgggcacagcatg

SEQ ID NO: 50777 - RNA, 27 nt, synthetic construct
  misc_feature 1..27: note = E3 ubiquitin-protein ligase BRE1B (135-143)
  source 1..27: mol_type = other RNA
caggccggccccatcaaccgcgagatg

SEQ ID NO: 50778 - RNA, 27 nt, synthetic construct
  misc_feature 1..27: note = Tyrosine-protein phosphatase non-receptor type 20 (25-33)
  source 1..27: mol_type = other RNA
caggccctgagccccctcctgtccgtg

SEQ ID NO: 50779 - RNA, 27 nt, synthetic construct
  misc_feature 1..27: note = Importin subunit beta-1 (408-416)
  source 1..27: mol_type = other RNA
caggccatgcccaccctgatcgagctc

SEQ ID NO: 50780 - RNA, 30 nt, synthetic construct
  misc_feature 1..30: note = UBX domain-containing protein 6 (85-94)
  source 1..30: mol_type = other RNA
caggaggaccccgaggagttctacgtgctg

SEQ ID NO: 50781 - RNA, 24 nt, synthetic construct
  misc_feature 1..24: note = Spectrin beta chain, non-erythrocytic 5 (1672-1679)
  source 1..24: mol_type = other RNA
caggaggagctggccatctactgg

SEQ ID NO: 50782 - RNA, 39 nt, synthetic construct
  misc_feature 1..39: note = Growth/differentiation factor 15 (4-16)
  source 1..39: mol_type = other RNA
caggagctgcgcaccgtgaacggcagccagatgctcctg

SEQ ID NO: 50783 - RNA, 30 nt, synthetic construct
  misc_feature 1..30: note = Ethanolamine kinase 1 (326-335)
  source 1..30: mol_type = other RNA
cagttcatcgactacgagtacagcggctac

SEQ ID NO: 50784 - RNA, 30 nt, synthetic construct
  misc_feature 1..30: note = Leucine-rich repeat-containing protein 15 (122-131)
  source 1..30: mol_type = other RNA
cagggcctggacagcctcgagtccctgctg

SEQ ID NO: 50785 - RNA, 30 nt, synthetic construct
  misc_feature 1..30: note = Methyltransferase-like protein 25 (467-476)
  source 1..30: mol_type = other RNA
cagggcctgcccaccgagagcctcttctac

SEQ ID NO: 50786 - RNA, 27 nt, synthetic construct
  misc_feature 1..27: note = Nuclear migration protein nudC (20-28)
  source 1..27: mol_type = other RNA
cagcacgagggcggggtgcaggagctg

SEQ ID NO: 50787 - RNA, 27 nt, synthetic construct
  misc_feature 1..27: note = Threonine-tRNA ligase, cytoplasmic (535-543)
  source 1..27: mol_type = other RNA
cagatcaaggacgccatcggccgctac

SEQ ID NO: 50788 - RNA, 27 nt, synthetic construct
  misc_feature 1..27: note = Cytoplasmic dynein 1 heavy chain 1 (2212-2220)
  source 1..27: mol_type = other RNA
cagatcacccagatcaaccacggcctg

SEQ ID NO: 50789 - RNA, 36 nt, synthetic construct
  misc_feature 1..36: note = Importin-8 (185-196)
  source 1..36: mol_type = other RNA
cagatcgtgcagctgctccccgacagctcctactac

SEQ ID NO: 50790 - RNA, 30 nt, synthetic construct
  misc_feature 1..30: note = Histone-lysine N-methyltransferase SUV39H1 (268-277)
  source 1..30: mol_type = other RNA
cagatctacgaccgccagggcgccacctac

SEQ ID NO: 50791 - RNA, 27 nt, synthetic construct
  misc_feature 1..27: note = PH and SEC7 domain-containing protein 3 (214-222)
  source 1..27: mol_type = other RNA
cagaaggacctgaccgccctcctgacc

SEQ ID NO: 50792 - RNA, 27 nt, synthetic construct
  misc_feature 1..27: note = Zinc finger and BTB domain-containing protein 37 (95-103)
  source 1..27: mol_type = other RNA
cagctggccgacatcatcagctacctc

SEQ ID NO: 50793 - RNA, 27 nt, synthetic construct
  misc_feature 1..27: note = Protein FAM98B (139-147)
  source 1..27: mol_type = other RNA
cagctggacaagaacagcgaggtgtac

SEQ ID NO: 50794 - RNA, 30 nt, synthetic construct
  misc_feature 1..30: note = Calsyntenin-1 (952-961)
  source 1..30: mol_type = other RNA
cagctggagtgggacgacagcaccctctcc

SEQ ID NO: 50795 - RNA, 27 nt, synthetic construct
  misc_feature 1..27: note = Poly (ADP-ribose) polymerase 4 (351-359)
  source 1..27: mol_type = other RNA
cagctgatccgcgacatggtgaacgtc

SEQ ID NO: 50796 - RNA, 27 nt, synthetic construct
  misc_feature 1..27: note = Rap guanine nucleotide exchange factor 6 (270-278)
  source 1..27: mol_type = other RNA
cagctgctcgagttcatgcaccagctg

SEQ ID NO: 50797 - RNA, 27 nt, synthetic construct
  misc_feature 1..27: note = Probable dimethyladenosine transferase (249-257)
  source 1..27: mol_type = other RNA
cagctgctcgagaagaactaccgcatc

SEQ ID NO: 50798 - RNA, 33 nt, synthetic construct
  misc_feature 1..33: note = 26S proteasome non-ATPase regulatory subunit 6 (306-316)
  source 1..33: mol_type = other RNA
cagctgctcgagagctaccgctccctgaccctg

SEQ ID NO: 50799 - RNA, 27 nt, synthetic construct
  misc_feature 1..27: note = Chromosome-associated kinesin KIF4A (982-990)
  source 1..27: mol_type = other RNA
cagctgctccgcgagaacgagatcatc

SEQ ID NO: 50800 - RNA, 33 nt, synthetic construct
  misc_feature 1..33: note = Voltage-gated potassium channel subunit beta-2 (329-339)
  source 1..33: mol_type = other RNA
cagctgatggagaacatcggcgccatccaggtg

SEQ ID NO: 50801 - RNA, 27 nt, synthetic construct
  misc_feature 1..27: note = Chromatin assembly factor 1 subunit B (113-121)
  source 1..27: mol_type = other RNA
cagctgaacaaggagaactggaccgtg

SEQ ID NO: 50802 - RNA, 27 nt, synthetic construct
  misc_feature 1..27: note = Transcription activator BRG1 (179-187)
  source 1..27: mol_type = other RNA
cagctgcgcgcccagatcatggcctac

SEQ ID NO: 50803 - RNA, 27 nt, synthetic construct
  misc_feature 1..27: note = Nuclear factor erythroid 2-related factor 1 (321-329)
  source 1..27: mol_type = other RNA
cagctgagcgaggcccagctctccctg

SEQ ID NO: 50804 - RNA, 27 nt, synthetic construct
  misc_feature 1..27: note = Protein AHNAK2 (5375-5383)
  source 1..27: mol_type = other RNA
cagctgtgggaggacagcgtgctcacc

SEQ ID NO: 50805 - RNA, 27 nt, synthetic construct
  misc_feature 1..27: note = Alpha-2-macroglobulin receptor-associated protein (61-69)
  source 1..27: mol_type = other RNA
cagctgtgggagaaggcccagcgcctc

SEQ ID NO: 50806 - RNA, 27 nt, synthetic construct
  misc_feature 1..27: note = Lysine-specific histone demethylase 1A (239-247)
  source 1..27: mol_type = other RNA
cagctgtggctcgacaaccccaagatc

SEQ ID NO: 50807 - RNA, 30 nt, synthetic construct
  misc_feature 1..30: note = YrdC domain-containing protein, mitochondrial (184-193)
  source 1..30: mol_type = other RNA
cagatgttcgagggccccctggccctcacc

SEQ ID NO: 50808 - RNA, 27 nt, synthetic construct
  misc_feature 1..27: note = U3 small nucleolar RNA-associated protein 14 homolog A (505-513)
  source 1..27: mol_type = other RNA
cagatgatcgacctgcagaacctcctg

SEQ ID NO: 50809 - RNA, 27 nt, synthetic construct
  misc_feature 1..27: note = Sodium/myo-inositol cotransporter (686-694)
  source 1..27: mol_type = other RNA
cagatgctggaggagacccgccaggtg

SEQ ID NO: 50810 - RNA, 33 nt, synthetic construct
  misc_feature 1..33: note = Neuroblastoma-amplified sequence (2232-2242)
  source 1..33: mol_type = other RNA
cagatgctgcccgccgagggcgtgaaggagctc

SEQ ID NO: 50811 - RNA, 27 nt, synthetic construct
  misc_feature 1..27: note = Vimentin (343-351)
  source 1..27: mol_type = other RNA
cagatgcgcgagatggaggagaacttc

SEQ ID NO: 50812 - RNA, 27 nt, synthetic construct
  misc_feature 1..27: note = Transmembrane emp24 domain-containing protein 4 (59-67)
  source 1..27: mol_type = other RNA
cagatgtgggacaagcagaaggaggtg

SEQ ID NO: 50813 - RNA, 27 nt, synthetic construct
  misc_feature 1..27: note = G protein-coupled receptor SNSR1 (285-293)
  source 1..27: mol_type = other RNA
cagaacctgaagctcgtgctgcagaag

SEQ ID NO: 50814 - RNA, 27 nt, synthetic construct
  misc_feature 1..27: note = DNA-directed RNA polymerase I subunit RPA2 (30-38)
  source 1..27: mol_type = other RNA
cagcagaaggccgccctgcaggagctc

SEQ ID NO: 50815 - RNA, 27 nt, synthetic construct
  misc_feature 1..27: note = Histone-lysine N-methyltransferase 2C (1225-1233)
  source 1..27: mol_type = other RNA
cagcagcagcagcagcagcagcagttc

SEQ ID NO: 50816 - RNA, 27 nt, synthetic construct
  misc_feature 1..27: note = Synaptosomal-associated protein 29 (42-50)
  source 1..27: mol_type = other RNA
cagcagtacctgcgccaggaggtgctc

SEQ ID NO: 50817 - RNA, 36 nt, synthetic construct
  misc_feature 1..36: note = Vimentin (195-206)
  source 1..36: mol_type = other RNA
cagcgcgaggaggccgagaacaccctgcagagcttc

SEQ ID NO: 50818 - RNA, 27 nt, synthetic construct
  misc_feature 1..27: note = Very long-chain specific acyl-CoA dehydrogenase, mitochondrial (600-608)
  source 1..27: mol_type = other RNA
cagagcgacccctggcagcaggagctg

SEQ ID NO: 50819 - RNA, 30 nt, synthetic construct
  misc_feature 1..30: note = Neuropilin-2 (690-699)
  source 1..30: mol_type = other RNA
cagagcgactcccagcgcgagggccagtac

SEQ ID NO: 50820 - RNA, 27 nt, synthetic construct
  misc_feature 1..27: note = Kelch-like protein 42 (26-34)
  source 1..27: mol_type = other RNA
cagagcgactacttccgcgccctgtac

SEQ ID NO: 50821 - RNA, 33 nt, synthetic construct
  misc_feature 1..33: note = HLA class I histocompatibility antigen, B-8 alpha chain (111-121)
  source 1..33: mol_type = other RNA
cagagcgaggccggctcccacaccctgcagagc

SEQ ID NO: 50822 - RNA, 39 nt, synthetic construct
  misc_feature 1..39: note = HLA class I histocompatibility antigen, A-66 alpha chain (86-98)
  source 1..39: mol_type = other RNA
cagagcgaggacggctcccacaccatccagcgcatgtac

SEQ ID NO: 50823 - RNA, 42 nt, synthetic construct
  misc_feature 1..42: note = Cold-inducible RNA-binding protein (147-160)
  source 1..42: mol_type = other RNA
cagagcggcgggtactccgaccgcagctccggcgggagctac

SEQ ID NO: 50824 - RNA, 39 nt, synthetic construct
  misc_feature 1..39: note = Caprin-1 (653-665)
  source 1..39: mol_type = other RNA
cagagccagttctccgccccccgcgactacagcggctac

SEQ ID NO: 50825 - RNA, 30 nt, synthetic construct
  misc_feature 1..30: note = Zinc finger and BTB domain-containing protein 17 (685-694)
  source 1..30: mol_type = other RNA
cagaccgacgccgacttctaccagcagtac

SEQ ID NO: 50826 - RNA, 27 nt, synthetic construct
  misc_feature 1..27: note = RNA polymerase-associated protein CTR9 homolog (424-432)
  source 1..27: mol_type = other RNA
cagaccgacatccagggcgccctgagc

SEQ ID NO: 50827 - RNA, 30 nt, synthetic construct
  misc_feature 1..30: note = Glia-derived nexin (301-310)
  source 1..30: mol_type = other RNA
cagaccgacctgaaggagcccctcaaggtg

SEQ ID NO: 50828 - RNA, 33 nt, synthetic construct
  misc_feature 1..33: note = Calreticulin (119-129)
  source 1..33: mol_type = other RNA
cagaccgacatgcacggcgacagcgagtacaac

SEQ ID NO: 50829 - RNA, 27 nt, synthetic construct
  misc_feature 1..27: note = Intraflagellar transport protein 172 homolog (85-93)
  source 1..27: mol_type = other RNA
cagaccgacaacatcatctacgtgtac

SEQ ID NO: 50830 - RNA, 30 nt, synthetic construct
  misc_feature 1..30: note = Putative E3 ubiquitin-protein ligase UNKL (18-27)
  source 1..30: mol_type = other RNA
cagaccgagaagcccacccactaccgctac

SEQ ID NO: 50831 - RNA, 30 nt, synthetic construct
  misc_feature 1..30: note = Zinc finger protein 217 (667-676)
  source 1..30: mol_type = other RNA
cagaccgagaccgccgccgactgccgctac

SEQ ID NO: 50832 - RNA, 27 nt, synthetic construct
  misc_feature 1..27: note = Interleukin-13 receptor subunit alpha-1 (268-276)
  source 1..27: mol_type = other RNA
cagaccgagacccacaacgtgttctac

SEQ ID NO: 50833 - RNA, 27 nt, synthetic construct
  misc_feature 1..27: note = Centrosomal protein of 295 kDa (745-753)
  source 1..27: mol_type = other RNA
cagaccgagacccagcagcgcgactac

SEQ ID NO: 50834 - RNA, 27 nt, synthetic construct
  misc_feature 1..27: note = Basic leucine zipper and W2 domain-containing protein 1 (165-173)
  source 1..27: mol_type = other RNA
cagaccatcggcgcccgcaaggagctg

SEQ ID NO: 50835 - RNA, 27 nt, synthetic construct
  misc_feature 1..27: note = Ubiquitin carboxyl-terminal hydrolase 32 (111-119)
  source 1..27: mol_type = other RNA
cagaccatcaaggagatccacgagtac

SEQ ID NO: 50836 - RNA, 30 nt, synthetic construct
  misc_feature 1..30: note = Zinc fingers and homeoboxes protein 3 (607-616)
  source 1..30: mol_type = other RNA
cagacccccgacttcaccccgacgaagtac

SEQ ID NO: 50837 - RNA, 33 nt, synthetic construct
  misc_feature 1..33: note = Glycerol-3-phosphate dehydrogenase 1-like protein (226-236)
  source 1..33: mol_type = other RNA
cagaccagcgccgaggtgtaccgcatcctgaag

SEQ ID NO: 50838 - RNA, 27 nt, synthetic construct
  misc_feature 1..27: note = Probable ATP-dependent RNA helicase DDX47 (228-236)
  source 1..27: mol_type = other RNA
cagaccgtggagaagctgcagcagtac

SEQ ID NO: 50839 - RNA, 30 nt, synthetic construct
  misc_feature 1..30: note = WD repeat-containing protein 62 (147-156)
  source 1..30: mol_type = other RNA
caggtggccgagatgctgggccacaagtac

SEQ ID NO: 50840 - RNA, 30 nt, synthetic construct
  misc_feature 1..30: note = Ran GTPase-activating protein 1 (17-26)
  source 1..30: mol_type = other RNA
caggtggccggcgggcagctgagcttcaag

SEQ ID NO: 50841 - RNA, 27 nt, synthetic construct
  misc_feature 1..27: note = Pre-mRNA-processing factor 19 (209-217)
  source 1..27: mol_type = other RNA
caggtggccagccacgtcggcctgcac

SEQ ID NO: 50842 - RNA, 33 nt, synthetic construct
  misc_feature 1..33: note = Rootletin (1601-1611)
  source 1..33: mol_type = other RNA
caggtggccaccctggagcgcagcctccaggcc

SEQ ID NO: 50843 - RNA, 36 nt, synthetic construct
  misc_feature 1..36: note = Tripartite motif-containing protein 2 (694-705)
  source 1..36: mol_type = other RNA
caggtgttcgacggcagcgggtccttcctgagctac

SEQ ID NO: 50844 - RNA, 30 nt, synthetic construct
  misc_feature 1..30: note = Basic leucine zipper and W2 domain-containing protein 2 (113-122)
  source 1..30: mol_type = other RNA
caggtgttcaacaagctgatccgccggtac

SEQ ID NO: 50845 - RNA, 30 nt, synthetic construct
  misc_feature 1..30: note = Sec1 family domain-containing protein 2 (210-219)
  source 1..30: mol_type = other RNA
caggtgatcgccgccgacctggcgaactac

SEQ ID NO: 50846 - RNA, 33 nt, synthetic construct
  misc_feature 1..33: note = Putative Polycomb group protein ASXL1 (36-46)
  source 1..33: mol_type = other RNA
caggtgatcgaggccgagggcctgaaggagatg

SEQ ID NO: 50847 - RNA, 33 nt, synthetic construct
  misc_feature 1..33: note = SURP and G-patch domain-containing protein 2 (69-79)
  source 1..33: mol_type = other RNA
caggtgatcggccaccgcaagctggggcacttc

SEQ ID NO: 50848 - RNA, 27 nt, synthetic construct
  misc_feature 1..27: note = Vimentin (453-461)
  source 1..27: mol_type = other RNA
caggtgatcaacgagaccagccagcac

SEQ ID NO: 50849 - RNA, 30 nt, synthetic construct
  misc_feature 1..30: note = Vimentin (453-462)
  source 1..30: mol_type = other RNA
caggtgatcaacgagaccagccagcaccac

SEQ ID NO: 50850 - RNA, 36 nt, synthetic construct
  misc_feature 1..36: note = Vimentin (453-464)
  source 1..36: mol_type = other RNA
caggtgatcaacgagaccagccagcaccacgacgac

SEQ ID NO: 50851 - RNA, 27 nt, synthetic construct
  misc_feature 1..27: note = Splicing factor U2AF 65 kDa subunit (274-282)
  source 1..27: mol_type = other RNA
caggtgaaggagctgctcaccagcttc

SEQ ID NO: 50852 - RNA, 27 nt, synthetic construct
  misc_feature 1..27: note = Glutathione-specific gamma-glutamylcyclotransferase 1 (98-106)
  source 1..27: mol_type = other RNA
caggtgcagggcgagcaggtcagcaag

SEQ ID NO: 50853 - RNA, 30 nt, synthetic construct
  misc_feature 1..30: note = tRNA-splicing ligase RtcB homolog (232-241)
  source 1..30: mol_type = other RNA
caggtggtcgacgagatcttcaacgagtac

SEQ ID NO: 50854 - RNA, 30 nt, synthetic construct
  misc_feature 1..30: note = Xylulose kinase (511-520)
  source 1..30: mol_type = other RNA
caggtgtacgaggccctgctcccccagtac

SEQ ID NO: 50855 - RNA, 30 nt, synthetic construct
  misc_feature 1..30: note = 2'-5'-oligoadenylate synthase 3 (908-917)
  source 1..30: mol_type = other RNA
caggtgtacgtcgacctgatccacagctac

SEQ ID NO: 50856 - RNA, 27 nt, synthetic construct
  misc_feature 1..27: note = FERM domain-containing protein 8 (28-36)
  source 1..27: mol_type = other RNA
cgcgccgccgacgtgctggtctacctc

SEQ ID NO: 50857 - RNA, 27 nt, synthetic construct
  misc_feature 1..27: note = Non-canonical poly(A) RNA polymerase PAPD7 (152-160)
  source 1..27: mol_type = other RNA
cgcgccgccgagttcatcaagaactac

SEQ ID NO: 50858 - RNA, 27 nt, synthetic construct
  misc_feature 1..27: note = Nuclear export mediator factor NEMF (136-144)
  source 1..27: mol_type = other RNA
cgcgccgccgagcccctgctcaccctg

SEQ ID NO: 50859 - RNA, 39 nt, synthetic construct
  misc_feature 1..39: note = Non-POU domain-containing octamer-binding protein (367-379)
  source 1..39: mol_type = other RNA
cgcgccgcccccggcgcggagttcgccccgaacaagcgg

SEQ ID NO: 50860 - RNA, 33 nt, synthetic construct
  misc_feature 1..33: note = Fatty acid synthase (2275-2285)
  source 1..33: mol_type = other RNA
cgcgccgcccccctggacagcatccactccctc

SEQ ID NO: 50861 - RNA, 30 nt, synthetic construct
  misc_feature 1..30: note = Sodium/potassium-transporting ATPase subunit alpha-3 (42-51)
  source 1..30: mol_type = other RNA
cgcgccgccgtgcccgacgcggtcggcaag

SEQ ID NO: 50862 - RNA, 27 nt, synthetic construct
  misc_feature 1..27: note = Nuclear pore complex protein Nup205 (413-421)
  source 1..27: mol_type = other RNA
cgcgccgacgaggacgcccggatgatc

SEQ ID NO: 50863 - RNA, 27 nt, synthetic construct
  misc_feature 1..27: note = Uncharacterized protein KIAA0930 (312-320)
  source 1..27: mol_type = other RNA
cgcgccgacggcaacttcctgctctac

SEQ ID NO: 50864 - RNA, 27 nt, synthetic construct
  misc_feature 1..27: note = Cytochrome b-c1 complex subunit 9 (34-42)
  source 1..27: mol_type = other RNA
cgcgccttcgaccagggcgccgacgcg

SEQ ID NO: 50865 - RNA, 33 nt, synthetic construct
  misc_feature 1..33: note = E3 ubiquitin-protein ligase DTX3L (679-689)
  source 1..33: mol_type = other RNA
cgcgccttcgaccagaagctgatcttcaccgtg

SEQ ID NO: 50866 - RNA, 27 nt, synthetic construct
  misc_feature 1..27: note = Protein transport protein Sec16A (1122-1130)
  source 1..27: mol_type = other RNA
cgcgccttccccggcccgctggccaag

SEQ ID NO: 50867 - RNA, 30 nt, synthetic construct
  misc_feature 1..30: note = Protein ECT2 (107-116)
  source 1..30: mol_type = other RNA
cgcgccttcagcttctccaagacccccaag

SEQ ID NO: 50868 - RNA, 27 nt, synthetic construct
  misc_feature 1..27: note = Rho GTPase-activating protein 11B (16-24)
  source 1..27: mol_type = other RNA
cgcgccttctacggcatcaaggtgaag

SEQ ID NO: 50869 - RNA, 33 nt, synthetic construct
  misc_feature 1..33: note = Glutaminyl-peptide cyclotransferase (172-182)
  source 1..33: mol_type = other RNA
cgcgccctggacaagaagctcctgagcctgaag

SEQ ID NO: 50870 - RNA, 27 nt, synthetic construct
  misc_feature 1..27: note = Clathrin heavy chain 1 (625-633)
  source 1..27: mol_type = other RNA
cgcgccctggagcacttcaccgacctc

SEQ ID NO: 50871 - RNA, 27 nt, synthetic construct
  misc_feature 1..27: note = Guanine nucleotide exchange factor DBS (926-934)
  source 1..27: mol_type = other RNA
cgcgccctggagcagagccagtccctc

SEQ ID NO: 50872 - RNA, 27 nt, synthetic construct
  misc_feature 1..27: note = ALX homeobox protein 1 (94-102)
  source 1..27: mol_type = other RNA
cgcgccatggacaactgcaacagcctg

SEQ ID NO: 50873 - RNA, 30 nt, synthetic construct
  misc_feature 1..30: note = Inositol hexakisphosphate kinase 2 (6-15)
  source 1..30: mol_type = other RNA
cgcgccatggacgtggagccccgggccaag

SEQ ID NO: 50874 - RNA, 27 nt, synthetic construct
  misc_feature 1..27: note = Hsp70-binding protein 1 (283-291)
  source 1..27: mol_type = other RNA
cgcgccatgcagcagcaggtgcagaag

SEQ ID NO: 50875 - RNA, 27 nt, synthetic construct
  misc_feature 1..27: note = Ankyrin-2 (388-396)
  source 1..27: mol_type = other RNA
cgcgccaaccccaacgcccgggcgctg

SEQ ID NO: 50876 - RNA, 39 nt, synthetic construct
  misc_feature 1..39: note = N-terminal kinase-like protein (673-685)
  source 1..39: mol_type = other RNA
cgcgccagccagtcccccaccggcgccgcggggaagctg

SEQ ID NO: 50877 - RNA, 27 nt, synthetic construct
  misc_feature 1..27: note = Retinoic acid receptor alpha (15-23)
  source 1..27: mol_type = other RNA
cgcgccaccagctccacccagagcctg

SEQ ID NO: 50878 - RNA, 27 nt, synthetic construct
  misc_feature 1..27: note = Coiled-coil domain-containing protein 124 (215-223)
  source 1..27: mol_type = other RNA
cgcgccgtgcccttcaacgccccgaag

SEQ ID NO: 50879 - RNA, 27 nt, synthetic construct
  misc_feature 1..27: note = Eukaryotic peptide chain release factor GTP-binding subunit ERF3A (143-151)
  source 1..27: mol_type = other RNA
cgcgcctacttcgagaccgagaagaag

SEQ ID NO: 50880 - RNA, 30 nt, synthetic construct
  misc_feature 1..30: note = CCR4-NOT transcription complex subunit 1 (1694-1703)
  source 1..30: mol_type = other RNA
cgcgcctacggcagcccctggtgcaacaag

SEQ ID NO: 50881 - RNA, 27 nt, synthetic construct
  misc_feature 1..27: note = E3 ubiquitin-protein ligase UBR5 (1124-1132)
  source 1..27: mol_type = other RNA
cgcgcctaccccgccgcgatcaccatc

SEQ ID NO: 50882 - RNA, 30 nt, synthetic construct
  misc_feature 1..30: note = SWI/SNF-related matrix-associated actin-dependent regulator of chromatin subfamily E member 1-related (135-144)
  source 1..30: mol_type = other RNA
cgcgcctaccagcagagcgaggcctacaag

SEQ ID NO: 50883 - RNA, 27 nt, synthetic construct
  misc_feature 1..27: note = Hermansky-Pudlak syndrome 3 protein (89-97)
  source 1..27: mol_type = other RNA
cgcgcctacgtgaactggcggaacaag

SEQ ID NO: 50884 - RNA, 27 nt, synthetic construct
  misc_feature 1..27: note = 60S ribosomal protein L37 (21-29)
  source 1..27: mol_type = other RNA
cgctgcggcagcaaggcctaccacctg

SEQ ID NO: 50885 - RNA, 42 nt, synthetic construct
  misc_feature 1..42: note = PEST proteolytic signal-containing nuclear protein (112-125)
  source 1..42: mol_type = other RNA
cgcgacacccccaccagcgccggcccgaactccttcaacaag

SEQ ID NO: 50886 - RNA, 30 nt, synthetic construct
  misc_feature 1..30: note = Nuclear mitotic apparatus protein 1 (76-85)
  source 1..30: mol_type = other RNA
cgcgaggccgagcagatgggcaacgagctg

SEQ ID NO: 50887 - RNA, 30 nt, synthetic construct
  misc_feature 1..30: note = Melanotransferrin (44-53)
  source 1..30: mol_type = other RNA
cgcgaggccggcatccagcccagcctgctc

SEQ ID NO: 50888 - RNA, 30 nt, synthetic construct
  misc_feature 1..30: note = Kinesin-like protein (353-362)
  source 1..30: mol_type = other RNA
cgcgaggccggcaacatcaaccagagcctg

SEQ ID NO: 50889 - RNA, 27 nt, synthetic construct
  misc_feature 1..27: note = Vacuolar protein sorting-associated protein 72 homolog (174-182)
  source 1..27: mol_type = other RNA
cgcgaggccaagatcaccgaggagctg

SEQ ID NO: 50890 - RNA, 27 nt, synthetic construct
  misc_feature 1..27: note = Src substrate cortactin (417-425)
  source 1..27: mol_type = other RNA
cgcgaggccagctcccagcagggcctg

SEQ ID NO: 50891 - RNA, 33 nt, synthetic construct
  misc_feature 1..33: note = Cullin-4B (258-268)
  source 1..33: mol_type = other RNA
cgcgaggacagcctggactccgtgctcttcctg

SEQ ID NO: 50892 - RNA, 30 nt, synthetic construct
  misc_feature 1..30: note = Beta-citrylglutamate synthase B (18-27)
  source 1..30: mol_type = other RNA
cgcgaggactacccccagaaggagatcctg

SEQ ID NO: 50893 - RNA, 30 nt, synthetic construct
  misc_feature 1..30: note = RE1-silencing transcription factor (872-881)
  source 1..30: mol_type = other RNA
cgcgaggaggccagcggcgaccagaagctg

SEQ ID NO: 50894 - RNA, 36 nt, synthetic construct
  misc_feature 1..36: note = 39S ribosomal protein L37, mitochondrial (242-253)
  source 1..36: mol_type = other RNA
cgcgaggagatcgaggccaccaagaaccacgtgctg

SEQ ID NO: 50895 - RNA, 27 nt, synthetic construct
  misc_feature 1..27: note = ATP-dependent RNA helicase DHX36 (91-99)
  source 1..27: mol_type = other RNA
cgcgaggagcagatcgtgcagctgctc

SEQ ID NO: 50896 - RNA, 27 nt, synthetic construct
  misc_feature 1..27: note = 60S ribosomal protein L3-like (69-77)
  source 1..27: mol_type = other RNA
cgcgaggaggtggaggccgtcaccatc

SEQ ID NO: 50897 - RNA, 30 nt, synthetic construct
  misc_feature 1..30: note = Colorectal mutant cancer protein (584-593)
  source 1..30: mol_type = other RNA
cgcgagttcgaggtggagaccgagcggctg

SEQ ID NO: 50898 - RNA, 33 nt, synthetic construct
  misc_feature 1..33: note = Proteasome subunit alpha type-7 (169-179)
  source 1..33: mol_type = other RNA
cgcgagttcctggagaagaactacaccgacgag

SEQ ID NO: 50899 - RNA, 27 nt, synthetic construct
  misc_feature 1..27: note = TBC1 domain family member 16 (242-250)
  source 1..27: mol_type = other RNA
cgcgagttccccgaggccgaggccctg

SEQ ID NO: 50900 - RNA, 27 nt, synthetic construct
  misc_feature 1..27: note = Leucine-rich repeat and calponin homology domain-containing protein 3 (427-435)
  source 1..27: mol_type = other RNA
cgcgagttccagaagaccgaggacatg

SEQ ID NO: 50901 - RNA, 27 nt, synthetic construct
  misc_feature 1..27: note = 5,6-dihydroxyindole-2-carboxylic acid oxidase (471-479)
  source 1..27: mol_type = other RNA
cgcgagttcagcgtgcccgagatcatc

SEQ ID NO: 50902 - RNA, 27 nt, synthetic construct
  misc_feature 1..27: note = Rhophilin-2 (553-561)
  source 1..27: mol_type = other RNA
cgcgagggcgactacatcgtgagcatc

SEQ ID NO: 50903 - RNA, 33 nt, synthetic construct
  misc_feature 1..33: note = Contactin-associated protein-like 3B (224-234)
  source 1..33: mol_type = other RNA
cgcgagggccagcacgggaaccacatcaccctg

SEQ ID NO: 50904 - RNA, 36 nt, synthetic construct
  misc_feature 1..36: note = Colorectal mutant cancer protein (255-266)
  source 1..36: mol_type = other RNA
cgcgagcacgaggacgtgcaggagcggaccaccctg

SEQ ID NO: 50905 - RNA, 27 nt, synthetic construct
  misc_feature 1..27: note = Protein orai-2 (155-163)
  source 1..27: mol_type = other RNA
cgcgagatcgaggagctgcacaagctc

SEQ ID NO: 50906 - RNA, 27 nt, synthetic construct
  misc_feature 1..27: note = Pyridoxal-dependent decarboxylase domain-containing protein 1 (596-604)
  source 1..27: mol_type = other RNA
cgcgagatcgaggagaacagccggctg

SEQ ID NO: 50907 - RNA, 27 nt, synthetic construct
  misc_feature 1..27: note = Zinc finger FYVE domain-containing protein 16 (199-207)
  source 1..27: mol_type = other RNA
cgcgagatcggcgggatcaaggagctg

SEQ ID NO: 50908 - RNA, 33 nt, synthetic construct
  misc_feature 1..33: note = Cathepsin K (225-235)
  source 1..33: mol_type = other RNA
cgcgagatccccgagggcaacgagaaggccctg

SEQ ID NO: 50909 - RNA, 27 nt, synthetic construct
  misc_feature 1..27: note = Calcineurin-binding protein cabin-1 (253-261)
  source 1..27: mol_type = other RNA
cgcgagaaggagcccgacctgaagctc

SEQ ID NO: 50910 - RNA, 27 nt, synthetic construct
  misc_feature 1..27: note = B-cell lymphoma 3 protein (77-85)
  source 1..27: mol_type = other RNA
cgcgagctggacatctacaacaacctc

SEQ ID NO: 50911 - RNA, 27 nt, synthetic construct
  misc_feature 1..27: note = Serine/threonine-protein kinase Nek9 (195-203)
  source 1..27: mol_type = other RNA
cgcgagatggaggagaaggtgaccctg

SEQ ID NO: 50912 - RNA, 27 nt, synthetic construct
  misc_feature 1..27: note = Vimentin (345-353)
  source 1..27: mol_type = other RNA
cgcgagatggaggagaacttcgccgtg

SEQ ID NO: 50913 - RNA, 27 nt, synthetic construct
  misc_feature 1..27: note = Mitogen-activated protein kinase kinase kinase 1 (162-170)
  source 1..27: mol_type = other RNA
cgcgagatggagaacaaggagaccctg

SEQ ID NO: 50914 - RNA, 30 nt, synthetic construct
  misc_feature 1..30: note = Protein lin-9 homolog (312-321)
  source 1..30: mol_type = other RNA
cgcgagatgaacaccgaggccgagaagctg

SEQ ID NO: 50915 - RNA, 30 nt, synthetic construct
  misc_feature 1..30: note = KN motif and ankyrin repeat domain-containing protein 1 (483-492)
  source 1..30: mol_type = other RNA
cgcgagatgaccaagctgaagcaggagctc

SEQ ID NO: 50916 - RNA, 30 nt, synthetic construct
  misc_feature 1..30: note = Sorting nexin-29 (92-101)
  source 1..30: mol_type = other RNA
cgcgagaacgaggtgctgaaggtccagctc

SEQ ID NO: 50917 - RNA, 27 nt, synthetic construct
  misc_feature 1..27: note = RNA-binding protein 27 (502-510)
  source 1..27: mol_type = other RNA
cgcgagaacaacgagcagcccaccctg

SEQ ID NO: 50918 - RNA, 33 nt, synthetic construct
  misc_feature 1..33: note = N-alpha-acetyltransferase 11 (175-185)
  source 1..33: mol_type = other RNA
cgcgagaaccaggagacccagggcagcaccctg

SEQ ID NO: 50919 - RNA, 30 nt, synthetic construct
  misc_feature 1..30: note = Heterogeneous nuclear ribonucleoprotein K (171-180)
  source 1..30: mol_type = other RNA
cgcgagaacacccagaccacgatcaagctg

SEQ ID NO: 50920 - RNA, 33 nt, synthetic construct
  misc_feature 1..33: note = Probable ATP-dependent RNA helicase DDX5 (511-521)
  source 1..33: mol_type = other RNA
cgcgagaactacgaccggggctacagctccctg

SEQ ID NO: 50921 - RNA, 36 nt, synthetic construct
  misc_feature 1..36: note = Probable ATP-dependent RNA helicase DDX5 (511-522)
  source 1..36: mol_type = other RNA
cgcgagaactacgaccggggctacagctccctgctc

SEQ ID NO: 50922 - RNA, 30 nt, synthetic construct
  misc_feature 1..30: note = Hsp70-binding protein 1 (357-366)
  source 1..30: mol_type = other RNA
cgcgagcccgagctgggcctcgaggagctg

SEQ ID NO: 50923 - RNA, 30 nt, synthetic construct
  misc_feature 1..30: note = Tripartite motif-containing protein 65 (51-60)
  source 1..30: mol_type = other RNA
cgcgagcccttcccggacggcgccgagctg

SEQ ID NO: 50924 - RNA, 30 nt, synthetic construct
  misc_feature 1..30: note = Melanoma-associated antigen 2 (155-164)
  source 1..30: mol_type = other RNA
cgcgagcccgtgaccaaggccgagatgctg

SEQ ID NO: 50925 - RNA, 27 nt, synthetic construct
  misc_feature 1..27: note = FAS-associated factor 1 (349-357)
  source 1..27: mol_type = other RNA
cgcgagcaggacgaggcctaccggctg

SEQ ID NO: 50926 - RNA, 27 nt, synthetic construct
  misc_feature 1..27: note = Intersectin-2 (475-483)
  source 1..27: mol_type = other RNA
cgcgagcaggaggagatcgtgcggctg

SEQ ID NO: 50927 - RNA, 30 nt, synthetic construct
  misc_feature 1..30: note = L-dopachrome tautomerase (138-147)
  source 1..30: mol_type = other RNA
cgcgagcagttcctgggcgccctcgacctg

SEQ ID NO: 50928 - RNA, 33 nt, synthetic construct
  misc_feature 1..33: note = Ras-responsive element-binding protein 1 (361-371)
  source 1..33: mol_type = other RNA
cgcgagcagcccagcgagggcgccaccgagctg

SEQ ID NO: 50929 - RNA, 27 nt, synthetic construct
  misc_feature 1..27: note = Microtubule-actin cross-linking factor 1, isoforms 1/2/3/5 (4309-4317)
  source 1..27: mol_type = other RNA
cgcgagcagcagctgcagagcaccctc

SEQ ID NO: 50930 - RNA, 27 nt, synthetic construct
  misc_feature 1..27: note = V-type proton ATPase subunit D (194-202)
  source 1..27: mol_type = other RNA
cgcgagcgggaggagttctaccgcctg

SEQ ID NO: 50931 - RNA, 27 nt, synthetic construct
  misc_feature 1..27: note = Eukaryotic translation initiation factor 4B (372-380)
  source 1..27: mol_type = other RNA
cgcgagcgggaggtggaggagcgcctg

SEQ ID NO: 50932 - RNA, 33 nt, synthetic construct
  misc_feature 1..33: note = Proteasome activator complex subunit 3 (19-29)
  source 1..33: mol_type = other RNA
cgcgagcggatcaccagcgaggccgaggacctg

SEQ ID NO: 50933 - RNA, 27 nt, synthetic construct
  misc_feature 1..27: note = Lysosomal-trafficking regulator (1440-1448)
  source 1..27: mol_type = other RNA
cgcgagagcttcccccaccggctgctc

SEQ ID NO: 50934 - RNA, 30 nt, synthetic construct
  misc_feature 1..30: note = Cytoplasmic dynein 1 intermediate chain 1 (57-66)
  source 1..30: mol_type = other RNA
cgcgagaccgaggccctgctccagagcatc

SEQ ID NO: 50935 - RNA, 30 nt, synthetic construct
  misc_feature 1..30: note = Annexin A5 (227-236)
  source 1..30: mol_type = other RNA
cgcgagaccagcggcaacctggagcagctc

SEQ ID NO: 50936 - RNA, 33 nt, synthetic construct
  misc_feature 1..33: note = Dexamethasone-induced Ras-related protein 1 (153-163)
  source 1..33: mol_type = other RNA
cgcgaggtggaccagcgggagatcgagcagctg

SEQ ID NO: 50937 - RNA, 39 nt, synthetic construct
  misc_feature 1..39: note = Dual specificity protein phosphatase 10 (294-306)
  source 1..39: mol_type = other RNA
cgcgaggtgggcgggggcgccagcgccgcgtccagcctg

SEQ ID NO: 50938 - RNA, 33 nt, synthetic construct
  misc_feature 1..33: note = Transmembrane channel-like protein 6 (57-67)
  source 1..33: mol_type = other RNA
cgcgaggtgaccggcagctcccagcagaccctg

SEQ ID NO: 50939 - RNA, 30 nt, synthetic construct
  misc_feature 1..30: note = Sarcoplasmic/endoplasmic reticulum calcium ATPase 2 (549-558)
  source 1..30: mol_type = other RNA
cgcgagtggggcagcgggtccgacaccctg

SEQ ID NO: 50940 - RNA, 30 nt, synthetic construct
  misc_feature 1..30: note = GPN-loop GTPase 1 (251-260)
  source 1..30: mol_type = other RNA
cgcgagtaccggcccgagtacgagcgcctg

SEQ ID NO: 50941 - RNA, 27 nt, synthetic construct
  misc_feature 1..27: note = Rab-like protein 3 (198-206)
  source 1..27: mol_type = other RNA
cgcttcttcgacaaggtgatcgagaag

SEQ ID NO: 50942 - RNA, 30 nt, synthetic construct
  misc_feature 1..30: note = DNA mismatch repair protein Msh3 (26-35)
  source 1..30: mol_type = other RNA
cgcttcttccagagcaccggctccctgaag

SEQ ID NO: 50943 - RNA, 54 nt, synthetic construct
  misc_feature 1..54: note = Transgelin-2 (182-199)
  source 1..54: mol_type = other RNA
cgcggcgccagccaggccgggatgaccggctacgggatgccccggcagatcctg

SEQ ID NO: 50944 - RNA, 33 nt, synthetic construct
  misc_feature 1..33: note = F-box/LRR-repeat protein 4 (358-368)
  source 1..33: mol_type = other RNA
cgcggcttcatcagcgtggccgggttctcccgg

SEQ ID NO: 50945 - RNA, 33 nt, synthetic construct
  misc_feature 1..33: note = Isocitrate dehydrogenase (NAD) subunit alpha, mitochondrial (25-35)
  source 1..33: mol_type = other RNA
cgcggcttcaccgggggcatcaacttcgccaag

SEQ ID NO: 50946 - RNA, 27 nt, synthetic construct
  misc_feature 1..27: note = POM121 and ZP3 fusion protein (9-17)
  source 1..27: mol_type = other RNA
cgcatcgcccccccggaccggcgcttc

SEQ ID NO: 50947 - RNA, 33 nt, synthetic construct
  misc_feature 1..33: note = Histone H2B type 1-A (74-84)
  source 1..33: mol_type = other RNA
cgcatcgccagcgaggcctcccggctggcgcac

SEQ ID NO: 50948 - RNA, 27 nt, synthetic construct
  misc_feature 1..27: note = Cell division cycle 5-like protein (33-41)
  source 1..27: mol_type = other RNA
cgcatcgccagcctgctccaccggaag

SEQ ID NO: 50949 - RNA, 30 nt, synthetic construct
  misc_feature 1..30: note = Transmembrane protein 230 (98-107)
  source 1..30: mol_type = other RNA
cgcatcgcctactacgccagcaagggctac

SEQ ID NO: 50950 - RNA, 27 nt, synthetic construct
  misc_feature 1..27: note = Galectin-3-binding protein (216-224)
  source 1..27: mol_type = other RNA
cgcatcgacatcaccctgagctccgtg

SEQ ID NO: 50951 - RNA, 27 nt, synthetic construct
  misc_feature 1..27: note = Nuclear pore complex protein Nup88 (356-364)
  source 1..27: mol_type = other RNA
cgcatcgacctgatccccagcctctac

SEQ ID NO: 50952 - RNA, 33 nt, synthetic construct
  misc_feature 1..33: note Dolichyl-diphosphooligosaccharide-proteinosyltransferase 48 kDa subunit (359-369)
  source 1..33: mol_type = other RNA
cgcatcgaccccttcgtgcggaccttcctgaag

SEQ ID NO: 50953 - RNA, 33 nt, synthetic construct
  misc_feature 1..33: note = 78 kDa glucose-regulated protein (540-550)
  source 1..33: mol_type = other RNA
cgcatcgacacccggaacgagctggagagctac

SEQ ID NO: 50954 - RNA, 27 nt, synthetic construct
  misc_feature 1..27: note = Tuftelin-interacting protein 11 (402-410)
  source 1..27: mol_type = other RNA
cgcatcttcgagaccctgcaggacaag

SEQ ID NO: 50955 - RNA, 27 nt, synthetic construct
  misc_feature 1..27: note = DNA-directed RNA polymerase III subunit RPC3 (364-372)
  source 1..27: mol_type = other RNA
cgcatcttccggctggtgctccagaag

SEQ ID NO: 50956 - RNA, 27 nt, synthetic construct
  misc_feature 1..27: note = Serine/threonine-protein phosphatase 2A regulatory subunit B'' subunit beta (354-362)
  source 1..27: mol_type = other RNA
cgcatcttcagcggcgccgtgacccgg

SEQ ID NO: 50957 - RNA, 39 nt, synthetic construct
  misc_feature 1..39: note = Interleukin enhancer-binding factor 3 (5-17)
  source 1..39: mol_type = other RNA
cgcatcttcgtgaacgacgaccggcacgtcatggccaag

SEQ ID NO: 50958 - RNA, 27 nt, synthetic construct
  misc_feature 1..27: note = Peroxisome biogenesis factor 10 (83-91)
  source 1..27: mol_type = other RNA
cgcatccacgtgcccagctccctgcgg

SEQ ID NO: 50959 - RNA, 27 nt, synthetic construct
  misc_feature 1..27: note = A-kinase anchor protein 13 (58-66)
  source 1..27: mol_type = other RNA
cgcatcatcgacagcaagttcctgaag

SEQ ID NO: 50960 - RNA, 27 nt, synthetic construct
  misc_feature 1..27: note = Oligoribonuclease, mitochondrial (133-141)
  source 1..27: mol_type = other RNA
cgcatcatcgacgtgagcaccgtcaag

SEQ ID NO: 50961 - RNA, 27 nt, synthetic construct
  misc_feature 1..27: note = Actin filament-associated protein 1-like 1 (363-371)
  source 1..27: mol_type = other RNA
cgcatcatcggcttcagcaagaagaag

SEQ ID NO: 50962 - RNA, 33 nt, synthetic construct
  misc_feature 1..33: note = Choline kinase alpha (244-254)
  source 1..33: mol_type = other RNA
cgcatcaagttcaccgaggagagccggatcaag

SEQ ID NO: 50963 - RNA, 27 nt, synthetic construct
  misc_feature 1..27: note = Endothelin B receptor (208-216)
  source 1..27: mol_type = other RNA
cgcatcaagggcatcggggtgcccaag

SEQ ID NO: 50964 - RNA, 30 nt, synthetic construct
  misc_feature 1..30: note = Uncharacterized protein C1orf21 (35-44)
  source 1..30: mol_type = other RNA
cgcatcaagcccgtggaggaggtcaagtac

SEQ ID NO: 50965 - RNA, 27 nt, synthetic construct
  misc_feature 1..27: note = Chromodomain-helicase-DNA-binding protein 8 (579-587)
  source 1..27: mol_type = other RNA
cgcatcctggacgagagccactccatc

SEQ ID NO: 50966 - RNA, 30 nt, synthetic construct
  misc_feature 1..30: note = SH3 domain-binding glutamic acid-rich-like protein 3 (159-168)
  source 1..30: mol_type = other RNA
cgcatcctggacggcaagcggatccagtac

SEQ ID NO: 50967 - RNA, 36 nt, synthetic construct
  misc_feature 1..36: note = Ubiquitin conjugation factor E4 B (856-867)
  source 1..36: mol_type = other RNA
cgcatcctggaccccgcctacccggacatcaccctc

SEQ ID NO: 50968 - RNA, 27 nt, synthetic construct
  misc_feature 1..27: note = Shugoshin-like 2 (1098-1106)
  source 1..27: mol_type = other RNA
cgcatcctggacagcgtgcagggcaag

SEQ ID NO: 50969 - RNA, 33 nt, synthetic construct
  misc_feature 1..33: note = Serine/threonine-protein phosphatase 6 regulatory subunit 3 (385-395)
  source 1..33: mol_type = other RNA
cgcatcctggaggcctgggagatgaacgagaag

SEQ ID NO: 50970 - RNA, 33 nt, synthetic construct
  misc_feature 1..33: note = 60S ribosomal protein L19 (117-127)
  source 1..33: mol_type = other RNA
cgcatcctgatggagcacatccacaagctcaag

SEQ ID NO: 50971 - RNA, 33 nt, synthetic construct
  misc_feature 1..33: note = Eukaryotic translation initiation factor 3 subunit A (623-633)
  source 1..33: mol_type = other RNA
cgcatcctgcaggagcacgagcagatcaagaag

SEQ ID NO: 50972 - RNA, 30 nt, synthetic construct
  misc_feature 1..30: note = Pre-mRNA-splicing factor ATP-dependent RNA helicase DHX15 (666-675)
  source 1..30: mol_type = other RNA
cgcatcatggaccggttcaacctgccccgc

SEQ ID NO: 50973 - RNA, 33 nt, synthetic construct
  misc_feature 1..33: note = Cell differentiation protein RCD1 homolog (169-179)
  source 1..33: mol_type = other RNA
cgcatcatggagagcggctccgagctgagcaag

SEQ ID NO: 50974 - RNA, 33 nt, synthetic construct
  misc_feature 1..33: note = Elongation factor 2 (428-438)
  source 1..33: mol_type = other RNA
cgcatcatgggccccaactacaccccggggaag

SEQ ID NO: 50975 - RNA, 33 nt, synthetic construct
  misc_feature 1..33: note = Calcineurin binding protein 1, isoform CRA_c (308-318)
  source 1..33: mol_type = other RNA
cgcatcatgagcgagacctacatgctgatcaag

SEQ ID NO: 50976 - RNA, 27 nt, synthetic construct
  misc_feature 1..27: note = Synaptonemal complex central element protein 1 (59-67)
  source 1..27: mol_type = other RNA
cgcatcaacgaggtgcagcaggccaag

SEQ ID NO: 50977 - RNA, 30 nt, synthetic construct
  misc_feature 1..30: note = Ninein (1240-1249)
  source 1..30: mol_type = other RNA
cgcatccccgaggccagcccgaagtacaag

SEQ ID NO: 50978 - RNA, 30 nt, synthetic construct
  misc_feature 1..30: note = Ribosomal protein 63, mitochondrial (11-20)
  source 1..30: mol_type = other RNA
cgcatccccggccggcagtggatcgggaag

SEQ ID NO: 50979 - RNA, 33 nt, synthetic construct
  misc_feature 1..33: note = Cullin-1 (328-338)
  source 1..33: mol_type = other RNA
cgcatccaggacggcctgggggagctcaagaag

SEQ ID NO: 50980 - RNA, 33 nt, synthetic construct
  misc_feature 1..33: note = Malate dehydrogenase, mitochondrial (229-239)
  source 1..33: mol_type = other RNA
cgcatccaggaggccggcaccgaggtggtcaag

SEQ ID NO: 50981 - RNA, 27 nt, synthetic construct
  misc_feature 1..27: note = Spectrin beta chain, non-erythrocytic 1 (1245-1253)
  source 1..27: mol_type = other RNA
cgcatccaggagaaggtggacagcatc

SEQ ID NO: 50982 - RNA, 30 nt, synthetic construct
  misc_feature 1..30: note = Thyroid adenoma-associated protein (692-701)
  source 1..30: mol_type = other RNA
cgcatccaggagagctcccaggtgctgtac

SEQ ID NO: 50983 - RNA, 27 nt, synthetic construct
  misc_feature 1..27: note = DNA replication licensing factor MCM6 (207-215)
  source 1..27: mol_type = other RNA
cgcatccaggagacccaggccgagctg

SEQ ID NO: 50984 - RNA, 27 nt, synthetic construct
  misc_feature 1..27: note = Antigen KI-67 (38-46)
  source 1..27: mol_type = other RNA
cgcatccagctgcccgtggtcagcaag

SEQ ID NO: 50985 - RNA, 27 nt, synthetic construct
  misc_feature 1..27: note = RNA-binding E3 ubiquitin-protein ligase MEX3C (156-164)
  source 1..27: mol_type = other RNA
cgcatccagcagcagacccacacctac

SEQ ID NO: 50986 - RNA, 33 nt, synthetic construct
  misc_feature 1..33: note = Tubulin beta chain (18-28)
  source 1..33: mol_type = other RNA
cgcatcagcgagcagttcaccgccatgttccgg

SEQ ID NO: 50987 - RNA, 27 nt, synthetic construct
  misc_feature 1..27: note = Zinc finger protein 529 (330-338)
  source 1..27: mol_type = other RNA
cgcatcagctcccagctgatcgagcac

SEQ ID NO: 50988 - RNA, 27 nt, synthetic construct
  misc_feature 1..27: note = Lysine-specific histone demethylase 1B (473-481)
  source 1..27: mol_type = other RNA
cgcatcaccgaccccaccatcgacaag

SEQ ID NO: 50989 - RNA, 30 nt, synthetic construct
  misc_feature 1..30: note = Cleavage stimulation factor subunit 2 (179-188)
  source 1..30: mol_type = other RNA
cgcatcgtggaccccgagatcgccctgaag

SEQ ID NO: 50990 - RNA, 27 nt, synthetic construct
  misc_feature 1..27: note = Unconventional myosin-X (239-247)
  source 1..27: mol_type = other RNA
cgcatcgtggactacctgctcgagaag

SEQ ID NO: 50991 - RNA, 27 nt, synthetic construct
  misc_feature 1..27: note = CDP-diacylglycerol-glycerol-3-phosphate 3-phosphatidyltransferase, mitochondrial (76-84)
  source 1..27: mol_type = other RNA
cgcatctggagcctgcagttctcccgg

SEQ ID NO: 50992 - RNA, 27 nt, synthetic construct
  misc_feature 1..27: note = Dynein heavy chain 6, axonemal (191-199)
  source 1..27: mol_type = other RNA
cgcatctacgccgccaccttcgagaag

SEQ ID NO: 50993 - RNA, 30 nt, synthetic construct
  misc_feature 1..30: note = DNA-directed RNA polymerase II subunit RPB2 (409-418)
  source 1..30: mol_type = other RNA
cgcatctacgcccagaagttcatcgaccgg

SEQ ID NO: 50994 - RNA, 27 nt, synthetic construct
  misc_feature 1..27: note = U4/U6 small nuclear ribonucleoprotein Prp31 (203-211)
  source 1..27: mol_type = other RNA
cgcatctacgagtacgtggagagccgg

SEQ ID NO: 50995 - RNA, 27 nt, synthetic construct
  misc_feature 1..27: note = Long-chain-fatty-acid-CoA ligase 4 (339-347)
  source 1..27: mol_type = other RNA
cgcatctacaagaacgtgatgagcaag

SEQ ID NO: 50996 - RNA, 27 nt, synthetic construct
  misc_feature 1..27: note = 28S ribosomal protein S21, mitochondrial (50-58)
  source 1..27: mol_type = other RNA
cgcatctacaacatggagatggcccgg

SEQ ID NO: 50997 - RNA, 27 nt, synthetic construct
  misc_feature 1..27: note = Ankyrin repeat and SOCS box protein 4 (318-326)
  source 1..27: mol_type = other RNA
cgcatctaccccccgcagttccacaag

SEQ ID NO: 50998 - RNA, 27 nt, synthetic construct
  misc_feature 1..27: note = Transformation/transcription domain-associated protein (296-304)
  source 1..27: mol_type = other RNA
cgcatctaccaggagctggtgaccaag

SEQ ID NO: 50999 - RNA, 30 nt, synthetic construct
  misc_feature 1..30: note = Semaphorin-5A (736-745)
  source 1..30: mol_type = other RNA
cgcctggccgaccccaacctcctggaggtg

SEQ ID NO: 51000 - RNA, 27 nt, synthetic construct
  misc_feature 1..27: note = Long-chain fatty acid transport protein 3 (117-125)
  source 1..27: mol_type = other RNA
cgcctggccgagctcgcccagcagcgg

SEQ ID NO: 51001 - RNA, 33 nt, synthetic construct
  misc_feature 1..33: note = E3 ubiquitin-protein ligase TRIM56 (291-301)
  source 1..33: mol_type = other RNA
cgcctggccgagctcgagggccgggagcaggtg

SEQ ID NO: 51002 - RNA, 27 nt, synthetic construct
  misc_feature 1..27: note = Catenin beta-1 (124-132)
  source 1..27: mol_type = other RNA
cgcctggccgagcccagccagatgctc

SEQ ID NO: 51003 - RNA, 27 nt, synthetic construct
  misc_feature 1..27: note = 14-3-3 protein eta (12-20)
  source 1..27: mol_type = other RNA
cgcctggccgagcaggccgagcggtac

SEQ ID NO: 51004 - RNA, 27 nt, synthetic construct
  misc_feature 1..27: note = Syntaxin-binding protein 1 (171-179)
  source 1..27: mol_type = other RNA
cgcctggccgagcagatcgccaccctc

SEQ ID NO: 51005 - RNA, 27 nt, synthetic construct
  misc_feature 1..27: note = GPALPP motifs-containing protein 1 (89-97)
  source 1..27: mol_type = other RNA
cgcctggccgagcaggtgagctcctac

SEQ ID NO: 51006 - RNA, 30 nt, synthetic construct
  misc_feature 1..30: note = Ubiquitin carboxyl-terminal hydrolase 19 (897-906)
  source 1..30: mol_type = other RNA
cgcctggccgaggtgatcaagaaccggttc

SEQ ID NO: 51007 - RNA, 33 nt, synthetic construct
  misc_feature 1..33: note = Receptor tyrosine-protein kinase erbB-3 (916-926)
  source 1..33: mol_type = other RNA
cgcctggccgaggtgcccgacctcctggagaag

SEQ ID NO: 51008 - RNA, 33 nt, synthetic construct
  misc_feature 1..33: note = Catenin beta-1 (274-284)
  source 1..33: mol_type = other RNA
cgcctggccggcgggctccagaagatggtggcc

SEQ ID NO: 51009 - RNA, 27 nt, synthetic construct
  misc_feature 1..27: note = Echinoderm microtubule-associated protein-like 3 (815-823)
  source 1..27: mol_type = other RNA
cgcctggccccccggctcgccggccgc

SEQ ID NO: 51010 - RNA, 27 nt, synthetic construct
  misc_feature 1..27: note = Nucleolar protein 56 (212-220)
  source 1..27: mol_type = other RNA
cgcctggcccagttcatcggcaaccgg

SEQ ID NO: 51011 - RNA, 27 nt, synthetic construct
  misc_feature 1..27: note = Sorting nexin-17 (261-269)
  source 1..27: mol_type = other RNA
cgcctggcccagaccctccggcactac

SEQ ID NO: 51012 - RNA, 36 nt, synthetic construct
  misc_feature 1..36: note = Microtubule-associated protein 4 (922-933)
  source 1..36: mol_type = other RNA
cgcctggccaccaacaccagcgcccccgacctcaag

SEQ ID NO: 51013 - RNA, 27 nt, synthetic construct
  misc_feature 1..27: note = P2X purinoceptor 7 (277-285)
  source 1..27: mol_type = other RNA
cgcctggacgacaagaccaccaacgtg

SEQ ID NO: 51014 - RNA, 33 nt, synthetic construct
  misc_feature 1..33: note = Nuclear RNA export factor 1 (219-229)
  source 1..33: mol_type = other RNA
cgcctggacgacatgagctccatcgtgcagaag

SEQ ID NO: 51015 - RNA, 30 nt, synthetic construct
  misc_feature 1..30: note = Potassium voltage-gated channel subfamily G member 3 (115-124)
  source 1..30: mol_type = other RNA
cgcctggacgaccggatgagcgacacctac

SEQ ID NO: 51016 - RNA, 30 nt, synthetic construct
  misc_feature 1..30: note = FERM domain-containing protein 6 (225-234)
  source 1..30: mol_type = other RNA
cgcctggacgacgtggccgtccactactac

SEQ ID NO: 51017 - RNA, 27 nt, synthetic construct
  misc_feature 1..27: note Dolichyl-diphosphooligosaccharide-proteinosyltransferase subunit 2 (190-198)
  source 1..27: mol_type = other RNA
cgcctggacgagctcggcggggtgtac

SEQ ID NO: 51018 - RNA, 27 nt, synthetic construct
  misc_feature 1..27: note = Activating signal cointegrator 1 (224-232)
  source 1..27: mol_type = other RNA
cgcctggacgagaccatccaggccatc

SEQ ID NO: 51019 - RNA, 27 nt, synthetic construct
  misc_feature 1..27: note = Helicase-like transcription factor (880-888)
  source 1..27: mol_type = other RNA
cgcctggacggcagcatggcccagaag

SEQ ID NO: 51020 - RNA, 27 nt, synthetic construct
  misc_feature 1..27: note = Tubulin alpha-1C chain (355-363)
  source 1..27: mol_type = other RNA
cgcctggaccacaagttcgacctcatg

SEQ ID NO: 51021 - RNA, 27 nt, synthetic construct
  misc_feature 1..27: note = Protein kinase C and casein kinase substrate in neurons protein 2 (427-435)
  source 1..27: mol_type = other RNA
cgcctggacaacggccaggtggggctc

SEQ ID NO: 51022 - RNA, 27 nt, synthetic construct
  misc_feature 1..27: note = Coiled-coil domain-containing protein 138 (306-314)
  source 1..27: mol_type = other RNA
cgcctggacaacctccagcggaagtac

SEQ ID NO: 51023 - RNA, 27 nt, synthetic construct
  misc_feature 1..27: note = Melanoma antigen preferentially expressed in tumors (312-320)
  source 1..27: mol_type = other RNA
cgcctggaccagctcctgcggcacgtg

SEQ ID NO: 51024 - RNA, 27 nt, synthetic construct
  misc_feature 1..27: note = Coiled-coil domain-containing protein 91 (405-413)
  source 1..27: mol_type = other RNA
cgcctggaccaggtgatccggcagcgc

SEQ ID NO: 51025 - RNA, 33 nt, synthetic construct
  misc_feature 1..33: note = Nicastrin (281-291)
  source 1..33: mol_type = other RNA
cgcctggacagccggtccttcttctggaacgtg

SEQ ID NO: 51026 - RNA, 27 nt, synthetic construct
  misc_feature 1..27: note = C-Jun-amino-terminal kinase-interacting protein 4 (1097-1105)
  source 1..27: mol_type = other RNA
cgcctggacagcaccctccggctgtac

SEQ ID NO: 51027 - RNA, 27 nt, synthetic construct
  misc_feature 1..27: note = Cyclin-dependent kinase 2 (36-44)
  source 1..27: mol_type = other RNA
cgcctggacaccgagaccgagggcgtg

SEQ ID NO: 51028 - RNA, 27 nt, synthetic construct
  misc_feature 1..27: note = Uncharacterized protein C19orf60 (50-58)
  source 1..27: mol_type = other RNA
cgcctggaggagggccaccggcagtac

SEQ ID NO: 51029 - RNA, 30 nt, synthetic construct
  misc_feature 1..30: note = Cap-specific mRNAucleoside-2'-O-)-methyltransferase 1 (708-717)
  source 1..30: mol_type = other RNA
cgcctggaggagatggagaagatcttcgtg

SEQ ID NO: 51030 - RNA, 33 nt, synthetic construct
  misc_feature 1..33: note = Pre-mRNA-processing factor 6 (317-327)
  source 1..33: mol_type = other RNA
cgcctggaggaggtgaccggcaagctccaggtc

SEQ ID NO: 51031 - RNA, 30 nt, synthetic construct
  misc_feature 1..30: note = Armadillo repeat-containing protein 8 (27-36)
  source 1..30: mol_type = other RNA
cgcctgttcgaccccgacccgcagaaggtg

SEQ ID NO: 51032 - RNA, 30 nt, synthetic construct
  misc_feature 1..30: note = Receptor-interacting serine/threonine-protein kinase 4 (198-207)
  source 1..30: mol_type = other RNA
cgcctgttcgacaccaagcacgacgtgtac

SEQ ID NO: 51033 - RNA, 30 nt, synthetic construct
  misc_feature 1..30: note = Phosphatidylinositol 4-kinase beta (132-141)
  source 1..30: mol_type = other RNA
cgcctgttcgagagcaagctcttcgacatc

SEQ ID NO: 51034 - RNA, 30 nt, synthetic construct
  misc_feature 1..30: note = Cartilage-associated protein (107-116)
  source 1..30: mol_type = other RNA
cgcctgttcggcgggctcctgcggcgcgcc

SEQ ID NO: 51035 - RNA, 30 nt, synthetic construct
  misc_feature 1..30: note = Synaptonemal complex protein SC65 (104-113)
  source 1..30: mol_type = other RNA
cgcctgttcggccgggtgctcgagcgcgcc

SEQ ID NO: 51036 - RNA, 36 nt, synthetic construct
  misc_feature 1..36: note = Diamine acetyltransferase 1 (155-166)
  source 1..36: mol_type = other RNA
cgcctgttcaagatcgacaaggagtacctcctgaag

SEQ ID NO: 51037 - RNA, 33 nt, synthetic construct
  misc_feature 1..33: note = Dol-P-Man:Man(5)GlcNAc(2)-PP-Dol alpha-1,3-mannosyltransferase (123-133)
  source 1..33: mol_type = other RNA
cgcctgttcaacgaccccgtggccatggtcctc

SEQ ID NO: 51038 - RNA, 27 nt, synthetic construct
  misc_feature 1..27: note = Membralin (58-66)
  source 1..27: mol_type = other RNA
cgcctgttccccccggccttccggcgc

SEQ ID NO: 51039 - RNA, 27 nt, synthetic construct
  misc_feature 1..27: note = DNA primase small subunit (19-27)
  source 1..27: mol_type = other RNA
cgcctgttcccctacagccagtactac

SEQ ID NO: 51040 - RNA, 27 nt, synthetic construct
  misc_feature 1..27: note = Homeobox protein cut-like 1 (640-648)
  source 1..27: mol_type = other RNA
cgcctgttccaggaggtgcccaagcgg

SEQ ID NO: 51041 - RNA, 33 nt, synthetic construct
  misc_feature 1..33: note = Coatomer subunit gamma-2 (75-85)
  source 1..33: mol_type = other RNA
cgcctgttccagagcaacgaccagaccctccgg

SEQ ID NO: 51042 - RNA, 27 nt, synthetic construct
  misc_feature 1..27: note = 28S ribosomal protein S2, mitochondrial (251-259)
  source 1..27: mol_type = other RNA
cgcctgttccagaccgccatcacccgg

SEQ ID NO: 51043 - RNA, 27 nt, synthetic construct
  misc_feature 1..27: note = Armadillo repeat-containing protein 2 (134-142)
  source 1..27: mol_type = other RNA
cgcctgttccgggccgccagccagcgc

SEQ ID NO: 51044 - RNA, 30 nt, synthetic construct
  misc_feature 1..30: note = Nicalin (40-49)
  source 1..30: mol_type = other RNA
cgcctgttcagccggctctacacctacaag

SEQ ID NO: 51045 - RNA, 36 nt, synthetic construct
  misc_feature 1..36: note = C-Jun-amino-terminal kinase-interacting protein 4 (548-559)
  source 1..36: mol_type = other RNA
cgcctgttcagctccagctccaacaccaccaagaag

SEQ ID NO: 51046 - RNA, 30 nt, synthetic construct
  misc_feature 1..30: note = 40S ribosomal protein S17 (23-32)
  source 1..30: mol_type = other RNA
cgcctgggcaacgacttccacaccaacaag

SEQ ID NO: 51047 - RNA, 30 nt, synthetic construct
  misc_feature 1..30: note = Thrombospondin-2 (245-254)
  source 1..30: mol_type = other RNA
cgcctgggcccccacgtgaccaccgagtac

SEQ ID NO: 51048 - RNA, 27 nt, synthetic construct
  misc_feature 1..27: note = Ankyrin repeat domain-containing protein 54 (100-108)
  source 1..27: mol_type = other RNA
cgcctgggccccaccgggaaggaggtg

SEQ ID NO: 51049 - RNA, 30 nt, synthetic construct
  misc_feature 1..30: note = Protein fantom (56-65)
  source 1..30: mol_type = other RNA
cgcctgcacgacgagaacatcctcctgaag

SEQ ID NO: 51050 - RNA, 39 nt, synthetic construct
  misc_feature 1..39: note = 40S ribosomal protein S20 (87-99)
  source 1..39: mol_type = other RNA
cgcctgatcgacctccacagcccctccgagatcgtgaag

SEQ ID NO: 51051 - RNA, 33 nt, synthetic construct
  misc_feature 1..33: note = 28S ribosomal protein S5, mitochondrial (246-256)
  source 1..33: mol_type = other RNA
cgcctgatcggcatcaaggacatgtacgccaag

SEQ ID NO: 51052 - RNA, 27 nt, synthetic construct
  misc_feature 1..27: note = Abnormal spindle-like microcephaly-associated protein (521-529)
  source 1..27: mol_type = other RNA
cgcctgatccagaccacctggcggaag

SEQ ID NO: 51053 - RNA, 27 nt, synthetic construct
  misc_feature 1..27: note = Calcineurin-binding protein cabin-1 (136-144)
  source 1..27: mol_type = other RNA
cgcctgatccggatccccctcgcccgc

SEQ ID NO: 51054 - RNA, 33 nt, synthetic construct
  misc_feature 1..33: note = Chromatin assembly factor 1 subunit A (782-792)
  source 1..33: mol_type = other RNA
cgcctgatcagcgagaactccgtgtacgagaag

SEQ ID NO: 51055 - RNA, 27 nt, synthetic construct
  misc_feature 1..27: note = Rho guanine nucleotide exchange factor 39 (185-193)
  source 1..27: mol_type = other RNA
cgcctgatcagcgagaccgcccagcgg

SEQ ID NO: 51056 - RNA, 36 nt, synthetic construct
  misc_feature 1..36: note = DCN1-like protein 5 (40-51)
  source 1..36: mol_type = other RNA
cgcctgatcagcggcgaggagcacttctccagcaag

SEQ ID NO: 51057 - RNA, 36 nt, synthetic construct
  misc_feature 1..36: note = 40S ribosomal protein S4, X isoform (81-92)
  source 1..36: mol_type = other RNA
cgcctgatctacgacaccaagggccggttcgccgtg

SEQ ID NO: 51058 - RNA, 27 nt, synthetic construct
  misc_feature 1..27: note = Protein PRRC2A (2074-2082)
  source 1..27: mol_type = other RNA
cgcctgaaggccacccccagcacctac

SEQ ID NO: 51059 - RNA, 27 nt, synthetic construct
  misc_feature 1..27: note = Nuclear migration protein nudC (143-151)
  source 1..27: mol_type = other RNA
cgcctgaagggcaaggacatggtggtc

SEQ ID NO: 51060 - RNA, 33 nt, synthetic construct
  misc_feature 1..33: note = tRNA-splicing endonuclease subunit Sen34 (58-68)
  source 1..33: mol_type = other RNA
cgcctgctcgccgagatcggcgccgtgaccctg

SEQ ID NO: 51061 - RNA, 27 nt, synthetic construct
  misc_feature 1..27: note = Transcription factor SPT20 homolog (262-270)
  source 1..27: mol_type = other RNA
cgcctgctcgacttcctgcagaagcgg

SEQ ID NO: 51062 - RNA, 27 nt, synthetic construct
  misc_feature 1..27: note = Mitogen-activated protein kinase-binding protein 1 (92-100)
  source 1..27: mol_type = other RNA
cgcctgctcgacaagtgggtggagctg

SEQ ID NO: 51063 - RNA, 27 nt, synthetic construct
  misc_feature 1..27: note = E3 ubiquitin-protein ligase RNF14 (373-381)
  source 1..27: mol_type = other RNA
cgcctgctcgaccagcggtacggcaag

SEQ ID NO: 51064 - RNA, 33 nt, synthetic construct
  misc_feature 1..33: note = Lysine-specific histone demethylase 1A (408-418)
  source 1..33: mol_type = other RNA
cgcctgctcgaggccaccagctacctgtcccac

SEQ ID NO: 51065 - RNA, 27 nt, synthetic construct
  misc_feature 1..27: note = 39S ribosomal protein L37, mitochondrial (112-120)
  source 1..27: mol_type = other RNA
cgcctgctcgagggcgtgaagcaggcc

SEQ ID NO: 51066 - RNA, 27 nt, synthetic construct
  misc_feature 1..27: note = Transient receptor potential cation channel subfamily M member 1 (158-166)
  source 1..27: mol_type = other RNA
cgcctgctcgagaagcacatcagcctg

SEQ ID NO: 51067 - RNA, 27 nt, synthetic construct
  misc_feature 1..27: note = DNA-directed RNA polymerase III subunit RPC3 (458-466)
  source 1..27: mol_type = other RNA
cgcctgctcgagaagagccagcgggtg

SEQ ID NO: 51068 - RNA, 27 nt, synthetic construct
  misc_feature 1..27: note = citron Rho-interacting kinase isoform X13 (384-392)
  source 1..27: mol_type = other RNA
cgcctgctcgagctggagacccggctg

SEQ ID NO: 51069 - RNA, 27 nt, synthetic construct
  misc_feature 1..27: note = Clathrin heavy chain 1 (583-591)
  source 1..27: mol_type = other RNA
cgcctgctcgagatgaacctgatgcac

SEQ ID NO: 51070 - RNA, 33 nt, synthetic construct
  misc_feature 1..33: note = Unconventional myosin-Va (137-147)
  source 1..33: mol_type = other RNA
cgcctgctcgagagccagctgcagtcccagaag

SEQ ID NO: 51071 - RNA, 33 nt, synthetic construct
  misc_feature 1..33: note = Glycogen synthase kinase-3 beta (319-329)
  source 1..33: mol_type = other RNA
cgcctgctcgagtacacccccaccgcccggctg

SEQ ID NO: 51072 - RNA, 51 nt, synthetic construct
  misc_feature 1..51: note = Oxidation resistance protein 1 (21-37)
  source 1..51: mol_type = other RNA
cgcctgctcggcttcgggggcgggggcgaggcccggcagaccctggccaag

SEQ ID NO: 51073 - RNA, 24 nt, synthetic construct
  misc_feature 1..24: note = Membrane-associated transporter protein (209-216)
  source 1..24: mol_type = other RNA
cgcctgctcggcaccgagttccag

SEQ ID NO: 51074 - RNA, 27 nt, synthetic construct
  misc_feature 1..27: note = Microsomal glutathione S-transferase 1 (147-155)
  source 1..27: mol_type = other RNA
cgcctgctcaagagcaagctgtacctg

SEQ ID NO: 51075 - RNA, 27 nt, synthetic construct
  misc_feature 1..27: note = Actin-binding protein anillin (762-770)
  source 1..27: mol_type = other RNA
cgcctgctcctgatcgccaccggcaag

SEQ ID NO: 51076 - RNA, 30 nt, synthetic construct
  misc_feature 1..30: note = DNA replication licensing factor MCM6 (11-20)
  source 1..30: mol_type = other RNA
cgcctgctcaacaagagcatcatccgggtg

SEQ ID NO: 51077 - RNA, 33 nt, synthetic construct
  misc_feature 1..33: note = Activating signal cointegrator 1 complex subunit 3 (832-842)
  source 1..33: mol_type = other RNA
cgcctgctcaacctgagcaaggtgatcgacaag

SEQ ID NO: 51078 - RNA, 33 nt, synthetic construct
  misc_feature 1..33: note = Glioma tumor suppressor candidate region gene 2 protein (165-175)
  source 1..33: mol_type = other RNA
cgcctgctcaaccccagcgccacccgggccaag

SEQ ID NO: 51079 - RNA, 30 nt, synthetic construct
  misc_feature 1..30: note = Ectonucleoside triphosphate diphosphohydrolase 6 (169-178)
  source 1..30: mol_type = other RNA
cgcctgctccccggcgagaaggcccagaag

SEQ ID NO: 51080 - RNA, 33 nt, synthetic construct
  misc_feature 1..33: note = Myomegalin (2291-2301)
  source 1..33: mol_type = other RNA
cgcctgctccagagcaccaccgagcacctgaag

SEQ ID NO: 51081 - RNA, 27 nt, synthetic construct
  misc_feature 1..27: note = Carbohydrate sulfotransferase 14 (180-188)
  source 1..27: mol_type = other RNA
cgcctgctcagcgcctaccggaacaag

SEQ ID NO: 51082 - RNA, 36 nt, synthetic construct
  misc_feature 1..36: note = GPI-anchor transamidase (149-160)
  source 1..36: mol_type = other RNA
cgcctgctcagcgacgaccggtccaacatcctgatc

SEQ ID NO: 51083 - RNA, 30 nt, synthetic construct
  misc_feature 1..30: note = Spermatogenesis-associated protein 20 (128-137)
  source 1..30: mol_type = other RNA
cgcctgctcagcgaggacttcgtgtccgtc

SEQ ID NO: 51084 - RNA, 33 nt, synthetic construct
  misc_feature 1..33: note = Attractin (51-61)
  source 1..33: mol_type = other RNA
cgcctgctcagccccccgctgcggccccgcctg

SEQ ID NO: 51085 - RNA, 36 nt, synthetic construct
  misc_feature 1..36: note = Attractin (51-62)
  source 1..36: mol_type = other RNA
cgcctgctcagccccccgctgcggccccgcctgctc

SEQ ID NO: 51086 - RNA, 27 nt, synthetic construct
  misc_feature 1..27: note = Actin-binding protein anillin (910-918)
  source 1..27: mol_type = other RNA
cgcctgctcaccagcatcaccacgaag

SEQ ID NO: 51087 - RNA, 33 nt, synthetic construct
  misc_feature 1..33: note = Serine/threonine-protein kinase mTOR (2429-2439)
  source 1..33: mol_type = other RNA
cgcctgatggacaccaacaccaagggcaacaag

SEQ ID NO: 51088 - RNA, 33 nt, synthetic construct
  misc_feature 1..33: note = Dehydrodolichyl diphosphate syntase complex subunit DHDDS (103-113)
  source 1..33: mol_type = other RNA
cgcctgatggaggagaaggagaagctccagaag

SEQ ID NO: 51089 - RNA, 27 nt, synthetic construct
  misc_feature 1..27: note = Dedicator of cytokinesis protein 4 (213-221)
  source 1..27: mol_type = other RNA
cgcctgatggagcggctcctggactac

SEQ ID NO: 51090 - RNA, 27 nt, synthetic construct
  misc_feature 1..27: note = Nuclear receptor-interacting protein 3 (4-12)
  source 1..27: mol_type = other RNA
cgcctgatggagaccaacctcagcaag

SEQ ID NO: 51091 - RNA, 36 nt, synthetic construct
  misc_feature 1..36: note = Heterogeneous nuclear ribonucleoprotein Q (192-203)
  source 1..36: mol_type = other RNA
cgcctgatgatggaccccctcaccggcctgaaccgg

SEQ ID NO: 51092 - RNA, 33 nt, synthetic construct
  misc_feature 1..33: note = Heat shock protein 105 kDa (169-179)
  source 1..33: mol_type = other RNA
cgcctgatgaacgacatgaccgccgtggccctc

SEQ ID NO: 51093 - RNA, 27 nt, synthetic construct
  misc_feature 1..27: note = RILP-like protein 1 (52-60)
  source 1..27: mol_type = other RNA
cgcctgatgcccaaggtggtccgggtg

SEQ ID NO: 51094 - RNA, 27 nt, synthetic construct
  misc_feature 1..27: note = U5 small nuclear ribonucleoprotein 200 kDa helicase (841-849)
  source 1..27: mol_type = other RNA
cgcctgatgcgggccatcttcgagatc

SEQ ID NO: 51095 - RNA, 27 nt, synthetic construct
  misc_feature 1..27: note = FYVE, RhoGEF and PH domain-containing protein 4 (32-40)
  source 1..27: mol_type = other RNA
cgcctgatgagcaagaacttcaccaag

SEQ ID NO: 51096 - RNA, 27 nt, synthetic construct
  misc_feature 1..27: note = Hyaluronan mediated motility receptor (119-127)
  source 1..27: mol_type = other RNA
cgcctgaacgccgccctccgggagaag

SEQ ID NO: 51097 - RNA, 27 nt, synthetic construct
  misc_feature 1..27: note = Cytochrome c oxidase subunit 5A, mitochondrial (98-106)
  source 1..27: mol_type = other RNA
cgcctgaacgacttcgccagcaccgtg

SEQ ID NO: 51098 - RNA, 27 nt, synthetic construct
  misc_feature 1..27: note = Spectrin beta chain, non-erythrocytic 1 (2278-2286)
  source 1..27: mol_type = other RNA
cgcctgaacgacggcaacgagtacctc

SEQ ID NO: 51099 - RNA, 30 nt, synthetic construct
  misc_feature 1..30: note = V-type proton ATPase subunit H (382-391)
  source 1..30: mol_type = other RNA
cgcctgaacgagaagaactacgagctcctg

SEQ ID NO: 51100 - RNA, 33 nt, synthetic construct
  misc_feature 1..33: note = Pyruvate kinase PKM (73-83)
  source 1..33: mol_type = other RNA
cgcctgaacttcagccacggcacccacgagtac

SEQ ID NO: 51101 - RNA, 36 nt, synthetic construct
  misc_feature 1..36: note = 60S acidic ribosomal protein P2 (38-49)
  source 1..36: mol_type = other RNA
cgcctgaacaaggtgatcagcgagctcaacggcaag

SEQ ID NO: 51102 - RNA, 27 nt, synthetic construct
  misc_feature 1..27: note = Midasin (2183-2191)
  source 1..27: mol_type = other RNA
cgcctgaacaacaagatcaacagctac

SEQ ID NO: 51103 - RNA, 33 nt, synthetic construct
  misc_feature 1..33: note = RalBP1-associated Eps domain-containing protein 1 (712-722)
  source 1..33: mol_type = other RNA
cgcctgaacagcgagctccagcagcagctgaag

SEQ ID NO: 51104 - RNA, 30 nt, synthetic construct
  misc_feature 1..30: note = Testis-expressed sequence 10 protein (473-482)
  source 1..30: mol_type = other RNA
cgcctgaacagcaagcagctcaaccggctg

SEQ ID NO: 51105 - RNA, 30 nt, synthetic construct
  misc_feature 1..30: note = Integrator complex subunit 8 (649-658)
  source 1..30: mol_type = other RNA
cgcctgcccgacatcccgctccggcaggtg

SEQ ID NO: 51106 - RNA, 33 nt, synthetic construct
  misc_feature 1..33: note = Protrudin (48-58)
  source 1..33: mol_type = other RNA
cgcctgcccgacagcgagctcatgcggcgcaag

SEQ ID NO: 51107 - RNA, 33 nt, synthetic construct
  misc_feature 1..33: note = Beta-1,3-N-acetylglucosaminyltransferase radical fringe (267-277)
  source 1..33: mol_type = other RNA
cgcctgcccccggacaccctcctgcagcaggtg

SEQ ID NO: 51108 - RNA, 27 nt, synthetic construct
  misc_feature 1..27: note = F-actin-capping protein subunit beta (41-49)
  source 1..27: mol_type = other RNA
cgcctgcccccgcagcagatcgagaag

SEQ ID NO: 51109 - RNA, 39 nt, synthetic construct
  misc_feature 1..39: note = Transmembrane protein 51 (123-135)
  source 1..39: mol_type = other RNA
cgcctgccccagggcaccatgttcccggccacccggaag

SEQ ID NO: 51110 - RNA, 27 nt, synthetic construct
  misc_feature 1..27: note = Inactive tyrosine-protein kinase 7 (362-370)
  source 1..27: mol_type = other RNA
cgcctgcccacccacggccgggtgtac

SEQ ID NO: 51111 - RNA, 27 nt, synthetic construct
  misc_feature 1..27: note = Bridging integrator 3 (137-145)
  source 1..27: mol_type = other RNA
cgcctgcaggccaaggtggagaagtac

SEQ ID NO: 51112 - RNA, 30 nt, synthetic construct
  misc_feature 1..30: note = Nck-associated protein 1 (492-501)
  source 1..30: mol_type = other RNA
cgcctgcaggcctacaccagcgtgtccaag

SEQ ID NO: 51113 - RNA, 27 nt, synthetic construct
  misc_feature 1..27: note = Scavenger receptor class A member 5 (244-252)
  source 1..27: mol_type = other RNA
cgcctgcaggacctccgggtgctggtc

SEQ ID NO: 51114 - RNA, 39 nt, synthetic construct
  misc_feature 1..39: note = Protein FAM167A (131-143)
  source 1..39: mol_type = other RNA
cgcctgcaggaccagcagctcgcccggcagctgatgcgc

SEQ ID NO: 51115 - RNA, 30 nt, synthetic construct
  misc_feature 1..30: note = KH domain-containing, RNA-binding, signal transduction-associated protein 1 (186-195)
  source 1..30: mol_type = other RNA
cgcctgcaggaggagaccggcgccaagatc

SEQ ID NO: 51116 - RNA, 27 nt, synthetic construct
  misc_feature 1..27: note = 26S proteasome non-ATPase regulatory subunit 12 (39-47)
  source 1..27: mol_type = other RNA
cgcctgcaggaggtgatcgagaccctc

SEQ ID NO: 51117 - RNA, 33 nt, synthetic construct
  misc_feature 1..33: note = Sentrin-specific protease 6 (172-182)
  source 1..33: mol_type = other RNA
cgcctgcagggcgtggagcggatcatgaagaag

SEQ ID NO: 51118 - RNA, 36 nt, synthetic construct
  misc_feature 1..36: note = 60S ribosomal protein L10 (109-120)
  source 1..36: mol_type = other RNA
cgcctgcagaccggcatgcggggggccttcggcaag

SEQ ID NO: 51119 - RNA, 30 nt, synthetic construct
  misc_feature 1..30: note = Integrin beta-3 (117-126)
  source 1..30: mol_type = other RNA
cgcctgcggcccgacgacagcaagaacttc

SEQ ID NO: 51120 - RNA, 30 nt, synthetic construct
  misc_feature 1..30: note = Protogenin (10-19)
  source 1..30: mol_type = other RNA
cgcctgcggcccccgggcatgctcctgcgc

SEQ ID NO: 51121 - RNA, 33 nt, synthetic construct
  misc_feature 1..33: note = DNA replication licensing factor MCM5 (573-583)
  source 1..33: mol_type = other RNA
cgcctgagcgccgaggccgcggagaagctcaag

SEQ ID NO: 51122 - RNA, 36 nt, synthetic construct
  misc_feature 1..36: note = EF-hand domain-containing protein D2 (176-187)
  source 1..36: mol_type = other RNA
cgcctgagcgagatcgacgtgtccagcgagggcgtc

SEQ ID NO: 51123 - RNA, 27 nt, synthetic construct
  misc_feature 1..27: note = MICOS complex subunit MIC25 (29-37)
  source 1..27: mol_type = other RNA
cgcctgagcgagaacgtggtcaaccgg

SEQ ID NO: 51124 - RNA, 27 nt, synthetic construct
  misc_feature 1..27: note = Neuron navigator 2 (2169-2177)
  source 1..27: mol_type = other RNA
cgcctgagcgagtacatcgtgctccgg

SEQ ID NO: 51125 - RNA, 33 nt, synthetic construct
  misc_feature 1..33: note = Serine palmitoyltransferase 2 (212-222)
  source 1..33: mol_type = other RNA
cgcctgagcggcgccaccatccggatcttcaag

SEQ ID NO: 51126 - RNA, 27 nt, synthetic construct
  misc_feature 1..27: note = T-complex protein 1 subunit delta (435-443)
  source 1..27: mol_type = other RNA
cgcctgaccgagtacagccggaccctc

SEQ ID NO: 51127 - RNA, 27 nt, synthetic construct
  misc_feature 1..27: note = 60S ribosomal protein L36 (32-40)
  source 1..27: mol_type = other RNA
cgcctgaccaagcacaccaagttcgtg

SEQ ID NO: 51128 - RNA, 27 nt, synthetic construct
  misc_feature 1..27: note = Centromere protein F (420-428)
  source 1..27: mol_type = other RNA
cgcctgacccaggagctccagcaggcc

SEQ ID NO: 51129 - RNA, 30 nt, synthetic construct
  misc_feature 1..30: note = Spectrin beta chain, non-erythrocytic 1 (2078-2087)
  source 1..30: mol_type = other RNA
cgcctgaccaccctcgagctgctggaggtg

SEQ ID NO: 51130 - RNA, 39 nt, synthetic construct
  misc_feature 1..39: note = Disintegrin and metalloproteinase domain-containing protein 10 (389-401)
  source 1..39: mol_type = other RNA
cgcctggtggacgccgacggccccctcgcccggctgaag

SEQ ID NO: 51131 - RNA, 33 nt, synthetic construct
  misc_feature 1..33: note = DNA mismatch repair protein Mlh1 (265-275)
  source 1..33: mol_type = other RNA
cgcctggtggagagcacctccctccggaaggcc

SEQ ID NO: 51132 - RNA, 27 nt, synthetic construct
  misc_feature 1..27: note = Coiled-coil domain-containing protein 144A (749-757)
  source 1..27: mol_type = other RNA
cgcctggtgaaggagctccggaccgtc

SEQ ID NO: 51133 - RNA, 39 nt, synthetic construct
  misc_feature 1..39: note = Sialidase-3 (111-123)
  source 1..39: mol_type = other RNA
cgcctggtgagcaactcctggacccaggccatcctcaag

SEQ ID NO: 51134 - RNA, 27 nt, synthetic construct
  misc_feature 1..27: note = Uridine phosphorylase 1 (90-98)
  source 1..27: mol_type = other RNA
cgcctggtgagctacttcatcaagaag

SEQ ID NO: 51135 - RNA, 27 nt, synthetic construct
  misc_feature 1..27: note = Cryptochrome-2 (155-163)
  source 1..27: mol_type = other RNA
cgcctgtgggacctctacaagaaggtg

SEQ ID NO: 51136 - RNA, 45 nt, synthetic construct
  misc_feature 1..45: note = Ribosome biogenesis protein WDR12 (322-336)
  source 1..45: mol_type = other RNA
cgcctgtgggacccccggaccaaggacggcagcctcgtgtccctg

SEQ ID NO: 51137 - RNA, 30 nt, synthetic construct
  misc_feature 1..30: note = Protein polybromo-1 (982-991)
  source 1..30: mol_type = other RNA
cgcctgtgggaggacagcgccggcgagaag

SEQ ID NO: 51138 - RNA, 27 nt, synthetic construct
  misc_feature 1..27: note = ATP-dependent RNA helicase DDX24 (447-455)
  source 1..27: mol_type = other RNA
cgcctgtgggagctcatcaaggagaag

SEQ ID NO: 51139 - RNA, 30 nt, synthetic construct
  misc_feature 1..30: note = DnaJ homolog subfamily C member 4 (11-20)
  source 1..30: mol_type = other RNA
cgcctgtggccccggaacccgcccagccgc

SEQ ID NO: 51140 - RNA, 36 nt, synthetic construct
  misc_feature 1..36: note = Multifunctional protein ADE2 (215-226)
  source 1..36: mol_type = other RNA
cgcctgtggcccagcggcgaccggtcccagcagaag

SEQ ID NO: 51141 - RNA, 33 nt, synthetic construct
  misc_feature 1..33: note = 39S ribosomal protein L37, mitochondrial (162-172)
  source 1..33: mol_type = other RNA
cgcctgtggcagaccaccgaggagatccccaag

SEQ ID NO: 51142 - RNA, 30 nt, synthetic construct
  misc_feature 1..30: note = Protein phosphatase Slingshot homolog 1 (144-153)
  source 1..30: mol_type = other RNA
cgcctgtggagcgacaccaagatccacctc

SEQ ID NO: 51143 - RNA, 30 nt, synthetic construct
  misc_feature 1..30: note = Inositol 1,4,5-trisphosphate receptor type 1 (806-815)
  source 1..30: mol_type = other RNA
cgcctgtggagcgagatcccctccgagatc

SEQ ID NO: 51144 - RNA, 30 nt, synthetic construct
  misc_feature 1..30: note = E3 ubiquitin-protein ligase Mdm2 (71-80)
  source 1..30: mol_type = other RNA
cgcctgtacgacgagaagcagcagcacatc

SEQ ID NO: 51145 - RNA, 36 nt, synthetic construct
  misc_feature 1..36: note = E3 ubiquitin-protein ligase Mdm2 (65-76)
  source 1..36: mol_type = other RNA
cgcctgtacgacgagaagcagcagcacatcgtgtac

SEQ ID NO: 51146 - RNA, 33 nt, synthetic construct
  misc_feature 1..33: note = ATP-binding cassette sub-family B member 10, mitochondrial (542-552)
  source 1..33: mol_type = other RNA
cgcctgtacgaccccgccagcggcaccatctcc

SEQ ID NO: 51147 - RNA, 30 nt, synthetic construct
  misc_feature 1..30: note = MICOS complex subunit MIC26 (165-174)
  source 1..30: mol_type = other RNA
cgcctgtacgactggggcctccgggggtac

SEQ ID NO: 51148 - RNA, 27 nt, synthetic construct
  misc_feature 1..27: note = ADP-ribosylation factor-like protein 4D (182-190)
  source 1..27: mol_type = other RNA
cgcctgtacgagatgatcctcaagcgg

SEQ ID NO: 51149 - RNA, 39 nt, synthetic construct
  misc_feature 1..39: note = Probable fibrosin-1 (306-318)
  source 1..39: mol_type = other RNA
cgcctgtacggcctcgagcccgcccacccgctgctgtac

SEQ ID NO: 51150 - RNA, 30 nt, synthetic construct
  misc_feature 1..30: note = Tubulin-specific chaperone C (217-226)
  source 1..30: mol_type = other RNA
cgcctgtacggcaaccccaacaccctccgg

SEQ ID NO: 51151 - RNA, 27 nt, synthetic construct
  misc_feature 1..27: note = Tubulin polyglutamylase TTLL7 (399-407)
  source 1..27: mol_type = other RNA
cgcctgtacggccagaacagcatcaag

SEQ ID NO: 51152 - RNA, 27 nt, synthetic construct
  misc_feature 1..27: note = Condensin-2 complex subunit G2 (329-337)
  source 1..27: mol_type = other RNA
cgcctgtacaagcccatcctctggcgg

SEQ ID NO: 51153 - RNA, 27 nt, synthetic construct
  misc_feature 1..27: note = Partitioning defective 6 homolog beta (159-167)
  source 1..27: mol_type = other RNA
cgcctgtacaagtacggcaccgagaag

SEQ ID NO: 51154 - RNA, 30 nt, synthetic construct
  misc_feature 1..30: note = HCG2002594, isoform CRA_c (311-320)
  source 1..30: mol_type = other RNA
cgcctgtacccctggggcatcgtggaggtc

SEQ ID NO: 51155 - RNA, 24 nt, synthetic construct
  misc_feature 1..24: note = Conserved oligomeric Golgi complex subunit 4 (121-128)
  source 1..24: mol_type = other RNA
cgcctgtaccaggccatccagcgg

SEQ ID NO: 51156 - RNA, 33 nt, synthetic construct
  misc_feature 1..33: note = Proteasome subunit alpha type-7 (143-153)
  source 1..33: mol_type = other RNA
cgcctgtaccagaccgaccccagcggcacctac

SEQ ID NO: 51157 - RNA, 27 nt, synthetic construct
  misc_feature 1..27: note = Coiled-coil domain-containing protein 77 (127-135)
  source 1..27: mol_type = other RNA
cgcctgtacagcgagaacgaccggctc

SEQ ID NO: 51158 - RNA, 30 nt, synthetic construct
  misc_feature 1..30: note = 39S ribosomal protein L17, mitochondrial (74-83)
  source 1..30: mol_type = other RNA
cgcatggccgacttctggctgaccgagaag

SEQ ID NO: 51159 - RNA, 39 nt, synthetic construct
  misc_feature 1..39: note = Coiled-coil-helix-coiled-coil-helix domain-containing protein 2 (11-23)
  source 1..39: mol_type = other RNA
cgcatggcccccccggccagccgggcgccccagatgcgc

SEQ ID NO: 51160 - RNA, 27 nt, synthetic construct
  misc_feature 1..27: note = Exportin-1 (44-52)
  source 1..27: mol_type = other RNA
cgcatggcccaggaggtgctgacccac

SEQ ID NO: 51161 - RNA, 30 nt, synthetic construct
  misc_feature 1..30: note = Lon protease homolog 2, peroxisomal (632-641)
  source 1..30: mol_type = other RNA
cgcatggacggcgaggggcagctgaccctc

SEQ ID NO: 51162 - RNA, 27 nt, synthetic construct
  misc_feature 1..27: note = DNA mismatch repair protein Msh3 (448-456)
  source 1..27: mol_type = other RNA
cgcatggacaacatctacttcgagtac

SEQ ID NO: 51163 - RNA, 36 nt, synthetic construct
  misc_feature 1..36: note = 39S ribosomal protein L51, mitochondrial (101-112)
  source 1..36: mol_type = other RNA
cgcatgttcgccgacgacctgcacaacctcaacaag

SEQ ID NO: 51164 - RNA, 33 nt, synthetic construct
  misc_feature 1..33: note = 60S ribosomal protein L4 (100-110)
  source 1..33: mol_type = other RNA
cgcatgttcgcccccaccaagacctggcggcgc

SEQ ID NO: 51165 - RNA, 27 nt, synthetic construct
  misc_feature 1..27: note = Zinc finger BED domain-containing protein 5 (228-236)
  source 1..27: mol_type = other RNA
cgcatgttcgacgagcagtacagcaag

SEQ ID NO: 51166 - RNA, 33 nt, synthetic construct
  misc_feature 1..33: note = HLA class II histocompatibility antigen, DP alpha 1 chain (6-16)
  source 1..33: mol_type = other RNA
cgcatgttccacatccgggccgtgatcctgcgc

SEQ ID NO: 51167 - RNA, 30 nt, synthetic construct
  misc_feature 1..30: note = Protein Shroom2 (323-332)
  source 1..30: mol_type = other RNA
cgcatgttcatcggcgacctggacaaggtg

SEQ ID NO: 51168 - RNA, 30 nt, synthetic construct
  misc_feature 1..30: note = Cullin-1 (506-515)
  source 1..30: mol_type = other RNA
cgcatgttccaggacatcggcgtgagcaag

SEQ ID NO: 51169 - RNA, 36 nt, synthetic construct
  misc_feature 1..36: note = EPM2A-interacting protein 1 (249-260)
  source 1..36: mol_type = other RNA
cgcatgatcggcgagaacagcgggctggtgtcctac

SEQ ID NO: 51170 - RNA, 30 nt, synthetic construct
  misc_feature 1..30: note = Leucine-rich repeat and WD repeat-containing protein 1 (193-202)
  source 1..30: mol_type = other RNA
cgcatgatcagcgaggagctggtggccgcc

SEQ ID NO: 51171 - RNA, 30 nt, synthetic construct
  misc_feature 1..30: note = Endoplasmin (509-518)
  source 1..30: mol_type = other RNA
cgcatgaaggagaagcaggacaagatctac

SEQ ID NO: 51172 - RNA, 33 nt, synthetic construct
  misc_feature 1..33: note = Heat shock protein HSP 90-alpha (605-615)
  source 1..33: mol_type = other RNA
cgcatgaaggagaaccagaagcacatctactac

SEQ ID NO: 51173 - RNA, 30 nt, synthetic construct
  misc_feature 1..30: note = Heat shock protein HSP 90-beta (401-410)
  source 1..30: mol_type = other RNA
cgcatgaaggagacccagaagagcatctac

SEQ ID NO: 51174 - RNA, 33 nt, synthetic construct
  misc_feature 1..33: note = Heat shock protein HSP 90-beta (401-411)
  source 1..33: mol_type = other RNA
cgcatgaaggagacccagaagagcatctactac

SEQ ID NO: 51175 - RNA, 30 nt, synthetic construct
  misc_feature 1..30: note = 60S ribosomal protein L39 (28-37)
  source 1..30: mol_type = other RNA
cgcatgaagaccggcaacaagatccggtac

SEQ ID NO: 51176 - RNA, 27 nt, synthetic construct
  misc_feature 1..27: note = Liprin-alpha-4 (339-347)
  source 1..27: mol_type = other RNA
cgcatgctggaccacctcaccaagaag

SEQ ID NO: 51177 - RNA, 30 nt, synthetic construct
  misc_feature 1..30: note = Eukaryotic translation initiation factor 3 subunit A (752-761)
  source 1..30: mol_type = other RNA
cgcatgctggaggaccgggacctcttcgtg

SEQ ID NO: 51178 - RNA, 27 nt, synthetic construct
  misc_feature 1..27: note = Proteasome subunit beta type-7 (103-111)
  source 1..27: mol_type = other RNA
cgcatgctgaagcagatgctcttccgg

SEQ ID NO: 51179 - RNA, 33 nt, synthetic construct
  misc_feature 1..33: note = cDNA FLJ78342 (112-122)
  source 1..33: mol_type = other RNA
cgcatgctgcagatcagcgagtccagcttcctc

SEQ ID NO: 51180 - RNA, 33 nt, synthetic construct
  misc_feature 1..33: note = rRNA-processing protein FCF1 homolog (15-25)
  source 1..33: mol_type = other RNA
cgcatgctgagcctccgggaccagcgcctgaag

SEQ ID NO: 51181 - RNA, 30 nt, synthetic construct
  misc_feature 1..30: note = Meiotic nuclear division protein 1 homolog (15-24)
  source 1..30: mol_type = other RNA
cgcatgatggagatcttcagcgagaccaag

SEQ ID NO: 51182 - RNA, 33 nt, synthetic construct
  misc_feature 1..33: note = Zinc finger FYVE domain-containing protein 16 (812-822)
  source 1..33: mol_type = other RNA
cgcatgatgagccccaccggctccaacctgaag

SEQ ID NO: 51183 - RNA, 27 nt, synthetic construct
  misc_feature 1..27: note = DNA replication ATP-dependent helicase/nuclease DNA2 (828-836)
  source 1..27: mol_type = other RNA
cgcatgaacagcaagatcatgtccctg

SEQ ID NO: 51184 - RNA, 33 nt, synthetic construct
  misc_feature 1..33: note = WAS protein family homolog 1 (5-15)
  source 1..33: mol_type = other RNA
cgcatgcagcacagcctggccggccagacctac

SEQ ID NO: 51185 - RNA, 27 nt, synthetic construct
  misc_feature 1..27: note = Neuron navigator 2 (1941-1949)
  source 1..27: mol_type = other RNA
cgcatgcagagcgagatcgagaagctg

SEQ ID NO: 51186 - RNA, 27 nt, synthetic construct
  misc_feature 1..27: note = 28 kDa heat- and acid-stable phosphoprotein (173-181)
  source 1..27: mol_type = other RNA
cgcatgcagagcctgtccctcaacaag

SEQ ID NO: 51187 - RNA, 39 nt, synthetic construct
  misc_feature 1..39: note = cDNA FLJ57726, highly similar to Heterogeneous nuclear ribonucleoprotein H3 (32-44)
  source 1..39: mol_type = other RNA
cgcatgcgggacggccgcgggatgggcgggcacggctac

SEQ ID NO: 51188 - RNA, 27 nt, synthetic construct
  misc_feature 1..27: note = Histone-lysine N-methyltransferase EHMT2 (42-50)
  source 1..27: mol_type = other RNA
cgcatgagcgacgacgtgcactccctg

SEQ ID NO: 51189 - RNA, 27 nt, synthetic construct
  misc_feature 1..27: note = La-related protein 4 (502-510)
  source 1..27: mol_type = other RNA
cgcatgagcgacgtggtcaagggcgtg

SEQ ID NO: 51190 - RNA, 48 nt, synthetic construct
  misc_feature 1..48: note = Casein kinase I isoform delta (394-409)
  source 1..48: mol_type = other RNA
cgcatgagcacctcccagaacagcatccccttcgagcaccacggcaag

SEQ ID NO: 51191 - RNA, 27 nt, synthetic construct
  misc_feature 1..27: note = Nucleophosmin (277-285)
  source 1..27: mol_type = other RNA
cgcatgaccgaccaggaggccatccag

SEQ ID NO: 51192 - RNA, 30 nt, synthetic construct
  misc_feature 1..30: note = DNA mismatch repair protein Msh6 (302-311)
  source 1..30: mol_type = other RNA
cgcatggtgaccggcaacgggagcctgaag

SEQ ID NO: 51193 - RNA, 33 nt, synthetic construct
  misc_feature 1..33: note = Mesencephalic astrocyte-derived neurotrophic factor (3-13)
  source 1..33: mol_type = other RNA
cgcatgtgggccacccagggcctggccgtggcg

SEQ ID NO: 51194 - RNA, 27 nt, synthetic construct
  misc_feature 1..27: note = Arginine/serine-rich coiled-coil protein 2 (170-178)
  source 1..27: mol_type = other RNA
cgcaacctggacgcccagtacgagatg

SEQ ID NO: 51195 - RNA, 51 nt, synthetic construct
  misc_feature 1..51: note = Melanocyte protein PMEL (241-257)
  source 1..51: mol_type = other RNA
cgcaaccagcccctgaccttcgccctccagctgcacgacccgagcggctac

SEQ ID NO: 51196 - RNA, 27 nt, synthetic construct
  misc_feature 1..27: note = Keratin, type I cytoskeletal 10 (99-107)
  source 1..27: mol_type = other RNA
cgcaacgtgagcaccggcgacgtcaac

SEQ ID NO: 51197 - RNA, 27 nt, synthetic construct
  misc_feature 1..27: note = Dystonin (4836-4844)
  source 1..27: mol_type = other RNA
cgccaggccgaggagttccacagcgtg

SEQ ID NO: 51198 - RNA, 27 nt, synthetic construct
  misc_feature 1..27: note = Stathmin-3 (130-138)
  source 1..27: mol_type = other RNA
cgccaggccgaggagaagctgaactac

SEQ ID NO: 51199 - RNA, 27 nt, synthetic construct
  misc_feature 1..27: note = Elongation factor 1-gamma (99-107)
  source 1..27: mol_type = other RNA
cgccaggccttccccaacaccaaccgg

SEQ ID NO: 51200 - RNA, 27 nt, synthetic construct
  misc_feature 1..27: note = A-kinase anchor protein 10, mitochondrial (481-489)
  source 1..27: mol_type = other RNA
cgccaggcctggaccaccatggagaag

SEQ ID NO: 51201 - RNA, 27 nt, synthetic construct
  misc_feature 1..27: note = Vimentin (207-215)
  source 1..27: mol_type = other RNA
cgccaggacgtggacaacgccagcctg

SEQ ID NO: 51202 - RNA, 27 nt, synthetic construct
  misc_feature 1..27: note = Acidic fibroblast growth factor intracellular-binding protein (136-144)
  source 1..27: mol_type = other RNA
cgccagttcgacaacttcaagcgggtg

SEQ ID NO: 51203 - RNA, 24 nt, synthetic construct
  misc_feature 1..24: note = Lysine-specific demethylase 5B (878-885)
  source 1..24: mol_type = other RNA
cgccagttcgtgacccagctgtac

SEQ ID NO: 51204 - RNA, 27 nt, synthetic construct
  misc_feature 1..27: note = Fibronectin type III domain-containing protein 3B (198-206)
  source 1..27: mol_type = other RNA
cgccagatcgaccggcagaaccgcctg

SEQ ID NO: 51205 - RNA, 30 nt, synthetic construct
  misc_feature 1..30: note = Cytochrome P450 2U1 (288-297)
  source 1..30: mol_type = other RNA
cgccagatcgagaaggacatcaccagcttc

SEQ ID NO: 51206 - RNA, 24 nt, synthetic construct
  misc_feature 1..24: note = Interferon alpha-inducible protein 6 (2-9)
  source 1..24: mol_type = other RNA
cgccagaaggccgtgagcctgttc

SEQ ID NO: 51207 - RNA, 27 nt, synthetic construct
  misc_feature 1..27: note = THAP domain-containing protein 1 (175-183)
  source 1..27: mol_type = other RNA
cgccagctggagaagctcaaggaggtg

SEQ ID NO: 51208 - RNA, 33 nt, synthetic construct
  misc_feature 1..33: note = 3-hydroxy-3-methylglutaryl-coenzyme A reductase (84-94)
  source 1..33: mol_type = other RNA
cgccagctgggcagcaagtacatcctcgggatc

SEQ ID NO: 51209 - RNA, 27 nt, synthetic construct
  misc_feature 1..27: note = Protein FAM32A (72-80)
  source 1..27: mol_type = other RNA
cgccagatggagcggatcctgaagaag

SEQ ID NO: 51210 - RNA, 27 nt, synthetic construct
  misc_feature 1..27: note = Splicing factor 3A subunit 1 (72-80)
  source 1..27: mol_type = other RNA
cgccagaacgagatcaacaaccccaag

SEQ ID NO: 51211 - RNA, 27 nt, synthetic construct
  misc_feature 1..27: note = Spectrin beta chain, non-erythrocytic 1 (1161-1169)
  source 1..27: mol_type = other RNA
cgccagaacctgctcagccagtcccac

SEQ ID NO: 51212 - RNA, 27 nt, synthetic construct
  misc_feature 1..27: note = Unconventional myosin-X (252-260)
  source 1..27: mol_type = other RNA
cgccagaaccccggcgagcggaactac

SEQ ID NO: 51213 - RNA, 30 nt, synthetic construct
  misc_feature 1..30: note = Phosphatidylinositol-binding clathrin assembly protein (139-148)
  source 1..30: mol_type = other RNA
cgccaggtggccttcgacttcaccaaggtc

SEQ ID NO: 51214 - RNA, 27 nt, synthetic construct
  misc_feature 1..27: note = Hom s 2 (98-106)
  source 1..27: mol_type = other RNA
cgccaggtgaccggcgtcacccgggtg

SEQ ID NO: 51215 - RNA, 30 nt, synthetic construct
  misc_feature 1..30: note = Alpha-actinin-1 (672-681)
  source 1..30: mol_type = other RNA
cgccagtacgagaagagcatcgtgaactac

SEQ ID NO: 51216 - RNA, 27 nt, synthetic construct
  misc_feature 1..27: note = Protein CREG2 (251-259)
  source 1..27: mol_type = other RNA
cgccagtacgagtggttcttcatgaag

SEQ ID NO: 51217 - RNA, 27 nt, synthetic construct
  misc_feature 1..27: note = Transmembrane emp24 domain-containing protein 4 (92-100)
  source 1..27: mol_type = other RNA
cgccagtacggcagcgaggggcggttc

SEQ ID NO: 51218 - RNA, 27 nt, synthetic construct
  misc_feature 1..27: note = Bromodomain adjacent to zinc finger domain protein 2B (487-495)
  source 1..27: mol_type = other RNA
cgccagtaccccgaggtgatcaagtac

SEQ ID NO: 51219 - RNA, 27 nt, synthetic construct
  misc_feature 1..27: note = Myb-binding protein 1A (59-67)
  source 1..27: mol_type = other RNA
cgccgggacttccagatccgcgtgctg

SEQ ID NO: 51220 - RNA, 27 nt, synthetic construct
  misc_feature 1..27: note = FLYWCH-type zinc finger-containing protein 1 (137-145)
  source 1..27: mol_type = other RNA
cgccggggccccgggccgctgaccctc

SEQ ID NO: 51221 - RNA, 27 nt, synthetic construct
  misc_feature 1..27: note = NEDD8 ultimate buster 1 (431-439)
  source 1..27: mol_type = other RNA
cgccggctggagaacatccgcttcctc

SEQ ID NO: 51222 - RNA, 27 nt, synthetic construct
  misc_feature 1..27: note = Tribbles homolog 2 (31-39)
  source 1..27: mol_type = other RNA
cgcagcgccgagccctcccagagcttc

SEQ ID NO: 51223 - RNA, 27 nt, synthetic construct
  misc_feature 1..27: note = Adenylate kinase 2, mitochondrial (175-183)
  source 1..27: mol_type = other RNA
cgcagcgacgacaacgagaaggccctg

SEQ ID NO: 51224 - RNA, 33 nt, synthetic construct
  misc_feature 1..33: note = Rhomboid-like protein (64-74)
  source 1..33: mol_type = other RNA
cgcagcgaccccggcacctccggggaggcctac

SEQ ID NO: 51225 - RNA, 33 nt, synthetic construct
  misc_feature 1..33: note = THO complex subunit 5 homolog (27-37)
  source 1..33: mol_type = other RNA
cgcagcgacaccgagcaggagggcaagtactac

SEQ ID NO: 51226 - RNA, 27 nt, synthetic construct
  misc_feature 1..27: note = Serine/threonine-protein kinase VRK2 (112-120)
  source 1..27: mol_type = other RNA
cgcagcgacgtggagatcctgggctac

SEQ ID NO: 51227 - RNA, 39 nt, synthetic construct
  misc_feature 1..39: note = Eukaryotic translation initiation factor 3 subunit E (431-443)
  source 1..39: mol_type = other RNA
cgcagcgaggcccccaactgggccacccaggactccggc

SEQ ID NO: 51228 - RNA, 39 nt, synthetic construct
  misc_feature 1..39: note = Annexin A1 (303-315)
  source 1..39: mol_type = other RNA
cgcagcgagatcgacatgaacgacatcaaggccttctac

SEQ ID NO: 51229 - RNA, 30 nt, synthetic construct
  misc_feature 1..30: note = Protein LAP2 (1012-1021)
  source 1..30: mol_type = other RNA
cgcagcgagtccaccgagaaccagagctac

SEQ ID NO: 51230 - RNA, 27 nt, synthetic construct
  misc_feature 1..27: note = Zinc finger and BTB domain-containing protein 17 (362-370)
  source 1..27: mol_type = other RNA
cgcagcttctccgaccccaccagcaag

SEQ ID NO: 51231 - RNA, 33 nt, synthetic construct
  misc_feature 1..33: note = Acyl-coenzyme A thioesterase THEM4 (34-44)
  source 1..33: mol_type = other RNA
cgcagcttctccagcgaggaggtgatcctgaag

SEQ ID NO: 51232 - RNA, 27 nt, synthetic construct
  misc_feature 1..27: note = Hypoxia-inducible factor 1-alpha (30-38)
  source 1..27: mol_type = other RNA
cgcagcaaggagtccgaggtgttctac

SEQ ID NO: 51233 - RNA, 27 nt, synthetic construct
  misc_feature 1..27: note = Tubulin-tyrosine ligase-like protein 12 (425-433)
  source 1..27: mol_type = other RNA
cgcagcctggacacccacgtgaccaag

SEQ ID NO: 51234 - RNA, 33 nt, synthetic construct
  misc_feature 1..33: note = UHRF1-binding protein 1 (558-568)
  source 1..33: mol_type = other RNA
cgcagcctggagcagttcaaggccatctacaag

SEQ ID NO: 51235 - RNA, 27 nt, synthetic construct
  misc_feature 1..27: note = EWS RNA-binding protein variant 6 (391-399)
  source 1..27: mol_type = other RNA
cgcagcctgcggtactactacgagaag

SEQ ID NO: 51236 - RNA, 33 nt, synthetic construct
  misc_feature 1..33: note = Transmembrane protein 131 (709-719)
  source 1..33: mol_type = other RNA
cgcagcctgtccgaggacgtgcggttctactac

SEQ ID NO: 51237 - RNA, 27 nt, synthetic construct
  misc_feature 1..27: note = Solute carrier family 25 member 35 (270-278)
  source 1..27: mol_type = other RNA
cgcagcctgtactacaccgacaccaag

SEQ ID NO: 51238 - RNA, 27 nt, synthetic construct
  misc_feature 1..27: note = Phospholipid hydroperoxide glutathione peroxidase, mitochondrial (39-47)
  source 1..27: mol_type = other RNA
cgcagcatgcacgagttctccgccaag

SEQ ID NO: 51239 - RNA, 27 nt, synthetic construct
  misc_feature 1..27: note = Ubiquitin-like protein 7 (210-218)
  source 1..27: mol_type = other RNA
cgcagcatgccctccagctcctaccgg

SEQ ID NO: 51240 - RNA, 27 nt, synthetic construct
  misc_feature 1..27: note = Baculoviral IAP repeat-containing protein 6 (3123-3131)
  source 1..27: mol_type = other RNA
cgcagcatggtgtccaccatcatgaag

SEQ ID NO: 51241 - RNA, 27 nt, synthetic construct
  misc_feature 1..27: note = Testis-specific Y-encoded protein 1 (206-214)
  source 1..27: mol_type = other RNA
cgcagcaacccctacttccagaacaag

SEQ ID NO: 51242 - RNA, 27 nt, synthetic construct
  misc_feature 1..27: note = Eukaryotic translation initiation factor 2 subunit 2 (285-293)
  source 1..27: mol_type = other RNA
cgcagccccgacaccatcctgcagaag

SEQ ID NO: 51243 - RNA, 36 nt, synthetic construct
  misc_feature 1..36: note = Myb-binding protein 1A (545-556)
  source 1..36: mol_type = other RNA
cgcagcccctccctgctccagagcggcgccaagaag

SEQ ID NO: 51244 - RNA, 30 nt, synthetic construct
  misc_feature 1..30: note = Histone acetyltransferase KAT2A (279-288)
  source 1..30: mol_type = other RNA
cgcagccaggccgaggacgtggccacctac

SEQ ID NO: 51245 - RNA, 27 nt, synthetic construct
  misc_feature 1..27: note = Sorting nexin-17 (193-201)
  source 1..27: mol_type = other RNA
cgcagccaggagtacaagatcgtgctg

SEQ ID NO: 51246 - RNA, 48 nt, synthetic construct
  misc_feature 1..48: note = Cold-inducible RNA-binding protein (145-160)
  source 1..48: mol_type = other RNA
cgcagccagtccggcgggtacagcgaccggtccagcggcgggtcctac

SEQ ID NO: 51247 - RNA, 39 nt, synthetic construct
  misc_feature 1..39: note = Heterogeneous nuclear ribonucleoprotein A1-like 2 (131-143)
  source 1..39: mol_type = other RNA
cgcagctccggcccctacgggggcgggggccagtacttc

SEQ ID NO: 51248 - RNA, 27 nt, synthetic construct
  misc_feature 1..27: note = Solute carrier family 22 member 18 (22-30)
  source 1..27: mol_type = other RNA
cgcagctccgtgatcctgctcacctac

SEQ ID NO: 51249 - RNA, 30 nt, synthetic construct
  misc_feature 1..30: note = Lysine-specific histone demethylase 1A (632-641)
  source 1..30: mol_type = other RNA
cgcagcacctcccagaccttcatctacaag

SEQ ID NO: 51250 - RNA, 27 nt, synthetic construct
  misc_feature 1..27: note = Butyrophilin subfamily 2 member A2 (135-143)
  source 1..27: mol_type = other RNA
cgcagctacgacgaggccatcctgcgg

SEQ ID NO: 51251 - RNA, 30 nt, synthetic construct
  misc_feature 1..30: note = Butyrophilin subfamily 2 member A2 (135-144)
  source 1..30: mol_type = other RNA
cgcagctacgacgaggccatcctgcggctc

SEQ ID NO: 51252 - RNA, 27 nt, synthetic construct
  misc_feature 1..27: note = Vacuolar protein sorting-associated protein 52 homolog (301-309)
  source 1..27: mol_type = other RNA
cgcagctacctgggccggctcatgaag

SEQ ID NO: 51253 - RNA, 33 nt, synthetic construct
  misc_feature 1..33: note = CDKN2AIP N-terminal-like protein (28-38)
  source 1..33: mol_type = other RNA
cgcagctactccgagagcgagaagcagtggaag

SEQ ID NO: 51254 - RNA, 36 nt, synthetic construct
  misc_feature 1..36: note = Vimentin (28-39)
  source 1..36: mol_type = other RNA
cgcagctacgtgaccacctccacgcggacctacagc

SEQ ID NO: 51255 - RNA, 33 nt, synthetic construct
  misc_feature 1..33: note = Ribosome biogenesis protein BOP1 (9-19)
  source 1..33: mol_type = other RNA
cgcaccgccgcccccagcgtgcggccggagaag

SEQ ID NO: 51256 - RNA, 33 nt, synthetic construct
  misc_feature 1..33: note = Myelin basic protein (92-102)
  source 1..33: mol_type = other RNA
cgcaccgcccactacggcagcctgccccagaag

SEQ ID NO: 51257 - RNA, 51 nt, synthetic construct
  misc_feature 1..51: note = HIRA-interacting protein 3 (190-206)
  source 1..51: mol_type = other RNA
cgcaccgcctggaaccccctgggcgaggccgcgccgcccggggagctctac

SEQ ID NO: 51258 - RNA, 27 nt, synthetic construct
  misc_feature 1..27: note = WD repeat-containing protein 91 (7-15)
  source 1..27: mol_type = other RNA
cgcaccgacgagctggtgcgggagtac

SEQ ID NO: 51259 - RNA, 27 nt, synthetic construct
  misc_feature 1..27: note = Protein FAM199X (55-63)
  source 1..27: mol_type = other RNA
cgcaccgaccccctgcaccggttccac

SEQ ID NO: 51260 - RNA, 39 nt, synthetic construct
  misc_feature 1..39: note = Sodium/potassium/calcium exchanger 5 (203-215)
  source 1..39: mol_type = other RNA
cgcaccgacagcggcatcttctacgaggactccgggtac

SEQ ID NO: 51261 - RNA, 36 nt, synthetic construct
  misc_feature 1..36: note = Multivesicular body subunit 12B (107-118)
  source 1..36: mol_type = other RNA
cgcaccgactacgagtaccagcacagcaacctgtac

SEQ ID NO: 51262 - RNA, 30 nt, synthetic construct
  misc_feature 1..30: note = Upstream stimulatory factor 1 (52-61)
  source 1..30: mol_type = other RNA
cgcaccgagaacggcgggcaggtgatgtac

SEQ ID NO: 51263 - RNA, 33 nt, synthetic construct
  misc_feature 1..33: note = Upstream stimulatory factor 2 (69-79)
  source 1..33: mol_type = other RNA
cgcaccgagaccaacggcgggcaggtgacgtac

SEQ ID NO: 51264 - RNA, 36 nt, synthetic construct
  misc_feature 1..36: note = Plexin-C1 (1024-1035)
  source 1..36: mol_type = other RNA
cgcaccttcttccccgagagcggcgggttcacccac

SEQ ID NO: 51265 - RNA, 30 nt, synthetic construct
  misc_feature 1..30: note = Spatacsin (651-660)
  source 1..30: mol_type = other RNA
cgcaccttcatgatcaagttcccctggaag

SEQ ID NO: 51266 - RNA, 30 nt, synthetic construct
  misc_feature 1..30: note = Cytoplasmic dynein 1 heavy chain 1 (4159-4168)
  source 1..30: mol_type = other RNA
cgcaccttcagctccatccccgtgagccgg

SEQ ID NO: 51267 - RNA, 27 nt, synthetic construct
  misc_feature 1..27: note = Abhydrolase domain-containing protein 2 (144-152)
  source 1..27: mol_type = other RNA
cgcaccttcgtggactacgcccagaag

SEQ ID NO: 51268 - RNA, 27 nt, synthetic construct
  misc_feature 1..27: note = Probable ATP-dependent RNA helicase DDX5 (559-567)
  source 1..27: mol_type = other RNA
cgcaccggcaaccccaccgggacgtac

SEQ ID NO: 51269 - RNA, 33 nt, synthetic construct
  misc_feature 1..33: note = Ras-related protein Rab-1B (48-58)
  source 1..33: mol_type = other RNA
cgcaccatcgagctggacggcaagaccatcaag

SEQ ID NO: 51270 - RNA, 42 nt, synthetic construct
  misc_feature 1..42: note = NADH dehydrogenase (ubiquinone) 1 beta subcomplex subunit 4 (72-85)
  source 1..42: mol_type = other RNA
cgcaccatcaacgtgtaccccaacttccggccgacccccaag

SEQ ID NO: 51271 - RNA, 39 nt, synthetic construct
  misc_feature 1..39: note = S-adenosylmethionine decarboxylase proenzyme (33-45)
  source 1..39: mol_type = other RNA
cgcaccatcccccggagcgagtgggacatcctgctcaag

SEQ ID NO: 51272 - RNA, 27 nt, synthetic construct
  misc_feature 1..27: note = Midasin (1582-1590)
  source 1..27: mol_type = other RNA
cgcaccctgttcaagttcatgaagaag

SEQ ID NO: 51273 - RNA, 27 nt, synthetic construct
  misc_feature 1..27: note = DNA dC-dU-editing enzyme APOBEC-3B (183-191)
  source 1..27: mol_type = other RNA
cgcaccctgaaggagatcctccggtac

SEQ ID NO: 51274 - RNA, 33 nt, synthetic construct
  misc_feature 1..33: note = Disintegrin and metalloproteinase domain-containing protein 10 (147-157)
  source 1..33: mol_type = other RNA
cgcaccctgcccttccacagcgtgatctaccac

SEQ ID NO: 51275 - RNA, 33 nt, synthetic construct
  misc_feature 1..33: note = BTB/POZ domain-containing adapter for CUL3-mediated RhoA degradation protein 1 (57-67)
  source 1..33: mol_type = other RNA
cgcaccctgaccggccaggacacgatgctcaag

SEQ ID NO: 51276 - RNA, 42 nt, synthetic construct
  misc_feature 1..42: note = Heat shock protein HSP 90-beta (32-45)
  source 1..42: mol_type = other RNA
cgcaccctgaccctcgtggacacgggcatcgggatgaccaag

SEQ ID NO: 51277 - RNA, 36 nt, synthetic construct
  misc_feature 1..36: note = UDP-N-acetylhexosamine pyrophosphorylase (169-180)
  source 1..36: mol_type = other RNA
cgcaccatggagagcaccaaggagttcttcacgaag

SEQ ID NO: 51278 - RNA, 33 nt, synthetic construct
  misc_feature 1..33: note = Hypoxia-inducible factor 1-alpha (180-190)
  source 1..33: mol_type = other RNA
cgcaccatgaacatcaagagcgccacctggaag

SEQ ID NO: 51279 - RNA, 27 nt, synthetic construct
  misc_feature 1..27: note = Spindle and centriole-associated protein 1 (657-665)
  source 1..27: mol_type = other RNA
cgcaccaacgagagcctgatccagcgg

SEQ ID NO: 51280 - RNA, 30 nt, synthetic construct
  misc_feature 1..30: note = COBW domain-containing protein 2 (353-362)
  source 1..30: mol_type = other RNA
cgcaccaaccggctggtgctcctgggccgc

SEQ ID NO: 51281 - RNA, 30 nt, synthetic construct
  misc_feature 1..30: note = Alpha-adducin (193-202)
  source 1..30: mol_type = other RNA
cgcacccccagcttcctgaagaagtccaag

SEQ ID NO: 51282 - RNA, 27 nt, synthetic construct
  misc_feature 1..27: note = Programmed cell death 6-interacting protein (478-486)
  source 1..27: mol_type = other RNA
cgcacccccagcaacgagctgtacaag

SEQ ID NO: 51283 - RNA, 36 nt, synthetic construct
  misc_feature 1..36: note = Leucine zipper putative tumor suppressor 1 (432-443)
  source 1..36: mol_type = other RNA
cgcacccaggacctggagggcgccctccggaccaag

SEQ ID NO: 51284 - RNA, 27 nt, synthetic construct
  misc_feature 1..27: note = Protein disulfide-isomerase A4 (155-163)
  source 1..27: mol_type = other RNA
cgcacccaggaggagatcgtggccaag

SEQ ID NO: 51285 - RNA, 33 nt, synthetic construct
  misc_feature 1..33: note = Glycerol kinase (118-128)
  source 1..33: mol_type = other RNA
cgcacccagagcaccgtggagtccctgagcaag

SEQ ID NO: 51286 - RNA, 30 nt, synthetic construct
  misc_feature 1..30: note = E3 ubiquitin-protein ligase DZIP3 (287-296)
  source 1..30: mol_type = other RNA
cgcacccagtacaacgagcagatcaacaag

SEQ ID NO: 51287 - RNA, 27 nt, synthetic construct
  misc_feature 1..27: note = SHC SH2 domain-binding protein 1 (434-442)
  source 1..27: mol_type = other RNA
cgcaccagcgccgagttcctgatgaag

SEQ ID NO: 51288 - RNA, 30 nt, synthetic construct
  misc_feature 1..30: note = Microtubule-associated protein 1B (1897-1906)
  source 1..30: mol_type = other RNA
cgcaccagcgacgtgggcgggtactactac

SEQ ID NO: 51289 - RNA, 27 nt, synthetic construct
  misc_feature 1..27: note = Phosphatidylinositol 3-kinase regulatory subunit beta (469-477)
  source 1..27: mol_type = other RNA
cgcaccagccaggagctgcagatgaag

SEQ ID NO: 51290 - RNA, 33 nt, synthetic construct
  misc_feature 1..33: note = Plakophilin-4 (455-465)
  source 1..33: mol_type = other RNA
cgcaccagctcccagcggagcaccctgacgtac

SEQ ID NO: 51291 - RNA, 27 nt, synthetic construct
  misc_feature 1..27: note = (E3-independent) E2 ubiquitin-conjugating enzyme (103-111)
  source 1..27: mol_type = other RNA
cgcaccaccgacatcgtgatccggatc

SEQ ID NO: 51292 - RNA, 33 nt, synthetic construct
  misc_feature 1..33: note = Uncharacterized protein KIAA1211 (15-25)
  source 1..33: mol_type = other RNA
cgcaccaccagctgggccaagtccaagctgttc

SEQ ID NO: 51293 - RNA, 27 nt, synthetic construct
  misc_feature 1..27: note = Eukaryotic translation initiation factor 3 subunit E (74-82)
  source 1..27: mol_type = other RNA
cgcaccaccgtggtcgcccagctgaag

SEQ ID NO: 51294 - RNA, 33 nt, synthetic construct
  misc_feature 1..33: note Dolichyl-diphosphooligosaccharide-proteinosyltransferase subunit 1 (38-48)
  source 1..33: mol_type = other RNA
cgcaccgtggacctgagctcccacctcgccaag

SEQ ID NO: 51295 - RNA, 30 nt, synthetic construct
  misc_feature 1..30: note = 28S ribosomal protein S24, mitochondrial (77-86)
  source 1..30: mol_type = other RNA
cgcaccgtggaggacgtcttcctgcggaag

SEQ ID NO: 51296 - RNA, 33 nt, synthetic construct
  misc_feature 1..33: note = Serpin B6 (125-135)
  source 1..33: mol_type = other RNA
cgcaccgtggagaaggagctgacctacgagaag

SEQ ID NO: 51297 - RNA, 30 nt, synthetic construct
  misc_feature 1..30: note = Ribosome biogenesis protein BOP1 (389-398)
  source 1..30: mol_type = other RNA
cgcaccgtgcccgtcggcggggtggtgaag

SEQ ID NO: 51298 - RNA, 27 nt, synthetic construct
  misc_feature 1..27: note = Histone-lysine N-methyltransferase SETMAR (106-114)
  source 1..27: mol_type = other RNA
cgcaccgtgcagtggtggttcaagaag

SEQ ID NO: 51299 - RNA, 30 nt, synthetic construct
  misc_feature 1..30: note = Kinesin-like protein KIF22 (23-32)
  source 1..30: mol_type = other RNA
cgcaccgtgaccggcgccaagcccctgaag

SEQ ID NO: 51300 - RNA, 27 nt, synthetic construct
  misc_feature 1..27: note = Ubiquitin-like-conjugating enzyme ATG3 (198-206)
  source 1..27: mol_type = other RNA
cgcacctacgacctgtacatcacctac

SEQ ID NO: 51301 - RNA, 27 nt, synthetic construct
  misc_feature 1..27: note = Phosphatidylinositol 4-kinase alpha (889-897)
  source 1..27: mol_type = other RNA
cgcacctacgacatgatccagtactac

SEQ ID NO: 51302 - RNA, 33 nt, synthetic construct
  misc_feature 1..33: note = Serine-protein kinase ATM (2034-2044)
  source 1..33: mol_type = other RNA
cgcacctacgagcacgaggccatgtggggcaag

SEQ ID NO: 51303 - RNA, 30 nt, synthetic construct
  misc_feature 1..30: note = Vimentin (36-45)
  source 1..30: mol_type = other RNA
cgcacctacagcctgggctccgccctccgg

SEQ ID NO: 51304 - RNA, 33 nt, synthetic construct
  misc_feature 1..33: note = Protein-methionine sulfoxide oxidase MICAL3 (192-202)
  source 1..33: mol_type = other RNA
cgcacctacaccgaggaggagctgaacgccaag

SEQ ID NO: 51305 - RNA, 30 nt, synthetic construct
  misc_feature 1..30: note = Nucleolar and coiled-body phosphoprotein 1 (638-647)
  source 1..30: mol_type = other RNA
cgcgtggccgacaacagcttcgacgccaag

SEQ ID NO: 51306 - RNA, 27 nt, synthetic construct
  misc_feature 1..27: note = Arginine vasopressin-induced protein 1 (66-74)
  source 1..27: mol_type = other RNA
cgcgtggccgaggccctgaagcggctc

SEQ ID NO: 51307 - RNA, 27 nt, synthetic construct
  misc_feature 1..27: note = Chondroitin sulfate synthase 3 (30-38)
  source 1..27: mol_type = other RNA
cgcgtggccgagctgagcgagcggaag

SEQ ID NO: 51308 - RNA, 27 nt, synthetic construct
  misc_feature 1..27: note = Caspase-9 (236-244)
  source 1..27: mol_type = other RNA
cgcgtggccaacgccgtcagcgtgaag

SEQ ID NO: 51309 - RNA, 39 nt, synthetic construct
  misc_feature 1..39: note = Caspase-9 (236-248)
  source 1..39: mol_type = other RNA
cgcgtggccaacgccgtcagcgtgaagggcatctacaag

SEQ ID NO: 51310 - RNA, 33 nt, synthetic construct
  misc_feature 1..33: note = 7-dehydrocholesterol reductase (339-349)
  source 1..33: mol_type = other RNA
cgcgtggccaaccaccagaaggacctgttccgg

SEQ ID NO: 51311 - RNA, 33 nt, synthetic construct
  misc_feature 1..33: note = SHC-transforming protein 3 (55-65)
  source 1..33: mol_type = other RNA
cgcgtgtgcgaggccgtccccggcgccaagggg

SEQ ID NO: 51312 - RNA, 30 nt, synthetic construct
  misc_feature 1..30: note = Transmembrane protein 98 (138-147)
  source 1..30: mol_type = other RNA
cgcgtggacgacgtcgtgaagagcatgtac

SEQ ID NO: 51313 - RNA, 30 nt, synthetic construct
  misc_feature 1..30: note = Protein OS-9 (16-25)
  source 1..30: mol_type = other RNA
cgcgtggacgagcccctgagctgctcctac

SEQ ID NO: 51314 - RNA, 27 nt, synthetic construct
  misc_feature 1..27: note = Eukaryotic peptide chain release factor subunit 1 (402-410)
  source 1..27: mol_type = other RNA
cgcgtggacttccagggcatggagtac

SEQ ID NO: 51315 - RNA, 33 nt, synthetic construct
  misc_feature 1..33: note = Nuclear fragile X mental retardation-interacting protein 2 (272-282)
  source 1..33: mol_type = other RNA
cgcgtggacggcagcaagcccatctggaagtac

SEQ ID NO: 51316 - RNA, 30 nt, synthetic construct
  misc_feature 1..30: note = COP9 signalosome complex subunit 1 (484-493)
  source 1..30: mol_type = other RNA
cgcgtggacagccactccaagatcctgtac

SEQ ID NO: 51317 - RNA, 30 nt, synthetic construct
  misc_feature 1..30: note = Brefeldin A-inhibited guanine nucleotide-exchange protein 1 (1662-1671)
  source 1..30: mol_type = other RNA
cgcgtggacacccaggaccagggcatgtac

SEQ ID NO: 51318 - RNA, 27 nt, synthetic construct
  misc_feature 1..27: note = Coiled-coil domain-containing protein 127 (252-260)
  source 1..27: mol_type = other RNA
cgcgtggaggaggccatcctggagaag

SEQ ID NO: 51319 - RNA, 33 nt, synthetic construct
  misc_feature 1..33: note = Copine-1 (267-277)
  source 1..33: mol_type = other RNA
cgcgtggagaccgagtacagcttcctggactac

SEQ ID NO: 51320 - RNA, 30 nt, synthetic construct
  misc_feature 1..30: note = Tumor protein D53 (48-57)
  source 1..30: mol_type = other RNA
cgcgtggagaccaccgtcacgagcctgaag

SEQ ID NO: 51321 - RNA, 30 nt, synthetic construct
  misc_feature 1..30: note = Chromobox protein homolog 6 (9-18)
  source 1..30: mol_type = other RNA
cgcgtgttcgccgccgagagcatcatcaag

SEQ ID NO: 51322 - RNA, 27 nt, synthetic construct
  misc_feature 1..27: note = Eukaryotic initiation factor 4A-III (166-174)
  source 1..27: mol_type = other RNA
cgcgtgttcgacatgatccggcgccgg

SEQ ID NO: 51323 - RNA, 30 nt, synthetic construct
  misc_feature 1..30: note = DNA topoisomerase 3-beta-1 (263-272)
  source 1..30: mol_type = other RNA
cgcgtgttcgaccgggagatcgcccagatg

SEQ ID NO: 51324 - RNA, 27 nt, synthetic construct
  misc_feature 1..27: note = Annexin A1 (235-243)
  source 1..27: mol_type = other RNA
cgcgtgttccagaagtacaccaagtac

SEQ ID NO: 51325 - RNA, 30 nt, synthetic construct
  misc_feature 1..30: note = Hermansky-Pudlak syndrome 5 protein (137-146)
  source 1..30: mol_type = other RNA
cgcgtgttcgtcggcgaccacgccgggaag

SEQ ID NO: 51326 - RNA, 36 nt, synthetic construct
  misc_feature 1..36: note = Non-specific lipid-transfer protein (13-24)
  source 1..36: mol_type = other RNA
cgcgtgttcgtcgtgggcgtggggatgaccaagttc

SEQ ID NO: 51327 - RNA, 27 nt, synthetic construct
  misc_feature 1..27: note = Receptor activity-modifying protein 2 (18-26)
  source 1..27: mol_type = other RNA
cgcgtgggccggcccgccgccctgcgc

SEQ ID NO: 51328 - RNA, 36 nt, synthetic construct
  misc_feature 1..36: note = ATP-dependent RNA helicase DDX3X (407-418)
  source 1..36: mol_type = other RNA
cgcgtgggcagcacctccgagaacatcacccagaag

SEQ ID NO: 51329 - RNA, 27 nt, synthetic construct
  misc_feature 1..27: note = Dol-P-Man:Man(5)GlcNAc(2)-PP-Dol alpha-1,3-mannosyltransferase (115-123)
  source 1..27: mol_type = other RNA
cgcgtgcacagcatcttcgtcctgcgg

SEQ ID NO: 51330 - RNA, 30 nt, synthetic construct
  misc_feature 1..30: note = Lon protease homolog 2, peroxisomal (197-206)
  source 1..30: mol_type = other RNA
cgcgtgatcgccatccggcccatccgccgg

SEQ ID NO: 51331 - RNA, 27 nt, synthetic construct
  misc_feature 1..27: note = B-cell lymphoma 3 protein (267-275)
  source 1..27: mol_type = other RNA
cgcgtgatcgacatcctgcggggcaag

SEQ ID NO: 51332 - RNA, 36 nt, synthetic construct
  misc_feature 1..36: note = Serine/threonine-protein kinase TBK1 (143-154)
  source 1..36: mol_type = other RNA
cgcgtgatcggcgaggacgggcagagcgtctacaag

SEQ ID NO: 51333 - RNA, 39 nt, synthetic construct
  misc_feature 1..39: note = Stress-70 protein, mitochondrial (218-230)
  source 1..39: mol_type = other RNA
cgcgtgatcaacgagcccaccgccgccgcgctggcctac

SEQ ID NO: 51334 - RNA, 33 nt, synthetic construct
  misc_feature 1..33: note = Synembryn-A (493-503)
  source 1..33: mol_type = other RNA
cgcgtgatccagcccatgggcatgagcccgcgg

SEQ ID NO: 51335 - RNA, 33 nt, synthetic construct
  misc_feature 1..33: note = GDP-fucose protein O-fucosyltransferase 1 (101-111)
  source 1..33: mol_type = other RNA
cgcgtgatcagcctggaggacttcatggagaag

SEQ ID NO: 51336 - RNA, 36 nt, synthetic construct
  misc_feature 1..36: note = Creatine kinase M-type (236-247)
  source 1..36: mol_type = other RNA
cgcgtgatcagcatggagaagggcgggaacatgaag

SEQ ID NO: 51337 - RNA, 36 nt, synthetic construct
  misc_feature 1..36: note = COX assembly mitochondrial protein 2 homolog (63-74)
  source 1..36: mol_type = other RNA
cgcgtgatcgtcacccacggcagcctgaagctcaag

SEQ ID NO: 51338 - RNA, 27 nt, synthetic construct
  misc_feature 1..27: note = ENTH domain-containing protein 1 (376-384)
  source 1..27: mol_type = other RNA
cgcgtgaaggagatcgtcatcaacaag

SEQ ID NO: 51339 - RNA, 36 nt, synthetic construct
  misc_feature 1..36: note = Epidermal growth factor receptor substrate 15 (33-44)
  source 1..36: mol_type = other RNA
cgcgtgctggccagcgacgccgcggccttcctcaag

SEQ ID NO: 51340 - RNA, 30 nt, synthetic construct
  misc_feature 1..30: note = Transient receptor potential cation channel subfamily M member 1 (871-880)
  source 1..30: mol_type = other RNA
cgcgtgctggacatcttcggcgtcaacaag

SEQ ID NO: 51341 - RNA, 33 nt, synthetic construct
  misc_feature 1..33: note = Anaphase-promoting complex subunit 2 (163-173)
  source 1..33: mol_type = other RNA
cgcgtgctggaccccagcatggtcatcctcgag

SEQ ID NO: 51342 - RNA, 36 nt, synthetic construct
  misc_feature 1..36: note = Monofunctional C1-tetrahydrofolate synthase, mitochondrial (497-508)
  source 1..36: mol_type = other RNA
cgcgtgctggacaccaacgaccggttcctccgcaag

SEQ ID NO: 51343 - RNA, 30 nt, synthetic construct
  misc_feature 1..30: note = Uncharacterized protein C19orf52 (162-171)
  source 1..30: mol_type = other RNA
cgcgtgctggacgtcggcttcgtggggcgg

SEQ ID NO: 51344 - RNA, 27 nt, synthetic construct
  misc_feature 1..27: note = Paired amphipathic helix protein Sin3b (506-514)
  source 1..27: mol_type = other RNA
cgcgtgctggagagcgtccagaagaag

SEQ ID NO: 51345 - RNA, 33 nt, synthetic construct
  misc_feature 1..33: note = Nipped-B-like protein (1779-1789)
  source 1..33: mol_type = other RNA
cgcgtgctgggcgagaacgccatcgccgtccgg

SEQ ID NO: 51346 - RNA, 27 nt, synthetic construct
  misc_feature 1..27: note = Interferon-stimulated gene 20 kDa protein (131-139)
  source 1..27: mol_type = other RNA
cgcgtgctgagcgagcggctcctgcac

SEQ ID NO: 51347 - RNA, 30 nt, synthetic construct
  misc_feature 1..30: note = Interferon-stimulated gene 20 kDa protein (131-140)
  source 1..30: mol_type = other RNA
cgcgtgctgagcgagcggctcctgcacaag

SEQ ID NO: 51348 - RNA, 27 nt, synthetic construct
  misc_feature 1..27: note = 14-3-3 protein sigma (60-68)
  source 1..27: mol_type = other RNA
cgcgtgctgagctccatcgagcagaag

SEQ ID NO: 51349 - RNA, 33 nt, synthetic construct
  misc_feature 1..33: note = Guanine nucleotide-binding protein G(s) subunit alpha isoforms short (187-197)
  source 1..33: mol_type = other RNA
cgcgtgctgaccagcggcatcttcgagaccaag

SEQ ID NO: 51350 - RNA, 27 nt, synthetic construct
  misc_feature 1..27: note = T lymphocyte c-maf long form (21-29)
  source 1..27: mol_type = other RNA
cgcgtgctgaccagcgtcttcaccaag

SEQ ID NO: 51351 - RNA, 27 nt, synthetic construct
  misc_feature 1..27: note = Beta-parvin (351-359)
  source 1..27: mol_type = other RNA
cgcgtgctgtacaacctcttcaccaag

SEQ ID NO: 51352 - RNA, 33 nt, synthetic construct
  misc_feature 1..33: note = B-cell CLL/lymphoma 7 protein family member A (20-30)
  source 1..33: mol_type = other RNA
cgcgtgatggccgccatcgagaaggtccggaag

SEQ ID NO: 51353 - RNA, 33 nt, synthetic construct
  misc_feature 1..33: note = Nuclear transcription factor Y subunit gamma (25-35)
  source 1..33: mol_type = other RNA
cgcgtgatggaggagatccggaacctgaccgtc

SEQ ID NO: 51354 - RNA, 33 nt, synthetic construct
  misc_feature 1..33: note = Poly (ADP-ribose) polymerase 4 (419-429)
  source 1..33: mol_type = other RNA
cgcgtgaacgagaccaccgagttcctgagcaag

SEQ ID NO: 51355 - RNA, 30 nt, synthetic construct
  misc_feature 1..30: note = Ceramide synthase 5 (379-388)
  source 1..30: mol_type = other RNA
cgcgtgaacggccacatggggggcagctac

SEQ ID NO: 51356 - RNA, 27 nt, synthetic construct
  misc_feature 1..27: note = Cytoplasmic dynein 1 heavy chain 1 (759-767)
  source 1..27: mol_type = other RNA
cgcgtgcccctggccatcgtcaacaag

SEQ ID NO: 51357 - RNA, 30 nt, synthetic construct
  misc_feature 1..30: note = Protein scribble homolog (161-170)
  source 1..30: mol_type = other RNA
cgcgtgccccaggccgagggcccgcccaag

SEQ ID NO: 51358 - RNA, 33 nt, synthetic construct
  misc_feature 1..33: note = Phosphatidylinositol 3-kinase regulatory subunit gamma (209-219)
  source 1..33: mol_type = other RNA
cgcgtgcaggccgaggacctgctctacggcaag

SEQ ID NO: 51359 - RNA, 30 nt, synthetic construct
  misc_feature 1..30: note = Large neutral amino acids transporter small subunit 1 (195-204)
  source 1..30: mol_type = other RNA
cgcgtgcaggacgccttcgccgcggccaag

SEQ ID NO: 51360 - RNA, 36 nt, synthetic construct
  misc_feature 1..36: note = ATPase family AAA domain-containing protein 3A (605-616)
  source 1..36: mol_type = other RNA
cgcgtgcaggacgccgtccagcagcaccagcagaag

SEQ ID NO: 51361 - RNA, 33 nt, synthetic construct
  misc_feature 1..33: note = Fibronectin type III domain-containing protein 3B (271-281)
  source 1..33: mol_type = other RNA
cgcgtgcaggacatcctgagcggcatcgagaag

SEQ ID NO: 51362 - RNA, 27 nt, synthetic construct
  misc_feature 1..27: note = 6-phosphofructo-2-kinase/fructose-2,6-bisphosphatase 2 (228-236)
  source 1..27: mol_type = other RNA
cgcgtgcaggactacatccagagcaag

SEQ ID NO: 51363 - RNA, 33 nt, synthetic construct
  misc_feature 1..33: note = Probable ATP-dependent RNA helicase DHX37 (767-777)
  source 1..33: mol_type = other RNA
cgcgtgcagagcgaggagatgctggaggacaag

SEQ ID NO: 51364 - RNA, 30 nt, synthetic construct
  misc_feature 1..30: note = Charged multivesicular body protein 1b (75-84)
  source 1..30: mol_type = other RNA
cgcgtgcagaccgccgtcaccatgggcaag

SEQ ID NO: 51365 - RNA, 42 nt, synthetic construct
  misc_feature 1..42: note = 28S ribosomal protein S29, mitochondrial (232-245)
  source 1..42: mol_type = other RNA
cgcgtgcggaacgccaccgacgccgtcggcatcgtgctgaag

SEQ ID NO: 51366 - RNA, 27 nt, synthetic construct
  misc_feature 1..27: note = F-box only protein 21 (77-85)
  source 1..27: mol_type = other RNA
cgcgtgcggtggcccagcctgatgaag

SEQ ID NO: 51367 - RNA, 30 nt, synthetic construct
  misc_feature 1..30: note = Platelet-activating factor acetylhydrolase 2, cytoplasmic (188-197)
  source 1..30: mol_type = other RNA
cgcgtgagcgagtgcctgcgggtcctcaag

SEQ ID NO: 51368 - RNA, 27 nt, synthetic construct
  misc_feature 1..27: note = ADP-ribosylation factor GTPase-activating protein 1 (148-156)
  source 1..27: mol_type = other RNA
cgcgtgagcggccagccccagtccgtc

SEQ ID NO: 51369 - RNA, 27 nt, synthetic construct
  misc_feature 1..27: note = DNA polymerase delta catalytic subunit (537-545)
  source 1..27: mol_type = other RNA
cgcgtgaccggcgtccccctgagctac

SEQ ID NO: 51370 - RNA, 30 nt, synthetic construct
  misc_feature 1..30: note = E3 ubiquitin-protein ligase MIB2 (258-267)
  source 1..30: mol_type = other RNA
cgcgtggtcgacatccggggctgggacgtg

SEQ ID NO: 51371 - RNA, 27 nt, synthetic construct
  misc_feature 1..27: note = NADH dehydrogenase (ubiquinone) 1 alpha subcomplex subunit 6 (77-85)
  source 1..27: mol_type = other RNA
cgcgtggtcgacctgctcgtgatcaag

SEQ ID NO: 51372 - RNA, 33 nt, synthetic construct
  misc_feature 1..33: note = Lysine-specific histone demethylase 1B (420-430)
  source 1..33: mol_type = other RNA
cgcgtgtgggacgacaagagcttcaagggcgtc

SEQ ID NO: 51373 - RNA, 33 nt, synthetic construct
  misc_feature 1..33: note = Coatomer subunit alpha (160-170)
  source 1..33: mol_type = other RNA
cgcgtgtgggacatcagcggcctgcggaagaag

SEQ ID NO: 51374 - RNA, 39 nt, synthetic construct
  misc_feature 1..39: note = ATP-binding cassette sub-family B member 8, mitochondrial (669-681)
  source 1..39: mol_type = other RNA
cgcgtgtgggaggccggcacccacgaggagctgctcaag

SEQ ID NO: 51375 - RNA, 30 nt, synthetic construct
  misc_feature 1..30: note = Methyltransferase-like protein 8 (334-343)
  source 1..30: mol_type = other RNA
cgcgtgtggatccagggcaagttccagaag

SEQ ID NO: 51376 - RNA, 30 nt, synthetic construct
  misc_feature 1..30: note = Charged multivesicular body protein 1a (46-55)
  source 1..30: mol_type = other RNA
cgcgtgtacgccgagaacgccatccggaag

SEQ ID NO: 51377 - RNA, 27 nt, synthetic construct
  misc_feature 1..27: note = Neuferricin (62-70)
  source 1..27: mol_type = other RNA
cgcgtgtacgacgtcagctccggccgg

SEQ ID NO: 51378 - RNA, 27 nt, synthetic construct
  misc_feature 1..27: note = Formin-binding protein 1-like (96-104)
  source 1..27: mol_type = other RNA
cgcgtgtacggcgagctgatgcggtac

SEQ ID NO: 51379 - RNA, 30 nt, synthetic construct
  misc_feature 1..30: note = Actin filament-associated protein 1-like 2 (535-544)
  source 1..30: mol_type = other RNA
cgcgtgtacctggacctcacccccgtcaag

SEQ ID NO: 51380 - RNA, 33 nt, synthetic construct
  misc_feature 1..33: note = Transcription termination factor 2 (414-424)
  source 1..33: mol_type = other RNA
cgcgtgtacctgaccacccagctcaagcagaag

SEQ ID NO: 51381 - RNA, 27 nt, synthetic construct
  misc_feature 1..27: note = Follistatin-related protein 5 (344-352)
  source 1..27: mol_type = other RNA
cgcgtgtaccccgagagccaggcccgg

SEQ ID NO: 51382 - RNA, 33 nt, synthetic construct
  misc_feature 1..33: note = Serine/threonine-protein kinase pim-1 (296-306)
  source 1..33: mol_type = other RNA
cgcgtgtacagccccccggagtggatccggtac

SEQ ID NO: 51383 - RNA, 30 nt, synthetic construct
  misc_feature 1..30: note = Epidermal growth factor receptor kinase substrate 8 (772-781)
  source 1..30: mol_type = other RNA
cgcgtgtacagccagatcaccgtccagaag

SEQ ID NO: 51384 - RNA, 33 nt, synthetic construct
  misc_feature 1..33: note = Bifunctional 3'-phosphoadenosine 5'-phosphosulfate synthase 1 (386-396)
  source 1..33: mol_type = other RNA
cgcgtgtactggaacgacggcctggaccagtac

SEQ ID NO: 51385 - RNA, 27 nt, synthetic construct
  misc_feature 1..27: note = ATP-binding cassette sub-family B member 6, mitochondrial (144-152)
  source 1..27: mol_type = other RNA
cgctaccgggaggccatcatcaagtac

SEQ ID NO: 51386 - RNA, 27 nt, synthetic construct
  misc_feature 1..27: note = Melanoma inhibitory activity protein 3 (1397-1405)
  source 1..27: mol_type = other RNA
agcgccgccgaggaggtgaagacctac

SEQ ID NO: 51387 - RNA, 27 nt, synthetic construct
  misc_feature 1..27: note = Transketolase (43-51)
  source 1..27: mol_type = other RNA
agcgccgccgagatcatggcggtgctg

SEQ ID NO: 51388 - RNA, 27 nt, synthetic construct
  misc_feature 1..27: note = Kinesin-like protein KIFC3 (471-479)
  source 1..27: mol_type = other RNA
agcgccgccgagatctacaacgaggtg

SEQ ID NO: 51389 - RNA, 27 nt, synthetic construct
  misc_feature 1..27: note = Protein fem-1 homolog C (91-99)
  source 1..27: mol_type = other RNA
agcgccgccggccacctgaaggtggtc

SEQ ID NO: 51390 - RNA, 27 nt, synthetic construct
  misc_feature 1..27: note = E3 ubiquitin-protein ligase AMFR (606-614)
  source 1..27: mol_type = other RNA
agcgccgacgagcgccagcggatgctg

SEQ ID NO: 51391 - RNA, 33 nt, synthetic construct
  misc_feature 1..33: note = Laminin subunit beta-3 (706-716)
  source 1..33: mol_type = other RNA
agcgccgacccctccggcgccttccgcatgctg

SEQ ID NO: 51392 - RNA, 27 nt, synthetic construct
  misc_feature 1..27: note = GRIP and coiled-coil domain-containing protein 2 (1284-1292)
  source 1..27: mol_type = other RNA
agcgccgagcagcaccagcgcaccctg

SEQ ID NO: 51393 - RNA, 27 nt, synthetic construct
  misc_feature 1..27: note = Mortality factor 4-like protein 2 (280-288)
  source 1..27: mol_type = other RNA
agcgccgagtaccaccgcaaggccctg

SEQ ID NO: 51394 - RNA, 33 nt, synthetic construct
  misc_feature 1..33: note = Coiled-coil domain-containing protein 77 (190-200)
  source 1..33: mol_type = other RNA
agcgccttcaaggccgaccccaagatctccaag

SEQ ID NO: 51395 - RNA, 33 nt, synthetic construct
  misc_feature 1..33: note = Versican core protein (1221-1231)
  source 1..33: mol_type = other RNA
agcgccttcaagccctccagcgccatcaccaag

SEQ ID NO: 51396 - RNA, 30 nt, synthetic construct
  misc_feature 1..30: note = Zinc finger protein 703 (400-409)
  source 1..30: mol_type = other RNA
agcgcccacgaccccgccggcccgtccctg

SEQ ID NO: 51397 - RNA, 27 nt, synthetic construct
  misc_feature 1..27: note = Transcription factor 20 (608-616)
  source 1..27: mol_type = other RNA
agcgcccacgagcccggcgggtccctg

SEQ ID NO: 51398 - RNA, 36 nt, synthetic construct
  misc_feature 1..36: note = Probable cation-transporting ATPase 13A3 (802-813)
  source 1..36: mol_type = other RNA
agcgccatcgaccccgaggccatcccggtgaagctg

SEQ ID NO: 51399 - RNA, 27 nt, synthetic construct
  misc_feature 1..27: note = Protein AATF (141-149)
  source 1..27: mol_type = other RNA
agcgccaagacccccggcttctccgtg

SEQ ID NO: 51400 - RNA, 30 nt, synthetic construct
  misc_feature 1..30: note = Ras-specific guanine nucleotide-releasing factor 1 (254-263)
  source 1..30: mol_type = other RNA
agcgccctggagatcgccgagcagctcacc

SEQ ID NO: 51401 - RNA, 36 nt, synthetic construct
  misc_feature 1..36: note = Fc receptor-like A (117-128)
  source 1..36: mol_type = other RNA
agcgccctgggccccccggggcccaaccgcgagttc

SEQ ID NO: 51402 - RNA, 33 nt, synthetic construct
  misc_feature 1..33: note = Vimentin (42-52)
  source 1..33: mol_type = other RNA
agcgccctgcgcccctccaccagccggtccctc

SEQ ID NO: 51403 - RNA, 39 nt, synthetic construct
  misc_feature 1..39: note = Vimentin (42-54)
  source 1..39: mol_type = other RNA
agcgccctgcgcccctccaccagccggtccctctacgcc

SEQ ID NO: 51404 - RNA, 33 nt, synthetic construct
  misc_feature 1..33: note = Actin-related protein 2/3 complex subunit 1A (298-308)
  source 1..33: mol_type = other RNA
agcgccatggagcgcttccggaacatggacaag

SEQ ID NO: 51405 - RNA, 27 nt, synthetic construct
  misc_feature 1..27: note = Fatty acid synthase (2039-2047)
  source 1..27: mol_type = other RNA
agcgccatggagcgcatctgcgagaag

SEQ ID NO: 51406 - RNA, 30 nt, synthetic construct
  misc_feature 1..30: note = Cytoplasmic dynein 1 heavy chain 1 (1505-1514)
  source 1..30: mol_type = other RNA
agcgccatgaagctgtccccctactacaag

SEQ ID NO: 51407 - RNA, 30 nt, synthetic construct
  misc_feature 1..30: note = Syntenin-1 (23-32)
  source 1..30: mol_type = other RNA
agcgccaaccccgccaacccggcgatcctg

SEQ ID NO: 51408 - RNA, 30 nt, synthetic construct
  misc_feature 1..30: note = Vacuole membrane protein 1 isoform 8 (83-92)
  source 1..30: mol_type = other RNA
agcgcccaggacttcgcctcccgcgcgaag

SEQ ID NO: 51409 - RNA, 30 nt, synthetic construct
  misc_feature 1..30: note = HLA class I histocompatibility antigen, alpha chain E (339-348)
  source 1..30: mol_type = other RNA
agcgcccagggctccgagagccactccctg

SEQ ID NO: 51410 - RNA, 27 nt, synthetic construct
  misc_feature 1..27: note = ATP-dependent RNA helicase DDX54 (145-153)
  source 1..27: mol_type = other RNA
agcgcccagaccggcgcccgcgcgctg

SEQ ID NO: 51411 - RNA, 27 nt, synthetic construct
  misc_feature 1..27: note = Poly(rC)-binding protein 2 (254-262)
  source 1..27: mol_type = other RNA
agcgcccagaccacctcccacgagctg

SEQ ID NO: 51412 - RNA, 27 nt, synthetic construct
  misc_feature 1..27: note = ADP-dependent glucokinase (213-221)
  source 1..27: mol_type = other RNA
agcgcctccggcccccacagctccctg

SEQ ID NO: 51413 - RNA, 30 nt, synthetic construct
  misc_feature 1..30: note = Nodal modulator 3 (166-175)
  source 1..30: mol_type = other RNA
agcgccgtggagttccgccagaccggctac

SEQ ID NO: 51414 - RNA, 30 nt, synthetic construct
  misc_feature 1..30: note = Histone acetyltransferase type B catalytic subunit (16-25)
  source 1..30: mol_type = other RNA
agcgccgtggagaagaagctggccgagtac

SEQ ID NO: 51415 - RNA, 27 nt, synthetic construct
  misc_feature 1..27: note = ADP-ribosylation factor-binding protein GGA1 (288-296)
  source 1..27: mol_type = other RNA
agcgccgtgcccaaggtcatgaaggtg

SEQ ID NO: 51416 - RNA, 27 nt, synthetic construct
  misc_feature 1..27: note = Ankyrin repeat domain-containing protein 20B (272-280)
  source 1..27: mol_type = other RNA
agcgccgtgtccatcttccacgagctg

SEQ ID NO: 51417 - RNA, 27 nt, synthetic construct
  misc_feature 1..27: note = Long-chain-fatty-acid-CoA ligase 3 (66-74)
  source 1..27: mol_type = other RNA
agcgcctaccgctccgtgaacagcctg

SEQ ID NO: 51418 - RNA, 33 nt, synthetic construct
  misc_feature 1..33: note = Ribulose-phosphate 3-epimerase (186-196)
  source 1..33: mol_type = other RNA
agcgaggacccccgctccgtgatcaacctgctc

SEQ ID NO: 51419 - RNA, 30 nt, synthetic construct
  misc_feature 1..30: note = WD repeat and FYVE domain-containing protein 1 (43-52)
  source 1..30: mol_type = other RNA
agcgaggaccgcaccatccgggtgtggctg

SEQ ID NO: 51420 - RNA, 30 nt, synthetic construct
  misc_feature 1..30: note = Clathrin heavy chain 1 (825-834)
  source 1..30: mol_type = other RNA
agcgaggacgtgatcaagaacctgatcctc

SEQ ID NO: 51421 - RNA, 30 nt, synthetic construct
  misc_feature 1..30: note = Microtubule-associated protein 4 (230-239)
  source 1..30: mol_type = other RNA
agcgaggagcgccccccggcccaggccctg

SEQ ID NO: 51422 - RNA, 30 nt, synthetic construct
  misc_feature 1..30: note = Cortactin-binding protein 2 (232-241)
  source 1..30: mol_type = other RNA
agcgagttcgacaccgagcgcgagcagctg

SEQ ID NO: 51423 - RNA, 27 nt, synthetic construct
  misc_feature 1..27: note = Ubiquitin carboxyl-terminal hydrolase 48 (254-262)
  source 1..27: mol_type = other RNA
agcgagttcctgaaggaggagaagctc

SEQ ID NO: 51424 - RNA, 39 nt, synthetic construct
  misc_feature 1..39: note = 55 kDa erythrocyte membrane protein (6-18)
  source 1..39: mol_type = other RNA
agcgagggcgagtccgggggcagcatgcacaccgccctg

SEQ ID NO: 51425 - RNA, 27 nt, synthetic construct
  misc_feature 1..27: note = Copper transport protein ATOX1 (44-52)
  source 1..27: mol_type = other RNA
agcgagcactccatggacaccctgctc

SEQ ID NO: 51426 - RNA, 39 nt, synthetic construct
  misc_feature 1..39: note = Ventricular zone-expressed PH domain-containing protein homolog 1 (106-118)
  source 1..39: mol_type = other RNA
agcgagatcgaccccctgggccaggggaacgacaagctc

SEQ ID NO: 51427 - RNA, 27 nt, synthetic construct
  misc_feature 1..27: note = Prolyl 3-hydroxylase OGFOD1 (290-298)
  source 1..27: mol_type = other RNA
agcgagatcctgctcaaggagttcctg

SEQ ID NO: 51428 - RNA, 27 nt, synthetic construct
  misc_feature 1..27: note = Nucleolar protein 10 (225-233)
  source 1..27: mol_type = other RNA
agcgagatcaactccctgcccaccatc

SEQ ID NO: 51429 - RNA, 33 nt, synthetic construct
  misc_feature 1..33: note = Leucine-rich repeat LGI family member 3 (77-87)
  source 1..33: mol_type = other RNA
agcgagatccaggacggcgccttctcccacctg

SEQ ID NO: 51430 - RNA, 27 nt, synthetic construct
  misc_feature 1..27: note = Serine-protein kinase ATM (707-715)
  source 1..27: mol_type = other RNA
agcgagatcaccaactccgagaccctg

SEQ ID NO: 51431 - RNA, 30 nt, synthetic construct
  misc_feature 1..30: note = Nuclear pore complex protein Nup50 (255-264)
  source 1..30: mol_type = other RNA
agcgagaagaagaccgacccctccagcctg

SEQ ID NO: 51432 - RNA, 24 nt, synthetic construct
  misc_feature 1..24: note = Talin-1 (1958-1965)
  source 1..24: mol_type = other RNA
agcgagaaggtgtcccacgtcctg

SEQ ID NO: 51433 - RNA, 30 nt, synthetic construct
  misc_feature 1..30: note = Protein strawberry notch homolog 1 (911-920)
  source 1..30: mol_type = other RNA
agcgagctggacgtgcccgtcgagatcctc

SEQ ID NO: 51434 - RNA, 33 nt, synthetic construct
  misc_feature 1..33: note = Protein S100-B (31-41)
  source 1..33: mol_type = other RNA
agcgagctgaaggagctcatcaacaacgagctg

SEQ ID NO: 51435 - RNA, 33 nt, synthetic construct
  misc_feature 1..33: note = U2 snRNP-associated SURP motif-containing protein (401-411)
  source 1..33: mol_type = other RNA
agcgagatgtccgaggagaagcgcgccaagctg

SEQ ID NO: 51436 - RNA, 27 nt, synthetic construct
  misc_feature 1..27: note = Protein piccolo (3378-3386)
  source 1..27: mol_type = other RNA
agcgagaactcccagcacctggagctc

SEQ ID NO: 51437 - RNA, 30 nt, synthetic construct
  misc_feature 1..30: note = Mitotic checkpoint serine/threonine-protein kinase BUB1 (159-168)
  source 1..30: mol_type = other RNA
agcgagcccctgcacaacgtgcaggtcctc

SEQ ID NO: 51438 - RNA, 33 nt, synthetic construct
  misc_feature 1..33: note = Gap junction beta-1 protein (253-263)
  source 1..33: mol_type = other RNA
agcgagcaggacggctccctgaaggacatcctc

SEQ ID NO: 51439 - RNA, 36 nt, synthetic construct
  misc_feature 1..36: note = Transformation/transcription domain-associated protein (434-445)
  source 1..36: mol_type = other RNA
agcgagcaggagtccggcaacgggcgcgacgtgctg

SEQ ID NO: 51440 - RNA, 27 nt, synthetic construct
  misc_feature 1..27: note = Multidrug resistance-associated protein 4 (13-21)
  source 1..27: mol_type = other RNA
agcgagacccccaccctgcagggcctc

SEQ ID NO: 51441 - RNA, 36 nt, synthetic construct
  misc_feature 1..36: note = Vitamin K epoxide reductase complex subunit 1 (44-55)
  source 1..36: mol_type = other RNA
agcttccgcaaggtgcaggagccccagggcaaggcc

SEQ ID NO: 51442 - RNA, 27 nt, synthetic construct
  misc_feature 1..27: note = POTE ankyrin domain family member F (855-863)
  source 1..27: mol_type = other RNA
agcggcgacggggtgacccacaccgtc

SEQ ID NO: 51443 - RNA, 27 nt, synthetic construct
  misc_feature 1..27: note = Disabled homolog 2 (538-546)
  source 1..27: mol_type = other RNA
agcggcttctcccagcccgtgatcttc

SEQ ID NO: 51444 - RNA, 42 nt, synthetic construct
  misc_feature 1..42: note = Heterogeneous nuclear ribonucleoprotein U-like protein 1 (662-675)
  source 1..42: mol_type = other RNA
agcggcgggggcgggtactcccagaaccgctggggcaacaac

SEQ ID NO: 51445 - RNA, 45 nt, synthetic construct
  misc_feature 1..45: note = Prelamin-A/C (483-497)
  source 1..45: mol_type = other RNA
agcggcgggggctccttcggggacaacctggtgacccgcagctac

SEQ ID NO: 51446 - RNA, 42 nt, synthetic construct
  misc_feature 1..42: note = Keratin, type II cytoskeletal 1 (604-617)
  source 1..42: mol_type = other RNA
agcggcgggggctccagcgggggctccatcgggggccgcggc

SEQ ID NO: 51447 - RNA, 39 nt, synthetic construct
  misc_feature 1..39: note = Cold-inducible RNA-binding protein (148-160)
  source 1..39: mol_type = other RNA
agcggcgggtactccgaccgcagctccggcgggagctac

SEQ ID NO: 51448 - RNA, 45 nt, synthetic construct
  misc_feature 1..45: note = Serine/threonine-protein phosphatase PP1-beta catalytic subunit (311-325)
  source 1..45: mol_type = other RNA
agcggccgccccgtgaccccgccccggaccgccaacccccccaag

SEQ ID NO: 51449 - RNA, 30 nt, synthetic construct
  misc_feature 1..30: note = Frataxin, mitochondrial (81-90)
  source 1..30: mol_type = other RNA
agcggcaccctggggcaccccggctccctc

SEQ ID NO: 51450 - RNA, 39 nt, synthetic construct
  misc_feature 1..39: note = Caprin-1 (663-675)
  source 1..39: mol_type = other RNA
agcggctaccagcgcgacgggtaccagcagaacttcaag

SEQ ID NO: 51451 - RNA, 27 nt, synthetic construct
  misc_feature 1..27: note = Protein kinase C delta-binding protein (70-78)
  source 1..27: mol_type = other RNA
agccacgacaccacctccaacacgctg

SEQ ID NO: 51452 - RNA, 30 nt, synthetic construct
  misc_feature 1..30: note = E3 ubiquitin-protein ligase TRIM32 (566-575)
  source 1..30: mol_type = other RNA
agccacttcttctccgagaacgaggacttc

SEQ ID NO: 51453 - RNA, 30 nt, synthetic construct
  misc_feature 1..30: note = ATP-dependent RNA helicase DDX42 (307-316)
  source 1..30: mol_type = other RNA
agccacgtgcgccccgaccggcagaccctg

SEQ ID NO: 51454 - RNA, 27 nt, synthetic construct
  misc_feature 1..27: note = Transmembrane protein 147 (87-95)
  source 1..27: mol_type = other RNA
agcatcgactccaacatcagcctggtg

SEQ ID NO: 51455 - RNA, 27 nt, synthetic construct
  misc_feature 1..27: note = Neuron navigator 2 (1236-1244)
  source 1..27: mol_type = other RNA
agcatcgactccaacatcagctccaag

SEQ ID NO: 51456 - RNA, 36 nt, synthetic construct
  misc_feature 1..36: note = Fructose-bisphosphate aldolase A (46-57)
  source 1..36: mol_type = other RNA
agcatcggcaccgagaacaccgaggagaaccgccgg

SEQ ID NO: 51457 - RNA, 27 nt, synthetic construct
  misc_feature 1..27: note = Septin-9 (321-329)
  source 1..27: mol_type = other RNA
agcatccacttcgaggcctaccgcgtg

SEQ ID NO: 51458 - RNA, 30 nt, synthetic construct
  misc_feature 1..30: note = Lanosterol 14-alpha demethylase (173-182)
  source 1..30: mol_type = other RNA
agcatcatcgagaaggagaccaaggagtac

SEQ ID NO: 51459 - RNA, 27 nt, synthetic construct
  misc_feature 1..27: note = Heterogeneous nuclear ribonucleoprotein K (401-409)
  source 1..27: mol_type = other RNA
agcatcatcggcaaggggggccagcgc

SEQ ID NO: 51460 - RNA, 33 nt, synthetic construct
  misc_feature 1..33: note = Interleukin-1 receptor accessory protein (317-327)
  source 1..33: mol_type = other RNA
agcatcaagaaggtgacctccgaggacctgaag

SEQ ID NO: 51461 - RNA, 33 nt, synthetic construct
  misc_feature 1..33: note = Ubiquitin carboxyl-terminal hydrolase 11 (519-529)
  source 1..33: mol_type = other RNA
agcatcctggaccgcgacgacatcttcgtgtac

SEQ ID NO: 51462 - RNA, 33 nt, synthetic construct
  misc_feature 1..33: note = Mortality factor 4-like protein 1 (192-202)
  source 1..33: mol_type = other RNA
agcatcctggaggactacgccaactacaagaag

SEQ ID NO: 51463 - RNA, 39 nt, synthetic construct
  misc_feature 1..39: note = Protein transport protein Sec31A (332-344)
  source 1..39: mol_type = other RNA
agcatcatgggcgggtccaccgacggcctgcgccagaag

SEQ ID NO: 51464 - RNA, 27 nt, synthetic construct
  misc_feature 1..27: note = Casein kinase I isoform delta (401-409)
  source 1..27: mol_type = other RNA
agcatccccttcgagcaccacggcaag

SEQ ID NO: 51465 - RNA, 30 nt, synthetic construct
  misc_feature 1..30: note = Protein maestro (14-23)
  source 1..30: mol_type = other RNA
agcatccccacctcccagccgaagcagaag

SEQ ID NO: 51466 - RNA, 30 nt, synthetic construct
  misc_feature 1..30: note = Inosine-5'-monophosphate dehydrogenase 1 (531-540)
  source 1..30: mol_type = other RNA
agcatccaggacaagggctccatccagaag

SEQ ID NO: 51467 - RNA, 30 nt, synthetic construct
  misc_feature 1..30: note = NHP2-like protein 1 (118-127)
  source 1..30: mol_type = other RNA
agcatccagcagtccatcgagcgcctgctc

SEQ ID NO: 51468 - RNA, 39 nt, synthetic construct
  misc_feature 1..39: note = ATP synthase F(0) complex subunit B1, mitochondrial (226-238)
  source 1..39: mol_type = other RNA
agcatctccacccagcaggagaaggagaccatcgccaag

SEQ ID NO: 51469 - RNA, 36 nt, synthetic construct
  misc_feature 1..36: note = StAR-related lipid transfer protein 13 (339-350)
  source 1..36: mol_type = other RNA
agcatctacgacaacgtgcccggctcccacctgtac

SEQ ID NO: 51470 - RNA, 36 nt, synthetic construct
  misc_feature 1..36: note = Carboxypeptidase Q (211-222)
  source 1..36: mol_type = other RNA
agcatctactccccccacaccggcatccaggagtac

SEQ ID NO: 51471 - RNA, 39 nt, synthetic construct
  misc_feature 1..39: note = Keratin, type I cytoskeletal 10 (148-160)
  source 1..39: mol_type = other RNA
agcaaggagctgaccaccgagatcgacaacaacatcgag

SEQ ID NO: 51472 - RNA, 27 nt, synthetic construct
  misc_feature 1..27: note = Receptor-interacting serine/threonine-protein kinase 1 (376-384)
  source 1..27: mol_type = other RNA
agcaagctgcaggacgaggccaactac

SEQ ID NO: 51473 - RNA, 39 nt, synthetic construct
  misc_feature 1..39: note = CDK5 regulatory subunit-associated protein 2 (133-145)
  source 1..39: mol_type = other RNA
agcctggccgaggccggcgggtccgagatccagcgcgtg

SEQ ID NO: 51474 - RNA, 27 nt, synthetic construct
  misc_feature 1..27: note = MICAL-like protein 2 (22-30)
  source 1..27: mol_type = other RNA
agcctggccgagttctccctcctgaag

SEQ ID NO: 51475 - RNA, 33 nt, synthetic construct
  misc_feature 1..33: note = Wiskott-Aldrich syndrome protein family member 2 (67-77)
  source 1..33: mol_type = other RNA
agcctggccgagcgcgtggaccggctccaggtc

SEQ ID NO: 51476 - RNA, 24 nt, synthetic construct
  misc_feature 1..24: note = Nucleolar protein 11 (286-293)
  source 1..24: mol_type = other RNA
agcctgtgccccgacctcatggag

SEQ ID NO: 51477 - RNA, 27 nt, synthetic construct
  misc_feature 1..27: note = Insulin-degrading enzyme (224-232)
  source 1..27: mol_type = other RNA
agcctggacgacctcaccaacctggtg

SEQ ID NO: 51478 - RNA, 27 nt, synthetic construct
  misc_feature 1..27: note = Signal peptidase complex subunit 2 (59-67)
  source 1..27: mol_type = other RNA
agcctggacgactccgccaagaaggtg

SEQ ID NO: 51479 - RNA, 33 nt, synthetic construct
  misc_feature 1..33: note = Signal peptidase complex subunit 2 (59-69)
  source 1..33: mol_type = other RNA
agcctggacgactccgccaagaaggtgctcctg

SEQ ID NO: 51480 - RNA, 27 nt, synthetic construct
  misc_feature 1..27: note = Sodium/potassium-transporting ATPase subunit alpha-1 (47-55)
  source 1..27: mol_type = other RNA
agcctggacgagctccaccgcaagtac

SEQ ID NO: 51481 - RNA, 27 nt, synthetic construct
  misc_feature 1..27: note = Transmembrane protein 132B (241-249)
  source 1..27: mol_type = other RNA
agcctggacgagatggtggtctccgtg

SEQ ID NO: 51482 - RNA, 27 nt, synthetic construct
  misc_feature 1..27: note = GREB1-like protein (74-82)
  source 1..27: mol_type = other RNA
agcctggacttctccaacaacctcacc

SEQ ID NO: 51483 - RNA, 27 nt, synthetic construct
  misc_feature 1..27: note = 2'-5'-oligoadenylate synthase 2 (123-131)
  source 1..27: mol_type = other RNA
agcctggacggcttcaccatccaggtg

SEQ ID NO: 51484 - RNA, 27 nt, synthetic construct
  misc_feature 1..27: note = Angio-associated migratory cell protein (93-101)
  source 1..27: mol_type = other RNA
agcctggaccccaagaccaacaccctc

SEQ ID NO: 51485 - RNA, 21 nt, synthetic construct
  misc_feature 1..21: note = Eukaryotic translation initiation factor 3 subunit C-like protein (835-841)
  source 1..21: mol_type = other RNA
agcctggaccagcccacccag

SEQ ID NO: 51486 - RNA, 27 nt, synthetic construct
  misc_feature 1..27: note = Regulator of nonsense transcripts 2 (992-1000)
  source 1..27: mol_type = other RNA
agcctggaggagtccatccgccaggtg

SEQ ID NO: 51487 - RNA, 36 nt, synthetic construct
  misc_feature 1..36: note = Heterogeneous nuclear ribonucleoprotein M (536-547)
  source 1..36: mol_type = other RNA
agcctggagcgcatgggcctcgagcggatgggggcc

SEQ ID NO: 51488 - RNA, 39 nt, synthetic construct
  misc_feature 1..39: note = Heterogeneous nuclear ribonucleoprotein M (536-548)
  source 1..39: mol_type = other RNA
agcctggagcgcatgggcctcgagcggatgggggccaac

SEQ ID NO: 51489 - RNA, 27 nt, synthetic construct
  misc_feature 1..27: note = ATP-sensitive inward rectifier potassium channel 10 (186-194)
  source 1..27: mol_type = other RNA
agcctgttcgaccaggtggtcaaggtg

SEQ ID NO: 51490 - RNA, 36 nt, synthetic construct
  misc_feature 1..36: note = Inositol 1,4,5-trisphosphate receptor type 3 (365-376)
  source 1..36: mol_type = other RNA
agcctgttcgagctcgaccccaccaccctgcagaag

SEQ ID NO: 51491 - RNA, 30 nt, synthetic construct
  misc_feature 1..30: note = Utrophin (249-258)
  source 1..30: mol_type = other RNA
agcctgttcgaggtgctcccccagcaggtc

SEQ ID NO: 51492 - RNA, 27 nt, synthetic construct
  misc_feature 1..27: note = Microtubule-associated tumor suppressor 1 (694-702)
  source 1..27: mol_type = other RNA
agcctgttcctcggctccgccagcaag

SEQ ID NO: 51493 - RNA, 27 nt, synthetic construct
  misc_feature 1..27: note = V-type proton ATPase 116 kDa subunit a isoform 1 (555-563)
  source 1..27: mol_type = other RNA
agcctgttcaaccacatctacttcaag

SEQ ID NO: 51494 - RNA, 27 nt, synthetic construct
  misc_feature 1..27: note = Ventricular zone-expressed PH domain-containing protein homolog 1 (252-260)
  source 1..27: mol_type = other RNA
agcctgttccccgagccgctctccatc

SEQ ID NO: 51495 - RNA, 30 nt, synthetic construct
  misc_feature 1..30: note = Eukaryotic translation initiation factor 3 subunit E (218-227)
  source 1..30: mol_type = other RNA
agcctgttcgtgttcttcaaccaccccaag

SEQ ID NO: 51496 - RNA, 27 nt, synthetic construct
  misc_feature 1..27: note = Metalloproteinase inhibitor 3 (15-23)
  source 1..27: mol_type = other RNA
agcctgggcgactggggggccgaggcc

SEQ ID NO: 51497 - RNA, 27 nt, synthetic construct
  misc_feature 1..27: note = Ran GTPase-activating protein 1 (102-110)
  source 1..27: mol_type = other RNA
agcctgggcgaggggctcatcaccgcc

SEQ ID NO: 51498 - RNA, 30 nt, synthetic construct
  misc_feature 1..30: note = Homeobox protein SEBOX (201-210)
  source 1..30: mol_type = other RNA
agcctgggctccctcagcgacctgatctac

SEQ ID NO: 51499 - RNA, 27 nt, synthetic construct
  misc_feature 1..27: note = Nuclear receptor subfamily 4 group A member 1 (492-500)
  source 1..27: mol_type = other RNA
agcctgcactccctcctggtggacgtc

SEQ ID NO: 51500 - RNA, 27 nt, synthetic construct
  misc_feature 1..27: note = Carboxypeptidase M (303-311)
  source 1..27: mol_type = other RNA
agcctgatcgagtacatcaagcaggtg

SEQ ID NO: 51501 - RNA, 30 nt, synthetic construct
  misc_feature 1..30: note = Zinc finger FYVE domain-containing protein 16 (160-169)
  source 1..30: mol_type = other RNA
agcctgatcggcctcgacctgtccagcgtg

SEQ ID NO: 51502 - RNA, 27 nt, synthetic construct
  misc_feature 1..27: note = Src kinase-associated phosphoprotein 2 (47-55)
  source 1..27: mol_type = other RNA
agcctgatcaagaagatcaaggacgtg

SEQ ID NO: 51503 - RNA, 27 nt, synthetic construct
  misc_feature 1..27: note = Small glutamine-rich tetratricopeptide repeat-containing protein beta (33-41)
  source 1..27: mol_type = other RNA
agcctgatcaacaaccccgccttcatc

SEQ ID NO: 51504 - RNA, 27 nt, synthetic construct
  misc_feature 1..27: note = Anoctamin-4 (154-162)
  source 1..27: mol_type = other RNA
agcctgatcaactccgacatcatcttc

SEQ ID NO: 51505 - RNA, 30 nt, synthetic construct
  misc_feature 1..30: note = Anoctamin-4 (154-163)
  source 1..30: mol_type = other RNA
agcctgatcaactccgacatcatcttcgtg

SEQ ID NO: 51506 - RNA, 33 nt, synthetic construct
  misc_feature 1..33: note = Serine/threonine-protein kinase Sgk1 (451-461)
  source 1..33: mol_type = other RNA
agcctgatcaactgggacgacctcatcaacaag

SEQ ID NO: 51507 - RNA, 33 nt, synthetic construct
  misc_feature 1..33: note = Probable global transcription activator SNF2L1 (137-147)
  source 1..33: mol_type = other RNA
agcctgatctccgccggcgactaccgccaccgg

SEQ ID NO: 51508 - RNA, 27 nt, synthetic construct
  misc_feature 1..27: note = Lambda-crystallin homolog (73-81)
  source 1..27: mol_type = other RNA
agcctgatctccggctgccccaacatc

SEQ ID NO: 51509 - RNA, 30 nt, synthetic construct
  misc_feature 1..30: note = Alpha-aminoadipic semialdehyde dehydrogenase (196-205)
  source 1..30: mol_type = other RNA
agcctgatctccgtggccgtcaccaagatc

SEQ ID NO: 51510 - RNA, 30 nt, synthetic construct
  misc_feature 1..30: note = Endonuclease G, mitochondrial (288-297)
  source 1..30: mol_type = other RNA
agcctgaaggccatcaccgccggctccaag

SEQ ID NO: 51511 - RNA, 27 nt, synthetic construct
  misc_feature 1..27: note = Cysteine protease ATG4C (177-185)
  source 1..27: mol_type = other RNA
agcctgaaggagaccatcggcaagtac

SEQ ID NO: 51512 - RNA, 27 nt, synthetic construct
  misc_feature 1..27: note = DNA-directed RNA polymerase II subunit RPB11-a (99-107)
  source 1..27: mol_type = other RNA
agcctgctcgaggagcgcttccgggtg

SEQ ID NO: 51513 - RNA, 27 nt, synthetic construct
  misc_feature 1..27: note = Nuclear receptor subfamily 4 group A member 3 (230-238)
  source 1..27: mol_type = other RNA
agcctgctcggcgagtcccccagcctg

SEQ ID NO: 51514 - RNA, 27 nt, synthetic construct
  misc_feature 1..27: note = Protein naked cuticle homolog 1 (158-166)
  source 1..27: mol_type = other RNA
agcctgctccacaccatctacgaggtg

SEQ ID NO: 51515 - RNA, 30 nt, synthetic construct
  misc_feature 1..30: note = IL6ST nirs variant 1 (26-35)
  source 1..30: mol_type = other RNA
agcctgctcatcgccaagcagaacgtgacc

SEQ ID NO: 51516 - RNA, 27 nt, synthetic construct
  misc_feature 1..27: note = Protein transport protein Sec23A (156-164)
  source 1..27: mol_type = other RNA
agcctgctccccccgaccgccctggtg

SEQ ID NO: 51517 - RNA, 30 nt, synthetic construct
  misc_feature 1..30: note = E3 ubiquitin-protein ligase UBR1 (683-692)
  source 1..30: mol_type = other RNA
agcctgatggaccccaacaagttcctcctg

SEQ ID NO: 51518 - RNA, 36 nt, synthetic construct
  misc_feature 1..36: note = Abhydrolase domain-containing protein 2 (299-310)
  source 1..36: mol_type = other RNA
agcctgatgcagatcgacgacaacgtgatgcgcaag

SEQ ID NO: 51519 - RNA, 27 nt, synthetic construct
  misc_feature 1..27: note = Fatty acid synthase (1570-1578)
  source 1..27: mol_type = other RNA
agcctgaacttccgcgacatcatgctc

SEQ ID NO: 51520 - RNA, 27 nt, synthetic construct
  misc_feature 1..27: note = Putative segment polarity protein dishevelled homolog DVL1P1 (246-254)
  source 1..27: mol_type = other RNA
agcctgaacatcatcaccgtgaccctc

SEQ ID NO: 51521 - RNA, 45 nt, synthetic construct
  misc_feature 1..45: note = Integrin alpha-6 (599-613)
  source 1..45: mol_type = other RNA
agcctgcccgaggtgctcccgatcctgaactccgacgagcccaag

SEQ ID NO: 51522 - RNA, 36 nt, synthetic construct
  misc_feature 1..36: note = 60S ribosomal protein L38 (59-70)
  source 1..36: mol_type = other RNA
agcctgcccccgggcctcgccgtgaaggagctgaag

SEQ ID NO: 51523 - RNA, 27 nt, synthetic construct
  misc_feature 1..27: note = Transcription cofactor HES-6 (44-52)
  source 1..27: mol_type = other RNA
agcctgcaggagctccgcctgctgctc

SEQ ID NO: 51524 - RNA, 30 nt, synthetic construct
  misc_feature 1..30: note = Anaphase-promoting complex subunit 1 (60-69)
  source 1..30: mol_type = other RNA
agcctgcaggaggtgaccatccacgagaag

SEQ ID NO: 51525 - RNA, 27 nt, synthetic construct
  misc_feature 1..27: note = Nestin (24-32)
  source 1..27: mol_type = other RNA
agcctgcagaaggagaaccaggagctc

SEQ ID NO: 51526 - RNA, 33 nt, synthetic construct
  misc_feature 1..33: note = Uncharacterized protein C17orf98 (105-115)
  source 1..33: mol_type = other RNA
agcctgcagcaggtgaccggccacgaccactac

SEQ ID NO: 51527 - RNA, 27 nt, synthetic construct
  misc_feature 1..27: note = RING finger protein 10 (254-262)
  source 1..27: mol_type = other RNA
agcctgtccgagaagacctggagcaag

SEQ ID NO: 51528 - RNA, 27 nt, synthetic construct
  misc_feature 1..27: note = Putative ATP-dependent RNA helicase TDRD12 (1100-1108)
  source 1..27: mol_type = other RNA
agcctgtcccagacccccccgcgcgtg

SEQ ID NO: 51529 - RNA, 30 nt, synthetic construct
  misc_feature 1..30: note = Alpha-crystallin B chain (129-138)
  source 1..30: mol_type = other RNA
agcctgtccagcgacggcgtgctcaccgtc

SEQ ID NO: 51530 - RNA, 27 nt, synthetic construct
  misc_feature 1..27: note = PWWP domain-containing protein MUM1 (280-288)
  source 1..27: mol_type = other RNA
agcctgaccgcccccccggcccccgag

SEQ ID NO: 51531 - RNA, 30 nt, synthetic construct
  misc_feature 1..30: note = Probable ATP-dependent RNA helicase DHX40 (351-360)
  source 1..30: mol_type = other RNA
agcctgaccatcgacggcatccgctacgtg

SEQ ID NO: 51532 - RNA, 33 nt, synthetic construct
  misc_feature 1..33: note = Integrator complex subunit 7 (196-206)
  source 1..33: mol_type = other RNA
agcctggtggacacccccaagcagatccagctc

SEQ ID NO: 51533 - RNA, 30 nt, synthetic construct
  misc_feature 1..30: note = Transcobalamin-1 (223-232)
  source 1..30: mol_type = other RNA
agcctggtggagaagatcctctccgagaag

SEQ ID NO: 51534 - RNA, 33 nt, synthetic construct
  misc_feature 1..33: note = Vacuolar protein sorting-associated protein 41 homolog (618-628)
  source 1..33: mol_type = other RNA
agcctgtacgccgagtacgaccgccccaacctc

SEQ ID NO: 51535 - RNA, 33 nt, synthetic construct
  misc_feature 1..33: note = Spermine synthase (309-319)
  source 1..33: mol_type = other RNA
agcctgtacgaggagcagctcggccgcctgtac

SEQ ID NO: 51536 - RNA, 33 nt, synthetic construct
  misc_feature 1..33: note = General transcription factor 3C polypeptide 3 (259-269)
  source 1..33: mol_type = other RNA
agcctgtacgagcagatgggcgaccacaagatg

SEQ ID NO: 51537 - RNA, 27 nt, synthetic construct
  misc_feature 1..27: note = COP9 signalosome complex subunit 3 (281-289)
  source 1..27: mol_type = other RNA
agcctgtacaagaagaacatccagcgc

SEQ ID NO: 51538 - RNA, 30 nt, synthetic construct
  misc_feature 1..30: note = P2X purinoceptor 7 (286-295)
  source 1..30: mol_type = other RNA
agcctgtaccccggctacaacttccgctac

SEQ ID NO: 51539 - RNA, 27 nt, synthetic construct
  misc_feature 1..27: note = Death-inducer obliterator 1 (1135-1143)
  source 1..27: mol_type = other RNA
agcctgtactcctacttcagctcccgc

SEQ ID NO: 51540 - RNA, 30 nt, synthetic construct
  misc_feature 1..30: note = Protein prune homolog 2 (269-278)
  source 1..30: mol_type = other RNA
agcctgtacaccgaggacatgacccagaag

SEQ ID NO: 51541 - RNA, 27 nt, synthetic construct
  misc_feature 1..27: note = Protein argonaute-2 (566-574)
  source 1..27: mol_type = other RNA
agcatggacgcccaccccaaccgctac

SEQ ID NO: 51542 - RNA, 27 nt, synthetic construct
  misc_feature 1..27: note = Protein argonaute-1 (615-623)
  source 1..27: mol_type = other RNA
agcatggacgcccacccctcccgctac

SEQ ID NO: 51543 - RNA, 27 nt, synthetic construct
  misc_feature 1..27: note = 5,6-dihydroxyindole-2-carboxylic acid oxidase (506-514)
  source 1..27: mol_type = other RNA
agcatggacgaggccaaccagcccctg

SEQ ID NO: 51544 - RNA, 30 nt, synthetic construct
  misc_feature 1..30: note = Kinesin-like protein KIF13A (63-72)
  source 1..30: mol_type = other RNA
agcatggacgagtccaacaccaccaagtac

SEQ ID NO: 51545 - RNA, 27 nt, synthetic construct
  misc_feature 1..27: note = Protein argonaute-4 (609-617)
  source 1..27: mol_type = other RNA
agcatggacggccacccctcccgctac

SEQ ID NO: 51546 - RNA, 27 nt, synthetic construct
  misc_feature 1..27: note = Serine-protein kinase ATM (2549-2557)
  source 1..27: mol_type = other RNA
agcatggaccacccccaccacaccctg

SEQ ID NO: 51547 - RNA, 27 nt, synthetic construct
  misc_feature 1..27: note = V-type proton ATPase 116 kDa subunit a isoform 3 (340-348)
  source 1..27: mol_type = other RNA
agcatggaggagggcgtgtccgccgtc

SEQ ID NO: 51548 - RNA, 36 nt, synthetic construct
  misc_feature 1..36: note = RNA-binding protein EWS (350-361)
  source 1..36: mol_type = other RNA
agcatgttcggctcccccgggggcctgcgcgaggcc

SEQ ID NO: 51549 - RNA, 33 nt, synthetic construct
  misc_feature 1..33: note = Ribosome-binding protein 1 (32-42)
  source 1..33: mol_type = other RNA
agcatgaaggagacctcctacgaggaggccctg

SEQ ID NO: 51550 - RNA, 30 nt, synthetic construct
  misc_feature 1..30: note = Caprin-1 (376-385)
  source 1..30: mol_type = other RNA
agcatgctggacttcgagaaccagaccctc

SEQ ID NO: 51551 - RNA, 27 nt, synthetic construct
  misc_feature 1..27: note = Protein GREB1 (500-508)
  source 1..27: mol_type = other RNA
agcatgctgggcgaggagatccagctc

SEQ ID NO: 51552 - RNA, 27 nt, synthetic construct
  misc_feature 1..27: note = Cystine/glutamate transporter (330-338)
  source 1..27: mol_type = other RNA
agcatgaacggcggggtgttcgccgtc

SEQ ID NO: 51553 - RNA, 30 nt, synthetic construct
  misc_feature 1..30: note = Myosin-10 (371-380)
  source 1..30: mol_type = other RNA
agcatgcccgagaacaccgtggcccagaag

SEQ ID NO: 51554 - RNA, 27 nt, synthetic construct
  misc_feature 1..27: note = T-complex protein 1 subunit alpha (155-163)
  source 1..27: mol_type = other RNA
agcatgtccagcaagatcatcggcatc

SEQ ID NO: 51555 - RNA, 30 nt, synthetic construct
  misc_feature 1..30: note = Liprin-alpha-1 (1169-1178)
  source 1..30: mol_type = other RNA
agcatgtccagcccctccatgcagccgaag

SEQ ID NO: 51556 - RNA, 27 nt, synthetic construct
  misc_feature 1..27: note = Protein PAT1 homolog 1 (499-507)
  source 1..27: mol_type = other RNA
agcatgtacgacaacctgcgcggcaag

SEQ ID NO: 51557 - RNA, 45 nt, synthetic construct
  misc_feature 1..45: note = Heterogeneous nuclear ribonucleoprotein A1-like 2 (99-113)
  source 1..45: mol_type = other RNA
agcaacttcggcgggggcgggtcctacaacgacttcggcaactac

SEQ ID NO: 51558 - RNA, 27 nt, synthetic construct
  misc_feature 1..27: note = Catenin beta-1 (605-613)
  source 1..27: mol_type = other RNA
agccccatcgagaacatccagcgcgtg

SEQ ID NO: 51559 - RNA, 27 nt, synthetic construct
  misc_feature 1..27: note = Pleckstrin homology-like domain family A member 2 (42-50)
  source 1..27: mol_type = other RNA
agcccccgcgcccggccgaaggagctg

SEQ ID NO: 51560 - RNA, 30 nt, synthetic construct
  misc_feature 1..30: note = Clathrin heavy chain 1 (1427-1436)
  source 1..30: mol_type = other RNA
agcccccgcctggaccacacccgggccgtg

SEQ ID NO: 51561 - RNA, 39 nt, synthetic construct
  misc_feature 1..39: note = Arginine/serine-rich protein 1 (18-30)
  source 1..39: mol_type = other RNA
agcccctccaccagccgctccggcgggagctcccggctg

SEQ ID NO: 51562 - RNA, 27 nt, synthetic construct
  misc_feature 1..27: note = Disabled homolog 2 (471-479)
  source 1..27: mol_type = other RNA
agccccaccggccagccgaccgccctg

SEQ ID NO: 51563 - RNA, 45 nt, synthetic construct
  misc_feature 1..45: note = Transgelin-2 (185-199)
  source 1..45: mol_type = other RNA
agccaggccggcatgaccgggtacggcatgccccgccagatcctg

SEQ ID NO: 51564 - RNA, 27 nt, synthetic construct
  misc_feature 1..27: note = Transmembrane protein 8A (50-58)
  source 1..27: mol_type = other RNA
agccaggccccccagcgcctgtccttc

SEQ ID NO: 51565 - RNA, 27 nt, synthetic construct
  misc_feature 1..27: note = Serine/threonine-protein phosphatase 4 regulatory subunit 2 (5-13)
  source 1..27: mol_type = other RNA
agccagttcaagggctacttcatcttc

SEQ ID NO: 51566 - RNA, 36 nt, synthetic construct
  misc_feature 1..36: note = Copine-8 (260-271)
  source 1..36: mol_type = other RNA
agccagttcaacgtgtacgaggtcgtgaaccccaag

SEQ ID NO: 51567 - RNA, 30 nt, synthetic construct
  misc_feature 1..30: note = Transmembrane protein 131 (402-411)
  source 1..30: mol_type = other RNA
agccagttctccggcaagatcaccgtgaag

SEQ ID NO: 51568 - RNA, 27 nt, synthetic construct
  misc_feature 1..27: note = Ragulator complex protein LAMTOR1 (73-81)
  source 1..27: mol_type = other RNA
agccagggcatggagcagcacgagtac

SEQ ID NO: 51569 - RNA, 39 nt, synthetic construct
  misc_feature 1..39: note = Catenin alpha-1 (268-280)
  source 1..39: mol_type = other RNA
agccagcaccagggcgggggcgggggcgagctggcctac

SEQ ID NO: 51570 - RNA, 27 nt, synthetic construct
  misc_feature 1..27: note = Protein NPAT (417-425)
  source 1..27: mol_type = other RNA
agccagatctccaccagcatccagaag

SEQ ID NO: 51571 - RNA, 27 nt, synthetic construct
  misc_feature 1..27: note = A-kinase anchor protein 9 (687-695)
  source 1..27: mol_type = other RNA
agccagaagatcgagaccatgcagttc

SEQ ID NO: 51572 - RNA, 33 nt, synthetic construct
  misc_feature 1..33: note = TSC22 domain family protein 1 (1018-1028)
  source 1..33: mol_type = other RNA
agccagctggagcaggagaacaacctcctgaag

SEQ ID NO: 51573 - RNA, 27 nt, synthetic construct
  misc_feature 1..27: note = Tubulin-specific chaperone E (124-132)
  source 1..27: mol_type = other RNA
agccagctgtccaagctccaggaggtg

SEQ ID NO: 51574 - RNA, 30 nt, synthetic construct
  misc_feature 1..30: note = Phosphatidylinositol-binding clathrin assembly protein (520-529)
  source 1..30: mol_type = other RNA
agccagaaccagaacctgcccgtggccaag

SEQ ID NO: 51575 - RNA, 30 nt, synthetic construct
  misc_feature 1..30: note = Heat shock protein HSP 90-alpha (575-584)
  source 1..30: mol_type = other RNA
agccagaaccgcaagaagctgtccgagctc

SEQ ID NO: 51576 - RNA, 27 nt, synthetic construct
  misc_feature 1..27: note = Clathrin interactor 1 (459-467)
  source 1..27: mol_type = other RNA
agccagaacaccgacatggtgcagaag

SEQ ID NO: 51577 - RNA, 27 nt, synthetic construct
  misc_feature 1..27: note = Rotatin (918-926)
  source 1..27: mol_type = other RNA
agccagcagtccagcctgctcaccgtg

SEQ ID NO: 51578 - RNA, 45 nt, synthetic construct
  misc_feature 1..45: note = Cold-inducible RNA-binding protein (146-160)
  source 1..45: mol_type = other RNA
agccagtccggcgggtacagcgaccgctccagcggcgggtcctac

SEQ ID NO: 51579 - RNA, 24 nt, synthetic construct
  misc_feature 1..24: note = Neuron navigator 2 (999-1006)
  source 1..24: mol_type = other RNA
agccaggtggagcgcaactccctg

SEQ ID NO: 51580 - RNA, 30 nt, synthetic construct
  misc_feature 1..30: note = Microtubule-actin cross-linking factor 1 (2589-2598)
  source 1..30: mol_type = other RNA
agccaggtgcagaaggagctgcagtccatc

SEQ ID NO: 51581 - RNA, 30 nt, synthetic construct
  misc_feature 1..30: note = Rho GTPase-activating protein 5 (922-931)
  source 1..30: mol_type = other RNA
agccagtaccaccgccagaccgaggtgttc

SEQ ID NO: 51582 - RNA, 30 nt, synthetic construct
  misc_feature 1..30: note = Histone-lysine N-methyltransferase setd3 (208-217)
  source 1..30: mol_type = other RNA
agccagtacaagaacaccgcccgccagtac

SEQ ID NO: 51583 - RNA, 27 nt, synthetic construct
  misc_feature 1..27: note = Protein unc-45 homolog A (578-586)
  source 1..27: mol_type = other RNA
agccgcctggaggagcggtccgtgctc

SEQ ID NO: 51584 - RNA, 51 nt, synthetic construct
  misc_feature 1..51: note = ELL-associated factor 1 (232-248)
  source 1..51: mol_type = other RNA
agccgccccgccgtggccaacggcacctcccggccgcaggggagcaaccag

SEQ ID NO: 51585 - RNA, 51 nt, synthetic construct
  misc_feature 1..51: note = Cold-inducible RNA-binding protein (144-160)
  source 1..51: mol_type = other RNA
agccgctcccagagcggcgggtactccgaccggagctccggcgggagctac

SEQ ID NO: 51586 - RNA, 27 nt, synthetic construct
  misc_feature 1..27: note = Phosphatase and actin regulator (216-224)
  source 1..27: mol_type = other RNA
agctccgccaagcccggcccggccctg

SEQ ID NO: 51587 - RNA, 30 nt, synthetic construct
  misc_feature 1..30: note = LIM domain-binding protein 3 (265-274)
  source 1..30: mol_type = other RNA
agctccgcccccgccacccacaccagctac

SEQ ID NO: 51588 - RNA, 27 nt, synthetic construct
  misc_feature 1..27: note = Serine incorporator 5 (337-345)
  source 1..27: mol_type = other RNA
agctccgacgccctgcagggccgctac

SEQ ID NO: 51589 - RNA, 30 nt, synthetic construct
  misc_feature 1..30: note = F-box-like/WD repeat-containing protein TBL1XR1 (4-13)
  source 1..30: mol_type = other RNA
agctccgacgaggtgaacttcctggtctac

SEQ ID NO: 51590 - RNA, 30 nt, synthetic construct
  misc_feature 1..30: note = Poly (ADP-ribose) polymerase 1 (4-13)
  source 1..30: mol_type = other RNA
agctccgacaagctgtaccgcgtggagtac

SEQ ID NO: 51591 - RNA, 27 nt, synthetic construct
  misc_feature 1..27: note = ATP-dependent RNA helicase DDX18 (602-610)
  source 1..27: mol_type = other RNA
agctccgacagccgccagttctcccac

SEQ ID NO: 51592 - RNA, 27 nt, synthetic construct
  misc_feature 1..27: note = Heterogeneous nuclear ribonucleoprotein H2 (441-449)
  source 1..27: mol_type = other RNA
agctccgactaccagagcaacctggcc

SEQ ID NO: 51593 - RNA, 33 nt, synthetic construct
  misc_feature 1..33: note = Tyrosinase (146-156)
  source 1..33: mol_type = other RNA
agctccgactacgtgatccccatcggcacctac

SEQ ID NO: 51594 - RNA, 27 nt, synthetic construct
  misc_feature 1..27: note = Nesprin-2 (2105-2113)
  source 1..27: mol_type = other RNA
agctccgaggcccccctggtgcagaag

SEQ ID NO: 51595 - RNA, 33 nt, synthetic construct
  misc_feature 1..33: note = Osteopontin (26-36)
  source 1..33: mol_type = other RNA
agctccgaggagaagcagctgtacaacaagtac

SEQ ID NO: 51596 - RNA, 27 nt, synthetic construct
  misc_feature 1..27: note = Carbohydrate sulfotransferase 11 (323-331)
  source 1..27: mol_type = other RNA
agctccgagcaccagacccagctgtac

SEQ ID NO: 51597 - RNA, 30 nt, synthetic construct
  misc_feature 1..30: note = Serine/threonine-protein kinase PLK2 (666-675)
  source 1..30: mol_type = other RNA
agctccgagctgaagaaccgcatggagtac

SEQ ID NO: 51598 - RNA, 27 nt, synthetic construct
  misc_feature 1..27: note = Neuron navigator 2 (1837-1845)
  source 1..27: mol_type = other RNA
agctccttcaagcaggccttcggcaag

SEQ ID NO: 51599 - RNA, 27 nt, synthetic construct
  misc_feature 1..27: note = Protein GREB1 (296-304)
  source 1..27: mol_type = other RNA
agctccttccgccccctgctcagcaag

SEQ ID NO: 51600 - RNA, 42 nt, synthetic construct
  misc_feature 1..42: note = Keratin, type I cytoskeletal 10 (370-383)
  source 1..42: mol_type = other RNA
agctccggcagcgtgggggagtccagctccaagggcccccgc

SEQ ID NO: 51601 - RNA, 24 nt, synthetic construct
  misc_feature 1..24: note = Olfactory receptor 52E1 (66-73)
  source 1..24: mol_type = other RNA
agctccatcgaccccggcctgagc

SEQ ID NO: 51602 - RNA, 27 nt, synthetic construct
  misc_feature 1..27: note = E3 ubiquitin-protein ligase HUWE1 (114-122)
  source 1..27: mol_type = other RNA
agctccatcgagcacctgaccaccctc

SEQ ID NO: 51603 - RNA, 27 nt, synthetic construct
  misc_feature 1..27: note = Zinc finger FYVE domain-containing protein 16 (841-849)
  source 1..27: mol_type = other RNA
agctccatccccagcccggccaccctg

SEQ ID NO: 51604 - RNA, 36 nt, synthetic construct
  misc_feature 1..36: note = HBS1-like protein (521-532)
  source 1..36: mol_type = other RNA
agctccaagctgggcaagaacagcaacttcgccaag

SEQ ID NO: 51605 - RNA, 33 nt, synthetic construct
  misc_feature 1..33: note = Zinc finger protein 43 (404-414)
  source 1..33: mol_type = other RNA
agctccaagctgaccgagcacaagctcacccac

SEQ ID NO: 51606 - RNA, 33 nt, synthetic construct
  misc_feature 1..33: note = RalBP1-associated Eps domain-containing protein 1 (509-519)
  source 1..33: mol_type = other RNA
agctccctggacatgaaccgcaccttcaccgtg

SEQ ID NO: 51607 - RNA, 33 nt, synthetic construct
  misc_feature 1..33: note = Chromodomain-helicase-DNA-binding protein 9 (261-271)
  source 1..33: mol_type = other RNA
agctccctggaggagaacctcctgcaccaggtg

SEQ ID NO: 51608 - RNA, 33 nt, synthetic construct
  misc_feature 1..33: note = Spectrin beta chain, non-erythrocytic 1 (1556-1566)
  source 1..33: mol_type = other RNA
agctccctgagcgccgaggccatccgccagcgg

SEQ ID NO: 51609 - RNA, 33 nt, synthetic construct
  misc_feature 1..33: note = Eukaryotic translation initiation factor 3 subunit C-like protein (15-25)
  source 1..33: mol_type = other RNA
agctccctgagcggcgaggagctcgtgaccaag

SEQ ID NO: 51610 - RNA, 30 nt, synthetic construct
  misc_feature 1..30: note = COMM domain-containing protein 10 (123-132)
  source 1..30: mol_type = other RNA
agctccatgggccaggagaccgtggagaag

SEQ ID NO: 51611 - RNA, 33 nt, synthetic construct
  misc_feature 1..33: note = Liprin-alpha-1 (1168-1178)
  source 1..33: mol_type = other RNA
agctccatgagctcccccagcatgcagccgaag

SEQ ID NO: 51612 - RNA, 27 nt, synthetic construct
  misc_feature 1..27: note = Exostosin-2 (52-60)
  source 1..27: mol_type = other RNA
agctccaacgactggaacgtggagaag

SEQ ID NO: 51613 - RNA, 42 nt, synthetic construct
  misc_feature 1..42: note = Membrane magnesium transporter 1 (109-122)
  source 1..42: mol_type = other RNA
agctccaaccaggacgccctgagctccaacaccagcctcaag

SEQ ID NO: 51614 - RNA, 51 nt, synthetic construct
  misc_feature 1..51: note = Vimentin (55-71)
  source 1..51: mol_type = other RNA
agctcccccggcggggtgtacgccacccgcagctccgccgtccggctgcgc

SEQ ID NO: 51615 - RNA, 27 nt, synthetic construct
  misc_feature 1..27: note = Coatomer subunit gamma-1 (297-305)
  source 1..27: mol_type = other RNA
agctcccccaaggccgccctgcgctac

SEQ ID NO: 51616 - RNA, 27 nt, synthetic construct
  misc_feature 1..27: note = RING finger protein 10 (486-494)
  source 1..27: mol_type = other RNA
agctcccagcaggagcccatcaccaag

SEQ ID NO: 51617 - RNA, 27 nt, synthetic construct
  misc_feature 1..27: note = FERM domain-containing protein 4A (829-837)
  source 1..27: mol_type = other RNA
agctcccagtaccgcatcaaggagtac

SEQ ID NO: 51618 - RNA, 39 nt, synthetic construct
  misc_feature 1..39: note = Chondroitin sulfate proteoglycan 4 (1608-1620)
  source 1..39: mol_type = other RNA
agctccagcgccggcaccgacccccagctgctcctgtac

SEQ ID NO: 51619 - RNA, 27 nt, synthetic construct
  misc_feature 1..27: note = Ankyrin-2 (960-968)
  source 1..27: mol_type = other RNA
agctccagccccatccactccggcttc

SEQ ID NO: 51620 - RNA, 36 nt, synthetic construct
  misc_feature 1..36: note = Reticulon-4 (429-440)
  source 1..36: mol_type = other RNA
agctccagccccctggaggcctccagcgtgaactac

SEQ ID NO: 51621 - RNA, 27 nt, synthetic construct
  misc_feature 1..27: note = Histone acetyltransferase KAT6A (999-1007)
  source 1..27: mol_type = other RNA
agctccagccccccgatcctgaccaag

SEQ ID NO: 51622 - RNA, 27 nt, synthetic construct
  misc_feature 1..27: note = Heterogeneous nuclear ribonucleoprotein U-like protein 1 (97-105)
  source 1..27: mol_type = other RNA
agctccagccgccccatcgtgcagaag

SEQ ID NO: 51623 - RNA, 42 nt, synthetic construct
  misc_feature 1..42: note = Retinoic acid-induced protein 1 (223-236)
  source 1..42: mol_type = other RNA
agctccagcgtgcagggcgggggccagggggcccactcctac

SEQ ID NO: 51624 - RNA, 36 nt, synthetic construct
  misc_feature 1..36: note = Helicase-like transcription factor (446-457)
  source 1..36: mol_type = other RNA
agctccgtgcccaccaccaagaagaagatgctgaag

SEQ ID NO: 51625 - RNA, 27 nt, synthetic construct
  misc_feature 1..27: note = Loss of heterozygosity 12 chromosomal region 1 protein (18-26)
  source 1..27: mol_type = other RNA
agctccgtgacccccagcccggccaag

SEQ ID NO: 51626 - RNA, 27 nt, synthetic construct
  misc_feature 1..27: note = Ral GTPase-activating protein subunit beta (647-655)
  source 1..27: mol_type = other RNA
agctcctacgacaagcccatcaccttc

SEQ ID NO: 51627 - RNA, 27 nt, synthetic construct
  misc_feature 1..27: note = Protein kinase C and casein kinase substrate in neurons protein 2 (345-353)
  source 1..27: mol_type = other RNA
agctcctacgagaagacccagagctac

SEQ ID NO: 51628 - RNA, 27 nt, synthetic construct
  misc_feature 1..27: note = CD99 antigen-like protein 2 (60-68)
  source 1..27: mol_type = other RNA
agctcctacatcagctaccagcagaag

SEQ ID NO: 51629 - RNA, 27 nt, synthetic construct
  misc_feature 1..27: note = U4/U6 small nuclear ribonucleoprotein Prp31 (226-234)
  source 1..27: mol_type = other RNA
agcaccgccgccaagatcatgggcgtg

SEQ ID NO: 51630 - RNA, 42 nt, synthetic construct
  misc_feature 1..42: note = Heterogeneous nuclear ribonucleoprotein H (363-376)
  source 1..42: mol_type = other RNA
agcaccgccggcgcctccgggggcgcgtacgagcaccgctac

SEQ ID NO: 51631 - RNA, 39 nt, synthetic construct
  misc_feature 1..39: note = Heterogeneous nuclear ribonucleoprotein H (363-375)
  source 1..39: mol_type = other RNA
agcaccgccggcgcctccgggggcgcgtacgggagccag

SEQ ID NO: 51632 - RNA, 27 nt, synthetic construct
  misc_feature 1..27: note = Complement component 1 Q subcomponent-binding protein, mitochondrial (175-183)
  source 1..27: mol_type = other RNA
agcaccgccctggagcaccaggagtac

SEQ ID NO: 51633 - RNA, 30 nt, synthetic construct
  misc_feature 1..30: note = JmjC domain-containing protein 8 (89-98)
  source 1..30: mol_type = other RNA
agcaccgccaacacctactcctaccacaag

SEQ ID NO: 51634 - RNA, 36 nt, synthetic construct
  misc_feature 1..36: note = Transcription initiation factor TFIID subunit 6 (584-595)
  source 1..36: mol_type = other RNA
agcaccgccccctccggcccggggagcgtgcagaag

SEQ ID NO: 51635 - RNA, 30 nt, synthetic construct
  misc_feature 1..30: note = IQ motif and SEC7 domain-containing protein 2 (10-19)
  source 1..30: mol_type = other RNA
agcaccgcctcccacaccctgcaccagtac

SEQ ID NO: 51636 - RNA, 27 nt, synthetic construct
  misc_feature 1..27: note = 116 kDa U5 small nuclear ribonucleoprotein component (483-491)
  source 1..27: mol_type = other RNA
agcaccgacgacggcgtgcagttccac

SEQ ID NO: 51637 - RNA, 24 nt, synthetic construct
  misc_feature 1..24: note = Neuropilin-2 (829-836)
  source 1..24: mol_type = other RNA
agcaccgacaaggagaagtcctgg

SEQ ID NO: 51638 - RNA, 30 nt, synthetic construct
  misc_feature 1..30: note = Immunoglobulin superfamily member 3 (124-133)
  source 1..30: mol_type = other RNA
agcaccgacaagcagtacttcggctcctac

SEQ ID NO: 51639 - RNA, 30 nt, synthetic construct
  misc_feature 1..30: note = Transcription initiation factor TFIID subunit 7-like (113-122)
  source 1..30: mol_type = other RNA
agcaccgaccccaacatcgtgcgcaagaag

SEQ ID NO: 51640 - RNA, 33 nt, synthetic construct
  misc_feature 1..33: note = Transcription factor HES-1 (101-111)
  source 1..33: mol_type = other RNA
agcaccgacccctccgtgctgggcaagtaccgc

SEQ ID NO: 51641 - RNA, 39 nt, synthetic construct
  misc_feature 1..39: note = RNA-binding protein FUS (44-56)
  source 1..39: mol_type = other RNA
agcaccgacacctccggctacgggcagagctcctacagc

SEQ ID NO: 51642 - RNA, 30 nt, synthetic construct
  misc_feature 1..30: note = Latent-transforming growth factor beta-binding protein 2 (1572-1581)
  source 1..30: mol_type = other RNA
agcaccgaggacctgcccgaccacgacatc

SEQ ID NO: 51643 - RNA, 33 nt, synthetic construct
  misc_feature 1..33: note = Baculoviral IAP repeat-containing protein 6 (2019-2029)
  source 1..33: mol_type = other RNA
agcaccgagcagctgcgcaccatcatccggtac

SEQ ID NO: 51644 - RNA, 27 nt, synthetic construct
  misc_feature 1..27: note = Cathepsin L1 (287-295)
  source 1..27: mol_type = other RNA
agcaccgagtccgacaacaacaagtac

SEQ ID NO: 51645 - RNA, 42 nt, synthetic construct
  misc_feature 1..42: note = DNA-dependent protein kinase catalytic subunit (1861-1874)
  source 1..42: mol_type = other RNA
agcaccttcgacacccagatcacgaagaagatgggctactac

SEQ ID NO: 51646 - RNA, 33 nt, synthetic construct
  misc_feature 1..33: note = Zinc finger protein 280B (174-184)
  source 1..33: mol_type = other RNA
agcaccttcgaggtgaactccatcaaccccaag

SEQ ID NO: 51647 - RNA, 27 nt, synthetic construct
  misc_feature 1..27: note = Brain-specific angiogenesis inhibitor 1-associated protein 2-like protein 1 (460-468)
  source 1..27: mol_type = other RNA
agcaccttcaaggcccccgcctccaag

SEQ ID NO: 51648 - RNA, 30 nt, synthetic construct
  misc_feature 1..30: note = Sex comb on midleg-like protein 4 (11-20)
  source 1..30: mol_type = other RNA
agcaccttcaaccaccgcggctccctgcac

SEQ ID NO: 51649 - RNA, 27 nt, synthetic construct
  misc_feature 1..27: note = Transmembrane emp24 domain-containing protein 3 (107-115)
  source 1..27: mol_type = other RNA
agcaccttctcccacaagaccgtgtac

SEQ ID NO: 51650 - RNA, 27 nt, synthetic construct
  misc_feature 1..27: note = Alstrom syndrome protein 1 (1095-1103)
  source 1..27: mol_type = other RNA
agcaccttctactcccagcgcgagaag

SEQ ID NO: 51651 - RNA, 30 nt, synthetic construct
  misc_feature 1..30: note = Protein FAM91A1 (429-438)
  source 1..30: mol_type = other RNA
agcaccggcgagggggaggcccagcgctac

SEQ ID NO: 51652 - RNA, 27 nt, synthetic construct
  misc_feature 1..27: note = N-acetylglucosamine-1-phosphodiester alpha-N-acetylglucosaminidase (4-12)
  source 1..27: mol_type = other RNA
agcaccggccgctggctgctcctgcgg

SEQ ID NO: 51653 - RNA, 27 nt, synthetic construct
  misc_feature 1..27: note = Vacuolar protein sorting-associated protein 16 homolog (322-330)
  source 1..27: mol_type = other RNA
agcacccacgagttcctgcacgaggtg

SEQ ID NO: 51654 - RNA, 27 nt, synthetic construct
  misc_feature 1..27: note = Bifunctional lysine-specific demethylase and histidyl-hydroxylase MINA (251-259)
  source 1..27: mol_type = other RNA
agcacccacgtgaccatctccacgtac

SEQ ID NO: 51655 - RNA, 30 nt, synthetic construct
  misc_feature 1..30: note = Clathrin interactor 1 (210-219)
  source 1..30: mol_type = other RNA
agcaccatcgacgacaccatctccaagttc

SEQ ID NO: 51656 - RNA, 27 nt, synthetic construct
  misc_feature 1..27: note = Prolyl 4-hydroxylase subunit alpha-1 (200-208)
  source 1..27: mol_type = other RNA
agcaccatcgacaaggtgtccgtcctg

SEQ ID NO: 51657 - RNA, 30 nt, synthetic construct
  misc_feature 1..30: note = EPB41 protein (372-381)
  source 1..30: mol_type = other RNA
agcaccatcggcttcaagctgccctcctac

SEQ ID NO: 51658 - RNA, 27 nt, synthetic construct
  misc_feature 1..27: note = Calcium-independent phospholipase A2-gamma (310-318)
  source 1..27: mol_type = other RNA
agcaccaagcagtccatcgccaacttc

SEQ ID NO: 51659 - RNA, 27 nt, synthetic construct
  misc_feature 1..27: note = Kanadaptin (547-555)
  source 1..27: mol_type = other RNA
agcaccctggacggcgtgtcccgcaag

SEQ ID NO: 51660 - RNA, 30 nt, synthetic construct
  misc_feature 1..30: note = Serologically defined colon cancer antigen 8 (8-17)
  source 1..30: mol_type = other RNA
agcaccctggaggagatcctcggccagtac

SEQ ID NO: 51661 - RNA, 27 nt, synthetic construct
  misc_feature 1..27: note = Serine-protein kinase ATM (934-942)
  source 1..27: mol_type = other RNA
agcaccctggagcccaccaagtccctc

SEQ ID NO: 51662 - RNA, 33 nt, synthetic construct
  misc_feature 1..33: note = DNA-directed RNA polymerase I subunit RPA1 (376-386)
  source 1..33: mol_type = other RNA
agcaccctgcccggccagtccctcatcgacaag

SEQ ID NO: 51663 - RNA, 27 nt, synthetic construct
  misc_feature 1..27: note = Myb-related protein B (600-608)
  source 1..27: mol_type = other RNA
agcaccctgcccaagtccctcagcctg

SEQ ID NO: 51664 - RNA, 30 nt, synthetic construct
  misc_feature 1..30: note = Zinc finger protein 212 (21-30)
  source 1..30: mol_type = other RNA
agcaccctgccctcccaggccaccgagaag

SEQ ID NO: 51665 - RNA, 39 nt, synthetic construct
  misc_feature 1..39: note = Myelin basic protein (20-32)
  source 1..39: mol_type = other RNA
agcaccatggaccacgcccgccacggcttcctgccccgg

SEQ ID NO: 51666 - RNA, 27 nt, synthetic construct
  misc_feature 1..27: note = Coatomer subunit gamma-1 (134-142)
  source 1..27: mol_type = other RNA
agcaccatgctgcaggccatcgagcgc

SEQ ID NO: 51667 - RNA, 27 nt, synthetic construct
  misc_feature 1..27: note = SHC SH2 domain-binding protein 1 (299-307)
  source 1..27: mol_type = other RNA
agcaccatgatggccggcctgctccgc

SEQ ID NO: 51668 - RNA, 27 nt, synthetic construct
  misc_feature 1..27: note = Forkhead box protein O1 (544-552)
  source 1..27: mol_type = other RNA
agcaccatgccccacacctccggcatg

SEQ ID NO: 51669 - RNA, 27 nt, synthetic construct
  misc_feature 1..27: note = Transmembrane protein 248 (87-95)
  source 1..27: mol_type = other RNA
agcaccatgacctccggccaggcccgc

SEQ ID NO: 51670 - RNA, 27 nt, synthetic construct
  misc_feature 1..27: note = Calcium uptake protein 1, mitochondrial (122-130)
  source 1..27: mol_type = other RNA
agcacccccgacaagatcttccgctac

SEQ ID NO: 51671 - RNA, 30 nt, synthetic construct
  misc_feature 1..30: note = C-Jun-amino-terminal kinase-interacting protein 4 (350-359)
  source 1..30: mol_type = other RNA
agcacccccaccaagggcatcgagaacaag

SEQ ID NO: 51672 - RNA, 27 nt, synthetic construct
  misc_feature 1..27: note = Transcription elongation factor A protein 1 (135-143)
  source 1..27: mol_type = other RNA
agcacctccgacagcgtgcgcctgaag

SEQ ID NO: 51673 - RNA, 30 nt, synthetic construct
  misc_feature 1..30: note = LisH domain-containing protein ARMC9 (382-391)
  source 1..30: mol_type = other RNA
agcacctccgacgtggtccgccagtacatg

SEQ ID NO: 51674 - RNA, 33 nt, synthetic construct
  misc_feature 1..33: note = Endoplasmin (187-197)
  source 1..33: mol_type = other RNA
agcacctccgagctgatcggccagttcggggtg

SEQ ID NO: 51675 - RNA, 27 nt, synthetic construct
  misc_feature 1..27: note = Enhancer of mRNA-decapping protein 4 (165-173)
  source 1..27: mol_type = other RNA
agcacctccgagcgcaccctgctcaag

SEQ ID NO: 51676 - RNA, 27 nt, synthetic construct
  misc_feature 1..27: note = Versican core protein (1942-1950)
  source 1..27: mol_type = other RNA
agcaccgtgtcccaccccatcgccaag

SEQ ID NO: 51677 - RNA, 27 nt, synthetic construct
  misc_feature 1..27: note = E3 ubiquitin-protein ligase ZNRF1 (95-103)
  source 1..27: mol_type = other RNA
agcacctacgcccacggcaacgggtac

SEQ ID NO: 51678 - RNA, 39 nt, synthetic construct
  misc_feature 1..39: note = Epithelial discoidin domain-containing receptor 1 (213-225)
  source 1..39: mol_type = other RNA
agcacctacgacggccacaccgtggggggcctgcagtac

SEQ ID NO: 51679 - RNA, 30 nt, synthetic construct
  misc_feature 1..30: note = Regulator of microtubule dynamics protein 1 (239-248)
  source 1..30: mol_type = other RNA
agcacctacgagaaggccctgggctacttc

SEQ ID NO: 51680 - RNA, 27 nt, synthetic construct
  misc_feature 1..27: note = Zinc finger protein 627 (490-498)
  source 1..27: mol_type = other RNA
agcacctacttccgcgtgcacgagaag

SEQ ID NO: 51681 - RNA, 33 nt, synthetic construct
  misc_feature 1..33: note = Heat shock protein HSP 90-alpha (724-734)
  source 1..33: mol_type = other RNA
agcacctacggctggaccgccaacatggagcgc

SEQ ID NO: 51682 - RNA, 27 nt, synthetic construct
  misc_feature 1..27: note = Phosphomevalonate kinase (66-74)
  source 1..27: mol_type = other RNA
agcacctacaaggaggccttccgcaag

SEQ ID NO: 51683 - RNA, 33 nt, synthetic construct
  misc_feature 1..33: note = Acid ceramidase (33-43)
  source 1..33: mol_type = other RNA
agcacctaccccccgtccggccccacctaccgc

SEQ ID NO: 51684 - RNA, 33 nt, synthetic construct
  misc_feature 1..33: note = Mitochondrial basic amino acids transporter (140-150)
  source 1..33: mol_type = other RNA
agcacctaccccgtggacgtcgtgaagtcccgc

SEQ ID NO: 51685 - RNA, 30 nt, synthetic construct
  misc_feature 1..30: note = Protein tweety homolog 2 (519-528)
  source 1..30: mol_type = other RNA
agcgtggccgacgagcacctgcgccactac

SEQ ID NO: 51686 - RNA, 33 nt, synthetic construct
  misc_feature 1..33: note = BMP-2-inducible protein kinase (599-609)
  source 1..33: mol_type = other RNA
agcgtggccgacaaggaggccatcgcgaacttc

SEQ ID NO: 51687 - RNA, 27 nt, synthetic construct
  misc_feature 1..27: note = Adenomatous polyposis coli protein 2 (774-782)
  source 1..27: mol_type = other RNA
agcgtggcctccaaggccctgcagaag

SEQ ID NO: 51688 - RNA, 33 nt, synthetic construct
  misc_feature 1..33: note Dolichyl-diphosphooligosaccharide-proteinosyltransferase subunit 2 (312-322)
  source 1..33: mol_type = other RNA
agcgtggcctcccgcgccaccgtcctgcagaag

SEQ ID NO: 51689 - RNA, 30 nt, synthetic construct
  misc_feature 1..30: note = DNA-directed RNA polymerase III subunit RPC5 (347-356)
  source 1..30: mol_type = other RNA
agcgtggccgtcctgcgcggcatccagaag

SEQ ID NO: 51690 - RNA, 27 nt, synthetic construct
  misc_feature 1..27: note = Epididymal secretory protein E1 (29-37)
  source 1..27: mol_type = other RNA
agcgtggacggcgtcatcaaggaggtg

SEQ ID NO: 51691 - RNA, 33 nt, synthetic construct
  misc_feature 1..33: note = Chromodomain-helicase-DNA-binding protein 4 (628-638)
  source 1..33: mol_type = other RNA
agcgtggacaagaagggccacgtccactacctg

SEQ ID NO: 51692 - RNA, 30 nt, synthetic construct
  misc_feature 1..30: note = U3 small nucleolar ribonucleoprotein protein MPP10 (594-603)
  source 1..30: mol_type = other RNA
agcgtggaccaggccggcaagtactccaag

SEQ ID NO: 51693 - RNA, 30 nt, synthetic construct
  misc_feature 1..30: note = Nucleolar protein 11 (28-37)
  source 1..30: mol_type = other RNA
agcgtggaccgcaagttcatctccctgatg

SEQ ID NO: 51694 - RNA, 30 nt, synthetic construct
  misc_feature 1..30: note = Peroxisomal multifunctional enzyme type 2 (75-84)
  source 1..30: mol_type = other RNA
agcgtggaggagggcgagaaggtcgtgaag

SEQ ID NO: 51695 - RNA, 33 nt, synthetic construct
  misc_feature 1..33: note = Cytochrome c oxidase subunit 7C, mitochondrial (30-40)
  source 1..33: mol_type = other RNA
agcgtggagaacaagtggtccctgctcgccaag

SEQ ID NO: 51696 - RNA, 33 nt, synthetic construct
  misc_feature 1..33: note = Histone acetyltransferase KAT7 (249-259)
  source 1..33: mol_type = other RNA
agcgtgttcgaggtcgacggcaagaagaacaag

SEQ ID NO: 51697 - RNA, 36 nt, synthetic construct
  misc_feature 1..36: note = Receptor-type tyrosine-protein phosphatase zeta (1032-1043)
  source 1..36: mol_type = other RNA
agcgtgttcggcgacgacaacaaggccctgtccaag

SEQ ID NO: 51698 - RNA, 39 nt, synthetic construct
  misc_feature 1..39: note = Calcium-binding mitochondrial carrier protein SCaMC-2 (37-49)
  source 1..39: mol_type = other RNA
agcgtgttcatcccctcccaggagttcagcacctaccgc

SEQ ID NO: 51699 - RNA, 30 nt, synthetic construct
  misc_feature 1..30: note = LIX1-like protein (121-130)
  source 1..30: mol_type = other RNA
agcgtgttcaacgagcacccctcccgccgg

SEQ ID NO: 51700 - RNA, 27 nt, synthetic construct
  misc_feature 1..27: note = Ras-associated and pleckstrin homology domains-containing protein 1 (627-635)
  source 1..27: mol_type = other RNA
agcgtgttctccgaggcctggaagcgc

SEQ ID NO: 51701 - RNA, 36 nt, synthetic construct
  misc_feature 1..36: note = Formin-1 (1148-1159)
  source 1..36: mol_type = other RNA
agcgtgttctccgagggcatcaccagcctgcaccgc

SEQ ID NO: 51702 - RNA, 27 nt, synthetic construct
  misc_feature 1..27: note = Transcription activator BRG1 (1587-1595)
  source 1..27: mol_type = other RNA
agcgtgttcacctccgtccgccagaag

SEQ ID NO: 51703 - RNA, 33 nt, synthetic construct
  misc_feature 1..33: note = Ras-related protein Rab-6B (23-33)
  source 1..33: mol_type = other RNA
agcgtgggcaagacctccctgatcacccgcttc

SEQ ID NO: 51704 - RNA, 27 nt, synthetic construct
  misc_feature 1..27: note = Rho guanine nucleotide exchange factor 17 (885-893)
  source 1..27: mol_type = other RNA
agcgtgatcgacaccgcctccaagtac

SEQ ID NO: 51705 - RNA, 27 nt, synthetic construct
  misc_feature 1..27: note = Transmembrane emp24 domain-containing protein 7 (151-159)
  source 1..27: mol_type = other RNA
agcgtgatcgactaccagacccacttc

SEQ ID NO: 51706 - RNA, 30 nt, synthetic construct
  misc_feature 1..30: note = BTB/POZ domain-containing protein 9 (367-376)
  source 1..30: mol_type = other RNA
agcgtgatcgagggcgtctcccgcagccgg

SEQ ID NO: 51707 - RNA, 30 nt, synthetic construct
  misc_feature 1..30: note = Protein dopey-2 (19-28)
  source 1..30: mol_type = other RNA
agcgtgatcgagaaggccctgcgcaacttc

SEQ ID NO: 51708 - RNA, 27 nt, synthetic construct
  misc_feature 1..27: note = Inactive phospholipase C-like protein 1 (372-380)
  source 1..27: mol_type = other RNA
agcgtgatcgaggtcatcaacaagttc

SEQ ID NO: 51709 - RNA, 27 nt, synthetic construct
  misc_feature 1..27: note = Carbohydrate sulfotransferase 10 (278-286)
  source 1..27: mol_type = other RNA
agcgtgatcggccaccacgagaccctg

SEQ ID NO: 51710 - RNA, 27 nt, synthetic construct
  misc_feature 1..27: note = E3 ubiquitin-protein ligase RBBP6 (1347-1355)
  source 1..27: mol_type = other RNA
agcgtgatcaagaacgtctccaccaag

SEQ ID NO: 51711 - RNA, 30 nt, synthetic construct
  misc_feature 1..30: note = FERM domain-containing protein 6 (60-69)
  source 1..30: mol_type = other RNA
agcgtgatccagaacaacgagcacgtctac

SEQ ID NO: 51712 - RNA, 30 nt, synthetic construct
  misc_feature 1..30: note = Vacuolar protein sorting-associated protein 11 homolog (769-778)
  source 1..30: mol_type = other RNA
agcgtgatccgcgactacctggtccagaag

SEQ ID NO: 51713 - RNA, 30 nt, synthetic construct
  misc_feature 1..30: note = Choline kinase alpha (114-123)
  source 1..30: mol_type = other RNA
agcgtgatccgcggcgggctgtccaacatg

SEQ ID NO: 51714 - RNA, 33 nt, synthetic construct
  misc_feature 1..33: note = Lipid phosphate phosphatase-related protein type 3 (109-119)
  source 1..33: mol_type = other RNA
agcgtgatctccgacaccaccaagctgctcaag

SEQ ID NO: 51715 - RNA, 30 nt, synthetic construct
  misc_feature 1..30: note = E3 ubiquitin-protein ligase MYCBP2 (613-622)
  source 1..30: mol_type = other RNA
agcgtgatctccaaggacggcgagctgtac

SEQ ID NO: 51716 - RNA, 33 nt, synthetic construct
  misc_feature 1..33: note = ATPase family AAA domain-containing protein 2 (1033-1043)
  source 1..33: mol_type = other RNA
agcgtgatctccaagatcgacctgcacaagtac

SEQ ID NO: 51717 - RNA, 27 nt, synthetic construct
  misc_feature 1..27: note = Pro-interleukin-16 (212-220)
  source 1..27: mol_type = other RNA
agcgtgatctccaacatcgtcctgatg

SEQ ID NO: 51718 - RNA, 30 nt, synthetic construct
  misc_feature 1..30: note Dolichyl-diphosphooligosaccharide-proteinosyltransferase subunit DAD1 (7-16)
  source 1..30: mol_type = other RNA
agcgtgatctcccgcttcctggaggagtac

SEQ ID NO: 51719 - RNA, 30 nt, synthetic construct
  misc_feature 1..30: note = Fanconi anemia group A protein (283-292)
  source 1..30: mol_type = other RNA
agcgtgatctccaccgaccccctgaagcgc

SEQ ID NO: 51720 - RNA, 27 nt, synthetic construct
  misc_feature 1..27: note = Vacuolar protein sorting-associated protein 13C (3201-3209)
  source 1..27: mol_type = other RNA
agcgtgatcacccgcttcaacgagtac

SEQ ID NO: 51721 - RNA, 27 nt, synthetic construct
  misc_feature 1..27: note = Acyl-CoA dehydrogenase family member 9, mitochondrial (237-245)
  source 1..27: mol_type = other RNA
agcgtgaaggacaagatcaccgccttc

SEQ ID NO: 51722 - RNA, 42 nt, synthetic construct
  misc_feature 1..42: note = Ran-specific GTPase-activating protein (187-200)
  source 1..42: mol_type = other RNA
agcgtgaaggaggagaccaaggaggacgccgaggagaagcag

SEQ ID NO: 51723 - RNA, 42 nt, synthetic construct
  misc_feature 1..42: note = 39S ribosomal protein L48, mitochondrial (94-107)
  source 1..42: mol_type = other RNA
agcgtgaaggagcacaccgaggaggacttcaagggccgcttc

SEQ ID NO: 51724 - RNA, 27 nt, synthetic construct
  misc_feature 1..27: note = CTP synthase 1 (225-233)
  source 1..27: mol_type = other RNA
agcgtgaaggagaagatctccatgttc

SEQ ID NO: 51725 - RNA, 27 nt, synthetic construct
  misc_feature 1..27: note = Amyloid protein-binding protein 2 (95-103)
  source 1..27: mol_type = other RNA
agcgtgctggcctactccttcagccgc

SEQ ID NO: 51726 - RNA, 33 nt, synthetic construct
  misc_feature 1..33: note = Cytoplasmic dynein 1 heavy chain 1 (2317-2327)
  source 1..33: mol_type = other RNA
agcgtgctggacgacaacaagctcctgaccctg

SEQ ID NO: 51727 - RNA, 27 nt, synthetic construct
  misc_feature 1..27: note = Interferon-induced GTP-binding protein Mx1 (85-93)
  source 1..27: mol_type = other RNA
agcgtgctggaggccctctccggcgtc

SEQ ID NO: 51728 - RNA, 36 nt, synthetic construct
  misc_feature 1..36: note = Protein fem-1 homolog B (414-425)
  source 1..36: mol_type = other RNA
agcgtgctggagatcgagcagtccatgaaccgcgtc

SEQ ID NO: 51729 - RNA, 27 nt, synthetic construct
  misc_feature 1..27: note = Zinc finger MYM-type protein 6 (648-656)
  source 1..27: mol_type = other RNA
agcgtgctgaagggcgccgtcaccaag

SEQ ID NO: 51730 - RNA, 27 nt, synthetic construct
  misc_feature 1..27: note = Pre-rRNA-processing protein TSR1 homolog (547-555)
  source 1..27: mol_type = other RNA
agcgtgctgaacatggtcgtgcgccgg

SEQ ID NO: 51731 - RNA, 30 nt, synthetic construct
  misc_feature 1..30: note = Protein tweety homolog 3 (286-295)
  source 1..30: mol_type = other RNA
agcgtgctgtccggcgacatcctccagtac

SEQ ID NO: 51732 - RNA, 27 nt, synthetic construct
  misc_feature 1..27: note = Interleukin-1 receptor-associated kinase 1 (94-102)
  source 1..27: mol_type = other RNA
agcgtgctgtggccctggatcaaccgc

SEQ ID NO: 51733 - RNA, 36 nt, synthetic construct
  misc_feature 1..36: note = Heat shock 70 kDa protein 14 (206-217)
  source 1..36: mol_type = other RNA
agcgtgatggaggtcaactccggcatctaccgcgtg

SEQ ID NO: 51734 - RNA, 33 nt, synthetic construct
  misc_feature 1..33: note = Synaptonemal complex protein SC65 (327-337)
  source 1..33: mol_type = other RNA
agcgtgatgcagcagaacctggtctactaccgc

SEQ ID NO: 51735 - RNA, 27 nt, synthetic construct
  misc_feature 1..27: note = DNA replication licensing factor MCM5 (417-425)
  source 1..27: mol_type = other RNA
agcgtgatgcgcgacccctccagccgg

SEQ ID NO: 51736 - RNA, 30 nt, synthetic construct
  misc_feature 1..30: note = V-type proton ATPase 16 kDa proteolipid subunit (45-54)
  source 1..30: mol_type = other RNA
agcgtgatgcgccccgagcagatcatgaag

SEQ ID NO: 51737 - RNA, 27 nt, synthetic construct
  misc_feature 1..27: note = Propionyl-CoA carboxylase beta chain, mitochondrial (34-42)
  source 1..27: mol_type = other RNA
agcgtgaacgagcgcatcgagaacaag

SEQ ID NO: 51738 - RNA, 36 nt, synthetic construct
  misc_feature 1..36: note = A-kinase-interacting protein 1 (106-117)
  source 1..36: mol_type = other RNA
agcgtgcccgaggagggcggggccacccacgtctac

SEQ ID NO: 51739 - RNA, 36 nt, synthetic construct
  misc_feature 1..36: note = Melanocyte protein PMEL (633-644)
  source 1..36: mol_type = other RNA
agcgtgccccagctgccgcactccagctcccactgg

SEQ ID NO: 51740 - RNA, 30 nt, synthetic construct
  misc_feature 1..30: note = Nuclear distribution protein nudE homolog 1 (211-220)
  source 1..30: mol_type = other RNA
agcgtgccctccaccccgatcgcccaccgc

SEQ ID NO: 51741 - RNA, 30 nt, synthetic construct
  misc_feature 1..30: note = Krueppel-like factor 5 (213-222)
  source 1..30: mol_type = other RNA
agcgtgcccacccagcagggccacctgtac

SEQ ID NO: 51742 - RNA, 36 nt, synthetic construct
  misc_feature 1..36: note = Retinoic acid-induced protein 1 (225-236)
  source 1..36: mol_type = other RNA
agcgtgcagggcgggggccagggggcccactcctac

SEQ ID NO: 51743 - RNA, 33 nt, synthetic construct
  misc_feature 1..33: note = Bcl-2-related protein A1 (43-53)
  source 1..33: mol_type = other RNA
agcgtgcagaaggaggtcgagaagaacctgaag

SEQ ID NO: 51744 - RNA, 27 nt, synthetic construct
  misc_feature 1..27: note = UDP-glucose 4-epimerase (97-105)
  source 1..27: mol_type = other RNA
agcgtgcagaagcccctggactactac

SEQ ID NO: 51745 - RNA, 27 nt, synthetic construct
  misc_feature 1..27: note = 40S ribosomal protein S16 (9-17)
  source 1..27: mol_type = other RNA
agcgtgcaggtcttcggccgcaagaag

SEQ ID NO: 51746 - RNA, 27 nt, synthetic construct
  misc_feature 1..27: note = Serine/threonine-protein kinase 4 (109-117)
  source 1..27: mol_type = other RNA
agcgtgtccgacatcatccgcctgcgg

SEQ ID NO: 51747 - RNA, 27 nt, synthetic construct
  misc_feature 1..27: note = Zinc transporter ZIP6 (243-251)
  source 1..27: mol_type = other RNA
agcgtgtccgagccccgcaagggcttc

SEQ ID NO: 51748 - RNA, 30 nt, synthetic construct
  misc_feature 1..30: note = MICOS complex subunit MIC60 (113-122)
  source 1..30: mol_type = other RNA
agcgtgtccgaggtcatgaaggagagcaag

SEQ ID NO: 51749 - RNA, 36 nt, synthetic construct
  misc_feature 1..36: note = CDC42 small effector protein 2 (51-62)
  source 1..36: mol_type = other RNA
agcgtgtccagcatccagaaccagatgcagtccaag

SEQ ID NO: 51750 - RNA, 27 nt, synthetic construct
  misc_feature 1..27: note = Vimentin (5-13)
  source 1..27: mol_type = other RNA
agcgtgtccagctccagctaccgccgg

SEQ ID NO: 51751 - RNA, 27 nt, synthetic construct
  misc_feature 1..27: note = Shootin-1 (9-17)
  source 1..27: mol_type = other RNA
agcgtgaccaagaccgccctgaacaag

SEQ ID NO: 51752 - RNA, 33 nt, synthetic construct
  misc_feature 1..33: note = LON peptidase N-terminal domain and RING finger protein 2 (607-617)
  source 1..33: mol_type = other RNA
agcgtggtcgacgccatcggcatctcccgcttc

SEQ ID NO: 51753 - RNA, 27 nt, synthetic construct
  misc_feature 1..27: note = Phosphatidylinositol 3-kinase regulatory subunit beta (397-405)
  source 1..27: mol_type = other RNA
agcgtggtcgacctgatcaaccactac

SEQ ID NO: 51754 - RNA, 27 nt, synthetic construct
  misc_feature 1..27: note = GRAM domain-containing protein 1A (439-447)
  source 1..27: mol_type = other RNA
agcgtggtcgagacccagaccctgttc

SEQ ID NO: 51755 - RNA, 30 nt, synthetic construct
  misc_feature 1..30: note = Unconventional myosin-VI (74-83)
  source 1..30: mol_type = other RNA
agcgtggtcggcgggttcgtgtcccactac

SEQ ID NO: 51756 - RNA, 33 nt, synthetic construct
  misc_feature 1..33: note = Elongator complex protein 1 (1171-1181)
  source 1..33: mol_type = other RNA
agcgtggtctccggcagcgagatgtccgggaag

SEQ ID NO: 51757 - RNA, 33 nt, synthetic construct
  misc_feature 1..33: note = DNA dC-dU-editing enzyme APOBEC-3C (46-56)
  source 1..33: mol_type = other RNA
agcgtggtctcctggaagaccggcgtgttccgc

SEQ ID NO: 51758 - RNA, 27 nt, synthetic construct
  misc_feature 1..27: note = Centrosomal protein of 131 kDa (47-55)
  source 1..27: mol_type = other RNA
agcgtggtcaccggctccgagcagaag

SEQ ID NO: 51759 - RNA, 27 nt, synthetic construct
  misc_feature 1..27: note = Discoidin domain-containing receptor 2 (215-223)
  source 1..27: mol_type = other RNA
agcgtgtacgacggcgccgtcgggtac

SEQ ID NO: 51760 - RNA, 30 nt, synthetic construct
  misc_feature 1..30: note = Exocyst complex component 6B (39-48)
  source 1..30: mol_type = other RNA
agcgtgtacgacggcgaggagcacgggcgc

SEQ ID NO: 51761 - RNA, 39 nt, synthetic construct
  misc_feature 1..39: note = Serum paraoxonase/arylesterase 2 (334-346)
  source 1..39: mol_type = other RNA
agcgtgtacgacggcaagctgctcatcgggaccctgtac

SEQ ID NO: 51762 - RNA, 30 nt, synthetic construct
  misc_feature 1..30: note = DNA-binding protein RFX7 (1307-1316)
  source 1..30: mol_type = other RNA
agcgtgtacgagttccagaccccctcctac

SEQ ID NO: 51763 - RNA, 30 nt, synthetic construct
  misc_feature 1..30: note = Far upstream element-binding protein 3 (77-86)
  source 1..30: mol_type = other RNA
agcgtgtacggctacggggtccagaagcgc

SEQ ID NO: 51764 - RNA, 33 nt, synthetic construct
  misc_feature 1..33: note = Nuclear cap-binding protein subunit 1 (280-290)
  source 1..33: mol_type = other RNA
agcgtgtaccccatgccgcgcgtcatcttccgg

SEQ ID NO: 51765 - RNA, 33 nt, synthetic construct
  misc_feature 1..33: note = Inositol hexakisphosphate and diphosphoinositol-pentakisphosphate kinase 2 (220-230)
  source 1..33: mol_type = other RNA
agcgtgtactcccccgagagcaacgtccgcaag

SEQ ID NO: 51766 - RNA, 30 nt, synthetic construct
  misc_feature 1..30: note = Golgi resident protein GCP60 (519-528)
  source 1..30: mol_type = other RNA
agcgtgtactaccgcgtctactacacccgg

SEQ ID NO: 51767 - RNA, 27 nt, synthetic construct
  misc_feature 1..27: note = T-box transcription factor TBX2 (536-544)
  source 1..27: mol_type = other RNA
accgccgcccccttcccgttccacctg

SEQ ID NO: 51768 - RNA, 33 nt, synthetic construct
  misc_feature 1..33: note = Transducin beta-like protein 3 (197-207)
  source 1..33: mol_type = other RNA
accgccgaccacaacctgctcctgtacgaggcc

SEQ ID NO: 51769 - RNA, 27 nt, synthetic construct
  misc_feature 1..27: note = Protein bicaudal D homolog 2 (465-473)
  source 1..27: mol_type = other RNA
accgccgaggtggccctggcgaacctc

SEQ ID NO: 51770 - RNA, 27 nt, synthetic construct
  misc_feature 1..27: note = Unconventional myosin-X (353-361)
  source 1..27: mol_type = other RNA
accgccctgggccgcagcgccgagctc

SEQ ID NO: 51771 - RNA, 27 nt, synthetic construct
  misc_feature 1..27: note = Homeodomain-interacting protein kinase 3 (308-316)
  source 1..27: mol_type = other RNA
accgccctgaagaagctcaagagcctg

SEQ ID NO: 51772 - RNA, 27 nt, synthetic construct
  misc_feature 1..27: note = Protein S100-A1 (7-15)
  source 1..27: mol_type = other RNA
accgccatggagaccctgatcaacgtg

SEQ ID NO: 51773 - RNA, 33 nt, synthetic construct
  misc_feature 1..33: note = Ankycorbin (72-82)
  source 1..33: mol_type = other RNA
accgcccaggacaccacgggccacagcgccctg

SEQ ID NO: 51774 - RNA, 48 nt, synthetic construct
  misc_feature 1..48: note = Presequence protease, mitochondrial (707-722)
  source 1..48: mol_type = other RNA
accgcccaggagctggccaacggcatccccgacagcgggcacctctac

SEQ ID NO: 51775 - RNA, 21 nt, synthetic construct
  misc_feature 1..21: note = Nuclear pore complex-interacting protein (238-244)
  source 1..21: mol_type = other RNA
accgacaacagcctgtccctc

SEQ ID NO: 51776 - RNA, 30 nt, synthetic construct
  misc_feature 1..30: note = Interleukin-1 receptor accessory protein (307-316)
  source 1..30: mol_type = other RNA
accgaggacgagacccgcacgcagatcctg

SEQ ID NO: 51777 - RNA, 30 nt, synthetic construct
  misc_feature 1..30: note = Uncharacterized membrane protein C19orf24 (108-117)
  source 1..30: mol_type = other RNA
accgaggaccccaccgagatggccagcctg

SEQ ID NO: 51778 - RNA, 27 nt, synthetic construct
  misc_feature 1..27: note = Quinone oxidoreductase (182-190)
  source 1..27: mol_type = other RNA
accgaggagggccagaagatcgtgctg

SEQ ID NO: 51779 - RNA, 30 nt, synthetic construct
  misc_feature 1..30: note = Proteasome activator complex subunit 3 (220-229)
  source 1..30: mol_type = other RNA
accgagatcgacgagaaggagtacatcagc

SEQ ID NO: 51780 - RNA, 27 nt, synthetic construct
  misc_feature 1..27: note = Ventricular zone-expressed PH domain-containing protein homolog 1 (7-15)
  source 1..27: mol_type = other RNA
accgagatcgagttccccgagaagctg

SEQ ID NO: 51781 - RNA, 27 nt, synthetic construct
  misc_feature 1..27: note = RNA-binding protein 12 (77-85)
  source 1..27: mol_type = other RNA
accgagatgcagaacatgatcgagctg

SEQ ID NO: 51782 - RNA, 27 nt, synthetic construct
  misc_feature 1..27: note = Pre-mRNA-processing-splicing factor 8 (945-953)
  source 1..27: mol_type = other RNA
accgagcccccgcccctgctcgtgtac

SEQ ID NO: 51783 - RNA, 27 nt, synthetic construct
  misc_feature 1..27: note = Probable N-acetyltransferase 16 (59-67)
  source 1..27: mol_type = other RNA
accgagcgcgagttcgaggaggtgctg

SEQ ID NO: 51784 - RNA, 27 nt, synthetic construct
  misc_feature 1..27: note = Major facilitator superfamily domain-containing protein 1 (327-335)
  source 1..27: mol_type = other RNA
accggcaagaacatcatctgggtgctg

SEQ ID NO: 51785 - RNA, 27 nt, synthetic construct
  misc_feature 1..27: note = DNA topoisomerase 2-alpha (1397-1405)
  source 1..27: mol_type = other RNA
acccacttccccgacgagaccgagatc

SEQ ID NO: 51786 - RNA, 30 nt, synthetic construct
  misc_feature 1..30: note = Mothers against decapentaplegic homolog 2 (197-206)
  source 1..30: mol_type = other RNA
acccacagcatccccgagaacaccaacttc

SEQ ID NO: 51787 - RNA, 30 nt, synthetic construct
  misc_feature 1..30: note = Sorting nexin-18 (279-288)
  source 1..30: mol_type = other RNA
accatcgacgaccccaccaagcagacgaag

SEQ ID NO: 51788 - RNA, 33 nt, synthetic construct
  misc_feature 1..33: note = Plastin-2 (117-127)
  source 1..33: mol_type = other RNA
accatcgacgagcgcaccatcaacaagaagaag

SEQ ID NO: 51789 - RNA, 27 nt, synthetic construct
  misc_feature 1..27: note = MAM and LDL-receptor class A domain-containing protein 1 (1829-1837)
  source 1..27: mol_type = other RNA
accatcgaggagagcggcctgaacatc

SEQ ID NO: 51790 - RNA, 30 nt, synthetic construct
  misc_feature 1..30: note = NADH-ubiquinone oxidoreductase chain 2 (12-21)
  source 1..30: mol_type = other RNA
accatcttcgccggcaccctgatcacggcc

SEQ ID NO: 51791 - RNA, 27 nt, synthetic construct
  misc_feature 1..27: note = DBH-like monooxygenase protein 1 (50-58)
  source 1..27: mol_type = other RNA
accatcatcgagttcacccgcgagctg

SEQ ID NO: 51792 - RNA, 27 nt, synthetic construct
  misc_feature 1..27: note = Cytoskeleton-associated protein 5 (365-373)
  source 1..27: mol_type = other RNA
accatcctggagaagttcaaggagaag

SEQ ID NO: 51793 - RNA, 48 nt, synthetic construct
  misc_feature 1..48: note = Melanocyte protein PMEL (215-230)
  source 1..48: mol_type = other RNA
accatcaccgaccaggtgcccttcagcgtctccgtgagccagctgcgc

SEQ ID NO: 51794 - RNA, 39 nt, synthetic construct
  misc_feature 1..39: note = Ornithine aminotransferase, mitochondrial (30-42)
  source 1..39: mol_type = other RNA
accaagaagaccgtgcagggccccccgacgagcgacgac

SEQ ID NO: 51795 - RNA, 39 nt, synthetic construct
  misc_feature 1..39: note = Catenin delta-1 (790-802)
  source 1..39: mol_type = other RNA
accaagagcctggacaacaactactccacccccaacgag

SEQ ID NO: 51796 - RNA, 30 nt, synthetic construct
  misc_feature 1..30: note = Low-density lipoprotein receptor-related protein 1B (701-710)
  source 1..30: mol_type = other RNA
accctggacttccacaccaacacgctctac

SEQ ID NO: 51797 - RNA, 33 nt, synthetic construct
  misc_feature 1..33: note = KN motif and ankyrin repeat domain-containing protein 1 (702-712)
  source 1..33: mol_type = other RNA
accctggacaagcagaccagcacgcagaccgtg

SEQ ID NO: 51798 - RNA, 24 nt, synthetic construct
  misc_feature 1..24: note = PH and SEC7 domain-containing protein 3 (117-124)
  source 1..24: mol_type = other RNA
accctggaccagagcctccgctac

SEQ ID NO: 51799 - RNA, 27 nt, synthetic construct
  misc_feature 1..27: note = Kinesin-like protein KIF20B (1134-1142)
  source 1..27: mol_type = other RNA
accctggacgtgcagatccagcacgtc

SEQ ID NO: 51800 - RNA, 33 nt, synthetic construct
  misc_feature 1..33: note = UPF0505 protein C16orf62 (625-635)
  source 1..33: mol_type = other RNA
accctggaggacgagaagcgcatgctcagctac

SEQ ID NO: 51801 - RNA, 33 nt, synthetic construct
  misc_feature 1..33: note = Syndecan-3 (348-358)
  source 1..33: mol_type = other RNA
accctggaggagcccaagcaggccagcgtgacc

SEQ ID NO: 51802 - RNA, 30 nt, synthetic construct
  misc_feature 1..30: note = Biliverdin reductase A (71-80)
  source 1..30: mol_type = other RNA
accctggaggagcgcaaggaggaccagtac

SEQ ID NO: 51803 - RNA, 27 nt, synthetic construct
  misc_feature 1..27: note = Rap guanine nucleotide exchange factor 6 (4-12)
  source 1..27: mol_type = other RNA
accctgttccagaagctcttcagcaag

SEQ ID NO: 51804 - RNA, 30 nt, synthetic construct
  misc_feature 1..30: note = ATP-dependent RNA helicase DHX36 (503-512)
  source 1..30: mol_type = other RNA
accctgcacgacctcctgatgagccaggtg

SEQ ID NO: 51805 - RNA, 30 nt, synthetic construct
  misc_feature 1..30: note = F-box/WD repeat-containing protein 11 (217-226)
  source 1..30: mol_type = other RNA
accctgatccaccacaacgaggccgtgctc

SEQ ID NO: 51806 - RNA, 30 nt, synthetic construct
  misc_feature 1..30: note = Plexin-C1 (370-379)
  source 1..30: mol_type = other RNA
accctgatccacagcgacctcacctccgtg

SEQ ID NO: 51807 - RNA, 33 nt, synthetic construct
  misc_feature 1..33: note = Tetraspanin-14 (239-249)
  source 1..33: mol_type = other RNA
accctgatcagcgacatcgaggccgtgaaggcc

SEQ ID NO: 51808 - RNA, 27 nt, synthetic construct
  misc_feature 1..27: note = Midasin (462-470)
  source 1..27: mol_type = other RNA
accctgctcgacaagtactggaccaag

SEQ ID NO: 51809 - RNA, 33 nt, synthetic construct
  misc_feature 1..33: note = Inositol-tetrakisphosphate 1-kinase (102-112)
  source 1..33: mol_type = other RNA
accctgctcgaccgcagcaagtcctacgagctg

SEQ ID NO: 51810 - RNA, 27 nt, synthetic construct
  misc_feature 1..27: note = Midasin (3030-3038)
  source 1..27: mol_type = other RNA
accctgctcgaggtgggccagatcgcc

SEQ ID NO: 51811 - RNA, 36 nt, synthetic construct
  misc_feature 1..36: note = NADH-ubiquinone oxidoreductase chain 4L (39-50)
  source 1..36: mol_type = other RNA
accctgatgaccctcaacacgcacagcctgctggcc

SEQ ID NO: 51812 - RNA, 30 nt, synthetic construct
  misc_feature 1..30: note = Serine/threonine-protein phosphatase 1 regulatory subunit 10 (169-178)
  source 1..30: mol_type = other RNA
accctgcccgagcgcccgctcaccgaggtg

SEQ ID NO: 51813 - RNA, 27 nt, synthetic construct
  misc_feature 1..27: note = Sorting nexin-9 (218-226)
  source 1..27: mol_type = other RNA
accctgcaggacaagcagaacatggtg

SEQ ID NO: 51814 - RNA, 30 nt, synthetic construct
  misc_feature 1..30: note = Olfactory receptor (79-88)
  source 1..30: mol_type = other RNA
accctggtgggcaacttcaccatcatcatc

SEQ ID NO: 51815 - RNA, 27 nt, synthetic construct
  misc_feature 1..27: note = tRNA-dihydrouridine(20) synthase (NAD(P)+)-like (378-386)
  source 1..27: mol_type = other RNA
accctgtgggacaagagcaagaagctc

SEQ ID NO: 51816 - RNA, 33 nt, synthetic construct
  misc_feature 1..33: note = Spatacsin (451-461)
  source 1..33: mol_type = other RNA
accctgtgggacctcgagacccagggcatgcag

SEQ ID NO: 51817 - RNA, 27 nt, synthetic construct
  misc_feature 1..27: note = E3 SUMO-protein ligase PIAS1 (360-368)
  source 1..27: mol_type = other RNA
accctgtacatccagatgaacgagaag

SEQ ID NO: 51818 - RNA, 42 nt, synthetic construct
  misc_feature 1..42: note = Eukaryotic translation initiation factor 3 subunit D (56-69)
  source 1..42: mol_type = other RNA
accaacaagtacagctcccagttcggcgggggcagccagtac

SEQ ID NO: 51819 - RNA, 33 nt, synthetic construct
  misc_feature 1..33: note = ATP-dependent RNA helicase DDX42 (106-116)
  source 1..33: mol_type = other RNA
accaacctgaccccccagcagctcatcgacctg

SEQ ID NO: 51820 - RNA, 27 nt, synthetic construct
  misc_feature 1..27: note = Calcium permeable stress-gated cation channel 1 (426-434)
  source 1..27: mol_type = other RNA
acccccgccatcatcatgaacaccatc

SEQ ID NO: 51821 - RNA, 27 nt, synthetic construct
  misc_feature 1..27: note = Neuron navigator 2 (981-989)
  source 1..27: mol_type = other RNA
acccccgccagctcccgcaagaacctg

SEQ ID NO: 51822 - RNA, 48 nt, synthetic construct
  misc_feature 1..48: note = Nucleolin (121-136)
  source 1..48: mol_type = other RNA
acccccggcaagaagggggccgccatcccggcgaagggcgccaagaac

SEQ ID NO: 51823 - RNA, 57 nt, synthetic construct
  misc_feature 1..57: note = Nucleolin (121-139)
  source 1..57: mol_type = other RNA
acccccggcaagaagggggccgccatcccggcgaagggcgccaagaacgggaagaac

SEQ ID NO: 51824 - RNA, 36 nt, synthetic construct
  misc_feature 1..36: note = Chondroitin sulfate proteoglycan 4 (2310-2321)
  source 1..36: mol_type = other RNA
acccccaacccggccctgaagaacggccagtactgg

SEQ ID NO: 51825 - RNA, 42 nt, synthetic construct
  misc_feature 1..42: note = Alpha-adducin (194-207)
  source 1..42: mol_type = other RNA
acccccagcttcctgaagaagtccaagaagaagagcgactcc

SEQ ID NO: 51826 - RNA, 27 nt, synthetic construct
  misc_feature 1..27: note = GPI ethanolamine phosphate transferase 3 (274-282)
  source 1..27: mol_type = other RNA
acccaggacctgcaggccaaggagctc

SEQ ID NO: 51827 - RNA, 30 nt, synthetic construct
  misc_feature 1..30: note = Homer protein homolog 3 (100-109)
  source 1..30: mol_type = other RNA
acccagttcgccgagaagttccaggaggtg

SEQ ID NO: 51828 - RNA, 33 nt, synthetic construct
  misc_feature 1..33: note = Hypoxia-inducible factor 1-alpha (123-133)
  source 1..33: mol_type = other RNA
acccagttcgagctgaccggccacagcgtgttc

SEQ ID NO: 51829 - RNA, 33 nt, synthetic construct
  misc_feature 1..33: note = Serine-protein kinase ATM (2268-2278)
  source 1..33: mol_type = other RNA
acccagctgcccgagcgcgccatcttccagatc

SEQ ID NO: 51830 - RNA, 36 nt, synthetic construct
  misc_feature 1..36: note = Proteasome subunit beta type-4 (15-26)
  source 1..36: mol_type = other RNA
acccagaaccccatggtgaccggcacgagcgtcctg

SEQ ID NO: 51831 - RNA, 33 nt, synthetic construct
  misc_feature 1..33: note = von Willebrand factor A domain-containing protein 9 (75-85)
  source 1..33: mol_type = other RNA
acccagaaccagcgcagcgagtccaaccggttc

SEQ ID NO: 51832 - RNA, 39 nt, synthetic construct
  misc_feature 1..39: note = Macrophage migration inhibitory factor (22-34)
  source 1..39: mol_type = other RNA
acccagcagctggcccaggccaccggcaagcccccgcag

SEQ ID NO: 51833 - RNA, 27 nt, synthetic construct
  misc_feature 1..27: note = Gamma-interferon-inducible protein 16 (235-243)
  source 1..27: mol_type = other RNA
acccagacccagttcttccacgtgaag

SEQ ID NO: 51834 - RNA, 27 nt, synthetic construct
  misc_feature 1..27: note = 60S ribosomal protein L14 (89-97)
  source 1..27: mol_type = other RNA
acccgctgggccaagaagatcgaggcc

SEQ ID NO: 51835 - RNA, 27 nt, synthetic construct
  misc_feature 1..27: note = Cadherin-19 (219-227)
  source 1..27: mol_type = other RNA
accagcgccgagatccgctccctgtac

SEQ ID NO: 51836 - RNA, 30 nt, synthetic construct
  misc_feature 1..30: note = WW domain-containing adapter protein with coiled-coil (338-347)
  source 1..30: mol_type = other RNA
accagcgacgcctccagcccccgctcctac

SEQ ID NO: 51837 - RNA, 27 nt, synthetic construct
  misc_feature 1..27: note = FAST kinase domain-containing protein 2 (547-555)
  source 1..27: mol_type = other RNA
accagcgacgacatgaagaacgcctac

SEQ ID NO: 51838 - RNA, 30 nt, synthetic construct
  misc_feature 1..30: note = Latent-transforming growth factor beta-binding protein 2 (1043-1052)
  source 1..30: mol_type = other RNA
accagcgacgagaagggctgccaggacgtg

SEQ ID NO: 51839 - RNA, 33 nt, synthetic construct
  misc_feature 1..33: note = Trimethyllysine dioxygenase, mitochondrial (224-234)
  source 1..33: mol_type = other RNA
accagcgacttctcccgcggcgacaccgcctac

SEQ ID NO: 51840 - RNA, 33 nt, synthetic construct
  misc_feature 1..33: note = Cyclic AMP-dependent transcription factor ATF-6 alpha (429-439)
  source 1..33: mol_type = other RNA
accagcgacggcatcatccagaagaactcctac

SEQ ID NO: 51841 - RNA, 27 nt, synthetic construct
  misc_feature 1..27: note = L-dopachrome tautomerase (136-144)
  source 1..27: mol_type = other RNA
accagcgaccagctgggctactcctac

SEQ ID NO: 51842 - RNA, 27 nt, synthetic construct
  misc_feature 1..27: note = Poly (ADP-ribose) polymerase 11 (22-30)
  source 1..27: mol_type = other RNA
accagcgacacccagtggggctggttc

SEQ ID NO: 51843 - RNA, 33 nt, synthetic construct
  misc_feature 1..33: note = Endoplasmin (188-198)
  source 1..33: mol_type = other RNA
accagcgagctgatcggccagttcggggtgggc

SEQ ID NO: 51844 - RNA, 36 nt, synthetic construct
  misc_feature 1..36: note = Probable ATP-dependent RNA helicase DDX5 (556-567)
  source 1..36: mol_type = other RNA
accagcttccgcaccggcaaccccacggggacctac

SEQ ID NO: 51845 - RNA, 30 nt, synthetic construct
  misc_feature 1..30: note = YTH domain-containing family protein 2 (706-715)
  source 1..30: mol_type = other RNA
accagcatcttcgacgacttctcccactac

SEQ ID NO: 51846 - RNA, 27 nt, synthetic construct
  misc_feature 1..27: note = KN motif and ankyrin repeat domain-containing protein 4 (11-19)
  source 1..27: mol_type = other RNA
accagcctgaagtccatcatgaagaag

SEQ ID NO: 51847 - RNA, 33 nt, synthetic construct
  misc_feature 1..33: note = E3 ubiquitin-protein ligase RNF213 (1201-1211)
  source 1..33: mol_type = other RNA
accagctccaacagccagcgcgccacccactac

SEQ ID NO: 51848 - RNA, 51 nt, synthetic construct
  misc_feature 1..51: note = Nestin (511-527)
  source 1..51: mol_type = other RNA
accagctgggccggcgcccccgtgcacctggggcagggccagttcctcaag

SEQ ID NO: 51849 - RNA, 27 nt, synthetic construct
  misc_feature 1..27: note = Probable ATP-dependent RNA helicase YTHDC2 (1212-1220)
  source 1..27: mol_type = other RNA
accaccgccgagcgcgtgctgatgaag

SEQ ID NO: 51850 - RNA, 24 nt, synthetic construct
  misc_feature 1..24: note = Junction plakoglobin (287-294)
  source 1..24: mol_type = other RNA
accaccgactgcctgcagctcctg

SEQ ID NO: 51851 - RNA, 27 nt, synthetic construct
  misc_feature 1..27: note = Junction plakoglobin (287-295)
  source 1..27: mol_type = other RNA
accaccgactgcctgcagctcctggcc

SEQ ID NO: 51852 - RNA, 33 nt, synthetic construct
  misc_feature 1..33: note = Flavin reductaseADPH) (190-200)
  source 1..33: mol_type = other RNA
accaccgacgagtacgacggccacagcacgtac

SEQ ID NO: 51853 - RNA, 27 nt, synthetic construct
  misc_feature 1..27: note = ATP-dependent 6-phosphofructokinase, platelet type (379-387)
  source 1..27: mol_type = other RNA
accaccgacttcatctaccagctgtac

SEQ ID NO: 51854 - RNA, 24 nt, synthetic construct
  misc_feature 1..24: note = Probable ATP-dependent RNA helicase DDX60-like (990-997)
  source 1..24: mol_type = other RNA
accaccgacatcatcgagaagtac

SEQ ID NO: 51855 - RNA, 33 nt, synthetic construct
  misc_feature 1..33: note = Methyl-CpG-binding domain protein 6 (678-688)
  source 1..33: mol_type = other RNA
accaccgaccccggcgccagctccctggggaag

SEQ ID NO: 51856 - RNA, 30 nt, synthetic construct
  misc_feature 1..30: note = IQ domain-containing protein G (71-80)
  source 1..30: mol_type = other RNA
accaccgaccagctgagcatcctcaactac

SEQ ID NO: 51857 - RNA, 27 nt, synthetic construct
  misc_feature 1..27: note = Glutamate receptor ionotropic, kainate 5 (78-86)
  source 1..27: mol_type = other RNA
accaccgacacgatgtgccagatcctg

SEQ ID NO: 51858 - RNA, 27 nt, synthetic construct
  misc_feature 1..27: note = Heterogeneous nuclear ribonucleoproteins A2/B1 (20-28)
  source 1..27: mol_type = other RNA
accaccgaggagagcctgcgcaactac

SEQ ID NO: 51859 - RNA, 27 nt, synthetic construct
  misc_feature 1..27: note = Apoptosis-stimulating of p53 protein 1 (687-695)
  source 1..27: mol_type = other RNA
accaccgagcagatccccagcccggtg

SEQ ID NO: 51860 - RNA, 39 nt, synthetic construct
  misc_feature 1..39: note = Transformer-2 protein homolog beta (29-41)
  source 1..39: mol_type = other RNA
accaccgagcgcgacctgcgggaggtgttcagcaagtac

SEQ ID NO: 51861 - RNA, 27 nt, synthetic construct
  misc_feature 1..27: note = Pre-mRNA-processing-splicing factor 8 (1254-1262)
  source 1..27: mol_type = other RNA
accaccttcacgaagatcgtgaacaag

SEQ ID NO: 51862 - RNA, 33 nt, synthetic construct
  misc_feature 1..33: note = Suppressor of tumorigenicity 7 protein (228-238)
  source 1..33: mol_type = other RNA
accaccatcgccgaggccgagaagctgttcaag

SEQ ID NO: 51863 - RNA, 27 nt, synthetic construct
  misc_feature 1..27: note = Lysine-specific demethylase 6B (1272-1280)
  source 1..27: mol_type = other RNA
accaccatcgccaagtacgcccagtac

SEQ ID NO: 51864 - RNA, 36 nt, synthetic construct
  misc_feature 1..36: note = TOX high mobility group box family member 4 (142-153)
  source 1..36: mol_type = other RNA
accaccatcgaccagagcgagctgtccagccagctc

SEQ ID NO: 51865 - RNA, 33 nt, synthetic construct
  misc_feature 1..33: note = Nucleolar protein 10 (56-66)
  source 1..33: mol_type = other RNA
accaccatcaaggtgagcaaggacggccagtac

SEQ ID NO: 51866 - RNA, 39 nt, synthetic construct
  misc_feature 1..39: note = V-type proton ATPase subunit F (43-55)
  source 1..39: mol_type = other RNA
accaccatcaacgagatcgaggacacgttccgccagttc

SEQ ID NO: 51867 - RNA, 30 nt, synthetic construct
  misc_feature 1..30: note = Large neutral amino acids transporter small subunit 1 (108-117)
  source 1..30: mol_type = other RNA
accaccatcagcaagtccggcggggactac

SEQ ID NO: 51868 - RNA, 27 nt, synthetic construct
  misc_feature 1..27: note = WD repeat-containing protein 3 (883-891)
  source 1..27: mol_type = other RNA
accaccatcagcaaggtgtcccaggtc

SEQ ID NO: 51869 - RNA, 27 nt, synthetic construct
  misc_feature 1..27: note = Succinyl-CoA ligase (ADP/GDP-forming) subunit alpha, mitochondrial (321-329)
  source 1..27: mol_type = other RNA
accaccatctacaaggagttcgagaag

SEQ ID NO: 51870 - RNA, 27 nt, synthetic construct
  misc_feature 1..27: note = Neurofilament light polypeptide (267-275)
  source 1..27: mol_type = other RNA
accaccaagagcgagatggcccgctac

SEQ ID NO: 51871 - RNA, 30 nt, synthetic construct
  misc_feature 1..30: note = Melanoma-associated antigen D1 (152-161)
  source 1..30: mol_type = other RNA
accaccaaggtgggccccaacgccacgtac

SEQ ID NO: 51872 - RNA, 33 nt, synthetic construct
  misc_feature 1..33: note = Glycosylphosphatidylinositol anchor attachment 1 protein (526-536)
  source 1..33: mol_type = other RNA
accaccatggtgcccacggccgccctggcgaag

SEQ ID NO: 51873 - RNA, 27 nt, synthetic construct
  misc_feature 1..27: note = Urocortin-2 (100-108)
  source 1..27: mol_type = other RNA
accaccaacgcccgcatcctggcccgg

SEQ ID NO: 51874 - RNA, 27 nt, synthetic construct
  misc_feature 1..27: note = Reticulon-1 (204-212)
  source 1..27: mol_type = other RNA
accacccccgtgaagatcacgctgacc

SEQ ID NO: 51875 - RNA, 33 nt, synthetic construct
  misc_feature 1..33: note = Probable E3 ubiquitin-protein ligase HERC1 (3302-3312)
  source 1..33: mol_type = other RNA
accaccgtggacgacagcatccagcgcaagttc

SEQ ID NO: 51876 - RNA, 36 nt, synthetic construct
  misc_feature 1..36: note = Ubiquitin carboxyl-terminal hydrolase 19 (1362-1373)
  source 1..36: mol_type = other RNA
accaccgtggacgagagccaggtcgtgacgcgctac

SEQ ID NO: 51877 - RNA, 30 nt, synthetic construct
  misc_feature 1..30: note = 40S ribosomal protein S6 (125-134)
  source 1..30: mol_type = other RNA
accaccgtgccccgccggctgggcccgaag

SEQ ID NO: 51878 - RNA, 27 nt, synthetic construct
  misc_feature 1..27: note = Aminoacyl tRNA synthase complex-interacting multifunctional protein 2 (206-214)
  source 1..27: mol_type = other RNA
accgtggccgacgtcgtgctgtggagc

SEQ ID NO: 51879 - RNA, 30 nt, synthetic construct
  misc_feature 1..30: note = Aminoacyl tRNA synthase complex-interacting multifunctional protein 2 (206-215)
  source 1..30: mol_type = other RNA
accgtggccgacgtcgtgctgtggagcgtg

SEQ ID NO: 51880 - RNA, 30 nt, synthetic construct
  misc_feature 1..30: note = Protein FAM73B (18-27)
  source 1..30: mol_type = other RNA
accgtggccgagatccccgtcttcctgtac

SEQ ID NO: 51881 - RNA, 30 nt, synthetic construct
  misc_feature 1..30: note = Carboxypeptidase Q (271-280)
  source 1..30: mol_type = other RNA
accgtggccgagatcaccggcagcaagtac

SEQ ID NO: 51882 - RNA, 27 nt, synthetic construct
  misc_feature 1..27: note = Dynein heavy chain 14, axonemal (3163-3171)
  source 1..27: mol_type = other RNA
accgtggccgagaagcagctgctcgcc

SEQ ID NO: 51883 - RNA, 27 nt, synthetic construct
  misc_feature 1..27: note = Protein phosphatase 1K, mitochondrial (191-199)
  source 1..27: mol_type = other RNA
accgtggccctgctccgcgacggcatc

SEQ ID NO: 51884 - RNA, 27 nt, synthetic construct
  misc_feature 1..27: note = Abl interactor 2 (96-104)
  source 1..27: mol_type = other RNA
accgtggacatccacaaggagaaggtc

SEQ ID NO: 51885 - RNA, 27 nt, synthetic construct
  misc_feature 1..27: note = Volume-regulated anion channel subunit LRRC8B (622-630)
  source 1..27: mol_type = other RNA
accgtggaggagatcatcagcttccag

SEQ ID NO: 51886 - RNA, 33 nt, synthetic construct
  misc_feature 1..33: note = Vimentin (446-456)
  source 1..33: mol_type = other RNA
accgtggagacccgcgacggccaggtcatcaac

SEQ ID NO: 51887 - RNA, 27 nt, synthetic construct
  misc_feature 1..27: note = Olfactory receptor 51G2 (211-219)
  source 1..27: mol_type = other RNA
accgtgggcatcgacagcctgctcatc

SEQ ID NO: 51888 - RNA, 36 nt, synthetic construct
  misc_feature 1..36: note = Exocyst complex component 7 (401-412)
  source 1..36: mol_type = other RNA
accgtgcacgagctgaccagcaacgccatcctcttc

SEQ ID NO: 51889 - RNA, 27 nt, synthetic construct
  misc_feature 1..27: note = WD repeat-containing protein 70 (364-372)
  source 1..27: mol_type = other RNA
accgtgcaccccaagttccactacaag

SEQ ID NO: 51890 - RNA, 27 nt, synthetic construct
  misc_feature 1..27: note = Eukaryotic translation initiation factor 3 subunit C-like protein (818-826)
  source 1..27: mol_type = other RNA
accgtgcacagcatcatctccaagatg

SEQ ID NO: 51891 - RNA, 30 nt, synthetic construct
  misc_feature 1..30: note = Transmembrane emp24 domain-containing protein 3 (153-162)
  source 1..30: mol_type = other RNA
accgtgatcgacagccagacccactaccgc

SEQ ID NO: 51892 - RNA, 30 nt, synthetic construct
  misc_feature 1..30: note = 60S ribosomal protein L7-like 1 (171-180)
  source 1..30: mol_type = other RNA
accgtgatcgaggagcacctgggcaagttc

SEQ ID NO: 51893 - RNA, 27 nt, synthetic construct
  misc_feature 1..27: note = Ubiquitin carboxyl-terminal hydrolase 24 (488-496)
  source 1..27: mol_type = other RNA
accgtgatcgagaacatccacaccatc

SEQ ID NO: 51894 - RNA, 27 nt, synthetic construct
  misc_feature 1..27: note = Integrin alpha-2 (988-996)
  source 1..27: mol_type = other RNA
accgtgatcatccacatcccccagtac

SEQ ID NO: 51895 - RNA, 33 nt, synthetic construct
  misc_feature 1..33: note = Actin filament-associated protein 1-like 1 (208-218)
  source 1..33: mol_type = other RNA
accgtgatccgcgaggaccagctgctctgctac

SEQ ID NO: 51896 - RNA, 33 nt, synthetic construct
  misc_feature 1..33: note = Angiomotin (709-719)
  source 1..33: mol_type = other RNA
accgtgatcagccactcccccaacaccagctac

SEQ ID NO: 51897 - RNA, 39 nt, synthetic construct
  misc_feature 1..39: note = Interferon-induced protein 44 (52-64)
  source 1..39: mol_type = other RNA
accgtgatctacagcgaggaccacatcatcggcgcctac

SEQ ID NO: 51898 - RNA, 27 nt, synthetic construct
  misc_feature 1..27: note = Structural maintenance of chromosomes flexible hinge domain-containing protein 1 (90-98)
  source 1..27: mol_type = other RNA
accgtgaaggacggcgtcaccctgtac

SEQ ID NO: 51899 - RNA, 27 nt, synthetic construct
  misc_feature 1..27: note = Microtubule-actin cross-linking factor 1 isoform X31 (4329-4337)
  source 1..27: mol_type = other RNA
accgtgaaggaccagctgaacgagatg

SEQ ID NO: 51900 - RNA, 27 nt, synthetic construct
  misc_feature 1..27: note = DnaJ homolog subfamily B member 1 (332-340)
  source 1..27: mol_type = other RNA
accgtgctggagcaggtcctccccatc

SEQ ID NO: 51901 - RNA, 27 nt, synthetic construct
  misc_feature 1..27: note = Prostaglandin E2 receptor EP4 subtype (335-343)
  source 1..27: mol_type = other RNA
accgtgctgagcaaggccatcgagaag

SEQ ID NO: 51902 - RNA, 30 nt, synthetic construct
  misc_feature 1..30: note = Carboxypeptidase Q (441-450)
  source 1..30: mol_type = other RNA
accgtgatggaccccaagcagatgaacgtc

SEQ ID NO: 51903 - RNA, 27 nt, synthetic construct
  misc_feature 1..27: note = Embryonic stem cell-specific 5-hydroxymethylcytosine-binding protein (101-109)
  source 1..27: mol_type = other RNA
accgtgatggagaagcgcagcttcaag

SEQ ID NO: 51904 - RNA, 36 nt, synthetic construct
  misc_feature 1..36: note = MICOS complex subunit MIC13 (90-101)
  source 1..36: mol_type = other RNA
accgtgatgagcgccctgtccgtcgcccccagcaag

SEQ ID NO: 51905 - RNA, 27 nt, synthetic construct
  misc_feature 1..27: note = Zinc finger protein 3 (182-190)
  source 1..27: mol_type = other RNA
accgtgaacagcaacctgatctcccac

SEQ ID NO: 51906 - RNA, 27 nt, synthetic construct
  misc_feature 1..27: note = mucin-3A isoform (865-873)
  source 1..27: mol_type = other RNA
accgtgcagaacaccgagatcagcatc

SEQ ID NO: 51907 - RNA, 33 nt, synthetic construct
  misc_feature 1..33: note = Zinc finger BED domain-containing protein 4 (806-816)
  source 1..33: mol_type = other RNA
accgtgaccgacaacgccagcatcggcaagacg

SEQ ID NO: 51908 - RNA, 36 nt, synthetic construct
  misc_feature 1..36: note = Transmembrane protein 186 (82-93)
  source 1..36: mol_type = other RNA
accgtggtcgccctgcccccgggctactacctctac

SEQ ID NO: 51909 - RNA, 27 nt, synthetic construct
  misc_feature 1..27: note = RNA-binding protein Musashi homolog 2 (17-25)
  source 1..27: mol_type = other RNA
accgtggtcgaggacgtgaagcagtac

SEQ ID NO: 51910 - RNA, 36 nt, synthetic construct
  misc_feature 1..36: note = Serine/threonine-protein kinase A-Raf (31-42)
  source 1..36: mol_type = other RNA
accgtggtcaccgtgcgcgacggcatgagcgtgtac

SEQ ID NO: 51911 - RNA, 27 nt, synthetic construct
  misc_feature 1..27: note = Putative oxidoreductase GLYR1 (235-243)
  source 1..27: mol_type = other RNA
accgtgtggaaccgcaccgccgagaag

SEQ ID NO: 51912 - RNA, 39 nt, synthetic construct
  misc_feature 1..39: note = RNA-binding protein 26 (673-685)
  source 1..39: mol_type = other RNA
accgtgtacaaccccgccgccctgaaggcggcccagaag

SEQ ID NO: 51913 - RNA, 33 nt, synthetic construct
  misc_feature 1..33: note = Junction plakoglobin (21-31)
  source 1..33: mol_type = other RNA
acctacgacagcggcatccactccggggccaac

SEQ ID NO: 51914 - RNA, 48 nt, synthetic construct
  misc_feature 1..48: note = Caprin-1 (572-587)
  source 1..48: mol_type = other RNA
acctaccacggcagccccgaccagtcccaccaggtgaccgggaaccac

SEQ ID NO: 51915 - RNA, 27 nt, synthetic construct
  misc_feature 1..27: note = Spartin (153-161)
  source 1..27: mol_type = other RNA
gtggccgcccccgcgagcctgtccctc

SEQ ID NO: 51916 - RNA, 30 nt, synthetic construct
  misc_feature 1..30: note = Phosphatidylinositol 3,4,5-trisphosphate 5-phosphatase 2 (908-917)
  source 1..30: mol_type = other RNA
gtggccgcccccccgcccaagaacagcttc

SEQ ID NO: 51917 - RNA, 30 nt, synthetic construct
  misc_feature 1..30: note Dolichyl-diphosphooligosaccharide-proteinosyltransferase subunit 2 (450-459)
  source 1..30: mol_type = other RNA
gtggccgagcccgacaacaagaacgtctac

SEQ ID NO: 51918 - RNA, 33 nt, synthetic construct
  misc_feature 1..33: note = Sodium/iodide cotransporter (484-494)
  source 1..33: mol_type = other RNA
gtggccctgagcgtcaacgcctccggcctcctg

SEQ ID NO: 51919 - RNA, 27 nt, synthetic construct
  misc_feature 1..27: note = Transcription elongation factor SPT5 (216-224)
  source 1..27: mol_type = other RNA
gtggcccccgagcacgtcaagggctac

SEQ ID NO: 51920 - RNA, 30 nt, synthetic construct
  misc_feature 1..30: note = DNA-dependent protein kinase catalytic subunit (2797-2806)
  source 1..30: mol_type = other RNA
gtggcccagcgcgaccccatcatcgccaag

SEQ ID NO: 51921 - RNA, 27 nt, synthetic construct
  misc_feature 1..27: note = Tetratricopeptide repeat protein 21B (25-33)
  source 1..27: mol_type = other RNA
gtggccagcgagggcatcaagcgctac

SEQ ID NO: 51922 - RNA, 27 nt, synthetic construct
  misc_feature 1..27: note = Probable E3 ubiquitin-protein ligase HERC1 (1139-1147)
  source 1..27: mol_type = other RNA
gtggacctggagcgcaccatcgccctc

SEQ ID NO: 51923 - RNA, 27 nt, synthetic construct
  misc_feature 1..27: note = Cytoplasmic dynein 1 heavy chain 1 (795-803)
  source 1..27: mol_type = other RNA
gtggaggagcgcaacaccatcagcctg

SEQ ID NO: 51924 - RNA, 33 nt, synthetic construct
  misc_feature 1..33: note = L-dopachrome tautomerase (152-162)
  source 1..33: mol_type = other RNA
gtggaggagacccccggctggccgaccacgctg

SEQ ID NO: 51925 - RNA, 27 nt, synthetic construct
  misc_feature 1..27: note = Glycogen phosphorylase, brain form (505-513)
  source 1..27: mol_type = other RNA
gtggagaagatcggcgaggagttcctg

SEQ ID NO: 51926 - RNA, 33 nt, synthetic construct
  misc_feature 1..33: note = Receptor-type tyrosine-protein phosphatase delta (635-645)
  source 1..33: mol_type = other RNA
gtggagaagcagaacggcatcatcaccgagtac

SEQ ID NO: 51927 - RNA, 24 nt, synthetic construct
  misc_feature 1..24: note = Phosphatidylinositol 3,4,5-trisphosphate-dependent Rac exchanger 1 protein (160-167)
  source 1..24: mol_type = other RNA
gtggagctgaacaagatccccacc

SEQ ID NO: 51928 - RNA, 27 nt, synthetic construct
  misc_feature 1..27: note = Prosaposin (299-307)
  source 1..27: mol_type = other RNA
gtggagcccatcaagaagcacgaggtc

SEQ ID NO: 51929 - RNA, 30 nt, synthetic construct
  misc_feature 1..30: note = Coiled-coil domain-containing protein 13 (514-523)
  source 1..30: mol_type = other RNA
gtggagagcgccctgacccgcccctccctc

SEQ ID NO: 51930 - RNA, 36 nt, synthetic construct
  misc_feature 1..36: note = Protein ZGRF1 (799-810)
  source 1..36: mol_type = other RNA
gtggaggtcgagaccgcccgcgagggcaagcagtac

SEQ ID NO: 51931 - RNA, 33 nt, synthetic construct
  misc_feature 1..33: note = Proteasome subunit alpha type-1 (104-114)
  source 1..33: mol_type = other RNA
gtgttcgaccgccccctgccggtcagccggctc

SEQ ID NO: 51932 - RNA, 33 nt, synthetic construct
  misc_feature 1..33: note = ATP-dependent RNA helicase DDX3X (408-418)
  source 1..33: mol_type = other RNA
gtgggcagcacctccgagaacatcacccagaag

SEQ ID NO: 51933 - RNA, 27 nt, synthetic construct
  misc_feature 1..27: note = Protocadherin-18 (261-269)
  source 1..27: mol_type = other RNA
gtgggcaccctgctcctggacctgaac

SEQ ID NO: 51934 - RNA, 30 nt, synthetic construct
  misc_feature 1..30: note = THO complex subunit 4 (113-122)
  source 1..30: mol_type = other RNA
gtgcactacgaccgcagcggccggtccctg

SEQ ID NO: 51935 - RNA, 36 nt, synthetic construct
  misc_feature 1..36: note = Butyrophilin subfamily 3 member A3 secreted isoform (174-185)
  source 1..36: mol_type = other RNA
gtgatcctggaccccgacaccgccaacgccatcctc

SEQ ID NO: 51936 - RNA, 21 nt, synthetic construct
  misc_feature 1..21: note = Trafficking protein particle complex subunit 8 (106-112)
  source 1..21: mol_type = other RNA
gtgatcaccgccggcgactac

SEQ ID NO: 51937 - RNA, 30 nt, synthetic construct
  misc_feature 1..30: note = P antigen family member 5 (46-55)
  source 1..30: mol_type = other RNA
gtgatcgtccagcagcccaccgaggagaag

SEQ ID NO: 51938 - RNA, 42 nt, synthetic construct
  misc_feature 1..42: note = Myosin-10 (20-33)
  source 1..42: mol_type = other RNA
gtgatctacaaccccgccacccaggccgactggaccgcgaag

SEQ ID NO: 51939 - RNA, 33 nt, synthetic construct
  misc_feature 1..33: note = Protein-methionine sulfoxide oxidase MICAL1 (432-442)
  source 1..33: mol_type = other RNA
gtgctggccgagcgcgagagcctctaccagctg

SEQ ID NO: 51940 - RNA, 30 nt, synthetic construct
  misc_feature 1..30: note = Protocadherin alpha-1 (636-645)
  source 1..30: mol_type = other RNA
gtgctggacgaggccgacctcagccgctac

SEQ ID NO: 51941 - RNA, 27 nt, synthetic construct
  misc_feature 1..27: note = NF-kappa-B inhibitor epsilon (286-294)
  source 1..27: mol_type = other RNA
gtgctggacatccagaacaacctctac

SEQ ID NO: 51942 - RNA, 33 nt, synthetic construct
  misc_feature 1..33: note = Peroxisomal trans-2-enoyl-CoA reductase (146-156)
  source 1..33: mol_type = other RNA
gtgctggagaccaacctcaccggcacgttctac

SEQ ID NO: 51943 - RNA, 33 nt, synthetic construct
  misc_feature 1..33: note = Translocon-associated protein subunit alpha (19-29)
  source 1..33: mol_type = other RNA
gtgctgttccgcggcgggccccggggcctcctg

SEQ ID NO: 51944 - RNA, 27 nt, synthetic construct
  misc_feature 1..27: note = ETS translocation variant 5 (79-87)
  source 1..27: mol_type = other RNA
gtgctgcacgcccccccgcccaccaag

SEQ ID NO: 51945 - RNA, 27 nt, synthetic construct
  misc_feature 1..27: note = Sorting nexin-14 (176-184)
  source 1..27: mol_type = other RNA
gtgctgatccgccggatccacaaggtc

SEQ ID NO: 51946 - RNA, 36 nt, synthetic construct
  misc_feature 1..36: note = Transcription initiation factor IIE subunit beta (280-291)
  source 1..36: mol_type = other RNA
gtgctgaaggactacagcgacatcacctccagcaag

SEQ ID NO: 51947 - RNA, 33 nt, synthetic construct
  misc_feature 1..33: note = Adenosylhomocysteinase 2 (123-133)
  source 1..33: mol_type = other RNA
gtgctgctcgccgagggccgcctgctgaacctc

SEQ ID NO: 51948 - RNA, 33 nt, synthetic construct
  misc_feature 1..33: note = Splicing factor 3B subunit 2 (163-173)
  source 1..33: mol_type = other RNA
gtgctgctcgagcaggagcgccagcaggagatc

SEQ ID NO: 51949 - RNA, 39 nt, synthetic construct
  misc_feature 1..39: note = Sodium-dependent phosphate transporter 1 (75-87)
  source 1..39: mol_type = other RNA
gtgctgctcggcgccaaggtcagcgagaccatccgcaag

SEQ ID NO: 51950 - RNA, 30 nt, synthetic construct
  misc_feature 1..30: note = HCG2043033, isoform CRA_b (11-20)
  source 1..30: mol_type = other RNA
gtgctgatgggcctccccctggcccaggcc

SEQ ID NO: 51951 - RNA, 30 nt, synthetic construct
  misc_feature 1..30: note = Armadillo repeat-containing X-linked protein 1 (210-219)
  source 1..30: mol_type = other RNA
gtgctgaacatcctcgagcgcaccaacgac

SEQ ID NO: 51952 - RNA, 27 nt, synthetic construct
  misc_feature 1..27: note = Protein GPR108 (359-367)
  source 1..27: mol_type = other RNA
gtgctgagcgacaaggagaagaaggtc

SEQ ID NO: 51953 - RNA, 30 nt, synthetic construct
  misc_feature 1..30: note = Leucine-rich repeat-containing protein 1 (295-304)
  source 1..30: mol_type = other RNA
gtgctgaccgagaaccagctcctgaccctg

SEQ ID NO: 51954 - RNA, 33 nt, synthetic construct
  misc_feature 1..33: note = 2',3'-cyclic-nucleotide 3'-phosphodiesterase (126-136)
  source 1..33: mol_type = other RNA
gtgctggtcgagcccaagaccgcctggcgcctc

SEQ ID NO: 51955 - RNA, 33 nt, synthetic construct
  misc_feature 1..33: note = Zinc finger CCHC domain-containing protein 14 (120-130)
  source 1..33: mol_type = other RNA
gtgctgtggagcgactccagcatcacctccgtc

SEQ ID NO: 51956 - RNA, 30 nt, synthetic construct
  misc_feature 1..30: note = ADP/ATP translocase 1 (288-297)
  source 1..30: mol_type = other RNA
gtgctgtacgacgagatcaagaagtacgtc

SEQ ID NO: 51957 - RNA, 36 nt, synthetic construct
  misc_feature 1..36: note = Sodium/potassium/calcium exchanger 5 (423-434)
  source 1..36: mol_type = other RNA
gtgctgtacgagctcggcatcatcgggaacaacaag

SEQ ID NO: 51958 - RNA, 33 nt, synthetic construct
  misc_feature 1..33: note = Cytoplasmic dynein 1 heavy chain 1 (3839-3849)
  source 1..33: mol_type = other RNA
gtgctgtacgagaaccccaacctcaagggcgtc

SEQ ID NO: 51959 - RNA, 45 nt, synthetic construct
  misc_feature 1..45: note Dolichyl-diphosphooligosaccharide-proteinosyltransferase subunit 4 (23-37)
  source 1..45: mol_type = other RNA
gtgctgtaccactacgtcgccgtgaacaaccccaagaagcaggag

SEQ ID NO: 51960 - RNA, 39 nt, synthetic construct
  misc_feature 1..39: note = Ras-related protein Rab-27A (25-37)
  source 1..39: mol_type = other RNA
gtgctgtaccagtacaccgacggcaagttcaacagcaag

SEQ ID NO: 51961 - RNA, 24 nt, synthetic construct
  misc_feature 1..24: note = HLA class I histocompatibility antigen, A-29 alpha chain (3-10)
  source 1..24: mol_type = other RNA
gtgatggccccccgcaccctgctc

SEQ ID NO: 51962 - RNA, 27 nt, synthetic construct
  misc_feature 1..27: note = Embryonic stem cell-specific 5-hydroxymethylcytosine-binding protein (102-110)
  source 1..27: mol_type = other RNA
gtgatggagaagcgcagcttcaaggtc

SEQ ID NO: 51963 - RNA, 33 nt, synthetic construct
  misc_feature 1..33: note = Ribosomal protein S6 kinase alpha-2 (56-66)
  source 1..33: mol_type = other RNA
gtgatgttcaccgaggaggacgtcaagttctac

SEQ ID NO: 51964 - RNA, 27 nt, synthetic construct
  misc_feature 1..27: note = Antigen KI-67 (115-123)
  source 1..27: mol_type = other RNA
gtgatgcacacccccccggtcctgaag

SEQ ID NO: 51965 - RNA, 39 nt, synthetic construct
  misc_feature 1..39: note = Transient receptor potential cation channel subfamily V member 2 (253-265)
  source 1..39: mol_type = other RNA
gtgatgatcagcgacaactccgccgagaacatcgccctg

SEQ ID NO: 51966 - RNA, 27 nt, synthetic construct
  misc_feature 1..27: note = Signal transducer and activator of transcription 1-alpha/beta (134-142)
  source 1..27: mol_type = other RNA
gtgatgctggacaagcagaaggagctc

SEQ ID NO: 51967 - RNA, 30 nt, synthetic construct
  misc_feature 1..30: note = Poly(U)-binding-splicing factor PUF60 (175-184)
  source 1..30: mol_type = other RNA
gtgatgctgggcgggcgcaacatcaaggtc

SEQ ID NO: 51968 - RNA, 27 nt, synthetic construct
  misc_feature 1..27: note = Transcriptional coactivator YAP1 (72-80)
  source 1..27: mol_type = other RNA
gtgatgaaccccaagaccgccaacgtc

SEQ ID NO: 51969 - RNA, 27 nt, synthetic construct
  misc_feature 1..27: note = CD63 antigen (111-119)
  source 1..27: mol_type = other RNA
gtgatgagcgagttcaacaacaacttc

SEQ ID NO: 51970 - RNA, 30 nt, synthetic construct
  misc_feature 1..30: note = Ras-related C3 botulinum toxin substrate 1 (44-53)
  source 1..30: mol_type = other RNA
gtgatggtcgacggcaagcccgtgaacctg

SEQ ID NO: 51971 - RNA, 33 nt, synthetic construct
  misc_feature 1..33: note = Uncharacterized protein C4orf36 (5-15)
  source 1..33: mol_type = other RNA
gtgccccgcaagaacaccgtcaagaccatcctg

SEQ ID NO: 51972 - RNA, 27 nt, synthetic construct
  misc_feature 1..27: note = Zinc finger protein ZFAT (1182-1190)
  source 1..27: mol_type = other RNA
gtgcagcaggccagcgtcgagctggcc

SEQ ID NO: 51973 - RNA, 27 nt, synthetic construct
  misc_feature 1..27: note = tRNA wybutosine-synthesizing protein 4 (287-295)
  source 1..27: mol_type = other RNA
gtgcagtgggacggccgcctgtaccac

SEQ ID NO: 51974 - RNA, 27 nt, synthetic construct
  misc_feature 1..27: note = Pre-mRNA-processing-splicing factor 8 (1168-1176)
  source 1..27: mol_type = other RNA
gtgcagtgggagaacagcttcgtctcc

SEQ ID NO: 51975 - RNA, 33 nt, synthetic construct
  misc_feature 1..33: note = Unconventional myosin-X (553-563)
  source 1..33: mol_type = other RNA
gtgcagtacgacgtccgcggcatcctggagaag

SEQ ID NO: 51976 - RNA, 54 nt, synthetic construct
  misc_feature 1..54: note = Probable ATP-dependent RNA helicase DDX5 (550-567)
  source 1..54: mol_type = other RNA
gtgagcgccggcatccagacctccttccgcaccgggaaccccacgggcacctac

SEQ ID NO: 51977 - RNA, 27 nt, synthetic construct
  misc_feature 1..27: note = 60S ribosomal protein L24 (148-156)
  source 1..27: mol_type = other RNA
gtgagcgccccccgcgtcggcgggaag

SEQ ID NO: 51978 - RNA, 27 nt, synthetic construct
  misc_feature 1..27: note = NADH dehydrogenase (ubiquinone) iron-sulfur protein 2, mitochondrial (8-16)
  source 1..27: mol_type = other RNA
gtgagcgacggctccagccgcccctac

SEQ ID NO: 51979 - RNA, 27 nt, synthetic construct
  misc_feature 1..27: note = Single Ig IL-1-related receptor (387-395)
  source 1..27: mol_type = other RNA
gtgagcgacctgggctcccgcaactac

SEQ ID NO: 51980 - RNA, 27 nt, synthetic construct
  misc_feature 1..27: note = MAM domain-containingosylphosphatidylinositol anchor protein 1 (140-148)
  source 1..27: mol_type = other RNA
gtgagcgacgtccgcggcaacttctac

SEQ ID NO: 51981 - RNA, 33 nt, synthetic construct
  misc_feature 1..33: note = Protein eva-1 homolog A (27-37)
  source 1..33: mol_type = other RNA
gtgagcgagaaccccgagcgcgccgccctgtac

SEQ ID NO: 51982 - RNA, 27 nt, synthetic construct
  misc_feature 1..27: note = Clustered mitochondria protein homolog (512-520)
  source 1..27: mol_type = other RNA
gtgagccacccccgctacctggagctc

SEQ ID NO: 51983 - RNA, 27 nt, synthetic construct
  misc_feature 1..27: note = ER degradation-enhancing alpha-mannosidase-like protein 2 (270-278)
  source 1..27: mol_type = other RNA
gtgagcatgcccgtcttccagtccctg

SEQ ID NO: 51984 - RNA, 33 nt, synthetic construct
  misc_feature 1..33: note = Transmembrane protein 50A (73-83)
  source 1..33: mol_type = other RNA
gtgagcaacggccaggtccgcggggactcctac

SEQ ID NO: 51985 - RNA, 36 nt, synthetic construct
  misc_feature 1..36: note = Natriuretic peptides A (87-98)
  source 1..36: mol_type = other RNA
gtgagccccgcccagcgcgacggcggggccctgggc

SEQ ID NO: 51986 - RNA, 27 nt, synthetic construct
  misc_feature 1..27: note = Pre-mRNA-processing-splicing factor 8 (2131-2139)
  source 1..27: mol_type = other RNA
gtgagccccccggacaacccccaggtc

SEQ ID NO: 51987 - RNA, 33 nt, synthetic construct
  misc_feature 1..33: note = PRO2822 (92-102)
  source 1..33: mol_type = other RNA
gtgagccaggacggcctgaacctcctgaccctg

SEQ ID NO: 51988 - RNA, 30 nt, synthetic construct
  misc_feature 1..30: note = PAB-dependent poly(A)-specific ribonuclease subunit PAN3 (183-192)
  source 1..30: mol_type = other RNA
gtgagccagaccccctccagcggccaggtc

SEQ ID NO: 51989 - RNA, 30 nt, synthetic construct
  misc_feature 1..30: note = Heat shock cognate 71 kDa protein (536-545)
  source 1..30: mol_type = other RNA
gtgagctccaagaacagcctggagtcctac

SEQ ID NO: 51990 - RNA, 27 nt, synthetic construct
  misc_feature 1..27: note = Zinc finger protein with KRAB and SCAN domains 2 (134-142)
  source 1..27: mol_type = other RNA
gtgagctcccccgtccaccgcgagaag

SEQ ID NO: 51991 - RNA, 33 nt, synthetic construct
  misc_feature 1..33: note = Complex I assembly factor TMEM126B, mitochondrial (46-56)
  source 1..33: mol_type = other RNA
gtgaccgacaagctgttcgtcatcgacgccctc

SEQ ID NO: 51992 - RNA, 27 nt, synthetic construct
  misc_feature 1..27: note = Uncharacterized protein C11orf63 (295-303)
  source 1..27: mol_type = other RNA
gtgaccgacaagaccagcatccagaac

SEQ ID NO: 51993 - RNA, 27 nt, synthetic construct
  misc_feature 1..27: note = Receptor-type tyrosine-protein phosphatase zeta (705-713)
  source 1..27: mol_type = other RNA
gtgaccgacctggagatgccccactac

SEQ ID NO: 51994 - RNA, 24 nt, synthetic construct
  misc_feature 1..24: note = F-box/LRR-repeat protein 7 (316-323)
  source 1..24: mol_type = other RNA
gtgaccgacgtcggcatccgctac

SEQ ID NO: 51995 - RNA, 33 nt, synthetic construct
  misc_feature 1..33: note = Heterogeneous nuclear ribonucleoprotein Q (266-276)
  source 1..33: mol_type = other RNA
gtgaccgagggcctgaccgacgtcatcctctac

SEQ ID NO: 51996 - RNA, 24 nt, synthetic construct
  misc_feature 1..24: note = Filamin-A (2353-2360)
  source 1..24: mol_type = other RNA
gtgaccgagatcgaccaggacaag

SEQ ID NO: 51997 - RNA, 30 nt, synthetic construct
  misc_feature 1..30: note = 1-acyl-sn-glycerol-3-phosphate acyltransferase gamma (296-305)
  source 1..30: mol_type = other RNA
gtgaccgagatcgagaagggcagctcctac

SEQ ID NO: 51998 - RNA, 30 nt, synthetic construct
  misc_feature 1..30: note = Carbonic anhydrase-related protein (181-190)
  source 1..30: mol_type = other RNA
gtgaccgagatcctgcaggacatccagtac

SEQ ID NO: 51999 - RNA, 30 nt, synthetic construct
  misc_feature 1..30: note = Short-chain-specific acyl-CoA dehydrogenase, mitochondrial (369-378)
  source 1..30: mol_type = other RNA
gtgaccgagatgcccgccgagcgccactac

SEQ ID NO: 52000 - RNA, 27 nt, synthetic construct
  misc_feature 1..27: note = Tyrosine-protein kinase TXK (10-18)
  source 1..27: mol_type = other RNA
gtgaccgagaacaagatcaccaacctg

SEQ ID NO: 52001 - RNA, 21 nt, synthetic construct
  misc_feature 1..21: note = Integrin beta-3 (336-342)
  source 1..21: mol_type = other RNA
gtgaccgagaacgtcgtgaac

SEQ ID NO: 52002 - RNA, 27 nt, synthetic construct
  misc_feature 1..27: note = Integrin beta-3 (336-344)
  source 1..27: mol_type = other RNA
gtgaccgagaacgtcgtgaacctgtac

SEQ ID NO: 52003 - RNA, 36 nt, synthetic construct
  misc_feature 1..36: note = Integrin beta-3 (336-347)
  source 1..36: mol_type = other RNA
gtgaccgagaacgtcgtgaacctgtaccagaactac

SEQ ID NO: 52004 - RNA, 30 nt, synthetic construct
  misc_feature 1..30: note = Myosin phosphatase Rho-interacting protein (65-74)
  source 1..30: mol_type = other RNA
gtgaccgagtaccccgtccagcgcaactac

SEQ ID NO: 52005 - RNA, 27 nt, synthetic construct
  misc_feature 1..27: note = Lymphocyte antigen 6E (61-69)
  source 1..27: mol_type = other RNA
gtgaccttcggccacagcctgtccaag

SEQ ID NO: 52006 - RNA, 27 nt, synthetic construct
  misc_feature 1..27: note = OX-2 membraneoprotein (76-84)
  source 1..27: mol_type = other RNA
gtgaccttcagcgagaaccacggcgtc

SEQ ID NO: 52007 - RNA, 30 nt, synthetic construct
  misc_feature 1..30: note = Annexin A9 (3-12)
  source 1..30: mol_type = other RNA
gtgaccggcgggaagatggcccccagcctg

SEQ ID NO: 52008 - RNA, 30 nt, synthetic construct
  misc_feature 1..30: note = Zinc finger FYVE domain-containing protein 16 (97-106)
  source 1..30: mol_type = other RNA
gtgaccggcctggacctcctgagctccgtc

SEQ ID NO: 52009 - RNA, 33 nt, synthetic construct
  misc_feature 1..33: note = Kinesin-like protein KIF6 (24-34)
  source 1..33: mol_type = other RNA
gtgaccatcgacgacaacaagcagatcctgaag

SEQ ID NO: 52010 - RNA, 27 nt, synthetic construct
  misc_feature 1..27: note = RNA pseudouridylate synthase domain-containing protein 1 (112-120)
  source 1..27: mol_type = other RNA
gtgaccatcagccacgccatcggccgc

SEQ ID NO: 52011 - RNA, 27 nt, synthetic construct
  misc_feature 1..27: note = Endoribonuclease Dicer (827-835)
  source 1..27: mol_type = other RNA
gtgaccatcagcatcgagctgaagaag

SEQ ID NO: 52012 - RNA, 33 nt, synthetic construct
  misc_feature 1..33: note = FACT complex subunit SPT16 (3-13)
  source 1..33: mol_type = other RNA
gtgaccctggacaaggacgcctactaccgccgg

SEQ ID NO: 52013 - RNA, 27 nt, synthetic construct
  misc_feature 1..27: note = Pappalysin-1 (689-697)
  source 1..27: mol_type = other RNA
gtgaccctggagtggttccccccgatc

SEQ ID NO: 52014 - RNA, 30 nt, synthetic construct
  misc_feature 1..30: note = Autophagy-related protein 9A (411-420)
  source 1..30: mol_type = other RNA
gtgaccctgctcggcgtcaccgtgacggtg

SEQ ID NO: 52015 - RNA, 30 nt, synthetic construct
  misc_feature 1..30: note = WD repeat-containing protein 70 (23-32)
  source 1..30: mol_type = other RNA
gtgaccatgggcttcaccgggttcggcaag

SEQ ID NO: 52016 - RNA, 33 nt, synthetic construct
  misc_feature 1..33: note = Small subunit processome component 20 homolog (830-840)
  source 1..33: mol_type = other RNA
gtgaccaaccccgacatcgccgccaagaagaag

SEQ ID NO: 52017 - RNA, 27 nt, synthetic construct
  misc_feature 1..27: note = DNA (cytosine-5)-methyltransferase 1 (1422-1430)
  source 1..27: mol_type = other RNA
gtgaccaaccccgagccgatgggcaag

SEQ ID NO: 52018 - RNA, 27 nt, synthetic construct
  misc_feature 1..27: note = Beta-parvin (138-146)
  source 1..27: mol_type = other RNA
gtgacccagagcgagatcggccagaag

SEQ ID NO: 52019 - RNA, 27 nt, synthetic construct
  misc_feature 1..27: note = Polymerase delta-interacting protein 3 (410-418)
  source 1..27: mol_type = other RNA
gtgaccacccagcccacggagttcaag

SEQ ID NO: 52020 - RNA, 30 nt, synthetic construct
  misc_feature 1..30: note = Polycystin-1 (1443-1452)
  source 1..30: mol_type = other RNA
gtgaccgtcaccgccagcaacaacatctcc

SEQ ID NO: 52021 - RNA, 27 nt, synthetic construct
  misc_feature 1..27: note = LisH domain-containing protein ARMC9 (225-233)
  source 1..27: mol_type = other RNA
gtgacctacctgaagcgctacaacaag

SEQ ID NO: 52022 - RNA, 33 nt, synthetic construct
  misc_feature 1..33: note = Trafficking protein particle complex subunit 2-like protein (8-18)
  source 1..33: mol_type = other RNA
gtggtcgacgagaagatcagcgccatgggcaag

SEQ ID NO: 52023 - RNA, 30 nt, synthetic construct
  misc_feature 1..30: note = Beta-actin-like protein 2 (10-19)
  source 1..30: mol_type = other RNA
gtggtcgacaacggcagcgggatgtgcaag

SEQ ID NO: 52024 - RNA, 36 nt, synthetic construct
  misc_feature 1..36: note = Beta-actin-like protein 2 (10-21)
  source 1..36: mol_type = other RNA
gtggtcgacaacggcagcgggatgtgcaaggccggc

SEQ ID NO: 52025 - RNA, 27 nt, synthetic construct
  misc_feature 1..27: note = Cytosolic acyl coenzyme A thioester hydrolase (273-281)
  source 1..27: mol_type = other RNA
gtggtcgacagctcccagaagcgctac

SEQ ID NO: 52026 - RNA, 30 nt, synthetic construct
  misc_feature 1..30: note = Catalase (55-64)
  source 1..30: mol_type = other RNA
gtggtcttcaccgacgagatggcccacttc

SEQ ID NO: 52027 - RNA, 33 nt, synthetic construct
  misc_feature 1..33: note = RAB6A-GEF complex partner protein 2 (239-249)
  source 1..33: mol_type = other RNA
gtggtcggcaccctgaacctcggggagggcacc

SEQ ID NO: 52028 - RNA, 33 nt, synthetic construct
  misc_feature 1..33: note = Retroviral-like aspartic protease 1 (242-252)
  source 1..33: mol_type = other RNA
gtggtcaaggtggccaacggcgccgagatgaag

SEQ ID NO: 52029 - RNA, 33 nt, synthetic construct
  misc_feature 1..33: note = Thiosulfate sulfurtransferase (97-107)
  source 1..33: mol_type = other RNA
gtggtctacgacggcgagcacctggggagcttc

SEQ ID NO: 52030 - RNA, 27 nt, synthetic construct
  misc_feature 1..27: note = Keratinocyte-associated transmembrane protein 2 (212-220)
  source 1..27: mol_type = other RNA
gtggtctacatcacctaccacaacaag

SEQ ID NO: 52031 - RNA, 39 nt, synthetic construct
  misc_feature 1..39: note = HLA class I histocompatibility antigen, B-40 alpha chain (243-255)
  source 1..39: mol_type = other RNA
tgggccgccgtggtcgtgcccagcggcgaggagcagcgc

SEQ ID NO: 52032 - RNA, 27 nt, synthetic construct
  misc_feature 1..27: note = Glycerol kinase (156-164)
  source 1..27: mol_type = other RNA
tggctgctcgacaacgtgcgcaaggtc

SEQ ID NO: 52033 - RNA, 33 nt, synthetic construct
  misc_feature 1..33: note = Protein transport protein Sec61 subunit alpha isoform 1 (324-334)
  source 1..33: mol_type = other RNA
tggagcgacacctccagcggcgggcccgcccgc

SEQ ID NO: 52034 - RNA, 30 nt, synthetic construct
  misc_feature 1..30: note = Ubiquitin carboxyl-terminal hydrolase 48 (533-542)
  source 1..30: mol_type = other RNA
tacgccgccgacatcttctacagccgctac

SEQ ID NO: 52035 - RNA, 27 nt, synthetic construct
  misc_feature 1..27: note = RNA-binding protein 14 (528-536)
  source 1..27: mol_type = other RNA
tacgccgcccagcagcacccccaggcg

SEQ ID NO: 52036 - RNA, 33 nt, synthetic construct
  misc_feature 1..33: note = Unconventional myosin-Va (62-72)
  source 1..33: mol_type = other RNA
tacgccgacgaccccaagaagtaccagagctac

SEQ ID NO: 52037 - RNA, 30 nt, synthetic construct
  misc_feature 1..30: note = V-type proton ATPase subunit B, kidney isoform (384-393)
  source 1..30: mol_type = other RNA
tacgccatcggcaaggacgtgcaggccatg

SEQ ID NO: 52038 - RNA, 27 nt, synthetic construct
  misc_feature 1..27: note = Junction plakoglobin (245-253)
  source 1..27: mol_type = other RNA
tacgccatcaccaccctgcacaacctc

SEQ ID NO: 52039 - RNA, 27 nt, synthetic construct
  misc_feature 1..27: note = Threonine-tRNA ligase, mitochondrial (546-554)
  source 1..27: mol_type = other RNA
tacgccaaggaggcccagcagagcctg

SEQ ID NO: 52040 - RNA, 27 nt, synthetic construct
  misc_feature 1..27: note = G2/mitotic-specific cyclin-B2 (368-376)
  source 1..27: mol_type = other RNA
tacgccagctccaagctgctcaagatc

SEQ ID NO: 52041 - RNA, 27 nt, synthetic construct
  misc_feature 1..27: note = Heterogeneous nuclear ribonucleoprotein L (430-438)
  source 1..27: mol_type = other RNA
tacgccgtggaccgcgccatcacccac

SEQ ID NO: 52042 - RNA, 33 nt, synthetic construct
  misc_feature 1..33: note = Protein-methionine sulfoxide oxidase MICAL3 (803-813)
  source 1..33: mol_type = other RNA
tacgcctacgacatcgaggacggcaagttctac

SEQ ID NO: 52043 - RNA, 27 nt, synthetic construct
  misc_feature 1..27: note = Hypoxia-inducible factor 1-alpha (254-262)
  source 1..27: mol_type = other RNA
tactgcgacgagcgcatcaccgagctg

SEQ ID NO: 52044 - RNA, 27 nt, synthetic construct
  misc_feature 1..27: note = Zinc finger protein 362 (287-295)
  source 1..27: mol_type = other RNA
tactgcgacaagagcttccgccagctg

SEQ ID NO: 52045 - RNA, 39 nt, synthetic construct
  misc_feature 1..39: note = Cofilin-1 (85-97)
  source 1..39: mol_type = other RNA
tacgacgccacctacgagaccaaggagagcaagaaggag

SEQ ID NO: 52046 - RNA, 30 nt, synthetic construct
  misc_feature 1..30: note = Melanoma antigen preferentially expressed in tumors (448-457)
  source 1..30: mol_type = other RNA
tacgaggacatccacggcaccctgcacctc

SEQ ID NO: 52047 - RNA, 27 nt, synthetic construct
  misc_feature 1..27: note = Transmembrane protein 9B (93-101)
  source 1..27: mol_type = other RNA
tacgaggagcgcagctccgtgaccatc

SEQ ID NO: 52048 - RNA, 33 nt, synthetic construct
  misc_feature 1..33: note = Ubiquitin-like protein 5 (60-70)
  source 1..33: mol_type = other RNA
tacgagatccacgacggcatgaacctggagctc

SEQ ID NO: 52049 - RNA, 36 nt, synthetic construct
  misc_feature 1..36: note = HLA class I histocompatibility antigen, alpha chain E (124-135)
  source 1..36: mol_type = other RNA
tacgagcagttcgcctacgacggcaaggactacctg

SEQ ID NO: 52050 - RNA, 27 nt, synthetic construct
  misc_feature 1..27: note = Carbohydrate sulfotransferase 14 (199-207)
  source 1..27: mol_type = other RNA
tacggcgccgagatcgtgcgccggtac

SEQ ID NO: 52051 - RNA, 27 nt, synthetic construct
  misc_feature 1..27: note = RNA-binding protein 14 (474-482)
  source 1..27: mol_type = other RNA
tacggcgcccaggccagcatggggctg

SEQ ID NO: 52052 - RNA, 33 nt, synthetic construct
  misc_feature 1..33: note = Transcription factor SOX-10 (412-422)
  source 1..33: mol_type = other RNA
tacggccacagcgggcaggcctccggcctgtac

SEQ ID NO: 52053 - RNA, 36 nt, synthetic construct
  misc_feature 1..36: note = Heterogeneous nuclear ribonucleoproteins A2/B1 (243-254)
  source 1..36: mol_type = other RNA
tacggcagcgggaactacaacgacttcggcaactac

SEQ ID NO: 52054 - RNA, 30 nt, synthetic construct
  misc_feature 1..30: note = RNMT-activating mini protein (107-116)
  source 1..30: mol_type = other RNA
tacggctacaaccagcgccccccgtacggg

SEQ ID NO: 52055 - RNA, 30 nt, synthetic construct
  misc_feature 1..30: note = Histone deacetylase complex subunit SAP130 (880-889)
  source 1..30: mol_type = other RNA
tacatcgacgaggagggcgtgcgctacgtc

SEQ ID NO: 52056 - RNA, 33 nt, synthetic construct
  misc_feature 1..33: note = Cleft lip and palate transmembrane protein 1 (409-419)
  source 1..33: mol_type = other RNA
tacatcctggacaacgagaccaacttcgtggtc

SEQ ID NO: 52057 - RNA, 33 nt, synthetic construct
  misc_feature 1..33: note = Negative elongation factor C/D (47-57)
  source 1..33: mol_type = other RNA
tacatcatggagcccagcatcttcaacaccctg

SEQ ID NO: 52058 - RNA, 27 nt, synthetic construct
  misc_feature 1..27: note = Filamin-B (1580-1588)
  source 1..27: mol_type = other RNA
tacatccccgacaagaccggccgctac

SEQ ID NO: 52059 - RNA, 27 nt, synthetic construct
  misc_feature 1..27: note = Beta-catenin-interacting protein 1 (15-23)
  source 1..27: mol_type = other RNA
tacatccagcagaaggtgcgcgtcctg

SEQ ID NO: 52060 - RNA, 30 nt, synthetic construct
  misc_feature 1..30: note = Signal recognition particle 9 kDa protein (18-27)
  source 1..30: mol_type = other RNA
tacctggccgaccccatgaaggcccgcgtg

SEQ ID NO: 52061 - RNA, 27 nt, synthetic construct
  misc_feature 1..27: note = S-phase kinase-associated protein 1 (33-41)
  source 1..27: mol_type = other RNA
tacctggacatcaagggcctcctggac

SEQ ID NO: 52062 - RNA, 30 nt, synthetic construct
  misc_feature 1..30: note = Procollagen-lysine,2-oxoglutarate 5-dioxygenase 3 (199-208)
  source 1..30: mol_type = other RNA
tacctggaccccggcctccgcgagaagctg

SEQ ID NO: 52063 - RNA, 30 nt, synthetic construct
  misc_feature 1..30: note = Protein dpy-30 homolog (56-65)
  source 1..30: mol_type = other RNA
tacctggaccagaccgtggtccccatcctc

SEQ ID NO: 52064 - RNA, 33 nt, synthetic construct
  misc_feature 1..33: note = Lysyl oxidase homolog 4 (547-557)
  source 1..33: mol_type = other RNA
tacctggaggaccgccccctcagccagctgtac

SEQ ID NO: 52065 - RNA, 36 nt, synthetic construct
  misc_feature 1..36: note = Ectonucleotide pyrophosphatase/phosphodiesterase family member 1 (319-330)
  source 1..36: mol_type = other RNA
tacctggaggagcccgacagctccggccacagctac

SEQ ID NO: 52066 - RNA, 27 nt, synthetic construct
  misc_feature 1..27: note = HLA class I histocompatibility antigen, Cw-8 alpha chain (170-178)
  source 1..27: mol_type = other RNA
tacctggagaacggcaagaagaccctc

SEQ ID NO: 52067 - RNA, 33 nt, synthetic construct
  misc_feature 1..33: note = Prolyl endopeptidase (353-363)
  source 1..33: mol_type = other RNA
tacctgcacgacgtgaagaacatcctccagctg

SEQ ID NO: 52068 - RNA, 33 nt, synthetic construct
  misc_feature 1..33: note = Unconventional myosin-Vb (79-89)
  source 1..33: mol_type = other RNA
tacctgcacgagcccgccgtgctccacaacctg

SEQ ID NO: 52069 - RNA, 33 nt, synthetic construct
  misc_feature 1..33: note = Dystonin (981-991)
  source 1..33: mol_type = other RNA
tacctgatcaacgagatcgaccgcatccgggcc

SEQ ID NO: 52070 - RNA, 33 nt, synthetic construct
  misc_feature 1..33: note = Tubulin polyglutamylase TTLL5 (191-201)
  source 1..33: mol_type = other RNA
tacctgatcaacaaccccaaccagatcagcctc

SEQ ID NO: 52071 - RNA, 36 nt, synthetic construct
  misc_feature 1..36: note = Vacuolar protein sorting-associated protein 13C (2639-2650)
  source 1..36: mol_type = other RNA
tacctgctcgagggcaccgccgagacccacgagctg

SEQ ID NO: 52072 - RNA, 27 nt, synthetic construct
  misc_feature 1..27: note = Unconventional myosin-XIX (218-226)
  source 1..27: mol_type = other RNA
tacctgctcgagaagacccgcgtggcc

SEQ ID NO: 52073 - RNA, 30 nt, synthetic construct
  misc_feature 1..30: note = Transforming growth factor-beta receptor-associated protein 1 (431-440)
  source 1..30: mol_type = other RNA
tacctgaacgaggtgcgcagcaccgaggtc

SEQ ID NO: 52074 - RNA, 33 nt, synthetic construct
  misc_feature 1..33: note = CD302 antigen (163-173)
  source 1..33: mol_type = other RNA
tacctgagcgacaaccacatcctcatctccgcc

SEQ ID NO: 52075 - RNA, 33 nt, synthetic construct
  misc_feature 1..33: note = GPI inositol-deacylase (41-51)
  source 1..33: mol_type = other RNA
tacatgttcgagtaccccgagtaccagaagatc

SEQ ID NO: 52076 - RNA, 33 nt, synthetic construct
  misc_feature 1..33: note = Methyl-CpG-binding domain protein 4 (530-540)
  source 1..33: mol_type = other RNA
taccccatcgagctgcacggcatcgggaagtac

SEQ ID NO: 52077 - RNA, 27 nt, synthetic construct
  misc_feature 1..27: note = TRIO and F-actin-binding protein (394-402)
  source 1..27: mol_type = other RNA
taccaggaggagctgagccgcgagctc

SEQ ID NO: 52078 - RNA, 27 nt, synthetic construct
  misc_feature 1..27: note = ATP synthase-coupling factor 6, mitochondrial (75-83)
  source 1..27: mol_type = other RNA
taccagcaggagctggagcgcgagctc

SEQ ID NO: 52079 - RNA, 33 nt, synthetic construct
  misc_feature 1..33: note = Caprin-1 (665-675)
  source 1..33: mol_type = other RNA
taccagcgcgacggctaccagcagaacttcaag

SEQ ID NO: 52080 - RNA, 30 nt, synthetic construct
  misc_feature 1..30: note = Melanocyte protein PMEL (485-494)
  source 1..30: mol_type = other RNA
taccgctacggcagcttctccgtgaccctg

SEQ ID NO: 52081 - RNA, 30 nt, synthetic construct
  misc_feature 1..30: note = PDZ and LIM domain protein 2 (315-324)
  source 1..30: mol_type = other RNA
tacagcgcccccgccaccctgtccagccgc

SEQ ID NO: 52082 - RNA, 45 nt, synthetic construct
  misc_feature 1..45: note = Interleukin enhancer-binding factor 3 (690-704)
  source 1..45: mol_type = other RNA
tacagcgacttcttcaccgactgctacggctaccacgacttcggg

SEQ ID NO: 52083 - RNA, 27 nt, synthetic construct
  misc_feature 1..27: note = Sphingosine-1-phosphate lyase 1 (366-374)
  source 1..27: mol_type = other RNA
tacagcgacaagaagtaccgcaactac

SEQ ID NO: 52084 - RNA, 51 nt, synthetic construct
  misc_feature 1..51: note = Cold-inducible RNA-binding protein (151-167)
  source 1..51: mol_type = other RNA
tacagcgaccgctccagcggcgggtcctaccgggacagctacgactcctac

SEQ ID NO: 52085 - RNA, 30 nt, synthetic construct
  misc_feature 1..30: note = AF4/FMR2 family member 2 (1092-1101)
  source 1..30: mol_type = other RNA
tacagcgagaccgtggagctgctccgctac

SEQ ID NO: 52086 - RNA, 45 nt, synthetic construct
  misc_feature 1..45: note = Ribonucleoprotein PTB-binding 1 (601-615)
  source 1..45: mol_type = other RNA
tacagcttcgactacccctccgacatgggcccgcgccggctgttc

SEQ ID NO: 52087 - RNA, 45 nt, synthetic construct
  misc_feature 1..45: note = Heterogeneous nuclear ribonucleoprotein A1 (260-274)
  source 1..45: mol_type = other RNA
tacagcggcgggtcccgcggctacgggagcggcgggcagggctac

SEQ ID NO: 52088 - RNA, 39 nt, synthetic construct
  misc_feature 1..39: note = Interleukin enhancer-binding factor 3 (624-636)
  source 1..39: mol_type = other RNA
tacagcggctccgggggccgcagcgggggcaactcctac

SEQ ID NO: 52089 - RNA, 39 nt, synthetic construct
  misc_feature 1..39: note = Heterogeneous nuclear ribonucleoprotein D-like (222-234)
  source 1..39: mol_type = other RNA
tacagcggctacgggggctacgactacaccgggtacaac

SEQ ID NO: 52090 - RNA, 42 nt, synthetic construct
  misc_feature 1..42: note = Heterogeneous nuclear ribonucleoprotein D-like (222-235)
  source 1..42: mol_type = other RNA
tacagcggctacgggggctacgactacaccgggtacaactac

SEQ ID NO: 52091 - RNA, 42 nt, synthetic construct
  misc_feature 1..42: note = Caprin-1 (662-675)
  source 1..42: mol_type = other RNA
tacagcggctaccagcgcgacgggtaccagcagaacttcaag

SEQ ID NO: 52092 - RNA, 24 nt, synthetic construct
  misc_feature 1..24: note = Transmembrane protein 214 (171-178)
  source 1..24: mol_type = other RNA
tacagcctggtgtcccgcgagctc

SEQ ID NO: 52093 - RNA, 57 nt, synthetic construct
  misc_feature 1..57: note = Cold-inducible RNA-binding protein (142-160)
  source 1..57: mol_type = other RNA
tacagctcccgcagccagtccggcgggtacagcgaccggtccagcggcgggtcctac

SEQ ID NO: 52094 - RNA, 27 nt, synthetic construct
  misc_feature 1..27: note = Condensin complex subunit 2 (428-436)
  source 1..27: mol_type = other RNA
tacagctacttctccccccgcaccatg

SEQ ID NO: 52095 - RNA, 24 nt, synthetic construct
  misc_feature 1..24: note = CBP80/20-dependent translation initiation factor (506-513)
  source 1..24: mol_type = other RNA
tacacctgcctgcgcgagctcctg

SEQ ID NO: 52096 - RNA, 36 nt, synthetic construct
  misc_feature 1..36: note = Transcription factor SOX-10 (369-380)
  source 1..36: mol_type = other RNA
tacaccgaccagcccagcacctcccagatcgcctac

SEQ ID NO: 52097 - RNA, 42 nt, synthetic construct
  misc_feature 1..42: note = Sialidase-1 (400-413)
  source 1..42: mol_type = other RNA
tacaccgagagcatctccgtggccaagatcagcgtctacggc

SEQ ID NO: 52098 - RNA, 27 nt, synthetic construct
  misc_feature 1..27: note = Metalloproteinase inhibitor 3 (48-56)
  source 1..27: mol_type = other RNA
tacaccatcaagcagatgaagatgtac

SEQ ID NO: 52099 - RNA, 27 nt, synthetic construct
  misc_feature 1..27: note = Nodal modulator 2 (59-67)
  source 1..27: mol_type = other RNA
tacaccaagcacggcaccctgaagtac

SEQ ID NO: 52100 - RNA, 36 nt, synthetic construct
  misc_feature 1..36: note = Cyclin-dependent kinase 1 (4-15)
  source 1..36: mol_type = other RNA
tacaccaagatcgagaagatcggcgaggggacctac

SEQ ID NO: 52101 - RNA, 33 nt, synthetic construct
  misc_feature 1..33: note = Syndecan-3 (347-357)
  source 1..33: mol_type = other RNA
tacaccctggaggagcccaagcaggccagcgtg

SEQ ID NO: 52102 - RNA, 27 nt, synthetic construct
  misc_feature 1..27: note = Nuclear receptor ROR-beta (229-237)
  source 1..27: mol_type = other RNA
tacaccatggaggagctgcaccagctc

SEQ ID NO: 52103 - RNA, 45 nt, synthetic construct
  misc_feature 1..45: note = Caprin-1 (651-665)
  source 1..45: mol_type = other RNA
tacacccagagccagttctccgccccccgcgactacagcggctac

SEQ ID NO: 52104 - RNA, 27 nt, synthetic construct
  misc_feature 1..27: note = ATP-binding cassette sub-family B member 8, mitochondrial (162-170)
  source 1..27: mol_type = other RNA
tacacccgcgaccacgtgggcagcttc

SEQ ID NO: 52105 - RNA, 27 nt, synthetic construct
  misc_feature 1..27: note = ATP-dependent 6-phosphofructokinase, platelet type (378-386)
  source 1..27: mol_type = other RNA
tacaccaccgacttcatctaccagctg

SEQ ID NO: 52106 - RNA, 33 nt, synthetic construct
  misc_feature 1..33: note = Sulfhydryl oxidase 2 (323-333)
  source 1..33: mol_type = other RNA
tacaccgtggacctggagagcggcctccactac

SEQ ID NO: 52107 - RNA, 27 nt, synthetic construct
  misc_feature 1..27: note = ER degradation-enhancing alpha-mannosidase-like protein 2 (322-330)
  source 1..27: mol_type = other RNA
tacaccgtggagaagcgcgagggctac

SEQ ID NO: 52108 - RNA, 33 nt, synthetic construct
  misc_feature 1..33: note = Membrane-associated transporter protein (439-449)
  source 1..33: mol_type = other RNA
tacaccgtgcccttcaacctgatcaccgagtac

SEQ ID NO: 52109 - RNA, 27 nt, synthetic construct
  misc_feature 1..27: note Dolichyl-diphosphooligosaccharide-proteinosyltransferase 48 kDa subunit (325-333)
  source 1..27: mol_type = other RNA
tacaccgtgaccgacctggtcgagtac

SEQ ID NO: 52110 - RNA, 36 nt, synthetic construct
  misc_feature 1..36: note = Sulfhydryl oxidase 1 (728-739)
  source 1..36: mol_type = other RNA
tacacctacttccaggccaagatccgcgccctgaag

SEQ ID NO: 52111 - RNA, 30 nt, synthetic construct
  misc_feature 1..30: note = Eukaryotic translation initiation factor 3 subunit E (286-295)
  source 1..30: mol_type = other RNA
tacacctacaaggaccccatcaccgagttc

SEQ ID NO: 52112 - RNA, 33 nt, synthetic construct
  misc_feature 1..33: note = ATP-binding cassette sub-family A member 7 (1610-1620)
  source 1..33: mol_type = other RNA
tacgtggcccccgccaacctgccggcgctcctg

SEQ ID NO: 52113 - RNA, 33 nt, synthetic construct
  misc_feature 1..33: note = General transcription factor 3C polypeptide 1 (627-637)
  source 1..33: mol_type = other RNA
tacgtggacgacgccagctggatgcgctacatc

SEQ ID NO: 52114 - RNA, 27 nt, synthetic construct
  misc_feature 1..27: note = Spectrin alpha chain, non-erythrocytic 1 (2453-2461)
  source 1..27: mol_type = other RNA
tacgtggacggcaaggggcgcgagctg

SEQ ID NO: 52115 - RNA, 33 nt, synthetic construct
  misc_feature 1..33: note = Tribbles homolog 1 (157-167)
  source 1..33: mol_type = other RNA
tacgtgttcttcgagaaggacttcggcgacatg

SEQ ID NO: 52116 - RNA, 27 nt, synthetic construct
  misc_feature 1..27: note = Kelch domain-containing protein 10 (220-228)
  source 1..27: mol_type = other RNA
tacgtgttcggcgggaccaccggctac

SEQ ID NO: 52117 - RNA, 30 nt, synthetic construct
  misc_feature 1..30: note = Actin, aortic smooth muscle (55-64)
  source 1..30: mol_type = other RNA
tacgtgggcgacgaggcccagagcaagcgc

SEQ ID NO: 52118 - RNA, 33 nt, synthetic construct
  misc_feature 1..33: note = Actin, aortic smooth muscle (55-65)
  source 1..33: mol_type = other RNA
tacgtgggcgacgaggcccagagcaagcgcggg

SEQ ID NO: 52119 - RNA, 33 nt, synthetic construct
  misc_feature 1..33: note = E3 ubiquitin-protein ligase HUWE1 (1115-1125)
  source 1..33: mol_type = other RNA
tacgtgggcatcgccaccctgatcgccaactac

SEQ ID NO: 52120 - RNA, 30 nt, synthetic construct
  misc_feature 1..30: note = Ankyrin repeat and SAM domain-containing protein 1A (113-122)
  source 1..30: mol_type = other RNA
tacgtgcacagcttcctgtccagcggctac

SEQ ID NO: 52121 - RNA, 36 nt, synthetic construct
  misc_feature 1..36: note = Cytospin-A (477-488)
  source 1..36: mol_type = other RNA
tacgtgatcgacgaggacgtcaagagcggccgctac

SEQ ID NO: 52122 - RNA, 39 nt, synthetic construct
  misc_feature 1..39: note = Cytospin-A (477-489)
  source 1..39: mol_type = other RNA
tacgtgatcgacgaggacgtcaagagcggccgctacatg

SEQ ID NO: 52123 - RNA, 27 nt, synthetic construct
  misc_feature 1..27: note = Kelch-like protein 42 (328-336)
  source 1..27: mol_type = other RNA
tacgtgatcggcgggtacaccacccgc

SEQ ID NO: 52124 - RNA, 27 nt, synthetic construct
  misc_feature 1..27: note = Lysosome-associated membraneoprotein 2 (396-404)
  source 1..27: mol_type = other RNA
tacgtgatcggccgccggaagagctac

SEQ ID NO: 52125 - RNA, 36 nt, synthetic construct
  misc_feature 1..36: note = Lysosome-associated membraneoprotein 2 (396-407)
  source 1..36: mol_type = other RNA
tacgtgatcggccgccggaagagctacgccgggtac

SEQ ID NO: 52126 - RNA, 33 nt, synthetic construct
  misc_feature 1..33: note = Tyrosinase (149-159)
  source 1..33: mol_type = other RNA
tacgtgatccccatcggcacctacgggcagatg

SEQ ID NO: 52127 - RNA, 30 nt, synthetic construct
  misc_feature 1..30: note = Partner of Y14 and mago (5-14)
  source 1..30: mol_type = other RNA
tacgtgaccgacgagaccggcgggaagtac

SEQ ID NO: 52128 - RNA, 36 nt, synthetic construct
  misc_feature 1..36: note = Solute carrier family 25 member 33 (176-187)
  source 1..36: mol_type = other RNA
tacgtgtaccagaccgagggcatccgcgggttctac

SEQ ID NO: 52129 - RNA, 30 nt, synthetic construct
  misc_feature 1..30: note = Plexin-A1 (224-233)
  source 1..30: mol_type = other RNA
tacgtgtacagcttccgctccgagcagttc

SEQ ID NO: 52130 - RNA, 27 nt, synthetic construct
  misc_feature 1..27: note = L-dopachrome tautomerase (190-198)
  source 1..27: mol_type = other RNA
tactacagcgtgcgcgacaccctgctc

SEQ ID NO: 52131 - RNA, 30 nt, synthetic construct
  misc_feature 1..30: note = GTPase Kras (52-61) mod
  source 1..30: mol_type = other RNA
ctgctcgacatcctggacaccgccggcctg

SEQ ID NO: 52132 - RNA, 27 nt, synthetic construct
  misc_feature 1..27: note = GTPase Kras (5-13) mod
  source 1..27: mol_type = other RNA
aagctggtggtcgtgggcgccggggtg

SEQ ID NO: 52133 - RNA, 30 nt, synthetic construct
  misc_feature 1..30: note = GTPase Kras (5-14) mod
  source 1..30: mol_type = other RNA
aagctggtggtcgtgggcgccgccggggtg

SEQ ID NO: 52134 - RNA, 33 nt, synthetic construct
  misc_feature 1..33: note = GTPase Kras (51-61) mod
  source 1..33: mol_type = other RNA
tgcctgctcgacatcctggacaccgccggcctg

SEQ ID NO: 52135 - RNA, 27 nt, synthetic construct
  misc_feature 1..27: note = GTPase Kras (51-59)
  source 1..27: mol_type = other RNA
tgcctgctcgacatcctggacaccgcc

SEQ ID NO: 52136 - RNA, 27 nt, synthetic construct
  misc_feature 1..27: note = GTPase Kras (5-13) mod
  source 1..27: mol_type = other RNA
aagctggtggtcgtgggcgcctgcgtg

SEQ ID NO: 52137 - RNA, 30 nt, synthetic construct
  misc_feature 1..30: note = GTPase Kras (5-14)
  source 1..30: mol_type = other RNA
aagctggtggtcgtgggcgccgggggcgtg

SEQ ID NO: 52138 - RNA, 30 nt, synthetic construct
  misc_feature 1..30: note = GTPase Kras (5-14) mod
  source 1..30: mol_type = other RNA
aagctggtggtcgtgggcgccagcggggtg

SEQ ID NO: 52139 - RNA, 30 nt, synthetic construct
  misc_feature 1..30: note = GTPase Kras (5-14) mod
  source 1..30: mol_type = other RNA
aagctggtggtcgtgggcgccgacggggtg

SEQ ID NO: 52140 - RNA, 30 nt, synthetic construct
  misc_feature 1..30: note = GTPase Kras (5-14) mod
  source 1..30: mol_type = other RNA
aagctggtggtcgtgggcgcctgcggggtg

SEQ ID NO: 52141 - RNA, 27 nt, synthetic construct
  misc_feature 1..27: note = GTPase Kras (1-9)
  source 1..27: mol_type = other RNA
atgaccgagtacaagctggtggtcgtg

SEQ ID NO: 52142 - RNA, 30 nt, synthetic construct
  misc_feature 1..30: note = GTPase Kras (5-14) mod
  source 1..30: mol_type = other RNA
aagctggtggtcgtgggcgccgtgggggtc

SEQ ID NO: 52143 - RNA, 96 nt, synthetic construct
  misc_feature 1..96: note = GTPase Kras (1-33) mod
  source 1..96: mol_type = other RNA
atgaccgagtacaagctggtggtcgtgggcgccgccggggtgggcaagagcgcgctcaccatccagctgatccagaaccacttcgtcgacgagtac

SEQ ID NO: 52144 - RNA, 96 nt, synthetic construct
  misc_feature 1..96: note = GTPase Kras (1-33) mod
  source 1..96: mol_type = other RNA
atgaccgagtacaagctggtggtcgtgggcgccagcggggtgggcaagtccgccctcaccatccagctgatccagaaccacttcgtcgacgagtac

SEQ ID NO: 52145 - RNA, 96 nt, synthetic construct
  misc_feature 1..96: note = GTPase Kras (1-33) mod
  source 1..96: mol_type = other RNA
atgaccgagtacaagctggtggtcgtgggcgccggggacgtgggcaagagcgccctcaccatccagctgatccagaaccacttcgtcgacgagtac

SEQ ID NO: 52146 - RNA, 75 nt, synthetic construct
  misc_feature 1..75: note = GTPase Kras (1-26) mod
  source 1..75: mol_type = other RNA
atgaccgagtacaacctggtggtcgtgggcgccgggggcgtggggaagagcgccctcaccatccagctgatccag

SEQ ID NO: 52147 - RNA, 123 nt, synthetic construct
  misc_feature 1..123: note = GTPase Kras mod (3-43)
  source 1..123: mol_type = other RNA
agctaccgcaagcaggtggtcatcgacggcgagacctgcctgctcgacatcctggacaccacggggcaggaggagtactccgccatgcgggaccagtacatgcgcaccggcgaggggttcctg

SEQ ID NO: 52148 - RNA, 27 nt, synthetic construct
  misc_feature 1..27: note = BRAF (597-605) V600E
  source 1..27: mol_type = other RNA
ctggccaccgagaagagccgctggtcc

SEQ ID NO: 52149 - RNA, 30 nt, synthetic construct
  misc_feature 1..30: note = BRAF (597-606) V600E
  source 1..30: mol_type = other RNA
ctggccaccgagaagagccgctggtccggc

SEQ ID NO: 52150 - RNA, 30 nt, synthetic construct
  misc_feature 1..30: note = BRAF(597-606) V600M
  source 1..30: mol_type = other RNA
ctggccaccatgaagagccgctggtccggc

SEQ ID NO: 52151 - RNA, 27 nt, synthetic construct
  misc_feature 1..27: note = p53 wt (65-73)
  source 1..27: mol_type = other RNA
cgcatgcccgaggccgccccgcccgtg

SEQ ID NO: 52152 - RNA, 27 nt, synthetic construct
  misc_feature 1..27: note = p53 wt (149-157)
  source 1..27: mol_type = other RNA
agcacccccccgcccggcacccgcgtg

SEQ ID NO: 52153 - RNA, 33 nt, synthetic construct; identical to SEQ ID NO: 28006
  misc_feature 1..33: note = p53 wt (187-197)
  source 1..33: mol_type = other RNA

SEQ ID NO: 52154 - RNA, 27 nt, synthetic construct
  misc_feature 1..27: note = p53 wt (217-225)
  source 1..27: mol_type = other RNA
gtggtcccctacgagccgcccgaggtg

SEQ ID NO: 52155 - RNA, 27 nt, synthetic construct
  misc_feature 1..27: note = p53 wt (264-272)
  source 1..27: mol_type = other RNA
ctgctcggccgcaacagcttcgaggtg

SEQ ID NO: 52156 - RNA, 27 nt, synthetic construct
  misc_feature 1..27: note = p53 wt (125134)
  source 1..27: mol_type = other RNA
acctaccccgccctgaacaagatgttc

SEQ ID NO: 52157 - RNA, 27 nt, synthetic construct
  misc_feature 1..27: note = p53 wt (161169)
  source 1..27: mol_type = other RNA
gccatctacaagcagagccagcacatg

SEQ ID NO: 52158 - RNA, 27 nt, synthetic construct
  misc_feature 1..27: note = p53 wt (204212)
  source 1..27: mol_type = other RNA
gagtacctggacgaccgcaacaccttc

SEQ ID NO: 52159 - RNA, 42 nt, synthetic construct
  misc_feature 1..42: note = p53 wt (108-122)
  source 1..42: mol_type = other RNA
ggcttccgcctggggttcctccacagcggcaccgcctccgtg

SEQ ID NO: 52160 - RNA, 42 nt, synthetic construct
  misc_feature 1..42: note = p53 wt (110-124)
  source 1..42: mol_type = other RNA
cgcctgggcttcctccacagcgggaccgcctccgtgacctgc

SEQ ID NO: 52161 - RNA, 39 nt, synthetic construct
  misc_feature 1..39: note = p53 wt (25-35)
  source 1..39: mol_type = other RNA
ctgtggaagctcctgcccgagaacaacgtgctgagcccg

SEQ ID NO: 52162 - RNA, 45 nt, synthetic construct
  misc_feature 1..45: note = p53 wt (108-122)
  source 1..45: mol_type = other RNA
ggcttccgcctggggttcctccacagcggcaccgccaagtccgtg

SEQ ID NO: 52163 - RNA, 42 nt, synthetic construct
  misc_feature 1..42: note = p53 wt (153-166)
  source 1..42: mol_type = other RNA
cccggcacccgcgtgcgggccatggccatctacaagcagagc

SEQ ID NO: 52164 - RNA, 123 nt, synthetic construct
  misc_feature 1..123: note = BRAF (442-482)
  source 1..123: mol_type = other RNA
ggccgccgggacagctccgacgactgggagatccccgacgggcagatcaccgtgggccagatcatcgggagcggctccttcgggaccgtctacaagggcaagtggcacggcgacgtggccgtg

SEQ ID NO: 52165 - RNA, 123 nt, synthetic construct
  misc_feature 1..123: note = BRAF (443-483)
  source 1..123: mol_type = other RNA
cgccgggacagctccgacgactgggagatccccgacggccagatcaccgtggggcagcgcagcggctccgggagcttcggcaccgtctacaaggggaagtggcacggcgacgtggccgtgaag

SEQ ID NO: 52166 - RNA, 123 nt, synthetic construct
  misc_feature 1..123: note = BRAF (444-484)
  source 1..123: mol_type = other RNA
cgcgacagctccgacgactgggagatccccgacggccagatcaccgtggggcagcggatcgagagcggctccttcgggaccgtctacaagggcaagtggcacggggacgtggccgtgaagatg

SEQ ID NO: 52167 - RNA, 123 nt, synthetic construct
  misc_feature 1..123: note = BRAF (581-621)
  source 1..123: mol_type = other RNA
aacatcttcctgcacgaggacctcaccgtgaagatcggcgacttcgggctggccaccgtcgagagccgctggtccggcagccaccagttcgagcagctgtccgggagcatcctctggatggcc

SEQ ID NO: 52168 - RNA, 123 nt, synthetic construct
  misc_feature 1..123: note = BRAF (446-486)
  source 1..123: mol_type = other RNA
agctccgacgactgggagatccccgacggccagatcaccgtggggcagcgcatcggcagcgtctccttcgggaccgtgtacaagggcaagtggcacggggacgtggccgtcaagatgctgaac

SEQ ID NO: 52169 - RNA, 123 nt, synthetic construct
  misc_feature 1..123: note = BRAF (577-617)
  source 1..123: mol_type = other RNA
ctgaagagcaacaacatcttcctccacgaggacctgaccgtgaagatcggcgacttcgggcgcgccaccgtcaagtcccggtggagcggctcccaccagttcgagcagctgagcgggtccatc

SEQ ID NO: 52170 - RNA, 123 nt, synthetic construct
  misc_feature 1..123: note = BRAF (449-489)
  source 1..123: mol_type = other RNA
gactgggagatccccgacggccagatcaccgtggggcagcgcatcggcagcgggtccttcgccaccgtctacaagggcaagtggcacggggacgtggccgtgaagatgctgaacgtcacggcg

SEQ ID NO: 52171 - RNA, 123 nt, synthetic construct
  misc_feature 1..123: note = BRAF (449-489)
  source 1..123: mol_type = other RNA
gactgggagatccccgacggccagatcaccgtggggcagcgcatcggcagcgggtccttccggaccgtctacaagggcaagtggcacggggacgtggccgtgaagatgctgaacgtcacggcc

SEQ ID NO: 52172 - RNA, 123 nt, synthetic construct
  misc_feature 1..123: note = BRAF (574-614)
  source 1..123: mol_type = other RNA
caccgcgacctgaagagcaacaacatcttcctccacgaggacctgaccgtgaagatcggcgggttcggcctggccaccgtcaagtcccggtggagcgggtcccaccagttcgagcagctcagc

SEQ ID NO: 52173 - RNA, 27 nt, synthetic construct
  misc_feature 1..27: note = Melanoma antigen recognized by T-cells 1 (27-35)
  source 1..27: mol_type = other RNA
gccgctggcatcgggattctgaccgtg

SEQ ID NO: 52174 - RNA, 27 nt, synthetic construct
  misc_feature 1..27: note = Eukaryotic translation initiation factor 4 gamma 1 (1073-1081)
  source 1..27: mol_type = other RNA
gccgctagacccgcaaccagcacactg

SEQ ID NO: 52175 - RNA, 33 nt, synthetic construct
  misc_feature 1..33: note = Histone H1.2 (49-59)
  source 1..33: mol_type = other RNA
gccgctagcaaggagagatccggcgtgtctctg

SEQ ID NO: 52176 - RNA, 30 nt, synthetic construct
  misc_feature 1..30: note = Cyclin-dependent kinase 4 (23-32)
  source 1..30: mol_type = other RNA
gcctgcgacccccacagcggccatttcgtg

SEQ ID NO: 52177 - RNA, 30 nt, synthetic construct
  misc_feature 1..30: note = 40S ribosomal protein S21 (37-46)
  source 1..30: mol_type = other RNA
gccgaggtggacaaggtcaccggcagattc

SEQ ID NO: 52178 - RNA, 27 nt, synthetic construct
  misc_feature 1..27: note = DNA replication licensing factor MCM4 (694-702)
  source 1..27: mol_type = other RNA
gcccacagcaccatcatgcccagactg

SEQ ID NO: 52179 - RNA, 27 nt, synthetic construct
  misc_feature 1..27: note = Actin, gamma-enteric smooth muscle (277-285)
  source 1..27: mol_type = other RNA
gccctggctcccagcaccatgaagatc

SEQ ID NO: 52180 - RNA, 30 nt, synthetic construct; identical to SEQ ID NO: 27953
  misc_feature 1..30: note = Melanocyte protein PMEL (231-240)
  source 1..30: mol_type = other RNA

SEQ ID NO: 52181 - RNA, 27 nt, synthetic construct
  misc_feature 1..27: note = Phospholipid transfer protein (2-10)
  source 1..27: mol_type = other RNA
gccctgttcggcgctctctttcttgca

SEQ ID NO: 52182 - RNA, 27 nt, synthetic construct
  misc_feature 1..27: note = Vimentin (332-340)
  source 1..27: mol_type = other RNA
gccctgaagggcaccaacgagagcctc

SEQ ID NO: 52183 - RNA, 27 nt, synthetic construct
  misc_feature 1..27: note = Eukaryotic translation initiation factor 3 subunit D (439-447)
  source 1..27: mol_type = other RNA
gccctgctcgctggcagcgagtacctt

SEQ ID NO: 52184 - RNA, 27 nt, synthetic construct
  misc_feature 1..27: note = Melanocyte protein PMEL (24-32)
  source 1..27: mol_type = other RNA
gccctgctcgctgtgggcgcaaccaag

SEQ ID NO: 52185 - RNA, 27 nt, synthetic construct
  misc_feature 1..27: note = Melanoma antigen recognized by T-cells 1 (56-64)
  source 1..27: mol_type = other RNA
gccctgatggacaagagcctccacgtg

SEQ ID NO: 52186 - RNA, 27 nt, synthetic construct
  misc_feature 1..27: note = Melanocyte protein PMEL (94-102)
  source 1..27: mol_type = other RNA
gccctgaacttccccggcagccagaag

SEQ ID NO: 52187 - RNA, 27 nt, synthetic construct
  misc_feature 1..27: note = Melanoma-associated antigen 1 (301-309)
  source 1..27: mol_type = other RNA
gccctgagagaggaagaggaaggcgtg

SEQ ID NO: 52188 - RNA, 27 nt, synthetic construct
  misc_feature 1..27: note = Fructose-bisphosphate aldolase A (98-106)
  source 1..27: mol_type = other RNA
gccctgagcgaccaccatatctacctc

SEQ ID NO: 52189 - RNA, 36 nt, synthetic construct
  misc_feature 1..36: note = Guanine nucleotide-binding protein G(I)/G(S)/G(T) subunit beta-2 (167-178)
  source 1..36: mol_type = other RNA
gccctgtgggacatcgagaccggccagcaaacagtg

SEQ ID NO: 52190 - RNA, 27 nt, synthetic construct
  misc_feature 1..27: note = ER membrane protein complex subunit 7 (4-12)
  source 1..27: mol_type = other RNA
gccctgtggggcttctttcccgtgctc

SEQ ID NO: 52191 - RNA, 30 nt, synthetic construct
  misc_feature 1..30: note = Melanocyte protein PMEL (184-193)
  source 1..30: mol_type = other RNA
gccatgctgggcacccacacaatggaggtg

SEQ ID NO: 52192 - RNA, 27 nt, synthetic construct
  misc_feature 1..27: note = Actin, cytoplasmic 1 (14-22)
  source 1..27: mol_type = other RNA
gcccccgaggaacaccctgtgctgctc

SEQ ID NO: 52193 - RNA, 27 nt, synthetic construct
  misc_feature 1..27: note = High mobility group protein B1 (94-102)
  source 1..27: mol_type = other RNA
gcccccaagagacctccaagcgctttc

SEQ ID NO: 52194 - RNA, 27 nt, synthetic construct
  misc_feature 1..27: note = Coiled-coil-helix-coiled-coil-helix domain-containing protein 2 (49-57)
  source 1..27: mol_type = other RNA
gcccccagacagcctggcctgatggct

SEQ ID NO: 52195 - RNA, 27 nt, synthetic construct
  misc_feature 1..27: note = HLA class II histocompatibility antigen, DP beta 1 chain (9-17)
  source 1..27: mol_type = other RNA
gcccccagaaccgtggctctgacagca

SEQ ID NO: 52196 - RNA, 27 nt, synthetic construct
  misc_feature 1..27: note = 60S ribosomal protein L13 (189-197)
  source 1..27: mol_type = other RNA
gccagactgttcggcatcagggctaag

SEQ ID NO: 52197 - RNA, 27 nt, synthetic construct
  misc_feature 1..27: note = Thymosin beta-10 (16-24)
  source 1..27: mol_type = other RNA
gccagcttcgacaaggctaaactgaag

SEQ ID NO: 52198 - RNA, 27 nt, synthetic construct
  misc_feature 1..27: note = Guanine nucleotide-binding protein G(s) subunit alpha isoforms short (239-247)
  source 1..27: mol_type = other RNA
gccagctcctcttacaacatggtgatc

SEQ ID NO: 52199 - RNA, 24 nt, synthetic construct
  misc_feature 1..24: note = Guanine nucleotide-binding protein subunit beta-2-like 1 (251-258)
  source 1..24: mol_type = other RNA
gccaccggccccagcatcaagatt

SEQ ID NO: 52200 - RNA, 27 nt, synthetic construct
  misc_feature 1..27: note = Bax inhibitor 1 (91-99)
  source 1..27: mol_type = other RNA
gcctacgtgcacatggtcacccatttc

SEQ ID NO: 52201 - RNA, 27 nt, synthetic construct
  misc_feature 1..27: note = Wilms tumor protein (235-243)
  source 1..27: mol_type = other RNA
tgcatgacctggaaccagatgaatctg

SEQ ID NO: 52202 - RNA, 27 nt, synthetic construct
  misc_feature 1..27: note = Melanocyte protein PMEL (647-655)
  source 1..27: mol_type = other RNA
tgccccatcggcgagaacagccctctg

SEQ ID NO: 52203 - RNA, 48 nt, synthetic construct
  misc_feature 1..48: note = Gamma-secretase C-terminal fragment 59 (562-577)
  source 1..48: mol_type = other RNA
gacgccgagttcagacacgatagcggctacgaagtgcatcaccagaag

SEQ ID NO: 52204 - RNA, 51 nt, synthetic construct
  misc_feature 1..51: note = Gamma-secretase C-terminal fragment 59 (562-578)
  source 1..51: mol_type = other RNA
gacgccgagttcagacacgatagcggctacgaagtgcatcaccagaagctg

SEQ ID NO: 52205 - RNA, 27 nt, synthetic construct
  misc_feature 1..27: note = Thymidylate synthase (254-262)
  source 1..27: mol_type = other RNA
gacgcccacatctacctgaaccatatt

SEQ ID NO: 52206 - RNA, 27 nt, synthetic construct
  misc_feature 1..27: note = 60S ribosomal protein L10 (28-36)
  source 1..27: mol_type = other RNA
gacgccaagatcagaattttcgatctg

SEQ ID NO: 52207 - RNA, 27 nt, synthetic construct
  misc_feature 1..27: note = Lys-63-specific deubiquitinase BRCC36 (221-229)
  source 1..27: mol_type = other RNA
gacgcctacagaaggatccacagcctg

SEQ ID NO: 52208 - RNA, 27 nt, synthetic construct
  misc_feature 1..27: note = Myelin basic protein (109-117)
  source 1..27: mol_type = other RNA
gacgagaaccccgtggtccacttcttt

SEQ ID NO: 52209 - RNA, 27 nt, synthetic construct
  misc_feature 1..27: note = Vimentin (219-227)
  source 1..27: mol_type = other RNA
gacctggagagaaaggtggaaagcctc

SEQ ID NO: 52210 - RNA, 45 nt, synthetic construct
  misc_feature 1..45: note = HLA class I histocompatibility antigen, A-2 alpha chain (29-43)
  source 1..45: mol_type = other RNA
gacacccagttcgtgagatttgatagcgacgccgcttcccaaagg

SEQ ID NO: 52211 - RNA, 54 nt, synthetic construct
  misc_feature 1..54: note = HLA class I histocompatibility antigen, A-2 alpha chain (29-46)
  source 1..54: mol_type = other RNA
gacacccagttcgtgagatttgatagcgacgccgcttcccaaaggatggagccc

SEQ ID NO: 52212 - RNA, 30 nt, synthetic construct
  misc_feature 1..30: note = Melanoma antigen recognized by T-cells 1 (26-35)
  source 1..30: mol_type = other RNA
gaggccgctggcatcgggattctgaccgtg

SEQ ID NO: 52213 - RNA, 27 nt, synthetic construct
  misc_feature 1..27: note = Melanoma-associated antigen 1 (161-169)
  source 1..27: mol_type = other RNA
gaggccgaccccaccggccacagctac

SEQ ID NO: 52214 - RNA, 27 nt, synthetic construct
  misc_feature 1..27: note = Ragulator complex protein LAMTOR5 (40-48)
  source 1..27: mol_type = other RNA
gagcacgccggcgtgatcagcgtcctg

SEQ ID NO: 52215 - RNA, 30 nt, synthetic construct
  misc_feature 1..30: note = Mart-1 (26-35)
  source 1..30: mol_type = other RNA
gagctggccggcatcgggattctcaccgtg

SEQ ID NO: 52216 - RNA, 27 nt, synthetic construct
  misc_feature 1..27: note = 40S ribosomal protein S25 (75-83)
  source 1..27: mol_type = other RNA
gagagactgaagatcaggggcagcctc

SEQ ID NO: 52217 - RNA, 27 nt, synthetic construct
  misc_feature 1..27: note = Actin, cytoplasmic 1 (364-372)
  source 1..27: mol_type = other RNA
gagagcggcccctccatcgtgcacaga

SEQ ID NO: 52218 - RNA, 27 nt, synthetic construct
  misc_feature 1..27: note = POTE ankyrin domain family member F (825-833)
  source 1..27: mol_type = other RNA
gagaccttcaacacacccgccatgtac

SEQ ID NO: 52219 - RNA, 30 nt, synthetic construct
  misc_feature 1..30: note = Mortality factor 4-like protein 1 (312-321)
  source 1..30: mol_type = other RNA
gaggtggccccccctgaataccacagaaag

SEQ ID NO: 52220 - RNA, 27 nt, synthetic construct
  misc_feature 1..27: note = Melanoma-associated antigen 3 (168-176)
  source 1..27: mol_type = other RNA
gaggtggaccccatcggccacctgtac

SEQ ID NO: 52221 - RNA, 27 nt, synthetic construct
  misc_feature 1..27: note = Heme oxygenase 1 (103-111)
  source 1..27: mol_type = other RNA
gaggtgatcccctacacccctgccatg

SEQ ID NO: 52222 - RNA, 27 nt, synthetic construct
  misc_feature 1..27: note = G2/mitotic-specific cyclin-B1 (18-26)
  source 1..27: mol_type = other RNA
ttcgcctttgtgaccgacaacacatac

SEQ ID NO: 52223 - RNA, 27 nt, synthetic construct
  misc_feature 1..27: note = Proteasome subunit alpha type-5 (154-162)
  source 1..27: mol_type = other RNA
ttccacatggaccccagcggcaccttt

SEQ ID NO: 52224 - RNA, 27 nt, synthetic construct
  misc_feature 1..27: note = Protein THEMIS2 (597-605)
  source 1..27: mol_type = other RNA
ttcatcaaggacggcagctccacctac

SEQ ID NO: 52225 - RNA, 30 nt, synthetic construct
  misc_feature 1..30: note = Vimentin (123-132)
  source 1..30: mol_type = other RNA
ttcctggagcagcaaaacaagatcctcctt

SEQ ID NO: 52226 - RNA, 30 nt, synthetic construct
  misc_feature 1..30: note = Fatty acid synthase (2335-2344)
  source 1..30: mol_type = other RNA
ttcctgtttgacggcagccccacctacgtg

SEQ ID NO: 52227 - RNA, 33 nt, synthetic construct
  misc_feature 1..33: note = Fatty acid synthase (2335-2345)
  source 1..33: mol_type = other RNA
ttcctgtttgacggcagccccacctacgtgctc

SEQ ID NO: 52228 - RNA, 27 nt, synthetic construct
  misc_feature 1..27: note = Mammaglobin-A (66-74)
  source 1..27: mol_type = other RNA
ttcctgaaccagaccgacgagacactc

SEQ ID NO: 52229 - RNA, 27 nt, synthetic construct
  misc_feature 1..27: note = Melanoma-associated antigen 3 (271-279)
  source 1..27: mol_type = other RNA
ttcctgtggggccccagagccctcgtg

SEQ ID NO: 52230 - RNA, 27 nt, synthetic construct
  misc_feature 1..27: note = Actin-related protein 2 (27-35)
  source 1..27: mol_type = other RNA
ttccccgagcacatctttcctgccctg

SEQ ID NO: 52231 - RNA, 27 nt, synthetic construct
  misc_feature 1..27: note = 60S ribosomal protein L28 (38-46)
  source 1..27: mol_type = other RNA
ttcagatacaacggcctgatccacagg

SEQ ID NO: 52232 - RNA, 27 nt, synthetic construct
  misc_feature 1..27: note = 60S acidic ribosomal protein P0 (67-75)
  source 1..27: mol_type = other RNA
ggccacctggagaacaatcccgccctc

SEQ ID NO: 52233 - RNA, 33 nt, synthetic construct
  misc_feature 1..33: note = Cellular tumor antigen p53 (62-72)
  source 1..33: mol_type = other RNA
ggcctggccccccctcagcacctcatcagagtg

SEQ ID NO: 52234 - RNA, 27 nt, synthetic construct
  misc_feature 1..27: note = Proteasome subunit beta type-3 (55-63)
  source 1..27: mol_type = other RNA
ggcctggccaccgacgtgcagacagtc

SEQ ID NO: 52235 - RNA, 27 nt, synthetic construct
  misc_feature 1..27: note = DNA (cytosine-5)-methyltransferase 1 (425-433)
  source 1..27: mol_type = other RNA
ggcctgatcgagaagaacattgaactc

SEQ ID NO: 52236 - RNA, 27 nt, synthetic construct
  misc_feature 1..27: note = Catenin beta-1 (400-408)
  source 1..27: mol_type = other RNA
ggcctgctcgggacccttgtgcagctg

SEQ ID NO: 52237 - RNA, 27 nt, synthetic construct
  misc_feature 1..27: note = Myosin-9 (338-346)
  source 1..27: mol_type = other RNA
ggcctgctcagagtgatcagcggggtc

SEQ ID NO: 52238 - RNA, 30 nt, synthetic construct
  misc_feature 1..30: note = Reticulocalbin-2 (4-13)
  source 1..30: mol_type = other RNA
ggccccagaaccgccgctctggggctcctt

SEQ ID NO: 52239 - RNA, 30 nt, synthetic construct
  misc_feature 1..30: note = Heterogeneous nuclear ribonucleoprotein A1 (339-348)
  source 1..30: mol_type = other RNA
ggcccctacgggggaggtggccagtatttc

SEQ ID NO: 52240 - RNA, 27 nt, synthetic construct
  misc_feature 1..27: note = 60S ribosomal protein L8 (127-135)
  source 1..27: mol_type = other RNA
ggcagaatcgacaagcccattctgaaa

SEQ ID NO: 52241 - RNA, 27 nt, synthetic construct
  misc_feature 1..27: note = Cellular tumor antigen p53 (5-13)
  source 1..27: mol_type = other RNA
ggcagaaacagcttcgaggtgagggtc

SEQ ID NO: 52242 - RNA, 30 nt, synthetic construct
  misc_feature 1..30: note = Ribonucleoside-diphosphate reductase subunit M2 (238-247)
  source 1..30: mol_type = other RNA
ggcagcttcgcctccatcttttggctgaag

SEQ ID NO: 52243 - RNA, 27 nt, synthetic construct
  misc_feature 1..27: note = Melanocyte protein PMEL (467-475)
  source 1..27: mol_type = other RNA
ggcaccgccacactgagactcgtgaag

SEQ ID NO: 52244 - RNA, 30 nt, synthetic construct
  misc_feature 1..30: note = Melanoma-associated antigen B2 (231-240)
  source 1..30: mol_type = other RNA
ggcgtgtacgacggggaggaacacagcgtc

SEQ ID NO: 52245 - RNA, 27 nt, synthetic construct
  misc_feature 1..27: note = Protein SSX2 (17-25)
  source 1..27: mol_type = other RNA
ggctacgaccagatcatgcccaagaaa

SEQ ID NO: 52246 - RNA, 27 nt, synthetic construct
  misc_feature 1..27: note = Proliferating cell nuclear antigen (241-249)
  source 1..27: mol_type = other RNA
atcgccgacatgggccacctgaagtac

SEQ ID NO: 52247 - RNA, 27 nt, synthetic construct
  misc_feature 1..27: note = Receptor tyrosine-protein kinase erbB-2 (654-662)
  source 1..27: mol_type = other RNA
atcattagcgccgtggtcggcatactg

SEQ ID NO: 52248 - RNA, 27 nt, synthetic construct
  misc_feature 1..27: note = Heat shock protein HSP 90-beta (496-504)
  source 1..27: mol_type = other RNA
atcctggacaagaaagtggagaaggtc

SEQ ID NO: 52249 - RNA, 27 nt, synthetic construct
  misc_feature 1..27: note = Ornithine decarboxylase (23-31)
  source 1..27: mol_type = other RNA
atcctggaccagaagattaacgaggtg

SEQ ID NO: 52250 - RNA, 27 nt, synthetic construct
  misc_feature 1..27: note = Ubiquitin-conjugating enzyme E2 E3 (97-105)
  source 1..27: mol_type = other RNA
atcctgggcccccctgggagcgtgtac

SEQ ID NO: 52251 - RNA, 27 nt, synthetic construct
  misc_feature 1..27: note = Vimentin (130-138)
  source 1..27: mol_type = other RNA
atcctgctcgccgagcttgaacagctg

SEQ ID NO: 52252 - RNA, 27 nt, synthetic construct
  misc_feature 1..27: note = 60S ribosomal protein L19 (137-145)
  source 1..27: mol_type = other RNA
atcctgatggagcacattcataagctc

SEQ ID NO: 52253 - RNA, 27 nt, synthetic construct
  misc_feature 1..27: note = Small nuclear ribonucleoprotein-associated proteins B and B' (13-21)
  source 1..27: mol_type = other RNA
atcctgcaggacggcagaattttcata

SEQ ID NO: 52254 - RNA, 27 nt, synthetic construct
  misc_feature 1..27: note = Elongation factor 2 (161-169)
  source 1..27: mol_type = other RNA
atcctgaccgacattacaaagggcgtg

SEQ ID NO: 52255 - RNA, 27 nt, synthetic construct
  misc_feature 1..27: note = Melanoma antigen recognized by T-cells 1 (32-40)
  source 1..27: mol_type = other RNA
atcctgaccgtgattctcggcgtcctt

SEQ ID NO: 52256 - RNA, 27 nt, synthetic construct
  misc_feature 1..27: note = Putative small nuclear ribonucleoprotein G-like protein 15 (68-76)
  source 1..27: mol_type = other RNA
atcatgctggaggccctcgaaagagtg

SEQ ID NO: 52257 - RNA, 27 nt, synthetic construct
  misc_feature 1..27: note = Serine-tRNA ligase, cytoplasmic (357-365)
  source 1..27: mol_type = other RNA
atcccctaccacattgtgaacatagtc

SEQ ID NO: 52258 - RNA, 48 nt, synthetic construct
  misc_feature 1..48: note = Beta-2-microglobulin (21-36)
  source 1..48: mol_type = other RNA
atccagagaacccccaagattcaagtgtacagcaggcaccctgccgag

SEQ ID NO: 52259 - RNA, 27 nt, synthetic construct
  misc_feature 1..27: note = ADP/ATP translocase 2 (79-87)
  source 1..27: mol_type = other RNA
atcagatacttccccacccaggccctg

SEQ ID NO: 52260 - RNA, 27 nt, synthetic construct
  misc_feature 1..27: note = Acyl-CoA desaturase (20-28)
  source 1..27: mol_type = other RNA
atcaccgccccccctagcagagtgctg

SEQ ID NO: 52261 - RNA, 27 nt, synthetic construct
  misc_feature 1..27: note = Melanocyte protein PMEL (216-224)
  source 1..27: mol_type = other RNA
atcaccgaccaggtgcccttcagcgtc

SEQ ID NO: 52262 - RNA, 27 nt, synthetic construct
  misc_feature 1..27: note = Ubiquitin-60S ribosomal protein L40 (68-76)
  source 1..27: mol_type = other RNA
aaggagagcaccctgcacctcgtgctt

SEQ ID NO: 52263 - RNA, 54 nt, synthetic construct
  misc_feature 1..54: note = Receptor tyrosine-protein kinase erbB-2 (369-386)
  source 1..54: mol_type = other RNA
aagatcttcggcagcctggcctttctccccgagtccttcgacggggatcctgct

SEQ ID NO: 52264 - RNA, 45 nt, synthetic construct
  misc_feature 1..45: note = Protein SSX2 (45-59)
  source 1..45: mol_type = other RNA
aagatcttctacgtgtatatgaaaagaaagtacgaggccatgacc

SEQ ID NO: 52265 - RNA, 30 nt, synthetic construct
  misc_feature 1..30: note = Vimentin (236-245)
  source 1..30: mol_type = other RNA
aagctgcacgaggaagagatccaggaactc

SEQ ID NO: 52266 - RNA, 27 nt, synthetic construct
  misc_feature 1..27: note = Myosin-9 (1843-1851)
  source 1..27: mol_type = other RNA
aagctgaaagacgtgctccttcaggtc

SEQ ID NO: 52267 - RNA, 30 nt, synthetic construct
  misc_feature 1..30: note = Prelamin-A/C (297-306)
  source 1..30: mol_type = other RNA
aagctgctcgagggcgaagaggaaagactt

SEQ ID NO: 52268 - RNA, 27 nt, synthetic construct
  misc_feature 1..27: note = Mammaglobin-A (2-10)
  source 1..27: mol_type = other RNA
aagctgctcatggtgcttatgctggcc

SEQ ID NO: 52269 - RNA, 27 nt, synthetic construct
  misc_feature 1..27: note = Heat shock cognate 71 kDa protein (126-134)
  source 1..27: mol_type = other RNA
aagatgaaagagatcgccgaagcttac

SEQ ID NO: 52270 - RNA, 27 nt, synthetic construct
  misc_feature 1..27: note = Melanoma-associated antigen 2 (140-148)
  source 1..27: mol_type = other RNA
aagatggtggagctggtccacttcctc

SEQ ID NO: 52271 - RNA, 27 nt, synthetic construct
  misc_feature 1..27: note = Beta-adrenergic receptor kinase 1 (667-675)
  source 1..27: mol_type = other RNA
aagcccagaagccctgtggtcgagctg

SEQ ID NO: 52272 - RNA, 27 nt, synthetic construct
  misc_feature 1..27: note = Farnesyl pyrophosphate synthase (184-192)
  source 1..27: mol_type = other RNA
aagagatacaaaagcatcgtgaagtat

SEQ ID NO: 52273 - RNA, 27 nt, synthetic construct
  misc_feature 1..27: note = Cellular tumor antigen p53 (139-147)
  source 1..27: mol_type = other RNA
aagacctgccccgtgcagctgtgggtc

SEQ ID NO: 52274 - RNA, 27 nt, synthetic construct
  misc_feature 1..27: note = 40S ribosomal protein S8 (75-83)
  source 1..27: mol_type = other RNA
aagaccagaatcattgacgtggtctac

SEQ ID NO: 52275 - RNA, 27 nt, synthetic construct
  misc_feature 1..27: note = Melanocyte protein PMEL (161-169)
  source 1..27: mol_type = other RNA
aagacctggggccagtactggcaagtg

SEQ ID NO: 52276 - RNA, 27 nt, synthetic construct
  misc_feature 1..27: note = Melanoma-associated antigen 1 (278-286)
  source 1..27: mol_type = other RNA
aaggtgctggagtacgtcatcaaagtt

SEQ ID NO: 52277 - RNA, 27 nt, synthetic construct
  misc_feature 1..27: note = Glutamate carboxypeptidase 2 (298-306)
  source 1..27: mol_type = other RNA
aagtacgccgacaaaatctatagcatt

SEQ ID NO: 52278 - RNA, 27 nt, synthetic construct
  misc_feature 1..27: note = Serine/threonine-protein phosphatase PP1-beta catalytic subunit (112-120)
  source 1..27: mol_type = other RNA
aagtaccccgagaacttctttctgctc

SEQ ID NO: 52279 - RNA, 30 nt, synthetic construct
  misc_feature 1..30: note = Mammaglobin-A (83-92)
  source 1..30: mol_type = other RNA
ctgatctacgacagctccctctgcgatctt

SEQ ID NO: 52280 - RNA, 27 nt, synthetic construct
  misc_feature 1..27: note = ATP-binding cassette sub-family F member 2 (251-259)
  source 1..27: mol_type = other RNA
ctgctcgacgagcccaccaaccacctt

SEQ ID NO: 52281 - RNA, 27 nt, synthetic construct
  misc_feature 1..27: note = Gamma-interferon-inducible lysosomal thiol reductase (24-32)
  source 1..27: mol_type = other RNA
ctgctcgacgtgcccaccgccgctgtc

SEQ ID NO: 52282 - RNA, 27 nt, synthetic construct
  misc_feature 1..27: note = Cellular tumor antigen p53 (264-272)
  source 1..27: mol_type = other RNA
ctgctcggcagaaacagcttcgaggtg

SEQ ID NO: 52283 - RNA, 30 nt, synthetic construct
  misc_feature 1..30: note = Gamma-interferon-inducible lysosomal thiol reductase (23-32)
  source 1..30: mol_type = other RNA
ctgctccttgacgtgcccaccgccgctgtc

SEQ ID NO: 52284 - RNA, 36 nt, synthetic construct
  misc_feature 1..36: note = Gamma-interferon-inducible lysosomal thiol reductase (15-26)
  source 1..36: mol_type = other RNA
ctgctccttgacgtgcccaccgccgctgtccaggca

SEQ ID NO: 52285 - RNA, 30 nt, synthetic construct
  misc_feature 1..30: note = Stress-70 protein, mitochondrial (436-445)
  source 1..30: mol_type = other RNA
ctgctccttgacgtgacccccctgagcttg

SEQ ID NO: 52286 - RNA, 27 nt, synthetic construct
  misc_feature 1..27: note = Mucin-1 (12-20)
  source 1..27: mol_type = other RNA
ctgctccttctgaccgtgttgacagtc

SEQ ID NO: 52287 - RNA, 27 nt, synthetic construct
  misc_feature 1..27: note = Mammaglobin-A (4-12)
  source 1..27: mol_type = other RNA
ctgatggtgctcatgcttgccgctctg

SEQ ID NO: 52288 - RNA, 27 nt, synthetic construct
  misc_feature 1..27: note = Melanocyte protein PMEL (527-535)
  source 1..27: mol_type = other RNA
ctgcccaaggaggcctgcatggaaatc

SEQ ID NO: 52289 - RNA, 27 nt, synthetic construct
  misc_feature 1..27: note = Rac GTPase-activating protein 1 (403-411)
  source 1..27: mol_type = other RNA
ctgccccaggccaacagagacaccctc

SEQ ID NO: 52290 - RNA, 27 nt, synthetic construct
  misc_feature 1..27: note = Catenin beta-1 (370-378)
  source 1..27: mol_type = other RNA
ctgaccgaccccagccagagactcgtg

SEQ ID NO: 52291 - RNA, 27 nt, synthetic construct
  misc_feature 1..27: note = HLA class I histocompatibility antigen, B-39 alpha chain (2-10)
  source 1..27: mol_type = other RNA
ctggtgatggcccccagaaccgtcctc

SEQ ID NO: 52292 - RNA, 27 nt, synthetic construct
  misc_feature 1..27: note = 40S ribosomal protein S16 (40-48)
  source 1..27: mol_type = other RNA
atgatcgagcccagaaccctgcagtac

SEQ ID NO: 52293 - RNA, 27 nt, synthetic construct
  misc_feature 1..27: note = Melanocyte protein PMEL (185-193)
  source 1..27: mol_type = other RNA
atgctgggcacccacacaatggaggtg

SEQ ID NO: 52294 - RNA, 27 nt, synthetic construct
  misc_feature 1..27: note = Tyrosinase (1-9)
  source 1..27: mol_type = other RNA
atgctgctcgccgtgctttactgcctg

SEQ ID NO: 52295 - RNA, 27 nt, synthetic construct
  misc_feature 1..27: note = HLA class I histocompatibility antigen, alpha chain E (1-9)
  source 1..27: mol_type = other RNA
atggtggacggcaccctgctccttctg

SEQ ID NO: 52296 - RNA, 27 nt, synthetic construct
  misc_feature 1..27: note = Vimentin (177-185)
  source 1..27: mol_type = other RNA
aacctggccgaggacatcatgagactc

SEQ ID NO: 52297 - RNA, 27 nt, synthetic construct
  misc_feature 1..27: note = Bifunctional purine biosynthesis protein PURH (101-109)
  source 1..27: mol_type = other RNA
aacctgtaccccttcgtgaagaccgtc

SEQ ID NO: 52298 - RNA, 48 nt, synthetic construct
  misc_feature 1..48: note = Transferrin receptor protein 1 (215-230)
  source 1..48: mol_type = other RNA
aaccccggcgggtacgtggcctatagcaaggctgcaaccgtcacagga

SEQ ID NO: 52299 - RNA, 54 nt, synthetic construct
  misc_feature 1..54: note = Transferrin receptor protein 1 (215-232)
  source 1..54: mol_type = other RNA
aaccccggcgggtacgtggcctatagcaaggctgcaaccgtcacaggaaaactg

SEQ ID NO: 52300 - RNA, 30 nt, synthetic construct
  misc_feature 1..30: note = ELAV-like protein 1 (186-195)
  source 1..30: mol_type = other RNA
aaccccaatcagaacaagaatgtggccctg

SEQ ID NO: 52301 - RNA, 27 nt, synthetic construct
  misc_feature 1..27: note = U1 small nuclear ribonucleoprotein A (229-237)
  source 1..27: mol_type = other RNA
aaccagttccccggctttaaggaggtg

SEQ ID NO: 52302 - RNA, 45 nt, synthetic construct
  misc_feature 1..45: note = Heat shock 70 kDa protein 1-like (170-184)
  source 1..45: mol_type = other RNA
aacgtgctgagaatcattaatgagcccaccgccgctgcaatagcc

SEQ ID NO: 52303 - RNA, 45 nt, synthetic construct
  misc_feature 1..45: note = HLA class II histocompatibility antigen, DR alpha chain (52-66)
  source 1..45: mol_type = other RNA
cagggcgccctggctaacatcgcagtggacaaggccaatctcgag

SEQ ID NO: 52304 - RNA, 27 nt, synthetic construct
  misc_feature 1..27: note = Myosin-9 (478-486)
  source 1..27: mol_type = other RNA
cagctgttcaaccacaccatgtttatc

SEQ ID NO: 52305 - RNA, 27 nt, synthetic construct
  misc_feature 1..27: note = Myosin-9 (163-171)
  source 1..27: mol_type = other RNA
cagctgatggccgagaagctccaactt

SEQ ID NO: 52306 - RNA, 27 nt, synthetic construct
  misc_feature 1..27: note = T-complex protein 1 subunit alpha (187-195)
  source 1..27: mol_type = other RNA
cagcccagataccctgtgaacagcgtc

SEQ ID NO: 52307 - RNA, 30 nt, synthetic construct
  misc_feature 1..30: note = Carcinoembryonic antigen-related cell adhesion molecule 5 (268-277)
  source 1..30: mol_type = other RNA
cagtacagctggttcgtgaacggcaccttt

SEQ ID NO: 52308 - RNA, 27 nt, synthetic construct
  misc_feature 1..27: note = Histone H2AX (78-86)
  source 1..27: mol_type = other RNA
agaatcattcccaggcacctgcagctc

SEQ ID NO: 52309 - RNA, 27 nt, synthetic construct
  misc_feature 1..27: note = Lamin-B1 (42-50)
  source 1..27: mol_type = other RNA
agactggccgtgtacatcgacaaggtc

SEQ ID NO: 52310 - RNA, 27 nt, synthetic construct
  misc_feature 1..27: note = Prelamin-A/C (41-49)
  source 1..27: mol_type = other RNA
agactggccgtgtacatcgacagggtc

SEQ ID NO: 52311 - RNA, 27 nt, synthetic construct
  misc_feature 1..27: note = Melanocyte protein PMEL (626-634)
  source 1..27: mol_type = other RNA
agactgatgaagcaggacttcagcgtg

SEQ ID NO: 52312 - RNA, 27 nt, synthetic construct
  misc_feature 1..27: note = 60S acidic ribosomal protein P2 (38-46)
  source 1..27: mol_type = other RNA
agactgaacaaggtgatcagcgagctc

SEQ ID NO: 52313 - RNA, 27 nt, synthetic construct
  misc_feature 1..27: note = Vimentin (69-77)
  source 1..27: mol_type = other RNA
agactgaggagctccgtgcccggcgtc

SEQ ID NO: 52314 - RNA, 27 nt, synthetic construct
  misc_feature 1..27: note = Wilms tumor protein (126-134)
  source 1..27: mol_type = other RNA
agaatgttccccaacgccccttacctg

SEQ ID NO: 52315 - RNA, 27 nt, synthetic construct
  misc_feature 1..27: note = Histone deacetylase 2 variant (122-130)
  source 1..27: mol_type = other RNA
agaatgctgccccacgcccctggcgtg

SEQ ID NO: 52316 - RNA, 27 nt, synthetic construct
  misc_feature 1..27: note = Cellular tumor antigen p53 (65-73)
  source 1..27: mol_type = other RNA
agaatgcccgaggccgctcctccagtg

SEQ ID NO: 52317 - RNA, 27 nt, synthetic construct
  misc_feature 1..27: note = Actin, cytoplasmic 2 (103-111)
  source 1..27: mol_type = other RNA
agaatgcagaaggagatcaccgccctg

SEQ ID NO: 52318 - RNA, 69 nt, synthetic construct
  misc_feature 1..69: note = Melanoma antigen recognized by T-cells 1 (51-73)
  source 1..69: mol_type = other RNA
agaaacggctacagggccctgatggacaagagcctccacgtggggacccagtgcgctcttacacggcgc

SEQ ID NO: 52319 - RNA, 27 nt, synthetic construct
  misc_feature 1..27: note = B-lymphocyte antigen CD20 (222-230)
  source 1..27: mol_type = other RNA
agacccaagagcaacatcgtgctgctc

SEQ ID NO: 52320 - RNA, 27 nt, synthetic construct
  misc_feature 1..27: note = Actin, aortic smooth muscle (39-47)
  source 1..27: mol_type = other RNA
agacccaggcaccagggcgtgatggtc

SEQ ID NO: 52321 - RNA, 27 nt, synthetic construct
  misc_feature 1..27: note = Probable global transcription activator SNF2L2 (261-269)
  source 1..27: mol_type = other RNA
agacccagcggccctgggccagagctg

SEQ ID NO: 52322 - RNA, 27 nt, synthetic construct
  misc_feature 1..27: note = Myotubularin-related protein 5 (644-652)
  source 1..27: mol_type = other RNA
agaccctacagcaacgtgtccaatctg

SEQ ID NO: 52323 - RNA, 27 nt, synthetic construct
  misc_feature 1..27: note = Proteasome subunit beta type-1 (127-135)
  source 1..27: mol_type = other RNA
agaaggttctttccctactatgtgtac

SEQ ID NO: 52324 - RNA, 27 nt, synthetic construct
  misc_feature 1..27: note = 60S ribosomal protein L7a (110-118)
  source 1..27: mol_type = other RNA
agaaggcactggggcgggaacgtgctg

SEQ ID NO: 52325 - RNA, 27 nt, synthetic construct
  misc_feature 1..27: note = Histone H3.3 (53-61)
  source 1..27: mol_type = other RNA
agaaggtaccagaagagcaccgagctg

SEQ ID NO: 52326 - RNA, 27 nt, synthetic construct
  misc_feature 1..27: note = 60S ribosomal protein L24 (23-31)
  source 1..27: mol_type = other RNA
agaaccgacggcaaggtgttccagttt

SEQ ID NO: 52327 - RNA, 27 nt, synthetic construct
  misc_feature 1..27: note = 40S ribosomal protein S3 (54-62)
  source 1..27: mol_type = other RNA
agaacccagaacgtgctgggcgagaag

SEQ ID NO: 52328 - RNA, 27 nt, synthetic construct
  misc_feature 1..27: note = HLA class I histocompatibility antigen, Cw-7 alpha chain (2-10)
  source 1..27: mol_type = other RNA
agagtgatggcccccagggctctgctc

SEQ ID NO: 52329 - RNA, 30 nt, synthetic construct
  misc_feature 1..30: note = HLA class I histocompatibility antigen, B-15 alpha chain (194-203)
  source 1..30: mol_type = other RNA
agatacctggagaacggcaaggaaaccctc

SEQ ID NO: 52330 - RNA, 27 nt, synthetic construct
  misc_feature 1..27: note = Serine/threonine-protein kinase Sgk1 (208-216)
  source 1..27: mol_type = other RNA
agcgccctgggctacctccactccctt

SEQ ID NO: 52331 - RNA, 27 nt, synthetic construct
  misc_feature 1..27: note = Tyrosinase (192-200)
  source 1..27: mol_type = other RNA
agcgagatctggagagacattgatttc

SEQ ID NO: 52332 - RNA, 27 nt, synthetic construct
  misc_feature 1..27: note = Serine/threonine-protein phosphatase PP1-alpha catalytic subunit (10-18)
  source 1..27: mol_type = other RNA
agcatcattggcagactgctcgaggtg

SEQ ID NO: 52333 - RNA, 30 nt, synthetic construct
  misc_feature 1..30: note = Melanocyte protein PMEL (577-586)
  source 1..30: mol_type = other RNA
agcctggccgacaccaactccctcgctgtg

SEQ ID NO: 52334 - RNA, 27 nt, synthetic construct
  misc_feature 1..27: note = Heterogeneous nuclear ribonucleoprotein K (154-162)
  source 1..27: mol_type = other RNA
agcctggccggcgggatcattggagtg

SEQ ID NO: 52335 - RNA, 27 nt, synthetic construct
  misc_feature 1..27: note = L-dopachrome tautomerase (288-296)
  source 1..27: mol_type = other RNA
agcctggacgattacaaccacctcgtg

SEQ ID NO: 52336 - RNA, 27 nt, synthetic construct
  misc_feature 1..27: note = Protein flightless-1 homolog (1009-1017)
  source 1..27: mol_type = other RNA
agcctgttccccggcaagctcgaggtg

SEQ ID NO: 52337 - RNA, 27 nt, synthetic construct
  misc_feature 1..27: note = Dual specificity protein phosphatase 5 (337-345)
  source 1..27: mol_type = other RNA
agcctgatcggccacctccagaccctt

SEQ ID NO: 52338 - RNA, 30 nt, synthetic construct
  misc_feature 1..30: note = TSC22 domain family protein 3 (27-36)
  source 1..30: mol_type = other RNA
agcctgctcggcggggacgtggtctccgtt

SEQ ID NO: 52339 - RNA, 27 nt, synthetic construct
  misc_feature 1..27: note = Cancer/testis antigen 1 (157-165)
  source 1..27: mol_type = other RNA
agcctgctcatgtggatcacccagtgc

SEQ ID NO: 52340 - RNA, 27 nt, synthetic construct
  misc_feature 1..27: note = Serine/threonine-protein phosphatase 2A 65 kDa regulatory subunit A alpha isoform (403-411)
  source 1..27: mol_type = other RNA
agcctgctccccgccatcgtggagctt

SEQ ID NO: 52341 - RNA, 33 nt, synthetic construct
  misc_feature 1..33: note = Protein transport protein Sec23B (138-148)
  source 1..33: mol_type = other RNA
agcctgctcccccctgacgcccttgtgggcctg

SEQ ID NO: 52342 - RNA, 33 nt, synthetic construct
  misc_feature 1..33: note = Protein transport protein Sec23A (156-166)
  source 1..33: mol_type = other RNA
agcctgctcccccctaccgcccttgtgggcctg

SEQ ID NO: 52343 - RNA, 27 nt, synthetic construct
  misc_feature 1..27: note = Vimentin (226-234)
  source 1..27: mol_type = other RNA
agcctgcaggaggaaatcgccttcctc

SEQ ID NO: 52344 - RNA, 27 nt, synthetic construct
  misc_feature 1..27: note = CD59oprotein (106-114)
  source 1..27: mol_type = other RNA
agcctgtccgagaagaccgtgctcctt

SEQ ID NO: 52345 - RNA, 27 nt, synthetic construct
  misc_feature 1..27: note = Collagen alpha-5(IV) chain (18-26)
  source 1..27: mol_type = other RNA
agcctgtggggccagcccgccgaggct

SEQ ID NO: 52346 - RNA, 27 nt, synthetic construct
  misc_feature 1..27: note = AT-rich interactive domain-containing protein 3A (372-380)
  source 1..27: mol_type = other RNA
agccccaagctgcctgtgtcctctctc

SEQ ID NO: 52347 - RNA, 33 nt, synthetic construct
  misc_feature 1..33: note = Polypyrimidine tract-binding protein 1 (141-151)
  source 1..33: mol_type = other RNA
agccccaaccaggccagagctcaagcagccctg

SEQ ID NO: 52348 - RNA, 27 nt, synthetic construct
  misc_feature 1..27: note = Spermine synthase (128-136)
  source 1..27: mol_type = other RNA
agcccctaccagaacatcaagattctg

SEQ ID NO: 52349 - RNA, 27 nt, synthetic construct
  misc_feature 1..27: note = Eukaryotic translation initiation factor 3 subunit D (61-69)
  source 1..27: mol_type = other RNA
agccagttcggcgggggatcccaatac

SEQ ID NO: 52350 - RNA, 27 nt, synthetic construct
  misc_feature 1..27: note = Ornithine decarboxylase (180-188)
  source 1..27: mol_type = other RNA
agctccgagcagaccttcatgtactat

SEQ ID NO: 52351 - RNA, 27 nt, synthetic construct
  misc_feature 1..27: note = Glutamine-fructose-6-phosphate aminotransferase (isomerizing) 1 (95-103)
  source 1..27: mol_type = other RNA
agcaccgaccacatccccattctgtac

SEQ ID NO: 52352 - RNA, 30 nt, synthetic construct
  misc_feature 1..30: note = Cellular tumor antigen p53 (149-157)
  source 1..30: mol_type = other RNA
agcaccccccctccaggcgccacaagagtg

SEQ ID NO: 52353 - RNA, 27 nt, synthetic construct
  misc_feature 1..27: note = Eukaryotic translation initiation factor 3 subunit L (226-234)
  source 1..27: mol_type = other RNA
agcgtgctgaacgtcctccactccctt

SEQ ID NO: 52354 - RNA, 27 nt, synthetic construct
  misc_feature 1..27: note = L-dopachrome tautomerase (180-188)
  source 1..27: mol_type = other RNA
agcgtgtacgacttctttgtctggctg

SEQ ID NO: 52355 - RNA, 27 nt, synthetic construct
  misc_feature 1..27: note = Mammaglobin-A (32-40)
  source 1..27: mol_type = other RNA
accatcaacccccaggtgagcaagaca

SEQ ID NO: 52356 - RNA, 27 nt, synthetic construct
  misc_feature 1..27: note = L-dopachrome tautomerase (360-368)
  source 1..27: mol_type = other RNA
accctggacagccaggtgatgtccctc

SEQ ID NO: 52357 - RNA, 27 nt, synthetic construct
  misc_feature 1..27: note = Protein BTG2 (101-109)
  source 1..27: mol_type = other RNA
accctgtgggtggacccctacgaggtc

SEQ ID NO: 52358 - RNA, 27 nt, synthetic construct
  misc_feature 1..27: note = DNA-directed RNA polymerase II subunit RPB1 (527-535)
  source 1..27: mol_type = other RNA
accccccagagcaacagacctgtgatg

SEQ ID NO: 52359 - RNA, 33 nt, synthetic construct
  misc_feature 1..33: note = Heat shock cognate 71 kDa protein (22-32)
  source 1..33: mol_type = other RNA
accgtgttcgacgccaagagactgatcggcagg

SEQ ID NO: 52360 - RNA, 27 nt, synthetic construct
  misc_feature 1..27: note = Carcinoembryonic antigen-related cell adhesion molecule 5 (652-660)
  source 1..27: mol_type = other RNA
acctacgcctgcttcgtgagcaacctg

SEQ ID NO: 52361 - RNA, 27 nt, synthetic construct
  misc_feature 1..27: note = Receptor tyrosine-protein kinase erbB-2 (63-71)
  source 1..27: mol_type = other RNA
acctacctgcccacaaacgccagcctc

SEQ ID NO: 52362 - RNA, 24 nt, synthetic construct
  misc_feature 1..24: note = Serine/threonine-protein phosphatase 2A 65 kDa regulatory subunit A alpha isoform (263-270)
  source 1..24: mol_type = other RNA
gtggccgacaagttcaccgagctg

SEQ ID NO: 52363 - RNA, 27 nt, synthetic construct
  misc_feature 1..27: note = Actin, cytoplasmic 2 (76-84)
  source 1..27: mol_type = other RNA
gtggccctggacttcgagcaggaaatg

SEQ ID NO: 52364 - RNA, 51 nt, synthetic construct
  misc_feature 1..51: note = HLA class I histocompatibility antigen, A-2 alpha chain (27-43)
  source 1..51: mol_type = other RNA
gtggacgatacccagttcgtcagatttgacagcgatgccgcttcccaaagg

SEQ ID NO: 52365 - RNA, 57 nt, synthetic construct
  misc_feature 1..57: note = HLA class I histocompatibility antigen, A-2 alpha chain (27-45)
  source 1..57: mol_type = other RNA
gtggacgatacccagttcgtcagatttgacagcgatgccgcttcccaaaggatggag

SEQ ID NO: 52366 - RNA, 60 nt, synthetic construct
  misc_feature 1..60: note = HLA class I histocompatibility antigen, A-2 alpha chain (27-46)
  source 1..60: mol_type = other RNA
gtggacgatacccagttcgtcagatttgacagcgatgccgcttcccaaaggatggagccc

SEQ ID NO: 52367 - RNA, 63 nt, synthetic construct
  misc_feature 1..63: note = HLA class I histocompatibility antigen, A-2 alpha chain (27-47)
  source 1..63: mol_type = other RNA
gtggacgatacccagttcgtcagatttgacagcgatgccgcttcccaaaggatggagccccgg

SEQ ID NO: 52368 - RNA, 27 nt, synthetic construct
  misc_feature 1..27: note = Myeloblastin (169-177)
  source 1..27: mol_type = other RNA
gtgctgcaggagctcaacgtcaccgtt

SEQ ID NO: 52369 - RNA, 30 nt, synthetic construct
  misc_feature 1..30: note = Melanocyte protein PMEL (483-492)
  source 1..30: mol_type = other RNA
gtgctgtacagatatggcagcttctccgtc

SEQ ID NO: 52370 - RNA, 27 nt, synthetic construct
  misc_feature 1..27: note = HLA class I histocompatibility antigen, Cw-3 alpha chain (3-11)
  source 1..27: mol_type = other RNA
gtgatggcccccagaaccctgatcctc

SEQ ID NO: 52371 - RNA, 27 nt, synthetic construct
  misc_feature 1..27: note = HLA class I histocompatibility antigen, A-2 alpha chain (3-11)
  source 1..27: mol_type = other RNA
gtgatggcccccagaaccctggtcctc

SEQ ID NO: 52372 - RNA, 27 nt, synthetic construct
  misc_feature 1..27: note = Importin subunit alpha-5 (434-442)
  source 1..27: mol_type = other RNA
gtgatggacagcaagatcgtccaggtt

SEQ ID NO: 52373 - RNA, 27 nt, synthetic construct
  misc_feature 1..27: note = 60S acidic ribosomal protein P2 (65-73)
  source 1..27: mol_type = other RNA
gtgcccgccggcggggctgtcgcagtt

SEQ ID NO: 52374 - RNA, 36 nt, synthetic construct
  misc_feature 1..36: note = rRNA 2'-O-methyltransferase fibrillarin (174-185)
  source 1..36: mol_type = other RNA
gtgagcgacatcgtcggccccgatgggctggtttac

SEQ ID NO: 52375 - RNA, 45 nt, synthetic construct
  misc_feature 1..45: note = Beta-2-microglobulin (84-98)
  source 1..45: mol_type = other RNA
gtgaccctgagccagcccaagatcgtcaaatgggacagagatatg

SEQ ID NO: 52376 - RNA, 27 nt, synthetic construct
  misc_feature 1..27: note = L-dopachrome tautomerase (82-90)
  source 1..27: mol_type = other RNA
gtggtcatgggcaccctggttgccctc

SEQ ID NO: 52377 - RNA, 60 nt, synthetic construct
  misc_feature 1..60: note = Cancer/testis antigen 1 (161-180)
  source 1..60: mol_type = other RNA
tggatcacccagtgcttcctgcccgtgtttctcgcccaacctccaagcggccagagaagg

SEQ ID NO: 52378 - RNA, 48 nt, synthetic construct
  misc_feature 1..48: note = Melanocyte protein PMEL (44-59)
  source 1..48: mol_type = other RNA
tggaacagacagctgtaccccgagtggaccgaagcccaaaggctcgac

SEQ ID NO: 52379 - RNA, 27 nt, synthetic construct
  misc_feature 1..27: note = Elongation factor 2 (265-273)
  source 1..27: mol_type = other RNA
tacttcgaccccgccaacggcaagttt

SEQ ID NO: 52380 - RNA, 27 nt, synthetic construct
  misc_feature 1..27: note = Cyclin-A2 (178-186)
  source 1..27: mol_type = other RNA
taccacgaggacatccatacctatctg

SEQ ID NO: 52381 - RNA, 27 nt, synthetic construct
  misc_feature 1..27: note = DNA (cytosine-5)-methyltransferase 1 (254-262)
  source 1..27: mol_type = other RNA
tacctggacgatcccgacctcaagtat

SEQ ID NO: 52382 - RNA, 27 nt, synthetic construct
  misc_feature 1..27: note = Melanocyte protein PMEL (280-288)
  source 1..27: mol_type = other RNA
tacctggagcccggccctgtgaccgcc

SEQ ID NO: 52383 - RNA, 27 nt, synthetic construct
  misc_feature 1..27: note = Myosin-9 (260-268)
  source 1..27: mol_type = other RNA
tacctgctcgagaagagcagagccatc

SEQ ID NO: 52384 - RNA, 27 nt, synthetic construct
  misc_feature 1..27: note = Probable ATP-dependent RNA helicase DDX5 (148-156)
  source 1..27: mol_type = other RNA
tacctgctccccgccatcgtgcacatt

SEQ ID NO: 52385 - RNA, 27 nt, synthetic construct
  misc_feature 1..27: note = Carcinoembryonic antigen-related cell adhesion molecule 5 (605-613)
  source 1..27: mol_type = other RNA
tacctgagcggcgccaacctcaatctt

SEQ ID NO: 52386 - RNA, 27 nt, synthetic construct
  misc_feature 1..27: note = Myosin-9 (9-17)
  source 1..27: mol_type = other RNA
tacctgtatgtggacaagaacttcatc

SEQ ID NO: 52387 - RNA, 27 nt, synthetic construct
  misc_feature 1..27: note = Tyrosinase (369-377
  source 1..27: mol_type = other RNA
tacatggacggcaccatgagccaggtg

SEQ ID NO: 52388 - RNA, 27 nt, synthetic construct
  misc_feature 1..27: note = Tyrosinase (369-377)
  source 1..27: mol_type = other RNA
tacatgaacggcaccatgagccaggtg

SEQ ID NO: 52389 - RNA, 27 nt, synthetic construct
  misc_feature 1..27: note = Cellular tumor antigen p53 (103-111)
  source 1..27: mol_type = other RNA
taccagggcagctatgggttcagactg

SEQ ID NO: 52390 - RNA, 36 nt, synthetic construct
  misc_feature 1..36: note = Cytochrome c oxidase subunit 2 (110-121)
  source 1..36: mol_type = other RNA
tacaccgactatggcgggctgatcttcaacagctac

SEQ ID NO: 52391 - RNA, 27 nt, synthetic construct
  misc_feature 1..27: note = HLA class I histocompatibility antigen, Cw-7 alpha chain (12-20)
  source 1..27: mol_type = other RNA
ttcgcctacgacggcaaggattatatc

SEQ ID NO: 52392 - RNA, 27 nt, synthetic construct
  misc_feature 1..27: note = HLA class I histocompatibility antigen, alpha chain E (137-145)
  source 1..27: mol_type = other RNA
ttcgcctacgacggcaaggattatctg

SEQ ID NO: 52393 - RNA, 27 nt, synthetic construct
  misc_feature 1..27: note = IST1 homolog (326-334)
  source 1..27: mol_type = other RNA
ttcgtgctgcccgagctccctagcgtc

SEQ ID NO: 52394 - RNA, 30 nt, synthetic construct
  misc_feature 1..30: note = 60S ribosomal protein L35 (19-28)
  source 1..30: mol_type = other RNA
aagcagctggacgatctcaaagtggagctt

SEQ ID NO: 52395 - RNA, 45 nt, synthetic construct
  misc_feature 1..45: note = Triosephosphate isomerase (23-37)
  source 1..45: mol_type = other RNA
ggcgagctgatcgggaccctcaacgccgctaaggtgcccgcagac

SEQ ID NO: 52396 - RNA, 42 nt, synthetic construct
  misc_feature 1..42: note = HLA class II histocompatibility antigen, DR alpha chain (40-53)
  source 1..42: mol_type = other RNA
ctggaggaattcggcagatttgccagcttcgaggctcagggg

SEQ ID NO: 52397 - RNA, 27 nt, synthetic construct
  misc_feature 1..27: note = Sorting nexin-5 (257-265)
  source 1..27: mol_type = other RNA
gaggaacccaccgtgatcaagaaatac

SEQ ID NO: 52398 - RNA, 30 nt, synthetic construct
  misc_feature 1..30: note = Melanoma-associated antigen 4 (230-239)
  source 1..30: mol_type = other RNA
ggcgtgtacgacgggagagagcacaccgtc

SEQ ID NO: 52399 - RNA, 27 nt, synthetic construct
  misc_feature 1..27: note = HLA class I histocompatibility antigen, B-39 alpha chain (3-11)
  source 1..27: mol_type = other RNA
gtgatggcccccagaaccgtcctgctc

SEQ ID NO: 52400 - RNA, 27 nt, synthetic construct
  misc_feature 1..27: note = Ubiquilin-4 (442-450)
  source 1..27: mol_type = other RNA
aaccccagagccatgcaggctctgctc

SEQ ID NO: 52401 - RNA, 27 nt, synthetic construct
  misc_feature 1..27: note = HLA class I histocompatibility antigen, Cw-7 alpha chain (3-11)
  source 1..27: mol_type = other RNA
gtgatggcccccagagctctgctcctt

SEQ ID NO: 52402 - RNA, 45 nt, synthetic construct
  misc_feature 1..45: note = Gamma-secretase C-terminal fragment 59 (562-576)
  source 1..45: mol_type = other RNA
gacgccgagttcagacacgatagcggctacgaagtgcatcaccag

SEQ ID NO: 52403 - RNA, 30 nt, synthetic construct
  misc_feature 1..30: note = Gamma-secretase C-terminal fragment 59 (565-574)
  source 1..30: mol_type = other RNA
ttcagacacgacagcggctacgaggtgcat

SEQ ID NO: 52404 - RNA, 27 nt, synthetic construct
  misc_feature 1..27: note = HLA class I histocompatibility antigen, Cw-2 alpha chain (3-11)
  source 1..27: mol_type = other RNA
gtgatggcccccagaaccctgctcctt

SEQ ID NO: 52405 - RNA, 39 nt, synthetic construct
  misc_feature 1..39: note = Gamma-secretase C-terminal fragment 59 (562-574)
  source 1..39: mol_type = other RNA
gacgccgagttcagacacgatagcggctacgaagtgcat

SEQ ID NO: 52406 - RNA, 24 nt, synthetic construct
  misc_feature 1..24: note = Beta-2-microglobulin (91-98)
  source 1..24: mol_type = other RNA
atcgtgaagtgggacagagatatg

SEQ ID NO: 52407 - RNA, 42 nt, synthetic construct
  misc_feature 1..42: note = HLA class II histocompatibility antigen, DR alpha chain (50-63)
  source 1..42: mol_type = other RNA
gaggcccagggcgctctggcaaacatcgccgtggacaaggcg

SEQ ID NO: 52408 - RNA, 45 nt, synthetic construct
  misc_feature 1..45: note = Interferon-induced transmembrane protein 1 (69-83)
  source 1..45: mol_type = other RNA
gtgggcgacgtcaccggggcccaggcttacgcaagcacagccaag

SEQ ID NO: 52409 - RNA, 45 nt, synthetic construct
  misc_feature 1..45: note = Gamma-secretase C-terminal fragment 59 (560-574)
  source 1..45: mol_type = other RNA
ttcgccgaggacgtgggcagcaacaagggggctatcattggactg

SEQ ID NO: 52410 - RNA, 33 nt, synthetic construct
  misc_feature 1..33: note = Amyloid beta A4 protein (20-30)
  source 1..33: mol_type = other RNA
ttcgccgaggacgtgggcagcaacaagggggct

SEQ ID NO: 52411 - RNA, 27 nt, synthetic construct
  misc_feature 1..27: note = Heat shock 70 kDa protein 1-like (395-403)
  source 1..27: mol_type = other RNA
ctgctcgacgtggccccccttagcctg

SEQ ID NO: 52412 - RNA, 27 nt, synthetic construct
  misc_feature 1..27: note = Heat shock 70 kDa protein 1B (391-399)
  source 1..27: mol_type = other RNA
ctgctccttctggacgtggcccccttg

SEQ ID NO: 52413 - RNA, 48 nt, synthetic construct
  misc_feature 1..48: note = HLA class I histocompatibility antigen, B-15 alpha chain (53-68)
  source 1..48: mol_type = other RNA
gacgatacccagttcgtgagatttgacagcgatgccgcttcccccagg

SEQ ID NO: 52414 - RNA, 48 nt, synthetic construct
  misc_feature 1..48: note = HLA class I histocompatibility antigen, Cw-7 alpha chain (153-168)
  source 1..48: mol_type = other RNA
gacctgagaagctggaccgccgctgatacagcagcccagatcactcaa

SEQ ID NO: 52415 - RNA, 45 nt, synthetic construct
  misc_feature 1..45: note = HLA class I histocompatibility antigen, B-15 alpha chain (54-68)
  source 1..45: mol_type = other RNA
gacacccagttcgtgagatttgatagcgacgccgcttcccccagg

SEQ ID NO: 52416 - RNA, 51 nt, synthetic construct
  misc_feature 1..51: note = HLA class I histocompatibility antigen, A-2 alpha chain (29-45)
  source 1..51: mol_type = other RNA
gacacccagttcgtgagatttgatagcgacgccgcttcccaaaggatggag

SEQ ID NO: 52417 - RNA, 36 nt, synthetic construct
  misc_feature 1..36: note = HLA class I histocompatibility antigen, B-15 alpha chain (57-68)
  source 1..36: mol_type = other RNA
ttcgtgagatttgacagcgatgccgcttcccccagg

SEQ ID NO: 52418 - RNA, 33 nt, synthetic construct
  misc_feature 1..33: note = HLA class I histocompatibility antigen, A-1 alpha chain (32-42)
  source 1..33: mol_type = other RNA
ttcgtgagatttgacagcgatgccgcttcccag

SEQ ID NO: 52419 - RNA, 45 nt, synthetic construct
  misc_feature 1..45: note = HLA class I histocompatibility antigen, B-15 alpha chain (154-168)
  source 1..45: mol_type = other RNA
ctgagctcctggaccgccgctgacacagcagcccagatcactcaa

SEQ ID NO: 52420 - RNA, 51 nt, synthetic construct
  misc_feature 1..51: note = HLA class I histocompatibility antigen, B-15 alpha chain (52-68)
  source 1..51: mol_type = other RNA
gtggacgatacccagttcgtcagatttgacagcgatgccgcttcccccagg

SEQ ID NO: 52421 - RNA, 27 nt, synthetic construct
  misc_feature 1..27: note = Vimentin (116-124)
  source 1..27: mol_type = other RNA
aactacatcgacaaggtgagattcctg

SEQ ID NO: 52422 - RNA, 27 nt, synthetic construct
  misc_feature 1..27: note = G antigen 12H (9-17)
  source 1..27: mol_type = other RNA
tactattggcccagacctaggcggtac

SEQ ID NO: 52423 - RNA, 27 nt, synthetic construct
  misc_feature 1..27: note = Transaldolase (168-176)
  source 1..27: mol_type = other RNA
ctgctcttcagctttgcccaggctgtg

SEQ ID NO: 52424 - RNA, 51 nt, synthetic construct
  misc_feature 1..51: note = T cell receptor beta chain (42-57)
  source 1..51: mol_type = other RNA
tgcaagcccatcagcggccacaactccctgttccagtggtacagacaaacc

SEQ ID NO: 52425 - RNA, 27 nt, synthetic construct
  misc_feature 1..27: note = Putative pre-mRNA-splicing factor ATP-dependent RNA helicase DHX16 (410-418)
  source 1..27: mol_type = other RNA
gccgctatcgcaaaccaccaggtgctg

SEQ ID NO: 52426 - RNA, 27 nt, synthetic construct
  misc_feature 1..27: note = 14-3-3 protein gamma (25-33)
  source 1..27: mol_type = other RNA
gccgctatgaagaacgtgaccgagctg

SEQ ID NO: 52427 - RNA, 27 nt, synthetic construct
  misc_feature 1..27: note = Serine/threonine-protein kinase SMG1 (111-119)
  source 1..27: mol_type = other RNA
gccctgaacaatctccttcacagcctg

SEQ ID NO: 52428 - RNA, 27 nt, synthetic construct
  misc_feature 1..27: note = Cyclin-L1 (148-156)
  source 1..27: mol_type = other RNA
gacgtgatcaacgtcttccaccatctg

SEQ ID NO: 52429 - RNA, 27 nt, synthetic construct
  misc_feature 1..27: note = Fructose-bisphosphate aldolase A (15-23)
  source 1..27: mol_type = other RNA
gagctgagcgacatcgcccacagaatt

SEQ ID NO: 52430 - RNA, 27 nt, synthetic construct
  misc_feature 1..27: note = Glyceraldehyde-3-phosphate dehydrogenase (173-181)
  source 1..27: mol_type = other RNA
ggcctgatgaccacagtgcacgccatc

SEQ ID NO: 52431 - RNA, 27 nt, synthetic construct
  misc_feature 1..27: note = Elongation of very long chain fatty acids protein 1 (135-143)
  source 1..27: mol_type = other RNA
ggccaggtgaccttcctgcacgtcttt

SEQ ID NO: 52432 - RNA, 27 nt, synthetic construct
  misc_feature 1..27: note = Microtubule-associated protein RP/EB family member 2 (234-242)
  source 1..27: mol_type = other RNA
cagctgaacgagcaagtgcacagcctc

SEQ ID NO: 52433 - RNA, 27 nt, synthetic construct
  misc_feature 1..27: note = T-complex protein 1 subunit epsilon (79-87)
  source 1..27: mol_type = other RNA
agcatgatggacgtggatcaccagatc

SEQ ID NO: 52434 - RNA, 27 nt, synthetic construct
  misc_feature 1..27: note = Sphingolipid delta(4)-desaturase DES1 (83-91)
  source 1..27: mol_type = other RNA
agcatgaccctggccatccacgagatt

SEQ ID NO: 52435 - RNA, 27 nt, synthetic construct
  misc_feature 1..27: note = Elongation of very long chain fatty acids protein 5 (171-179)
  source 1..27: mol_type = other RNA
accctgaacagcttcatccacgtgctc

SEQ ID NO: 52436 - RNA, 27 nt, synthetic construct
  misc_feature 1..27: note = ORM1-like protein 2 (50-58)
  source 1..27: mol_type = other RNA
accctgacaaacgtgatccacaatctc

SEQ ID NO: 52437 - RNA, 30 nt, synthetic construct
  misc_feature 1..30: note = Baculoviral IAP repeat-containing protein 7 (280-289)
  source 1..30: mol_type = other RNA
cagctgtgccccatctgtagagcccctgtg

SEQ ID NO: 52438 - RNA, 30 nt, synthetic construct
  misc_feature 1..30: note = E3 ubiquitin-protein ligase TRIM68 (55-64)
  source 1..30: mol_type = other RNA
tacacctgccccctgtgtagagcccctgtg

SEQ ID NO: 52439 - RNA, 33 nt, synthetic construct
  misc_feature 1..33: note = Putative HTLV-1-related endogenous sequence (14-24)
  source 1..33: mol_type = other RNA
cccaccagagcccctagcggcccaaggccgccc

SEQ ID NO: 52440 - RNA, 33 nt, synthetic construct
  misc_feature 1..33: note = Putative HTLV-1-related endogenous sequence (117-127)
  source 1..33: mol_type = other RNA
agaaggcgggagggccccgaccgcagccctcga

SEQ ID NO: 52441 - RNA, 27 nt, synthetic construct
  misc_feature 1..27: note = Myelin basic protein (175-183)
  source 1..27: mol_type = other RNA
ggcaccctgagcaagatcttcaaactc

SEQ ID NO: 52442 - RNA, 27 nt, synthetic construct
  misc_feature 1..27: note = Myelin proteolipid protein (45-53)
  source 1..27: mol_type = other RNA
aagctgatcgagacctacttcagcaaa

SEQ ID NO: 52443 - RNA, 27 nt, synthetic construct
  misc_feature 1..27: note = Gamma-secretase C-terminal fragment 59 (563-571)
  source 1..27: mol_type = other RNA
gccgagttcagacacgacagcggctac

SEQ ID NO: 52444 - RNA, 27 nt, synthetic construct
  misc_feature 1..27: note = SAM and SH3 domain-containing protein 1 (305-313)
  source 1..27: mol_type = other RNA
gccctgtacagcggcgtgcacaagaaa

SEQ ID NO: 52445 - RNA, 30 nt, synthetic construct
  misc_feature 1..30: note = E3 ubiquitin-protein ligase SIAH1 (6-15)
  source 1..30: mol_type = other RNA
gccaccgctctgcccacaggcactagcaag

SEQ ID NO: 52446 - RNA, 27 nt, synthetic construct
  misc_feature 1..27: note = Muscleblind-like protein 2 (359-367)
  source 1..27: mol_type = other RNA
gccaccgctaaccagatcattctgaag

SEQ ID NO: 52447 - RNA, 27 nt, synthetic construct
  misc_feature 1..27: note = Annexin A1 (63-71)
  source 1..27: mol_type = other RNA
gccaccatcattgacatactgacaaag

SEQ ID NO: 52448 - RNA, 27 nt, synthetic construct
  misc_feature 1..27: note = Nuclear ubiquitous casein and cyclin-dependent kinase substrate 1 (176-184)
  source 1..27: mol_type = other RNA
gccaccgtgacacccagccctgtcaag

SEQ ID NO: 52449 - RNA, 27 nt, synthetic construct
  misc_feature 1..27: note = Pleiotropic regulator 1 (118-126)
  source 1..27: mol_type = other RNA
gccgtggctctgcccctccagaccaag

SEQ ID NO: 52450 - RNA, 36 nt, synthetic construct
  misc_feature 1..36: note = NADH dehydrogenase (ubiquinone) 1 alpha subcomplex subunit 3 (29-40)
  source 1..36: mol_type = other RNA
gccgtgatcctgccccctctcagcccatacttcaag

SEQ ID NO: 52451 - RNA, 27 nt, synthetic construct
  misc_feature 1..27: note = CD99 antigen (177-185)
  source 1..27: mol_type = other RNA
gccgtgcagagaaccctgctcgagaag

SEQ ID NO: 52452 - RNA, 27 nt, synthetic construct
  misc_feature 1..27: note = Guanine nucleotide-binding protein G(o) subunit alpha (93-101)
  source 1..27: mol_type = other RNA
gccgtgaccgacgtcatcattgctaag

SEQ ID NO: 52453 - RNA, 42 nt, synthetic construct
  misc_feature 1..42: note = Calsyntenin-1 (56-69)
  source 1..42: mol_type = other RNA
gacccccctctgatcgccctcgataaggacgctccacttaga

SEQ ID NO: 52454 - RNA, 27 nt, synthetic construct
  misc_feature 1..27: note = GPI transamidase component PIG-T (161-169)
  source 1..27: mol_type = other RNA
gacaccgatcactacttcctgagatat

SEQ ID NO: 52455 - RNA, 42 nt, synthetic construct
  misc_feature 1..42: note = Perilipin-3 (222-235)
  source 1..42: mol_type = other RNA
gacgtggccagcgtccagcaacagagacaggagcagtcctac

SEQ ID NO: 52456 - RNA, 27 nt, synthetic construct
  misc_feature 1..27: note = WD40 repeat-containing protein SMU1 (9-17)
  source 1..27: mol_type = other RNA
gacgtgatcagactgattatgcagtac

SEQ ID NO: 52457 - RNA, 30 nt, synthetic construct
  misc_feature 1..30: note = Protein S100-B (35-44)
  source 1..30: mol_type = other RNA
gagctgatcaacaatgaactcagccacttc

SEQ ID NO: 52458 - RNA, 33 nt, synthetic construct
  misc_feature 1..33: note = Annexin A11 (430-440)
  source 1..33: mol_type = other RNA
gagaccgacctgctcgatatcagaagcgaatac

SEQ ID NO: 52459 - RNA, 27 nt, synthetic construct
  misc_feature 1..27: note = Histone H2B type 2-F (66-74)
  source 1..27: mol_type = other RNA
ttcgtgaacgacatctttgagagaatt

SEQ ID NO: 52460 - RNA, 24 nt, synthetic construct
  misc_feature 1..24: note = Calmodulin (145-152)
  source 1..24: mol_type = other RNA
ttcgtgcagatgatgaccgccaag

SEQ ID NO: 52461 - RNA, 42 nt, synthetic construct
  misc_feature 1..42: note = Phosphoinositide-3-kinase-interacting protein 1 (30-43)
  source 1..42: mol_type = other RNA
ggccacctgtacagagaggaccagaccagccccgcccctggg

SEQ ID NO: 52462 - RNA, 27 nt, synthetic construct
  misc_feature 1..27: note = THO complex subunit 4 (147-155)
  source 1..27: mol_type = other RNA
ggcaccgccgacgtgcacttcgagaga

SEQ ID NO: 52463 - RNA, 27 nt, synthetic construct
  misc_feature 1..27: note = Neuroblast differentiation-associated protein AHNAK (1210-1218)
  source 1..27: mol_type = other RNA
ggcaccttcgggggactgggtagcaag

SEQ ID NO: 52464 - RNA, 27 nt, synthetic construct
  misc_feature 1..27: note = Phosphoserine aminotransferase (119-127)
  source 1..27: mol_type = other RNA
ggcaccatcaacattgtgcaccccaag

SEQ ID NO: 52465 - RNA, 27 nt, synthetic construct
  misc_feature 1..27: note = Histone deacetylase 7 (159-167)
  source 1..27: mol_type = other RNA
cacagcgagagacatgtgctgctctac

SEQ ID NO: 52466 - RNA, 27 nt, synthetic construct
  misc_feature 1..27: note = Gelsolin (48-56)
  source 1..27: mol_type = other RNA
atcatttacaagggcgggaccagcaga

SEQ ID NO: 52467 - RNA, 30 nt, synthetic construct
  misc_feature 1..30: note = Tight junction protein ZO-1 (562-571)
  source 1..30: mol_type = other RNA
atccccaacaagaatagagccgagcagctg

SEQ ID NO: 52468 - RNA, 39 nt, synthetic construct
  misc_feature 1..39: note = Calmodulin (126-138)
  source 1..39: mol_type = other RNA
atcagagaggccgacattgatggcgacgggcaggtgaac

SEQ ID NO: 52469 - RNA, 51 nt, synthetic construct
  misc_feature 1..51: note = POTE ankyrin domain family member F (1057-1073)
  source 1..51: mol_type = other RNA
atcagcaagcaggagtacgacgaatccggcccctctattgtgcacagaaaa

SEQ ID NO: 52470 - RNA, 27 nt, synthetic construct
  misc_feature 1..27: note = NADH dehydrogenase (ubiquinone) iron-sulfur protein 7, mitochondrial (66-74)
  source 1..27: mol_type = other RNA
atcgtggccggcaccctgacaaacaag

SEQ ID NO: 52471 - RNA, 27 nt, synthetic construct
  misc_feature 1..27: note = LIM domain transcription factor LMO4 (29-37)
  source 1..27: mol_type = other RNA
aagatcgccgacagattcctgctctac

SEQ ID NO: 52472 - RNA, 30 nt, synthetic construct
  misc_feature 1..30: note = Spectrin beta chain, non-erythrocytic 1 (1939-1948)
  source 1..30: mol_type = other RNA
aagcccagagacgtgagctccgtcgagctg

SEQ ID NO: 52473 - RNA, 27 nt, synthetic construct
  misc_feature 1..27: note = NADH dehydrogenase (ubiquinone) 1 subunit C2 (106-114)
  source 1..27: mol_type = other RNA
aagacctacggcgagatcttcgaaaaa

SEQ ID NO: 52474 - RNA, 45 nt, synthetic construct
  misc_feature 1..45: note = Testican-2 (317-331)
  source 1..45: mol_type = other RNA
ctggagagaatccagattcaagaagccgctaagaaaaagcccggc

SEQ ID NO: 52475 - RNA, 27 nt, synthetic construct
  misc_feature 1..27: note = Alpha-adducin (37-45)
  source 1..27: mol_type = other RNA
ctgaccgacagagagctcgaagagtac

SEQ ID NO: 52476 - RNA, 30 nt, synthetic construct
  misc_feature 1..30: note = V-type proton ATPase subunit F (46-55)
  source 1..30: mol_type = other RNA
aacgagatcgaagacaccttcagacagttt

SEQ ID NO: 52477 - RNA, 24 nt, synthetic construct
  misc_feature 1..24: note = 40S ribosomal protein SA (149-156)
  source 1..24: mol_type = other RNA
aacaccgacagccccctgagatac

SEQ ID NO: 52478 - RNA, 27 nt, synthetic construct
  misc_feature 1..27: note = Bcl-2-associated transcription factor 1 (428-436)
  source 1..27: mol_type = other RNA
aacaccgaggaagagggcctgaagtac

SEQ ID NO: 52479 - RNA, 33 nt, synthetic construct
  misc_feature 1..33: note = ATP synthase-coupling factor 6, mitochondrial (98-108)
  source 1..33: mol_type = other RNA
cccaagttcgaggtgatcgaaaaacctcaggcc

SEQ ID NO: 52480 - RNA, 39 nt, synthetic construct
  misc_feature 1..39: note = Phosphatidylethanolamine-binding protein 1 (2-14)
  source 1..39: mol_type = other RNA
cccgtggacctgagcaagtggtccggccctctctctctt

SEQ ID NO: 52481 - RNA, 27 nt, synthetic construct
  misc_feature 1..27: note = 40S ribosomal protein S29 (5-13)
  source 1..27: mol_type = other RNA
cagctgtactggagccaccccagaaag

SEQ ID NO: 52482 - RNA, 30 nt, synthetic construct
  misc_feature 1..30: note = Septin-2 (291-300)
  source 1..30: mol_type = other RNA
agactgtacccctggggcgtggtcgaggtt

SEQ ID NO: 52483 - RNA, 27 nt, synthetic construct
  misc_feature 1..27: note = Methyl-CpG-binding domain protein 3 (74-82)
  source 1..27: mol_type = other RNA
agcatcttcaagcagcccgtgaccaaa

SEQ ID NO: 52484 - RNA, 27 nt, synthetic construct
  misc_feature 1..27: note = Transformation/transcription domain-associated protein (1806-1814)
  source 1..27: mol_type = other RNA
agcatcacctccgtgttcattacaaag

SEQ ID NO: 52485 - RNA, 30 nt, synthetic construct; identical to SEQ ID NO: 28258
  misc_feature 1..30: note = Transcription factor HES-1 (101-110)
  source 1..30: mol_type = other RNA

SEQ ID NO: 52486 - RNA, 27 nt, synthetic construct
  misc_feature 1..27: note = Protein transport protein Sec23B (115-123)
  source 1..27: mol_type = other RNA
agcaccatcgagtacgtgattcagaga

SEQ ID NO: 52487 - RNA, 33 nt, synthetic construct; identical to SEQ ID NO: 28260
  misc_feature 1..33: note = Paralemmin-2 (155-165)
  source 1..33: mol_type = other RNA

SEQ ID NO: 52488 - RNA, 30 nt, synthetic construct
  misc_feature 1..30: note = Sodium/potassium-transporting ATPase subunit alpha-3 (946-955)
  source 1..30: mol_type = other RNA
agcgtgttccagcaaggcatgaagaacaaa

SEQ ID NO: 52489 - RNA, 33 nt, synthetic construct
  misc_feature 1..33: note = Stathmin (31-41)
  source 1..33: mol_type = other RNA
agcgtgcccgagttccctctgtccccaccgaag

SEQ ID NO: 52490 - RNA, 27 nt, synthetic construct
  misc_feature 1..27: note = Heterogeneous nuclear ribonucleoprotein L-like (68-76)
  source 1..27: mol_type = other RNA
agcgtgtcccccgtcgttcacgtgaga

SEQ ID NO: 52491 - RNA, 24 nt, synthetic construct
  misc_feature 1..24: note = Nodal modulator 3 (247-254)
  source 1..24: mol_type = other RNA
accgccatcagacaccatgtgctg

SEQ ID NO: 52492 - RNA, 33 nt, synthetic construct
  misc_feature 1..33: note = Interferon-induced GTP-binding protein Mx2 (194-204)
  source 1..33: mol_type = other RNA
accatcattgacctgcccggcataacaagagtg

SEQ ID NO: 52493 - RNA, 27 nt, synthetic construct
  misc_feature 1..27: note = Neuronal membraneoprotein M6-b (264-272)
  source 1..27: mol_type = other RNA
accacatacaactatgccgtgctgaag

SEQ ID NO: 52494 - RNA, 27 nt, synthetic construct
  misc_feature 1..27: note = Contactin-1 (759-767)
  source 1..27: mol_type = other RNA
gtgaccaaccccgacacaggcagatac

SEQ ID NO: 52495 - RNA, 24 nt, synthetic construct
  misc_feature 1..24: note = Cytosolic non-specific dipeptidase (468-475)
  source 1..24: mol_type = other RNA
tacgaggtgagccagctgaaggac

SEQ ID NO: 52496 - RNA, 27 nt, synthetic construct
  misc_feature 1..27: note = Septin-2 (121-129)
  source 1..27: mol_type = other RNA
tacatcgacgagcagttcgaaagatat

SEQ ID NO: 52497 - RNA, 30 nt, synthetic construct
  misc_feature 1..30: note = Noelin-2 (405-414)
  source 1..30: mol_type = other RNA
tacaccgacgtgcccttccacaaccagtat

SEQ ID NO: 52498 - RNA, 33 nt, synthetic construct
  misc_feature 1..33: note = Serine/threonine-protein kinase DCLK1 (176-186)
  source 1..33: mol_type = other RNA
tacaccgagagagacgccagcggcatgctgtat

SEQ ID NO: 52499 - RNA, 24 nt, synthetic construct
  misc_feature 1..24: note = U2 small nuclear ribonucleoprotein B'' (205-212)
  source 1..24: mol_type = other RNA
gacgccctgcagggcttcaagatc

SEQ ID NO: 52500 - RNA, 45 nt, synthetic construct
  misc_feature 1..45: note = Melanocyte protein PMEL (45-59)
  source 1..45: mol_type = other RNA
aacagacagctgtaccccgagtggaccgaagcccaaaggctcgac

SEQ ID NO: 52501 - RNA, 27 nt, synthetic construct
  misc_feature 1..27: note = Nuclear autoantigenic sperm protein (281-289)
  source 1..27: mol_type = other RNA
gtgctgaacgagcaggtcaaggaagcc

SEQ ID NO: 52502 - RNA, 27 nt, synthetic construct
  misc_feature 1..27: note = 60S ribosomal protein L5 (218-226)
  source 1..27: mol_type = other RNA
gcctacaagaaacagttcagccaatat

SEQ ID NO: 52503 - RNA, 27 nt, synthetic construct
  misc_feature 1..27: note = Endoplasmic reticulum-Golgi intermediate compartment protein 1 (258-266)
  source 1..27: mol_type = other RNA
gccatcattggcgggaccttcacagtg

SEQ ID NO: 52504 - RNA, 27 nt, synthetic construct
  misc_feature 1..27: note = Programmed cell death protein 4 (283-291)
  source 1..27: mol_type = other RNA
gccctggacaaggctaccgtgctcctt

SEQ ID NO: 52505 - RNA, 27 nt, synthetic construct
  misc_feature 1..27: note = Endoplasmin (381-389)
  source 1..27: mol_type = other RNA
gccctgaaggacaaaatcgagaaggct

SEQ ID NO: 52506 - RNA, 27 nt, synthetic construct
  misc_feature 1..27: note = Glyceraldehyde-3-phosphate dehydrogenase (302-310)
  source 1..27: mol_type = other RNA
gccctgaacgaccacttcgtgaagctc

SEQ ID NO: 52507 - RNA, 27 nt, synthetic construct
  misc_feature 1..27: note = Eukaryotic translation initiation factor 3 subunit F (349-357)
  source 1..27: mol_type = other RNA
gccctgaacgagaagctcgtgaatctt

SEQ ID NO: 52508 - RNA, 27 nt, synthetic construct
  misc_feature 1..27: note = Cofilin-1 (6-14)
  source 1..27: mol_type = other RNA
gccgtgagcgacggcgtcatcaaggtt

SEQ ID NO: 52509 - RNA, 27 nt, synthetic construct
  misc_feature 1..27: note = Actin, cytoplasmic 2 (21-29)
  source 1..27: mol_type = other RNA
ttcgccggcgacgatgctcccagagca

SEQ ID NO: 52510 - RNA, 30 nt, synthetic construct
  misc_feature 1..30: note = Pyruvate kinase PKM (12-21)
  source 1..30: mol_type = other RNA
ttcatccagacccaacagctgcacgccgct

SEQ ID NO: 52511 - RNA, 30 nt, synthetic construct
  misc_feature 1..30: note Dolichyl-diphosphooligosaccharide-proteinosyltransferase subunit STT3A (59-68)
  source 1..30: mol_type = other RNA
ttcctggccgaggaaggcttttacaagttc

SEQ ID NO: 52512 - RNA, 30 nt, synthetic construct
  misc_feature 1..30: note = 5'(3')-deoxyribonucleotidase, cytosolic type (71-80)
  source 1..30: mol_type = other RNA
ttcctggacctcgagcccatccctggcgcc

SEQ ID NO: 52513 - RNA, 24 nt, synthetic construct
  misc_feature 1..24: note = CKLF-like MARVEL transmembrane domain-containing protein 6 (79-86)
  source 1..24: mol_type = other RNA
ttcctgctcagccttctgatcttg

SEQ ID NO: 52514 - RNA, 27 nt, synthetic construct
  misc_feature 1..27: note = Cleavage and polyadenylation specificity factor subunit 1 (185-193)
  source 1..27: mol_type = other RNA
ttcctgcccagctacatcattgacgtg

SEQ ID NO: 52515 - RNA, 24 nt, synthetic construct
  misc_feature 1..24: note = Neutral amino acid transporter B(0) (89-96)
  source 1..24: mol_type = other RNA
ttcgtgtttcccggcgagctgctc

SEQ ID NO: 52516 - RNA, 30 nt, synthetic construct
  misc_feature 1..30: note = Glyceraldehyde-3-phosphate dehydrogenase (169-178)
  source 1..30: mol_type = other RNA
ggcatcgtggaggggctgatgaccacagtc

SEQ ID NO: 52517 - RNA, 27 nt, synthetic construct
  misc_feature 1..27: note = Protein PRRC1 (212-220)
  source 1..27: mol_type = other RNA
ggcatctgggggttcattaagggagtg

SEQ ID NO: 52518 - RNA, 27 nt, synthetic construct
  misc_feature 1..27: note = Probable ATP-dependent RNA helicase DDX49 (311-319)
  source 1..27: mol_type = other RNA
ggcctggacatccccaccgtgcaggtc

SEQ ID NO: 52519 - RNA, 24 nt, synthetic construct
  misc_feature 1..24: note = Nuclear pore complex protein Nup160 (1223-1230)
  source 1..24: mol_type = other RNA
ggcctgttcgacaccgccatcagc

SEQ ID NO: 52520 - RNA, 39 nt, synthetic construct
  misc_feature 1..39: note = ATP synthase subunit beta, mitochondrial (203-215)
  source 1..39: mol_type = other RNA
ggcctgttcgggggagccggtgtgggcaagaccgtcctc

SEQ ID NO: 52521 - RNA, 27 nt, synthetic construct
  misc_feature 1..27: note = Signal peptidase complex subunit 2 (79-87)
  source 1..27: mol_type = other RNA
ggcctgatcgacgggagactcaccatt

SEQ ID NO: 52522 - RNA, 33 nt, synthetic construct
  misc_feature 1..33: note = Pyruvate kinase PKM (122-132)
  source 1..33: mol_type = other RNA
ggcctgatcaaggggagcggaaccgccgaggtg

SEQ ID NO: 52523 - RNA, 30 nt, synthetic construct
  misc_feature 1..30: note = Protein kinase C iota type (241-250)
  source 1..30: mol_type = other RNA
ggcctgcaggacttcgatctccttagagtg

SEQ ID NO: 52524 - RNA, 27 nt, synthetic construct
  misc_feature 1..27: note = Histone acetyltransferase p300 (2240-2248)
  source 1..27: mol_type = other RNA
ggccagatcgggcaactgccccaggcc

SEQ ID NO: 52525 - RNA, 27 nt, synthetic construct
  misc_feature 1..27: note = Histone H2A type 1-A (107-115)
  source 1..27: mol_type = other RNA
ggcgtgctgcccaacatccaggccgtc

SEQ ID NO: 52526 - RNA, 30 nt, synthetic construct
  misc_feature 1..30: note = Small nuclear ribonucleoprotein G (67-76)
  source 1..30: mol_type = other RNA
atcattatgctggaggccctcgaaagagtg

SEQ ID NO: 52527 - RNA, 27 nt, synthetic construct
  misc_feature 1..27: note = Heat shock 70 kDa protein 1-like (174-182)
  source 1..27: mol_type = other RNA
atcattaacgagcccaccgccgctgca

SEQ ID NO: 52528 - RNA, 27 nt, synthetic construct
  misc_feature 1..27: note = Glyceraldehyde-3-phosphate dehydrogenase (206-214)
  source 1..27: mol_type = other RNA
atcattcccgccagcaccggcgctgca

SEQ ID NO: 52529 - RNA, 36 nt, synthetic construct
  misc_feature 1..36: note = Nucleosome assembly protein 1-like 1 (319-330)
  source 1..36: mol_type = other RNA
atcctggccgctgacttcgagattggccactttctc

SEQ ID NO: 52530 - RNA, 27 nt, synthetic construct
  misc_feature 1..27: note = Glyceraldehyde-3-phosphate dehydrogenase (273-281)
  source 1..27: mol_type = other RNA
atcctgggctacaccgagcaccaggtg

SEQ ID NO: 52531 - RNA, 27 nt, synthetic construct
  misc_feature 1..27: note = 40S ribosomal protein S11 (72-80)
  source 1..27: mol_type = other RNA
atcctgagcggcgtggtcaccaagatg

SEQ ID NO: 52532 - RNA, 27 nt, synthetic construct
  misc_feature 1..27: note = Structural maintenance of chromosomes protein 3 (436-444)
  source 1..27: mol_type = other RNA
aagctggaccaggatctcaacgaggtg

SEQ ID NO: 52533 - RNA, 39 nt, synthetic construct
  misc_feature 1..39: note = Centrin-2 (111-123)
  source 1..39: mol_type = other RNA
aagctgttcgacgatgacgagaccggcaaaatcagcttt

SEQ ID NO: 52534 - RNA, 33 nt, synthetic construct; identical to SEQ ID NO: 28307
  misc_feature 1..33: note = GTP-binding nuclear protein Ran (167-177)
  source 1..33: mol_type = other RNA

SEQ ID NO: 52535 - RNA, 33 nt, synthetic construct
  misc_feature 1..33: note = 40S ribosomal protein S3a (227-237)
  source 1..33: mol_type = other RNA
aagctgatggagctccacggcgaagggagctcc

SEQ ID NO: 52536 - RNA, 30 nt, synthetic construct
  misc_feature 1..30: note = ATP-dependent RNA helicase A (696-705)
  source 1..30: mol_type = other RNA
aaggtgttcgaccccgtccctgttggcgtg

SEQ ID NO: 52537 - RNA, 24 nt, synthetic construct
  misc_feature 1..24: note = Gamma-interferon-inducible lysosomal thiol reductase (27-34)
  source 1..24: mol_type = other RNA
ctgctcgacgtgcccaccgccgct

SEQ ID NO: 52538 - RNA, 27 nt, synthetic construct
  misc_feature 1..27: note = Heat shock cognate 71 kDa protein (393-401)
  source 1..27: mol_type = other RNA
ctgctcgacgtgaccccccttagcctg

SEQ ID NO: 52539 - RNA, 24 nt, synthetic construct
  misc_feature 1..24: note = T-complex protein 1 subunit eta (68-75)
  source 1..24: mol_type = other RNA
ctgctcgacgtggtccaccccgcc

SEQ ID NO: 52540 - RNA, 27 nt, synthetic construct
  misc_feature 1..27: note = T-complex protein 1 subunit eta (68-76)
  source 1..27: mol_type = other RNA
ctgctcgacgtggtccaccccgccgct

SEQ ID NO: 52541 - RNA, 27 nt, synthetic construct
  misc_feature 1..27: note = Transmembrane emp24 domain-containing protein 10 (23-31)
  source 1..27: mol_type = other RNA
ctgctcggccccagacttgtgctggcc

SEQ ID NO: 52542 - RNA, 33 nt, synthetic construct
  misc_feature 1..33: note = Glyceraldehyde-3-phosphate dehydrogenase (174-184)
  source 1..33: mol_type = other RNA
ctgatgaccacagtgcacgccatcactgctacg

SEQ ID NO: 52543 - RNA, 27 nt, synthetic construct
  misc_feature 1..27: note = Proteasome-associated protein ECM29 homolog (162-170)
  source 1..27: mol_type = other RNA
aacctggccgagaagcccaaaaccgtg

SEQ ID NO: 52544 - RNA, 27 nt, synthetic construct
  misc_feature 1..27: note = GPN-loop GTPase 1 (42-50)
  source 1..27: mol_type = other RNA
aacctggaccccgccgtgcacgaggtc

SEQ ID NO: 52545 - RNA, 27 nt, synthetic construct
  misc_feature 1..27: note = 60S ribosomal protein L10a (143-151)
  source 1..27: mol_type = other RNA
aacatggtggccaaggtcgacgaggtt

SEQ ID NO: 52546 - RNA, 27 nt, synthetic construct
  misc_feature 1..27: note = Heterogeneous nuclear ribonucleoproteins C1/C2 (142-150)
  source 1..27: mol_type = other RNA
agagtgccccctccaccgcccatcgcc

SEQ ID NO: 52547 - RNA, 24 nt, synthetic construct
  misc_feature 1..24: note = Hydroxymethylglutaryl-CoA synthase, cytoplasmic (447-454)
  source 1..24: mol_type = other RNA
agcctgttcgagggcacctggtac

SEQ ID NO: 52548 - RNA, 27 nt, synthetic construct
  misc_feature 1..27: note = Hydroxymethylglutaryl-CoA synthase, cytoplasmic (482-490)
  source 1..27: mol_type = other RNA
agcctgttcgagggcacctggtacctc

SEQ ID NO: 52549 - RNA, 21 nt, synthetic construct
  misc_feature 1..21: note = Sterol O-acyltransferase 1 (127-133)
  source 1..21: mol_type = other RNA
agcctgctcgacgagcttctg

SEQ ID NO: 52550 - RNA, 27 nt, synthetic construct
  misc_feature 1..27: note = Tuberin (526-534)
  source 1..27: mol_type = other RNA
agcctgctcgacatcattgagaaggtg

SEQ ID NO: 52551 - RNA, 27 nt, synthetic construct
  misc_feature 1..27: note = Eukaryotic translation elongation factor 1 epsilon-1 (8-16)
  source 1..27: mol_type = other RNA
agcctgctcgagaagtcccttggcctg

SEQ ID NO: 52552 - RNA, 27 nt, synthetic construct
  misc_feature 1..27: note = Neuroblast differentiation-associated protein AHNAK (2580-2588)
  source 1..27: mol_type = other RNA
agcatgcccgacttcgatctgcacctc

SEQ ID NO: 52553 - RNA, 27 nt, synthetic construct
  misc_feature 1..27: note = Phosphoinositide 3-kinase regulatory subunit 4 (906-914)
  source 1..27: mol_type = other RNA
agccaggtgcccgaggtcaccacagtt

SEQ ID NO: 52554 - RNA, 36 nt, synthetic construct
  misc_feature 1..36: note = Annexin A2 (184-195)
  source 1..36: mol_type = other RNA
agcgtgatcgactacgagctgattgatcaggacgcc

SEQ ID NO: 52555 - RNA, 33 nt, synthetic construct
  misc_feature 1..33: note = U2 small nuclear ribonucleoprotein A' (213-223)
  source 1..33: mol_type = other RNA
accctggccgaggtggaaagactcaagggcctt

SEQ ID NO: 52556 - RNA, 27 nt, synthetic construct
  misc_feature 1..27: note = Serine/threonine-protein kinase SIK1 (473-481)
  source 1..27: mol_type = other RNA
accctggccgaggtgagcacaagactc

SEQ ID NO: 52557 - RNA, 27 nt, synthetic construct
  misc_feature 1..27: note = G2/mitotic-specific cyclin-B1 (321-329)
  source 1..27: mol_type = other RNA
accctggccaagtacctcatggagctt

SEQ ID NO: 52558 - RNA, 33 nt, synthetic construct
  misc_feature 1..33: note = Nucleolin (501-511)
  source 1..33: mol_type = other RNA
accctgcaggaggtgttcgaaaaggccacattt

SEQ ID NO: 52559 - RNA, 30 nt, synthetic construct
  misc_feature 1..30: note = L-lactate dehydrogenase B chain (323-332)
  source 1..30: mol_type = other RNA
accctgtgggacatccagaaggatctcaaa

SEQ ID NO: 52560 - RNA, 27 nt, synthetic construct
  misc_feature 1..27: note = L-lactate dehydrogenase A chain (322-330)
  source 1..27: mol_type = other RNA
accctgtggggcatccagaaggagctc

SEQ ID NO: 52561 - RNA, 27 nt, synthetic construct
  misc_feature 1..27: note = Aladin (17-25)
  source 1..27: mol_type = other RNA
accctgtacgagcacaacaatgaactc

SEQ ID NO: 52562 - RNA, 33 nt, synthetic construct
  misc_feature 1..33: note = Microtubule-associated protein 4 (335-345)
  source 1..33: mol_type = other RNA
gtgctgcccaccgagacagaagtcgcccctgct

SEQ ID NO: 52563 - RNA, 27 nt, synthetic construct
  misc_feature 1..27: note = Peroxiredoxin-5, mitochondrial (184-192)
  source 1..27: mol_type = other RNA
gtggtccaggacggcatcgttaaggcc

SEQ ID NO: 52564 - RNA, 30 nt, synthetic construct
  misc_feature 1..30: note = HLA class I histocompatibility antigen, B-7 alpha chain (140-149)
  source 1..30: mol_type = other RNA
tacgcctatgacggcaaggattacatcgct

SEQ ID NO: 52565 - RNA, 21 nt, synthetic construct
  misc_feature 1..21: note = Carbamoyl-phosphate synthase (ammonia), mitochondrial (389-395)
  source 1..21: mol_type = other RNA
tacctgttcgacagctttttc

SEQ ID NO: 52566 - RNA, 24 nt, synthetic construct
  misc_feature 1..24: note = Bax inhibitor 1 (140-147)
  source 1..24: mol_type = other RNA
tacctgttcctcggcgggatcctt

SEQ ID NO: 52567 - RNA, 30 nt, synthetic construct
  misc_feature 1..30: note = Coiled-coil domain-containing protein 12 (62-71)
  source 1..30: mol_type = other RNA
tacgtgcccgaggacgaagatctgaagaaa

SEQ ID NO: 52568 - RNA, 24 nt, synthetic construct
  misc_feature 1..24: note = Small nuclear ribonucleoprotein-associated proteins B and B' (18-25)
  source 1..24: mol_type = other RNA
agaatcttcattggcacctttaag

SEQ ID NO: 52569 - RNA, 54 nt, synthetic construct
  misc_feature 1..54: note = ATP synthase-coupling factor 6, mitochondrial (91-108)
  source 1..54: mol_type = other RNA
cccaccttcaagtttgaggaccctaaattcgaagtgatcgagaagccacaggcc

SEQ ID NO: 52570 - RNA, 27 nt, synthetic construct
  misc_feature 1..27: note = Kinectin (794-802)
  source 1..27: mol_type = other RNA
agcctggtggaggaactcaagaaagtc

SEQ ID NO: 52571 - RNA, 27 nt, synthetic construct
  misc_feature 1..27: note = Kinectin (600-608)
  source 1..27: mol_type = other RNA
gtgctggccgaggaactccacaaggtc

SEQ ID NO: 52572 - RNA, 33 nt, synthetic construct
  misc_feature 1..33: note = HLA class I histocompatibility antigen, B-15 alpha chain (193-203)
  source 1..33: mol_type = other RNA
agaaggtacctggagaacggcaaggaaaccctc

SEQ ID NO: 52573 - RNA, 27 nt, synthetic construct
  misc_feature 1..27: note = Keratin, type I cytoskeletal 18 (307-315)
  source 1..27: mol_type = other RNA
gccctgctcaacatcaaggtgaaactt

SEQ ID NO: 52574 - RNA, 30 nt, synthetic construct
  misc_feature 1..30: note = Heat shock protein HSP 90-beta (346-355)
  source 1..30: mol_type = other RNA
gccgaggacaaggaaaactacaaaaagttc

SEQ ID NO: 52575 - RNA, 27 nt, synthetic construct
  misc_feature 1..27: note = 40S ribosomal protein S5 (12-20)
  source 1..27: mol_type = other RNA
gccgagacccccgacatcaagctgttc

SEQ ID NO: 52576 - RNA, 36 nt, synthetic construct
  misc_feature 1..36: note = Ribonucleoside-diphosphate reductase subunit M2 (165-176)
  source 1..36: mol_type = other RNA
gaggaagtggacctgagcaaggatatccagcactgg

SEQ ID NO: 52577 - RNA, 30 nt, synthetic construct
  misc_feature 1..30: note = Nucleosome assembly protein 1-like 4 (86-95)
  source 1..30: mol_type = other RNA
gaggaagtgcacgacctggagagaaagtac

SEQ ID NO: 52578 - RNA, 27 nt, synthetic construct
  misc_feature 1..27: note = U4/U6 small nuclear ribonucleoprotein Prp31 (105-113)
  source 1..27: mol_type = other RNA
aacgagctgaatatcattcacaagttc

SEQ ID NO: 52579 - RNA, 36 nt, synthetic construct
  misc_feature 1..36: note = ELAV-like protein 3 (161-172)
  source 1..36: mol_type = other RNA
ttcatcagatttgacaagaggattgaggccgaagag

SEQ ID NO: 52580 - RNA, 30 nt, synthetic construct
  misc_feature 1..30: note = ELAV-like protein 3 (29-38)
  source 1..30: mol_type = other RNA
aagaccaacctgatcgtgaattacctcccc

SEQ ID NO: 52581 - RNA, 27 nt, synthetic construct
  misc_feature 1..27: note = Minor histocompatibility protein HA-1 (137-145)
  source 1..27: mol_type = other RNA
gtgctgcacgacgatctccttgaggcc

SEQ ID NO: 52582 - RNA, 42 nt, synthetic construct
  misc_feature 1..42: note = Glyceraldehyde-3-phosphate dehydrogenase (26-39)
  source 1..42: mol_type = other RNA
ggcaaggtggacatcgtcgccattaacgatcccttcatagac

SEQ ID NO: 52583 - RNA, 42 nt, synthetic construct
  misc_feature 1..42: note = Low affinity immunoglobulin epsilon Fc receptor (10-23)
  source 1..42: mol_type = other RNA
atcagccaggagctggaagagctcagagccgaacaacagagg

SEQ ID NO: 52584 - RNA, 27 nt, synthetic construct
  misc_feature 1..27: note = 26S proteasome non-ATPase regulatory subunit 2 (299-307)
  source 1..27: mol_type = other RNA
ggcagacacggggtgttcctggagctc

SEQ ID NO: 52585 - RNA, 27 nt, synthetic construct
  misc_feature 1..27: note = ATP-dependent RNA helicase DDX3X (234-242)
  source 1..27: mol_type = other RNA
ttcctgctccccatccttagccagatt

SEQ ID NO: 52586 - RNA, 27 nt, synthetic construct
  misc_feature 1..27: note = Putative homeodomain transcription factor 2 (652-660)
  source 1..27: mol_type = other RNA
gcccagctgctccacgtgcatgagatc

SEQ ID NO: 52587 - RNA, 27 nt, synthetic construct
  misc_feature 1..27: note = Transcription factor BTF3 (47-55)
  source 1..27: mol_type = other RNA
gagaccatcatgaaccaggaaaagctg

SEQ ID NO: 52588 - RNA, 27 nt, synthetic construct
  misc_feature 1..27: note = Ribosome biogenesis protein BRX1 homolog (141-149)
  source 1..27: mol_type = other RNA
ttcctggtgcagaacatccacaccctc

SEQ ID NO: 52589 - RNA, 27 nt, synthetic construct
  misc_feature 1..27: note = Microtubule-actin cross-linking factor 1, isoforms 1/2/3/5 (2558-2566)
  source 1..27: mol_type = other RNA
caggccatcaagaacggccaagctctg

SEQ ID NO: 52590 - RNA, 39 nt, synthetic construct
  misc_feature 1..39: note = HLA class I histocompatibility antigen, B-8 alpha chain (111-123)
  source 1..39: mol_type = other RNA
cagagcgaggccggctcccacaccctgcaatctatgtac

SEQ ID NO: 52591 - RNA, 27 nt, synthetic construct
  misc_feature 1..27: note = Dynamin-2 (390-398)
  source 1..27: mol_type = other RNA
tacgccatcaagaacattcacggcgtg

SEQ ID NO: 52592 - RNA, 27 nt, synthetic construct
  misc_feature 1..27: note = ELAV-like protein 4 (96-104)
  source 1..27: mol_type = other RNA
gaccccaaggatgccgagaaagctatc

SEQ ID NO: 52593 - RNA, 27 nt, synthetic construct
  misc_feature 1..27: note = ELAV-like protein 4 (318-326)
  source 1..27: mol_type = other RNA
ggccccttcggggccgtgaacaatgtc

SEQ ID NO: 52594 - RNA, 27 nt, synthetic construct
  misc_feature 1..27: note = ELAV-like protein 4 (197-205)
  source 1..27: mol_type = other RNA
aagcccagcggcgccaccgagcctatc

SEQ ID NO: 52595 - RNA, 27 nt, synthetic construct
  misc_feature 1..27: note = ELAV-like protein 4 (265-273)
  source 1..27: mol_type = other RNA
ccccctagcgcctgctccccaagattc

SEQ ID NO: 52596 - RNA, 27 nt, synthetic construct
  misc_feature 1..27: note = ELAV-like protein 4 (270-278)
  source 1..27: mol_type = other RNA
agccccagattctcccctatcaccatt

SEQ ID NO: 52597 - RNA, 36 nt, synthetic construct
  misc_feature 1..36: note = ATP-dependent RNA helicase DDX3Y (176-187)
  source 1..36: mol_type = other RNA
cacatcgagaacttcagcgacattgatatgggcgaa

SEQ ID NO: 52598 - RNA, 27 nt, synthetic construct
  misc_feature 1..27: note = Histone demethylase UTY (719-727)
  source 1..27: mol_type = other RNA
ctgctcatcgccgacaacccccagctt

SEQ ID NO: 52599 - RNA, 27 nt, synthetic construct
  misc_feature 1..27: note = Pumilio homolog 3 (149-157)
  source 1..27: mol_type = other RNA
agaaccctggacaaggtgctcgaggtc

SEQ ID NO: 52600 - RNA, 27 nt, synthetic construct
  misc_feature 1..27: note = Histone H4 (83-91)
  source 1..27: mol_type = other RNA
accgccatggacgtggtctacgctctg

SEQ ID NO: 52601 - RNA, 27 nt, synthetic construct
  misc_feature 1..27: note = Histone H3.2 (119-127)
  source 1..27: mol_type = other RNA
accatcatgcccaaggacattcagctg

SEQ ID NO: 52602 - RNA, 39 nt, synthetic construct
  misc_feature 1..39: note = Protein S100-A9 (67-79)
  source 1..39: mol_type = other RNA
gacaccaacgccgataagcagctgagcttcgaggaattt

SEQ ID NO: 52603 - RNA, 48 nt, synthetic construct
  misc_feature 1..48: note = Annexin A2 (209-224)
  source 1..48: mol_type = other RNA
gacgtgcccaagtggatcagcattatgaccgagagatccgtccctcac

SEQ ID NO: 52604 - RNA, 39 nt, synthetic construct
  misc_feature 1..39: note = Glyceraldehyde-3-phosphate dehydrogenase (269-281)
  source 1..39: mol_type = other RNA
atcagctggtacgacaacgagttcggctattccaataga

SEQ ID NO: 52605 - RNA, 54 nt, synthetic construct
  misc_feature 1..54: note = Macrophage migration inhibitory factor (3-20)
  source 1..54: mol_type = other RNA
atcgtgaacaccaatgtccccagagccagcgttcctgacggcttcctgtccgag

SEQ ID NO: 52606 - RNA, 27 nt, synthetic construct
  misc_feature 1..27: note = Hemoglobin subunit alpha (41-49)
  source 1..27: mol_type = other RNA
ctgagagtggaccccgtcaacttcaag

SEQ ID NO: 52607 - RNA, 54 nt, synthetic construct
  misc_feature 1..54: note = 40S ribosomal protein S17 (118-135)
  source 1..54: mol_type = other RNA
caggtgacccaacccacagtcggcatgaacttcaagactcctagagggccagtt

SEQ ID NO: 52608 - RNA, 48 nt, synthetic construct
  misc_feature 1..48: note = Collagen alpha-1(I) chain (857-872)
  source 1..48: mol_type = other RNA
agactgcccatcattgacgtggcccctctcgatgtcggcgctccagac

SEQ ID NO: 52609 - RNA, 48 nt, synthetic construct
  misc_feature 1..48: note = Collagen alpha-2(I) chain (949-964)
  source 1..48: mol_type = other RNA
agacccaaggactacgaggtggatgccaccctgaaaagcctcaacaat

SEQ ID NO: 52610 - RNA, 33 nt, synthetic construct
  misc_feature 1..33: note = T-complex protein 1 subunit theta (369-379)
  source 1..33: mol_type = other RNA
gccgaggctttcgaagcaatccccagagccctg

SEQ ID NO: 52611 - RNA, 27 nt, synthetic construct
  misc_feature 1..27: note = Cullin-1 (484-492)
  source 1..27: mol_type = other RNA
gccgaggctagcatgatctccaagctg

SEQ ID NO: 52612 - RNA, 27 nt, synthetic construct
  misc_feature 1..27: note = DNA replication licensing factor MCM7 (328-336)
  source 1..27: mol_type = other RNA
gccgaggaagacttctacgagaagctg

SEQ ID NO: 52613 - RNA, 30 nt, synthetic construct
  misc_feature 1..30: note = BolA-like protein 2 (61-70)
  source 1..30: mol_type = other RNA
gccgaggaactgccccacatccatgctttc

SEQ ID NO: 52614 - RNA, 27 nt, synthetic construct
  misc_feature 1..27: note = DNA topoisomerase 2-beta (526-534)
  source 1..27: mol_type = other RNA
gccgagatcaacaatattataaagatc

SEQ ID NO: 52615 - RNA, 30 nt, synthetic construct
  misc_feature 1..30: note = Cofilin-1 (150-159)
  source 1..30: mol_type = other RNA
gccgagaagctgggcgggagcgctgtgatc

SEQ ID NO: 52616 - RNA, 27 nt, synthetic construct
  misc_feature 1..27: note = Proteasome subunit alpha type-4 (137-145)
  source 1..27: mol_type = other RNA
gccgagaaggtggaaatcgctaccctg

SEQ ID NO: 52617 - RNA, 27 nt, synthetic construct
  misc_feature 1..27: note = Bifunctional glutamate/proline-tRNA ligase (1393-1401)
  source 1..27: mol_type = other RNA
gccgagaacgaagctgagaccaagctg

SEQ ID NO: 52618 - RNA, 30 nt, synthetic construct; identical to SEQ ID NO: 28391
  misc_feature 1..30: note = Sodium/potassium-transporting ATPase subunit alpha-1 (677-686)
  source 1..30: mol_type = other RNA

SEQ ID NO: 52619 - RNA, 30 nt, synthetic construct
  misc_feature 1..30: note = Eukaryotic translation initiation factor 4 gamma 1 (1531-1540)
  source 1..30: mol_type = other RNA
gccgagcagcaaggcaagggggtggctctg

SEQ ID NO: 52620 - RNA, 36 nt, synthetic construct
  misc_feature 1..36: note = T-complex protein 1 subunit eta (76-87)
  source 1..36: mol_type = other RNA
gccgaggtgggcgacgggaccacaagcgtcactctg

SEQ ID NO: 52621 - RNA, 27 nt, synthetic construct
  misc_feature 1..27: note = MICOS complex subunit MIC60 (166-174)
  source 1..27: mol_type = other RNA
ggcgaggggaagcccacccctgccctg

SEQ ID NO: 52622 - RNA, 33 nt, synthetic construct
  misc_feature 1..33: note = Peptidyl-prolyl cis-trans isomerase A (80-90)
  source 1..33: mol_type = other RNA
ggcgagaagttcgaagacgagaactttatcctg

SEQ ID NO: 52623 - RNA, 27 nt, synthetic construct
  misc_feature 1..27: note = NADH dehydrogenase (ubiquinone) 1 beta subcomplex subunit 7 (127-135)
  source 1..27: mol_type = other RNA
ggcgaggtggaccccaaggtcgccctg

SEQ ID NO: 52624 - RNA, 30 nt, synthetic construct
  misc_feature 1..30: note = G2/mitotic-specific cyclin-B1 (62-71)
  source 1..30: mol_type = other RNA
ggcgaggtggacgtcgaacagcacaccctg

SEQ ID NO: 52625 - RNA, 42 nt, synthetic construct
  misc_feature 1..42: note = Zinc finger MYM-type protein 2 (207-220)
  source 1..42: mol_type = other RNA
ggcgagtacctgcccagcaagggggccggaaacaatgtgctc

SEQ ID NO: 52626 - RNA, 30 nt, synthetic construct
  misc_feature 1..30: note = Transforming protein RhoA (46-55)
  source 1..30: mol_type = other RNA
atcgaggtggacggcaagcaggtcgaactg

SEQ ID NO: 52627 - RNA, 33 nt, synthetic construct
  misc_feature 1..33: note = 40S ribosomal protein S17 (96-106)
  source 1..33: mol_type = other RNA
atcgaggtggaccccgataccaaggaaatgctg

SEQ ID NO: 52628 - RNA, 30 nt, synthetic construct
  misc_feature 1..30: note = Putative endoplasmin-like protein (341-350)
  source 1..30: mol_type = other RNA
aaggaggacgaagatgacaaaaccgtgctg

SEQ ID NO: 52629 - RNA, 30 nt, synthetic construct
  misc_feature 1..30: note = Plasminogen activator inhibitor 1 RNA-binding protein (182-191)
  source 1..30: mol_type = other RNA
aaggaggaaggccccaaagagatgaccctg

SEQ ID NO: 52630 - RNA, 27 nt, synthetic construct
  misc_feature 1..27: note = Uncharacterized protein C20orf24 (7-15)
  source 1..27: mol_type = other RNA
aaggaggaaccccctcagccacaactg

SEQ ID NO: 52631 - RNA, 30 nt, synthetic construct
  misc_feature 1..30: note = Importin subunit beta-1 (183-192)
  source 1..30: mol_type = other RNA
aaggaggaacccagcaacaatgtgaaactg

SEQ ID NO: 52632 - RNA, 33 nt, synthetic construct
  misc_feature 1..33: note = Heat shock protein HSP 90-beta (452-462)
  source 1..33: mol_type = other RNA
aaggagttcgacggcaaaagcctggtgtccgtc

SEQ ID NO: 52633 - RNA, 27 nt, synthetic construct
  misc_feature 1..27: note = Melanoma-associated antigen D2 (337-345)
  source 1..27: mol_type = other RNA
aaggagatcgacaaaaacgatcacctg

SEQ ID NO: 52634 - RNA, 30 nt, synthetic construct
  misc_feature 1..30: note = Protein Spindly (380-389)
  source 1..30: mol_type = other RNA
aaggagatcgaaagcaccaaaggcgagctg

SEQ ID NO: 52635 - RNA, 30 nt, synthetic construct
  misc_feature 1..30: note = Coatomer subunit epsilon (241-250)
  source 1..30: mol_type = other RNA
aaggagaacgacttcgatagactggtgctc

SEQ ID NO: 52636 - RNA, 27 nt, synthetic construct
  misc_feature 1..27: note = Targeting protein for Xklp2 (238-246)
  source 1..27: mol_type = other RNA
aaggaggtgaacttcaccagcgaactg

SEQ ID NO: 52637 - RNA, 27 nt, synthetic construct
  misc_feature 1..27: note = H/ACA ribonucleoprotein complex subunit 4 (151-159)
  source 1..27: mol_type = other RNA
aaggagtacgtgggcatcgtcagactg

SEQ ID NO: 52638 - RNA, 30 nt, synthetic construct
  misc_feature 1..30: note = H/ACA ribonucleoprotein complex subunit 3 (8-17)
  source 1..30: mol_type = other RNA
aacgagcagggcgacagagtgtacaccctg

SEQ ID NO: 52639 - RNA, 30 nt, synthetic construct
  misc_feature 1..30: note = Cerebellar degeneration-related protein 2 (148-157)
  source 1..30: mol_type = other RNA
agagagctggaagagaccaaccagaagctc

SEQ ID NO: 52640 - RNA, 27 nt, synthetic construct
  misc_feature 1..27: note = Exocyst complex component 2 (640-648)
  source 1..27: mol_type = other RNA
agactgttcgagaactacatcgaactc

SEQ ID NO: 52641 - RNA, 27 nt, synthetic construct
  misc_feature 1..27: note = 1-phosphatidylinositol 3-phosphate 5-kinase (1841-1849)
  source 1..27: mol_type = other RNA
agcgaggaagacttcatcagatccctg

SEQ ID NO: 52642 - RNA, 30 nt, synthetic construct; identical to SEQ ID NO: 28415
  misc_feature 1..30: note = Hydroxymethylglutaryl-CoA synthase, cytoplasmic (246-255)
  source 1..30: mol_type = other RNA

SEQ ID NO: 52643 - RNA, 33 nt, synthetic construct
  misc_feature 1..33: note = Proteasome activator complex subunit 3 (220-230)
  source 1..33: mol_type = other RNA
accgagatcgacgaaaaggagtacattagcctg

SEQ ID NO: 52644 - RNA, 45 nt, synthetic construct
  misc_feature 1..45: note = HLA class I histocompatibility antigen, B-15 alpha chain (240-254)
  source 1..45: mol_type = other RNA
acctggcagagagacggcgaggatcaaacacaggacactgaactg

SEQ ID NO: 52645 - RNA, 30 nt, synthetic construct
  misc_feature 1..30: note = Nuclear pore complex protein Nup205 (350-359)
  source 1..30: mol_type = other RNA
gtggaggacgatagaaccctgcagagcctc

SEQ ID NO: 52646 - RNA, 30 nt, synthetic construct
  misc_feature 1..30: note = Septin-2 (86-95)
  source 1..30: mol_type = other RNA
gtggagatcgaagagagaggcgtcaagctg

SEQ ID NO: 52647 - RNA, 27 nt, synthetic construct
  misc_feature 1..27: note = Hemoglobin subunit alpha (25-33)
  source 1..27: mol_type = other RNA
tacggcgccgaggctctggaaagaatg

SEQ ID NO: 52648 - RNA, 42 nt, synthetic construct
  misc_feature 1..42: note = HLA class I histocompatibility antigen, A-1 alpha chain (29-42)
  source 1..42: mol_type = other RNA
gacacccagttcgtgagatttgatagcgacgccgcttcccaa

SEQ ID NO: 52649 - RNA, 27 nt, synthetic construct
  misc_feature 1..27: note = Neutral amino acid transporter B(0) (533-541)
  source 1..27: mol_type = other RNA
gtggccagcgagaaggaatccgtcatg

SEQ ID NO: 52650 - RNA, 27 nt, synthetic construct
  misc_feature 1..27: note = Lysosomal protective protein (20-28)
  source 1..27: mol_type = other RNA
atcagagccgctccccctccactgttc

SEQ ID NO: 52651 - RNA, 27 nt, synthetic construct
  misc_feature 1..27: note = Serine/threonine-protein kinase 38-like (444-452)
  source 1..27: mol_type = other RNA
aagagattcgagggcctgacccagagg

SEQ ID NO: 52652 - RNA, 48 nt, synthetic construct
  misc_feature 1..48: note = Alpha-1B-glycoprotein (173-188)
  source 1..48: mol_type = other RNA
gcccccgtggagctgatcctcagcgacgaaacccttcctgctccagag

SEQ ID NO: 52653 - RNA, 39 nt, synthetic construct
  misc_feature 1..39: note = Neuropilin-2 (696-708)
  source 1..39: mol_type = other RNA
gagggccagtacgccagactgatcagcccccctgtgcac

SEQ ID NO: 52654 - RNA, 45 nt, synthetic construct
  misc_feature 1..45: note = Calreticulin (106-120)
  source 1..45: mol_type = other RNA
ggcgggggatacgtgaagctgttccccaacagcctcgaccagacc

SEQ ID NO: 52655 - RNA, 57 nt, synthetic construct
  misc_feature 1..57: note = Annexin A2 (50-68)
  source 1..57: mol_type = other RNA
ggcgtggacgaggtcaccatcgttaacattctgacaaatagaagcaacgcccagagg

SEQ ID NO: 52656 - RNA, 45 nt, synthetic construct
  misc_feature 1..45: note = Filamin-A (2114-2128)
  source 1..45: mol_type = other RNA
aaccccgccgagttcgtggtcaataccagcaacgctggcgcaggg

SEQ ID NO: 52657 - RNA, 51 nt, synthetic construct
  misc_feature 1..51: note = Syntenin-1 (25-41)
  source 1..51: mol_type = other RNA
aaccccgccaatcctgctatcctgagcgaggcatccgccccaattccgcac

SEQ ID NO: 52658 - RNA, 42 nt, synthetic construct
  misc_feature 1..42: note = Transferrin receptor protein 1 (680-693)
  source 1..42: mol_type = other RNA
agagtggagtaccacttcctgagcccctatgtctcccctaag

SEQ ID NO: 52659 - RNA, 39 nt, synthetic construct
  misc_feature 1..39: note = Cathepsin D (230-242)
  source 1..39: mol_type = other RNA
agcttctacctgtccagagaccccgatgcccagcctggc

SEQ ID NO: 52660 - RNA, 63 nt, synthetic construct
  misc_feature 1..63: note = HLA class I histocompatibility antigen, B-51 alpha chain (27-47)
  source 1..63: mol_type = other RNA
gtggacgatacccagttcgtcagatttgacagcgatgccgcttcccccaggacagagcctcgg

SEQ ID NO: 52661 - RNA, 51 nt, synthetic construct
  misc_feature 1..51: note = Profilin-1 (35-51)
  source 1..51: mol_type = other RNA
gtgcccggcaagaccttcgtcaacatcacacctgccgaggttggggtgctg

SEQ ID NO: 52662 - RNA, 27 nt, synthetic construct
  misc_feature 1..27: note = Lymphocyte-specific protein 1 (197-205)
  source 1..27: mol_type = other RNA
aagctgatcgacagaaccgagagcctc

SEQ ID NO: 52663 - RNA, 27 nt, synthetic construct
  misc_feature 1..27: note = Synemin (426-434)
  source 1..27: mol_type = other RNA
agaaccttcagccccacatacggcctg

SEQ ID NO: 52664 - RNA, 27 nt, synthetic construct
  misc_feature 1..27: note = Insulin receptor substrate 2 (1097-1105)
  source 1..27: mol_type = other RNA
agagtggccagccccacctccggcgtc

SEQ ID NO: 52665 - RNA, 27 nt, synthetic construct
  misc_feature 1..27: note = ETS translocation variant 5 (45-53)
  source 1..27: mol_type = other RNA
gagctgttccaggacctcagccaactt

SEQ ID NO: 52666 - RNA, 27 nt, synthetic construct
  misc_feature 1..27: note = E3 ubiquitin-protein ligase Mdm2 (53-61)
  source 1..27: mol_type = other RNA
gtgctgttctacctcggccagtatatc

SEQ ID NO: 52667 - RNA, 27 nt, synthetic construct
  misc_feature 1..27: note = U1 small nuclear ribonucleoprotein 70 kDa (423-431)
  source 1..27: mol_type = other RNA
tacctggcccccgagaacggctatctc

SEQ ID NO: 52668 - RNA, 27 nt, synthetic construct
  misc_feature 1..27: note = Coatomer subunit gamma-1 (147-155)
  source 1..27: mol_type = other RNA
gccatcgtggacaaggtccccagcgtt

SEQ ID NO: 52669 - RNA, 27 nt, synthetic construct
  misc_feature 1..27: note = T-complex protein 1 subunit gamma (129-137)
  source 1..27: mol_type = other RNA
gccctggacgatatgatcagcaccctc

SEQ ID NO: 52670 - RNA, 27 nt, synthetic construct
  misc_feature 1..27: note = DCN1-like protein 1 (94-102)
  source 1..27: mol_type = other RNA
gccctggaccccgctagcatctccgtg

SEQ ID NO: 52671 - RNA, 27 nt, synthetic construct
  misc_feature 1..27: note = U3 small nucleolar ribonucleoprotein protein IMP3 (78-86)
  source 1..27: mol_type = other RNA
gccctgctcgacaagctttacgctctg

SEQ ID NO: 52672 - RNA, 27 nt, synthetic construct
  misc_feature 1..27: note = Nuclear pore complex protein Nup205 (318-326)
  source 1..27: mol_type = other RNA
gccctgctcgacagaatcgtgagcgtc

SEQ ID NO: 52673 - RNA, 27 nt, synthetic construct
  misc_feature 1..27: note = Phosphoglycerate kinase 1 (354-362)
  source 1..27: mol_type = other RNA
gccctgatggacgaggtggtcaaggct

SEQ ID NO: 52674 - RNA, 27 nt, synthetic construct
  misc_feature 1..27: note = Diphthamide biosynthesis protein 1 (138-146)
  source 1..27: mol_type = other RNA
gcccaggacttcagagtgctgtacgtc

SEQ ID NO: 52675 - RNA, 27 nt, synthetic construct
  misc_feature 1..27: note = Methionine aminopeptidase 2 (433-441)
  source 1..27: mol_type = other RNA
gcccagttcgagcacaccatcctgctc

SEQ ID NO: 52676 - RNA, 27 nt, synthetic construct
  misc_feature 1..27: note = GTP-binding nuclear protein Ran (215-223)
  source 1..27: mol_type = other RNA
gcccagtacgagcacgacctggaagtg

SEQ ID NO: 52677 - RNA, 33 nt, synthetic construct
  misc_feature 1..33: note = 60S acidic ribosomal protein P0 (108-118)
  source 1..33: mol_type = other RNA
ttcctggccgaccccagcgcttttgtggcagcc

SEQ ID NO: 52678 - RNA, 33 nt, synthetic construct
  misc_feature 1..33: note = 60S ribosomal protein L10a (110-120)
  source 1..33: mol_type = other RNA
ttcctggccagcgagtccctcatcaagcagatt

SEQ ID NO: 52679 - RNA, 27 nt, synthetic construct
  misc_feature 1..27: note = Dipeptidyl peptidase 9 (806-814)
  source 1..27: mol_type = other RNA
ttcctggacgagaacgtgcactttttc

SEQ ID NO: 52680 - RNA, 27 nt, synthetic construct
  misc_feature 1..27: note = ATP-binding cassette sub-family F member 2 (539-547)
  source 1..27: mol_type = other RNA
ttcctggacgagcccaccaaccacctc

SEQ ID NO: 52681 - RNA, 27 nt, synthetic construct
  misc_feature 1..27: note = Chloride intracellular channel protein 4 (178-186)
  source 1..27: mol_type = other RNA
ttcctggacggcaacgagatgaccctc

SEQ ID NO: 52682 - RNA, 27 nt, synthetic construct
  misc_feature 1..27: note = 3-hydroxy-3-methylglutaryl-coenzyme A reductase (113-121)
  source 1..27: mol_type = other RNA
ttcctggacaaggagctcaccggcctt

SEQ ID NO: 52683 - RNA, 27 nt, synthetic construct
  misc_feature 1..27: note = Acyl-protein thioesterase 2 (218-226)
  source 1..27: mol_type = other RNA
ttcctggagaagctccttccccctgtg

SEQ ID NO: 52684 - RNA, 27 nt, synthetic construct
  misc_feature 1..27: note = Macrophage migration inhibitory factor (17-25)
  source 1..27: mol_type = other RNA
ttcctgagcgagctcacccagcaactt

SEQ ID NO: 52685 - RNA, 27 nt, synthetic construct
  misc_feature 1..27: note = 26S proteasome non-ATPase regulatory subunit 14 (61-69)
  source 1..27: mol_type = other RNA
ttcgtggacgattacaccgtcagagtt

SEQ ID NO: 52686 - RNA, 30 nt, synthetic construct; identical to SEQ ID NO: 28459
  misc_feature 1..30: note = Golgi-specific brefeldin A-resistance guanine nucleotide exchange factor 1 (1053-1062)
  source 1..30: mol_type = other RNA

SEQ ID NO: 52687 - RNA, 27 nt, synthetic construct
  misc_feature 1..27: note = E3 ubiquitin-protein ligase BRE1A (401-409)
  source 1..27: mol_type = other RNA
cacctggacgaggccagaaccctcctt

SEQ ID NO: 52688 - RNA, 27 nt, synthetic construct
  misc_feature 1..27: note = Abl interactor 2 (89-97)
  source 1..27: mol_type = other RNA
atcctggacgatattggccacggggtg

SEQ ID NO: 52689 - RNA, 27 nt, synthetic construct
  misc_feature 1..27: note = Nuclear pore complex protein Nup88 (183-191)
  source 1..27: mol_type = other RNA
atcctggacccccacgtggtcctcctt

SEQ ID NO: 52690 - RNA, 27 nt, synthetic construct
  misc_feature 1..27: note = Thioredoxin-like protein 4A (40-48)
  source 1..27: mol_type = other RNA
aagatggacgaggtgctgtacagcatc

SEQ ID NO: 52691 - RNA, 27 nt, synthetic construct
  misc_feature 1..27: note = Protein BTG2 (73-81)
  source 1..27: mol_type = other RNA
aagatggaccccatcattagcagagtg

SEQ ID NO: 52692 - RNA, 27 nt, synthetic construct
  misc_feature 1..27: note = Elongation factor 2 (159-167)
  source 1..27: mol_type = other RNA
aagatggacagagccctgctcgagctt

SEQ ID NO: 52693 - RNA, 24 nt, synthetic construct
  misc_feature 1..24: note = Transmembrane emp24 domain-containing protein 2 (42-49)
  source 1..24: mol_type = other RNA
aagatgggcctgatcttcgaggtg

SEQ ID NO: 52694 - RNA, 24 nt, synthetic construct
  misc_feature 1..24: note = 60S ribosomal protein L19 (119-126)
  source 1..24: mol_type = other RNA
ctgatggagcacatccataagctc

SEQ ID NO: 52695 - RNA, 27 nt, synthetic construct
  misc_feature 1..27: note = Glycogen phosphorylase, muscle form (271-279)
  source 1..27: mol_type = other RNA
aacctggccgagaatatcagcagagtg

SEQ ID NO: 52696 - RNA, 27 nt, synthetic construct
  misc_feature 1..27: note = Junction plakoglobin (5-13)
  source 1..27: mol_type = other RNA
aacctgatggagcagcccatcaaggtg

SEQ ID NO: 52697 - RNA, 30 nt, synthetic construct
  misc_feature 1..30: note Dolichyl-diphosphooligosaccharide-proteinosyltransferase subunit 2 (51-60)
  source 1..30: mol_type = other RNA
agactggacgagctcggcggggtgtacctt

SEQ ID NO: 52698 - RNA, 27 nt, synthetic construct
  misc_feature 1..27: note = Putative eukaryotic translation initiation factor 2 subunit 3-like protein (17-25)
  source 1..27: mol_type = other RNA
agacaggacctgaccacactcgatgtg

SEQ ID NO: 52699 - RNA, 27 nt, synthetic construct
  misc_feature 1..27: note = Serine/threonine-protein kinase/endoribonuclease IRE1 (37-45)
  source 1..27: mol_type = other RNA
accctggacggcagcctccacgccgtg

SEQ ID NO: 52700 - RNA, 33 nt, synthetic construct
  misc_feature 1..33: note = Interferon-induced GTP-binding protein Mx1 (175-185)
  source 1..33: mol_type = other RNA
accctgatcgacctccccggcattacaagagtg

SEQ ID NO: 52701 - RNA, 27 nt, synthetic construct
  misc_feature 1..27: note = Mitotic spindle-associated MMXD complex subunit MIP18 (97-105)
  source 1..27: mol_type = other RNA
accctgatcggcctcagcattaaggtg

SEQ ID NO: 52702 - RNA, 27 nt, synthetic construct
  misc_feature 1..27: note = Sulfiredoxin-1 (114-122)
  source 1..27: mol_type = other RNA
accctgagcgacctcagagtgtacctt

SEQ ID NO: 52703 - RNA, 30 nt, synthetic construct
  misc_feature 1..30: note = Nucleolar GTP-binding protein 1 (322-331)
  source 1..30: mol_type = other RNA
accctgacagaggaaggcgtgatcaaggtc

SEQ ID NO: 52704 - RNA, 27 nt, synthetic construct
  misc_feature 1..27: note = 10 kDa heat shock protein, mitochondrial (81-89)
  source 1..27: mol_type = other RNA
gtgctggacgataaggactacttcctc

SEQ ID NO: 52705 - RNA, 27 nt, synthetic construct
  misc_feature 1..27: note = Anoctamin-6 (137-145)
  source 1..27: mol_type = other RNA
gtgctggacgataagctcgtcttcgtt

SEQ ID NO: 52706 - RNA, 27 nt, synthetic construct
  misc_feature 1..27: note = Nucleolar pre-ribosomal-associated protein 1 (1314-1322)
  source 1..27: mol_type = other RNA
gtgctggaccagaagatcctccttctg

SEQ ID NO: 52707 - RNA, 33 nt, synthetic construct; identical to SEQ ID NO: 28480
  misc_feature 1..33: note = RNA-binding protein 34 (333-343)
  source 1..33: mol_type = other RNA

SEQ ID NO: 52708 - RNA, 27 nt, synthetic construct
  misc_feature 1..27: note = Eukaryotic translation initiation factor 4 gamma 1 (680-688)
  source 1..27: mol_type = other RNA
gtgctgatgaccgaggacatcaagctc

SEQ ID NO: 52709 - RNA, 33 nt, synthetic construct; identical to SEQ ID NO: 28482
  misc_feature 1..33: note = Phosphoglycerate kinase 1 (407-417)
  source 1..33: mol_type = other RNA

SEQ ID NO: 52710 - RNA, 30 nt, synthetic construct
  misc_feature 1..30: note = S-adenosylmethionine synthase isoform type-2 (235-244)
  source 1..30: mol_type = other RNA
tacctggacgaggataccatctatcacctc

SEQ ID NO: 52711 - RNA, 27 nt, synthetic construct
  misc_feature 1..27: note = Transmembrane protein 209 (409-417)
  source 1..27: mol_type = other RNA
tacctgttcgagagaatcaaggaactc

SEQ ID NO: 52712 - RNA, 30 nt, synthetic construct
  misc_feature 1..30: note = HLA class I histocompatibility antigen, B-13 alpha chain (26-35)
  source 1..30: mol_type = other RNA
tacgtggacgatacccagttcgtcagattt

SEQ ID NO: 52713 - RNA, 36 nt, synthetic construct
  misc_feature 1..36: note = Melanoma antigen recognized by T-cells 1 (100-111)
  source 1..36: mol_type = other RNA
gccccccctgcttacgagaagctgagcgcagaacag

SEQ ID NO: 52714 - RNA, 45 nt, synthetic construct
  misc_feature 1..45: note = Melanoma antigen recognized by T-cells 1 (100-114)
  source 1..45: mol_type = other RNA
gccccccctgcttacgagaagctgagcgcagaacagtccccaccg

SEQ ID NO: 52715 - RNA, 48 nt, synthetic construct
  misc_feature 1..48: note = Melanoma antigen recognized by T-cells 1 (100-115)
  source 1..48: mol_type = other RNA
gccccccctgcttacgagaagctgagcgcagaacagtccccaccgccc

SEQ ID NO: 52716 - RNA, 51 nt, synthetic construct
  misc_feature 1..51: note = Melanoma antigen recognized by T-cells 1 (100-116)
  source 1..51: mol_type = other RNA
gccccccctgcttacgagaagctgagcgcagaacagtccccaccgccctat

SEQ ID NO: 52717 - RNA, 36 nt, synthetic construct
  misc_feature 1..36: note = Melanoma antigen recognized by T-cells 1 (99-110)
  source 1..36: mol_type = other RNA
aacgccccccctgcttacgagaagctgagcgcagaa

SEQ ID NO: 52718 - RNA, 60 nt, synthetic construct
  misc_feature 1..60: note = Melanoma antigen recognized by T-cells 1 (97-116)
  source 1..60: mol_type = other RNA
gtgcccaacgcccctccagcttacgagaagctgagcgcagaacagtccccgcccccttat

SEQ ID NO: 52719 - RNA, 48 nt, synthetic construct
  misc_feature 1..48: note = Gamma-secretase C-terminal fragment 59 (581-596)
  source 1..48: mol_type = other RNA
ttcgccgaggacgtgggcagcaacaagggggctatcattggactgatg

SEQ ID NO: 52720 - RNA, 27 nt, synthetic construct
  misc_feature 1..27: note = Ubiquitin carboxyl-terminal hydrolase 11 (583-591)
  source 1..27: mol_type = other RNA
ttcacctgggagggcctgtacaacgtg

SEQ ID NO: 52721 - RNA, 30 nt, synthetic construct
  misc_feature 1..30: note = Ataxin-10 (324-333)
  source 1..30: mol_type = other RNA
caggtgttccccggcctgctcgagagagtc

SEQ ID NO: 52722 - RNA, 27 nt, synthetic construct
  misc_feature 1..27: note = Vacuolar protein sorting-associated protein 13B (29-37)
  source 1..27: mol_type = other RNA
agcctgtggggcggggacgtggtcctc

SEQ ID NO: 52723 - RNA, 30 nt, synthetic construct
  misc_feature 1..30: note = Farnesyl pyrophosphate synthase (238-247)
  source 1..30: mol_type = other RNA
tacctggacctcttcggcgatcccagcgtg

SEQ ID NO: 52724 - RNA, 27 nt, synthetic construct
  misc_feature 1..27: note = Suppressor of SWI4 1 homolog (26-34)
  source 1..27: mol_type = other RNA
gccgctaacccccacagcttcgtgttt

SEQ ID NO: 52725 - RNA, 33 nt, synthetic construct
  misc_feature 1..33: note = Golgin subfamily A member 7 (65-75)
  source 1..33: mol_type = other RNA
gccgaggctgaaaagctgggcgggcagagctac

SEQ ID NO: 52726 - RNA, 27 nt, synthetic construct
  misc_feature 1..27: note = DNA replication licensing factor MCM4 (741-749)
  source 1..27: mol_type = other RNA
gccgaggctcacgcaaaggtgagactg

SEQ ID NO: 52727 - RNA, 27 nt, synthetic construct
  misc_feature 1..27: note = Stomatin-like protein 2, mitochondrial (255-263)
  source 1..27: mol_type = other RNA
gccgaggctatcagaattctggcagcc

SEQ ID NO: 52728 - RNA, 27 nt, synthetic construct
  misc_feature 1..27: note = Nuclear pore complex protein Nup107 (415-423)
  source 1..27: mol_type = other RNA
gccgaggacgaactgttcaacagatac

SEQ ID NO: 52729 - RNA, 33 nt, synthetic construct
  misc_feature 1..33: note = N-alpha-acetyltransferase 10 (45-55)
  source 1..33: mol_type = other RNA
gccgaggacgaaaacggcaagatcgtggggtac

SEQ ID NO: 52730 - RNA, 33 nt, synthetic construct
  misc_feature 1..33: note = Cytochrome c oxidase subunit 6B1 (2-12)
  source 1..33: mol_type = other RNA
gccgaggacatggaaaccaagatcaaaaactac

SEQ ID NO: 52731 - RNA, 27 nt, synthetic construct
  misc_feature 1..27: note = General transcription factor II-I repeat domain-containing protein 2B (397-405)
  source 1..27: mol_type = other RNA
gccgagttcatcaagtttaccgtgatt

SEQ ID NO: 52732 - RNA, 27 nt, synthetic construct
  misc_feature 1..27: note = Heterogeneous nuclear ribonucleoprotein A0 (110-118)
  source 1..27: mol_type = other RNA
gccgagggcgacctgatcgaacacttc

SEQ ID NO: 52733 - RNA, 33 nt, synthetic construct; identical to SEQ ID NO: 28506
  misc_feature 1..33: note = 60S ribosomal protein L8 (33-43)
  source 1..33: mol_type = other RNA

SEQ ID NO: 52734 - RNA, 27 nt, synthetic construct
  misc_feature 1..27: note = Condensin complex subunit 3 (712-720)
  source 1..27: mol_type = other RNA
gccgagggcctggctaagctcatgttc

SEQ ID NO: 52735 - RNA, 27 nt, synthetic construct
  misc_feature 1..27: note = T-complex protein 1 subunit gamma (109-117)
  source 1..27: mol_type = other RNA
gccgagcacttcctggaacagcaaatg

SEQ ID NO: 52736 - RNA, 30 nt, synthetic construct
  misc_feature 1..30: note = Spectrin beta chain, non-erythrocytic 1 (1958-1967)
  source 1..30: mol_type = other RNA
gccgagatcgacgctagaaacgatagcttc

SEQ ID NO: 52737 - RNA, 27 nt, synthetic construct
  misc_feature 1..27: note = Regulation of nuclear pre-mRNA domain-containing protein 1A (232-240)
  source 1..27: mol_type = other RNA
gccgagatcgacgatagaaagcagctg

SEQ ID NO: 52738 - RNA, 30 nt, synthetic construct
  misc_feature 1..30: note = 40S ribosomal protein SA (218-227)
  source 1..30: mol_type = other RNA
gccgagaaggctgtgaccaaagaagagttc

SEQ ID NO: 52739 - RNA, 27 nt, synthetic construct
  misc_feature 1..27: note = Helicase SRCAP (394-402)
  source 1..27: mol_type = other RNA
gccgagagcctgcagcccaagggctac

SEQ ID NO: 52740 - RNA, 27 nt, synthetic construct
  misc_feature 1..27: note = Spartin (569-577)
  source 1..27: mol_type = other RNA
gccgagaccgtgcagacagtcagatac

SEQ ID NO: 52741 - RNA, 27 nt, synthetic construct
  misc_feature 1..27: note = Uncharacterized protein ZMYM6NB (44-52)
  source 1..27: mol_type = other RNA
gccgaggtgttccccctgaaggtcttt

SEQ ID NO: 52742 - RNA, 30 nt, synthetic construct
  misc_feature 1..30: note = CLIP-associating protein 1 (357-366)
  source 1..30: mol_type = other RNA
gccgagtacgacaacttctttcagcacctg

SEQ ID NO: 52743 - RNA, 27 nt, synthetic construct
  misc_feature 1..27: note = Alpha-actinin-4 (306-314)
  source 1..27: mol_type = other RNA
gccatcgaccagctgcacctcgagtac

SEQ ID NO: 52744 - RNA, 27 nt, synthetic construct
  misc_feature 1..27: note = Nucleolar protein 58 (12-20)
  source 1..27: mol_type = other RNA
gccatcttcaaggtgctgaacgagaaa

SEQ ID NO: 52745 - RNA, 30 nt, synthetic construct
  misc_feature 1..30: note = Serine/threonine-protein kinase Kist (151-160)
  source 1..30: mol_type = other RNA
gccatcattgaccacatattcgctagcaag

SEQ ID NO: 52746 - RNA, 30 nt, synthetic construct
  misc_feature 1..30: note = Transcription factor Sp2 (106-115)
  source 1..30: mol_type = other RNA
gccatccagaaccccaccatgattaataag

SEQ ID NO: 52747 - RNA, 27 nt, synthetic construct
  misc_feature 1..27: note = Apolipoprotein L1 (142-150)
  source 1..27: mol_type = other RNA
gccctggctgacggcgtgcagaaggtc

SEQ ID NO: 52748 - RNA, 27 nt, synthetic construct
  misc_feature 1..27: note = Tankyrase-2 (1234-1242)
  source 1..27: mol_type = other RNA
gccctggctgagtacgtgatctataga

SEQ ID NO: 52749 - RNA, 27 nt, synthetic construct
  misc_feature 1..27: note = Uncharacterized protein C19orf43 (126-134)
  source 1..27: mol_type = other RNA
gccctgaagaccggcatcgtggctaaa

SEQ ID NO: 52750 - RNA, 30 nt, synthetic construct
  misc_feature 1..30: note = Heat shock protein HSP 90-alpha (740-749)
  source 1..30: mol_type = other RNA
gccctgagagacaacagcaccatgggctac

SEQ ID NO: 52751 - RNA, 27 nt, synthetic construct
  misc_feature 1..27: note = X-ray repair cross-complementing protein 5 (376-384)
  source 1..27: mol_type = other RNA
gccctgagctccctcatccacgctctt

SEQ ID NO: 52752 - RNA, 30 nt, synthetic construct
  misc_feature 1..30: note = Nucleolar protein 7 (190-199)
  source 1..30: mol_type = other RNA
gcccaggctttcatccacaacagcctgtac

SEQ ID NO: 52753 - RNA, 27 nt, synthetic construct
  misc_feature 1..27: note = U5 small nuclear ribonucleoprotein 200 kDa helicase (1246-1254)
  source 1..27: mol_type = other RNA
gcccaggacgagcacctgatcaccttc

SEQ ID NO: 52754 - RNA, 27 nt, synthetic construct
  misc_feature 1..27: note = 15 kDa selenoprotein (78-86)
  source 1..27: mol_type = other RNA
gcccagttcgagaccaagaaactgtac

SEQ ID NO: 52755 - RNA, 30 nt, synthetic construct
  misc_feature 1..30: note = Prelamin-A/C (169-178)
  source 1..30: mol_type = other RNA
gcccagcacgaggaccaagtggaacagtac

SEQ ID NO: 52756 - RNA, 27 nt, synthetic construct
  misc_feature 1..27: note = Ribosomal RNA processing protein 1 homolog B (90-98)
  source 1..27: mol_type = other RNA
gcccagcacctgttcatccaaaccttt

SEQ ID NO: 52757 - RNA, 27 nt, synthetic construct
  misc_feature 1..27: note = 116 kDa U5 small nuclear ribonucleoprotein component (574-582)
  source 1..27: mol_type = other RNA
gcccagatcttcagacccctgaagttt

SEQ ID NO: 52758 - RNA, 27 nt, synthetic construct
  misc_feature 1..27: note = Paraneoplastic antigen Ma1 (246-254)
  source 1..27: mol_type = other RNA
gcccagatcaagttcctgaacacctac

SEQ ID NO: 52759 - RNA, 30 nt, synthetic construct
  misc_feature 1..30: note = Retinoic acid-induced protein 1 (1522-1531)
  source 1..30: mol_type = other RNA
gcccagaagcaacccggccacaccaactac

SEQ ID NO: 52760 - RNA, 27 nt, synthetic construct
  misc_feature 1..27: note = ADP-ribosylation factor GTPase-activating protein 2 (233-241)
  source 1..27: mol_type = other RNA
gcccagaaggtgagctcccaatctttc

SEQ ID NO: 52761 - RNA, 27 nt, synthetic construct
  misc_feature 1..27: note = Nucleolar protein 56 (144-152)
  source 1..27: mol_type = other RNA
gcccagctgggcctcgggcacagctac

SEQ ID NO: 52762 - RNA, 27 nt, synthetic construct
  misc_feature 1..27: note = Catenin beta-1 (481-489)
  source 1..27: mol_type = other RNA
gcccagaacgctgtgagactgcactac

SEQ ID NO: 52763 - RNA, 33 nt, synthetic construct
  misc_feature 1..33: note = nuclear pore complex protein Nup98 isoform 2 proprotein (110-120)
  source 1..33: mol_type = other RNA
gcccagaacaagcccaccggcttcgggaatttt

SEQ ID NO: 52764 - RNA, 33 nt, synthetic construct
  misc_feature 1..33: note = RNA-binding protein 14 (530-540)
  source 1..33: mol_type = other RNA
gcccagcaacacccccaggctgcagccagctac

SEQ ID NO: 52765 - RNA, 27 nt, synthetic construct
  misc_feature 1..27: note = Eukaryotic initiation factor 4A-I (113-121)
  source 1..27: mol_type = other RNA
gcccagcaaatccagaaggtggtcatg

SEQ ID NO: 52766 - RNA, 27 nt, synthetic construct
  misc_feature 1..27: note = Septin-7 (21-29)
  source 1..27: mol_type = other RNA
gcccagcaaaagaacctggagggctac

SEQ ID NO: 52767 - RNA, 27 nt, synthetic construct
  misc_feature 1..27: note = Protein polybromo-1 (234-242)
  source 1..27: mol_type = other RNA
gcccagagaatccaaaacggcagctac

SEQ ID NO: 52768 - RNA, 30 nt, synthetic construct
  misc_feature 1..30: note = Annexin A2 (66-75)
  source 1..30: mol_type = other RNA
gcccagagacaagacatcgctttcgcatac

SEQ ID NO: 52769 - RNA, 30 nt, synthetic construct
  misc_feature 1..30: note = Annexin A4 (49-58)
  source 1..30: mol_type = other RNA
gcccagagacaagagatcaggaccgcttac

SEQ ID NO: 52770 - RNA, 30 nt, synthetic construct
  misc_feature 1..30: note = Centromere protein F (348-357)
  source 1..30: mol_type = other RNA
gcccagtacgaccaagctagcaccaagtat

SEQ ID NO: 52771 - RNA, 33 nt, synthetic construct
  misc_feature 1..33: note = 60S ribosomal protein L22-like 1 (118-128)
  source 1..33: mol_type = other RNA
gccagcgacaaggagacctacgaactgagatat

SEQ ID NO: 52772 - RNA, 30 nt, synthetic construct
  misc_feature 1..30: note = Histone H2B type 1-A (76-85)
  source 1..30: mol_type = other RNA
gccagcgaggcttccagactggcacactac

SEQ ID NO: 52773 - RNA, 30 nt, synthetic construct
  misc_feature 1..30: note = ADP-dependent glucokinase (24-33)
  source 1..30: mol_type = other RNA
gccagcgagttccccggcgctcagcactac

SEQ ID NO: 52774 - RNA, 27 nt, synthetic construct
  misc_feature 1..27: note = Heterogeneous nuclear ribonucleoprotein U (205-213)
  source 1..27: mol_type = other RNA
gccagctacggcgtgtccaaggggaaa

SEQ ID NO: 52775 - RNA, 30 nt, synthetic construct
  misc_feature 1..30: note = High affinity cAMP-specific 3',5'-cyclic phosphodiesterase 7A (294-303)
  source 1..30: mol_type = other RNA
gccaccgacatcagcagacagaacgagtac

SEQ ID NO: 52776 - RNA, 27 nt, synthetic construct
  misc_feature 1..27: note = E3 ubiquitin-protein ligase UBR2 (31-39)
  source 1..27: mol_type = other RNA
gccaccgacctgacaagagaggtgtac

SEQ ID NO: 52777 - RNA, 27 nt, synthetic construct
  misc_feature 1..27: note = m7GpppX diphosphatase (135-143)
  source 1..27: mol_type = other RNA
gccaccgagaagcacctgcagaaatac

SEQ ID NO: 52778 - RNA, 33 nt, synthetic construct
  misc_feature 1..33: note = Microtubule-actin cross-linking factor 1, isoforms 1/2/3/5 (326-336)
  source 1..33: mol_type = other RNA
gccaccgaggtggacagcagatggcaggaatac

SEQ ID NO: 52779 - RNA, 27 nt, synthetic construct
  misc_feature 1..27: note = YTH domain-containing protein 1 (92-100)
  source 1..27: mol_type = other RNA
gccaccgagtacaagaacgaagagtat

SEQ ID NO: 52780 - RNA, 27 nt, synthetic construct
  misc_feature 1..27: note = Eukaryotic translation initiation factor 5A-1 (146-154)
  source 1..27: mol_type = other RNA
gccgtggctatcaaggcaatggccaaa

SEQ ID NO: 52781 - RNA, 30 nt, synthetic construct
  misc_feature 1..30: note = Activating transcription factor 7-interacting protein 1 (621-630)
  source 1..30: mol_type = other RNA
gccgtgttcgacaagaccctggctgagctc

SEQ ID NO: 52782 - RNA, 27 nt, synthetic construct
  misc_feature 1..27: note = Transmembrane protein 258 (16-24)
  source 1..27: mol_type = other RNA
gccgtgttcccccacctgaccgtcgtt

SEQ ID NO: 52783 - RNA, 33 nt, synthetic construct
  misc_feature 1..33: note = U3 small nucleolar RNA-associated protein 6 homolog (467-477)
  source 1..33: mol_type = other RNA
gccgtgatcggcgctgacagcgtcaccctgaag

SEQ ID NO: 52784 - RNA, 27 nt, synthetic construct
  misc_feature 1..27: note = Nucleolar RNA helicase 2 (357-365)
  source 1..27: mol_type = other RNA
gccgtgatcggcgacgtcattagagtt

SEQ ID NO: 52785 - RNA, 30 nt, synthetic construct; identical to SEQ ID NO: 28558
  misc_feature 1..30: note = Nucleosome assembly protein 1-like 1 (107-116)
  source 1..30: mol_type = other RNA

SEQ ID NO: 52786 - RNA, 30 nt, synthetic construct
  misc_feature 1..30: note = MICOS complex subunit MIC60 (247-256)
  source 1..30: mol_type = other RNA
gccgtgaacgctcacagcaatatcctgaag

SEQ ID NO: 52787 - RNA, 27 nt, synthetic construct
  misc_feature 1..27: note = Elongation of very long chain fatty acids protein 5 (276-284)
  source 1..27: mol_type = other RNA
gccgtgaacggccacaccaatagcttc

SEQ ID NO: 52788 - RNA, 27 nt, synthetic construct
  misc_feature 1..27: note = DNA-directed RNA polymerase II subunit RPB7 (87-95)
  source 1..27: mol_type = other RNA
gccgtggtcacccaggttaacaaggtg

SEQ ID NO: 52789 - RNA, 27 nt, synthetic construct
  misc_feature 1..27: note = RRP12-like protein (704-712)
  source 1..27: mol_type = other RNA
gacgaggccgctatcagcaagctgtac

SEQ ID NO: 52790 - RNA, 33 nt, synthetic construct
  misc_feature 1..33: note = 26S protease regulatory subunit 6B (265-275)
  source 1..33: mol_type = other RNA
gacgagatcgatgccattgctaccaagagattc

SEQ ID NO: 52791 - RNA, 33 nt, synthetic construct
  misc_feature 1..33: note = 26S protease regulatory subunit 7 (275-285)
  source 1..33: mol_type = other RNA
gacgagatcgatgccattggcggggctagattc

SEQ ID NO: 52792 - RNA, 33 nt, synthetic construct
  misc_feature 1..33: note = 26S protease regulatory subunit 4 (285-295)
  source 1..33: mol_type = other RNA
gacgagatcgatgccattggcaccaagagatac

SEQ ID NO: 52793 - RNA, 27 nt, synthetic construct
  misc_feature 1..27: note = Nucleolar protein 11 (17-25)
  source 1..27: mol_type = other RNA
gacgagaacagcgtgatcaagtccttc

SEQ ID NO: 52794 - RNA, 27 nt, synthetic construct
  misc_feature 1..27: note = Prothymosin alpha (16-24)
  source 1..27: mol_type = other RNA
gacctgaaggagaaaaaggaagtggtc

SEQ ID NO: 52795 - RNA, 30 nt, synthetic construct
  misc_feature 1..30: note = Vezatin (553-562)
  source 1..30: mol_type = other RNA
gacagcgatttcagaaaggacgatttttac

SEQ ID NO: 52796 - RNA, 27 nt, synthetic construct
  misc_feature 1..27: note = Protein AF-10 (379-387)
  source 1..27: mol_type = other RNA
gacagcgatctgagaaacgactcctac

SEQ ID NO: 52797 - RNA, 27 nt, synthetic construct
  misc_feature 1..27: note = Negative elongation factor C/D (348-356)
  source 1..27: mol_type = other RNA
gacaccgatatcagcctgattagatac

SEQ ID NO: 52798 - RNA, 27 nt, synthetic construct
  misc_feature 1..27: note = Transcription factor E2F1 (237-245)
  source 1..27: mol_type = other RNA
gacaccgatagccagagactggcctac

SEQ ID NO: 52799 - RNA, 27 nt, synthetic construct
  misc_feature 1..27: note = RNA-binding protein 6 (398-406)
  source 1..27: mol_type = other RNA
gacaccgattacagaagcatggagtat

SEQ ID NO: 52800 - RNA, 30 nt, synthetic construct
  misc_feature 1..30: note = Eukaryotic translation initiation factor 4 gamma 3 (1509-1518)
  source 1..30: mol_type = other RNA
gacaccgagaaggaactgcaggccctctac

SEQ ID NO: 52801 - RNA, 33 nt, synthetic construct
  misc_feature 1..33: note = Next to BRCA1 gene 1 protein (720-730)
  source 1..33: mol_type = other RNA
gacaccagcagacccctgggcgattccatgtac

SEQ ID NO: 52802 - RNA, 27 nt, synthetic construct
  misc_feature 1..27: note = Mitochondrial import receptor subunit TOM7 homolog (7-15)
  source 1..27: mol_type = other RNA
gaggccaagcagagactgcaacagctc

SEQ ID NO: 52803 - RNA, 30 nt, synthetic construct
  misc_feature 1..30: note = Heterogeneous nuclear ribonucleoprotein U-like protein 1 (585-594)
  source 1..30: mol_type = other RNA
gaggaagccgacaagctggtgagacagtac

SEQ ID NO: 52804 - RNA, 27 nt, synthetic construct
  misc_feature 1..27: note = Poly (ADP-ribose) polymerase 1 (809-817)
  source 1..27: mol_type = other RNA
gaggaagccgagatcattagaaagtac

SEQ ID NO: 52805 - RNA, 30 nt, synthetic construct
  misc_feature 1..30: note = RB1 protein (1-10)
  source 1..30: mol_type = other RNA
gaggaagagagactgagcatccagaacttc

SEQ ID NO: 52806 - RNA, 30 nt, synthetic construct
  misc_feature 1..30: note = Eukaryotic translation initiation factor 3 subunit C (81-90)
  source 1..30: mol_type = other RNA
gaggaattcgagctgctcggcaaggcctac

SEQ ID NO: 52807 - RNA, 27 nt, synthetic construct
  misc_feature 1..27: note = Condensin-2 complex subunit G2 (490-498)
  source 1..27: mol_type = other RNA
gaggaaggcgccgtggacaagagctac

SEQ ID NO: 52808 - RNA, 30 nt, synthetic construct
  misc_feature 1..30: note = Prelamin-A/C (53-62)
  source 1..30: mol_type = other RNA
gaggaactggacttccagaagaacatctac

SEQ ID NO: 52809 - RNA, 27 nt, synthetic construct
  misc_feature 1..27: note = Signal transducer and activator of transcription 1-alpha/beta (281-289)
  source 1..27: mol_type = other RNA
gaggaactggagcagaagtacacctat

SEQ ID NO: 52810 - RNA, 27 nt, synthetic construct
  misc_feature 1..27: note = Poly (ADP-ribose) polymerase 1 (168-176)
  source 1..27: mol_type = other RNA
gaggaactgggcttcagacccgagtac

SEQ ID NO: 52811 - RNA, 27 nt, synthetic construct
  misc_feature 1..27: note = BolA-like protein 2 (62-70)
  source 1..27: mol_type = other RNA
gaggaactgccccacatccatgccttc

SEQ ID NO: 52812 - RNA, 27 nt, synthetic construct
  misc_feature 1..27: note = Signal transducer and activator of transcription 3 (285-293)
  source 1..27: mol_type = other RNA
gaggaactgcagcaaaaggtgagctac

SEQ ID NO: 52813 - RNA, 30 nt, synthetic construct
  misc_feature 1..30: note = Ataxin-2-like protein (284-293)
  source 1..30: mol_type = other RNA
gaggaaaactacggcgtgaagaccacatat

SEQ ID NO: 52814 - RNA, 27 nt, synthetic construct
  misc_feature 1..27: note = G patch domain-containing protein 4 (16-24)
  source 1..27: mol_type = other RNA
gaggaacagctgctcaagcacggctgg

SEQ ID NO: 52815 - RNA, 30 nt, synthetic construct
  misc_feature 1..30: note = Golgi resident protein GCP60 (489-498)
  source 1..30: mol_type = other RNA
gaggaagtgtacgccggcagccaccagtat

SEQ ID NO: 52816 - RNA, 27 nt, synthetic construct
  misc_feature 1..27: note = AP-1 complex subunit sigma-3 (146-154)
  source 1..27: mol_type = other RNA
gaggaatacatgaacaagcccaccttc

SEQ ID NO: 52817 - RNA, 27 nt, synthetic construct
  misc_feature 1..27: note = Transferrin receptor protein 1 (575-583)
  source 1..27: mol_type = other RNA
gagctgatcgaaagaattcccgagctc

SEQ ID NO: 52818 - RNA, 27 nt, synthetic construct
  misc_feature 1..27: note = Cleavage stimulation factor subunit 3 (52-60)
  source 1..27: mol_type = other RNA
gagaccgccctgctcgtggacagatac

SEQ ID NO: 52819 - RNA, 33 nt, synthetic construct
  misc_feature 1..33: note = ATP-dependent RNA helicase DDX24 (571-581)
  source 1..33: mol_type = other RNA
gagaccgacgaaaaggatttctacctgtattac

SEQ ID NO: 52820 - RNA, 30 nt, synthetic construct
  misc_feature 1..30: note = Mediator of RNA polymerase II transcription subunit 23 (175-184)
  source 1..30: mol_type = other RNA
gagaccgaccacatcaaccagattggctac

SEQ ID NO: 52821 - RNA, 30 nt, synthetic construct
  misc_feature 1..30: note = Sorting and assembly machinery component 50 homolog (206-215)
  source 1..30: mol_type = other RNA
gagaccgacagaggcatgagcgccgaatac

SEQ ID NO: 52822 - RNA, 33 nt, synthetic construct
  misc_feature 1..33: note = Protein polybromo-1 (1182-1192)
  source 1..33: mol_type = other RNA
gagaccgaacacgagcccacaaagatgttctac

SEQ ID NO: 52823 - RNA, 33 nt, synthetic construct
  misc_feature 1..33: note = Protein LAP2 (803-813)
  source 1..33: mol_type = other RNA
gagaccgaacacctggagaacggcaataagtac

SEQ ID NO: 52824 - RNA, 27 nt, synthetic construct
  misc_feature 1..27: note = Spectrin beta chain, erythrocytic (299-307)
  source 1..27: mol_type = other RNA
gagaccgaaaagatgatcgagaaatac

SEQ ID NO: 52825 - RNA, 30 nt, synthetic construct
  misc_feature 1..30: note = E3 ubiquitin-protein ligase RBBP6 (790-799)
  source 1..30: mol_type = other RNA
gagaccgaaagagagtacttcaacaggtat

SEQ ID NO: 52826 - RNA, 27 nt, synthetic construct
  misc_feature 1..27: note = Putative eukaryotic translation initiation factor 2 subunit 3-like protein (322-330)
  source 1..27: mol_type = other RNA
ttcgccgagcacaacgacctgcagtac

SEQ ID NO: 52827 - RNA, 27 nt, synthetic construct
  misc_feature 1..27: note = 40S ribosomal protein S18 (28-36)
  source 1..27: mol_type = other RNA
ttcgccatcaccgctattaagggcgtg

SEQ ID NO: 52828 - RNA, 27 nt, synthetic construct
  misc_feature 1..27: note = Keratinocyte-associated protein 2 (110-118)
  source 1..27: mol_type = other RNA
ttcgccagcggcctgatccacagagtg

SEQ ID NO: 52829 - RNA, 27 nt, synthetic construct
  misc_feature 1..27: note Dolichyl-diphosphooligosaccharide-proteinosyltransferase subunit DAD1 (99-107)
  source 1..27: mol_type = other RNA
ttcgccagcaccatcctgcacctcgtg

SEQ ID NO: 52830 - RNA, 27 nt, synthetic construct
  misc_feature 1..27: note = Minor histocompatibility antigen H13 (236-244)
  source 1..27: mol_type = other RNA
ttcgaggcccccatcaagctggtgttt

SEQ ID NO: 52831 - RNA, 27 nt, synthetic construct
  misc_feature 1..27: note = Catenin alpha-2 (609-617)
  source 1..27: mol_type = other RNA
ttcatcgacgccagcagactggtgtac

SEQ ID NO: 52832 - RNA, 33 nt, synthetic construct
  misc_feature 1..33: note = TBC1 domain family member 31 (560-570)
  source 1..33: mol_type = other RNA
ttcatcgaccacgatattaccagccagctgtac

SEQ ID NO: 52833 - RNA, 27 nt, synthetic construct
  misc_feature 1..27: note = Poly (ADP-ribose) polymerase 4 (797-805)
  source 1..27: mol_type = other RNA
ttcatctttagcgacacccacgagctg

SEQ ID NO: 52834 - RNA, 33 nt, synthetic construct
  misc_feature 1..33: note = Basic leucine zipper and W2 domain-containing protein 1 (53-63)
  source 1..33: mol_type = other RNA
ttcctggacgccagcggcgctaagctcgattac

SEQ ID NO: 52835 - RNA, 30 nt, synthetic construct
  misc_feature 1..30: note = Neutral alpha-glucosidase AB (604-613)
  source 1..30: mol_type = other RNA
ttcctggacgatggccacacctttaactac

SEQ ID NO: 52836 - RNA, 30 nt, synthetic construct
  misc_feature 1..30: note = RuvB-like 2 (433-442)
  source 1..30: mol_type = other RNA
ttcctggacgagagcagatccacccagtac

SEQ ID NO: 52837 - RNA, 27 nt, synthetic construct
  misc_feature 1..27: note = Signal transducer and activator of transcription 1-alpha/beta (14-22)
  source 1..27: mol_type = other RNA
ttcctggagcaggtgcaccaactctac

SEQ ID NO: 52838 - RNA, 27 nt, synthetic construct
  misc_feature 1..27: note = Protein MCM10 homolog (333-341)
  source 1..27: mol_type = other RNA
ttcctgtttggcgaggtgcacaaggcc

SEQ ID NO: 52839 - RNA, 30 nt, synthetic construct
  misc_feature 1..30: note = Hemoglobin subunit alpha (5-14)
  source 1..30: mol_type = other RNA
ttcctgagctttcccaccacaaagacttac

SEQ ID NO: 52840 - RNA, 27 nt, synthetic construct
  misc_feature 1..27: note = Plexin-C1 (1065-1073)
  source 1..27: mol_type = other RNA
ttcctggtgaccgtcatccacacactc

SEQ ID NO: 52841 - RNA, 27 nt, synthetic construct
  misc_feature 1..27: note = DNA repair protein XRCC1 (161-169)
  source 1..27: mol_type = other RNA
ttccagaacccctttagaagcgagctg

SEQ ID NO: 52842 - RNA, 27 nt, synthetic construct
  misc_feature 1..27: note = Protein AATF (298-306)
  source 1..27: mol_type = other RNA
ttccagtaccccgacaccagatatctg

SEQ ID NO: 52843 - RNA, 27 nt, synthetic construct
  misc_feature 1..27: note = Short transient receptor potential channel 4-associated protein (457-465)
  source 1..27: mol_type = other RNA
ttcagcgaccaccatgagaacaagtac

SEQ ID NO: 52844 - RNA, 27 nt, synthetic construct
  misc_feature 1..27: note = Cell cycle progression protein 1 (186-194)
  source 1..27: mol_type = other RNA
ttcagcgactacctgcacccccagtat

SEQ ID NO: 52845 - RNA, 27 nt, synthetic construct
  misc_feature 1..27: note = Dihydrofolate reductase, mitochondrial (149-157)
  source 1..27: mol_type = other RNA
ttcagcgagatcgacctggaaaagtac

SEQ ID NO: 52846 - RNA, 30 nt, synthetic construct
  misc_feature 1..30: note = Splicing factor 3A subunit 3 (130-139)
  source 1..30: mol_type = other RNA
ttcaccgacgaggaaggctacgggagatat

SEQ ID NO: 52847 - RNA, 30 nt, synthetic construct
  misc_feature 1..30: note = Bifunctional glutamate/proline-tRNA ligase (48-57)
  source 1..30: mol_type = other RNA
ttcaccgacgtgaacagcatcctgagatac

SEQ ID NO: 52848 - RNA, 33 nt, synthetic construct
  misc_feature 1..33: note = RNMT-activating mini protein (19-29)
  source 1..33: mol_type = other RNA
ttcaccgagaacgacaaggaataccaggagtat

SEQ ID NO: 52849 - RNA, 27 nt, synthetic construct
  misc_feature 1..27: note = ATP-dependent RNA helicase DDX24 (801-809)
  source 1..27: mol_type = other RNA
ttcaccgagagccagaagacaaaatac

SEQ ID NO: 52850 - RNA, 27 nt, synthetic construct
  misc_feature 1..27: note = Eukaryotic translation initiation factor 4 gamma 1 (1377-1385)
  source 1..27: mol_type = other RNA
ttcgtggccgagcagaaggtcgaatac

SEQ ID NO: 52851 - RNA, 27 nt, synthetic construct
  misc_feature 1..27: note = Coatomer subunit delta (9-17)
  source 1..27: mol_type = other RNA
ttcgtggagaccgaaagcgtcagatac

SEQ ID NO: 52852 - RNA, 27 nt, synthetic construct
  misc_feature 1..27: note = Coatomer subunit alpha (641-649)
  source 1..27: mol_type = other RNA
ttcgtgaaggacgagaaaaccagattt

SEQ ID NO: 52853 - RNA, 27 nt, synthetic construct
  misc_feature 1..27: note = Mothers against decapentaplegic homolog 9 (418-426)
  source 1..27: mol_type = other RNA
ttcgtgaagggctggggggccgagtac

SEQ ID NO: 52854 - RNA, 30 nt, synthetic construct
  misc_feature 1..30: note = Ubiquitin-like protein FUBI (4-13)
  source 1..30: mol_type = other RNA
ttcgtgagagcccaggagctgcacaccttt

SEQ ID NO: 52855 - RNA, 27 nt, synthetic construct
  misc_feature 1..27: note = Lysine-tRNA ligase (119-127)
  source 1..27: mol_type = other RNA
ggcgaggacccctaccctcacaagttc

SEQ ID NO: 52856 - RNA, 27 nt, synthetic construct
  misc_feature 1..27: note = Cytochrome c oxidase subunit 6A1, mitochondrial (7-15)
  source 1..27: mol_type = other RNA
ggcgaggaagggagcgccagaatgtgg

SEQ ID NO: 52857 - RNA, 27 nt, synthetic construct
  misc_feature 1..27: note = Polycomb protein SUZ12 (549-557)
  source 1..27: mol_type = other RNA
ggcgaggtggaacagcaaagaacctac

SEQ ID NO: 52858 - RNA, 30 nt, synthetic construct
  misc_feature 1..30: note = SNARE-associated protein Snapin (127-136)
  source 1..30: mol_type = other RNA
ggcatctacccccctgggagcccaggaaag

SEQ ID NO: 52859 - RNA, 33 nt, synthetic construct
  misc_feature 1..33: note = Ataxin-10 (379-389)
  source 1..33: mol_type = other RNA
ggcctggccgacgctagcctccttaagaaagtg

SEQ ID NO: 52860 - RNA, 27 nt, synthetic construct
  misc_feature 1..27: note = Signal recognition particle 54 kDa protein (302-310)
  source 1..27: mol_type = other RNA
ggcctgatcgacaaggtgaacgagctc

SEQ ID NO: 52861 - RNA, 27 nt, synthetic construct
  misc_feature 1..27: note = Probable JmjC domain-containing histone demethylation protein 2C (846-854)
  source 1..27: mol_type = other RNA
ggccaggcccaccccagcgcttcctac

SEQ ID NO: 52862 - RNA, 27 nt, synthetic construct
  misc_feature 1..27: note = Putative ATP-dependent RNA helicase DDX11-like protein 8 (825-833)
  source 1..27: mol_type = other RNA
ggccaggccccccctgggaaggctctg

SEQ ID NO: 52863 - RNA, 27 nt, synthetic construct
  misc_feature 1..27: note = General transcription factor 3C polypeptide 1 (604-612)
  source 1..27: mol_type = other RNA
ggccaggacaagccccacgagacctac

SEQ ID NO: 52864 - RNA, 30 nt, synthetic construct
  misc_feature 1..30: note = Tonsoku-like protein (670-679)
  source 1..30: mol_type = other RNA
ggccaggacccccacagctcccaagccttc

SEQ ID NO: 52865 - RNA, 27 nt, synthetic construct
  misc_feature 1..27: note = Nuclear pore complex protein Nup214 (1208-1216)
  source 1..27: mol_type = other RNA
ggccagttcagcaagcccttttccttc

SEQ ID NO: 52866 - RNA, 33 nt, synthetic construct
  misc_feature 1..33: note = ATP-dependent 6-phosphofructokinase, platelet type (125-135)
  source 1..33: mol_type = other RNA
ggccagatcgacaaggaggccgtgcaaaaatac

SEQ ID NO: 52867 - RNA, 27 nt, synthetic construct
  misc_feature 1..27: note = Alpha-endosulfine (45-53)
  source 1..27: mol_type = other RNA
ggccagaagcccgggggaagcgacttc

SEQ ID NO: 52868 - RNA, 27 nt, synthetic construct
  misc_feature 1..27: note = Heterogeneous nuclear ribonucleoprotein U (812-820)
  source 1..27: mol_type = other RNA
ggccagaagccctggagccaacactac

SEQ ID NO: 52869 - RNA, 33 nt, synthetic construct
  misc_feature 1..33: note = 60S ribosomal protein L26 (64-74)
  source 1..33: mol_type = other RNA
ggccagcaaatcgggaaggtggtccaggtttac

SEQ ID NO: 52870 - RNA, 30 nt, synthetic construct
  misc_feature 1..30: note = 60S ribosomal protein L8 (3-12)
  source 1..30: mol_type = other RNA
ggccagagaaagggggccggaagcgtgttc

SEQ ID NO: 52871 - RNA, 27 nt, synthetic construct
  misc_feature 1..27: note = 60S ribosomal protein L28 (69-77)
  source 1..27: mol_type = other RNA
ggccagagaaagcccgccaccagctac

SEQ ID NO: 52872 - RNA, 27 nt, synthetic construct
  misc_feature 1..27: note = DNA mismatch repair protein Msh2 (157-165)
  source 1..27: mol_type = other RNA
ggccagagacaagtgggggtcggatac

SEQ ID NO: 52873 - RNA, 27 nt, synthetic construct
  misc_feature 1..27: note = Chromodomain-helicase-DNA-binding protein 8 (210-218)
  source 1..27: mol_type = other RNA
ggccagagcaaggccgtgaaagtctac

SEQ ID NO: 52874 - RNA, 27 nt, synthetic construct
  misc_feature 1..27: note = Cell division cycle protein 27 homolog (325-333)
  source 1..27: mol_type = other RNA
ggccagaccgggacaaagagcgtgttc

SEQ ID NO: 52875 - RNA, 27 nt, synthetic construct
  misc_feature 1..27: note = Transmembrane protein 43 (137-145)
  source 1..27: mol_type = other RNA
ggccaggtgaagaaagagaccagatac

SEQ ID NO: 52876 - RNA, 27 nt, synthetic construct
  misc_feature 1..27: note = Clathrin heavy chain 1 (496-504)
  source 1..27: mol_type = other RNA
ggccaggtgcaaaagatcgtcctgtac

SEQ ID NO: 52877 - RNA, 30 nt, synthetic construct
  misc_feature 1..30: note = Disintegrin and metalloproteinase domain-containing protein 10 (19-28)
  source 1..30: mol_type = other RNA
ggccagtacgggaaccccctgaataagtat

SEQ ID NO: 52878 - RNA, 33 nt, synthetic construct; identical to SEQ ID NO: 28651
  misc_feature 1..33: note = Protein transport protein Sec23B (560-570)
  source 1..33: mol_type = other RNA

SEQ ID NO: 52879 - RNA, 27 nt, synthetic construct
  misc_feature 1..27: note = Protein CASP (561-569)
  source 1..27: mol_type = other RNA
ggcagcgacgataccgagctgagatac

SEQ ID NO: 52880 - RNA, 30 nt, synthetic construct
  misc_feature 1..30: note = Gem-associated protein 5 (444-453)
  source 1..30: mol_type = other RNA
ggcaccgacgatgggaaggtgggactgtac

SEQ ID NO: 52881 - RNA, 27 nt, synthetic construct
  misc_feature 1..27: note = Ribosomal biogenesis protein LAS1L (107-115)
  source 1..27: mol_type = other RNA
ggcaccgacgagctgagactcctttac

SEQ ID NO: 52882 - RNA, 27 nt, synthetic construct
  misc_feature 1..27: note = WD repeat-containing protein 34 (398-406)
  source 1..27: mol_type = other RNA
ggcaccgacgggcacgtgcatctgtac

SEQ ID NO: 52883 - RNA, 33 nt, synthetic construct
  misc_feature 1..33: note = DnaJ homolog subfamily B member 4 (38-48)
  source 1..33: mol_type = other RNA
ggcaccgacgggcagggaggtacattcagatac

SEQ ID NO: 52884 - RNA, 27 nt, synthetic construct
  misc_feature 1..27: note = Tyrosine-protein kinase Fyn (31-39)
  source 1..27: mol_type = other RNA
ggcaccgaccccacacctcagcactac

SEQ ID NO: 52885 - RNA, 27 nt, synthetic construct
  misc_feature 1..27: note = Activating signal cointegrator 1 (235-243)
  source 1..27: mol_type = other RNA
ggcaccctgaaccagcccctcacaaag

SEQ ID NO: 52886 - RNA, 27 nt, synthetic construct
  misc_feature 1..27: note = Putative mitochondrial import inner membrane translocase subunit Tim23B (113-121)
  source 1..27: mol_type = other RNA
ggcaccatgacagggatgctgtacaag

SEQ ID NO: 52887 - RNA, 30 nt, synthetic construct
  misc_feature 1..30: note = Peroxisomal acyl-coenzyme A oxidase 1 (263-272)
  source 1..30: mol_type = other RNA
ggcacctacgtgaagcccctgagcaacaaa

SEQ ID NO: 52888 - RNA, 27 nt, synthetic construct
  misc_feature 1..27: note = HLA class II histocompatibility antigen, DO alpha chain (37-45)
  source 1..27: mol_type = other RNA
ggcacctacgtgagctccgtccccaga

SEQ ID NO: 52889 - RNA, 27 nt, synthetic construct
  misc_feature 1..27: note = Poly (ADP-ribose) polymerase 14 (924-932)
  source 1..27: mol_type = other RNA
ggcgtgttcgggtttcccctgggaaga

SEQ ID NO: 52890 - RNA, 30 nt, synthetic construct
  misc_feature 1..30: note = Cytosolic non-specific dipeptidase (106-115)
  source 1..30: mol_type = other RNA
ggcgtgtacgggggaagcgtccacgaggcc

SEQ ID NO: 52891 - RNA, 30 nt, synthetic construct
  misc_feature 1..30: note = Mediator of RNA polymerase II transcription subunit 18 (127-136)
  source 1..30: mol_type = other RNA
cacgagttcgtggccaagggccatctgttt

SEQ ID NO: 52892 - RNA, 30 nt, synthetic construct
  misc_feature 1..30: note = 60S ribosomal protein L7 (192-201)
  source 1..30: mol_type = other RNA
cacgagatctacaccgtgggcaagagattc

SEQ ID NO: 52893 - RNA, 27 nt, synthetic construct
  misc_feature 1..27: note = Coatomer subunit alpha (103-111)
  source 1..27: mol_type = other RNA
cacgagtacccctggatcctgagcgcc

SEQ ID NO: 52894 - RNA, 30 nt, synthetic construct
  misc_feature 1..30: note = Zinc finger protein 548 (24-33)
  source 1..30: mol_type = other RNA
cacctggacgaggcccagagactcctttac

SEQ ID NO: 52895 - RNA, 27 nt, synthetic construct
  misc_feature 1..27: note = Protein FAM32A (95-103)
  source 1..27: mol_type = other RNA
cacctggacaccctcacagagcattac

SEQ ID NO: 52896 - RNA, 27 nt, synthetic construct
  misc_feature 1..27: note = Heat shock protein HSP 90-alpha A2 (189-197)
  source 1..27: mol_type = other RNA
cacctgaaggaggaccagaccgaatac

SEQ ID NO: 52897 - RNA, 27 nt, synthetic construct
  misc_feature 1..27: note = Myc-associated zinc finger protein (411-419)
  source 1..27: mol_type = other RNA
cacctgaacagccatgtgagacaggtc

SEQ ID NO: 52898 - RNA, 27 nt, synthetic construct
  misc_feature 1..27: note = Heterogeneous nuclear ribonucleoproteins A2/B1 (127-135)
  source 1..27: mol_type = other RNA
cacctgagagactacttcgaggaatat

SEQ ID NO: 52899 - RNA, 27 nt, synthetic construct
  misc_feature 1..27: note = V-type proton ATPase 116 kDa subunit a isoform 4 (722-730)
  source 1..27: mol_type = other RNA
caccaggccatccataccattgagtac

SEQ ID NO: 52900 - RNA, 27 nt, synthetic construct
  misc_feature 1..27: note = Elongation of very long chain fatty acids protein 5 (137-145)
  source 1..27: mol_type = other RNA
caccagatcaccgtgctgcatgtctac

SEQ ID NO: 52901 - RNA, 27 nt, synthetic construct
  misc_feature 1..27: note = Zinc finger protein 770 (99-107)
  source 1..27: mol_type = other RNA
caccagcaactgcataacgagacctac

SEQ ID NO: 52902 - RNA, 27 nt, synthetic construct
  misc_feature 1..27: note = Protein SSXT (207-215)
  source 1..27: mol_type = other RNA
caccagcaaccccctagccagcagtac

SEQ ID NO: 52903 - RNA, 27 nt, synthetic construct
  misc_feature 1..27: note = Zinc finger and BTB domain-containing protein 43 (140-148)
  source 1..27: mol_type = other RNA
caccagagcccctcctcttcaagttac

SEQ ID NO: 52904 - RNA, 27 nt, synthetic construct
  misc_feature 1..27: note = Signal transducing adapter molecule 2 (410-418)
  source 1..27: mol_type = other RNA
caccaggtgaccgtcgcccaaagctac

SEQ ID NO: 52905 - RNA, 27 nt, synthetic construct
  misc_feature 1..27: note = Cirhin (556-564)
  source 1..27: mol_type = other RNA
cacagcgaccagcaagtgttcgagtac

SEQ ID NO: 52906 - RNA, 30 nt, synthetic construct
  misc_feature 1..30: note = Catenin beta-1 (645-654)
  source 1..30: mol_type = other RNA
cacagcagaaacgagggcgtggccacctac

SEQ ID NO: 52907 - RNA, 30 nt, synthetic construct
  misc_feature 1..30: note = U3 small nucleolar RNA-associated protein 6 homolog (267-276)
  source 1..30: mol_type = other RNA
cacaccgacgatcccctgacatgggactac

SEQ ID NO: 52908 - RNA, 27 nt, synthetic construct
  misc_feature 1..27: note = DTW domain-containing protein 1 (175-183)
  source 1..27: mol_type = other RNA
cacaccgacatcctgaaggagaaatac

SEQ ID NO: 52909 - RNA, 30 nt, synthetic construct
  misc_feature 1..30: note = Bone morphogenetic protein receptor type-2 (316-325)
  source 1..30: mol_type = other RNA
cacaccgagctgcccagaggcgaccattac

SEQ ID NO: 52910 - RNA, 27 nt, synthetic construct
  misc_feature 1..27: note = Dedicator of cytokinesis protein 7 (913-921)
  source 1..27: mol_type = other RNA
atcgccagcgacattgtgtccagattc

SEQ ID NO: 52911 - RNA, 27 nt, synthetic construct
  misc_feature 1..27: note = Filamin-A (898-906)
  source 1..27: mol_type = other RNA
atcattgaccaccatgataacacctac

SEQ ID NO: 52912 - RNA, 27 nt, synthetic construct
  misc_feature 1..27: note = SUMO-activating enzyme subunit 1 (309-317)
  source 1..27: mol_type = other RNA
atcctggcccaggagattgtgaaggct

SEQ ID NO: 52913 - RNA, 30 nt, synthetic construct
  misc_feature 1..30: note = Superkiller viralicidic activity 2-like 2 (470-479)
  source 1..30: mol_type = other RNA
atcctgttcagcgagggcctcattaaggcc

SEQ ID NO: 52914 - RNA, 27 nt, synthetic construct
  misc_feature 1..27: note = 60S ribosomal protein L15 (133-141)
  source 1..27: mol_type = other RNA
atcctgattgaccccttccacaaggcc

SEQ ID NO: 52915 - RNA, 27 nt, synthetic construct
  misc_feature 1..27: note = Transcription elongation factor SPT6 (1267-1275)
  source 1..27: mol_type = other RNA
atcatgaagattgacatagagaaattc

SEQ ID NO: 52916 - RNA, 27 nt, synthetic construct
  misc_feature 1..27: note = X-ray repair cross-complementing protein 5 (528-536)
  source 1..27: mol_type = other RNA
atccccctgagcaagattaaaaccctc

SEQ ID NO: 52917 - RNA, 27 nt, synthetic construct
  misc_feature 1..27: note = Eukaryotic translation initiation factor 3 subunit C (783-791)
  source 1..27: mol_type = other RNA
atccaggaggaaagcctgagaacctac

SEQ ID NO: 52918 - RNA, 27 nt, synthetic construct
  misc_feature 1..27: note = 60S ribosomal protein L18a (95-103)
  source 1..27: mol_type = other RNA
atccagattatgaaggtggaggaaata

SEQ ID NO: 52919 - RNA, 27 nt, synthetic construct
  misc_feature 1..27: note = Catalase (398-406)
  source 1..27: mol_type = other RNA
atccagaagaaagccgtgaagaacttc

SEQ ID NO: 52920 - RNA, 27 nt, synthetic construct
  misc_feature 1..27: note = Tuftelin-interacting protein 11 (336-344)
  source 1..27: mol_type = other RNA
atccagaacgacagacaactgcagtac

SEQ ID NO: 52921 - RNA, 27 nt, synthetic construct
  misc_feature 1..27: note = Hepatoma-derived growth factor-related protein 2 (84-92)
  source 1..27: mol_type = other RNA
atccagaacaatccccacgccagctac

SEQ ID NO: 52922 - RNA, 27 nt, synthetic construct
  misc_feature 1..27: note = Putative annexin A2-like protein (319-327)
  source 1..27: mol_type = other RNA
atccagcaagacaccaagggcgattac

SEQ ID NO: 52923 - RNA, 27 nt, synthetic construct
  misc_feature 1..27: note = Interferon-induced GTP-binding protein Mx1 (206-214)
  source 1..27: mol_type = other RNA
atccagagacaagagaccattagcctg

SEQ ID NO: 52924 - RNA, 27 nt, synthetic construct
  misc_feature 1..27: note = Protein transport protein Sec16A (1602-1610)
  source 1..27: mol_type = other RNA
atccagagaaccgaggcctacgaatat

SEQ ID NO: 52925 - RNA, 27 nt, synthetic construct
  misc_feature 1..27: note = Transcription elongation factor SPT5 (984-992)
  source 1..27: mol_type = other RNA
atccaggtgaaggtcagagacacctac

SEQ ID NO: 52926 - RNA, 33 nt, synthetic construct
  misc_feature 1..33: note = Splicing factor 3B subunit 4 (6-16)
  source 1..33: mol_type = other RNA
atcagcgagagaaaccaggacgccaccgtgtac

SEQ ID NO: 52927 - RNA, 27 nt, synthetic construct
  misc_feature 1..27: note = 40S ribosomal protein S16 (87-95)
  source 1..27: mol_type = other RNA
atcagcaaggccctggtggcttactat

SEQ ID NO: 52928 - RNA, 27 nt, synthetic construct
  misc_feature 1..27: note = Serine/threonine-protein kinase 17B (51-59)
  source 1..27: mol_type = other RNA
atcagcaagtccaccggccaggagtac

SEQ ID NO: 52929 - RNA, 27 nt, synthetic construct
  misc_feature 1..27: note = Pre-mRNA-splicing factor CWC22 homolog (146-154)
  source 1..27: mol_type = other RNA
atcaccgacaagaacagcctggcctac

SEQ ID NO: 52930 - RNA, 30 nt, synthetic construct
  misc_feature 1..30: note = Serine/threonine-protein kinase mTOR (664-673)
  source 1..30: mol_type = other RNA
atcaccgaccccgatcctgacattagatac

SEQ ID NO: 52931 - RNA, 30 nt, synthetic construct
  misc_feature 1..30: note = AAC42003.1 (85-94)
  source 1..30: mol_type = other RNA
atcaccgacagcgccggccacattctgtac

SEQ ID NO: 52932 - RNA, 27 nt, synthetic construct
  misc_feature 1..27: note = E3 ubiquitin-protein ligase RNF213 (4163-4171)
  source 1..27: mol_type = other RNA
atcaccgaggacaagacagaactgtac

SEQ ID NO: 52933 - RNA, 27 nt, synthetic construct
  misc_feature 1..27: note = RNA polymerase I-specific transcription initiation factor RRN3 (516-524)
  source 1..27: mol_type = other RNA
atcaccaacaagtaccagctggtgttc

SEQ ID NO: 52934 - RNA, 27 nt, synthetic construct
  misc_feature 1..27: note = Nuclear receptor corepressor 2 (1441-1449)
  source 1..27: mol_type = other RNA
atcacccagggcacacccctgaagtac

SEQ ID NO: 52935 - RNA, 33 nt, synthetic construct
  misc_feature 1..33: note = HLA class II histocompatibility antigen, DQ alpha 1 chain (3-13)
  source 1..33: mol_type = other RNA
atcgtggccgaccacgtcgctagctacggcgtt

SEQ ID NO: 52936 - RNA, 27 nt, synthetic construct
  misc_feature 1..27: note = Putative eukaryotic translation initiation factor 2 subunit 3-like protein (59-67)
  source 1..27: mol_type = other RNA
aaggccatcagcggcgtgcacaccgtc

SEQ ID NO: 52937 - RNA, 27 nt, synthetic construct
  misc_feature 1..27: note = Nuclear pore membraneoprotein 210 (219-227)
  source 1..27: mol_type = other RNA
aaggccagaatccaggaggctgtgtac

SEQ ID NO: 52938 - RNA, 27 nt, synthetic construct
  misc_feature 1..27: note = Heat shock protein HSP 90-beta (452-460)
  source 1..27: mol_type = other RNA
aaggagttcgacggcaaaagcctggtg

SEQ ID NO: 52939 - RNA, 27 nt, synthetic construct
  misc_feature 1..27: note = NADH dehydrogenase (ubiquinone) 1 beta subcomplex subunit 10 (121-129)
  source 1..27: mol_type = other RNA
aaggaggtggaacagttcacccaagtc

SEQ ID NO: 52940 - RNA, 27 nt, synthetic construct
  misc_feature 1..27: note = Lysine-specific histone demethylase 1A (454-462)
  source 1..27: mol_type = other RNA
aagatcaaagagctgcaccagcaatac

SEQ ID NO: 52941 - RNA, 27 nt, synthetic construct
  misc_feature 1..27: note = Thioredoxin-interacting protein (6-14)
  source 1..27: mol_type = other RNA
aagatcaaaagcttcgaggtggtcttt

SEQ ID NO: 52942 - RNA, 27 nt, synthetic construct
  misc_feature 1..27: note = 60S ribosomal protein L27 (67-75)
  source 1..27: mol_type = other RNA
aagatcaaaagcttcgtgaaggtctac

SEQ ID NO: 52943 - RNA, 27 nt, synthetic construct
  misc_feature 1..27: note = 60S ribosomal protein L5 (117-125)
  source 1..27: mol_type = other RNA
aagatctacgagggccaggtggaagtc

SEQ ID NO: 52944 - RNA, 30 nt, synthetic construct
  misc_feature 1..30: note = Putative elongation factor 1-alpha-like 3 (386-395)
  source 1..30: mol_type = other RNA
aagctggaggacggccccaaattcctcaag

SEQ ID NO: 52945 - RNA, 30 nt, synthetic construct
  misc_feature 1..30: note = Long-chain-fatty-acid-CoA ligase 4 (40-49)
  source 1..30: mol_type = other RNA
aagctgttcgaccacgccgtgagcaaattt

SEQ ID NO: 52946 - RNA, 27 nt, synthetic construct
  misc_feature 1..27: note = Signal recognition particle receptor subunit alpha (81-89)
  source 1..27: mol_type = other RNA
aagctgatcgacgatgtgcacagactc

SEQ ID NO: 52947 - RNA, 33 nt, synthetic construct
  misc_feature 1..33: note = Embryonic stem cell-specific 5-hydroxymethylcytosine-binding protein (239-249)
  source 1..33: mol_type = other RNA
aagctgatccaccccaccgagaacattacattc

SEQ ID NO: 52948 - RNA, 27 nt, synthetic construct
  misc_feature 1..27: note Dolichyl-diphosphooligosaccharide-proteinosyltransferase subunit DAD1 (25-33)
  source 1..27: mol_type = other RNA
aagctgctcgacgcctaccttctgtat

SEQ ID NO: 52949 - RNA, 30 nt, synthetic construct
  misc_feature 1..30: note = DNA-directed RNA polymerases I, II, and III subunit RPABC5 (58-67)
  source 1..30: mol_type = other RNA
aagctgctcaactacgccccccttgagaaa

SEQ ID NO: 52950 - RNA, 27 nt, synthetic construct
  misc_feature 1..27: note = Dystonin (4751-4759)
  source 1..27: mol_type = other RNA
aagctgagcgacctcgataacaaactt

SEQ ID NO: 52951 - RNA, 30 nt, synthetic construct
  misc_feature 1..30: note = 60S ribosomal protein L23a (115-124)
  source 1..30: mol_type = other RNA
aagctgtacgacatcgatgtggccaaagtc

SEQ ID NO: 52952 - RNA, 30 nt, synthetic construct
  misc_feature 1..30: note = ATP-citrate synthase (650-659)
  source 1..30: mol_type = other RNA
aagctgtacagacccggcagcgtggcctat

SEQ ID NO: 52953 - RNA, 27 nt, synthetic construct
  misc_feature 1..27: note = Protein quaking (81-89)
  source 1..27: mol_type = other RNA
aagctgtacgtgcccgtcaaagagtat

SEQ ID NO: 52954 - RNA, 27 nt, synthetic construct
  misc_feature 1..27: note = Homocysteine-responsive endoplasmic reticulum-resident ubiquitin-like domain member 1 protein (92-100)
  source 1..27: mol_type = other RNA
aagatgcccgagatcaacgccaaagtg

SEQ ID NO: 52955 - RNA, 27 nt, synthetic construct
  misc_feature 1..27: note = Transducin-like enhancer protein 2 (76-84)
  source 1..27: mol_type = other RNA
aagcaggccgagatcgtgaaaagactg

SEQ ID NO: 52956 - RNA, 27 nt, synthetic construct
  misc_feature 1..27: note = Gamma-interferon-inducible protein 16 (309-317)
  source 1..27: mol_type = other RNA
aagcaggccagcggcaacatcgtgtac

SEQ ID NO: 52957 - RNA, 30 nt, synthetic construct
  misc_feature 1..30: note = Cytoplasmic dynein 1 heavy chain 1 (1181-1190)
  source 1..30: mol_type = other RNA
aagcagttcgagaaacaagtggaactgtac

SEQ ID NO: 52958 - RNA, 30 nt, synthetic construct
  misc_feature 1..30: note = Staphylococcal nuclease domain-containing protein 1 (869-878)
  source 1..30: mol_type = other RNA
aagcagttccaaaaagtgatcaccgagtac

SEQ ID NO: 52959 - RNA, 30 nt, synthetic construct
  misc_feature 1..30: note = Cytoplasmic dynein 1 heavy chain 1 (652-661)
  source 1..30: mol_type = other RNA
aagcagatcgacagacaactgaccgcctac

SEQ ID NO: 52960 - RNA, 27 nt, synthetic construct
  misc_feature 1..27: note = Thioredoxin (3-11)
  source 1..27: mol_type = other RNA
aagcagatcgagagcaaaaccgccttc

SEQ ID NO: 52961 - RNA, 27 nt, synthetic construct
  misc_feature 1..27: note = Ribonucleoside-diphosphate reductase large subunit (529-537)
  source 1..27: mol_type = other RNA
aagcagatcttcgagaccatttactat

SEQ ID NO: 52962 - RNA, 27 nt, synthetic construct
  misc_feature 1..27: note = ADP/ATP translocase 2 (43-51)
  source 1..27: mol_type = other RNA
aagcagatcaccgccgacaaacaatac

SEQ ID NO: 52963 - RNA, 30 nt, synthetic construct
  misc_feature 1..30: note = Lamin-B receptor (234-243)
  source 1..30: mol_type = other RNA
aagcagaaagaccccagcctgctcaacttc

SEQ ID NO: 52964 - RNA, 30 nt, synthetic construct
  misc_feature 1..30: note = Asparagine synthetase (glutamine-hydrolyzing) (272-281)
  source 1..30: mol_type = other RNA
aagcagctgaaagaggcccaagtgcagtac

SEQ ID NO: 52965 - RNA, 33 nt, synthetic construct
  misc_feature 1..33: note = Heterogeneous nuclear ribonucleoprotein L (455-465)
  source 1..33: mol_type = other RNA
aagcagcccgccatcatgcctggccaaagctac

SEQ ID NO: 52966 - RNA, 30 nt, synthetic construct
  misc_feature 1..30: note = Caprin-1 (536-545)
  source 1..30: mol_type = other RNA
aagcagcaaaaccagtaccaggccagctat

SEQ ID NO: 52967 - RNA, 27 nt, synthetic construct
  misc_feature 1..27: note = DNA-dependent protein kinase catalytic subunit (2970-2978)
  source 1..27: mol_type = other RNA
aagcagtacgacgaggccctgaacaaa

SEQ ID NO: 52968 - RNA, 30 nt, synthetic construct
  misc_feature 1..30: note = Alpha-actinin-4 (691-700)
  source 1..30: mol_type = other RNA
aagcagtacgagagaagcatcgtggactat

SEQ ID NO: 52969 - RNA, 27 nt, synthetic construct
  misc_feature 1..27: note = RAC-beta serine/threonine-protein kinase (30-38)
  source 1..27: mol_type = other RNA
aagagcgacggctccttcatcgggtac

SEQ ID NO: 52970 - RNA, 27 nt, synthetic construct
  misc_feature 1..27: note = Replication factor C subunit 1 (870-878)
  source 1..27: mol_type = other RNA
aagagcgacctgttctttcacgattac

SEQ ID NO: 52971 - RNA, 30 nt, synthetic construct
  misc_feature 1..30: note = Pre-mRNA-processing factor 40 homolog A (164-173)
  source 1..30: mol_type = other RNA
aagagcgactccggcaaaccctactattac

SEQ ID NO: 52972 - RNA, 27 nt, synthetic construct
  misc_feature 1..27: note = Helicase-like transcription factor (499-507)
  source 1..27: mol_type = other RNA
aagagcgacgtgcacctgaacttctac

SEQ ID NO: 52973 - RNA, 27 nt, synthetic construct
  misc_feature 1..27: note = Pre-mRNA-splicing factor RBM22 (109-117)
  source 1..27: mol_type = other RNA
aagagcgacgtgaacaaagagtactat

SEQ ID NO: 52974 - RNA, 27 nt, synthetic construct
  misc_feature 1..27: note = Kinesin-like protein KIF18A (241-249)
  source 1..27: mol_type = other RNA
aagaccgccagcatcaaccagaatgtg

SEQ ID NO: 52975 - RNA, 30 nt, synthetic construct
  misc_feature 1..30: note = Vacuolar protein sorting-associated protein 13A (1399-1408)
  source 1..30: mol_type = other RNA
aagaccgacgatctgacaatggtgctctac

SEQ ID NO: 52976 - RNA, 27 nt, synthetic construct
  misc_feature 1..27: note = Chromodomain-helicase-DNA-binding protein 8 (165-173)
  source 1..27: mol_type = other RNA
aagaccgacgagagcctgacaaaatac

SEQ ID NO: 52977 - RNA, 27 nt, synthetic construct
  misc_feature 1..27: note = Raftlin (114-122)
  source 1..27: mol_type = other RNA
aagaccgacctgcacaacgagggctac

SEQ ID NO: 52978 - RNA, 27 nt, synthetic construct
  misc_feature 1..27: note = Coiled-coil domain-containing protein 94 (90-98)
  source 1..27: mol_type = other RNA
aagaccgaccccgagaacacagattac

SEQ ID NO: 52979 - RNA, 33 nt, synthetic construct
  misc_feature 1..33: note = Signal-induced proliferation-associated 1-like protein 2 (436-446)
  source 1..33: mol_type = other RNA
aagaccgacagcacaggcactcactccctgtac

SEQ ID NO: 52980 - RNA, 33 nt, synthetic construct
  misc_feature 1..33: note = Pre-mRNA-processing-splicing factor 8 (341-351)
  source 1..33: mol_type = other RNA
aagaccgaggaccccgatctgcctgccttctac

SEQ ID NO: 52981 - RNA, 33 nt, synthetic construct
  misc_feature 1..33: note = Serine/arginine-rich splicing factor 3 (23-33)
  source 1..33: mol_type = other RNA
aagaccgagctggaaagagccttcggctactat

SEQ ID NO: 52982 - RNA, 30 nt, synthetic construct
  misc_feature 1..30: note = T-complex protein 1 subunit zeta-2 (196-205)
  source 1..30: mol_type = other RNA
aagaccgaggtgaacagcggcttcttttac

SEQ ID NO: 52983 - RNA, 27 nt, synthetic construct
  misc_feature 1..27: note = Periphilin-1 (297-305)
  source 1..27: mol_type = other RNA
aagaccaaagagatcgaacaggtgtac

SEQ ID NO: 52984 - RNA, 30 nt, synthetic construct
  misc_feature 1..30: note = Metastasis-associated protein MTA2 (311-320)
  source 1..30: mol_type = other RNA
aagaccacagacagatacatccagcaaaaa

SEQ ID NO: 52985 - RNA, 27 nt, synthetic construct
  misc_feature 1..27: note = Spatacsin (1273-1281)
  source 1..27: mol_type = other RNA
aaggtggccaacatcattctgagctac

SEQ ID NO: 52986 - RNA, 27 nt, synthetic construct
  misc_feature 1..27: note = Heterogeneous nuclear ribonucleoprotein A/B (227-235)
  source 1..27: mol_type = other RNA
aaggtggcccagcccaaagaggtctac

SEQ ID NO: 52987 - RNA, 27 nt, synthetic construct
  misc_feature 1..27: note = Protein RRP5 homolog (1680-1688)
  source 1..27: mol_type = other RNA
aaggtgttcgagagagccgtccagtac

SEQ ID NO: 52988 - RNA, 27 nt, synthetic construct
  misc_feature 1..27: note = 60 kDa heat shock protein, mitochondrial (344-352)
  source 1..27: mol_type = other RNA
aaggtgggcgaggtcatcgttaccaaa

SEQ ID NO: 52989 - RNA, 27 nt, synthetic construct
  misc_feature 1..27: note = Protein transport protein Sec61 subunit beta (67-75)
  source 1..27: mol_type = other RNA
aaggtgggccccgtccctgttctggtg

SEQ ID NO: 52990 - RNA, 27 nt, synthetic construct
  misc_feature 1..27: note = 40S ribosomal protein S19 (29-37)
  source 1..27: mol_type = other RNA
aaggtgcccgagtgggtcgacaccgtt

SEQ ID NO: 52991 - RNA, 27 nt, synthetic construct
  misc_feature 1..27: note = Protein DEK (315-323)
  source 1..27: mol_type = other RNA
aaggtgtacgagaactatcccacctac

SEQ ID NO: 52992 - RNA, 27 nt, synthetic construct
  misc_feature 1..27: note = Cyclin-dependent kinases regulatory subunit 2 (11-19)
  source 1..27: mol_type = other RNA
aagtacttcgacgagcactatgaatac

SEQ ID NO: 52993 - RNA, 27 nt, synthetic construct
  misc_feature 1..27: note = Protein disulfide-isomerase A3 (16-24)
  source 1..27: mol_type = other RNA
ctggccgctgcaagactcgccgcggct

SEQ ID NO: 52994 - RNA, 27 nt, synthetic construct
  misc_feature 1..27: note = Heterogeneous nuclear ribonucleoprotein R (193-201)
  source 1..27: mol_type = other RNA
ctggagtacgaagaccacaagagcgcc

SEQ ID NO: 52995 - RNA, 27 nt, synthetic construct
  misc_feature 1..27: note = Lamina-associated polypeptide 2, isoform alpha (313-321)
  source 1..27: mol_type = other RNA
ctgatcaaggagaccacaactggctac

SEQ ID NO: 52996 - RNA, 27 nt, synthetic construct
  misc_feature 1..27: note = 60S ribosomal protein L28 (17-25)
  source 1..27: mol_type = other RNA
ctgatcaagagaaacaaacagacctac

SEQ ID NO: 52997 - RNA, 27 nt, synthetic construct
  misc_feature 1..27: note = ATP synthase F(0) complex subunit C1, mitochondrial (21-29)
  source 1..27: mol_type = other RNA
ctgatcagacccgtgagcgcctccttc

SEQ ID NO: 52998 - RNA, 27 nt, synthetic construct
  misc_feature 1..27: note = Cytospin-A (469-477)
  source 1..27: mol_type = other RNA
ctgctcgacgagcaccatatcagctac

SEQ ID NO: 52999 - RNA, 30 nt, synthetic construct
  misc_feature 1..30: note = Zinc finger protein 557 (59-68)
  source 1..30: mol_type = other RNA
ctgctcgaccccgcccagagaaccctttac

SEQ ID NO: 53000 - RNA, 30 nt, synthetic construct
  misc_feature 1..30: note = Clathrin heavy chain 1 (421-430)
  source 1..30: mol_type = other RNA
ctgctcgaccagggccaacttaacaagtac

SEQ ID NO: 53001 - RNA, 30 nt, synthetic construct
  misc_feature 1..30: note = Zinc finger protein 669 (106-115)
  source 1..30: mol_type = other RNA
ctgctcgacagctcccagaagaacctttac

SEQ ID NO: 53002 - RNA, 30 nt, synthetic construct; identical to SEQ ID NO: 28775
  misc_feature 1..30: note = WD repeat-containing protein 6 (358-367)
  source 1..30: mol_type = other RNA

SEQ ID NO: 53003 - RNA, 27 nt, synthetic construct
  misc_feature 1..27: note = Signal transducer and activator of transcription 6 (56-64)
  source 1..27: mol_type = other RNA
ctgctcagcgacaccgtgcagcacctt

SEQ ID NO: 53004 - RNA, 27 nt, synthetic construct
  misc_feature 1..27: note = Antigen peptide transporter 1 (684-692)
  source 1..27: mol_type = other RNA
ctgctctacgagagccccgaaagatat

SEQ ID NO: 53005 - RNA, 27 nt, synthetic construct
  misc_feature 1..27: note = Retinoic acid receptor RXR-gamma (423-431)
  source 1..27: mol_type = other RNA
ctgcccgccctcagaagcatcggcctt

SEQ ID NO: 53006 - RNA, 27 nt, synthetic construct
  misc_feature 1..27: note = Eukaryotic translation initiation factor 2-alpha kinase 1 (221-229)
  source 1..27: mol_type = other RNA
ctgcagcaccccaacatcgtgggctac

SEQ ID NO: 53007 - RNA, 27 nt, synthetic construct
  misc_feature 1..27: note = CDK5 regulatory subunit-associated protein 2 (355-363)
  source 1..27: mol_type = other RNA
ctgcagaaggcccaaacccaggagttc

SEQ ID NO: 53008 - RNA, 27 nt, synthetic construct
  misc_feature 1..27: note = Trifunctional purine biosynthetic protein adenosine-3 (429-437)
  source 1..27: mol_type = other RNA
ctgcagcaacccagaagcctcacctac

SEQ ID NO: 53009 - RNA, 27 nt, synthetic construct
  misc_feature 1..27: note = Farnesyl pyrophosphate synthase (341-349)
  source 1..27: mol_type = other RNA
ctgcagagagccacccccgagcaatac

SEQ ID NO: 53010 - RNA, 27 nt, synthetic construct
  misc_feature 1..27: note = R3H domain-containing protein 4 (70-78)
  source 1..27: mol_type = other RNA
ctgcagagactcgagaacacccaatac

SEQ ID NO: 53011 - RNA, 27 nt, synthetic construct
  misc_feature 1..27: note = WD repeat-containing protein 27 (15-23)
  source 1..27: mol_type = other RNA
ctgagcgacatcgtgattgagaagtac

SEQ ID NO: 53012 - RNA, 27 nt, synthetic construct
  misc_feature 1..27: note = UAP56-interacting factor (99-107)
  source 1..27: mol_type = other RNA
ctgagcgacaagaacatcgagcagtac

SEQ ID NO: 53013 - RNA, 27 nt, synthetic construct
  misc_feature 1..27: note = Histone acetyltransferase KAT8 (325-333)
  source 1..27: mol_type = other RNA
ctgagcgacctcggcaagctttcctac

SEQ ID NO: 53014 - RNA, 30 nt, synthetic construct
  misc_feature 1..30: note = Probable tRNA N6-adenosine threonylcarbamoyltransferase (315-324)
  source 1..30: mol_type = other RNA
ctgagcgactccggcgtgacccagagatac

SEQ ID NO: 53015 - RNA, 30 nt, synthetic construct
  misc_feature 1..30: note = Deoxynucleotidyltransferase terminal-interacting protein 2 (252-261)
  source 1..30: mol_type = other RNA
ctgagcgagatcaacaagcccaatttctac

SEQ ID NO: 53016 - RNA, 33 nt, synthetic construct
  misc_feature 1..33: note = Serpin B8 (74-84)
  source 1..33: mol_type = other RNA
ctgagcgaggtgaacagaaccggcacacagtac

SEQ ID NO: 53017 - RNA, 27 nt, synthetic construct
  misc_feature 1..27: note = ATP synthase subunit alpha, mitochondrial (160-168)
  source 1..27: mol_type = other RNA
ctgaccgacgccgatgctatgaagtac

SEQ ID NO: 53018 - RNA, 27 nt, synthetic construct
  misc_feature 1..27: note = 1,4-alpha-glucan-branching enzyme (569-577)
  source 1..27: mol_type = other RNA
ctgaccgacgatgacctccttagatac

SEQ ID NO: 53019 - RNA, 30 nt, synthetic construct
  misc_feature 1..30: note = 26S proteasome non-ATPase regulatory subunit 2 (391-400)
  source 1..30: mol_type = other RNA
ctgaccgacgatggcaacaagtggctctac

SEQ ID NO: 53020 - RNA, 27 nt, synthetic construct
  misc_feature 1..27: note = Phosphatidylinositol 4,5-bisphosphate 3-kinase catalytic subunit alpha isoform (623-631)
  source 1..27: mol_type = other RNA
ctgaccgacgataagctcagccagtac

SEQ ID NO: 53021 - RNA, 27 nt, synthetic construct
  misc_feature 1..27: note = Probable threonine-tRNA ligase 2, cytoplasmic (435-443)
  source 1..27: mol_type = other RNA
ctgaccgacttcatcagagaggaatac

SEQ ID NO: 53022 - RNA, 30 nt, synthetic construct
  misc_feature 1..30: note = Coiled-coil domain-containing protein 127 (209-218)
  source 1..30: mol_type = other RNA
ctgaccgacatcttccagcacgatacatac

SEQ ID NO: 53023 - RNA, 30 nt, synthetic construct
  misc_feature 1..30: note = Elongation factor 2 (162-171)
  source 1..30: mol_type = other RNA
ctgaccgacatcacaaagggcgtgcagtac

SEQ ID NO: 53024 - RNA, 30 nt, synthetic construct
  misc_feature 1..30: note = Tuberin (146-155)
  source 1..30: mol_type = other RNA
ctgaccgacaacggcagacacatcacatac

SEQ ID NO: 53025 - RNA, 27 nt, synthetic construct
  misc_feature 1..27: note = Glucosylceramidase (252-260)
  source 1..27: mol_type = other RNA
ctgaccgaccccgaggccgctaagtac

SEQ ID NO: 53026 - RNA, 30 nt, synthetic construct
  misc_feature 1..30: note = ATPase family AAA domain-containing protein 5 (1663-1672)
  source 1..30: mol_type = other RNA
ctgaccgacgtgagagagcagaacaagtac

SEQ ID NO: 53027 - RNA, 27 nt, synthetic construct
  misc_feature 1..27: note = Casein kinase II subunit alpha (128-136)
  source 1..27: mol_type = other RNA
ctgaccgactacgatatcagattctat

SEQ ID NO: 53028 - RNA, 30 nt, synthetic construct
  misc_feature 1..30: note = Gamma-tubulin complex component 2 (88-97)
  source 1..30: mol_type = other RNA
ctgaccgaggacaaggaaacactccagtac

SEQ ID NO: 53029 - RNA, 27 nt, synthetic construct
  misc_feature 1..27: note = Integrator complex subunit 11 (242-250)
  source 1..27: mol_type = other RNA
ctgaccgagaaggccaaccactactat

SEQ ID NO: 53030 - RNA, 27 nt, synthetic construct
  misc_feature 1..27: note = Pogo transposable element with KRAB domain (64-72)
  source 1..27: mol_type = other RNA
ctgaccgagcagcaaaaggccctctac

SEQ ID NO: 53031 - RNA, 30 nt, synthetic construct
  misc_feature 1..30: note = Nuclear factor erythroid 2-related factor 2 (197-206)
  source 1..30: mol_type = other RNA
ctgaccgaggtggacaactaccacttctat

SEQ ID NO: 53032 - RNA, 33 nt, synthetic construct
  misc_feature 1..33: note = Serpin B9 (74-84)
  source 1..33: mol_type = other RNA
ctgaccgaggtgaacaaggccggcacacagtac

SEQ ID NO: 53033 - RNA, 27 nt, synthetic construct
  misc_feature 1..27: note = Folliculin-interacting protein 2 (997-1005)
  source 1..27: mol_type = other RNA
ctggtggccgacctcgtccacaccgtt

SEQ ID NO: 53034 - RNA, 27 nt, synthetic construct
  misc_feature 1..27: note = Pogo transposable element with KRAB domain (261-269)
  source 1..27: mol_type = other RNA
ctggtggaccagagagtcgccgagtac

SEQ ID NO: 53035 - RNA, 30 nt, synthetic construct
  misc_feature 1..30: note = Exportin-5 (20-29)
  source 1..30: mol_type = other RNA
atgatggaccccaacagcacccagagatac

SEQ ID NO: 53036 - RNA, 30 nt, synthetic construct
  misc_feature 1..30: note = Protein transport protein Sec61 subunit gamma (5-14)
  source 1..30: mol_type = other RNA
atgcagttcgtggagcccagcagacaattt

SEQ ID NO: 53037 - RNA, 27 nt, synthetic construct
  misc_feature 1..27: note = Catenin beta-1 (662-670)
  source 1..27: mol_type = other RNA
atgagcgaggacaagccccaggattac

SEQ ID NO: 53038 - RNA, 27 nt, synthetic construct
  misc_feature 1..27: note = Brefeldin A-inhibited guanine nucleotide-exchange protein 1 (574-582)
  source 1..27: mol_type = other RNA
aacgccgctaatatcttcgagagactg

SEQ ID NO: 53039 - RNA, 33 nt, synthetic construct
  misc_feature 1..33: note = Charged multivesicular body protein 5 (63-73)
  source 1..33: mol_type = other RNA
aacgagatccaggaagccctgagcagatcctac

SEQ ID NO: 53040 - RNA, 27 nt, synthetic construct
  misc_feature 1..27: note = Clathrin heavy chain 1 (935-943)
  source 1..27: mol_type = other RNA
aacgagaatagcctgttcaagtccctc

SEQ ID NO: 53041 - RNA, 27 nt, synthetic construct
  misc_feature 1..27: note = Calpain small subunit 1 (93-101)
  source 1..27: mol_type = other RNA
aacgagagcgaagaggtgagacagttc

SEQ ID NO: 53042 - RNA, 27 nt, synthetic construct
  misc_feature 1..27: note = PR domain zinc finger protein 15 (791-799)
  source 1..27: mol_type = other RNA
aacgaggtggacggcgaatacagatat

SEQ ID NO: 53043 - RNA, 33 nt, synthetic construct
  misc_feature 1..33: note = Nucleolar pre-ribosomal-associated protein 1 (127-137)
  source 1..33: mol_type = other RNA
aacgaggtggaccccggcgattggcagaagttc

SEQ ID NO: 53044 - RNA, 27 nt, synthetic construct
  misc_feature 1..27: note = DnaJ homolog subfamily C member 11 (261-269)
  source 1..27: mol_type = other RNA
aacctggacaagaataccgtgggctac

SEQ ID NO: 53045 - RNA, 27 nt, synthetic construct
  misc_feature 1..27: note = Ubiquitin-conjugating enzyme E2 variant 3 (190-198)
  source 1..27: mol_type = other RNA
aacctggacagccagagactccaatac

SEQ ID NO: 53046 - RNA, 27 nt, synthetic construct
  misc_feature 1..27: note = Clathrin heavy chain 1 (74-82)
  source 1..27: mol_type = other RNA
aaccccgccagcaaggtgatcgctctg

SEQ ID NO: 53047 - RNA, 27 nt, synthetic construct
  misc_feature 1..27: note = Spermatid perinuclear RNA-binding protein (397-405)
  source 1..27: mol_type = other RNA
aaccagatcagacccggcctgcaatac

SEQ ID NO: 53048 - RNA, 27 nt, synthetic construct
  misc_feature 1..27: note = Dystonin (3331-3339)
  source 1..27: mol_type = other RNA
aaccagaagccccctagcgccgagttc

SEQ ID NO: 53049 - RNA, 27 nt, synthetic construct
  misc_feature 1..27: note = Microtubule-actin cross-linking factor 1, isoforms 1/2/3/5 (5369-5377)
  source 1..27: mol_type = other RNA
aaccagaagccccctagcgccgagtac

SEQ ID NO: 53050 - RNA, 27 nt, synthetic construct
  misc_feature 1..27: note = Cytosolic carboxypeptidase 1 (749-757)
  source 1..27: mol_type = other RNA
aacagcgacatcaattccaaccactac

SEQ ID NO: 53051 - RNA, 30 nt, synthetic construct
  misc_feature 1..30: note = DNA repair protein RAD51 homolog 1 (99-108)
  source 1..30: mol_type = other RNA
aacaccgaccaccagacacaactgctctac

SEQ ID NO: 53052 - RNA, 27 nt, synthetic construct
  misc_feature 1..27: note = Eukaryotic translation initiation factor 3 subunit C-like protein (462-470)
  source 1..27: mol_type = other RNA
aacaccgacccccacagccaggagtac

SEQ ID NO: 53053 - RNA, 30 nt, synthetic construct
  misc_feature 1..30: note = Methionine aminopeptidase 1 (74-83)
  source 1..30: mol_type = other RNA
aacaccgacccctgggccggctacagatat

SEQ ID NO: 53054 - RNA, 27 nt, synthetic construct
  misc_feature 1..27: note = Tyrosine-protein phosphatase non-receptor type 11 (414-422)
  source 1..27: mol_type = other RNA
aacaccgagagaacagtgtggcagtac

SEQ ID NO: 53055 - RNA, 27 nt, synthetic construct
  misc_feature 1..27: note = Protein UXT (66-74)
  source 1..27: mol_type = other RNA
aacgtgatcgagagactgcaggaagcc

SEQ ID NO: 53056 - RNA, 27 nt, synthetic construct
  misc_feature 1..27: note = Nardilysin (107-115)
  source 1..27: mol_type = other RNA
cccagcgaccctaagcagtacagatat

SEQ ID NO: 53057 - RNA, 33 nt, synthetic construct
  misc_feature 1..33: note = Mediator of RNA polymerase II transcription subunit 13 (1456-1466)
  source 1..33: mol_type = other RNA
cccaccgacggcgatagccacgccgtgacatac

SEQ ID NO: 53058 - RNA, 27 nt, synthetic construct
  misc_feature 1..27: note = Absent in melanoma 1 protein (1215-1223)
  source 1..27: mol_type = other RNA
cccaccgaccctaaggtggtcgtttac

SEQ ID NO: 53059 - RNA, 33 nt, synthetic construct
  misc_feature 1..33: note = Ubiquitin carboxyl-terminal hydrolase 22 (453-463)
  source 1..33: mol_type = other RNA
cccaccgacagcctgaacaatgataacaagtac

SEQ ID NO: 53060 - RNA, 33 nt, synthetic construct
  misc_feature 1..33: note = ADP-sugar pyrophosphatase (6-16)
  source 1..33: mol_type = other RNA
cccaccgagagctcccagaacggcaagcaatac

SEQ ID NO: 53061 - RNA, 27 nt, synthetic construct
  misc_feature 1..27: note = Vimentin (311-319)
  source 1..27: mol_type = other RNA
caggccaagcaagagagcaccgaatac

SEQ ID NO: 53062 - RNA, 33 nt, synthetic construct
  misc_feature 1..33: note = Nuclear autoantigenic sperm protein (67-77)
  source 1..33: mol_type = other RNA
caggaggccgctagcctgctcggcaagaaatac

SEQ ID NO: 53063 - RNA, 27 nt, synthetic construct
  misc_feature 1..27: note = Ras GTPase-activating protein-binding protein 1 (243-251)
  source 1..27: mol_type = other RNA
caggaggacctgagaaccttcagctgg

SEQ ID NO: 53064 - RNA, 30 nt, synthetic construct
  misc_feature 1..30: note = Nuclear pore complex protein Nup155 (718-727)
  source 1..30: mol_type = other RNA
caggagttcctggacagaaacagccaattt

SEQ ID NO: 53065 - RNA, 27 nt, synthetic construct
  misc_feature 1..27: note = Cytosolic non-specific dipeptidase (28-36)
  source 1..27: mol_type = other RNA
caggagatccccgtgaacgtcagattc

SEQ ID NO: 53066 - RNA, 27 nt, synthetic construct
  misc_feature 1..27: note = Putative ATP-dependent RNA helicase DDX11-like protein 8 (240-248)
  source 1..27: mol_type = other RNA
cagctggcccaattcgtgcacgaggtc

SEQ ID NO: 53067 - RNA, 30 nt, synthetic construct
  misc_feature 1..30: note = Zinc finger protein 550 (19-28)
  source 1..30: mol_type = other RNA
cagctggacctcgcccaaagaaccctttac

SEQ ID NO: 53068 - RNA, 30 nt, synthetic construct
  misc_feature 1..30: note = Zinc finger protein 674 (24-33)
  source 1..30: mol_type = other RNA
cagctggacagcgcccaaaagaacctctac

SEQ ID NO: 53069 - RNA, 27 nt, synthetic construct
  misc_feature 1..27: note = Proteasome activator complex subunit 3 (33-41)
  source 1..27: mol_type = other RNA
cagctggtggacatcattgagaaggtc

SEQ ID NO: 53070 - RNA, 27 nt, synthetic construct
  misc_feature 1..27: note = Nucleoporin NUP188 homolog (1544-1552)
  source 1..27: mol_type = other RNA
cagcaagccctgcacaccgtgcagtac

SEQ ID NO: 53071 - RNA, 27 nt, synthetic construct
  misc_feature 1..27: note = Homocysteine-responsive endoplasmic reticulum-resident ubiquitin-like domain member 1 protein (174-182)
  source 1..27: mol_type = other RNA
cagcaaatctacgccagacagtattac

SEQ ID NO: 53072 - RNA, 27 nt, synthetic construct
  misc_feature 1..27: note = Signal recognition particle subunit SRP72 (107-115)
  source 1..27: mol_type = other RNA
cagaccgacaagctgaaagagctctac

SEQ ID NO: 53073 - RNA, 27 nt, synthetic construct
  misc_feature 1..27: note = Oxysterol-binding protein-related protein 8 (674-682)
  source 1..27: mol_type = other RNA
cagaccgaggccacacaagaaaagtac

SEQ ID NO: 53074 - RNA, 27 nt, synthetic construct
  misc_feature 1..27: note = Probable cation-transporting ATPase 13A3 (131-139)
  source 1..27: mol_type = other RNA
cagaccgagagccaacagatcagatac

SEQ ID NO: 53075 - RNA, 27 nt, synthetic construct
  misc_feature 1..27: note = Band 4.1-like protein 2 (42-50)
  source 1..27: mol_type = other RNA
cagaccgagacaaagactatcacgtac

SEQ ID NO: 53076 - RNA, 27 nt, synthetic construct
  misc_feature 1..27: note = 26S proteasome non-ATPase regulatory subunit 13 (164-172)
  source 1..27: mol_type = other RNA
cagaccatcggcaaccacgccagctac

SEQ ID NO: 53077 - RNA, 33 nt, synthetic construct
  misc_feature 1..33: note = 60S ribosomal protein L28 (23-33)
  source 1..33: mol_type = other RNA
cagacctacagcacagagcccaacaatctgaag

SEQ ID NO: 53078 - RNA, 33 nt, synthetic construct
  misc_feature 1..33: note = Cytochrome b-c1 complex subunit 9 (34-44)
  source 1..33: mol_type = other RNA
agagccttcgaccagggcgctgatgcaatctac

SEQ ID NO: 53079 - RNA, 27 nt, synthetic construct
  misc_feature 1..27: note = Mitotic checkpoint protein BUB3 (186-194)
  source 1..27: mol_type = other RNA
agagccttccccaacaagcagggctac

SEQ ID NO: 53080 - RNA, 30 nt, synthetic construct
  misc_feature 1..30: note = X-ray repair cross-complementing protein 5 (296-305)
  source 1..30: mol_type = other RNA
agagccaacccccaggtgggcgtcgctttc

SEQ ID NO: 53081 - RNA, 33 nt, synthetic construct
  misc_feature 1..33: note = Exocyst complex component 4 (551-561)
  source 1..33: mol_type = other RNA
agagaggccgacctggatttcgctaggcagtac

SEQ ID NO: 53082 - RNA, 30 nt, synthetic construct
  misc_feature 1..30: note = Signal peptidase complex subunit 2 (185-194)
  source 1..30: mol_type = other RNA
agagaggccgaattcaccaagagcatcgct

SEQ ID NO: 53083 - RNA, 27 nt, synthetic construct
  misc_feature 1..27: note = Patatin-like phospholipase domain-containing protein 2 (30-38)
  source 1..27: mol_type = other RNA
agagagcacgcccccttcctggtggct

SEQ ID NO: 53084 - RNA, 24 nt, synthetic construct
  misc_feature 1..24: note = Tubulin beta-4A chain (2-9)
  source 1..24: mol_type = other RNA
agagagatcgtgcacctgcaggcc

SEQ ID NO: 53085 - RNA, 27 nt, synthetic construct
  misc_feature 1..27: note = ATP-binding cassette sub-family F member 3 (425-433)
  source 1..27: mol_type = other RNA
agagagtacgaagcccagcaacagtat

SEQ ID NO: 53086 - RNA, 27 nt, synthetic construct
  misc_feature 1..27: note = Pre-mRNA-splicing factor ATP-dependent RNA helicase DHX15 (399-407)
  source 1..27: mol_type = other RNA
agaatcttcgagccccctccaccgaag

SEQ ID NO: 53087 - RNA, 30 nt, synthetic construct
  misc_feature 1..30: note = Actin-related protein 2/3 complex subunit 2 (9-18)
  source 1..30: mol_type = other RNA
agaatcattgaggaaaccctggccctcaag

SEQ ID NO: 53088 - RNA, 27 nt, synthetic construct
  misc_feature 1..27: note = Protein FAM60A (102-110)
  source 1..27: mol_type = other RNA
agaatcaagagcaaccagatttccaaa

SEQ ID NO: 53089 - RNA, 30 nt, synthetic construct
  misc_feature 1..30: note = Chromobox protein homolog 6 (91-100)
  source 1..30: mol_type = other RNA
agaatcagcgacgtgcacttctccgtcaag

SEQ ID NO: 53090 - RNA, 30 nt, synthetic construct
  misc_feature 1..30: note = Splicing factor 3B subunit 1 (276-285)
  source 1..30: mol_type = other RNA
agaatctacaacgacgataagaatacctat

SEQ ID NO: 53091 - RNA, 27 nt, synthetic construct
  misc_feature 1..27: note = FAS-associated factor 2 (75-83)
  source 1..27: mol_type = other RNA
agaatctacagctatgtggtctccagg

SEQ ID NO: 53092 - RNA, 27 nt, synthetic construct
  misc_feature 1..27: note = 26S proteasome non-ATPase regulatory subunit 3 (107-115)
  source 1..27: mol_type = other RNA
agactgaaccactacgtgctctataag

SEQ ID NO: 53093 - RNA, 33 nt, synthetic construct
  misc_feature 1..33: note = Cell division cycle protein 27 homolog (214-224)
  source 1..33: mol_type = other RNA
agactgaacctcgagagctccaattctaagtac

SEQ ID NO: 53094 - RNA, 30 nt, synthetic construct
  misc_feature 1..30: note = Histone deacetylase 9 (670-679)
  source 1..30: mol_type = other RNA
agactgcaggagaccggcctccttaacaag

SEQ ID NO: 53095 - RNA, 33 nt, synthetic construct
  misc_feature 1..33: note = F-box only protein 5 (140-150)
  source 1..33: mol_type = other RNA
agactgtacgaggacagcggctattcctctttc

SEQ ID NO: 53096 - RNA, 30 nt, synthetic construct
  misc_feature 1..30: note = ATP-binding cassette sub-family D member 1 (172-181)
  source 1..30: mol_type = other RNA
agactgtacttcagccagcaaacctattac

SEQ ID NO: 53097 - RNA, 30 nt, synthetic construct
  misc_feature 1..30: note = V-type proton ATPase subunit d 1 (169-178)
  source 1..30: mol_type = other RNA
agactgtaccccgagggcctcgcccagctt

SEQ ID NO: 53098 - RNA, 27 nt, synthetic construct
  misc_feature 1..27: note = Vimentin (13-21)
  source 1..27: mol_type = other RNA
agaatgttcggcgggcccggaaccgcc

SEQ ID NO: 53099 - RNA, 33 nt, synthetic construct
  misc_feature 1..33: note = Enhancer of rudimentary homolog (42-52)
  source 1..33: mol_type = other RNA
agaatgaaccccaatagcccttccatcacctac

SEQ ID NO: 53100 - RNA, 30 nt, synthetic construct
  misc_feature 1..30: note = ATP synthase subunit epsilon-like protein, mitochondrial (6-15)
  source 1..30: mol_type = other RNA
agacaggccggcctgagctacatcaggtat

SEQ ID NO: 53101 - RNA, 27 nt, synthetic construct
  misc_feature 1..27: note = Polyadenylate-binding protein 1 (374-382)
  source 1..27: mol_type = other RNA
agacaggcccacctgaccaaccaatac

SEQ ID NO: 53102 - RNA, 30 nt, synthetic construct
  misc_feature 1..30: note = Vimentin (310-319)
  source 1..30: mol_type = other RNA
agacaggccaagcaagagagcaccgaatac

SEQ ID NO: 53103 - RNA, 27 nt, synthetic construct
  misc_feature 1..27: note = Caprin-1 (297-305)
  source 1..27: mol_type = other RNA
agacagttcatggccgagacccaattt

SEQ ID NO: 53104 - RNA, 30 nt, synthetic construct
  misc_feature 1..30: note = Splicing factor 3B subunit 1 (517-526)
  source 1..30: mol_type = other RNA
agacagatcaccgacaaggccagggagttc

SEQ ID NO: 53105 - RNA, 27 nt, synthetic construct
  misc_feature 1..27: note = Protein OS-9 (639-647)
  source 1..27: mol_type = other RNA
agacagaaggagctggaaagcaactac

SEQ ID NO: 53106 - RNA, 30 nt, synthetic construct
  misc_feature 1..30: note = Interferon-induced, double-stranded RNA-activated protein kinase (18-27)
  source 1..30: mol_type = other RNA
agacagaagcaaggcgtggtcctgaaatac

SEQ ID NO: 53107 - RNA, 30 nt, synthetic construct
  misc_feature 1..30: note = Alpha-taxilin (77-86)
  source 1..30: mol_type = other RNA
agacagctggaggacatcctcagcacctac

SEQ ID NO: 53108 - RNA, 33 nt, synthetic construct
  misc_feature 1..33: note = Prelamin-A/C (390-400)
  source 1..33: mol_type = other RNA
agacagaacggcgacgatcccctgctcacctac

SEQ ID NO: 53109 - RNA, 33 nt, synthetic construct
  misc_feature 1..33: note = Spectrin beta chain, non-erythrocytic 1 (1161-1171)
  source 1..33: mol_type = other RNA
agacagaacctgctcagccaatcccacgcctac

SEQ ID NO: 53110 - RNA, 30 nt, synthetic construct
  misc_feature 1..30: note = Tetratricopeptide repeat protein 9C (19-28)
  source 1..30: mol_type = other RNA
agacagcccgacaacgccaaggctctgtac

SEQ ID NO: 53111 - RNA, 27 nt, synthetic construct
  misc_feature 1..27: note = Eukaryotic translation initiation factor 3 subunit C (905-913)
  source 1..27: mol_type = other RNA
agacagcaacagagccagaccgcctac

SEQ ID NO: 53112 - RNA, 33 nt, synthetic construct
  misc_feature 1..33: note = ATP-dependent RNA helicase DDX3X (603-613)
  source 1..33: mol_type = other RNA
agacagagctccggcgcctcttcaagtagcttc

SEQ ID NO: 53113 - RNA, 27 nt, synthetic construct
  misc_feature 1..27: note = 40S ribosomal protein S29 (44-52)
  source 1..27: mol_type = other RNA
agacagtacgccaaggacatcggcttc

SEQ ID NO: 53114 - RNA, 33 nt, synthetic construct
  misc_feature 1..33: note = Transmembrane emp24 domain-containing protein 4 (33-43)
  source 1..33: mol_type = other RNA
agacagtacggcagcgaggggaggttcaccttt

SEQ ID NO: 53115 - RNA, 27 nt, synthetic construct
  misc_feature 1..27: note = Non-receptor tyrosine-protein kinase TYK2 (521-529)
  source 1..27: mol_type = other RNA
agaagcttcccctccgtgagggagctg

SEQ ID NO: 53116 - RNA, 27 nt, synthetic construct
  misc_feature 1..27: note = E3 ubiquitin-protein ligase AMFR (229-237)
  source 1..27: mol_type = other RNA
agaaccgcccacgtgatcctgaggtac

SEQ ID NO: 53117 - RNA, 27 nt, synthetic construct
  misc_feature 1..27: note = Proteasome subunit alpha type-2 (113-121)
  source 1..27: mol_type = other RNA
agagtggccagcgtcatgcaggagtac

SEQ ID NO: 53118 - RNA, 30 nt, synthetic construct
  misc_feature 1..30: note = Calmodulin (91-100)
  source 1..30: mol_type = other RNA
agagtgttcgacaaggatggcaacgggtac

SEQ ID NO: 53119 - RNA, 30 nt, synthetic construct
  misc_feature 1..30: note = Nucleolysin TIA-1 isoform p40 (244-253)
  source 1..30: mol_type = other RNA
agagtgttccccgacaagggctacagcttt

SEQ ID NO: 53120 - RNA, 30 nt, synthetic construct
  misc_feature 1..30: note = Nucleolysin TIAR (213-222)
  source 1..30: mol_type = other RNA
agagtgttccccgagaagggctacagcttt

SEQ ID NO: 53121 - RNA, 30 nt, synthetic construct
  misc_feature 1..30: note = Kinesin-like protein KIF20A (466-475)
  source 1..30: mol_type = other RNA
agagtgttccagggctttttcaccgggagg

SEQ ID NO: 53122 - RNA, 33 nt, synthetic construct
  misc_feature 1..33: note = Fatty acid synthase (1694-1704)
  source 1..33: mol_type = other RNA
agagtgttcaccacagtcggcagcgccgagaag

SEQ ID NO: 53123 - RNA, 33 nt, synthetic construct
  misc_feature 1..33: note = Non-specific lipid-transfer protein (13-23)
  source 1..33: mol_type = other RNA
agagtgttcgtcgttggcgtggggatgaccaag

SEQ ID NO: 53124 - RNA, 33 nt, synthetic construct
  misc_feature 1..33: note = 26S protease regulatory subunit 7 (239-249)
  source 1..33: mol_type = other RNA
agagtgatcggcagcgagctggtccagaagtac

SEQ ID NO: 53125 - RNA, 30 nt, synthetic construct
  misc_feature 1..30: note = Ectonucleoside triphosphate diphosphohydrolase 1 (97-106)
  source 1..30: mol_type = other RNA
agagtgaagggccccgggatcagcaaattc

SEQ ID NO: 53126 - RNA, 27 nt, synthetic construct
  misc_feature 1..27: note = FACT complex subunit SSRP1 (316-324)
  source 1..27: mol_type = other RNA
agagtgatgaaggccctggtcaacagg

SEQ ID NO: 53127 - RNA, 27 nt, synthetic construct
  misc_feature 1..27: note = DNA replication licensing factor MCM4 (387-395)
  source 1..27: mol_type = other RNA
agagtgaacgtcaccggcatctacagg

SEQ ID NO: 53128 - RNA, 27 nt, synthetic construct
  misc_feature 1..27: note = Double-stranded RNA-binding protein Staufen homolog 1 (457-465)
  source 1..27: mol_type = other RNA
agagtgcagggcttccaagtcgagtac

SEQ ID NO: 53129 - RNA, 27 nt, synthetic construct
  misc_feature 1..27: note = Serine/threonine-protein phosphatase 6 regulatory subunit 3 (45-53)
  source 1..27: mol_type = other RNA
agagtgagcgacatcaacttcaccctg

SEQ ID NO: 53130 - RNA, 30 nt, synthetic construct
  misc_feature 1..30: note = SUMO-specific isopeptidase USPL1 (717-726)
  source 1..30: mol_type = other RNA
agagtgaccagccaggtctccaacctgaag

SEQ ID NO: 53131 - RNA, 27 nt, synthetic construct
  misc_feature 1..27: note = 5'-nucleotidase domain-containing protein 1 (141-149)
  source 1..27: mol_type = other RNA
agagtggtcgactacctgaccaagctc

SEQ ID NO: 53132 - RNA, 27 nt, synthetic construct
  misc_feature 1..27: note = Serine/arginine-rich splicing factor 6 (3-11)
  source 1..27: mol_type = other RNA
agagtgtacatcggcaggctgagctat

SEQ ID NO: 53133 - RNA, 27 nt, synthetic construct
  misc_feature 1..27: note = Serine/threonine-protein kinase SMG1 (36-44)
  source 1..27: mol_type = other RNA
agcgccgaccccgataacctgaagtac

SEQ ID NO: 53134 - RNA, 27 nt, synthetic construct
  misc_feature 1..27: note = Serine/threonine-protein kinase 17A (293-301)
  source 1..27: mol_type = other RNA
agcgccgtggacttcatcagaaccctg

SEQ ID NO: 53135 - RNA, 30 nt, synthetic construct
  misc_feature 1..30: note = A-kinase anchor protein 2 (685-694)
  source 1..30: mol_type = other RNA
agcgaggccgctgaactgagatccaccgca

SEQ ID NO: 53136 - RNA, 27 nt, synthetic construct
  misc_feature 1..27: note = Zinc finger protein Rlf (1399-1407)
  source 1..27: mol_type = other RNA
agcgaggccggctccgctgcaagattc

SEQ ID NO: 53137 - RNA, 27 nt, synthetic construct
  misc_feature 1..27: note = Histone-lysine N-methyltransferase SETD2 (461-469)
  source 1..27: mol_type = other RNA
agcgaggaagagtacaagaaaacctat

SEQ ID NO: 53138 - RNA, 27 nt, synthetic construct
  misc_feature 1..27: note = U5 small nuclear ribonucleoprotein 200 kDa helicase (1010-1018)
  source 1..27: mol_type = other RNA
agcgagatcgaactgttcagagtgttt

SEQ ID NO: 53139 - RNA, 30 nt, synthetic construct
  misc_feature 1..30: note = Nesprin-2 (320-329)
  source 1..30: mol_type = other RNA
agcgagaacgacacctacttcaagaaatat

SEQ ID NO: 53140 - RNA, 30 nt, synthetic construct
  misc_feature 1..30: note = Uncharacterized protein C14orf119 (121-130)
  source 1..30: mol_type = other RNA
agcgagcccgacttcgtggccaagttttac

SEQ ID NO: 53141 - RNA, 33 nt, synthetic construct
  misc_feature 1..33: note = Fructose-bisphosphate aldolase A (408-418)
  source 1..33: mol_type = other RNA
agcgagtccctgttcgtgtctaaccacgcctac

SEQ ID NO: 53142 - RNA, 27 nt, synthetic construct
  misc_feature 1..27: note = Cyclin-G-associated kinase (305-313)
  source 1..27: mol_type = other RNA
agcatcgccgaggtggtccaccagctg

SEQ ID NO: 53143 - RNA, 27 nt, synthetic construct
  misc_feature 1..27: note = 26S proteasome non-ATPase regulatory subunit 3 (418-426)
  source 1..27: mol_type = other RNA
agcctggccgacatcgctcagaagctc

SEQ ID NO: 53144 - RNA, 30 nt, synthetic construct
  misc_feature 1..30: note = Peroxisomal membrane protein 2 (66-75)
  source 1..30: mol_type = other RNA
agcctggacgtgggcgggcccctcagatac

SEQ ID NO: 53145 - RNA, 27 nt, synthetic construct
  misc_feature 1..27: note = Nucleoporin GLE1 (288-296)
  source 1..27: mol_type = other RNA
agcctgatctccggcattataagagcc

SEQ ID NO: 53146 - RNA, 27 nt, synthetic construct
  misc_feature 1..27: note = Nucleolar protein 7 (197-205)
  source 1..27: mol_type = other RNA
agcctgtacggccccgggaccaacaga

SEQ ID NO: 53147 - RNA, 27 nt, synthetic construct
  misc_feature 1..27: note = Nuclear pore complex protein Nup93 (787-795)
  source 1..27: mol_type = other RNA
agccaggccagaaccctgatcacattc

SEQ ID NO: 53148 - RNA, 27 nt, synthetic construct
  misc_feature 1..27: note = 60S ribosomal export protein NMD3 (228-236)
  source 1..27: mol_type = other RNA
agccaggacatccactccaacacctac

SEQ ID NO: 53149 - RNA, 27 nt, synthetic construct
  misc_feature 1..27: note = 14 kDa phosphohistidine phosphatase (83-91)
  source 1..27: mol_type = other RNA
agccaggacaagaaaatccacgtgtac

SEQ ID NO: 53150 - RNA, 27 nt, synthetic construct
  misc_feature 1..27: note = MKI67 FHA domain-interacting nucleolar phosphoprotein (66-74)
  source 1..27: mol_type = other RNA
agccagttcggcaccgtgacaagattt

SEQ ID NO: 53151 - RNA, 30 nt, synthetic construct
  misc_feature 1..30: note = Kinesin-associated protein 3 (208-217)
  source 1..30: mol_type = other RNA
agccagttccacggcctgatcacccattac

SEQ ID NO: 53152 - RNA, 27 nt, synthetic construct
  misc_feature 1..27: note = Heterogeneous nuclear ribonucleoprotein U (697-705)
  source 1..27: mol_type = other RNA
agccagcactaccatcaaggctattac

SEQ ID NO: 53153 - RNA, 33 nt, synthetic construct
  misc_feature 1..33: note = U4/U6 small nuclear ribonucleoprotein Prp4 (224-234)
  source 1..33: mol_type = other RNA
agccagatcggcgacgatagacccatttcctac

SEQ ID NO: 53154 - RNA, 27 nt, synthetic construct
  misc_feature 1..27: note = DCN1-like protein 1 (7-15)
  source 1..27: mol_type = other RNA
agccagaaggacaaagtgagacaattc

SEQ ID NO: 53155 - RNA, 27 nt, synthetic construct
  misc_feature 1..27: note = General transcription factor 3C polypeptide 1 (1442-1450)
  source 1..27: mol_type = other RNA
agccagatgaagtcctaccaatctttc

SEQ ID NO: 53156 - RNA, 27 nt, synthetic construct
  misc_feature 1..27: note = Transmembrane emp24 domain-containing protein 3 (196-204)
  source 1..27: mol_type = other RNA
agccaggtgctgctccttaagtccttc

SEQ ID NO: 53157 - RNA, 27 nt, synthetic construct
  misc_feature 1..27: note = E3 ubiquitin-protein ligase MARCH7 (122-130)
  source 1..27: mol_type = other RNA
agccaggtgcccagatcctcttcaatg

SEQ ID NO: 53158 - RNA, 27 nt, synthetic construct
  misc_feature 1..27: note = Midasin (130-138)
  source 1..27: mol_type = other RNA
agctccgacgccaaccccgtgagatac

SEQ ID NO: 53159 - RNA, 27 nt, synthetic construct
  misc_feature 1..27: note = Arf-GAP with coiled-coil, ANK repeat and PH domain-containing protein 2 (251-259)
  source 1..27: mol_type = other RNA
agctccgacgattctaagctggagtac

SEQ ID NO: 53160 - RNA, 30 nt, synthetic construct
  misc_feature 1..30: note = Zinc finger protein 330 (258-267)
  source 1..30: mol_type = other RNA
agctccgacaagtacggcgatacctcttat

SEQ ID NO: 53161 - RNA, 30 nt, synthetic construct
  misc_feature 1..30: note = Protein FAM208B (1580-1589)
  source 1..30: mol_type = other RNA
agctccgacaacgccaccctgacacactac

SEQ ID NO: 53162 - RNA, 27 nt, synthetic construct
  misc_feature 1..27: note = Heat shock 70 kDa protein 14 (75-83)
  source 1..27: mol_type = other RNA
agctccgacccccaggcccaaaagtac

SEQ ID NO: 53163 - RNA, 27 nt, synthetic construct
  misc_feature 1..27: note = Spectrin beta chain, non-erythrocytic 1 (769-777)
  source 1..27: mol_type = other RNA
agctccgacgtgggccacgatgagtac

SEQ ID NO: 53164 - RNA, 27 nt, synthetic construct
  misc_feature 1..27: note = Signal transducer and activator of transcription 3 (613-621)
  source 1..27: mol_type = other RNA
agctccaaggagggcggggtgaccttc

SEQ ID NO: 53165 - RNA, 30 nt, synthetic construct
  misc_feature 1..30: note = COP9 signalosome complex subunit 6 (241-250)
  source 1..30: mol_type = other RNA
agcaccgacaagttcaaaacagatttttac

SEQ ID NO: 53166 - RNA, 27 nt, synthetic construct
  misc_feature 1..27: note = Axin-1 (71-79)
  source 1..27: mol_type = other RNA
agcaccgaccccagacctgcctcctac

SEQ ID NO: 53167 - RNA, 33 nt, synthetic construct
  misc_feature 1..33: note = Proteasome subunit beta type-8 (261-271)
  source 1..33: mol_type = other RNA
agcaccgacgtgtccgatctgctccaccagtac

SEQ ID NO: 53168 - RNA, 27 nt, synthetic construct
  misc_feature 1..27: note = Dedicator of cytokinesis protein 11 (109-117)
  source 1..27: mol_type = other RNA
agcaccgactggcacgtggtcaactac

SEQ ID NO: 53169 - RNA, 27 nt, synthetic construct
  misc_feature 1..27: note = Mitochondrial Rho GTPase 2 (298-306)
  source 1..27: mol_type = other RNA
agcaccgagctgaaccacctcggctac

SEQ ID NO: 53170 - RNA, 27 nt, synthetic construct
  misc_feature 1..27: note = Cirhin (419-427)
  source 1..27: mol_type = other RNA
agcaccgtgtccagattctttctgtac

SEQ ID NO: 53171 - RNA, 27 nt, synthetic construct
  misc_feature 1..27: note = Cysteine-rich PDZ-binding protein (64-72)
  source 1..27: mol_type = other RNA
agcgtgcaccagcccggctcccattac

SEQ ID NO: 53172 - RNA, 33 nt, synthetic construct
  misc_feature 1..33: note = Exosome complex exonuclease RRP44 (580-590)
  source 1..33: mol_type = other RNA
agcgtgatcaactccaaggcctctctgacctac

SEQ ID NO: 53173 - RNA, 27 nt, synthetic construct
  misc_feature 1..27: note = Collagen type IV alpha-3-binding protein (484-492)
  source 1..27: mol_type = other RNA
agcgtgatcagaaagattcccgccctg

SEQ ID NO: 53174 - RNA, 27 nt, synthetic construct
  misc_feature 1..27: note = Vigilin (74-82)
  source 1..27: mol_type = other RNA
agcgtgatcacccaggtcttccacgtt

SEQ ID NO: 53175 - RNA, 27 nt, synthetic construct
  misc_feature 1..27: note = WD repeat-containing protein 1 (458-466)
  source 1..27: mol_type = other RNA
agcgtgaaggagtggaccatcacatac

SEQ ID NO: 53176 - RNA, 27 nt, synthetic construct
  misc_feature 1..27: note = Cytoplasmic FMR1-interacting protein 1 (214-222)
  source 1..27: mol_type = other RNA
agcgtgaagaacgaccactccgcctac

SEQ ID NO: 53177 - RNA, 27 nt, synthetic construct
  misc_feature 1..27: note = Ribosomal biogenesis protein LAS1L (538-546)
  source 1..27: mol_type = other RNA
agcgtgaagcccgcctcctcttcattc

SEQ ID NO: 53178 - RNA, 30 nt, synthetic construct
  misc_feature 1..30: note = Eukaryotic translation initiation factor 3 subunit I (39-48)
  source 1..30: mol_type = other RNA
agcgtgaacggcgagagactggggacctac

SEQ ID NO: 53179 - RNA, 33 nt, synthetic construct
  misc_feature 1..33: note = Bone morphogenetic protein receptor type-2 (815-825)
  source 1..33: mol_type = other RNA
agcgtgaactcccacgccgctaccacacagtac

SEQ ID NO: 53180 - RNA, 27 nt, synthetic construct
  misc_feature 1..27: note = Epidermal growth factor receptor substrate 15 (746-754)
  source 1..27: mol_type = other RNA
agcgtgtccaacgtcgttatcaccaag

SEQ ID NO: 53181 - RNA, 33 nt, synthetic construct
  misc_feature 1..33: note = E3 ubiquitin-protein ligase Topors (191-201)
  source 1..33: mol_type = other RNA
agcgtgtactccccctctggccctgtcaacaga

SEQ ID NO: 53182 - RNA, 33 nt, synthetic construct
  misc_feature 1..33: note = Tubulin beta chain (48-58)
  source 1..33: mol_type = other RNA
agcgtgtactataacgaggccaccggcgggaag

SEQ ID NO: 53183 - RNA, 27 nt, synthetic construct
  misc_feature 1..27: note = Cohesin subunit SA-2 (881-889)
  source 1..27: mol_type = other RNA
accgccgctgacatcttcaagcagtac

SEQ ID NO: 53184 - RNA, 27 nt, synthetic construct
  misc_feature 1..27: note = Phosphatidylinositol 3,4,5-trisphosphate-dependent Rac exchanger 1 protein (345-353)
  source 1..27: mol_type = other RNA
accgccgactaccacagcaacggctat

SEQ ID NO: 53185 - RNA, 27 nt, synthetic construct
  misc_feature 1..27: note = Phospholipid-transporting ATPase IG (35-43)
  source 1..27: mol_type = other RNA
accgaggcctacatcgctcagagattc

SEQ ID NO: 53186 - RNA, 30 nt, synthetic construct
  misc_feature 1..30: note = RNMT-activating mini protein (20-29)
  source 1..30: mol_type = other RNA
accgagaacgacaaggaataccaggagtat

SEQ ID NO: 53187 - RNA, 27 nt, synthetic construct
  misc_feature 1..27: note = Vacuolar protein sorting-associated protein 26A (225-233)
  source 1..27: mol_type = other RNA
accgagacagaaactatcgccaagtac

SEQ ID NO: 53188 - RNA, 27 nt, synthetic construct
  misc_feature 1..27: note = Ribosomal RNA processing protein 1 homolog B (77-85)
  source 1..27: mol_type = other RNA
accatcgcccagctggtgcacgctgtc

SEQ ID NO: 53189 - RNA, 27 nt, synthetic construct
  misc_feature 1..27: note = Heterogeneous nuclear ribonucleoproteins A2/B1 (164-172)
  source 1..27: mol_type = other RNA
accatcaacggccacaatgccgaggtg

SEQ ID NO: 53190 - RNA, 27 nt, synthetic construct
  misc_feature 1..27: note = Transformation/transcription domain-associated protein (378-386)
  source 1..27: mol_type = other RNA
accctggccgacctcgtgcaccatgtc

SEQ ID NO: 53191 - RNA, 30 nt, synthetic construct
  misc_feature 1..30: note = Syntaxin-binding protein 3 (187-196)
  source 1..30: mol_type = other RNA
accctggacgagaaccccggcgtgagatac

SEQ ID NO: 53192 - RNA, 27 nt, synthetic construct
  misc_feature 1..27: note = Centrosomal protein CEP57L1 (127-135)
  source 1..27: mol_type = other RNA
accctgctcgagaagcagcttgaatac

SEQ ID NO: 53193 - RNA, 33 nt, synthetic construct
  misc_feature 1..33: note = Pleckstrin homology domain-containing family B member 2 (103-113)
  source 1..33: mol_type = other RNA
accctgcaggacagcagaacaaacactgcctac

SEQ ID NO: 53194 - RNA, 27 nt, synthetic construct
  misc_feature 1..27: note = Zinc finger protein 706 (46-54)
  source 1..27: mol_type = other RNA
acccagatgcccgaccctaagacattc

SEQ ID NO: 53195 - RNA, 27 nt, synthetic construct
  misc_feature 1..27: note = SWI/SNF-related matrix-associated actin-dependent regulator of chromatin subfamily D member 2 (452-460)
  source 1..27: mol_type = other RNA
acccagagagacttcatgctgagcttt

SEQ ID NO: 53196 - RNA, 27 nt, synthetic construct
  misc_feature 1..27: note = V-type proton ATPase subunit E 2 (48-56)
  source 1..27: mol_type = other RNA
acccagagactgaagatcatggagtac

SEQ ID NO: 53197 - RNA, 27 nt, synthetic construct
  misc_feature 1..27: note = DNA replication licensing factor MCM7 (654-662)
  source 1..27: mol_type = other RNA
acccagagacccgccgacgtgatcttc

SEQ ID NO: 53198 - RNA, 30 nt, synthetic construct
  misc_feature 1..30: note = 40S ribosomal protein S13 (18-27)
  source 1..30: mol_type = other RNA
accagcgacgatgtgaaggagcagatctac

SEQ ID NO: 53199 - RNA, 27 nt, synthetic construct
  misc_feature 1..27: note = Cation-independent mannose-6-phosphate receptor (877-885)
  source 1..27: mol_type = other RNA
accagcgacggcagacagacaacttac

SEQ ID NO: 53200 - RNA, 33 nt, synthetic construct
  misc_feature 1..33: note = Bifunctional glutamate/proline-tRNA ligase (269-279)
  source 1..33: mol_type = other RNA
accagcgaccacttcgagacaatcatgaagtac

SEQ ID NO: 53201 - RNA, 30 nt, synthetic construct
  misc_feature 1..30: note = Nucleoporin Nup37 (108-117)
  source 1..30: mol_type = other RNA
accagcgacctgcaggataagaacgagtac

SEQ ID NO: 53202 - RNA, 33 nt, synthetic construct
  misc_feature 1..33: note = RNA polymerase II elongation factor ELL (458-468)
  source 1..33: mol_type = other RNA
accagcgagacacccgactacctgctcaagtat

SEQ ID NO: 53203 - RNA, 33 nt, synthetic construct
  misc_feature 1..33: note = Heterogeneous nuclear ribonucleoprotein F (256-266)
  source 1..33: mol_type = other RNA
accacagacctgttcggcagagatctcagctac

SEQ ID NO: 53204 - RNA, 27 nt, synthetic construct
  misc_feature 1..27: note = Tetratricopeptide repeat protein 13 (710-718)
  source 1..27: mol_type = other RNA
accacagaggaaagaactcagctgtac

SEQ ID NO: 53205 - RNA, 30 nt, synthetic construct
  misc_feature 1..30: note = Heterogeneous nuclear ribonucleoproteins A2/B1 (20-29)
  source 1..30: mol_type = other RNA
accacagaggaaagcctgagaaactactat

SEQ ID NO: 53206 - RNA, 27 nt, synthetic construct
  misc_feature 1..27: note = Tapasin (372-380)
  source 1..27: mol_type = other RNA
accacagagcagcacggcgccagatac

SEQ ID NO: 53207 - RNA, 30 nt, synthetic construct
  misc_feature 1..30: note = Condensin-2 complex subunit D3 (675-684)
  source 1..30: mol_type = other RNA
accacagagagccaggaactgtccagatac

SEQ ID NO: 53208 - RNA, 27 nt, synthetic construct
  misc_feature 1..27: note = Endoplasmic reticulum-Golgi intermediate compartment protein 3 (40-48)
  source 1..27: mol_type = other RNA
accacagaggtgcaccccgaactgtac

SEQ ID NO: 53209 - RNA, 27 nt, synthetic construct
  misc_feature 1..27: note = Coatomer subunit gamma-1 (759-767)
  source 1..27: mol_type = other RNA
accgtggccgaccacatccagaaggtc

SEQ ID NO: 53210 - RNA, 27 nt, synthetic construct
  misc_feature 1..27: note = Threonine-tRNA ligase, cytoplasmic (150-158)
  source 1..27: mol_type = other RNA
accgtgatcgccaaggtcaacaatgtt

SEQ ID NO: 53211 - RNA, 27 nt, synthetic construct
  misc_feature 1..27: note = Transmembrane emp24 domain-containing protein 3 (153-161)
  source 1..27: mol_type = other RNA
accgtgatcgacagccagacacactac

SEQ ID NO: 53212 - RNA, 30 nt, synthetic construct
  misc_feature 1..30: note = Importin subunit alpha-5 (433-442)
  source 1..30: mol_type = other RNA
accgtgatggacagcaagatcgtccaggtt

SEQ ID NO: 53213 - RNA, 27 nt, synthetic construct
  misc_feature 1..27: note = Sodium/potassium-transporting ATPase subunit alpha-3 (268-276)
  source 1..27: mol_type = other RNA
accgtgatgggcagaatcgccacactg

SEQ ID NO: 53214 - RNA, 27 nt, synthetic construct
  misc_feature 1..27: note = Band 4.1-like protein 2 (777-785)
  source 1..27: mol_type = other RNA
gtggaggaagagcccagacctgccgct

SEQ ID NO: 53215 - RNA, 27 nt, synthetic construct
  misc_feature 1..27: note = 26S protease regulatory subunit 4 (176-184)
  source 1..27: mol_type = other RNA
gtggagaaggccccccaggaaacctac

SEQ ID NO: 53216 - RNA, 27 nt, synthetic construct
  misc_feature 1..27: note = Choline/ethanolaminephosphotransferase 1 (268-276)
  source 1..27: mol_type = other RNA
gtgatcttcaccggcggggtcggaaag

SEQ ID NO: 53217 - RNA, 27 nt, synthetic construct
  misc_feature 1..27: note = 28S ribosomal protein S17, mitochondrial (34-42)
  source 1..27: mol_type = other RNA
gtgctggacccctacctccttaagtat

SEQ ID NO: 53218 - RNA, 30 nt, synthetic construct
  misc_feature 1..30: note = Protein Niban (367-376)
  source 1..30: mol_type = other RNA
gtgctgttcgagaaggaagtcaacgaggtt

SEQ ID NO: 53219 - RNA, 27 nt, synthetic construct
  misc_feature 1..27: note = Caprin-1 (232-240)
  source 1..27: mol_type = other RNA
gtgctgaaggagatcgtcgaaagagtt

SEQ ID NO: 53220 - RNA, 27 nt, synthetic construct
  misc_feature 1..27: note = Ribonucleoside-diphosphate reductase large subunit (245-253)
  source 1..27: mol_type = other RNA
gtgctgaaggagaaaatcgccaagtac

SEQ ID NO: 53221 - RNA, 33 nt, synthetic construct
  misc_feature 1..33: note = Histone H4 (22-32)
  source 1..33: mol_type = other RNA
gtgctgagagacaacatccagggcattaccaag

SEQ ID NO: 53222 - RNA, 27 nt, synthetic construct
  misc_feature 1..27: note = Cytoplasmic dynein 1 heavy chain 1 (3839-3847)
  source 1..27: mol_type = other RNA
gtgctgtacgagaaccccaatctcaag

SEQ ID NO: 53223 - RNA, 27 nt, synthetic construct
  misc_feature 1..27: note = Ubiquitin carboxyl-terminal hydrolase 7 (195-203)
  source 1..27: mol_type = other RNA
gtgcaggccgacgctccccacggcgtc

SEQ ID NO: 53224 - RNA, 30 nt, synthetic construct
  misc_feature 1..30: note = E3 ubiquitin-protein ligase RNF19A (143-152)
  source 1..30: mol_type = other RNA
gtgcaggccgacgtccaaaaggagagatac

SEQ ID NO: 53225 - RNA, 27 nt, synthetic construct
  misc_feature 1..27: note = Interleukin enhancer-binding factor 2 (97-105)
  source 1..27: mol_type = other RNA
gtgcagatcgaggaagtcagacaagtt

SEQ ID NO: 53226 - RNA, 33 nt, synthetic construct
  misc_feature 1..33: note = Proteasome subunit alpha type-2 (102-112)
  source 1..33: mol_type = other RNA
gtgcagagagtcgccagcgttatgcaagagtac

SEQ ID NO: 53227 - RNA, 27 nt, synthetic construct
  misc_feature 1..27: note = Transitional endoplasmic reticulum ATPase (747-755)
  source 1..27: mol_type = other RNA
gtgagcgacaacgatatcagaaagtac

SEQ ID NO: 53228 - RNA, 27 nt, synthetic construct
  misc_feature 1..27: note = Nuclear factor NF-kappa-B p100 subunit (317-325)
  source 1..27: mol_type = other RNA
gtgagcgactccaagcagttcacctac

SEQ ID NO: 53229 - RNA, 30 nt, synthetic construct
  misc_feature 1..30: note = Nuclear factor NF-kappa-B p100 subunit (317-326)
  source 1..30: mol_type = other RNA
gtgagcgactccaagcagttcacctactat

SEQ ID NO: 53230 - RNA, 33 nt, synthetic construct
  misc_feature 1..33: note = Phospholipase D2 (65-75)
  source 1..33: mol_type = other RNA
gtgaccgcccaggtcgttggcacagagagatac

SEQ ID NO: 53231 - RNA, 27 nt, synthetic construct
  misc_feature 1..27: note = Acidic fibroblast growth factor intracellular-binding protein (29-37)
  source 1..27: mol_type = other RNA
gtgaccgacgccgtcgctctgagagtt

SEQ ID NO: 53232 - RNA, 30 nt, synthetic construct
  misc_feature 1..30: note = Alanine-tRNA ligase, cytoplasmic (480-489)
  source 1..30: mol_type = other RNA
gtgaccgacgatagccccaagtacaactat

SEQ ID NO: 53233 - RNA, 33 nt, synthetic construct; identical to SEQ ID NO: 29006
  misc_feature 1..33: note = Histone-lysine N-methyltransferase 2C (1500-1510)
  source 1..33: mol_type = other RNA

SEQ ID NO: 53234 - RNA, 30 nt, synthetic construct
  misc_feature 1..30: note = Attractin (145-154)
  source 1..30: mol_type = other RNA
gtgaccgacggccccgggaactacaagtat

SEQ ID NO: 53235 - RNA, 30 nt, synthetic construct
  misc_feature 1..30: note = Proteasome-associated protein ECM29 homolog (1150-1159)
  source 1..30: mol_type = other RNA
gtgaccgacaagagcatggtcgataaatac

SEQ ID NO: 53236 - RNA, 30 nt, synthetic construct
  misc_feature 1..30: note = Histone-lysine N-methyltransferase, H3 lysine-79 specific (77-86)
  source 1..30: mol_type = other RNA
gtgaccgaccccgagaagctgaacaattac

SEQ ID NO: 53237 - RNA, 27 nt, synthetic construct
  misc_feature 1..27: note = Dynamin-1-like protein (55-63)
  source 1..27: mol_type = other RNA
gtgaccgacagcatcagagatgagtac

SEQ ID NO: 53238 - RNA, 30 nt, synthetic construct; identical to SEQ ID NO: 29011
  misc_feature 1..30: note = Pyridine nucleotide-disulfide oxidoreductase domain-containing protein 1 (98-107)
  source 1..30: mol_type = other RNA

SEQ ID NO: 53239 - RNA, 27 nt, synthetic construct
  misc_feature 1..27: note = Filamin-A (2353-2361)
  source 1..27: mol_type = other RNA
gtgaccgagatcgaccaggataagtac

SEQ ID NO: 53240 - RNA, 33 nt, synthetic construct
  misc_feature 1..33: note = Staphylococcal nuclease domain-containing protein 1 (687-697)
  source 1..33: mol_type = other RNA
gtgaccgagatcacagacgatctgcacttctac

SEQ ID NO: 53241 - RNA, 27 nt, synthetic construct
  misc_feature 1..27: note = E3 ubiquitin-protein ligase RNF213 (4915-4923)
  source 1..27: mol_type = other RNA
gtgaccgagctgcacgtcatcagctac

SEQ ID NO: 53242 - RNA, 27 nt, synthetic construct
  misc_feature 1..27: note = Eukaryotic translation initiation factor 3 subunit C-like protein (23-31)
  source 1..27: mol_type = other RNA
gtgaccaagcccgtcggcgggaactac

SEQ ID NO: 53243 - RNA, 30 nt, synthetic construct
  misc_feature 1..30: note = Heterogeneous nuclear ribonucleoprotein U (696-705)
  source 1..30: mol_type = other RNA
tggagccagcactaccatcaaggctattac

SEQ ID NO: 53244 - RNA, 30 nt, synthetic construct
  misc_feature 1..30: note = Chromodomain-helicase-DNA-binding protein 7 (859-868)
  source 1..30: mol_type = other RNA
tggaccgacatcctgagccacggcagatac

SEQ ID NO: 53245 - RNA, 27 nt, synthetic construct
  misc_feature 1..27: note = Polypyrimidine tract-binding protein 3 (269-277)
  source 1..27: mol_type = other RNA
tacgccgaccccgtgaacgctcactat

SEQ ID NO: 53246 - RNA, 27 nt, synthetic construct
  misc_feature 1..27: note = HLA class I histocompatibility antigen, B-15 alpha chain (140-148)
  source 1..27: mol_type = other RNA
tacgcctatgacggcaaggattacatc

SEQ ID NO: 53247 - RNA, 33 nt, synthetic construct
  misc_feature 1..33: note = HLA class I histocompatibility antigen, B-52 alpha chain (140-150)
  source 1..33: mol_type = other RNA
tacgcctatgacggcaaggattacatcgctctg

SEQ ID NO: 53248 - RNA, 27 nt, synthetic construct
  misc_feature 1..27: note = Cell division cycle-associated 7-like protein (433-441)
  source 1..27: mol_type = other RNA
tacggctatgacaacgtgaaggagtac

SEQ ID NO: 53249 - RNA, 33 nt, synthetic construct
  misc_feature 1..33: note = Mediator of RNA polymerase II transcription subunit 10 (70-80)
  source 1..33: mol_type = other RNA
tacatcgaccagggcagaaacccccaactgtat

SEQ ID NO: 53250 - RNA, 27 nt, synthetic construct
  misc_feature 1..27: note = Septin-7 (132-140)
  source 1..27: mol_type = other RNA
tacatcgacagcaagttcgaggattat

SEQ ID NO: 53251 - RNA, 27 nt, synthetic construct
  misc_feature 1..27: note = Hypoxia-inducible factor 1-alpha (111-119)
  source 1..27: mol_type = other RNA
tacatcagcgacaacgtgaataagtat

SEQ ID NO: 53252 - RNA, 30 nt, synthetic construct
  misc_feature 1..30: note = Ubiquitin carboxyl-terminal hydrolase 22 (118-127)
  source 1..30: mol_type = other RNA
tacatctatgacaaggatatggagattata

SEQ ID NO: 53253 - RNA, 30 nt, synthetic construct
  misc_feature 1..30: note = Metastasis-associated protein MTA3 (123-132)
  source 1..30: mol_type = other RNA
tacctggacaaggaggataccttcttttat

SEQ ID NO: 53254 - RNA, 27 nt, synthetic construct
  misc_feature 1..27: note = Oxysterol-binding protein-related protein 3 (75-83)
  source 1..27: mol_type = other RNA
tacctggacaagggcatcctcaaatat

SEQ ID NO: 53255 - RNA, 30 nt, synthetic construct
  misc_feature 1..30: note = tRNA (adenine(58)-N(1))-methyltransferase non-catalytic subunit TRM6 (53-62)
  source 1..30: mol_type = other RNA
tacctggacaacgtgatcggccacagctat

SEQ ID NO: 53256 - RNA, 27 nt, synthetic construct
  misc_feature 1..27: note = Nucleolar complex protein 4 homolog (174-182)
  source 1..27: mol_type = other RNA
tacctggactatgatgacaccagatac

SEQ ID NO: 53257 - RNA, 27 nt, synthetic construct
  misc_feature 1..27: note = Signal transducer and activator of transcription 3 (14-22)
  source 1..27: mol_type = other RNA
tacctggagcagctccaccaactttat

SEQ ID NO: 53258 - RNA, 27 nt, synthetic construct
  misc_feature 1..27: note = Dystonin (981-989)
  source 1..27: mol_type = other RNA
tacctgatcaacgagattgacagaata

SEQ ID NO: 53259 - RNA, 27 nt, synthetic construct
  misc_feature 1..27: note = Geminin (150-158)
  source 1..27: mol_type = other RNA
tacatggccgagctgatcgaaagactc

SEQ ID NO: 53260 - RNA, 27 nt, synthetic construct
  misc_feature 1..27: note = Thymidylate synthase (235-243)
  source 1..27: mol_type = other RNA
tacatgatcgcccacattaccggcctg

SEQ ID NO: 53261 - RNA, 33 nt, synthetic construct
  misc_feature 1..33: note = Chromodomain-helicase-DNA-binding protein 1-like (712-722)
  source 1..33: mol_type = other RNA
taccaggaccccgatgccaccagcctgaagtat

SEQ ID NO: 53262 - RNA, 27 nt, synthetic construct
  misc_feature 1..27: note = Up-regulated during skeletal muscle growth protein 5 (10-18)
  source 1..27: mol_type = other RNA
taccagttcaccggcatcaagaaatat

SEQ ID NO: 53263 - RNA, 27 nt, synthetic construct
  misc_feature 1..27: note = Integrator complex subunit 3 (156-164)
  source 1..27: mol_type = other RNA
taccagaagcaacccaaaatcggctat

SEQ ID NO: 53264 - RNA, 27 nt, synthetic construct
  misc_feature 1..27: note = Pre-mRNA-processing-splicing factor 8 (2326-2334)
  source 1..27: mol_type = other RNA
tacagcgccgacagagaggatctgtat

SEQ ID NO: 53265 - RNA, 27 nt, synthetic construct
  misc_feature 1..27: note = Mitogen-activated protein kinase 6 (427-435)
  source 1..27: mol_type = other RNA
tacagcgaccaccatgagaacaagtat

SEQ ID NO: 53266 - RNA, 30 nt, synthetic construct
  misc_feature 1..30: note = RNA binding motif protein, X-linked-like-1 (272-281)
  source 1..30: mol_type = other RNA
tacagcgaccacccctccggcgggtcttat

SEQ ID NO: 53267 - RNA, 30 nt, synthetic construct
  misc_feature 1..30: note = Cyclin-dependent kinases regulatory subunit 2 (8-17)
  source 1..30: mol_type = other RNA
tacagcgacaagtatttcgatgagcactac

SEQ ID NO: 53268 - RNA, 27 nt, synthetic construct
  misc_feature 1..27: note = Serine/threonine-protein kinase PLK1 (417-425)
  source 1..27: mol_type = other RNA
tacagcgacaagtatggcctggggtac

SEQ ID NO: 53269 - RNA, 27 nt, synthetic construct
  misc_feature 1..27: note = Glycoprotein endo-alpha-1,2-mannosidase-like protein (102-110)
  source 1..27: mol_type = other RNA
tacagcgacctgcacgccttctattac

SEQ ID NO: 53270 - RNA, 30 nt, synthetic construct
  misc_feature 1..30: note = Cold-inducible RNA-binding protein (151-160)
  source 1..30: mol_type = other RNA
tacagcgacagatcctctggcgggtcatat

SEQ ID NO: 53271 - RNA, 30 nt, synthetic construct
  misc_feature 1..30: note = DNA mismatch repair protein Msh6 (469-478)
  source 1..30: mol_type = other RNA
tacagcgactccctggtgcagaagggctat

SEQ ID NO: 53272 - RNA, 30 nt, synthetic construct
  misc_feature 1..30: note = Serine hydroxymethyltransferase, cytosolic (73-82)
  source 1..30: mol_type = other RNA
tacagcgagggctatcccgggcagagatac

SEQ ID NO: 53273 - RNA, 33 nt, synthetic construct
  misc_feature 1..33: note = Store-operated calcium entry-associated regulatory factor (204-214)
  source 1..33: mol_type = other RNA
tacagcgagtatccccctttctcccacagatac

SEQ ID NO: 53274 - RNA, 33 nt, synthetic construct
  misc_feature 1..33: note = FACT complex subunit SPT16 (18-28)
  source 1..33: mol_type = other RNA
tacagcaactggagaaagggcgaggacgaatat

SEQ ID NO: 53275 - RNA, 27 nt, synthetic construct
  misc_feature 1..27: note = Histone-lysine N-methyltransferase EZH1 (729-737)
  source 1..27: mol_type = other RNA
tacagccaggccgacgctctgaagtat

SEQ ID NO: 53276 - RNA, 27 nt, synthetic construct
  misc_feature 1..27: note = RNA binding motif protein, X-linked-like-1 (327-335)
  source 1..27: mol_type = other RNA
tacagctcctctagatcagacctgtat

SEQ ID NO: 53277 - RNA, 33 nt, synthetic construct
  misc_feature 1..33: note = Eukaryotic translation initiation factor 3 subunit I (38-48)
  source 1..33: mol_type = other RNA
tacagcgtgaacggcgagagactggggacctat

SEQ ID NO: 53278 - RNA, 33 nt, synthetic construct
  misc_feature 1..33: note = Trafficking protein particle complex subunit 4 (75-85)
  source 1..33: mol_type = other RNA
tacaccgccgacggcaaggaggtgctggaatat

SEQ ID NO: 53279 - RNA, 24 nt, synthetic construct
  misc_feature 1..24: note = DnaJ homolog subfamily C member 3 (284-291)
  source 1..24: mol_type = other RNA
tacaccgacgccacaagcaagtat

SEQ ID NO: 53280 - RNA, 27 nt, synthetic construct
  misc_feature 1..27: note = Meckelin (401-409)
  source 1..27: mol_type = other RNA
tacaccgacgagaaccagcaccaatat

SEQ ID NO: 53281 - RNA, 30 nt, synthetic construct
  misc_feature 1..30: note = Serine/threonine-protein kinase pim-2 (194-203)
  source 1..30: mol_type = other RNA
tacaccgacttcgatggcacaagagtgtat

SEQ ID NO: 53282 - RNA, 30 nt, synthetic construct
  misc_feature 1..30: note = RNA-binding protein 7 (219-228)
  source 1..30: mol_type = other RNA
tacaccgaccacggcagcgatcatcactat

SEQ ID NO: 53283 - RNA, 33 nt, synthetic construct
  misc_feature 1..33: note = Glutathione S-transferase Mu 2 (23-33)
  source 1..33: mol_type = other RNA
tacaccgacagctcctatgaggaaaagaaatac

SEQ ID NO: 53284 - RNA, 30 nt, synthetic construct
  misc_feature 1..30: note = Protein patched homolog 1 (564-573)
  source 1..30: mol_type = other RNA
tacaccgacacacacgataacactagatat

SEQ ID NO: 53285 - RNA, 33 nt, synthetic construct
  misc_feature 1..33: note = ARF GTPase-activating protein GIT2 (492-502)
  source 1..33: mol_type = other RNA
tacaccgacacaagcaaccactcctctctgaag

SEQ ID NO: 53286 - RNA, 24 nt, synthetic construct
  misc_feature 1..24: note = Thioredoxin-related transmembrane protein 2 (199-206)
  source 1..24: mol_type = other RNA
tacaccgacgtgagcacaagatat

SEQ ID NO: 53287 - RNA, 30 nt, synthetic construct
  misc_feature 1..30: note = Zinc finger CCCH domain-containing protein 18 (65-74)
  source 1..30: mol_type = other RNA
tacaccgagacagaaccctatcacaactac

SEQ ID NO: 53288 - RNA, 27 nt, synthetic construct
  misc_feature 1..27: note = Probable ATP-dependent RNA helicase DDX47 (236-244)
  source 1..27: mol_type = other RNA
tactatatcttcattcccagcaagttt

SEQ ID NO: 53289 - RNA, 27 nt, synthetic construct
  misc_feature 1..27: note = ORM1-like protein 2 (59-67)
  source 1..27: mol_type = other RNA
gccacctacgtgttcctgcacacagtc

SEQ ID NO: 53290 - RNA, 27 nt, synthetic construct
  misc_feature 1..27: note = Eukaryotic translation initiation factor 2 subunit 3 (202-210)
  source 1..27: mol_type = other RNA
gagcagtacgaacaaatcctggccttc

SEQ ID NO: 53291 - RNA, 27 nt, synthetic construct
  misc_feature 1..27: note = Tapasin (354-362)
  source 1..27: mol_type = other RNA
caccatagcgacggctccgtgtctctg

SEQ ID NO: 53292 - RNA, 27 nt, synthetic construct
  misc_feature 1..27: note = Cyclin-dependent kinases regulatory subunit 2 (59-67)
  source 1..27: mol_type = other RNA
atccacgagcccgaacctcatattctg

SEQ ID NO: 53293 - RNA, 27 nt, synthetic construct
  misc_feature 1..27: note = Prelamin-A/C (341-349)
  source 1..27: mol_type = other RNA
aaggccggccaggtggtcaccatctgg

SEQ ID NO: 53294 - RNA, 27 nt, synthetic construct
  misc_feature 1..27: note = AP-1 complex subunit beta-1 (249-257)
  source 1..27: mol_type = other RNA
agccacgccaactccgctgtggtcctg

SEQ ID NO: 53295 - RNA, 27 nt, synthetic construct
  misc_feature 1..27: note = Proliferating cell nuclear antigen (152-160)
  source 1..27: mol_type = other RNA
agccacatcggcgacgccgtggtcatt

SEQ ID NO: 53296 - RNA, 27 nt, synthetic construct
  misc_feature 1..27: note = Ubiquitin-60S ribosomal protein L40 (70-78)
  source 1..27: mol_type = other RNA
agcaccctgcacctcgtgcttagactg

SEQ ID NO: 53297 - RNA, 30 nt, synthetic construct
  misc_feature 1..30: note = HLA class I histocompatibility antigen, B-15 alpha chain (162-171)
  source 1..30: mol_type = other RNA
accgccgctcagatcacacaaagaaagtgg

SEQ ID NO: 53298 - RNA, 27 nt, synthetic construct
  misc_feature 1..27: note = Septin-6 (73-81)
  source 1..27: mol_type = other RNA
acccacacacagcccggcgtgcaactg

SEQ ID NO: 53299 - RNA, 27 nt, synthetic construct
  misc_feature 1..27: note = DNA topoisomerase 2-alpha (684-692)
  source 1..27: mol_type = other RNA
tacctgtatggccagaccacaacttac

SEQ ID NO: 53300 - RNA, 30 nt, synthetic construct; identical to SEQ ID NO: 29073
  misc_feature 1..30: note = Coilin (257-266)
  source 1..30: mol_type = other RNA

SEQ ID NO: 53301 - RNA, 27 nt, synthetic construct
  misc_feature 1..27: note = Cancer/testis antigen 1 (155-163)
  source 1..27: mol_type = other RNA
cagctgagcctccttatgtggatcacc

SEQ ID NO: 53302 - RNA, 27 nt, synthetic construct
  misc_feature 1..27: note = ATPase family AAA domain-containing protein 2 (1274-1282)
  source 1..27: mol_type = other RNA
gccagctcctctcagatcattcacata

SEQ ID NO: 53303 - RNA, 27 nt, synthetic construct
  misc_feature 1..27: note = Guanine nucleotide-binding protein G(I)/G(S)/G(T) subunit beta-2 (91-99)
  source 1..27: mol_type = other RNA
cacgccatccccctgagaagctcctgg

SEQ ID NO: 53304 - RNA, 27 nt, synthetic construct
  misc_feature 1..27: note = Acyl-CoA desaturase (115-123)
  source 1..27: mol_type = other RNA
atcaccgccggcgctcacagactgtgg

SEQ ID NO: 53305 - RNA, 27 nt, synthetic construct
  misc_feature 1..27: note = Choline-phosphate cytidylyltransferase A (201-209)
  source 1..27: mol_type = other RNA
agcacctccgacatcattacaagaata

SEQ ID NO: 53306 - RNA, 27 nt, synthetic construct
  misc_feature 1..27: note = Serine/threonine-protein kinase pim-1 (191-199)
  source 1..27: mol_type = other RNA
gccctgctcaaggacaccgtgtacaca

SEQ ID NO: 53307 - RNA, 27 nt, synthetic construct
  misc_feature 1..27: note = Death-associated protein kinase 2 (1-9)
  source 1..27: mol_type = other RNA
atgctgctcgacaagaacatccccatt

SEQ ID NO: 53308 - RNA, 27 nt, synthetic construct
  misc_feature 1..27: note = HLA class I histocompatibility antigen, B-15 alpha chain (163-171)
  source 1..27: mol_type = other RNA
gccgctcagatcacccaaagaaagtgg

SEQ ID NO: 53309 - RNA, 27 nt, synthetic construct
  misc_feature 1..27: note = Transcription termination factor 2 (113-121)
  source 1..27: mol_type = other RNA
gagaccttccaccatagctccaactgg

SEQ ID NO: 53310 - RNA, 27 nt, synthetic construct
  misc_feature 1..27: note = Filamin-A (352-360)
  source 1..27: mol_type = other RNA
ggcacccacaaggtgacagtcctgttc

SEQ ID NO: 53311 - RNA, 27 nt, synthetic construct
  misc_feature 1..27: note = Filamin-A (452-460)
  source 1..27: mol_type = other RNA
ggcgtgcacaccgtccatgttacattc

SEQ ID NO: 53312 - RNA, 57 nt, synthetic construct
  misc_feature 1..57: note = C-1-tetrahydrofolate synthase, cytoplasmic (72-90)
  source 1..57: mol_type = other RNA
cacggcaacagctccatcattgccgaccagatagctctgaagctcgtggggcccgag

SEQ ID NO: 53313 - RNA, 57 nt, synthetic construct
  misc_feature 1..57: note = Major histocompatibility complex class I-related gene protein (3-21)
  source 1..57: mol_type = other RNA
cacagcctgagatacttcaggctcggcgtgtccgaccccatccggggggtccctgag

SEQ ID NO: 53314 - RNA, 30 nt, synthetic construct
  misc_feature 1..30: note = Delta(24)-sterol reductase (310-319)
  source 1..30: mol_type = other RNA
cacaccttccagaacgacatccatgtgtac

SEQ ID NO: 53315 - RNA, 24 nt, synthetic construct
  misc_feature 1..24: note = Protein SET (64-71)
  source 1..24: mol_type = other RNA
atcgccaagattcccaacttctgg

SEQ ID NO: 53316 - RNA, 27 nt, synthetic construct
  misc_feature 1..27: note = Eukaryotic translation initiation factor 3 subunit C-like protein (385-393)
  source 1..27: mol_type = other RNA
atcagcaagcagttccaccatcaactg

SEQ ID NO: 53317 - RNA, 27 nt, synthetic construct
  misc_feature 1..27: note = Constitutive coactivator of PPAR-gamma-like protein 1 (982-990)
  source 1..27: mol_type = other RNA
atcagcacccccgtgattagaacattc

SEQ ID NO: 53318 - RNA, 27 nt, synthetic construct
  misc_feature 1..27: note = T-complex protein 1 subunit gamma (160-168)
  source 1..27: mol_type = other RNA
atcaccacaaaggccattagcagatgg

SEQ ID NO: 53319 - RNA, 27 nt, synthetic construct
  misc_feature 1..27: note = DNA replication complex GINS protein PSF1 (5-13)
  source 1..27: mol_type = other RNA
aaggccatggagctgatcagagaactc

SEQ ID NO: 53320 - RNA, 27 nt, synthetic construct
  misc_feature 1..27: note = 60S ribosomal protein L18a (2-10)
  source 1..27: mol_type = other RNA
aaggccagcggcaccctgagagagtac

SEQ ID NO: 53321 - RNA, 27 nt, synthetic construct
  misc_feature 1..27: note = 14-3-3 protein gamma (152-160)
  source 1..27: mol_type = other RNA
aaggcctacagcgaggctcacgaaatc

SEQ ID NO: 53322 - RNA, 27 nt, synthetic construct
  misc_feature 1..27: note = AP-1 complex subunit mu-2 (348-356)
  source 1..27: mol_type = other RNA
aagagcttccccggcgggaaagagtac

SEQ ID NO: 53323 - RNA, 30 nt, synthetic construct
  misc_feature 1..30: note = Dolichol-phosphate mannosyltransferase subunit 1 (42-51)
  source 1..30: mol_type = other RNA
aagagcttctccgagtctggcatcaactac

SEQ ID NO: 53324 - RNA, 30 nt, synthetic construct
  misc_feature 1..30: note = Heterogeneous nuclear ribonucleoprotein M (203-212)
  source 1..30: mol_type = other RNA
aagagcagaggcatcgggaccgtgacattc

SEQ ID NO: 53325 - RNA, 27 nt, synthetic construct
  misc_feature 1..27: note = Plastin-3 (40-48)
  source 1..27: mol_type = other RNA
aagagctccgacatcgccaaaaccttc

SEQ ID NO: 53326 - RNA, 27 nt, synthetic construct
  misc_feature 1..27: note = THO complex subunit 2 (398-406)
  source 1..27: mol_type = other RNA
aagaccttcccctaccagcacagatat

SEQ ID NO: 53327 - RNA, 27 nt, synthetic construct
  misc_feature 1..27: note = Guanine nucleotide-binding protein subunit beta-2-like 1 (127-135)
  source 1..27: mol_type = other RNA
aagaccatcaaactgtggaacacactc

SEQ ID NO: 53328 - RNA, 27 nt, synthetic construct
  misc_feature 1..27: note = 60S ribosomal protein L4 (163-171)
  source 1..27: mol_type = other RNA
aagaccaaagaggccgtgctgctcctt

SEQ ID NO: 53329 - RNA, 27 nt, synthetic construct
  misc_feature 1..27: note = Ribonucleoside-diphosphate reductase large subunit (52-60)
  source 1..27: mol_type = other RNA
aagaccctggagagaagctacctcctt

SEQ ID NO: 53330 - RNA, 30 nt, synthetic construct
  misc_feature 1..30: note = Hexokinase-2 (777-786)
  source 1..30: mol_type = other RNA
aagaccagaggcatcttcgagacaaaattt

SEQ ID NO: 53331 - RNA, 27 nt, synthetic construct
  misc_feature 1..27: note = Ribosome-binding protein 1 (145-153)
  source 1..27: mol_type = other RNA
aaggtggccaaagtcgagcccgctgtt

SEQ ID NO: 53332 - RNA, 27 nt, synthetic construct
  misc_feature 1..27: note = Proteasome subunit beta type-5 (92-100)
  source 1..27: mol_type = other RNA
aaggtgatcgagattaacccctacctg

SEQ ID NO: 53333 - RNA, 27 nt, synthetic construct
  misc_feature 1..27: note = Anaphase-promoting complex subunit 2 (557-565)
  source 1..27: mol_type = other RNA
aaggtgagagaccagcaactggtctac

SEQ ID NO: 53334 - RNA, 57 nt, synthetic construct
  misc_feature 1..57: note = Protein-tyrosine kinase 2-beta (528-546)
  source 1..57: mol_type = other RNA
caggaggaaaagagcctggaccccatggtgtacatgaacgatacctcccctctcaca

SEQ ID NO: 53335 - RNA, 27 nt, synthetic construct
  misc_feature 1..27: note = Vigilin (54-62)
  source 1..27: mol_type = other RNA
agagccaagcccgagtaccacaaattc

SEQ ID NO: 53336 - RNA, 24 nt, synthetic construct
  misc_feature 1..24: note = NEDD8 ultimate buster 1 (113-120)
  source 1..24: mol_type = other RNA
agaagcaagatcgccgagaccttc

SEQ ID NO: 53337 - RNA, 27 nt, synthetic construct
  misc_feature 1..27: note = Pleiotropic regulator 1 (309-317)
  source 1..27: mol_type = other RNA
agaaccaaggccagcgtgcacacactg

SEQ ID NO: 53338 - RNA, 27 nt, synthetic construct
  misc_feature 1..27: note = Baculoviral IAP repeat-containing protein 6 (597-605)
  source 1..27: mol_type = other RNA
agaaccctgcccgtgctccttctgtac

SEQ ID NO: 53339 - RNA, 27 nt, synthetic construct
  misc_feature 1..27: note = E3 ubiquitin-protein ligase CBL-B (66-74)
  source 1..27: mol_type = other RNA
agaaccgtggagaagacatggaaactg

SEQ ID NO: 53340 - RNA, 30 nt, synthetic construct
  misc_feature 1..30: note = Basigin (137-146)
  source 1..30: mol_type = other RNA
agagtgaggagccacctggccgctctctgg

SEQ ID NO: 53341 - RNA, 36 nt, synthetic construct
  misc_feature 1..36: note = Phosphatidylinositol 4-kinase type 2-beta (74-85)
  source 1..36: mol_type = other RNA
agcagatcctcttcagccgagctggacaggagtcgg

SEQ ID NO: 53342 - RNA, 27 nt, synthetic construct
  misc_feature 1..27: note = Histone-binding protein RBBP7 (376-384)
  source 1..27: mol_type = other RNA
accgccaagatcagcgacttctcctgg

SEQ ID NO: 53343 - RNA, 27 nt, synthetic construct
  misc_feature 1..27: note = Junction plakoglobin (207-215)
  source 1..27: mol_type = other RNA
accacaagcagagtgctgaaggtcctc

SEQ ID NO: 53344 - RNA, 27 nt, synthetic construct
  misc_feature 1..27: note = High mobility group protein B3 (123-131)
  source 1..27: mol_type = other RNA
gtggccaagaaactgggcgagatgtgg

SEQ ID NO: 53345 - RNA, 33 nt, synthetic construct
  misc_feature 1..33: note = Heterogeneous nuclear ribonucleoprotein U-like protein 1 (427-437)
  source 1..33: mol_type = other RNA
gtgggcctgcccgccgctgggaagaccacatgg

SEQ ID NO: 53346 - RNA, 27 nt, synthetic construct
  misc_feature 1..27: note = Phosphoglycerate kinase 1 (328-336)
  source 1..27: mol_type = other RNA
gtgaccagagccaagcagatcgtctgg

SEQ ID NO: 53347 - RNA, 27 nt, synthetic construct
  misc_feature 1..27: note = Transcription elongation factor SPT5 (976-984)
  source 1..27: mol_type = other RNA
gtgaccacagacatccaggtcaaggtt

SEQ ID NO: 53348 - RNA, 57 nt, synthetic construct
  misc_feature 1..57: note = Lymphocyte antigen 75 (1307-1325)
  source 1..57: mol_type = other RNA
tacatggccagctgggtgatgctgggcatcacctatagaaacaagtccctcatgtgg

SEQ ID NO: 53349 - RNA, 27 nt, synthetic construct
  misc_feature 1..27: note = Guanine nucleotide-binding protein subunit beta-2-like 1 (302-310)
  source 1..27: mol_type = other RNA
tacaccgacaacctggtgagagtctgg

SEQ ID NO: 53350 - RNA, 27 nt, synthetic construct
  misc_feature 1..27: note = 40S ribosomal protein S21 (75-83)
  source 1..27: mol_type = other RNA
gccgacggcatcgtgagcaagaacttc

SEQ ID NO: 53351 - RNA, 30 nt, synthetic construct
  misc_feature 1..30: note = Pleiotropic regulator 1 (471-480)
  source 1..30: mol_type = other RNA
gccgaggctgacaagaccatcaaagtgtac

SEQ ID NO: 53352 - RNA, 27 nt, synthetic construct
  misc_feature 1..27: note = Putative RRN3-like protein RRN3P1 (4-12)
  source 1..27: mol_type = other RNA
gccgaggctttcctggaacacctctgg

SEQ ID NO: 53353 - RNA, 33 nt, synthetic construct
  misc_feature 1..33: note = Chloride intracellular channel protein 1 (157-167)
  source 1..33: mol_type = other RNA
gccgaggacgaaggcgtgagccagagaaagttc

SEQ ID NO: 53354 - RNA, 33 nt, synthetic construct
  misc_feature 1..33: note = Heat shock protein HSP 90-beta (346-356)
  source 1..33: mol_type = other RNA
gccgaggacaaggaaaactacaaaaagttctat

SEQ ID NO: 53355 - RNA, 33 nt, synthetic construct
  misc_feature 1..33: note = Transmembrane emp24 domain-containing protein 3 (50-60)
  source 1..33: mol_type = other RNA
gccgaggacctgaacagcagagtgtcctactgg

SEQ ID NO: 53356 - RNA, 33 nt, synthetic construct
  misc_feature 1..33: note = Transmembrane emp24 domain-containing protein 7 (170-180)
  source 1..33: mol_type = other RNA
gccgaggacctgaacaccagagtggcttactgg

SEQ ID NO: 53357 - RNA, 30 nt, synthetic construct
  misc_feature 1..30: note = Plasminogen activator inhibitor 1 RNA-binding protein (236-245)
  source 1..30: mol_type = other RNA
gccgaggacagcgtgatggatcaccatttc

SEQ ID NO: 53358 - RNA, 30 nt, synthetic construct
  misc_feature 1..30: note = Eukaryotic translation elongation factor 1 epsilon-1 (65-74)
  source 1..30: mol_type = other RNA
gccgaggaaaaggctatcgtgcagcaatgg

SEQ ID NO: 53359 - RNA, 27 nt, synthetic construct
  misc_feature 1..27: note = Transcription elongation factor SPT6 (985-993)
  source 1..27: mol_type = other RNA
gccgaggaactggagagacagggctac

SEQ ID NO: 53360 - RNA, 30 nt, synthetic construct
  misc_feature 1..30: note = G patch domain-containing protein 4 (15-24)
  source 1..30: mol_type = other RNA
gccgaggaacagctgctcaagcacggctgg

SEQ ID NO: 53361 - RNA, 30 nt, synthetic construct
  misc_feature 1..30: note = General transcription factor 3C polypeptide 1 (182-191)
  source 1..30: mol_type = other RNA
gccgaggaaagcgacctgtccagacagtac

SEQ ID NO: 53362 - RNA, 30 nt, synthetic construct
  misc_feature 1..30: note = Myosin light polypeptide 6 (10-19)
  source 1..30: mol_type = other RNA
gccgagttcaaggaagcttttcagctgttc

SEQ ID NO: 53363 - RNA, 30 nt, synthetic construct
  misc_feature 1..30: note = Signal peptidase complex subunit 2 (187-196)
  source 1..30: mol_type = other RNA
gccgagttcaccaagagcatcgctaaattt

SEQ ID NO: 53364 - RNA, 27 nt, synthetic construct
  misc_feature 1..27: note = 60S ribosomal protein L8 (33-41)
  source 1..27: mol_type = other RNA
gccgagggcatccacaccgggcagttc

SEQ ID NO: 53365 - RNA, 33 nt, synthetic construct
  misc_feature 1..33: note = Proteasome inhibitor PI31 subunit (114-124)
  source 1..33: mol_type = other RNA
gccgagcacctgggcgacttccatagaacctac

SEQ ID NO: 53366 - RNA, 27 nt, synthetic construct
  misc_feature 1..27: note = Kinesin-like protein KIF20B (872-880)
  source 1..27: mol_type = other RNA
gccgagatcgaagacattagagtgctg

SEQ ID NO: 53367 - RNA, 30 nt, synthetic construct
  misc_feature 1..30: note = rRNA-processing protein FCF1 homolog (108-117)
  source 1..30: mol_type = other RNA
gccgagatcgaaaagctgggccagaaatac

SEQ ID NO: 53368 - RNA, 36 nt, synthetic construct
  misc_feature 1..36: note = Cyclin-dependent kinase 6 (17-28)
  source 1..36: mol_type = other RNA
gccgagatcggcgaaggggcttacggaaaggtgttc

SEQ ID NO: 53369 - RNA, 33 nt, synthetic construct
  misc_feature 1..33: note = Delta(24)-sterol reductase (227-237)
  source 1..33: mol_type = other RNA
gccgagatcagaattatacccgctaagaaatac

SEQ ID NO: 53370 - RNA, 33 nt, synthetic construct
  misc_feature 1..33: note = Filamin A (105-115)
  source 1..33: mol_type = other RNA
gccgagatcgtggaaggcgagaaccacacctac

SEQ ID NO: 53371 - RNA, 30 nt, synthetic construct
  misc_feature 1..30: note = Replication protein A 32 kDa subunit (83-92)
  source 1..30: mol_type = other RNA
gccgagaaggctcccaccaacatcgtgtac

SEQ ID NO: 53372 - RNA, 30 nt, synthetic construct
  misc_feature 1..30: note = ATP-dependent RNA helicase DHX8 (57-66)
  source 1..30: mol_type = other RNA
gccgagaagaacaccacattcgacactttt

SEQ ID NO: 53373 - RNA, 33 nt, synthetic construct
  misc_feature 1..33: note = Cysteine andine-rich protein 1 (129-139)
  source 1..33: mol_type = other RNA
gccgagaaggtgatcggcgctgggaaaagctgg

SEQ ID NO: 53374 - RNA, 30 nt, synthetic construct
  misc_feature 1..30: note = ER membrane protein complex subunit 2 (162-171)
  source 1..30: mol_type = other RNA
gccgagctgtacatcaacgaacacgactat

SEQ ID NO: 53375 - RNA, 30 nt, synthetic construct
  misc_feature 1..30: note = Catenin beta-1 (478-487)
  source 1..30: mol_type = other RNA
gccgagatggctcagaacgcagtgagactg

SEQ ID NO: 53376 - RNA, 27 nt, synthetic construct
  misc_feature 1..27: note = Cleavage stimulation factor subunit 1 (217-225)
  source 1..27: mol_type = other RNA
gccgagatgctgagaagcatctccttc

SEQ ID NO: 53377 - RNA, 27 nt, synthetic construct
  misc_feature 1..27: note = DNA-dependent protein kinase catalytic subunit (193-201)
  source 1..27: mol_type = other RNA
gccgagaacctgttcagagcttttctc

SEQ ID NO: 53378 - RNA, 33 nt, synthetic construct
  misc_feature 1..33: note = Proteasome subunit beta type-1 (211-221)
  source 1..33: mol_type = other RNA
gccgagagagacgtgtacaccggcgatgctctg

SEQ ID NO: 53379 - RNA, 27 nt, synthetic construct
  misc_feature 1..27: note = Exportin-2 (513-521)
  source 1..27: mol_type = other RNA
gccgagagcatcgtggtccacacctac

SEQ ID NO: 53380 - RNA, 27 nt, synthetic construct
  misc_feature 1..27: note = Full=Zinc finger CCCH domain-containing protein 16 (227-235)
  source 1..27: mol_type = other RNA
gccgaggtggctgcagaaaagagcttc

SEQ ID NO: 53381 - RNA, 33 nt, synthetic construct
  misc_feature 1..33: note = Targeting protein for Xklp2 (638-648)
  source 1..33: mol_type = other RNA
gccgaggtggaagctcagaaggcacaacagctg

SEQ ID NO: 53382 - RNA, 27 nt, synthetic construct
  misc_feature 1..27: note = Transmembrane emp24 domain-containing protein 3 (92-100)
  source 1..27: mol_type = other RNA
gccgaggtgaagggcgtctaccagttc

SEQ ID NO: 53383 - RNA, 30 nt, synthetic construct
  misc_feature 1..30: note = DNA-dependent protein kinase catalytic subunit (2320-2329)
  source 1..30: mol_type = other RNA
gccgaggtgctgggcctcatccttagatac

SEQ ID NO: 53384 - RNA, 30 nt, synthetic construct
  misc_feature 1..30: note = Spectrin beta chain, non-erythrocytic 1 (1304-1313)
  source 1..30: mol_type = other RNA
gacgaggccagaaacctgcacagcaagtgg

SEQ ID NO: 53385 - RNA, 27 nt, synthetic construct
  misc_feature 1..27: note = Protein KIAA0100 (696-704)
  source 1..27: mol_type = other RNA
gacgaggccgtgggcgtccagaagtgg

SEQ ID NO: 53386 - RNA, 30 nt, synthetic construct
  misc_feature 1..30: note = Transcription elongation factor SPT6 (573-582)
  source 1..30: mol_type = other RNA
gacgagttcagccaccaggtgcaagaatgg

SEQ ID NO: 53387 - RNA, 27 nt, synthetic construct
  misc_feature 1..27: note = Heat shock protein HSP 90-alpha (288-296)
  source 1..27: mol_type = other RNA
gacgagatggtgagcctgaaggattac

SEQ ID NO: 53388 - RNA, 30 nt, synthetic construct
  misc_feature 1..30: note = Cyclin-dependent kinase inhibitor 3 (22-31)
  source 1..30: mol_type = other RNA
gacgagcagacccccatccacattagctgg

SEQ ID NO: 53389 - RNA, 27 nt, synthetic construct
  misc_feature 1..27: note = Spectrin beta chain, non-erythrocytic 1 (741-749)
  source 1..27: mol_type = other RNA
gaggaagccagcctgctccaccagttc

SEQ ID NO: 53390 - RNA, 33 nt, synthetic construct
  misc_feature 1..33: note = Eukaryotic translation initiation factor 3 subunit M (11-21)
  source 1..33: mol_type = other RNA
gaggaagaccaggccgctgagctgagagcatac

SEQ ID NO: 53391 - RNA, 27 nt, synthetic construct
  misc_feature 1..27: note = Protein transport protein Sec23B (521-529)
  source 1..27: mol_type = other RNA
gaggaaggccccgacgtgctgagatgg

SEQ ID NO: 53392 - RNA, 33 nt, synthetic construct
  misc_feature 1..33: note = 40S ribosomal protein S17 (36-46)
  source 1..33: mol_type = other RNA
gaggaaatcgccattatacccagcaagaaactg

SEQ ID NO: 53393 - RNA, 30 nt, synthetic construct
  misc_feature 1..30: note = Sigma non-opioid intracellular receptor 1 (40-49)
  source 1..30: mol_type = other RNA
gaggaaatcgcccagctggctagacaatac

SEQ ID NO: 53394 - RNA, 33 nt, synthetic construct
  misc_feature 1..33: note = DNA repair protein RAD50 (1002-1012)
  source 1..33: mol_type = other RNA
gaggaaatcaacaagattataagagacctgtgg

SEQ ID NO: 53395 - RNA, 27 nt, synthetic construct
  misc_feature 1..27: note = Targeting protein for Xklp2 (351-359)
  source 1..27: mol_type = other RNA
gaggaactggagaagctccagcaatac

SEQ ID NO: 53396 - RNA, 27 nt, synthetic construct
  misc_feature 1..27: note = 26S proteasome non-ATPase regulatory subunit 13 (26-34)
  source 1..27: mol_type = other RNA
gaggaactgtacaccaagaaactctgg

SEQ ID NO: 53397 - RNA, 36 nt, synthetic construct
  misc_feature 1..36: note = Nuclear pore complex protein Nup153 (1104-1115)
  source 1..36: mol_type = other RNA
gaggaaatgcccgccaccaagggcgggttcagcttt

SEQ ID NO: 53398 - RNA, 33 nt, synthetic construct
  misc_feature 1..33: note = Eukaryotic initiation factor 4A-I (396-406)
  source 1..33: mol_type = other RNA
gaggaaatgcccctgaacgtggccgacctcatc

SEQ ID NO: 53399 - RNA, 27 nt, synthetic construct
  misc_feature 1..27: note = General transcription factor 3C polypeptide 1 (183-191)
  source 1..27: mol_type = other RNA
gaggaaagcgacctgtccagacagtac

SEQ ID NO: 53400 - RNA, 30 nt, synthetic construct
  misc_feature 1..30: note = Protein SCO1 homolog, mitochondrial (121-130)
  source 1..30: mol_type = other RNA
gaggaagtggaccaggtcgccagagcttac

SEQ ID NO: 53401 - RNA, 30 nt, synthetic construct
  misc_feature 1..30: note = F-box/LRR-repeat protein 3 (394-403)
  source 1..30: mol_type = other RNA
gaggaagtgctgatccccgaccagaagtac

SEQ ID NO: 53402 - RNA, 27 nt, synthetic construct
  misc_feature 1..27: note = von Willebrand factor (1339-1347)
  source 1..27: mol_type = other RNA
gagctgagaaggatcgccagccaggtg

SEQ ID NO: 53403 - RNA, 15 nt, synthetic construct
  misc_feature 1..15: note = DNA nucleotidylexotransferase (64-68)
  source 1..15: mol_type = other RNA
ttcagaaggggcaag

SEQ ID NO: 53404 - RNA, 27 nt, synthetic construct
  misc_feature 1..27: note = Spectrin beta chain, non-erythrocytic 1 (1059-1067)
  source 1..27: mol_type = other RNA
ggcgaggccagcaagctgcagcaattc

SEQ ID NO: 53405 - RNA, 30 nt, synthetic construct
  misc_feature 1..30: note = Endothelial differentiation-related factor 1 (35-44)
  source 1..30: mol_type = other RNA
ggcgaggacgtggaaaccagcaagaaatgg

SEQ ID NO: 53406 - RNA, 27 nt, synthetic construct
  misc_feature 1..27: note = Serine/arginine-rich splicing factor 9 (175-183)
  source 1..27: mol_type = other RNA
ggcgagaccagctacatcagagtgtat

SEQ ID NO: 53407 - RNA, 33 nt, synthetic construct
  misc_feature 1..33: note = Peroxiredoxin-5, mitochondrial (36-46)
  source 1..33: mol_type = other RNA
ggcgagtgggccagcgggggagtgagatccttc

SEQ ID NO: 53408 - RNA, 27 nt, synthetic construct
  misc_feature 1..27: note = Probable E3 ubiquitin-protein ligase makorin-2 (170-178)
  source 1..27: mol_type = other RNA
cacgagatggaaaaggccttcgctttt

SEQ ID NO: 53409 - RNA, 30 nt, synthetic construct
  misc_feature 1..30: note = Antigen KI-67 (54-63)
  source 1..30: mol_type = other RNA
cacgagcaggaagccatcctgcataacttc

SEQ ID NO: 53410 - RNA, 30 nt, synthetic construct
  misc_feature 1..30: note = Mediator of RNA polymerase II transcription subunit 17 (187-196)
  source 1..30: mol_type = other RNA
atcgaggacccccagattcaagcccactgg

SEQ ID NO: 53411 - RNA, 27 nt, synthetic construct
  misc_feature 1..27: note = Actin, aortic smooth muscle (73-81)
  source 1..27: mol_type = other RNA
atcgagcacggcattataaccaactgg

SEQ ID NO: 53412 - RNA, 33 nt, synthetic construct
  misc_feature 1..33: note = DNA topoisomerase 2-alpha (921-931)
  source 1..33: mol_type = other RNA
atcgagattagcgaactgcccgtgagaacctgg

SEQ ID NO: 53413 - RNA, 27 nt, synthetic construct
  misc_feature 1..27: note = Non-canonical poly(A) RNA polymerase PAPD5 (227-235)
  source 1..27: mol_type = other RNA
atcgagagcgtgattaaggaactgtgg

SEQ ID NO: 53414 - RNA, 45 nt, synthetic construct
  misc_feature 1..45: note = Interleukin-9 receptor (168-182)
  source 1..45: mol_type = other RNA
atcagccccgccctggagcctatgaccacactcctttcctacgaa

SEQ ID NO: 53415 - RNA, 30 nt, synthetic construct
  misc_feature 1..30: note = T-complex protein 1 subunit gamma (6-15)
  source 1..30: mol_type = other RNA
ctggagatcaagaaaattggcgacgaatac

SEQ ID NO: 53416 - RNA, 33 nt, synthetic construct
  misc_feature 1..33: note = Trafficking protein particle complex subunit 5 (105-115)
  source 1..33: mol_type = other RNA
ctggagcaggccaacgacgatgctagaaccttc

SEQ ID NO: 53417 - RNA, 30 nt, synthetic construct
  misc_feature 1..30: note = Eukaryotic translation initiation factor 3 subunit D (314-323)
  source 1..30: mol_type = other RNA
atggaggccacctacatcaaccacaatttc

SEQ ID NO: 53418 - RNA, 30 nt, synthetic construct
  misc_feature 1..30: note = Magnesium transporter protein 1 (242-251)
  source 1..30: mol_type = other RNA
atggagttcctgtttaacaagaccggctgg

SEQ ID NO: 53419 - RNA, 27 nt, synthetic construct
  misc_feature 1..27: note = Transforming acidic coiled-coil-containing protein 3 (718-726)
  source 1..27: mol_type = other RNA
atggagaagagcttctccgacctgttt

SEQ ID NO: 53420 - RNA, 30 nt, synthetic construct
  misc_feature 1..30: note = Membrane-associated tyrosine- and threonine-specific cdc2-inhibitory kinase (234-243)
  source 1..30: mol_type = other RNA
atggagctgccccacggcggggaaggatgg

SEQ ID NO: 53421 - RNA, 27 nt, synthetic construct
  misc_feature 1..27: note = AAC83183.1 (92-100)
  source 1..27: mol_type = other RNA
atggagagcctgaccaagcacctcttc

SEQ ID NO: 53422 - RNA, 30 nt, synthetic construct
  misc_feature 1..30: note = 60S ribosomal protein L4 (212-221)
  source 1..30: mol_type = other RNA
aacgaggacaatggcatcattaaggccttc

SEQ ID NO: 53423 - RNA, 33 nt, synthetic construct
  misc_feature 1..33: note = Protein transport protein Sec23B (420-430)
  source 1..33: mol_type = other RNA
aacgagctgggcgtggggggaaccagccagtgg

SEQ ID NO: 53424 - RNA, 30 nt, synthetic construct
  misc_feature 1..30: note = Long-chain-fatty-acid-CoA ligase 4 (65-74)
  source 1..30: mol_type = other RNA
aacgagatgcagcccaatggcaaggtgttc

SEQ ID NO: 53425 - RNA, 30 nt, synthetic construct
  misc_feature 1..30: note = Mortality factor 4-like protein 1 (215-224)
  source 1..30: mol_type = other RNA
aacgaggtggtcgccggcatcaaggaatac

SEQ ID NO: 53426 - RNA, 24 nt, synthetic construct
  misc_feature 1..24: note = Ig kappa chain C region (1-8)
  source 1..24: mol_type = other RNA
aacatcgtgatgacccagagcccc

SEQ ID NO: 53427 - RNA, 27 nt, synthetic construct
  misc_feature 1..27: note = Multifunctional protein ADE2 (69-77)
  source 1..27: mol_type = other RNA
caggaggccggcatcaagaccgctttc

SEQ ID NO: 53428 - RNA, 33 nt, synthetic construct; identical to SEQ ID NO: 29201
  misc_feature 1..33: note = Guanine nucleotide-binding protein G(s) subunit alpha isoforms short (257-267)
  source 1..33: mol_type = other RNA

SEQ ID NO: 53429 - RNA, 33 nt, synthetic construct
  misc_feature 1..33: note = Spectrin beta chain, non-erythrocytic 1 (1864-1874)
  source 1..33: mol_type = other RNA
caggaggacgccgctagactgcaagcagcctac

SEQ ID NO: 53430 - RNA, 30 nt, synthetic construct
  misc_feature 1..30: note = Annexin A2 (138-147)
  source 1..30: mol_type = other RNA
caggagctgcaagaaatcaacagagtgtac

SEQ ID NO: 53431 - RNA, 30 nt, synthetic construct
  misc_feature 1..30: note = TPT1-like protein (84-93)
  source 1..30: mol_type = other RNA
caggagaccagcttcacaaaggaagcctac

SEQ ID NO: 53432 - RNA, 33 nt, synthetic construct
  misc_feature 1..33: note = AP-5 complex subunit zeta-1 (14-24)
  source 1..33: mol_type = other RNA
agagagatccaggacgaagagctgaagaaattc

SEQ ID NO: 53433 - RNA, 33 nt, synthetic construct
  misc_feature 1..33: note = Eukaryotic translation initiation factor 3 subunit C-like protein (201-211)
  source 1..33: mol_type = other RNA
agcgaggccccctccggcgaatctagaaagttc

SEQ ID NO: 53434 - RNA, 27 nt, synthetic construct
  misc_feature 1..27: note = Histone H2B type 1-A (77-85)
  source 1..27: mol_type = other RNA
agcgaggcctccagactggctcactac

SEQ ID NO: 53435 - RNA, 36 nt, synthetic construct
  misc_feature 1..36: note = Protein transport protein Sec31A (233-244)
  source 1..36: mol_type = other RNA
agcgaggacgatagactgcccgtgatccagatgtgg

SEQ ID NO: 53436 - RNA, 27 nt, synthetic construct
  misc_feature 1..27: note = DnaJ homolog subfamily C member 7 (393-401)
  source 1..27: mol_type = other RNA
agcgaggacgaaatcaagaaagcctac

SEQ ID NO: 53437 - RNA, 27 nt, synthetic construct
  misc_feature 1..27: note = WD repeat-containing protein 82 (86-94)
  source 1..27: mol_type = other RNA
agcgaggacggcaagatccacgtgtgg

SEQ ID NO: 53438 - RNA, 30 nt, synthetic construct
  misc_feature 1..30: note = Poly (ADP-ribose) polymerase 1 (808-817)
  source 1..30: mol_type = other RNA
agcgaggaagccgagatcattagaaagtac

SEQ ID NO: 53439 - RNA, 27 nt, synthetic construct
  misc_feature 1..27: note = Polypyrimidine tract-binding protein 1 (485-493)
  source 1..27: mol_type = other RNA
agcgaggaagacctgaaggtgctcttc

SEQ ID NO: 53440 - RNA, 36 nt, synthetic construct
  misc_feature 1..36: note = Eukaryotic translation initiation factor 3 subunit M (10-21)
  source 1..36: mol_type = other RNA
agcgaggaagaccaggccgctgagctgagagcatac

SEQ ID NO: 53441 - RNA, 27 nt, synthetic construct
  misc_feature 1..27: note = General transcription factor 3C polypeptide 1 (415-423)
  source 1..27: mol_type = other RNA
agcgaggaaggcctgctcagactttac

SEQ ID NO: 53442 - RNA, 30 nt, synthetic construct; identical to SEQ ID NO: 29215
  misc_feature 1..30: note = Disco-interacting protein 2 homolog A (29-38)
  source 1..30: mol_type = other RNA

SEQ ID NO: 53443 - RNA, 27 nt, synthetic construct
  misc_feature 1..27: note = DNA replication licensing factor MCM5 (690-698)
  source 1..27: mol_type = other RNA
agcgagcactccatcattaaggacttc

SEQ ID NO: 53444 - RNA, 27 nt, synthetic construct
  misc_feature 1..27: note = Disks large homolog 1 (143-151)
  source 1..27: mol_type = other RNA
agcgagatcgaaaacgtgcacggcttc

SEQ ID NO: 53445 - RNA, 33 nt, synthetic construct
  misc_feature 1..33: note = Protein SET (61-71)
  source 1..33: mol_type = other RNA
agcgagctgatcgccaagattcccaacttctgg

SEQ ID NO: 53446 - RNA, 27 nt, synthetic construct
  misc_feature 1..27: note = Uncharacterized protein C14orf119 (121-129)
  source 1..27: mol_type = other RNA
agcgagcccgacttcgtggccaagttt

SEQ ID NO: 53447 - RNA, 27 nt, synthetic construct
  misc_feature 1..27: note = Ubiquitin-conjugating enzyme E2 J1 (204-212)
  source 1..27: mol_type = other RNA
agcgagtccgacctgaaccactctttc

SEQ ID NO: 53448 - RNA, 27 nt, synthetic construct
  misc_feature 1..27: note = Nucleolar transcription factor 1 (275-283)
  source 1..27: mol_type = other RNA
agcgagtccgaactgaccagactcctt

SEQ ID NO: 53449 - RNA, 27 nt, synthetic construct
  misc_feature 1..27: note = Citrate synthase, mitochondrial (120-128)
  source 1..27: mol_type = other RNA
agcgagtccaacttcgccagagcttac

SEQ ID NO: 53450 - RNA, 27 nt, synthetic construct
  misc_feature 1..27: note = GMP reductase 2 (46-54)
  source 1..27: mol_type = other RNA
agcgaggtggacctgaccagatccttc

SEQ ID NO: 53451 - RNA, 39 nt, synthetic construct
  misc_feature 1..39: note = Single Ig IL-1-related receptor (383-395)
  source 1..39: mol_type = other RNA
agcgaggtggacgtctccgatctgggctctagaaactac

SEQ ID NO: 53452 - RNA, 27 nt, synthetic construct
  misc_feature 1..27: note = Sulfhydryl oxidase 1 (223-231)
  source 1..27: mol_type = other RNA
accgaggccaacgtggtcagaaagttc

SEQ ID NO: 53453 - RNA, 30 nt, synthetic construct
  misc_feature 1..30: note = Cyclin-D1-binding protein 1 (44-53)
  source 1..30: mol_type = other RNA
accgaggaattcaacagagagatgttttgg

SEQ ID NO: 53454 - RNA, 30 nt, synthetic construct
  misc_feature 1..30: note = Staphylococcal nuclease domain-containing protein 1 (663-672)
  source 1..30: mol_type = other RNA
accgagatcacagacgatctgcacttctac

SEQ ID NO: 53455 - RNA, 27 nt, synthetic construct
  misc_feature 1..27: note = Eukaryotic translation initiation factor 3 subunit M (142-150)
  source 1..27: mol_type = other RNA
accgagctggaccaggtgagaaagtgg

SEQ ID NO: 53456 - RNA, 30 nt, synthetic construct
  misc_feature 1..30: note = Serine/arginine-rich splicing factor 3 (24-33)
  source 1..30: mol_type = other RNA
accgagctggaaagagccttcggctactat

SEQ ID NO: 53457 - RNA, 33 nt, synthetic construct
  misc_feature 1..33: note = HLA class II histocompatibility antigen, DRB1-15 beta chain (46-56)
  source 1..33: mol_type = other RNA
accgagctgggcagacccgacgccgaatactgg

SEQ ID NO: 53458 - RNA, 27 nt, synthetic construct
  misc_feature 1..27: note = Pre-mRNA-splicing factor ISY1 homolog (37-45)
  source 1..27: mol_type = other RNA
accgagctgcccaaggccgaaaaatgg

SEQ ID NO: 53459 - RNA, 33 nt, synthetic construct
  misc_feature 1..33: note = Coatomer subunit delta (46-56)
  source 1..33: mol_type = other RNA
accgagatggacagccacgaagagaaggtgttc

SEQ ID NO: 53460 - RNA, 27 nt, synthetic construct
  misc_feature 1..27: note = CUGBP Elav-like family member 1 (120-128)
  source 1..27: mol_type = other RNA
accgagaacgacatcagagtgatgttc

SEQ ID NO: 53461 - RNA, 27 nt, synthetic construct
  misc_feature 1..27: note = Gamma-secretase subunit PEN-2 (48-56)
  source 1..27: mol_type = other RNA
accgagcagagccaaatcaagggctac

SEQ ID NO: 53462 - RNA, 33 nt, synthetic construct
  misc_feature 1..33: note = Gamma-secretase subunit PEN-2 (48-58)
  source 1..33: mol_type = other RNA
accgagcagagccaaatcaagggctacgtgtgg

SEQ ID NO: 53463 - RNA, 27 nt, synthetic construct
  misc_feature 1..27: note = Tyrosine-protein kinase BAZ1B (274-282)
  source 1..27: mol_type = other RNA
gtggaggacgaactggtcaagaaatac

SEQ ID NO: 53464 - RNA, 27 nt, synthetic construct
  misc_feature 1..27: note = Vigilin (405-413)
  source 1..27: mol_type = other RNA
gtggagatcaacattgaccacaagttc

SEQ ID NO: 53465 - RNA, 33 nt, synthetic construct
  misc_feature 1..33: note = Influenza virus NS1A-binding protein (576-586)
  source 1..33: mol_type = other RNA
gtggagatgtacgaccccaccagaaacgaatgg

SEQ ID NO: 53466 - RNA, 30 nt, synthetic construct
  misc_feature 1..30: note = Target of rapamycin complex subunit LST8 (298-307)
  source 1..30: mol_type = other RNA
gtggagaccggcgaaatcaagagagagtac

SEQ ID NO: 53467 - RNA, 30 nt, synthetic construct
  misc_feature 1..30: note = Methionine aminopeptidase 2 (311-320)
  source 1..30: mol_type = other RNA
tacgaggtggaaatcgacggcaagacctat

SEQ ID NO: 53468 - RNA, 42 nt, synthetic construct
  misc_feature 1..42: note = Gamma-secretase C-terminal fragment 59 (565-578)
  source 1..42: mol_type = other RNA
ttcagacacgacagcggctacgaggtgcatcaccagaagctg

SEQ ID NO: 53469 - RNA, 27 nt, synthetic construct
  misc_feature 1..27: note = Disintegrin and metalloproteinase domain-containing protein 10 (19-27)
  source 1..27: mol_type = other RNA
ggccagtacgggaaccccctgaataag

SEQ ID NO: 53470 - RNA, 24 nt, synthetic construct
  misc_feature 1..24: note = Beta-2-microglobulin (21-28)
  source 1..24: mol_type = other RNA
atccagagaacccccaagattcaa

SEQ ID NO: 53471 - RNA, 30 nt, synthetic construct
  misc_feature 1..30: note = Beta-2-microglobulin (21-30)
  source 1..30: mol_type = other RNA
atccagagaacccccaagattcaagtgtac

SEQ ID NO: 53472 - RNA, 27 nt, synthetic construct
  misc_feature 1..27: note = Splicing factor 3B subunit 2 (36-44)
  source 1..27: mol_type = other RNA
agacagaccggcatcgtgctgaacagg

SEQ ID NO: 53473 - RNA, 27 nt, synthetic construct
  misc_feature 1..27: note = Importin subunit alpha-1 (377-385)
  source 1..27: mol_type = other RNA
ggcctggtgcccttcctcgtcagcgtt

SEQ ID NO: 53474 - RNA, 27 nt, synthetic construct
  misc_feature 1..27: note = Neutral alpha-glucosidase AB (3-11)
  source 1..27: mol_type = other RNA
gccgtggctgcagtcgccgcgagaagg

SEQ ID NO: 53475 - RNA, 30 nt, synthetic construct
  misc_feature 1..30: note = 60S ribosomal protein L15 (131-140)
  source 1..30: mol_type = other RNA
gaggtgatcctgattgaccccttccacaag

SEQ ID NO: 53476 - RNA, 30 nt, synthetic construct
  misc_feature 1..30: note = Cullin-4A (5-14)
  source 1..30: mol_type = other RNA
gcccccagaaagggcagcttctccgctctg

SEQ ID NO: 53477 - RNA, 30 nt, synthetic construct
  misc_feature 1..30: note = Fatty acid synthase (1169-1178)
  source 1..30: mol_type = other RNA
atccccagagaccctagccagcaagagctg

SEQ ID NO: 53478 - RNA, 30 nt, synthetic construct
  misc_feature 1..30: note = Carbonic anhydrase 9 (397-406)
  source 1..30: mol_type = other RNA
agccccagagccgctgagcctgtgcagctg

SEQ ID NO: 53479 - RNA, 27 nt, synthetic construct
  misc_feature 1..27: note = BTB/POZ domain-containing adapter for CUL3-mediated RhoA degradation protein 3 (28-36)
  source 1..27: mol_type = other RNA
agcccctcctctaagtacgtgaaactg

SEQ ID NO: 53480 - RNA, 27 nt, synthetic construct
  misc_feature 1..27: note = Melanoma-associated antigen 10 (254-262)
  source 1..27: mol_type = other RNA
ggcctgtacgacgggatggagcacctc

SEQ ID NO: 53481 - RNA, 27 nt, synthetic construct
  misc_feature 1..27: note = 26S proteasome non-ATPase regulatory subunit 6 (103-111)
  source 1..27: mol_type = other RNA
gccatgatggctaaggcagagtacctg

SEQ ID NO: 53482 - RNA, 27 nt, synthetic construct
  misc_feature 1..27: note = 40S ribosomal protein S26 (107-115)
  source 1..27: mol_type = other RNA
gcccccagacctccaccgaagcccatg

SEQ ID NO: 53483 - RNA, 27 nt, synthetic construct
  misc_feature 1..27: note = Elongation factor 2 (286-294)
  source 1..27: mol_type = other RNA
gcctacctgcccgtgaacgagagcttc

SEQ ID NO: 53484 - RNA, 27 nt, synthetic construct
  misc_feature 1..27: note = Long-chain-fatty-acid-CoA ligase 3 (326-334)
  source 1..27: mol_type = other RNA
ggctacctgcccctcgcccacgtgctt

SEQ ID NO: 53485 - RNA, 27 nt, synthetic construct
  misc_feature 1..27: note = m7GpppX diphosphatase (268-276)
  source 1..27: mol_type = other RNA
cactacctgcccagctattaccatctc

SEQ ID NO: 53486 - RNA, 27 nt, synthetic construct
  misc_feature 1..27: note = N6-adenosine-methyltransferase subunit METTL14 (99-107)
  source 1..27: mol_type = other RNA
atctacaaggacagctccaccttcctg

SEQ ID NO: 53487 - RNA, 27 nt, synthetic construct
  misc_feature 1..27: note = Ubiquitin-conjugating enzyme E2 H (17-25)
  source 1..27: mol_type = other RNA
aagctgatcgagagcaaacacgaagtg

SEQ ID NO: 53488 - RNA, 27 nt, synthetic construct
  misc_feature 1..27: note = Adenylosuccinate synthetase isozyme 2 (347-355)
  source 1..27: mol_type = other RNA
aagtacgcccacatgatcaacggcttc

SEQ ID NO: 53489 - RNA, 27 nt, synthetic construct
  misc_feature 1..27: note = Serine/threonine-protein phosphatase 2A 56 kDa regulatory subunit epsilon isoform (174-182)
  source 1..27: mol_type = other RNA
aagtacatcgaccagaaattcgtgctg

SEQ ID NO: 53490 - RNA, 27 nt, synthetic construct
  misc_feature 1..27: note = Actin-binding protein IPP (238-246)
  source 1..27: mol_type = other RNA
aagtacatcgagggcgtgagcgacttc

SEQ ID NO: 53491 - RNA, 27 nt, synthetic construct
  misc_feature 1..27: note = Mitogen-activated protein kinase 4 (138-146)
  source 1..27: mol_type = other RNA
aagtacatccacagcgccaacgtgctg

SEQ ID NO: 53492 - RNA, 27 nt, synthetic construct
  misc_feature 1..27: note = Tyrosine-protein phosphatase non-receptor type 23 (70-78)
  source 1..27: mol_type = other RNA
aagtacctgggccagctccactatctt

SEQ ID NO: 53493 - RNA, 30 nt, synthetic construct
  misc_feature 1..30: note = Mitochondrial carrier homolog 1 (280-289)
  source 1..30: mol_type = other RNA
aagtacctgagcgtgcagggccaactcttc

SEQ ID NO: 53494 - RNA, 27 nt, synthetic construct
  misc_feature 1..27: note = Caprin-1 (98-106)
  source 1..27: mol_type = other RNA
aagtaccaggaggtgaccaacaatctg

SEQ ID NO: 53495 - RNA, 27 nt, synthetic construct
  misc_feature 1..27: note = Mitochondrial carrier homolog 1 (168-176)
  source 1..27: mol_type = other RNA
aagtacagcggcgtgctgtcctctatc

SEQ ID NO: 53496 - RNA, 27 nt, synthetic construct
  misc_feature 1..27: note = Microspherule protein 1 (251-259)
  source 1..27: mol_type = other RNA
ctgtacgaccccgtgatcagcaagctc

SEQ ID NO: 53497 - RNA, 27 nt, synthetic construct
  misc_feature 1..27: note = Splicing factor 3B subunit 3 (988-996)
  source 1..27: mol_type = other RNA
aactacatcagcggcattcagaccata

SEQ ID NO: 53498 - RNA, 27 nt, synthetic construct
  misc_feature 1..27: note = Vimentin (357-365)
  source 1..27: mol_type = other RNA
aactaccaggacaccatcggcagactg

SEQ ID NO: 53499 - RNA, 27 nt, synthetic construct
  misc_feature 1..27: note = Stomatin-like protein 2, mitochondrial (236-244)
  source 1..27: mol_type = other RNA
cagtacgtgagcgccttctccaagctg

SEQ ID NO: 53500 - RNA, 30 nt, synthetic construct
  misc_feature 1..30: note = Actin, cytoplasmic 2 (85-94)
  source 1..30: mol_type = other RNA
agagtggcccccgaggaacaccctgtcctg

SEQ ID NO: 53501 - RNA, 27 nt, synthetic construct
  misc_feature 1..27: note = Casein kinase I isoform delta (178-186)
  source 1..27: mol_type = other RNA
agatacgccagcatcaacacccacctg

SEQ ID NO: 53502 - RNA, 27 nt, synthetic construct
  misc_feature 1..27: note Dolichyl-diphosphooligosaccharide-proteinosyltransferase subunit 2 (218-226)
  source 1..27: mol_type = other RNA
agatacatcgccaacaccgtggagctg

SEQ ID NO: 53503 - RNA, 27 nt, synthetic construct
  misc_feature 1..27: note = Signal transducer and activator of transcription 3 (13-21)
  source 1..27: mol_type = other RNA
agatacctggagcagctccaccaactt

SEQ ID NO: 53504 - RNA, 27 nt, synthetic construct
  misc_feature 1..27: note = Protein kish-A (2-10)
  source 1..27: mol_type = other RNA
agcgccatcttcaactttcagtccctg

SEQ ID NO: 53505 - RNA, 27 nt, synthetic construct
  misc_feature 1..27: note = Seipin (55-63)
  source 1..27: mol_type = other RNA
agctacatgcccaccgtgtcccacctg

SEQ ID NO: 53506 - RNA, 27 nt, synthetic construct
  misc_feature 1..27: note CMP-N-acetylneuraminate-beta-galactosamide-alpha-2,3-sialyl transf erase 2 (239-247)
  source 1..27: mol_type = other RNA
acctacgcccccgtgaagagcttcctg

SEQ ID NO: 53507 - RNA, 27 nt, synthetic construct
  misc_feature 1..27: note = Cleft lip and palate transmembrane protein 1 (545-553)
  source 1..27: mol_type = other RNA
acctacaaggccctgaacacattcatc

SEQ ID NO: 53508 - RNA, 27 nt, synthetic construct
  misc_feature 1..27: note = Proteasome subunit beta type-6 (94-102)
  source 1..27: mol_type = other RNA
acctaccagctgggcttccacagcatc

SEQ ID NO: 53509 - RNA, 27 nt, synthetic construct
  misc_feature 1..27: note = RNA-binding protein 42 (91-99)
  source 1..27: mol_type = other RNA
acctaccagcaagtgcagcagacactg

SEQ ID NO: 53510 - RNA, 27 nt, synthetic construct
  misc_feature 1..27: note = DNA replication licensing factor MCM7 (231-239)
  source 1..27: mol_type = other RNA
acctacacaagcgccagaactctgctc

SEQ ID NO: 53511 - RNA, 27 nt, synthetic construct
  misc_feature 1..27: note = Alpha-enolase (18-26)
  source 1..27: mol_type = other RNA
gtgtaccacaacctgaagaatgtcatc

SEQ ID NO: 53512 - RNA, 27 nt, synthetic construct
  misc_feature 1..27: note = Unconventional myosin-Ic (350-358)
  source 1..27: mol_type = other RNA
gtgtacagcagaaccttcacatggctg

SEQ ID NO: 53513 - RNA, 33 nt, synthetic construct; identical to SEQ ID NO: 29286
  misc_feature 1..33: note = THO complex subunit 5 homolog (420-430)
  source 1..33: mol_type = other RNA

SEQ ID NO: 53514 - RNA, 27 nt, synthetic construct
  misc_feature 1..27: note = Splicing factor 3B subunit 3 (1166-1174)
  source 1..27: mol_type = other RNA
tactatttccccgtgaagaacgtcatc

SEQ ID NO: 53515 - RNA, 27 nt, synthetic construct
  misc_feature 1..27: note = Solute carrier family 35 member B1 (27-35)
  source 1..27: mol_type = other RNA
tactatggcatcctgcaggagaagatt

SEQ ID NO: 53516 - RNA, 24 nt, synthetic construct
  misc_feature 1..24: note = Transformation/transcription domain-associated protein (1974-1981)
  source 1..24: mol_type = other RNA
tactatcccgtgagacaccatctg

SEQ ID NO: 53517 - RNA, 48 nt, synthetic construct
  misc_feature 1..48: note = Gamma-secretase C-terminal fragment 59 (563-578)
  source 1..48: mol_type = other RNA
gccgagttcagacacgacagcggctacgaagtgcatcaccagaagctg

SEQ ID NO: 53518 - RNA, 30 nt, synthetic construct
  misc_feature 1..30: note = Ribosome-binding protein 1 (168-177)
  source 1..30: mol_type = other RNA
gccatcctggagaccgctcccaaggaagtg

SEQ ID NO: 53519 - RNA, 27 nt, synthetic construct
  misc_feature 1..27: note = Sarcoplasmic/endoplasmic reticulum calcium ATPase 1 (206-214)
  source 1..27: mol_type = other RNA
gccatcgtgagaagcctgccctccgtc

SEQ ID NO: 53520 - RNA, 27 nt, synthetic construct
  misc_feature 1..27: note = ATP-dependent RNA helicase DDX50 (247-255)
  source 1..27: mol_type = other RNA
gccctggctgcagccctcgcgcacatc

SEQ ID NO: 53521 - RNA, 30 nt, synthetic construct
  misc_feature 1..30: note = Splicing factor, proline- and glutamine-rich (343-352)
  source 1..30: mol_type = other RNA
gccctggctgagatcgcaaaggccgaactc

SEQ ID NO: 53522 - RNA, 36 nt, synthetic construct
  misc_feature 1..36: note = DDB1- and CUL4-associated factor 11 (187-198)
  source 1..36: mol_type = other RNA
gccctggctggccaccaggacgggatcaccttcatt

SEQ ID NO: 53523 - RNA, 27 nt, synthetic construct
  misc_feature 1..27: note = EH domain-containing protein 1 (502-510)
  source 1..27: mol_type = other RNA
gccctggctaaccacctcatcaaggtg

SEQ ID NO: 53524 - RNA, 27 nt, synthetic construct
  misc_feature 1..27: note = COP9 signalosome complex subunit 7a (30-38)
  source 1..27: mol_type = other RNA
gccctggctaccctcatccaccaggtg

SEQ ID NO: 53525 - RNA, 27 nt, synthetic construct
  misc_feature 1..27: note = Cullin-2 (304-312)
  source 1..27: mol_type = other RNA
gccctggacaaggctctcaccagcgtg

SEQ ID NO: 53526 - RNA, 27 nt, synthetic construct
  misc_feature 1..27: note = Glutathione S-transferase A4 (73-81)
  source 1..27: mol_type = other RNA
gccctggaggaaaagatccccaacatt

SEQ ID NO: 53527 - RNA, 27 nt, synthetic construct
  misc_feature 1..27: note = WD repeat-containing protein 19 (108-116)
  source 1..27: mol_type = other RNA
gccctgttcgagggcaaggtgcagctc

SEQ ID NO: 53528 - RNA, 27 nt, synthetic construct
  misc_feature 1..27: note = H/ACA ribonucleoprotein complex subunit 4 (179-187)
  source 1..27: mol_type = other RNA
gccctgttccagagaccccctctcatc

SEQ ID NO: 53529 - RNA, 27 nt, synthetic construct
  misc_feature 1..27: note = Serine palmitoyltransferase 2 (292-300)
  source 1..27: mol_type = other RNA
gccctgggccccaccgggagaggagtg

SEQ ID NO: 53530 - RNA, 33 nt, synthetic construct
  misc_feature 1..33: note = Syntaxin-binding protein 3 (373-383)
  source 1..33: mol_type = other RNA
gccctgggcaccgacgctgaggggcagaaggtg

SEQ ID NO: 53531 - RNA, 27 nt, synthetic construct
  misc_feature 1..27: note = Apoptosis-associated speck-like protein containing a CARD (118-126)
  source 1..27: mol_type = other RNA
gccctgatcgctagagtgaccaacgtc

SEQ ID NO: 53532 - RNA, 27 nt, synthetic construct
  misc_feature 1..27: note = DNA damage-inducible transcript 3 protein (158-166)
  source 1..27: mol_type = other RNA
gccctgatcgacagaatggtgaacctc

SEQ ID NO: 53533 - RNA, 33 nt, synthetic construct
  misc_feature 1..33: note = Erlin-2 (214-224)
  source 1..33: mol_type = other RNA
gccctgatcgaggctgaaaaggtggcacaggtc

SEQ ID NO: 53534 - RNA, 27 nt, synthetic construct
  misc_feature 1..27: note = DNA polymerase alpha subunit B (22-30)
  source 1..27: mol_type = other RNA
gccctgatcgagaagctcgtggaactt

SEQ ID NO: 53535 - RNA, 27 nt, synthetic construct
  misc_feature 1..27: note = Thyroid adenoma-associated protein (142-150)
  source 1..27: mol_type = other RNA
gccctgatcaccagaattttcggcgtg

SEQ ID NO: 53536 - RNA, 27 nt, synthetic construct
  misc_feature 1..27: note = Proliferating cell nuclear antigen (18-26)
  source 1..27: mol_type = other RNA
gccctgaaggacctcatcaacgaggct

SEQ ID NO: 53537 - RNA, 33 nt, synthetic construct
  misc_feature 1..33: note = Eukaryotic translation initiation factor 3 subunit D (439-449)
  source 1..33: mol_type = other RNA
gccctgctcgctggcagcgagtaccttaagctg

SEQ ID NO: 53538 - RNA, 27 nt, synthetic construct
  misc_feature 1..27: note = AP-3 complex subunit delta-1 (461-469)
  source 1..27: mol_type = other RNA
gccctgctcgacagcgctcaccttctg

SEQ ID NO: 53539 - RNA, 36 nt, synthetic construct
  misc_feature 1..36: note = Extended synaptotagmin-2 (137-148)
  source 1..36: mol_type = other RNA
gccctgctcgaggacgaagagagagtggtcaggctt

SEQ ID NO: 53540 - RNA, 27 nt, synthetic construct
  misc_feature 1..27: note = Transportin-1 (689-697)
  source 1..27: mol_type = other RNA
gccctgctcggcgaccttaccaaggct

SEQ ID NO: 53541 - RNA, 27 nt, synthetic construct
  misc_feature 1..27: note = NudC domain-containing protein 3 (12-20)
  source 1..27: mol_type = other RNA
gccctgctcggcatccttcagcacgtg

SEQ ID NO: 53542 - RNA, 27 nt, synthetic construct
  misc_feature 1..27: note = ATP synthase subunit beta, mitochondrial (320-328)
  source 1..27: mol_type = other RNA
gccctgctcggcagaatccccagcgct

SEQ ID NO: 53543 - RNA, 27 nt, synthetic construct
  misc_feature 1..27: note = Ubiquitin carboxyl-terminal hydrolase 35 (288-296)
  source 1..27: mol_type = other RNA
gccctgctcaagggccttgctgcagtg

SEQ ID NO: 53544 - RNA, 27 nt, synthetic construct
  misc_feature 1..27: note = Proline and serine-rich protein 1 (900-908)
  source 1..27: mol_type = other RNA
gccctgctccagcaagtgcacagcgct

SEQ ID NO: 53545 - RNA, 27 nt, synthetic construct
  misc_feature 1..27: note = Lysine-specific histone demethylase 1A (418-426)
  source 1..27: mol_type = other RNA
gccctgctcagcggccttagagaggct

SEQ ID NO: 53546 - RNA, 33 nt, synthetic construct
  misc_feature 1..33: note = Hsp90 co-chaperone Cdc37 (204-214)
  source 1..33: mol_type = other RNA
gccctgatggagcaggtggctcaccaaaccatc

SEQ ID NO: 53547 - RNA, 33 nt, synthetic construct
  misc_feature 1..33: note = Ubiquitin-conjugating enzyme E2 S (128-138)
  source 1..33: mol_type = other RNA
gccctgaacgaggaagctggcagactccttctg

SEQ ID NO: 53548 - RNA, 27 nt, synthetic construct
  misc_feature 1..27: note = Talin-1 (777-785)
  source 1..27: mol_type = other RNA
gccctgaacgagctccttcagcacgtg

SEQ ID NO: 53549 - RNA, 27 nt, synthetic construct
  misc_feature 1..27: note = Kinetochore protein NDC80 homolog (274-282)
  source 1..27: mol_type = other RNA
gccctgaacgagcagatcgctagactc

SEQ ID NO: 53550 - RNA, 27 nt, synthetic construct
  misc_feature 1..27: note = Influenza virus NS1A-binding protein (460-468)
  source 1..27: mol_type = other RNA
gccctgaacggcaagctctacatcgtg

SEQ ID NO: 53551 - RNA, 27 nt, synthetic construct
  misc_feature 1..27: note = Integrator complex subunit 4 (235-243)
  source 1..27: mol_type = other RNA
gccctgcaggagaagctctggaacgtg

SEQ ID NO: 53552 - RNA, 27 nt, synthetic construct
  misc_feature 1..27: note = BRISC complex subunit Abro1 (215-223)
  source 1..27: mol_type = other RNA
gccctgcaggagaaggtgcaagctgtc

SEQ ID NO: 53553 - RNA, 27 nt, synthetic construct
  misc_feature 1..27: note = Enhancer of filamentation 1 (806-814)
  source 1..27: mol_type = other RNA
gccctgcaggagatggtgcaccaagtc

SEQ ID NO: 53554 - RNA, 27 nt, synthetic construct
  misc_feature 1..27: note = Alpha-taxilin (67-75)
  source 1..27: mol_type = other RNA
gccctgagagacgtgagcgaggaactc

SEQ ID NO: 53555 - RNA, 27 nt, synthetic construct
  misc_feature 1..27: note = SET and MYND domain-containing protein 4 (220-228)
  source 1..27: mol_type = other RNA
gccctgagagaggaaaacgagcagctc

SEQ ID NO: 53556 - RNA, 27 nt, synthetic construct
  misc_feature 1..27: note = Leucine-rich PPR motif-containing protein, mitochondrial (676-684)
  source 1..27: mol_type = other RNA
gccctgagaggcgagatcgaaaccgtg

SEQ ID NO: 53557 - RNA, 27 nt, synthetic construct
  misc_feature 1..27: note = HAUS augmin-like complex subunit 1 (219-227)
  source 1..27: mol_type = other RNA
gccctgagcgagaagctcgctagactt

SEQ ID NO: 53558 - RNA, 30 nt, synthetic construct
  misc_feature 1..30: note = T-complex protein 1 subunit zeta (162-171)
  source 1..30: mol_type = other RNA
gccctgagcaaggagggcatcgtggctctc

SEQ ID NO: 53559 - RNA, 27 nt, synthetic construct
  misc_feature 1..27: note = Coatomer subunit gamma-1 (159-167)
  source 1..27: mol_type = other RNA
gccctggtgagctccctccaccttctg

SEQ ID NO: 53560 - RNA, 30 nt, synthetic construct
  misc_feature 1..30: note = Guanine nucleotide-binding protein G(s) subunit alpha isoforms short (142-151)
  source 1..30: mol_type = other RNA
gccctgtgggaggacgaaggcgtgagagct

SEQ ID NO: 53561 - RNA, 27 nt, synthetic construct
  misc_feature 1..27: note = FERM, RhoGEF and pleckstrin domain-containing protein 2 (602-610)
  source 1..27: mol_type = other RNA
gccctgtgggagggccccagcaaggct

SEQ ID NO: 53562 - RNA, 27 nt, synthetic construct
  misc_feature 1..27: note = Mannose-1-phosphate guanyltransferase alpha (254-262)
  source 1..27: mol_type = other RNA
gccctgtacgctagcagactctatctt

SEQ ID NO: 53563 - RNA, 27 nt, synthetic construct
  misc_feature 1..27: note = Structural maintenance of chromosomes flexible hinge domain-containing protein 1 (656-664)
  source 1..27: mol_type = other RNA
gccctgtacgacgaggtgagaaccgtc

SEQ ID NO: 53564 - RNA, 27 nt, synthetic construct
  misc_feature 1..27: note = Asparagine synthetase (glutamine-hydrolyzing) (131-139)
  source 1..27: mol_type = other RNA
gccctgtacgacaacgtggagaagctc

SEQ ID NO: 53565 - RNA, 27 nt, synthetic construct
  misc_feature 1..27: note = A-kinase anchor protein 11 (579-587)
  source 1..27: mol_type = other RNA
gccctgtaccacctcgctatcaagctt

SEQ ID NO: 53566 - RNA, 30 nt, synthetic construct; identical to SEQ ID NO: 29339
  misc_feature 1..30: note = tRNA-splicing ligase RtcB homolog (146-155)
  source 1..30: mol_type = other RNA

SEQ ID NO: 53567 - RNA, 27 nt, synthetic construct
  misc_feature 1..27: note = Sister chromatid cohesion protein PDS5 homolog A (534-542)
  source 1..27: mol_type = other RNA
gccatgttcggcaagctgatgaccatc

SEQ ID NO: 53568 - RNA, 27 nt, synthetic construct
  misc_feature 1..27: note = Autophagy-related protein 101 (20-28)
  source 1..27: mol_type = other RNA
gccatgctggctgtgctccacaccgtc

SEQ ID NO: 53569 - RNA, 33 nt, synthetic construct
  misc_feature 1..33: note = ATP-binding cassette sub-family F member 1 (296-306)
  source 1..33: mol_type = other RNA
gccatgctggagaacgctagcgacatcaagctc

SEQ ID NO: 53570 - RNA, 27 nt, synthetic construct
  misc_feature 1..27: note = Ankyrin repeat and KH domain-containing protein 1 (1231-1239)
  source 1..27: mol_type = other RNA
gccatgaacggccacgtgcccgctgtc

SEQ ID NO: 53571 - RNA, 27 nt, synthetic construct
  misc_feature 1..27: note = Phosphopantothenoylcysteine decarboxylase (65-73)
  source 1..27: mol_type = other RNA
gccatgtgggagcaccccatcaccgct

SEQ ID NO: 53572 - RNA, 30 nt, synthetic construct
  misc_feature 1..30: note = Bifunctional methylenetetrahydrofolate dehydrogenase/cyclohydrolase, mitochondrial (270-279)
  source 1..30: mol_type = other RNA
gccgtgatcgacgtcggcattaacagagtt

SEQ ID NO: 53573 - RNA, 27 nt, synthetic construct
  misc_feature 1..27: note = Leucine-rich repeat flightless-interacting protein 2 (349-357)
  source 1..27: mol_type = other RNA
gacctgaaggatcagatccaagacgtg

SEQ ID NO: 53574 - RNA, 27 nt, synthetic construct
  misc_feature 1..27: note = ADP-ribosylation factor GTPase-activating protein 3 (152-160)
  source 1..27: mol_type = other RNA
ttcgccagccacgtgtcccccgaggtc

SEQ ID NO: 53575 - RNA, 30 nt, synthetic construct
  misc_feature 1..30: note = Plexin-B2 (141-150)
  source 1..30: mol_type = other RNA
ttcatctttgacgtgcacgtccatgaggtt

SEQ ID NO: 53576 - RNA, 30 nt, synthetic construct
  misc_feature 1..30: note = Ankyrin repeat and LEM domain-containing protein 2 (100-109)
  source 1..30: mol_type = other RNA
ttcatctttgagaagaaactggcccaggct

SEQ ID NO: 53577 - RNA, 30 nt, synthetic construct
  misc_feature 1..30: note = Signal transducer and activator of transcription 5B (332-341)
  source 1..30: mol_type = other RNA
ttcatcattgagaagcagccccctcaagtg

SEQ ID NO: 53578 - RNA, 27 nt, synthetic construct
  misc_feature 1..27: note = DNA-directed RNA polymerase I subunit RPA2 (31-39)
  source 1..27: mol_type = other RNA
ttcatcattaacggcatagagaaggtg

SEQ ID NO: 53579 - RNA, 30 nt, synthetic construct
  misc_feature 1..30: note = Son of sevenless homolog 1 (444-453)
  source 1..30: mol_type = other RNA
ttcatcatggagggcaccctgacaagagtg

SEQ ID NO: 53580 - RNA, 27 nt, synthetic construct
  misc_feature 1..27: note = Formin-like protein 1 (47-55)
  source 1..27: mol_type = other RNA
ttcatcaacattgtggtccacagcgtt

SEQ ID NO: 53581 - RNA, 27 nt, synthetic construct
  misc_feature 1..27: note = Exocyst complex component 4 (169-177)
  source 1..27: mol_type = other RNA
ttcatccaggagattgaacacgccctg

SEQ ID NO: 53582 - RNA, 27 nt, synthetic construct
  misc_feature 1..27: note = 26S proteasome non-ATPase regulatory subunit 13 (63-71)
  source 1..27: mol_type = other RNA
ttcatcagcgagtttgaacacagagtg

SEQ ID NO: 53583 - RNA, 27 nt, synthetic construct
  misc_feature 1..27: note = Dystonin (4051-4059)
  source 1..27: mol_type = other RNA
ttcatctgggagaacattcacaccctg

SEQ ID NO: 53584 - RNA, 30 nt, synthetic construct
  misc_feature 1..30: note = Cytoskeleton-associated protein 5 (478-487)
  source 1..30: mol_type = other RNA
ttcctggccgacgtggataagctcaaactt

SEQ ID NO: 53585 - RNA, 30 nt, synthetic construct; identical to SEQ ID NO: 29358
  misc_feature 1..30: note = DNA dC-dU-editing enzyme APOBEC-3F (106-115)
  source 1..30: mol_type = other RNA

SEQ ID NO: 53586 - RNA, 33 nt, synthetic construct
  misc_feature 1..33: note = General transcription factor 3C polypeptide 2 (609-619)
  source 1..33: mol_type = other RNA
ttcctggcccacgaccaggctgtgagaaccctc

SEQ ID NO: 53587 - RNA, 27 nt, synthetic construct
  misc_feature 1..27: note = DCC-interacting protein 13-alpha (225-233)
  source 1..27: mol_type = other RNA
ttcctggccaacatcggcaccagcgtg

SEQ ID NO: 53588 - RNA, 27 nt, synthetic construct
  misc_feature 1..27: note = Nucleoside diphosphate kinase 3 (25-33)
  source 1..27: mol_type = other RNA
ttcctggccgtgaagcccgacggcgtc

SEQ ID NO: 53589 - RNA, 27 nt, synthetic construct
  misc_feature 1..27: note = Basic leucine zipper and W2 domain-containing protein 1 (57-65)
  source 1..27: mol_type = other RNA
ttcctggacgccagcggcgctaagctc

SEQ ID NO: 53590 - RNA, 27 nt, synthetic construct
  misc_feature 1..27: note = Probable JmjC domain-containing histone demethylation protein 2C (60-68)
  source 1..27: mol_type = other RNA
ttcctggacgatgtggtccacagcctc

SEQ ID NO: 53591 - RNA, 27 nt, synthetic construct
  misc_feature 1..27: note = Dipeptidyl peptidase 8 (72-80)
  source 1..27: mol_type = other RNA
ttcctggacgagaacgtgcactttgcc

SEQ ID NO: 53592 - RNA, 27 nt, synthetic construct
  misc_feature 1..27: note = Myotubularin (308-316)
  source 1..27: mol_type = other RNA
ttcctggacatccacaacattcatgtg

SEQ ID NO: 53593 - RNA, 27 nt, synthetic construct
  misc_feature 1..27: note = Ubiquitin fusion degradation protein 1 homolog (168-176)
  source 1..27: mol_type = other RNA
ttcctggacatcaccaaccccaaggcc

SEQ ID NO: 53594 - RNA, 27 nt, synthetic construct
  misc_feature 1..27: note = RHO/RAC effector protein (1023-1031)
  source 1..27: mol_type = other RNA
ttcctggacaagaacgatcacagcctc

SEQ ID NO: 53595 - RNA, 27 nt, synthetic construct
  misc_feature 1..27: note = Epidermal growth factor receptor substrate 15-like 1 (67-75)
  source 1..27: mol_type = other RNA
ttcctggacaagcagggcttttacgtg

SEQ ID NO: 53596 - RNA, 27 nt, synthetic construct
  misc_feature 1..27: note = Serine/threonine-protein kinase N1 (458-466)
  source 1..27: mol_type = other RNA
ttcctggacaacgagagacacgaagtg

SEQ ID NO: 53597 - RNA, 33 nt, synthetic construct
  misc_feature 1..33: note = Sphingomyelin phosphodiesterase 4 (86-96)
  source 1..33: mol_type = other RNA
ttcctggaccccggcgggcctatgatgaagctc

SEQ ID NO: 53598 - RNA, 30 nt, synthetic construct
  misc_feature 1..30: note = Probable dolichyl pyrophosphate Glc1Man9GlcNAc2 alpha-1,3-glucosyltransferase (305-314)
  source 1..30: mol_type = other RNA
ttcctggaccccaacaatatccctaaggcc

SEQ ID NO: 53599 - RNA, 27 nt, synthetic construct
  misc_feature 1..27: note = trabeculin-alpha (1734-1742)
  source 1..27: mol_type = other RNA
ttcctggaccagcacggccataacctc

SEQ ID NO: 53600 - RNA, 27 nt, synthetic construct
  misc_feature 1..27: note = Gamma-tubulin complex component 5 (53-61)
  source 1..27: mol_type = other RNA
ttcctggacgtgaacagccacaagatc

SEQ ID NO: 53601 - RNA, 27 nt, synthetic construct
  misc_feature 1..27: note = Bromodomain adjacent to zinc finger domain protein 2A (750-758)
  source 1..27: mol_type = other RNA
ttcctggagcccgtgaaccctagactc

SEQ ID NO: 53602 - RNA, 27 nt, synthetic construct
  misc_feature 1..27: note = Serine/threonine-protein phosphatase 4 regulatory subunit 3A (581-589)
  source 1..27: mol_type = other RNA
ttcctgtttgagcccgtggtcaaggcc

SEQ ID NO: 53603 - RNA, 27 nt, synthetic construct
  misc_feature 1..27: note = Protein yippee-like 5 (43-51)
  source 1..27: mol_type = other RNA
ttcctgtttaacaaggtggtcaatctc

SEQ ID NO: 53604 - RNA, 27 nt, synthetic construct
  misc_feature 1..27: note = Protein TASOR (98-106)
  source 1..27: mol_type = other RNA
ttcctgtttcaggagcccagaagcatc

SEQ ID NO: 53605 - RNA, 27 nt, synthetic construct
  misc_feature 1..27: note = Protein FAM177A1 (116-124)
  source 1..27: mol_type = other RNA
ttcctgggcgagaagatcgccagcgtg

SEQ ID NO: 53606 - RNA, 27 nt, synthetic construct
  misc_feature 1..27: note = Meckelin (880-888)
  source 1..27: mol_type = other RNA
ttcctgggcagctttatcgaccacgtg

SEQ ID NO: 53607 - RNA, 30 nt, synthetic construct
  misc_feature 1..30: note = 60S ribosomal protein L34 (95-104)
  source 1..30: mol_type = other RNA
ttcctgatcgaggaacagaagattgtggtc

SEQ ID NO: 53608 - RNA, 30 nt, synthetic construct
  misc_feature 1..30: note = TBCC domain-containing protein 1 (214-223)
  source 1..30: mol_type = other RNA
ttcctgatcgagggcaccattagcagagcc

SEQ ID NO: 53609 - RNA, 27 nt, synthetic construct
  misc_feature 1..27: note = T-complex protein 1 subunit beta (218-226)
  source 1..27: mol_type = other RNA
ttcctgctcgacaagaaaatcggcgtg

SEQ ID NO: 53610 - RNA, 33 nt, synthetic construct
  misc_feature 1..33: note = Plectin (3718-3728)
  source 1..33: mol_type = other RNA
ttcctgctcgaccccgtgaagggcgagagactt

SEQ ID NO: 53611 - RNA, 27 nt, synthetic construct
  misc_feature 1..27: note = GDP-mannose 4,6 dehydratase (9-17)
  source 1..27: mol_type = other RNA
ttcctgctcgagaagggctacgaagtg

SEQ ID NO: 53612 - RNA, 27 nt, synthetic construct
  misc_feature 1..27: note = Protein arginine N-methyltransferase 3 (423-431)
  source 1..27: mol_type = other RNA
ttcctgctcgagaagccctttagcgtg

SEQ ID NO: 53613 - RNA, 27 nt, synthetic construct
  misc_feature 1..27: note = Unconventional myosin-If (148-156)
  source 1..27: mol_type = other RNA
ttcctgctcgagaagagcagagtggtc

SEQ ID NO: 53614 - RNA, 27 nt, synthetic construct
  misc_feature 1..27: note = TBC1 domain family member 9B (187-195)
  source 1..27: mol_type = other RNA
ttcctgctcggcaaggaggtgagcctt

SEQ ID NO: 53615 - RNA, 33 nt, synthetic construct
  misc_feature 1..33: note = Poly (ADP-ribose) polymerase 10 (535-545)
  source 1..33: mol_type = other RNA
ttcctgctcggccccgaggggcagcaccttctg

SEQ ID NO: 53616 - RNA, 30 nt, synthetic construct
  misc_feature 1..30: note = Transport and Golgi organization protein 6 homolog (990-999)
  source 1..30: mol_type = other RNA
ttcctgctcggcagcgtggtccacgaggtt

SEQ ID NO: 53617 - RNA, 27 nt, synthetic construct
  misc_feature 1..27: note = Protein transport protein Sec24A (394-402)
  source 1..27: mol_type = other RNA
ttcctgctccacatccagcaacaggtg

SEQ ID NO: 53618 - RNA, 30 nt, synthetic construct; identical to SEQ ID NO: 29391
  misc_feature 1..30: note = GMP synthase (glutamine-hydrolyzing) (510-519)
  source 1..30: mol_type = other RNA

SEQ ID NO: 53619 - RNA, 27 nt, synthetic construct
  misc_feature 1..27: note = Nuclear pore complex protein Nup133 (610-618)
  source 1..27: mol_type = other RNA
ttcctgatggactttatccaccaggtg

SEQ ID NO: 53620 - RNA, 33 nt, synthetic construct; identical to SEQ ID NO: 29393
  misc_feature 1..33: note = SHC SH2 domain-binding protein 1 (439-449)
  source 1..33: mol_type = other RNA

SEQ ID NO: 53621 - RNA, 27 nt, synthetic construct
  misc_feature 1..27: note = 3-hydroxyacyl-CoA dehydrogenase type-2 (245-253)
  source 1..27: mol_type = other RNA
ttcctgaacggcgaggtgatcagactc

SEQ ID NO: 53622 - RNA, 27 nt, synthetic construct
  misc_feature 1..27: note = Translation initiation factor eIF-2B subunit delta (300-308)
  source 1..27: mol_type = other RNA
ttcctgaacaaggagatcaccagcgtg

SEQ ID NO: 53623 - RNA, 27 nt, synthetic construct
  misc_feature 1..27: note = Ubiquitin-associated protein 2-like (434-442)
  source 1..27: mol_type = other RNA
ttcctgcaggagaagagccccgccgtg

SEQ ID NO: 53624 - RNA, 30 nt, synthetic construct
  misc_feature 1..30: note = DNA dC-dU-editing enzyme APOBEC-3B (104-113)
  source 1..30: mol_type = other RNA
ttcctgcaggagaacacccacgtgagactc

SEQ ID NO: 53625 - RNA, 27 nt, synthetic construct
  misc_feature 1..27: note = Glutathione S-transferase A4 (87-95)
  source 1..27: mol_type = other RNA
ttcctgcaggagtacaccgtgaagctc

SEQ ID NO: 53626 - RNA, 27 nt, synthetic construct
  misc_feature 1..27: note = Proteasome activator complex subunit 4 (673-681)
  source 1..27: mol_type = other RNA
ttcctgcagcccgagctcgtgaagctt

SEQ ID NO: 53627 - RNA, 27 nt, synthetic construct
  misc_feature 1..27: note = cAMP-dependent protein kinase type I-alpha regulatory subunit (49-57)
  source 1..27: mol_type = other RNA
ttcctgagagagtactttgaaaggctc

SEQ ID NO: 53628 - RNA, 33 nt, synthetic construct
  misc_feature 1..33: note = 6-phosphofructo-2-kinase/fructose-2,6-bisphosphatase 4 (83-93)
  source 1..33: mol_type = other RNA
ttcctgagcgaggaaggcgggcacgtggccgtc

SEQ ID NO: 53629 - RNA, 30 nt, synthetic construct; identical to SEQ ID NO: 29402
  misc_feature 1..30: note = DNA dC-dU-editing enzyme APOBEC-3B (107-116)
  source 1..30: mol_type = other RNA

SEQ ID NO: 53630 - RNA, 33 nt, synthetic construct
  misc_feature 1..33: note = Lysine-tRNA ligase (585-595)
  source 1..33: mol_type = other RNA
ttcctgaccgacagcaacaatatcaaggaggtg

SEQ ID NO: 53631 - RNA, 27 nt, synthetic construct
  misc_feature 1..27: note = Calcium and integrin-binding protein 1 (21-29)
  source 1..27: mol_type = other RNA
ttcctgaccaagcaggagatcctcctt

SEQ ID NO: 53632 - RNA, 27 nt, synthetic construct
  misc_feature 1..27: note = Zinc transporter ZIP6 (435-443)
  source 1..27: mol_type = other RNA
ttcctggtggagcacgtcctcaccctt

SEQ ID NO: 53633 - RNA, 27 nt, synthetic construct
  misc_feature 1..27: note = DDB1- and CUL4-associated factor 15 (73-81)
  source 1..27: mol_type = other RNA
ttcctgtacgccggccacatctttctc

SEQ ID NO: 53634 - RNA, 27 nt, synthetic construct
  misc_feature 1..27: note = DNA topoisomerase 2-beta (701-709)
  source 1..27: mol_type = other RNA
ttcctgtacgacgataaccagagagtg

SEQ ID NO: 53635 - RNA, 30 nt, synthetic construct
  misc_feature 1..30: note = Alpha-ketoglutarate-dependent dioxygenase FTO (206-215)
  source 1..30: mol_type = other RNA
ttcatggacccccagaagatgccttacctg

SEQ ID NO: 53636 - RNA, 30 nt, synthetic construct
  misc_feature 1..30: note = Serine/threonine-protein phosphatase 6 catalytic subunit (244-253)
  source 1..30: mol_type = other RNA
ttcatgtttgacgagaagctggtgaccgtc

SEQ ID NO: 53637 - RNA, 27 nt, synthetic construct
  misc_feature 1..27: note = U4/U6 small nuclear ribonucleoprotein Prp3 (195-203)
  source 1..27: mol_type = other RNA
ttcatgaacgacgccatcgagaaggct

SEQ ID NO: 53638 - RNA, 27 nt, synthetic construct
  misc_feature 1..27: note = Putative helicase MOV-10 (35-43)
  source 1..27: mol_type = other RNA
ttcgtggacggcctgacctttaaggtc

SEQ ID NO: 53639 - RNA, 30 nt, synthetic construct
  misc_feature 1..30: note = Ubiquitin carboxyl-terminal hydrolase 10 (604-613)
  source 1..30: mol_type = other RNA
ggcatcttcgggggacacattagaagcgtg

SEQ ID NO: 53640 - RNA, 33 nt, synthetic construct
  misc_feature 1..33: note = D13S824E locus (103-113)
  source 1..33: mol_type = other RNA
ggcatcctgaccaaggagctccttcacagcgtg

SEQ ID NO: 53641 - RNA, 27 nt, synthetic construct
  misc_feature 1..27: note = CAD protein (445-453)
  source 1..27: mol_type = other RNA
ggcctggccgacaaggtgtacttcctc

SEQ ID NO: 53642 - RNA, 33 nt, synthetic construct
  misc_feature 1..33: note = Threonine-tRNA ligase, cytoplasmic (145-155)
  source 1..33: mol_type = other RNA
ggcctggccgacaacaccgtgatcgctaaggtc

SEQ ID NO: 53643 - RNA, 27 nt, synthetic construct
  misc_feature 1..27: note = Importin-4 (306-314)
  source 1..27: mol_type = other RNA
ggcctggccccccacctcgagcagatc

SEQ ID NO: 53644 - RNA, 27 nt, synthetic construct
  misc_feature 1..27: note = Filamin-B (1451-1459)
  source 1..27: mol_type = other RNA
ggcctggcccccctcgaggtgagagtc

SEQ ID NO: 53645 - RNA, 30 nt, synthetic construct
  misc_feature 1..30: note = Putative helicase MOV-10 (451-460)
  source 1..30: mol_type = other RNA
ggcctggacgatatcaaggacctcaaagtg

SEQ ID NO: 53646 - RNA, 27 nt, synthetic construct
  misc_feature 1..27: note = Probable helicase with zinc finger domain (341-349)
  source 1..27: mol_type = other RNA
ggcctggaccactacgtgtataaggtc

SEQ ID NO: 53647 - RNA, 30 nt, synthetic construct
  misc_feature 1..30: note = Rho GTPase-activating protein 12 (126-135)
  source 1..30: mol_type = other RNA
ggcctggacatcgatgggatttacagagtg

SEQ ID NO: 53648 - RNA, 30 nt, synthetic construct
  misc_feature 1..30: note = Proline-rich protein 12 (188-197)
  source 1..30: mol_type = other RNA
ggcctggaccccaacaagcctccagagctc

SEQ ID NO: 53649 - RNA, 30 nt, synthetic construct
  misc_feature 1..30: note = WD repeat-containing protein 70 (189-198)
  source 1..30: mol_type = other RNA
ggcctggaccccagcggggccagactcgtg

SEQ ID NO: 53650 - RNA, 27 nt, synthetic construct
  misc_feature 1..27: note = Hexokinase-1 (818-826)
  source 1..27: mol_type = other RNA
ggcctggacagactcaacgtgaccgtc

SEQ ID NO: 53651 - RNA, 27 nt, synthetic construct
  misc_feature 1..27: note = Cleavage stimulation factor subunit 3 (220-228)
  source 1..27: mol_type = other RNA
ggcctggacagaaacgcccccagcgtg

SEQ ID NO: 53652 - RNA, 27 nt, synthetic construct
  misc_feature 1..27: note = Nischarin (1238-1246)
  source 1..27: mol_type = other RNA
ggcctgttcgaccagcactttagactc

SEQ ID NO: 53653 - RNA, 27 nt, synthetic construct
  misc_feature 1..27: note = Targeting protein for Xklp2 (12-20)
  source 1..27: mol_type = other RNA
ggcctgttccaggggaagacccccctc

SEQ ID NO: 53654 - RNA, 27 nt, synthetic construct
  misc_feature 1..27: note = Protein SPT2 homolog (93-101)
  source 1..27: mol_type = other RNA
ggcctggggccccctggaagaagcgtg

SEQ ID NO: 53655 - RNA, 24 nt, synthetic construct
  misc_feature 1..24: note = Bardet-Biedl syndrome 1 protein (382-389)
  source 1..24: mol_type = other RNA
ggcctggggcccaccttcaagctc

SEQ ID NO: 53656 - RNA, 27 nt, synthetic construct
  misc_feature 1..27: note = Microtubule-actin cross-linking factor 1, isoforms 1/2/3/5 (195-203)
  source 1..27: mol_type = other RNA
ggcctgatcgacagacaggtgaccgtc

SEQ ID NO: 53657 - RNA, 30 nt, synthetic construct; identical to SEQ ID NO: 29430
  misc_feature 1..30: note = Ubiquitin-like domain-containing CTD phosphatase 1 (225-234)
  source 1..30: mol_type = other RNA

SEQ ID NO: 53658 - RNA, 27 nt, synthetic construct
  misc_feature 1..27: note = Programmed cell death protein 5 (91-99)
  source 1..27: mol_type = other RNA
ggcctgatcgagattctcaagaaagtg

SEQ ID NO: 53659 - RNA, 33 nt, synthetic construct
  misc_feature 1..33: note = Na(+)/H(+) exchange regulatory cofactor NHE-RF1 (122-132)
  source 1..33: mol_type = other RNA
ggcctgctcgccggggacagacttgtggaggtc

SEQ ID NO: 53660 - RNA, 27 nt, synthetic construct
  misc_feature 1..27: note = Trifunctional purine biosynthetic protein adenosine-3 (685-693)
  source 1..27: mol_type = other RNA
ggcctgctcgagaacatccccagagtg

SEQ ID NO: 53661 - RNA, 30 nt, synthetic construct
  misc_feature 1..30: note = Hom s 1 (11-20)
  source 1..30: mol_type = other RNA
ggcctgctcgagaccacagtgcagaaggtc

SEQ ID NO: 53662 - RNA, 27 nt, synthetic construct
  misc_feature 1..27: note = Tumor necrosis factor receptor superfamily member 10B (362-370)
  source 1..27: mol_type = other RNA
ggcctgatggacaacgagatcaaggtg

SEQ ID NO: 53663 - RNA, 27 nt, synthetic construct
  misc_feature 1..27: note = Glucocorticoid modulatory element-binding protein 1 (312-320)
  source 1..27: mol_type = other RNA
ggcctgatggacaccgtgaagaaagtc

SEQ ID NO: 53664 - RNA, 30 nt, synthetic construct
  misc_feature 1..30: note = Hydroxyacyl-coenzyme A dehydrogenase, mitochondrial (36-45)
  source 1..30: mol_type = other RNA
ggcctgatgggggccggaatcgctcaggtg

SEQ ID NO: 53665 - RNA, 27 nt, synthetic construct
  misc_feature 1..27: note = Myocyte-specific enhancer factor 2A (27-35)
  source 1..27: mol_type = other RNA
ggcctgatgaagaaagcctacgagctc

SEQ ID NO: 53666 - RNA, 27 nt, synthetic construct
  misc_feature 1..27: note = Kinetochore protein NDC80 homolog (330-338)
  source 1..27: mol_type = other RNA
ggcctgaacgaggaaatcgccagagtg

SEQ ID NO: 53667 - RNA, 30 nt, synthetic construct
  misc_feature 1..30: note = Zinc finger protein 106 (808-817)
  source 1..30: mol_type = other RNA
ggcctgcccagattcgggatcgagatggtg

SEQ ID NO: 53668 - RNA, 27 nt, synthetic construct
  misc_feature 1..27: note = Signal recognition particle subunit SRP72 (170-178)
  source 1..27: mol_type = other RNA
ggcctgcaggaggggacccacgaactc

SEQ ID NO: 53669 - RNA, 30 nt, synthetic construct
  misc_feature 1..30: note = Rho GTPase-activating protein 35 (1277-1286)
  source 1..30: mol_type = other RNA
ggcctgagcaccgaggggatctacagagtg

SEQ ID NO: 53670 - RNA, 30 nt, synthetic construct
  misc_feature 1..30: note = Probable RNA-binding protein 23 (209-218)
  source 1..30: mol_type = other RNA
ggcctgaccgggcagagactccttggagtg

SEQ ID NO: 53671 - RNA, 27 nt, synthetic construct
  misc_feature 1..27: note = Anamorsin (27-35)
  source 1..27: mol_type = other RNA
ggcctggtggacaagctccaggccctt

SEQ ID NO: 53672 - RNA, 27 nt, synthetic construct
  misc_feature 1..27: note = Anaphase-promoting complex subunit 1 (56-64)
  source 1..27: mol_type = other RNA
ggcctggtggggagcctccaggaggtc

SEQ ID NO: 53673 - RNA, 27 nt, synthetic construct
  misc_feature 1..27: note = Intraflagellar transport protein 172 homolog (410-418)
  source 1..27: mol_type = other RNA
ggcctgtgggaggaagcctacagagtg

SEQ ID NO: 53674 - RNA, 33 nt, synthetic construct
  misc_feature 1..33: note = Protein PRRC2B (1324-1334)
  source 1..33: mol_type = other RNA
ggcctgtgggggcccgaggaagagcctcacctc

SEQ ID NO: 53675 - RNA, 27 nt, synthetic construct
  misc_feature 1..27: note = TRPM8 channel-associated factor 1 (327-335)
  source 1..27: mol_type = other RNA
ggcctgtgggggcccgtgcacgagctc

SEQ ID NO: 53676 - RNA, 30 nt, synthetic construct; identical to SEQ ID NO: 29449
  misc_feature 1..30: note = tRNA (adenine(58)-N(1))-methyltransferase non-catalytic subunit TRM6 (83-92)
  source 1..30: mol_type = other RNA

SEQ ID NO: 53677 - RNA, 27 nt, synthetic construct
  misc_feature 1..27: note = Long-chain-fatty-acid-CoA ligase 3 (310-318)
  source 1..27: mol_type = other RNA
ggcatggccgagagaatccccgaactg

SEQ ID NO: 53678 - RNA, 33 nt, synthetic construct; identical to SEQ ID NO: 29451
  misc_feature 1..33: note = DNA damage-binding protein 1 (56-66)
  source 1..33: mol_type = other RNA

SEQ ID NO: 53679 - RNA, 27 nt, synthetic construct
  misc_feature 1..27: note = ORM1-like protein 3 (59-67)
  source 1..27: mol_type = other RNA
ggcatgtacatcttcctgcacaccgtg

SEQ ID NO: 53680 - RNA, 33 nt, synthetic construct
  misc_feature 1..33: note = WD repeat-containing protein 18 (99-109)
  source 1..33: mol_type = other RNA
ggcgtggccgagagcatccacctgtgggaagtc

SEQ ID NO: 53681 - RNA, 33 nt, synthetic construct
  misc_feature 1..33: note = Putative eukaryotic translation initiation factor 2 subunit 3-like protein (277-287)
  source 1..33: mol_type = other RNA
ggcgtggccgggggaagcatcctgaagggtgtc

SEQ ID NO: 53682 - RNA, 27 nt, synthetic construct
  misc_feature 1..27: note = Chitinase domain-containing protein 1 (236-244)
  source 1..27: mol_type = other RNA
cacctggccgaggctctccatcaggca

SEQ ID NO: 53683 - RNA, 27 nt, synthetic construct
  misc_feature 1..27: note = E3 ubiquitin-protein ligase BRE1A (291-299)
  source 1..27: mol_type = other RNA
cacctggccgaggtgctcgaaagagtc

SEQ ID NO: 53684 - RNA, 27 nt, synthetic construct
  misc_feature 1..27: note = Protein VPRBP (425-433)
  source 1..27: mol_type = other RNA
cacctggccatcaagctcgagcaggtg

SEQ ID NO: 53685 - RNA, 27 nt, synthetic construct
  misc_feature 1..27: note = E3 ubiquitin-protein ligase TRIM22 (73-81)
  source 1..27: mol_type = other RNA
cacctggccaacatcgtggagagagtc

SEQ ID NO: 53686 - RNA, 27 nt, synthetic construct
  misc_feature 1..27: note = Tetratricopeptide repeat protein 17 (671-679)
  source 1..27: mol_type = other RNA
cacctggacgccaccaagctccttctg

SEQ ID NO: 53687 - RNA, 27 nt, synthetic construct
  misc_feature 1..27: note = Ninein (404-412)
  source 1..27: mol_type = other RNA
cacctgctcgagagagtggaccaggtc

SEQ ID NO: 53688 - RNA, 27 nt, synthetic construct
  misc_feature 1..27: note = Golgin subfamily A member 4 (1695-1703)
  source 1..27: mol_type = other RNA
cacctgagcgagctcaacaccaagctt

SEQ ID NO: 53689 - RNA, 27 nt, synthetic construct
  misc_feature 1..27: note = Lysine-tRNA ligase (148-156)
  source 1..27: mol_type = other RNA
cacctgaccgacatcacactcaaggtg

SEQ ID NO: 53690 - RNA, 27 nt, synthetic construct
  misc_feature 1..27: note = Multiple C2 and transmembrane domain-containing protein 1 (245-253)
  source 1..27: mol_type = other RNA
cacctgtggagaggcatcgtgagcatt

SEQ ID NO: 53691 - RNA, 27 nt, synthetic construct
  misc_feature 1..27: note = Nucleoside diphosphate-linked moiety X motif 19 (348-356)
  source 1..27: mol_type = other RNA
cacctgtacgacatccatgtgaccgtc

SEQ ID NO: 53692 - RNA, 27 nt, synthetic construct
  misc_feature 1..27: note = Probable helicase senataxin (435-443)
  source 1..27: mol_type = other RNA
cacctgtacagcgaggtgaaggaagtc

SEQ ID NO: 53693 - RNA, 30 nt, synthetic construct
  misc_feature 1..30: note = Folliculin-interacting protein 1 (827-836)
  source 1..30: mol_type = other RNA
atcattgccgacatggataagtggaccgtg

SEQ ID NO: 53694 - RNA, 33 nt, synthetic construct
  misc_feature 1..33: note = Cofilin-1 (47-57)
  source 1..33: mol_type = other RNA
atcattctggaggaaggcaaggagatactcgtg

SEQ ID NO: 53695 - RNA, 27 nt, synthetic construct
  misc_feature 1..27: note = Ras GTPase-activating-like protein IQGAP1 (1071-1079)
  source 1..27: mol_type = other RNA
atcctggcccccgtggtcaaggagatt

SEQ ID NO: 53696 - RNA, 27 nt, synthetic construct
  misc_feature 1..27: note = 26S proteasome non-ATPase regulatory subunit 1 (736-744)
  source 1..27: mol_type = other RNA
atcctggacgccggcgggcacaacgtg

SEQ ID NO: 53697 - RNA, 33 nt, synthetic construct
  misc_feature 1..33: note = 26S proteasome non-ATPase regulatory subunit 1 (736-746)
  source 1..33: mol_type = other RNA
atcctggacgccggcgggcacaacgtgaccatt

SEQ ID NO: 53698 - RNA, 27 nt, synthetic construct
  misc_feature 1..27: note = F-box only protein 8 (162-170)
  source 1..27: mol_type = other RNA
atcctggacgatagccccaaggagatt

SEQ ID NO: 53699 - RNA, 33 nt, synthetic construct
  misc_feature 1..33: note = Melanoma inhibitory activity protein 3 (156-166)
  source 1..33: mol_type = other RNA
atcctggacgataccgccaagaacctcagagtg

SEQ ID NO: 53700 - RNA, 27 nt, synthetic construct
  misc_feature 1..27: note = IQ domain-containing protein D (55-63)
  source 1..27: mol_type = other RNA
atcctggacgaggccatttacaaggtg

SEQ ID NO: 53701 - RNA, 27 nt, synthetic construct
  misc_feature 1..27: note = Axin-1 (508-516)
  source 1..27: mol_type = other RNA
atcctggacgagcacgtgcagagagtc

SEQ ID NO: 53702 - RNA, 33 nt, synthetic construct
  misc_feature 1..33: note = Dihydroxyacetone phosphate acyltransferase (106-116)
  source 1..33: mol_type = other RNA
atcctggacgagatgagccacaagctcagactt

SEQ ID NO: 53703 - RNA, 27 nt, synthetic construct
  misc_feature 1..27: note = Protein DBF4 homolog A (461-469)
  source 1..27: mol_type = other RNA
atcctggacattagcgagcacaccctc

SEQ ID NO: 53704 - RNA, 27 nt, synthetic construct
  misc_feature 1..27: note = F-box only protein 25 (65-73)
  source 1..27: mol_type = other RNA
atcctggacaagattgtgcagaaagtc

SEQ ID NO: 53705 - RNA, 27 nt, synthetic construct
  misc_feature 1..27: note = Hermansky-Pudlak syndrome 5 protein (446-454)
  source 1..27: mol_type = other RNA
atcctggacagcggcatttacagaata

SEQ ID NO: 53706 - RNA, 30 nt, synthetic construct
  misc_feature 1..30: note = Cofilin-1 (48-57)
  source 1..30: mol_type = other RNA
atcctggaggaaggcaaggagattctcgtg

SEQ ID NO: 53707 - RNA, 27 nt, synthetic construct
  misc_feature 1..27: note = Heat shock protein HSP 90-alpha (394-402)
  source 1..27: mol_type = other RNA
atcctggagaagaaagtggaaaaggtc

SEQ ID NO: 53708 - RNA, 27 nt, synthetic construct
  misc_feature 1..27: note = Guanine nucleotide-binding protein subunit beta-5 (320-328)
  source 1..27: mol_type = other RNA
atcctgttcggccacgagaacagagtg

SEQ ID NO: 53709 - RNA, 27 nt, synthetic construct
  misc_feature 1..27: note = Cytosolic phospholipase A2 (399-407)
  source 1..27: mol_type = other RNA
atcctgttcaacagagtgctcggcgtc

SEQ ID NO: 53710 - RNA, 27 nt, synthetic construct
  misc_feature 1..27: note = 60S acidic ribosomal protein P1 (15-23)
  source 1..27: mol_type = other RNA
atcctgcacgacgatgaggtgaccgtc

SEQ ID NO: 53711 - RNA, 27 nt, synthetic construct
  misc_feature 1..27: note = ATP-binding cassette sub-family B member 7, mitochondrial (22-30)
  source 1..27: mol_type = other RNA
atcctgattagacccctcgtgagcgtc

SEQ ID NO: 53712 - RNA, 33 nt, synthetic construct
  misc_feature 1..33: note = Dual specificity mitogen-activated protein kinase kinase 7 (249-259)
  source 1..33: mol_type = other RNA
atcctgctcgacgagagaggccagattaagctt

SEQ ID NO: 53713 - RNA, 30 nt, synthetic construct
  misc_feature 1..30: note = Lon protease homolog 2, peroxisomal (293-302)
  source 1..30: mol_type = other RNA
atcctgctcgacaacgatcactacgccatg

SEQ ID NO: 53714 - RNA, 27 nt, synthetic construct
  misc_feature 1..27: note = Protein virilizer homolog (532-540)
  source 1..27: mol_type = other RNA
atcctgctcgaccagaccgtgagagtc

SEQ ID NO: 53715 - RNA, 27 nt, synthetic construct
  misc_feature 1..27: note = Histone-lysine N-methyltransferase SETD1A (58-66)
  source 1..27: mol_type = other RNA
atcctgctcgagcacaactacgccctt

SEQ ID NO: 53716 - RNA, 33 nt, synthetic construct
  misc_feature 1..33: note = Beta-adrenergic receptor kinase 1 (32-42)
  source 1..33: mol_type = other RNA
atcctgctccccgagcctagcattagatccgtg

SEQ ID NO: 53717 - RNA, 27 nt, synthetic construct
  misc_feature 1..27: note = Endosomal/lysomomal potassium channel TMEM175 (218-226)
  source 1..27: mol_type = other RNA
atcctgctcccctacgtgagcaaggtc

SEQ ID NO: 53718 - RNA, 33 nt, synthetic construct
  misc_feature 1..33: note = Serine/threonine-protein kinase TAO2 (157-167)
  source 1..33: mol_type = other RNA
atcctgctcagcgagcccggccttgtgaagctg

SEQ ID NO: 53719 - RNA, 33 nt, synthetic construct
  misc_feature 1..33: note = 60S ribosomal protein L19 (118-128)
  source 1..33: mol_type = other RNA
atcctgatggagcacattcataagctcaaagcc

SEQ ID NO: 53720 - RNA, 27 nt, synthetic construct
  misc_feature 1..27: note = Pre-mRNA-splicing factor ATP-dependent RNA helicase DHX15 (271-279)
  source 1..27: mol_type = other RNA
atcctgatgggcgtgctcaaggaggtc

SEQ ID NO: 53721 - RNA, 27 nt, synthetic construct
  misc_feature 1..27: note = Cohesin subunit SA-2 (794-802)
  source 1..27: mol_type = other RNA
atcctgatgattttcagccaccagata

SEQ ID NO: 53722 - RNA, 27 nt, synthetic construct
  misc_feature 1..27: note = Epidermal growth factor receptor substrate 15 (67-75)
  source 1..27: mol_type = other RNA
atcctgaacaagcaggagttctttgtg

SEQ ID NO: 53723 - RNA, 27 nt, synthetic construct
  misc_feature 1..27: note = Cell division control protein 6 homolog (354-362)
  source 1..27: mol_type = other RNA
atcctgcaggacagactcaaccaagtg

SEQ ID NO: 53724 - RNA, 27 nt, synthetic construct
  misc_feature 1..27: note = AT-rich interactive domain-containing protein 4B (796-804)
  source 1..27: mol_type = other RNA
atcctgcaggagaagctccaagaaatt

SEQ ID NO: 53725 - RNA, 27 nt, synthetic construct
  misc_feature 1..27: note = Transcription activator BRG1 (366-374)
  source 1..27: mol_type = other RNA
atcctgcaggagagagaatacaggctc

SEQ ID NO: 53726 - RNA, 27 nt, synthetic construct
  misc_feature 1..27: note = Putative eukaryotic translation initiation factor 2 subunit 3-like protein (187-195)
  source 1..27: mol_type = other RNA
atcctgcagaacaagattgacctcgtg

SEQ ID NO: 53727 - RNA, 27 nt, synthetic construct
  misc_feature 1..27: note = Ankyrin repeat and SOCS box protein 3 (486-494)
  source 1..27: mol_type = other RNA
atcctgcagcaacacattgccaccgtg

SEQ ID NO: 53728 - RNA, 27 nt, synthetic construct
  misc_feature 1..27: note = Poly (ADP-ribose) polymerase 1 (712-720)
  source 1..27: mol_type = other RNA
atcctgagcgaggtgcagcaagccgtc

SEQ ID NO: 53729 - RNA, 27 nt, synthetic construct
  misc_feature 1..27: note = Ribonucleases P/MRP protein subunit POP1 (442-450)
  source 1..27: mol_type = other RNA
atcctgaccgaggccattaaggctgca

SEQ ID NO: 53730 - RNA, 27 nt, synthetic construct
  misc_feature 1..27: note = Translin-associated protein X (86-94)
  source 1..27: mol_type = other RNA
atcctgaccgagagcgaaattaagctc

SEQ ID NO: 53731 - RNA, 27 nt, synthetic construct
  misc_feature 1..27: note = Phosphotriesterase-related protein (316-324)
  source 1..27: mol_type = other RNA
atcctgaccaacgtggtccccaagatg

SEQ ID NO: 53732 - RNA, 27 nt, synthetic construct
  misc_feature 1..27: note = T-complex protein 1 subunit eta (186-194)
  source 1..27: mol_type = other RNA
atcctgtacgacaagctcgagaaaatt

SEQ ID NO: 53733 - RNA, 27 nt, synthetic construct
  misc_feature 1..27: note = Methionine adenosyltransferase 2 subunit beta (184-192)
  source 1..27: mol_type = other RNA
atcctgtacggcgaggtggaaaagctc

SEQ ID NO: 53734 - RNA, 27 nt, synthetic construct
  misc_feature 1..27: note = Chromosome transmission fidelity protein 8 homolog (58-66)
  source 1..27: mol_type = other RNA
atcctgtacggcaagattatacacctc

SEQ ID NO: 53735 - RNA, 33 nt, synthetic construct
  misc_feature 1..33: note = Catenin alpha-1 (549-559)
  source 1..33: mol_type = other RNA
atcatggcccagctgccccaagagcagaaggct

SEQ ID NO: 53736 - RNA, 27 nt, synthetic construct
  misc_feature 1..27: note = Ras GTPase-activating-like protein IQGAP1 (1079-1087)
  source 1..27: mol_type = other RNA
atcatggacgataagagcctgaacatt

SEQ ID NO: 53737 - RNA, 27 nt, synthetic construct
  misc_feature 1..27: note = Staphylococcal nuclease domain-containing protein 1 (665-673)
  source 1..27: mol_type = other RNA
atcaccgacgatctgcacttctacgtg

SEQ ID NO: 53738 - RNA, 27 nt, synthetic construct
  misc_feature 1..27: note = Splicing factor 3A subunit 1 (52-60)
  source 1..27: mol_type = other RNA
atcgtggacaagaccgccagcttcgtc

SEQ ID NO: 53739 - RNA, 33 nt, synthetic construct
  misc_feature 1..33: note = Probable JmjC domain-containing histone demethylation protein 2C (2276-2286)
  source 1..33: mol_type = other RNA
atcgtgctgcccgccggcgctctccaccaggtc

SEQ ID NO: 53740 - RNA, 27 nt, synthetic construct
  misc_feature 1..27: note = Aurora kinase B (242-250)
  source 1..27: mol_type = other RNA
aagatcgccgacttcggctggagcgtg

SEQ ID NO: 53741 - RNA, 30 nt, synthetic construct
  misc_feature 1..30: note = DNA topoisomerase 2-alpha (83-92)
  source 1..30: mol_type = other RNA
aagatcttcgacgagattctggtgaacgcc

SEQ ID NO: 53742 - RNA, 30 nt, synthetic construct
  misc_feature 1..30: note = Vam6/Vps39-like protein (471-480)
  source 1..30: mol_type = other RNA
aagatcttcaccgaggacctgcccgaagtg

SEQ ID NO: 53743 - RNA, 30 nt, synthetic construct; identical to SEQ ID NO: 29516
  misc_feature 1..30: note = B-Raf serine/threonine-protein (638-647)
  source 1..30: mol_type = other RNA

SEQ ID NO: 53744 - RNA, 27 nt, synthetic construct
  misc_feature 1..27: note = Kelch-like protein 13 (131-139)
  source 1..27: mol_type = other RNA
aagatcattgacttcatatacaccgcc

SEQ ID NO: 53745 - RNA, 27 nt, synthetic construct
  misc_feature 1..27: note = Interleukin-6 receptor subunit beta (362-370)
  source 1..27: mol_type = other RNA
aagatcctggactacgaggtgaccctc

SEQ ID NO: 53746 - RNA, 27 nt, synthetic construct
  misc_feature 1..27: note = Ankyrin repeat domain-containing protein 17 (748-756)
  source 1..27: mol_type = other RNA
aagatcctggaggaactccagaaagtg

SEQ ID NO: 53747 - RNA, 27 nt, synthetic construct
  misc_feature 1..27: note = Protein IWS1 homolog (639-647)
  source 1..27: mol_type = other RNA
aagatcctgcaggagctccccagcgtg

SEQ ID NO: 53748 - RNA, 27 nt, synthetic construct
  misc_feature 1..27: note = G2/M phase-specific E3 ubiquitin-protein ligase (105-113)
  source 1..27: mol_type = other RNA
aagatcctgagcgagctcttcaccgtg

SEQ ID NO: 53749 - RNA, 27 nt, synthetic construct
  misc_feature 1..27: note = Adenomatous polyposis coli protein (1645-1653)
  source 1..27: mol_type = other RNA
aagatcatggaccaggtgcaacaggcc

SEQ ID NO: 53750 - RNA, 33 nt, synthetic construct
  misc_feature 1..33: note = Flotillin-2 (57-67)
  source 1..33: mol_type = other RNA
aagatcatgaccgagaaagaactgctcgccgtg

SEQ ID NO: 53751 - RNA, 27 nt, synthetic construct
  misc_feature 1..27: note = Calpastatin (416-424)
  source 1..27: mol_type = other RNA
aagctggccgctgcaatcagcgaggtg

SEQ ID NO: 53752 - RNA, 33 nt, synthetic construct
  misc_feature 1..33: note = Transitional endoplasmic reticulum ATPase (17-27)
  source 1..33: mol_type = other RNA
aagctggccgacgatgtggacctcgagcaggtc

SEQ ID NO: 53753 - RNA, 30 nt, synthetic construct
  misc_feature 1..30: note = Cyclin-dependent kinase 9 (164-173)
  source 1..30: mol_type = other RNA
aagctggccgacttcggcctcgctagagca

SEQ ID NO: 53754 - RNA, 30 nt, synthetic construct
  misc_feature 1..30: note = E3 ubiquitin-protein ligase listerin (404-413)
  source 1..30: mol_type = other RNA
aagctggccgacatcagcattaactacgtg

SEQ ID NO: 53755 - RNA, 27 nt, synthetic construct
  misc_feature 1..27: note = Guanosine-3',5'-bis(diphosphate) 3'-pyrophosphohydrolase MESH1 (119-127)
  source 1..27: mol_type = other RNA
aagctggccgacaaactctacaacctt

SEQ ID NO: 53756 - RNA, 27 nt, synthetic construct
  misc_feature 1..27: note = Protein PRR14L (1063-1071)
  source 1..27: mol_type = other RNA
aagctggccgagggcgtgctcgacgtc

SEQ ID NO: 53757 - RNA, 27 nt, synthetic construct
  misc_feature 1..27: note = MAP kinase-activated protein kinase 5 (452-460)
  source 1..27: mol_type = other RNA
aagctggccgagatcgtgaaacaggtc

SEQ ID NO: 53758 - RNA, 27 nt, synthetic construct
  misc_feature 1..27: note = Nck-associated protein 1 (12-20)
  source 1..27: mol_type = other RNA
aagctggccgagaaactcaccatcctt

SEQ ID NO: 53759 - RNA, 30 nt, synthetic construct
  misc_feature 1..30: note = Nuclear poreoprotein p62 (435-444)
  source 1..30: mol_type = other RNA
aagctggccgagaacatcgacgctcagctc

SEQ ID NO: 53760 - RNA, 27 nt, synthetic construct
  misc_feature 1..27: note = FACT complex subunit SPT16 (216-224)
  source 1..27: mol_type = other RNA
aagctggccgagagcgtggaaaaagct

SEQ ID NO: 53761 - RNA, 27 nt, synthetic construct
  misc_feature 1..27: note = Transcription factor BTF3 (54-62)
  source 1..27: mol_type = other RNA
aagctggccaaactccaggctcaagtg

SEQ ID NO: 53762 - RNA, 27 nt, synthetic construct
  misc_feature 1..27: note = DNA excision repair protein ERCC-6-like (655-663)
  source 1..27: mol_type = other RNA
aagctggacgagcacatcgcctacctc

SEQ ID NO: 53763 - RNA, 33 nt, synthetic construct
  misc_feature 1..33: note = DNA topoisomerase 2-alpha (278-288)
  source 1..33: mol_type = other RNA
aagctggacgagaccggcaacagcctcaaagtg

SEQ ID NO: 53764 - RNA, 33 nt, synthetic construct
  misc_feature 1..33: note = Kelch repeat and BTB domain-containing protein 4 (508-518)
  source 1..33: mol_type = other RNA
aagctggaccccgccaccagcgctgtgacagtc

SEQ ID NO: 53765 - RNA, 27 nt, synthetic construct
  misc_feature 1..27: note = N-acetylneuraminate lyase (77-85)
  source 1..27: mol_type = other RNA
aagctggaccaggtgatcattcacgtc

SEQ ID NO: 53766 - RNA, 27 nt, synthetic construct
  misc_feature 1..27: note = DENN domain-containing protein 4C (705-713)
  source 1..27: mol_type = other RNA
aagctgttcgacagaccccaggagctc

SEQ ID NO: 53767 - RNA, 33 nt, synthetic construct
  misc_feature 1..33: note = DENN domain-containing protein 4C (705-715)
  source 1..33: mol_type = other RNA
aagctgttcgacagaccccaggagctcaaactt

SEQ ID NO: 53768 - RNA, 27 nt, synthetic construct
  misc_feature 1..27: note = Fatty acyl-CoA reductase 2 (63-71)
  source 1..27: mol_type = other RNA
aagctgttcgagaaagtgaaggaagtc

SEQ ID NO: 53769 - RNA, 27 nt, synthetic construct
  misc_feature 1..27: note = Putative homeodomain transcription factor 2 (586-594)
  source 1..27: mol_type = other RNA
aagctgttcggccacctcaccagcgcc

SEQ ID NO: 53770 - RNA, 27 nt, synthetic construct
  misc_feature 1..27: note = 28S ribosomal protein S33, mitochondrial (35-43)
  source 1..27: mol_type = other RNA
aagctgttcagcgagctcccccttgcc

SEQ ID NO: 53771 - RNA, 27 nt, synthetic construct
  misc_feature 1..27: note = Hom s 1 (129-137)
  source 1..27: mol_type = other RNA
aagctgggcctcaaaccccttgaggtg

SEQ ID NO: 53772 - RNA, 27 nt, synthetic construct
  misc_feature 1..27: note = AP-1 complex subunit beta-1 (147-155)
  source 1..27: mol_type = other RNA
aagctgcacgacatcaacgcccagctc

SEQ ID NO: 53773 - RNA, 30 nt, synthetic construct
  misc_feature 1..30: note = Guanine nucleotide-binding protein subunit beta-5 (32-41)
  source 1..30: mol_type = other RNA
aagctgcacgacgtggagctccatcaggtc

SEQ ID NO: 53774 - RNA, 27 nt, synthetic construct
  misc_feature 1..27: note = RNA-binding protein 4B (59-67)
  source 1..27: mol_type = other RNA
aagctgcacggcgtgaacatcaatgtc

SEQ ID NO: 53775 - RNA, 30 nt, synthetic construct
  misc_feature 1..30: note = Zinc finger protein 143 (59-68)
  source 1..30: mol_type = other RNA
aagctgatcgacggccaggtgattcaactc

SEQ ID NO: 53776 - RNA, 27 nt, synthetic construct
  misc_feature 1..27: note = cAMP-responsive element modulator (103-111)
  source 1..27: mol_type = other RNA
aagctgatcgaggaactcgagaccctt

SEQ ID NO: 53777 - RNA, 30 nt, synthetic construct
  misc_feature 1..30: note = Elongation factor 2 (314-323)
  source 1..30: mol_type = other RNA
aagctgatcgagaaactcgacattaagctt

SEQ ID NO: 53778 - RNA, 27 nt, synthetic construct
  misc_feature 1..27: note = WD repeat-containing protein 43 (416-424)
  source 1..27: mol_type = other RNA
aagctgatcctccttattacccaggtg

SEQ ID NO: 53779 - RNA, 27 nt, synthetic construct
  misc_feature 1..27: note = CTD small phosphatase-like protein 2 (434-442)
  source 1..27: mol_type = other RNA
aagctgatccccttcctcgagaaactt

SEQ ID NO: 53780 - RNA, 27 nt, synthetic construct
  misc_feature 1..27: note = Ras-related GTP-binding protein C (235-243)
  source 1..27: mol_type = other RNA
aagctgatcccccagctccctaccctt

SEQ ID NO: 53781 - RNA, 27 nt, synthetic construct
  misc_feature 1..27: note = DNA repair and recombination protein RAD54B (649-657)
  source 1..27: mol_type = other RNA
aagctgctcgccgtgatccacgagctt

SEQ ID NO: 53782 - RNA, 39 nt, synthetic construct
  misc_feature 1..39: note = HIV Tat-specific factor 1 (199-211)
  source 1..39: mol_type = other RNA
aagctgctcgacgaggatgaaatcagaggctacaaactt

SEQ ID NO: 53783 - RNA, 33 nt, synthetic construct
  misc_feature 1..33: note = Negative elongation factor A (255-265)
  source 1..33: mol_type = other RNA
aagctgctcgacatcagcgagcttgatatggtg

SEQ ID NO: 53784 - RNA, 27 nt, synthetic construct
  misc_feature 1..27: note = Integrator complex subunit 4 (341-349)
  source 1..27: mol_type = other RNA
aagctgctcgaccttatgcccagactg

SEQ ID NO: 53785 - RNA, 33 nt, synthetic construct
  misc_feature 1..33: note = Rho-associated protein kinase 1 (1093-1103)
  source 1..33: mol_type = other RNA
aagctgctcgaccttagcgattccacctctgtg

SEQ ID NO: 53786 - RNA, 27 nt, synthetic construct
  misc_feature 1..27: note = E3 ISG15-protein ligase HERC5 (795-803)
  source 1..27: mol_type = other RNA
aagctgctcgaccagatgcccagcctt

SEQ ID NO: 53787 - RNA, 27 nt, synthetic construct
  misc_feature 1..27: note = T-complex protein 1 subunit eta (55-63)
  source 1..27: mol_type = other RNA
aagctgctcgacgtggtccaccccgcc

SEQ ID NO: 53788 - RNA, 27 nt, synthetic construct
  misc_feature 1..27: note = Renal cancer differentiation gene 1 protein (69-77)
  source 1..27: mol_type = other RNA
aagctgctcgaggccaccagcgctgtg

SEQ ID NO: 53789 - RNA, 30 nt, synthetic construct
  misc_feature 1..30: note = E3 ubiquitin-protein ligase UBR4 (335-344)
  source 1..30: mol_type = other RNA
aagctgctcgaggaacagggcatcttcctt

SEQ ID NO: 53790 - RNA, 36 nt, synthetic construct
  misc_feature 1..36: note = Prolyl 4-hydroxylase subunit alpha-1 (230-241)
  source 1..36: mol_type = other RNA
aagctgctcgagcttgaccccgaacaccagagagcc

SEQ ID NO: 53791 - RNA, 30 nt, synthetic construct
  misc_feature 1..30: note = Archaemetzincin-2 (125-134)
  source 1..30: mol_type = other RNA
aagctgctcgagcccgtgcctgtcagcgtt

SEQ ID NO: 53792 - RNA, 27 nt, synthetic construct
  misc_feature 1..27: note = EH domain-binding protein 1 (684-692)
  source 1..27: mol_type = other RNA
aagctgctcgaggtgcagccccaagtc

SEQ ID NO: 53793 - RNA, 27 nt, synthetic construct
  misc_feature 1..27: note = Hyaluronan mediated motility receptor (233-241)
  source 1..27: mol_type = other RNA
aagctgctcgagtacatcgaagagatt

SEQ ID NO: 53794 - RNA, 27 nt, synthetic construct
  misc_feature 1..27: note = Conserved oligomeric Golgi complex subunit 5 (336-344)
  source 1..27: mol_type = other RNA
aagctgatggaccacatctacgccgtg

SEQ ID NO: 53795 - RNA, 30 nt, synthetic construct
  misc_feature 1..30: note = Proliferating cell nuclear antigen (117-126)
  source 1..30: mol_type = other RNA
aagctgatggacctcgatgtggagcagctt

SEQ ID NO: 53796 - RNA, 27 nt, synthetic construct
  misc_feature 1..27: note Dolichyl-diphosphooligosaccharide-proteinosyltransferase subunit STT3A (289-297)
  source 1..27: mol_type = other RNA
aagctgaacccccagcaattcgaggtg

SEQ ID NO: 53797 - RNA, 27 nt, synthetic construct
  misc_feature 1..27: note = Ribosomal L1 domain-containing protein 1 (242-250)
  source 1..27: mol_type = other RNA
aagctgcccgagaaatgggaaagcgtg

SEQ ID NO: 53798 - RNA, 27 nt, synthetic construct
  misc_feature 1..27: note = Regulator of G-protein signaling 10 (129-137)
  source 1..27: mol_type = other RNA
aagctgcaggaccaaatcttcaacctc

SEQ ID NO: 53799 - RNA, 27 nt, synthetic construct
  misc_feature 1..27: note = Nesprin-2 (2292-2300)
  source 1..27: mol_type = other RNA
aagctgcaggagctcgaaaacagactt

SEQ ID NO: 53800 - RNA, 27 nt, synthetic construct
  misc_feature 1..27: note = Signal transducer and activator of transcription 1-alpha/beta (350-358)
  source 1..27: mol_type = other RNA
aagctgcaggagctcaactacaatctt

SEQ ID NO: 53801 - RNA, 27 nt, synthetic construct
  misc_feature 1..27: note = Protein Jade-2 (282-290)
  source 1..27: mol_type = other RNA
aagctgcaggagcaaatcttccacctc

SEQ ID NO: 53802 - RNA, 27 nt, synthetic construct
  misc_feature 1..27: note = DNA-directed RNA polymerase II subunit RPB3 (255-263)
  source 1..27: mol_type = other RNA
aagctgagcgacctccagacccaactt

SEQ ID NO: 53803 - RNA, 27 nt, synthetic construct
  misc_feature 1..27: note = Probable tRNA N6-adenosine threonylcarbamoyltransferase (189-197)
  source 1..27: mol_type = other RNA
aagctggtggagctcccctacaccgtc

SEQ ID NO: 53804 - RNA, 27 nt, synthetic construct
  misc_feature 1..27: note = Electron transfer flavoprotein subunit beta (147-155)
  source 1..27: mol_type = other RNA
aagctggtgaaagaggtcatcgccgtt

SEQ ID NO: 53805 - RNA, 27 nt, synthetic construct
  misc_feature 1..27: note = Protein Mis18-alpha (218-226)
  source 1..27: mol_type = other RNA
aagctgtgggaggccgaaagcaaactc

SEQ ID NO: 53806 - RNA, 27 nt, synthetic construct
  misc_feature 1..27: note = Phosphatidylinositol 4-kinase beta (788-796)
  source 1..27: mol_type = other RNA
aagctgtacgacggcttccagtatctc

SEQ ID NO: 53807 - RNA, 27 nt, synthetic construct
  misc_feature 1..27: note = Cytochrome P450 20A1 (274-282)
  source 1..27: mol_type = other RNA
aagctgtacgaggaaatcaaccaggtg

SEQ ID NO: 53808 - RNA, 27 nt, synthetic construct
  misc_feature 1..27: note = Delta(24)-sterol reductase (287-295)
  source 1..27: mol_type = other RNA
aagctgtacgagcagcaccatgtggtc

SEQ ID NO: 53809 - RNA, 30 nt, synthetic construct
  misc_feature 1..30: note = Ectopic P granules protein 5 homolog (225-234)
  source 1..30: mol_type = other RNA
aagctgtacccccagctccctgccgagatc

SEQ ID NO: 53810 - RNA, 27 nt, synthetic construct
  misc_feature 1..27: note = CCAAT/enhancer-binding protein zeta (211-219)
  source 1..27: mol_type = other RNA
aagctgtaccagcacgagatcaacctc

SEQ ID NO: 53811 - RNA, 39 nt, synthetic construct
  misc_feature 1..39: note = Stathmin (95-107)
  source 1..39: mol_type = other RNA
aagatggccgaggaaaaactgacccacaagatggaggct

SEQ ID NO: 53812 - RNA, 27 nt, synthetic construct
  misc_feature 1..27: note = MORF4 family-associated protein 1-like 1 (109-117)
  source 1..27: mol_type = other RNA
aagatggccgagatgctggtggaactc

SEQ ID NO: 53813 - RNA, 27 nt, synthetic construct
  misc_feature 1..27: note = ATP-binding cassette sub-family F member 3 (459-467)
  source 1..27: mol_type = other RNA
aagatgctggagaaactccccgaactt

SEQ ID NO: 53814 - RNA, 27 nt, synthetic construct
  misc_feature 1..27: note = Nodal modulator 3 (261-269)
  source 1..27: mol_type = other RNA
aagatgatggacgtgaccgtcacaatc

SEQ ID NO: 53815 - RNA, 27 nt, synthetic construct
  misc_feature 1..27: note = Proteasome subunit beta type-2 (37-45)
  source 1..27: mol_type = other RNA
aagatgagcgagaaaatcctgctcctt

SEQ ID NO: 53816 - RNA, 30 nt, synthetic construct
  misc_feature 1..30: note = cAMP-dependent protein kinase type I-beta regulatory subunit (244-253)
  source 1..30: mol_type = other RNA
aagatgtacgaggaattcctgagcaaagtg

SEQ ID NO: 53817 - RNA, 27 nt, synthetic construct
  misc_feature 1..27: note = Rap1 GTPase-GDP dissociation stimulator 1 (67-75)
  source 1..27: mol_type = other RNA
aaggtggccaacatcattgctgaggtc

SEQ ID NO: 53818 - RNA, 27 nt, synthetic construct
  misc_feature 1..27: note = Myosin light polypeptide 6 (69-77)
  source 1..27: mol_type = other RNA
aaggtgctggacttcgagcactttctc

SEQ ID NO: 53819 - RNA, 27 nt, synthetic construct
  misc_feature 1..27: note = Probable E3 ubiquitin-protein ligase HERC4 (595-603)
  source 1..27: mol_type = other RNA
aaggtgctggagatcctccacagagtc

SEQ ID NO: 53820 - RNA, 33 nt, synthetic construct
  misc_feature 1..33: note = Protein SON (298-308)
  source 1..33: mol_type = other RNA
aaggtgctggagcccagcgaaaccctcgtcgtt

SEQ ID NO: 53821 - RNA, 27 nt, synthetic construct
  misc_feature 1..27: note = Proteasome activator complex subunit 2 (145-153)
  source 1..27: mol_type = other RNA
aaggtgctggagagagtcaacgccgtt

SEQ ID NO: 53822 - RNA, 27 nt, synthetic construct
  misc_feature 1..27: note = CCR4-NOT transcription complex subunit 1 (128-136)
  source 1..27: mol_type = other RNA
aaggtgctgggcatcgtcgttggggtg

SEQ ID NO: 53823 - RNA, 27 nt, synthetic construct
  misc_feature 1..27: note = Amyloid beta A4 protein (9-17)
  source 1..27: mol_type = other RNA
ctgctcgccgcttggaccgcaagagcc

SEQ ID NO: 53824 - RNA, 27 nt, synthetic construct
  misc_feature 1..27: note = DNA fragmentation factor subunit beta (69-77)
  source 1..27: mol_type = other RNA
ctgctcgccgaccttctgcacaacgtg

SEQ ID NO: 53825 - RNA, 27 nt, synthetic construct
  misc_feature 1..27: note = CREB-binding protein (653-661)
  source 1..27: mol_type = other RNA
ctgctcgccgagaagatctacaaaatt

SEQ ID NO: 53826 - RNA, 27 nt, synthetic construct
  misc_feature 1..27: note = Nuclear autoantigenic sperm protein (243-251)
  source 1..27: mol_type = other RNA
ctgctcgccgagacccactaccagctt

SEQ ID NO: 53827 - RNA, 33 nt, synthetic construct
  misc_feature 1..33: note = SCAN domain-containing protein 1 (194-204)
  source 1..33: mol_type = other RNA
ctgctcgccatccttcccgaggctgcaagagcc

SEQ ID NO: 53828 - RNA, 27 nt, synthetic construct
  misc_feature 1..27: note = Cyclin-dependent kinase inhibitor 1C (103-111)
  source 1..27: mol_type = other RNA
ctgctcgcccccagacctgtggctgtc

SEQ ID NO: 53829 - RNA, 27 nt, synthetic construct
  misc_feature 1..27: note = Protein quaking (40-48)
  source 1..27: mol_type = other RNA
ctgctcgacgaggaaatcagcagagtg

SEQ ID NO: 53830 - RNA, 24 nt, synthetic construct
  misc_feature 1..24: note = T-complex protein 1 subunit beta (219-226)
  source 1..24: mol_type = other RNA
ctgctcgacaagaaaatcggcgtg

SEQ ID NO: 53831 - RNA, 33 nt, synthetic construct; identical to SEQ ID NO: 29604
  misc_feature 1..33: note = ERI1 exoribonuclease 3 (155-165)
  source 1..33: mol_type = other RNA

SEQ ID NO: 53832 - RNA, 27 nt, synthetic construct
  misc_feature 1..27: note = Talin-1 (1761-1769)
  source 1..27: mol_type = other RNA
ctgctcgaccagaccaagacacttgcc

SEQ ID NO: 53833 - RNA, 27 nt, synthetic construct
  misc_feature 1..27: note = Cyclin-I (72-80)
  source 1..27: mol_type = other RNA
ctgctcgacagattccttgccaccgtg

SEQ ID NO: 53834 - RNA, 27 nt, synthetic construct
  misc_feature 1..27: note = Tight junction protein ZO-2 (821-829)
  source 1..27: mol_type = other RNA
ctgctcgacgtgacccccaaggccgtc

SEQ ID NO: 53835 - RNA, 27 nt, synthetic construct
  misc_feature 1..27: note = Exocyst complex component 4 (7-15)
  source 1..27: mol_type = other RNA
ctgctcttcgacaagtttaacgccgtg

SEQ ID NO: 53836 - RNA, 27 nt, synthetic construct
  misc_feature 1..27: note = Heterogeneous nuclear ribonucleoprotein M (229-237)
  source 1..27: mol_type = other RNA
ctgctcttcgacagacccatgcacgtg

SEQ ID NO: 53837 - RNA, 30 nt, synthetic construct
  misc_feature 1..30: note = DNA-directed RNA polymerase II subunit RPB11-b1 (11-20)
  source 1..30: mol_type = other RNA
ctgctcttcgagggcgaaaagatcaccatt

SEQ ID NO: 53838 - RNA, 27 nt, synthetic construct
  misc_feature 1..27: note = Conserved oligomeric Golgi complex subunit 4 (51-59)
  source 1..27: mol_type = other RNA
ctgctcttcgagggcatcgccagaatt

SEQ ID NO: 53839 - RNA, 27 nt, synthetic construct
  misc_feature 1..27: note = Cip1-interacting zinc finger protein (83-91)
  source 1..27: mol_type = other RNA
ctgctcggcccccctccagtgggggtc

SEQ ID NO: 53840 - RNA, 24 nt, synthetic construct
  misc_feature 1..24: note = Neuferricin (59-66)
  source 1..24: mol_type = other RNA
ctgctcggcagagtgtacgacgtc

SEQ ID NO: 53841 - RNA, 33 nt, synthetic construct
  misc_feature 1..33: note = Cyclin-dependent kinase 1 (134-144)
  source 1..33: mol_type = other RNA
ctgctcatcgacgataagggcaccattaaactt

SEQ ID NO: 53842 - RNA, 27 nt, synthetic construct
  misc_feature 1..27: note = Nuclear pore complex protein Nup205 (248-256)
  source 1..27: mol_type = other RNA
ctgctcatcggccaccttgagagagtg

SEQ ID NO: 53843 - RNA, 27 nt, synthetic construct
  misc_feature 1..27: note = RCC1 and BTB domain-containing protein 1 (125-133)
  source 1..27: mol_type = other RNA
ctgctcatcaagcaggtggtcgaggtt

SEQ ID NO: 53844 - RNA, 36 nt, synthetic construct
  misc_feature 1..36: note = Histone H2B type 2-F (101-112)
  source 1..36: mol_type = other RNA
ctgctccttcccggcgagctggccaagcacgctgtg

SEQ ID NO: 53845 - RNA, 27 nt, synthetic construct
  misc_feature 1..27: note = Eukaryotic translation initiation factor 3 subunit H (242-250)
  source 1..27: mol_type = other RNA
ctgctcatggacagagtggatgagatg

SEQ ID NO: 53846 - RNA, 27 nt, synthetic construct
  misc_feature 1..27: note = CDK5 regulatory subunit-associated protein 2 (1394-1402)
  source 1..27: mol_type = other RNA
ctgctcatggagcacatccaggaaatt

SEQ ID NO: 53847 - RNA, 27 nt, synthetic construct
  misc_feature 1..27: note = Zinc finger SWIM domain-containing protein 1 (234-242)
  source 1..27: mol_type = other RNA
ctgctcaacgacagaatctggcttgcc

SEQ ID NO: 53848 - RNA, 27 nt, synthetic construct
  misc_feature 1..27: note = DNA-directed RNA polymerase II subunit RPB4 (32-40)
  source 1..27: mol_type = other RNA
ctgctcaacagcgaggtgcacatgctt

SEQ ID NO: 53849 - RNA, 27 nt, synthetic construct
  misc_feature 1..27: note = Rho guanine nucleotide exchange factor 2 (627-635)
  source 1..27: mol_type = other RNA
ctgctccaggacgccatcagagaggtg

SEQ ID NO: 53850 - RNA, 27 nt, synthetic construct
  misc_feature 1..27: note = Vam6/Vps39-like protein (218-226)
  source 1..27: mol_type = other RNA
ctgctccaggacaagcaattcgagctt

SEQ ID NO: 53851 - RNA, 27 nt, synthetic construct
  misc_feature 1..27: note = E3 ubiquitin-protein ligase TRIM37 (221-229)
  source 1..27: mol_type = other RNA
ctgctccaggaggtggaacaccaactt

SEQ ID NO: 53852 - RNA, 27 nt, synthetic construct
  misc_feature 1..27: note = DEP domain-containing protein 1A (20-28)
  source 1..27: mol_type = other RNA
ctgctccagccccaccttgagagagtg

SEQ ID NO: 53853 - RNA, 27 nt, synthetic construct
  misc_feature 1..27: note = Small nuclear ribonucleoprotein Sm D1 (38-46)
  source 1..27: mol_type = other RNA
ctgctcgtggacgtcgagcccaaggtt

SEQ ID NO: 53854 - RNA, 30 nt, synthetic construct
  misc_feature 1..30: note = Lipopolysaccharide-responsive and beige-like anchor protein (407-416)
  source 1..30: mol_type = other RNA
ctgctctacgacggcaagcttagctccgcc

SEQ ID NO: 53855 - RNA, 33 nt, synthetic construct
  misc_feature 1..33: note = Electron transfer flavoprotein subunit alpha, mitochondrial (184-194)
  source 1..33: mol_type = other RNA
ctgctctacgaccttgccgatcagctgcacgct

SEQ ID NO: 53856 - RNA, 27 nt, synthetic construct
  misc_feature 1..27: note = Solute carrier family 43 member 3 (191-199)
  source 1..27: mol_type = other RNA
ctgctctacgagaagggcatcagcctt

SEQ ID NO: 53857 - RNA, 30 nt, synthetic construct
  misc_feature 1..30: note = Integrin alpha-4 (42-51)
  source 1..30: mol_type = other RNA
ctgctctaccagggcccccacaacaccctt

SEQ ID NO: 53858 - RNA, 30 nt, synthetic construct; identical to SEQ ID NO: 29631
  misc_feature 1..30: note = Uridine-cytidine kinase-like 1 (470-479)
  source 1..30: mol_type = other RNA

SEQ ID NO: 53859 - RNA, 27 nt, synthetic construct
  misc_feature 1..27: note = KH domain-containing, RNA-binding, signal transduction-associated protein 1 (243-251)
  source 1..27: mol_type = other RNA
ctgatggcccacgctatggaggaagtg

SEQ ID NO: 53860 - RNA, 27 nt, synthetic construct
  misc_feature 1..27: note = Rho guanine nucleotide exchange factor 18 (267-275)
  source 1..27: mol_type = other RNA
ctgatgcagaccgaggtgcaccatgtc

SEQ ID NO: 53861 - RNA, 27 nt, synthetic construct
  misc_feature 1..27: note = Steroid receptor RNA activator 1 (183-191)
  source 1..27: mol_type = other RNA
ctgatggtggaccacgtcaccgaggtt

SEQ ID NO: 53862 - RNA, 30 nt, synthetic construct
  misc_feature 1..30: note = Cytochrome c oxidase subunit 7C, mitochondrial (54-63)
  source 1..30: mol_type = other RNA
ctggtggtcagacaccagctccttaagacc

SEQ ID NO: 53863 - RNA, 27 nt, synthetic construct
  misc_feature 1..27: note = EH domain-containing protein 1 (385-393)
  source 1..27: mol_type = other RNA
atgctggccaacgacatcgctagactc

SEQ ID NO: 53864 - RNA, 27 nt, synthetic construct
  misc_feature 1..27: note = Ubiquitin carboxyl-terminal hydrolase 11 (568-576)
  source 1..27: mol_type = other RNA
atgctgttcggccaccccctccttgtg

SEQ ID NO: 53865 - RNA, 27 nt, synthetic construct
  misc_feature 1..27: note = Flotillin-1 (356-364)
  source 1..27: mol_type = other RNA
atgctgctcgagaagcttccccaggtg

SEQ ID NO: 53866 - RNA, 27 nt, synthetic construct
  misc_feature 1..27: note = Breast cancer type 1 susceptibility protein (1657-1665)
  source 1..27: mol_type = other RNA
atgctgaacgagcacgacttcgaagtg

SEQ ID NO: 53867 - RNA, 27 nt, synthetic construct
  misc_feature 1..27: note = trim5alpha (75-83)
  source 1..27: mol_type = other RNA
aacatcgtggagaagctgagagaagtc

SEQ ID NO: 53868 - RNA, 27 nt, synthetic construct
  misc_feature 1..27: note = E3 ubiquitin-protein ligase TRIM22 (76-84)
  source 1..27: mol_type = other RNA
aacatcgtggagagagtcaaggaagtt

SEQ ID NO: 53869 - RNA, 27 nt, synthetic construct
  misc_feature 1..27: note = Ral GTPase-activating protein subunit beta (190-198)
  source 1..27: mol_type = other RNA
aacctggccgagaagctcatcggcgtg

SEQ ID NO: 53870 - RNA, 27 nt, synthetic construct
  misc_feature 1..27: note = F-box only protein 22 (24-32)
  source 1..27: mol_type = other RNA
aacctggccgaggtggtcgaaagagtt

SEQ ID NO: 53871 - RNA, 27 nt, synthetic construct
  misc_feature 1..27: note = Glycerol-3-phosphate dehydrogenase, mitochondrial (146-154)
  source 1..27: mol_type = other RNA
aacctgctcgagatcgccccccacctt

SEQ ID NO: 53872 - RNA, 27 nt, synthetic construct
  misc_feature 1..27: note = Propionyl-CoA carboxylase beta chain, mitochondrial (27-35)
  source 1..27: mol_type = other RNA
aacatggtggacatcattcacagcgtc

SEQ ID NO: 53873 - RNA, 27 nt, synthetic construct
  misc_feature 1..27: note = Transcription elongation factor SPT5 (558-566)
  source 1..27: mol_type = other RNA
aacatgtacggcaaggtggtcaccgtt

SEQ ID NO: 53874 - RNA, 30 nt, synthetic construct
  misc_feature 1..30: note = Utrophin (2315-2324)
  source 1..30: mol_type = other RNA
aaccagtgggacggcacccaacacggggtg

SEQ ID NO: 53875 - RNA, 39 nt, synthetic construct
  misc_feature 1..39: note = Melanocyte protein PMEL (45-57)
  source 1..39: mol_type = other RNA
aacagacagctgtaccccgagtggaccgaagcccaaagg

SEQ ID NO: 53876 - RNA, 27 nt, synthetic construct
  misc_feature 1..27: note = 60S ribosomal protein L35 (20-28)
  source 1..27: mol_type = other RNA
cagctggacgatctcaaggtggagctt

SEQ ID NO: 53877 - RNA, 27 nt, synthetic construct
  misc_feature 1..27: note = SNARE-associated protein Snapin (39-47)
  source 1..27: mol_type = other RNA
cagctggacagccacgtgcatgccgtc

SEQ ID NO: 53878 - RNA, 27 nt, synthetic construct
  misc_feature 1..27: note = Testis-expressed sequence 10 protein (575-583)
  source 1..27: mol_type = other RNA
cagctgatcgacattatacacaccgcc

SEQ ID NO: 53879 - RNA, 27 nt, synthetic construct
  misc_feature 1..27: note = SEC14-like protein 1 (559-567)
  source 1..27: mol_type = other RNA
cagctgatcgacaaggtgtggcaactc

SEQ ID NO: 53880 - RNA, 27 nt, synthetic construct
  misc_feature 1..27: note = Ethylmalonyl-CoA decarboxylase (79-87)
  source 1..27: mol_type = other RNA
cagctgctcgagaaggtgatcgaactt

SEQ ID NO: 53881 - RNA, 27 nt, synthetic construct
  misc_feature 1..27: note = HEAT repeat-containing protein 2 (843-851)
  source 1..27: mol_type = other RNA
cagctgctccaacacgtgcaggccgtc

SEQ ID NO: 53882 - RNA, 27 nt, synthetic construct
  misc_feature 1..27: note = 60S ribosomal protein L6 (267-275)
  source 1..27: mol_type = other RNA
cagctgcaaggctacctcagaagcgtg

SEQ ID NO: 53883 - RNA, 27 nt, synthetic construct
  misc_feature 1..27: note = Mitochondrial dynamics protein MID51 (384-392)
  source 1..27: mol_type = other RNA
cagctgaccaacgtgatcctccacctt

SEQ ID NO: 53884 - RNA, 27 nt, synthetic construct
  misc_feature 1..27: note = Casein kinase I isoform delta (111-119)
  source 1..27: mol_type = other RNA
cagatgatcagcagaattgagtacata

SEQ ID NO: 53885 - RNA, 33 nt, synthetic construct
  misc_feature 1..33: note = Zinc finger protein 131 (113-123)
  source 1..33: mol_type = other RNA
cagatgctggaggccatcaaggctctcgaagtg

SEQ ID NO: 53886 - RNA, 27 nt, synthetic construct
  misc_feature 1..27: note = 40S ribosomal protein S8 (77-85)
  source 1..27: mol_type = other RNA
agaatcattgacgtggtctacaacgcc

SEQ ID NO: 53887 - RNA, 33 nt, synthetic construct
  misc_feature 1..33: note = CCR4-NOT transcription complex subunit 1 (459-469)
  source 1..33: mol_type = other RNA
agactggccgaggtgggccagtacgaacaagtc

SEQ ID NO: 53888 - RNA, 27 nt, synthetic construct
  misc_feature 1..27: note = DNA replication licensing factor MCM7 (164-172)
  source 1..27: mol_type = other RNA
agactggcccagcacatcacctacgtg

SEQ ID NO: 53889 - RNA, 27 nt, synthetic construct
  misc_feature 1..27: note = Vacuolar protein sorting-associated protein 53 homolog (74-82)
  source 1..27: mol_type = other RNA
agactggacgataacatcaggaccgtg

SEQ ID NO: 53890 - RNA, 33 nt, synthetic construct
  misc_feature 1..33: note = Putative sodium-coupled neutral amino acid transporter 10 (413-423)
  source 1..33: mol_type = other RNA
agactgggcgaggccgaagggctcatgaaggtg

SEQ ID NO: 53891 - RNA, 30 nt, synthetic construct
  misc_feature 1..30: note = Protein quaking (39-48)
  source 1..30: mol_type = other RNA
agactgctcgacgaggaaatcagcagggtg

SEQ ID NO: 53892 - RNA, 27 nt, synthetic construct
  misc_feature 1..27: note = CLIP-associating protein 1 (367-375)
  source 1..27: mol_type = other RNA
agactgctcgacggcgccttcaagctt

SEQ ID NO: 53893 - RNA, 27 nt, synthetic construct
  misc_feature 1..27: note = KN motif and ankyrin repeat domain-containing protein 2 (654-662)
  source 1..27: mol_type = other RNA
agactgctcgactacgtggtcaacatc

SEQ ID NO: 53894 - RNA, 33 nt, synthetic construct
  misc_feature 1..33: note = Pyridoxal-dependent decarboxylase domain-containing protein 1 (630-640)
  source 1..33: mol_type = other RNA
agactgctcgaggaaggcgtgcttaggcagatc

SEQ ID NO: 53895 - RNA, 27 nt, synthetic construct
  misc_feature 1..27: note = Pinin (207-215)
  source 1..27: mol_type = other RNA
agactgctcgagcagaaggtggaactt

SEQ ID NO: 53896 - RNA, 27 nt, synthetic construct
  misc_feature 1..27: note = E3 ubiquitin-protein ligase RNF213 (4648-4656)
  source 1..27: mol_type = other RNA
agactgctccaggagcaacaccagctt

SEQ ID NO: 53897 - RNA, 27 nt, synthetic construct
  misc_feature 1..27: note = V-type proton ATPase subunit H (382-390)
  source 1..27: mol_type = other RNA
agactgaacgagaagaattacgaactc

SEQ ID NO: 53898 - RNA, 27 nt, synthetic construct
  misc_feature 1..27: note = Cytospin-A (639-647)
  source 1..27: mol_type = other RNA
agactgcaggacgccatcgctaaggtg

SEQ ID NO: 53899 - RNA, 30 nt, synthetic construct
  misc_feature 1..30: note = Ubiquitin-conjugating enzyme E2 A (15-24)
  source 1..30: mol_type = other RNA
agactgcaggaggacccccctgccggcgtg

SEQ ID NO: 53900 - RNA, 30 nt, synthetic construct
  misc_feature 1..30: note = Ubiquitin-conjugating enzyme E2 B (15-24)
  source 1..30: mol_type = other RNA
agactgcaggaggacccccctgtgggcgtc

SEQ ID NO: 53901 - RNA, 27 nt, synthetic construct
  misc_feature 1..27: note = Inhibitor of nuclear factor kappa-B kinase-interacting protein (38-46)
  source 1..27: mol_type = other RNA
agactgcaggaggaaatcaacgaggtg

SEQ ID NO: 53902 - RNA, 27 nt, synthetic construct
  misc_feature 1..27: note = Double-strand-break repair protein rad21 homolog (450-458)
  source 1..27: mol_type = other RNA
agactgcaggagagcgtgatggaagcc

SEQ ID NO: 53903 - RNA, 30 nt, synthetic construct
  misc_feature 1..30: note = SHC SH2 domain-binding protein 1 (594-603)
  source 1..30: mol_type = other RNA
agactgagcgagctcggcatcacccaggcc

SEQ ID NO: 53904 - RNA, 27 nt, synthetic construct
  misc_feature 1..27: note = PRA1 family protein 3 (178-186)
  source 1..27: mol_type = other RNA
agactgaccgactacatcagcaaggtg

SEQ ID NO: 53905 - RNA, 27 nt, synthetic construct
  misc_feature 1..27: note = Eukaryotic translation initiation factor 3 subunit H (165-173)
  source 1..27: mol_type = other RNA
agactgacccccaagctcatggaggtg

SEQ ID NO: 53906 - RNA, 33 nt, synthetic construct
  misc_feature 1..33: note = Proliferating cell nuclear antigen (5-15)
  source 1..33: mol_type = other RNA
agactggtgcagggcagcatcctcaagaaagtc

SEQ ID NO: 53907 - RNA, 27 nt, synthetic construct
  misc_feature 1..27: note = DEP domain-containing protein 1B (15-23)
  source 1..27: mol_type = other RNA
agactgtggaacgagaccgtggaactc

SEQ ID NO: 53908 - RNA, 27 nt, synthetic construct
  misc_feature 1..27: note = DNA damage-binding protein 1 (134-142)
  source 1..27: mol_type = other RNA
agactgtacgacggcctcttcaaggtg

SEQ ID NO: 53909 - RNA, 36 nt, synthetic construct
  misc_feature 1..36: note = ATP-binding cassette sub-family B member 10, mitochondrial (542-553)
  source 1..36: mol_type = other RNA
agactgtacgaccccgccagcggcaccatctccctc

SEQ ID NO: 53910 - RNA, 27 nt, synthetic construct
  misc_feature 1..27: note = Serine/threonine-protein kinase Kist (287-295)
  source 1..27: mol_type = other RNA
agaatgttcgacggcaagtttgtggtc

SEQ ID NO: 53911 - RNA, 30 nt, synthetic construct
  misc_feature 1..30: note = Serine/threonine-protein kinase Kist (287-296)
  source 1..30: mol_type = other RNA
agaatgttcgacggcaagtttgtggtcgcc

SEQ ID NO: 53912 - RNA, 36 nt, synthetic construct
  misc_feature 1..36: note = Melanocyte protein PMEL (46-57)
  source 1..36: mol_type = other RNA
agacagctgtaccccgagtggaccgaagcccaaagg

SEQ ID NO: 53913 - RNA, 42 nt, synthetic construct
  misc_feature 1..42: note = Melanocyte protein PMEL (46-59)
  source 1..42: mol_type = other RNA
agacagctgtaccccgagtggaccgaagcccaaaggctcgac

SEQ ID NO: 53914 - RNA, 54 nt, synthetic construct
  misc_feature 1..54: note = Melanocyte protein PMEL (40-57)
  source 1..54: mol_type = other RNA
agaaccaaggcctggaacaggcagctgtaccccgagtggacagaagctcaacgg

SEQ ID NO: 53915 - RNA, 33 nt, synthetic construct
  misc_feature 1..33: note = Aurora kinase B (360-370)
  source 1..33: mol_type = other RNA
agagtgctgccccctagcgccctccagtccgtc

SEQ ID NO: 53916 - RNA, 27 nt, synthetic construct
  misc_feature 1..27: note = SHC-transforming protein 1 (255-263)
  source 1..27: mol_type = other RNA
agagtgccccctccaccgcagagcgtc

SEQ ID NO: 53917 - RNA, 27 nt, synthetic construct
  misc_feature 1..27: note = Serine/threonine-protein phosphatase PP1-gamma catalytic subunit (7-15)
  source 1..27: mol_type = other RNA
agcatcattcagagactgctcgaggtg

SEQ ID NO: 53918 - RNA, 27 nt, synthetic construct
  misc_feature 1..27: note = Eukaryotic translation initiation factor 2 subunit 1 (110-118)
  source 1..27: mol_type = other RNA
agcatcctgagacacgtggccgaggtc

SEQ ID NO: 53919 - RNA, 27 nt, synthetic construct
  misc_feature 1..27: note = Anaphase-promoting complex subunit 7 (276-284)
  source 1..27: mol_type = other RNA
agcctggccgacctctacttcagagct

SEQ ID NO: 53920 - RNA, 27 nt, synthetic construct
  misc_feature 1..27: note = TATA-binding protein-associated factor 172 (784-792)
  source 1..27: mol_type = other RNA
agcctggccgacgtgcacatcgaggtc

SEQ ID NO: 53921 - RNA, 27 nt, synthetic construct
  misc_feature 1..27: note = 2'-5'-oligoadenylate synthase 3 (247-255)
  source 1..27: mol_type = other RNA
agcctggccgagggcctcagaaccgtg

SEQ ID NO: 53922 - RNA, 27 nt, synthetic construct
  misc_feature 1..27: note = LisH domain-containing protein ARMC9 (400-408)
  source 1..27: mol_type = other RNA
agcctggccgagggcagactctacctt

SEQ ID NO: 53923 - RNA, 27 nt, synthetic construct
  misc_feature 1..27: note = Ankyrin repeat and SOCS box protein 6 (353-361)
  source 1..27: mol_type = other RNA
agcctggccgagaagatccaggctctc

SEQ ID NO: 53924 - RNA, 30 nt, synthetic construct
  misc_feature 1..30: note = DNA polymerase epsilon catalytic subunit A (943-952)
  source 1..30: mol_type = other RNA
agcctggccgagctcaagggcttcgaagtg

SEQ ID NO: 53925 - RNA, 27 nt, synthetic construct
  misc_feature 1..27: note = Sestrin-1 (129-137)
  source 1..27: mol_type = other RNA
agcctggccgagctcgtgcacgctgtc

SEQ ID NO: 53926 - RNA, 30 nt, synthetic construct
  misc_feature 1..30: note = V-type proton ATPase catalytic subunit A (500-509)
  source 1..30: mol_type = other RNA
agcctggccgagaccgacaagatcacactc

SEQ ID NO: 53927 - RNA, 27 nt, synthetic construct
  misc_feature 1..27: note = Trinucleotide repeat-containing gene 6A protein (198-206)
  source 1..27: mol_type = other RNA
agcctggcccacgagctctggaaggtg

SEQ ID NO: 53928 - RNA, 27 nt, synthetic construct
  misc_feature 1..27: note = TNFAIP3-interacting protein 2 (146-154)
  source 1..27: mol_type = other RNA
agcctggccaacgagacccaccagctc

SEQ ID NO: 53929 - RNA, 27 nt, synthetic construct
  misc_feature 1..27: note = Phosphatidylinositol 3-kinase regulatory subunit gamma (63-71)
  source 1..27: mol_type = other RNA
agcctggcccagtacaaccccaagctc

SEQ ID NO: 53930 - RNA, 27 nt, synthetic construct
  misc_feature 1..27: note = Baculoviral IAP repeat-containing protein 6 (1230-1238)
  source 1..27: mol_type = other RNA
agcctggcctccctccttgctaaggtg

SEQ ID NO: 53931 - RNA, 27 nt, synthetic construct
  misc_feature 1..27: note = TELO2-interacting protein 1 homolog (380-388)
  source 1..27: mol_type = other RNA
agcctggccacctccctccccagactt

SEQ ID NO: 53932 - RNA, 27 nt, synthetic construct
  misc_feature 1..27: note = Leucine-rich repeat and coiled-coil domain-containing protein 1 (37-45)
  source 1..27: mol_type = other RNA
agcctggactccaccctccacgccgtg

SEQ ID NO: 53933 - RNA, 30 nt, synthetic construct
  misc_feature 1..30: note = Transmembrane emp24 domain-containing protein 9 (130-139)
  source 1..30: mol_type = other RNA
agcctgttcgccggcgggatgctcagagtg

SEQ ID NO: 53934 - RNA, 30 nt, synthetic construct
  misc_feature 1..30: note = F-box/LRR-repeat protein 5 (73-82)
  source 1..30: mol_type = other RNA
agcctgttcgagaagggcctcaaaaacgtg

SEQ ID NO: 53935 - RNA, 27 nt, synthetic construct
  misc_feature 1..27: note = Programmed cell death 6-interacting protein (103-111)
  source 1..27: mol_type = other RNA
agcctgttcggcgggtccgtgaagctc

SEQ ID NO: 53936 - RNA, 30 nt, synthetic construct
  misc_feature 1..30: note = Ribosome production factor 1 (265-274)
  source 1..30: mol_type = other RNA
agcctgttcccccacaaccctcagtttatc

SEQ ID NO: 53937 - RNA, 27 nt, synthetic construct
  misc_feature 1..27: note = Exostosin-2 (478-486)
  source 1..27: mol_type = other RNA
agcctgttcagagtgatcaccgaggtc

SEQ ID NO: 53938 - RNA, 24 nt, synthetic construct
  misc_feature 1..24: note = Bloom syndrome protein (853-860)
  source 1..24: mol_type = other RNA
agcctgggcaaggtgttcggggtc

SEQ ID NO: 53939 - RNA, 27 nt, synthetic construct
  misc_feature 1..27: note = U1 small nuclear ribonucleoprotein C (24-32)
  source 1..27: mol_type = other RNA
agcctgatcgacaagaccacagccgct

SEQ ID NO: 53940 - RNA, 27 nt, synthetic construct
  misc_feature 1..27: note = AAC41999.1 (170-178)
  source 1..27: mol_type = other RNA
agcctgatcgagaagattcccaccgcc

SEQ ID NO: 53941 - RNA, 27 nt, synthetic construct
  misc_feature 1..27: note = Transcription factor RFX3 (374-382)
  source 1..27: mol_type = other RNA
agcctgatcgagaagctctggcagacc

SEQ ID NO: 53942 - RNA, 27 nt, synthetic construct
  misc_feature 1..27: note = Importin subunit alpha-1 (490-498)
  source 1..27: mol_type = other RNA
agcctgatcgagaagtacttctccgtg

SEQ ID NO: 53943 - RNA, 27 nt, synthetic construct
  misc_feature 1..27: note = Ubiquitin carboxyl-terminal hydrolase 34 (1442-1450)
  source 1..27: mol_type = other RNA
agcctgatccagagactcatgtccgtg

SEQ ID NO: 53944 - RNA, 27 nt, synthetic construct
  misc_feature 1..27: note = Polymerase I and transcript release factor (56-64)
  source 1..27: mol_type = other RNA
agcctgctcgacaagatcattggcgcc

SEQ ID NO: 53945 - RNA, 30 nt, synthetic construct
  misc_feature 1..30: note = Rho guanine nucleotide exchange factor 18 (642-651)
  source 1..30: mol_type = other RNA
agcctgctcgagaagcagcaaatctacctt

SEQ ID NO: 53946 - RNA, 27 nt, synthetic construct
  misc_feature 1..27: note = Mediator of RNA polymerase II transcription subunit 12 (1224-1232)
  source 1..27: mol_type = other RNA
agcctgctcgagaacatcgccaaggct

SEQ ID NO: 53947 - RNA, 27 nt, synthetic construct
  misc_feature 1..27: note = Heterogeneous nuclear ribonucleoprotein C-like 1 (196-204)
  source 1..27: mol_type = other RNA
agcctgctcgagaaccttgaaaagatc

SEQ ID NO: 53948 - RNA, 27 nt, synthetic construct
  misc_feature 1..27: note = Serine/threonine-protein kinase ATR (549-557)
  source 1..27: mol_type = other RNA
agcctgctcgagtccgtgcagaagctt

SEQ ID NO: 53949 - RNA, 33 nt, synthetic construct
  misc_feature 1..33: note = Neurochondrin (337-347)
  source 1..33: mol_type = other RNA
agcctgctcaaggagccccagaaagtgcaactt

SEQ ID NO: 53950 - RNA, 30 nt, synthetic construct
  misc_feature 1..30: note = Adrenocortical dysplasia protein homolog (124-133)
  source 1..30: mol_type = other RNA
agcctgctccccaccgagcagcctagactt

SEQ ID NO: 53951 - RNA, 27 nt, synthetic construct
  misc_feature 1..27: note = Ran GTPase-activating protein 1 (579-587)
  source 1..27: mol_type = other RNA
agcctgctccagaccctttacaaggtg

SEQ ID NO: 53952 - RNA, 27 nt, synthetic construct
  misc_feature 1..27: note = Arfaptin-2 (71-79)
  source 1..27: mol_type = other RNA
agcctgctccagacccaacacgccctt

SEQ ID NO: 53953 - RNA, 30 nt, synthetic construct
  misc_feature 1..30: note = Pericentrin (1754-1763)
  source 1..30: mol_type = other RNA
agcctgatgggccccgtggtccacgaggtt

SEQ ID NO: 53954 - RNA, 27 nt, synthetic construct
  misc_feature 1..27: note = Hermansky-Pudlak syndrome 4 protein (573-581)
  source 1..27: mol_type = other RNA
agcctgaacggcctcgaggtgcacctt

SEQ ID NO: 53955 - RNA, 27 nt, synthetic construct
  misc_feature 1..27: note = Choline/ethanolamine kinase (86-94)
  source 1..27: mol_type = other RNA
agcctgcccgaccacctcccttccgtg

SEQ ID NO: 53956 - RNA, 27 nt, synthetic construct
  misc_feature 1..27: note = WD repeat-containing protein 3 (348-356)
  source 1..27: mol_type = other RNA
agcctgcaggacgagatccaaagagtg

SEQ ID NO: 53957 - RNA, 27 nt, synthetic construct
  misc_feature 1..27: note = Peroxisomal membrane protein 4 (59-67)
  source 1..27: mol_type = other RNA
agcctgcaggagaagctctgggccatc

SEQ ID NO: 53958 - RNA, 27 nt, synthetic construct
  misc_feature 1..27: note = Dynactin subunit 1 (1169-1177)
  source 1..27: mol_type = other RNA
agcctgtccgacaccgtggagaagctc

SEQ ID NO: 53959 - RNA, 27 nt, synthetic construct
  misc_feature 1..27: note = AP-3 complex subunit mu-1 (219-227)
  source 1..27: mol_type = other RNA
agcctgtccttcatgaaccccagactc

SEQ ID NO: 53960 - RNA, 27 nt, synthetic construct
  misc_feature 1..27: note = Alsin (755-763)
  source 1..27: mol_type = other RNA
agcctgtcctctttcctccacggcgtg

SEQ ID NO: 53961 - RNA, 27 nt, synthetic construct
  misc_feature 1..27: note = Eukaryotic translation initiation factor 3 subunit F (301-309)
  source 1..27: mol_type = other RNA
agcctggtgaaccaggtccccaagatc

SEQ ID NO: 53962 - RNA, 27 nt, synthetic construct
  misc_feature 1..27: note = FACT complex subunit SSRP1 (309-317)
  source 1..27: mol_type = other RNA
agcctgtacgagatggtgtccagagtc

SEQ ID NO: 53963 - RNA, 27 nt, synthetic construct
  misc_feature 1..27: note = Mediator of RNA polymerase II transcription subunit 12 (1349-1357)
  source 1..27: mol_type = other RNA
agcctgtactcccaggtgcaccaaatc

SEQ ID NO: 53964 - RNA, 27 nt, synthetic construct
  misc_feature 1..27: note = RNA-binding protein 28 (53-61)
  source 1..27: mol_type = other RNA
agcatgctggaggacgtgcagagagcc

SEQ ID NO: 53965 - RNA, 27 nt, synthetic construct
  misc_feature 1..27: note = Zinc finger MYM-type protein 3 (1346-1354)
  source 1..27: mol_type = other RNA
agcatgctgaacagaatcctcgccgtg

SEQ ID NO: 53966 - RNA, 27 nt, synthetic construct
  misc_feature 1..27: note = RNA polymerase II-associated protein 1 (1333-1341)
  source 1..27: mol_type = other RNA
agcatgctgcagaagacctggctcctt

SEQ ID NO: 53967 - RNA, 27 nt, synthetic construct
  misc_feature 1..27: note = General transcription factor 3C polypeptide 5 (74-82)
  source 1..27: mol_type = other RNA
agcatgtacgacaaggtgctgatgctc

SEQ ID NO: 53968 - RNA, 27 nt, synthetic construct
  misc_feature 1..27: note = EH domain-containing protein 4 (482-490)
  source 1..27: mol_type = other RNA
agcgtgctgggcaagatctggaaactc

SEQ ID NO: 53969 - RNA, 27 nt, synthetic construct
  misc_feature 1..27: note = Huntingtin (111-119)
  source 1..27: mol_type = other RNA
accctggccgctgcagtgcccaagatc

SEQ ID NO: 53970 - RNA, 27 nt, synthetic construct
  misc_feature 1..27: note = Set1/Ash2 histone methyltransferase complex subunit ASH2 (512-520)
  source 1..27: mol_type = other RNA
accctggccgacgtgctctaccacgtc

SEQ ID NO: 53971 - RNA, 30 nt, synthetic construct
  misc_feature 1..30: note = Non-POU domain-containing octamer-binding protein (31-40)
  source 1..30: mol_type = other RNA
accctggccgagatcgctaaggtggaactc

SEQ ID NO: 53972 - RNA, 27 nt, synthetic construct
  misc_feature 1..27: note = Ancient ubiquitous protein 1 (365-373)
  source 1..27: mol_type = other RNA
accctggcccagagagtgaaggaggtc

SEQ ID NO: 53973 - RNA, 27 nt, synthetic construct
  misc_feature 1..27: note = Pre-mRNA-processing factor 40 homolog A (170-178)
  source 1..27: mol_type = other RNA
accctggacgccggcaacatcaagctc

SEQ ID NO: 53974 - RNA, 27 nt, synthetic construct
  misc_feature 1..27: note = Coiled-coil domain-containing protein 93 (524-532)
  source 1..27: mol_type = other RNA
accctggacgataagaaagtgtacctc

SEQ ID NO: 53975 - RNA, 27 nt, synthetic construct
  misc_feature 1..27: note = Probable ATP-dependent RNA helicase DDX27 (87-95)
  source 1..27: mol_type = other RNA
accctggacgagaagatcgaaaaagtg

SEQ ID NO: 53976 - RNA, 27 nt, synthetic construct
  misc_feature 1..27: note = Nuclear respiratory factor 1 (118-126)
  source 1..27: mol_type = other RNA
accctggacgagtacacaactagagtg

SEQ ID NO: 53977 - RNA, 27 nt, synthetic construct
  misc_feature 1..27: note = Fanconi anemia group D2 protein (847-855)
  source 1..27: mol_type = other RNA
accctggacatcacaccccacactgtg

SEQ ID NO: 53978 - RNA, 27 nt, synthetic construct
  misc_feature 1..27: note = E3 ubiquitin-protein ligase UHRF1 (57-65)
  source 1..27: mol_type = other RNA
accctgttcgactacgaggtgagactc

SEQ ID NO: 53979 - RNA, 27 nt, synthetic construct
  misc_feature 1..27: note = Staphylococcal nuclease domain-containing protein 1 (582-590)
  source 1..27: mol_type = other RNA
accctgttcacaaaggagctcgtgctt

SEQ ID NO: 53980 - RNA, 33 nt, synthetic construct
  misc_feature 1..33: note = Dynamin-2 (133-143)
  source 1..33: mol_type = other RNA
accctgatcgacctccccggcattacaaaggtg

SEQ ID NO: 53981 - RNA, 27 nt, synthetic construct
  misc_feature 1..27: note = Cyclic AMP-dependent transcription factor ATF-1 (254-262)
  source 1..27: mol_type = other RNA
accctgatcgaggaactcaagacactt

SEQ ID NO: 53982 - RNA, 30 nt, synthetic construct
  misc_feature 1..30: note = Cleavage and polyadenylation specificity factor subunit 1 (348-357)
  source 1..30: mol_type = other RNA
accctgatcacagacggcatgagaagcgtg

SEQ ID NO: 53983 - RNA, 27 nt, synthetic construct
  misc_feature 1..27: note = Negative elongation factor C/D (294-302)
  source 1..27: mol_type = other RNA
accctgctcgacagaatggtgcacctt

SEQ ID NO: 53984 - RNA, 30 nt, synthetic construct
  misc_feature 1..30: note = HEAT repeat-containing protein 5B (1620-1629)
  source 1..30: mol_type = other RNA
accctgctcgacagcccctacgccagagtg

SEQ ID NO: 53985 - RNA, 30 nt, synthetic construct
  misc_feature 1..30: note = NmrA-like family domain-containing protein 1 (23-32)
  source 1..30: mol_type = other RNA
accctgctcgaggacggcacattcaaggtg

SEQ ID NO: 53986 - RNA, 27 nt, synthetic construct
  misc_feature 1..27: note = Tetratricopeptide repeat protein 21B (311-319)
  source 1..27: mol_type = other RNA
accctgctcgagagagccttcagcctt

SEQ ID NO: 53987 - RNA, 27 nt, synthetic construct
  misc_feature 1..27: note = Cell division cycle protein 27 homolog (544-552)
  source 1..27: mol_type = other RNA
accctgctcggccacgagttcgtgctt

SEQ ID NO: 53988 - RNA, 27 nt, synthetic construct
  misc_feature 1..27: note = Coatomer subunit alpha (88-96)
  source 1..27: mol_type = other RNA
accctgctcggccaccttgactacatc

SEQ ID NO: 53989 - RNA, 27 nt, synthetic construct
  misc_feature 1..27: note = Inositol 1,4,5-trisphosphate receptor type 1 (2386-2394)
  source 1..27: mol_type = other RNA
accctgctcaacgtgatcaagagcgtc

SEQ ID NO: 53990 - RNA, 27 nt, synthetic construct
  misc_feature 1..27: note = Perilipin-2 (327-335)
  source 1..27: mol_type = other RNA
accctgctcagcaacatccagggcgtg

SEQ ID NO: 53991 - RNA, 27 nt, synthetic construct
  misc_feature 1..27: note = V-type proton ATPase subunit C 1 (184-192)
  source 1..27: mol_type = other RNA
accctgctcgtggtcgttcccaagctt

SEQ ID NO: 53992 - RNA, 27 nt, synthetic construct
  misc_feature 1..27: note = Protein NOXP20 (254-262)
  source 1..27: mol_type = other RNA
accctgatggagagaacagtgagcctc

SEQ ID NO: 53993 - RNA, 27 nt, synthetic construct
  misc_feature 1..27: note = CAD protein (639-647)
  source 1..27: mol_type = other RNA
accctgaacgacagagagtaccagctc

SEQ ID NO: 53994 - RNA, 27 nt, synthetic construct
  misc_feature 1..27: note = Short transient receptor potential channel 1 (45-53)
  source 1..27: mol_type = other RNA
accctgaacgagaagctcttccttctg

SEQ ID NO: 53995 - RNA, 27 nt, synthetic construct
  misc_feature 1..27: note = Pinin (7-15)
  source 1..27: mol_type = other RNA
accctgcaggagcaactcgaaaaggcc

SEQ ID NO: 53996 - RNA, 27 nt, synthetic construct
  misc_feature 1..27: note = Mitochondrial import receptor subunit TOM22 homolog (35-43)
  source 1..27: mol_type = other RNA
accctgagcgagagactctggggcctt

SEQ ID NO: 53997 - RNA, 27 nt, synthetic construct
  misc_feature 1..27: note = AP-3 complex subunit mu-2 (219-227)
  source 1..27: mol_type = other RNA
accctgagcttcatgaaccccagactc

SEQ ID NO: 53998 - RNA, 27 nt, synthetic construct
  misc_feature 1..27: note = Splicing factor 3B subunit 3 (165-173)
  source 1..27: mol_type = other RNA
accctggtgtaccacgtcgttggcgtg

SEQ ID NO: 53999 - RNA, 33 nt, synthetic construct
  misc_feature 1..33: note = Malate dehydrogenase, mitochondrial (54-64)
  source 1..33: mol_type = other RNA
accctgtacgacatcgcccacacacccggcgtg

SEQ ID NO: 54000 - RNA, 27 nt, synthetic construct
  misc_feature 1..27: note = 60S ribosomal protein L10a (9-17)
  source 1..27: mol_type = other RNA
accctgtacgaggccgtgagagaagtc

SEQ ID NO: 54001 - RNA, 33 nt, synthetic construct
  misc_feature 1..33: note = Quinone oxidoreductase (225-235)
  source 1..33: mol_type = other RNA
accatggccaaggagagctccatcattggcgtg

SEQ ID NO: 54002 - RNA, 27 nt, synthetic construct
  misc_feature 1..27: note = Dual specificity protein phosphatase 14 (92-100)
  source 1..27: mol_type = other RNA
accgtggccgacaagatccacagcgtc

SEQ ID NO: 54003 - RNA, 27 nt, synthetic construct
  misc_feature 1..27: note = EH domain-containing protein 1 (479-487)
  source 1..27: mol_type = other RNA
accgtgctgggcaagatctggaaactc

SEQ ID NO: 54004 - RNA, 27 nt, synthetic construct
  misc_feature 1..27: note = Cell division cycle and apoptosis regulator protein 1 (1120-1128)
  source 1..27: mol_type = other RNA
accgtgatggacgagatccacacagtc

SEQ ID NO: 54005 - RNA, 27 nt, synthetic construct
  misc_feature 1..27: note = Protein PAT1 homolog 1 (459-467)
  source 1..27: mol_type = other RNA
gtgatcattgagaagacctacagcctg

SEQ ID NO: 54006 - RNA, 30 nt, synthetic construct
  misc_feature 1..30: note = Tropomyosin alpha-4 chain (134-143)
  source 1..30: mol_type = other RNA
gtgatcctggagggcgaactcgagagagcc

SEQ ID NO: 54007 - RNA, 27 nt, synthetic construct
  misc_feature 1..27: note = 40S ribosomal protein S15a (6-14)
  source 1..27: mol_type = other RNA
gtgctggccgacgctctcaagagcatc

SEQ ID NO: 54008 - RNA, 27 nt, synthetic construct
  misc_feature 1..27: note = Prefoldin subunit 4 (107-115)
  source 1..27: mol_type = other RNA
gtgctggccgacctcaaggtccagctt

SEQ ID NO: 54009 - RNA, 27 nt, synthetic construct
  misc_feature 1..27: note = Neurobeachin-like protein 2 (65-73)
  source 1..27: mol_type = other RNA
gtgctggccgagcagctccaccaagct

SEQ ID NO: 54010 - RNA, 30 nt, synthetic construct
  misc_feature 1..30: note = E3 ubiquitin-protein ligase RNF130 (74-83)
  source 1..30: mol_type = other RNA
gtgctggcccccctccctcttcacggcgtc

SEQ ID NO: 54011 - RNA, 27 nt, synthetic construct
  misc_feature 1..27: note = Calmodulin-regulated spectrin-associated protein 1 (1065-1073)
  source 1..27: mol_type = other RNA
gtgctggacgccagcgtcaaggaggtt

SEQ ID NO: 54012 - RNA, 27 nt, synthetic construct
  misc_feature 1..27: note = HEAT repeat-containing protein 3 (702-710)
  source 1..27: mol_type = other RNA
gtgctggacaacgtcaagatgaatctc

SEQ ID NO: 54013 - RNA, 27 nt, synthetic construct
  misc_feature 1..27: note = Carbohydrate sulfotransferase 14 (134-142)
  source 1..27: mol_type = other RNA
gtgctggacagcgtcgatgttagactc

SEQ ID NO: 54014 - RNA, 30 nt, synthetic construct
  misc_feature 1..30: note = Cytosolic carboxypeptidase 1 (592-601)
  source 1..30: mol_type = other RNA
gtgctgttcgagggcagaaccgtccagctc

SEQ ID NO: 54015 - RNA, 27 nt, synthetic construct
  misc_feature 1..27: note = Isochorismatase domain-containing protein 1 (143-151)
  source 1..27: mol_type = other RNA
gtgctgttcggcgtcgagacccacgtt

SEQ ID NO: 54016 - RNA, 27 nt, synthetic construct
  misc_feature 1..27: note = Rab GTPase-activating protein 1-like (129-137)
  source 1..27: mol_type = other RNA
gtgctgttcaacaagctcacctacctt

SEQ ID NO: 54017 - RNA, 27 nt, synthetic construct
  misc_feature 1..27: note = Sorting nexin-5 (197-205)
  source 1..27: mol_type = other RNA
gtgctgttcaccggcgtcaaggaggtt

SEQ ID NO: 54018 - RNA, 33 nt, synthetic construct
  misc_feature 1..33: note = Centrosomal protein of 76 kDa (112-122)
  source 1..33: mol_type = other RNA
gtgctgggcgggaaggccttcctcgagcacctt

SEQ ID NO: 54019 - RNA, 27 nt, synthetic construct
  misc_feature 1..27: note = Exportin-1 (784-792)
  source 1..27: mol_type = other RNA
gtgctgatcgactaccagagaaacgtc

SEQ ID NO: 54020 - RNA, 27 nt, synthetic construct
  misc_feature 1..27: note = ORM1-like protein 3 (134-142)
  source 1..27: mol_type = other RNA
gtgctgatccccaagctccctcagctt

SEQ ID NO: 54021 - RNA, 27 nt, synthetic construct
  misc_feature 1..27: note = von Willebrand factor A domain-containing protein 8 (511-519)
  source 1..27: mol_type = other RNA
gtgctgctcgacggcatccacagagtc

SEQ ID NO: 54022 - RNA, 36 nt, synthetic construct
  misc_feature 1..36: note = Asparagine synthetase (glutamine-hydrolyzing) (41-52)
  source 1..36: mol_type = other RNA
gtgctgctcgacaccgccaacaagaaagtcttcctt

SEQ ID NO: 54023 - RNA, 39 nt, synthetic construct
  misc_feature 1..39: note = Ras-related protein Rab-5A (24-36)
  source 1..39: mol_type = other RNA
gtgctgctcggcgagagcgccgtcgggaagtcctctctt

SEQ ID NO: 54024 - RNA, 27 nt, synthetic construct
  misc_feature 1..27: note = MAU2 chromatid cohesion factor homolog (356-364)
  source 1..27: mol_type = other RNA
gtgctgctcggccacatcttctacgtc

SEQ ID NO: 54025 - RNA, 27 nt, synthetic construct
  misc_feature 1..27: note = Kelch-like protein 24 (404-412)
  source 1..27: mol_type = other RNA
gtgctgctcggcaaggtctacgttgtg

SEQ ID NO: 54026 - RNA, 30 nt, synthetic construct
  misc_feature 1..30: note = Protein FAM171B (19-28)
  source 1..30: mol_type = other RNA
gtgctgctcaaggccagacttgtccccgct

SEQ ID NO: 54027 - RNA, 33 nt, synthetic construct
  misc_feature 1..33: note = Anamorsin (98-108)
  source 1..33: mol_type = other RNA
gtgctgctcagcgactccaaccttcacgatgcc

SEQ ID NO: 54028 - RNA, 27 nt, synthetic construct
  misc_feature 1..27: note = Protein yippee-like 1 (66-74)
  source 1..27: mol_type = other RNA
gtgctgctcaccggccttcacgccgtc

SEQ ID NO: 54029 - RNA, 27 nt, synthetic construct
  misc_feature 1..27: note = Inhibitor of nuclear factor kappa-B kinase subunit alpha (271-279)
  source 1..27: mol_type = other RNA
gtgctgatggaccacatcctcaacctt

SEQ ID NO: 54030 - RNA, 27 nt, synthetic construct
  misc_feature 1..27: note = Probable ATP-dependent RNA helicase DDX56 (130-138)
  source 1..27: mol_type = other RNA
gtgctgatggagaagcccgacgtcgtt

SEQ ID NO: 54031 - RNA, 27 nt, synthetic construct
  misc_feature 1..27: note = Uncharacterized protein C18orf8 (434-442)
  source 1..27: mol_type = other RNA
gtgctgatggagtacatcagaagcctc

SEQ ID NO: 54032 - RNA, 27 nt, synthetic construct
  misc_feature 1..27: note = Protein LLP homolog (39-47)
  source 1..27: mol_type = other RNA
gtgctgatgaaggacgtccaggagatc

SEQ ID NO: 54033 - RNA, 30 nt, synthetic construct
  misc_feature 1..30: note = Cyclin-dependent kinase 1 (69-78)
  source 1..30: mol_type = other RNA
gtgctgatgcaggacagcagactctacctt

SEQ ID NO: 54034 - RNA, 27 nt, synthetic construct
  misc_feature 1..27: note = AP-2 complex subunit sigma (90-98)
  source 1..27: mol_type = other RNA
gtgctgaacgagtacttccacaatgtc

SEQ ID NO: 54035 - RNA, 27 nt, synthetic construct
  misc_feature 1..27: note = Maestro heat-like repeat-containing protein family member 1 (1078-1086)
  source 1..27: mol_type = other RNA
gtgctgcaggagaaggtccccgaaatc

SEQ ID NO: 54036 - RNA, 30 nt, synthetic construct
  misc_feature 1..30: note = Nucleolar protein 9 (544-553)
  source 1..30: mol_type = other RNA
gtgctgcagaacctcaagggccaatacgtc

SEQ ID NO: 54037 - RNA, 27 nt, synthetic construct
  misc_feature 1..27: note = High mobility group protein 20A (167-175)
  source 1..27: mol_type = other RNA
gtgctgcagcaacacctcgagaccctt

SEQ ID NO: 54038 - RNA, 27 nt, synthetic construct
  misc_feature 1..27: note = HLA class II histocompatibility antigen, DR beta 3 chain (2-10)
  source 1..27: mol_type = other RNA
gtgctgagctccagactcgccttcgct

SEQ ID NO: 54039 - RNA, 27 nt, synthetic construct
  misc_feature 1..27: note = Importin-9 (169-177)
  source 1..27: mol_type = other RNA
gtgctgaccgagttcacaagagaagtc

SEQ ID NO: 54040 - RNA, 27 nt, synthetic construct
  misc_feature 1..27: note = Protein asunder homolog (229-237)
  source 1..27: mol_type = other RNA
gtgctgaccagcgaggtccactccgtt

SEQ ID NO: 54041 - RNA, 27 nt, synthetic construct
  misc_feature 1..27: note = ELAV-like protein 1 (137-145)
  source 1..27: mol_type = other RNA
gtgctggtcgaccagaccacaggcctc

SEQ ID NO: 54042 - RNA, 27 nt, synthetic construct
  misc_feature 1..27: note = Ribonuclease UK114 (25-33)
  source 1..27: mol_type = other RNA
gtgctggtcgacagaaccatctacatt

SEQ ID NO: 54043 - RNA, 33 nt, synthetic construct
  misc_feature 1..33: note = Zinc finger BED domain-containing protein 1 (374-384)
  source 1..33: mol_type = other RNA
gtgctggtcgaggacagcaacaatcaccatctc

SEQ ID NO: 54044 - RNA, 27 nt, synthetic construct
  misc_feature 1..27: note = Tyrosine-protein kinase JAK1 (997-1005)
  source 1..27: mol_type = other RNA
gtgctggtcgagagcgaacaccaggtt

SEQ ID NO: 54045 - RNA, 27 nt, synthetic construct
  misc_feature 1..27: note = Signal transducer and activator of transcription 1-alpha/beta (300-308)
  source 1..27: mol_type = other RNA
gtgctgtgggacagaaccttcagcctc

SEQ ID NO: 54046 - RNA, 27 nt, synthetic construct
  misc_feature 1..27: note = Mediator of RNA polymerase II transcription subunit 12 (571-579)
  source 1..27: mol_type = other RNA
gtgctgtacgaccagcccagacacgtc

SEQ ID NO: 54047 - RNA, 27 nt, synthetic construct
  misc_feature 1..27: note = Putative RNA-binding protein 15 (219-227)
  source 1..27: mol_type = other RNA
gtgctgtacgacagacccctcaagatc

SEQ ID NO: 54048 - RNA, 27 nt, synthetic construct
  misc_feature 1..27: note = AKT-interacting protein (200-208)
  source 1..27: mol_type = other RNA
gtgctgtacgagaaggacatccagctc

SEQ ID NO: 54049 - RNA, 27 nt, synthetic construct
  misc_feature 1..27: note = Werner syndrome ATP-dependent helicase (1155-1163)
  source 1..27: mol_type = other RNA
gtgctgtacggcaagctcgtcgaggcc

SEQ ID NO: 54050 - RNA, 27 nt, synthetic construct
  misc_feature 1..27: note = Set1/Ash2 histone methyltransferase complex subunit ASH2 (516-524)
  source 1..27: mol_type = other RNA
gtgctgtaccacgtcgagaccgaagtt

SEQ ID NO: 54051 - RNA, 30 nt, synthetic construct
  misc_feature 1..30: note = Protein downstream neighbor of Son (395-404)
  source 1..30: mol_type = other RNA
gtgctgtacccccacgagcctaccgccgtc

SEQ ID NO: 54052 - RNA, 27 nt, synthetic construct
  misc_feature 1..27: note = Protein artemis (131-139)
  source 1..27: mol_type = other RNA
gtgctgtacaccggcgacttcagactc

SEQ ID NO: 54053 - RNA, 27 nt, synthetic construct
  misc_feature 1..27: note = Anaphase-promoting complex subunit 1 (498-506)
  source 1..27: mol_type = other RNA
gtgctgtacaccggcgtcgttagagtg

SEQ ID NO: 54054 - RNA, 30 nt, synthetic construct
  misc_feature 1..30: note = Adenosylhomocysteinase 2 (277-286)
  source 1..30: mol_type = other RNA
gtgatgttcggcgggaagcaggtcgttgtg

SEQ ID NO: 54055 - RNA, 27 nt, synthetic construct
  misc_feature 1..27: note = Ligand-dependent nuclear receptor-interacting factor 1 (358-366)
  source 1..27: mol_type = other RNA
gtgatgttcaacggcaaggtctacctg

SEQ ID NO: 54056 - RNA, 24 nt, synthetic construct
  misc_feature 1..24: note = Kelch-like protein 8 (201-208)
  source 1..24: mol_type = other RNA
gtgatgggcaagatcttcgccgtc

SEQ ID NO: 54057 - RNA, 30 nt, synthetic construct
  misc_feature 1..30: note = Adenosylhomocysteinase (209-218)
  source 1..30: mol_type = other RNA
gtgatgatcgccggcaaggtcgctgttgtg

SEQ ID NO: 54058 - RNA, 27 nt, synthetic construct
  misc_feature 1..27: note = Cullin-2 (25-33)
  source 1..27: mol_type = other RNA
gtgatgctggagtacgtcgaaagagcc

SEQ ID NO: 54059 - RNA, 27 nt, synthetic construct
  misc_feature 1..27: note = DNA-directed RNA polymerases I, II, and III subunit RPABC3 (55-63)
  source 1..27: mol_type = other RNA
gtgatgtacggcaaggtctatagaatc

SEQ ID NO: 54060 - RNA, 27 nt, synthetic construct
  misc_feature 1..27: note = Cytoskeleton-associated protein 5 (1001-1009)
  source 1..27: mol_type = other RNA
tggctggccgagaagctccccaccctt

SEQ ID NO: 54061 - RNA, 27 nt, synthetic construct
  misc_feature 1..27: note = Transcription factor 25 (392-400)
  source 1..27: mol_type = other RNA
tggctggaggaaaacgtgcacgaggtc

SEQ ID NO: 54062 - RNA, 33 nt, synthetic construct
  misc_feature 1..33: note = Nuclear migration protein nudC (184-194)
  source 1..33: mol_type = other RNA
tggctgatcgaggacggcaaggtggtcaccgtt

SEQ ID NO: 54063 - RNA, 27 nt, synthetic construct
  misc_feature 1..27: note = Serine/threonine-protein phosphatase 2A 65 kDa regulatory subunit A alpha isoform isoform X1 (271-279)
  source 1..27: mol_type = other RNA
tggctggtggaccacgtctacgccatc

SEQ ID NO: 54064 - RNA, 42 nt, synthetic construct
  misc_feature 1..42: note = Melanocyte protein PMEL (44-57)
  source 1..42: mol_type = other RNA
tggaacagacagctgtaccccgagtggaccgaagcccaaagg

SEQ ID NO: 54065 - RNA, 30 nt, synthetic construct
  misc_feature 1..30: note = Helicase-like transcription factor (121-130)
  source 1..30: mol_type = other RNA
tacatcatggacaacaagctggcccagatt

SEQ ID NO: 54066 - RNA, 27 nt, synthetic construct
  misc_feature 1..27: note = Unconventional myosin-If (18-26)
  source 1..27: mol_type = other RNA
tacatcatgagctatatttccagagtg

SEQ ID NO: 54067 - RNA, 27 nt, synthetic construct
  misc_feature 1..27: note = CCR4-NOT transcription complex subunit 1 (237-245)
  source 1..27: mol_type = other RNA
tacctggcccccttcctcagaaacgtg

SEQ ID NO: 54068 - RNA, 27 nt, synthetic construct
  misc_feature 1..27: note = COP9 signalosome complex subunit 1 (357-365)
  source 1..27: mol_type = other RNA
tacctggccccccacgtgagaaccctc

SEQ ID NO: 54069 - RNA, 27 nt, synthetic construct
  misc_feature 1..27: note = Nucleoprotein TPR (422-430)
  source 1..27: mol_type = other RNA
tacctggacgagatcgtgaaggaagtc

SEQ ID NO: 54070 - RNA, 27 nt, synthetic construct
  misc_feature 1..27: note = Tuberin (190-198)
  source 1..27: mol_type = other RNA
tacctggacgagtatatcgccagaatg

SEQ ID NO: 54071 - RNA, 27 nt, synthetic construct
  misc_feature 1..27: note = Neutral alpha-glucosidase C (478-486)
  source 1..27: mol_type = other RNA
tacctggacttcaccaaccccaaggtg

SEQ ID NO: 54072 - RNA, 27 nt, synthetic construct
  misc_feature 1..27: note = Protein flightless-1 homolog (154-162)
  source 1..27: mol_type = other RNA
tacctggacctcagcgagaacagactt

SEQ ID NO: 54073 - RNA, 27 nt, synthetic construct
  misc_feature 1..27: note = UPF0585 protein C16orf13 (21-29)
  source 1..27: mol_type = other RNA
tacctggaccccgcccagagaggcgtg

SEQ ID NO: 54074 - RNA, 27 nt, synthetic construct
  misc_feature 1..27: note = BTB/POZ domain-containing protein KCTD3 (224-232)
  source 1..27: mol_type = other RNA
tacctggactggaccatcgagagagtg

SEQ ID NO: 54075 - RNA, 27 nt, synthetic construct
  misc_feature 1..27: note = DBF4-type zinc finger-containing protein 2 (1397-1405)
  source 1..27: mol_type = other RNA
tacctggaggacaagagctataaactc

SEQ ID NO: 54076 - RNA, 27 nt, synthetic construct
  misc_feature 1..27: note = NADH dehydrogenase (ubiquinone) iron-sulfur protein 8, mitochondrial (74-82)
  source 1..27: mol_type = other RNA
tacctgttcagagagcccgccaccatc

SEQ ID NO: 54077 - RNA, 27 nt, synthetic construct
  misc_feature 1..27: note = Protein unc-50 homolog (55-63)
  source 1..27: mol_type = other RNA
tacctgttcaccagcccccagagagtg

SEQ ID NO: 54078 - RNA, 27 nt, synthetic construct
  misc_feature 1..27: note = Vacuole membrane protein 1 (137-145)
  source 1..27: mol_type = other RNA
tacctgggcccccacatcgccagcgtg

SEQ ID NO: 54079 - RNA, 24 nt, synthetic construct
  misc_feature 1..24: note = SUMO-activating enzyme subunit 2 (164-171)
  source 1..24: mol_type = other RNA
tacctgggccaggtgaccacaatc

SEQ ID NO: 54080 - RNA, 27 nt, synthetic construct
  misc_feature 1..27: note = Mitotic checkpoint serine/threonine-protein kinase BUB1 beta (141-149)
  source 1..27: mol_type = other RNA
tacctgcacaaccagggcatcggggtg

SEQ ID NO: 54081 - RNA, 33 nt, synthetic construct
  misc_feature 1..33: note = EKC/KEOPS complex subunit TPRKB (121-131)
  source 1..33: mol_type = other RNA
tacctgatcagccaggtggagggccaccaagtc

SEQ ID NO: 54082 - RNA, 27 nt, synthetic construct
  misc_feature 1..27: note = Myosin-10 (264-272)
  source 1..27: mol_type = other RNA
tacctgctcgagaagagcagagccgtg

SEQ ID NO: 54083 - RNA, 33 nt, synthetic construct
  misc_feature 1..33: note = Cyclin-D1-binding protein 1 (104-114)
  source 1..33: mol_type = other RNA
tacctgctccccaaggaccagggcatcaccctt

SEQ ID NO: 54084 - RNA, 30 nt, synthetic construct
  misc_feature 1..30: note = PRKC apoptosis WT1 regulator protein (215-224)
  source 1..30: mol_type = other RNA
tacctgctccaggagccccctagaaccgtg

SEQ ID NO: 54085 - RNA, 27 nt, synthetic construct
  misc_feature 1..27: note = Probable methyltransferase TARBP1 (286-294)
  source 1..27: mol_type = other RNA
tacctgctccagagagccgtggaggtc

SEQ ID NO: 54086 - RNA, 30 nt, synthetic construct
  misc_feature 1..30: note = E3 ubiquitin-protein ligase HUWE1 (1351-1360)
  source 1..30: mol_type = other RNA
tacctgctcacccacccccctccaatcatg

SEQ ID NO: 54087 - RNA, 30 nt, synthetic construct
  misc_feature 1..30: note = 26S proteasome non-ATPase regulatory subunit 8 (142-151)
  source 1..30: mol_type = other RNA
tacctgatggagggcagctataacaaggtg

SEQ ID NO: 54088 - RNA, 27 nt, synthetic construct
  misc_feature 1..27: note = Leucine-tRNA ligase, cytoplasmic (901-909)
  source 1..27: mol_type = other RNA
tacctgatggaggtgacccacgacctc

SEQ ID NO: 54089 - RNA, 27 nt, synthetic construct
  misc_feature 1..27: note = Striatin-interacting protein 2 (207-215)
  source 1..27: mol_type = other RNA
tacctgatggtggagaacatcagactc

SEQ ID NO: 54090 - RNA, 27 nt, synthetic construct
  misc_feature 1..27: note = Zinc finger protein Pegasus (211-219)
  source 1..27: mol_type = other RNA
tacctgaacgacttcacccacgagatc

SEQ ID NO: 54091 - RNA, 27 nt, synthetic construct
  misc_feature 1..27: note = A-kinase anchor protein 10, mitochondrial (504-512)
  source 1..27: mol_type = other RNA
tacctgaacgacctcatccacagcgtg

SEQ ID NO: 54092 - RNA, 27 nt, synthetic construct
  misc_feature 1..27: note = RNA polymerase II subunit A C-terminal domain phosphatase (611-619)
  source 1..27: mol_type = other RNA
tacctgaacaaggagatcgaagaggcc

SEQ ID NO: 54093 - RNA, 27 nt, synthetic construct
  misc_feature 1..27: note = DNA repair protein complementing XP-G cells (242-250)
  source 1..27: mol_type = other RNA
tacctgaaccagcacatcgagcatgtg

SEQ ID NO: 54094 - RNA, 33 nt, synthetic construct
  misc_feature 1..33: note = Protein phosphatase 1G (74-84)
  source 1..33: mol_type = other RNA
tacctgcccgacatcattaaggatcagaaagcc

SEQ ID NO: 54095 - RNA, 27 nt, synthetic construct
  misc_feature 1..27: note = Interleukin-1 receptor-associated kinase-like 2 (381-389)
  source 1..27: mol_type = other RNA
tacctgcccgaggacttcatcagagtg

SEQ ID NO: 54096 - RNA, 27 nt, synthetic construct
  misc_feature 1..27: note = Dual specificity protein kinase CLK2 (259-267)
  source 1..27: mol_type = other RNA
tacctgccctatcctatccaccaggtg

SEQ ID NO: 54097 - RNA, 27 nt, synthetic construct
  misc_feature 1..27: note = Sterol regulatory element-binding protein 2 (379-387)
  source 1..27: mol_type = other RNA
tacctgcagcaagtgaaccacaagctc

SEQ ID NO: 54098 - RNA, 27 nt, synthetic construct
  misc_feature 1..27: note = Actin-related protein 2/3 complex subunit 4 (8-16)
  source 1..27: mol_type = other RNA
tacctgagcgccgtgagagctaccctc

SEQ ID NO: 54099 - RNA, 27 nt, synthetic construct
  misc_feature 1..27: note = Hsp90 co-chaperone Cdc37 (174-182)
  source 1..27: mol_type = other RNA
tacctgagcgacaacgtgcacctcgtc

SEQ ID NO: 54100 - RNA, 27 nt, synthetic construct
  misc_feature 1..27: note = Replication factor C subunit 5 (157-165)
  source 1..27: mol_type = other RNA
tacctgagcaagatcattcccgccctc

SEQ ID NO: 54101 - RNA, 27 nt, synthetic construct
  misc_feature 1..27: note = SLC45A3-BRAF fusion protein (236-244)
  source 1..27: mol_type = other RNA
tacctgagccccgacctctccaaggtg

SEQ ID NO: 54102 - RNA, 27 nt, synthetic construct
  misc_feature 1..27: note = THO complex subunit 5 homolog (225-233)
  source 1..27: mol_type = other RNA
tacctgagctccctccagcccagactt

SEQ ID NO: 54103 - RNA, 27 nt, synthetic construct
  misc_feature 1..27: note = Histone deacetylase 3 (183-191)
  source 1..27: mol_type = other RNA
tacctgaccgacagagtgatgacagtc

SEQ ID NO: 54104 - RNA, 30 nt, synthetic construct
  misc_feature 1..30: note = 40S ribosomal protein S10 (70-79)
  source 1..30: mol_type = other RNA
tacctgaccaacgagggcatccagtatctc

SEQ ID NO: 54105 - RNA, 27 nt, synthetic construct
  misc_feature 1..27: note = Heat shock protein HSP 90-alpha (142-150)
  source 1..27: mol_type = other RNA
tacctggtggccgagaaggtcaccgtt

SEQ ID NO: 54106 - RNA, 27 nt, synthetic construct
  misc_feature 1..27: note = Protein unc-93 homolog B1 (246-254)
  source 1..27: mol_type = other RNA
tacctgtatgacctcaaccacaccctt

SEQ ID NO: 54107 - RNA, 27 nt, synthetic construct
  misc_feature 1..27: note = Sodium- and chloride-dependent taurine transporter (277-285)
  source 1..27: mol_type = other RNA
tacctgtatcccgacatcaccagactc

SEQ ID NO: 54108 - RNA, 27 nt, synthetic construct
  misc_feature 1..27: note = Cullin-7 (1355-1363)
  source 1..27: mol_type = other RNA
tacatggccgacagactgctcggcgtg

SEQ ID NO: 54109 - RNA, 27 nt, synthetic construct
  misc_feature 1..27: note = Kinetochore-associated protein 1 (1575-1583)
  source 1..27: mol_type = other RNA
tacatgctggagcacgtgatcaccctc

SEQ ID NO: 54110 - RNA, 27 nt, synthetic construct
  misc_feature 1..27: note = Elongation of very long chain fatty acids protein 1 (200-208)
  source 1..27: mol_type = other RNA
taccagtatcccgtgatcattcacctg

SEQ ID NO: 54111 - RNA, 27 nt, synthetic construct
  misc_feature 1..27: note = Histone deacetylase 1 (188-196)
  source 1..27: mol_type = other RNA
tacaccacagacagagtgatgactgtc

SEQ ID NO: 54112 - RNA, 30 nt, synthetic construct
  misc_feature 1..30: note = Syntaxin-binding protein 5 (234-243)
  source 1..30: mol_type = other RNA
tacacctatgacgaggccatccacagcgtg

SEQ ID NO: 54113 - RNA, 27 nt, synthetic construct
  misc_feature 1..27: note = Speriolin-like protein (56-64)
  source 1..27: mol_type = other RNA
tacgtgttccccggcgtcaccagactg

SEQ ID NO: 54114 - RNA, 33 nt, synthetic construct
  misc_feature 1..33: note = Plectin (3961-3971)
  source 1..33: mol_type = other RNA
tacgtgatcgaccccattaagggcctgaaactc

SEQ ID NO: 54115 - RNA, 27 nt, synthetic construct
  misc_feature 1..27: note = Erythroid differentiation-related factor 1 (607-615)
  source 1..27: mol_type = other RNA
tacgtgctggagggcctcaagagcgtc

SEQ ID NO: 54116 - RNA, 27 nt, synthetic construct
  misc_feature 1..27: note = Translation initiation factor eIF-2B subunit delta (413-421)
  source 1..27: mol_type = other RNA
tacgtgctgcccgaggtcagcaaggtt

SEQ ID NO: 54117 - RNA, 45 nt, synthetic construct
  misc_feature 1..45: note = Vimentin (452-466)
  source 1..45: mol_type = other RNA
ggccaggtgatcaacgagaccagccaacaccatgacgatctggaa

SEQ ID NO: 54118 - RNA, 27 nt, synthetic construct
  misc_feature 1..27: note = Ubiquitin-conjugating enzyme E2 J2 (121-129)
  source 1..27: mol_type = other RNA
ttcatggtggagaagggccccaccctg

SEQ ID NO: 54119 - RNA, 27 nt, synthetic construct
  misc_feature 1..27: note = 26S proteasome non-ATPase regulatory subunit 3 (216-224)
  source 1..27: mol_type = other RNA
agagtgtacgagttcctggacaagctc

SEQ ID NO: 54120 - RNA, 27 nt, synthetic construct
  misc_feature 1..27: note = E3 ubiquitin-protein ligase Hakai (341-349)
  source 1..27: mol_type = other RNA
gccccccctccaccgccccctccaccc

SEQ ID NO: 54121 - RNA, 27 nt, synthetic construct
  misc_feature 1..27: note = Farnesyl pyrophosphate synthase (36-44)
  source 1..27: mol_type = other RNA
gccagactgaaggaggtgctcgaatac

SEQ ID NO: 54122 - RNA, 27 nt, synthetic construct
  misc_feature 1..27: note = Annexin A5 (92-100)
  source 1..27: mol_type = other RNA
gacgcctacgagctgaagcacgctctc

SEQ ID NO: 54123 - RNA, 27 nt, synthetic construct
  misc_feature 1..27: note = cAMP-dependent protein kinase catalytic subunit alpha (34-42)
  source 1..27: mol_type = other RNA
gaccagttcgagagaatcaagaccctg

SEQ ID NO: 54124 - RNA, 27 nt, synthetic construct
  misc_feature 1..27: note = Cytochrome c (90-98)
  source 1..27: mol_type = other RNA
gaggaaagagccgacctgatcgcttac

SEQ ID NO: 54125 - RNA, 27 nt, synthetic construct
  misc_feature 1..27: note = T-complex protein 1 subunit theta (418-426)
  source 1..27: mol_type = other RNA
gagctggccaagcagatcaccagctac

SEQ ID NO: 54126 - RNA, 27 nt, synthetic construct
  misc_feature 1..27: note = COMM domain-containing protein 2 (116-124)
  source 1..27: mol_type = other RNA
gagctggcccccagcctcccttcctac

SEQ ID NO: 54127 - RNA, 27 nt, synthetic construct
  misc_feature 1..27: note = Akirin-1 (166-174)
  source 1..27: mol_type = other RNA
gagcagtacgaaagcttcgtgaagttt

SEQ ID NO: 54128 - RNA, 24 nt, synthetic construct
  misc_feature 1..24: note = U5 small nuclear ribonucleoprotein 200 kDa helicase (1231-1238)
  source 1..24: mol_type = other RNA
gaggtgatcctgcaccatgaatac

SEQ ID NO: 54129 - RNA, 27 nt, synthetic construct
  misc_feature 1..27: note = ORM1-like protein 1 (9-17)
  source 1..27: mol_type = other RNA
gaggtgaaccccaataccagagtcatg

SEQ ID NO: 54130 - RNA, 27 nt, synthetic construct
  misc_feature 1..27: note = Proteasome subunit alpha type-5 (125-133)
  source 1..27: mol_type = other RNA
gaggtgtaccacaagagcatgaccctg

SEQ ID NO: 54131 - RNA, 27 nt, synthetic construct
  misc_feature 1..27: note = Transcription factor 25 (248-256)
  source 1..27: mol_type = other RNA
ttcgcctttgagcacagcgaagagtac

SEQ ID NO: 54132 - RNA, 27 nt, synthetic construct
  misc_feature 1..27: note = Septin-6 (154-162)
  source 1..27: mol_type = other RNA
ttcatcgcccccaccggccacagcctg

SEQ ID NO: 54133 - RNA, 27 nt, synthetic construct
  misc_feature 1..27: note = Sodium channel and clathrin linker 1 (55-63)
  source 1..27: mol_type = other RNA
ttcctggcccccctcgtgaccgagtac

SEQ ID NO: 54134 - RNA, 27 nt, synthetic construct
  misc_feature 1..27: note = Tetratricopeptide repeat protein 14 (257-265)
  source 1..27: mol_type = other RNA
ttcgtgaaccccggcgtcgttgagttt

SEQ ID NO: 54135 - RNA, 27 nt, synthetic construct
  misc_feature 1..27: note = Structural maintenance of chromosomes protein 4 (524-532)
  source 1..27: mol_type = other RNA
ggcagaatccccgggatttacggaagg

SEQ ID NO: 54136 - RNA, 30 nt, synthetic construct
  misc_feature 1..30: note = BCL-6 corepressor (860-869)
  source 1..30: mol_type = other RNA
ggcagaatcagcgacttccacgagacctac

SEQ ID NO: 54137 - RNA, 27 nt, synthetic construct
  misc_feature 1..27: note = NEDD8-activating enzyme E1 regulatory subunit (434-442)
  source 1..27: mol_type = other RNA
ggcagataccccggggtgagcaactat

SEQ ID NO: 54138 - RNA, 27 nt, synthetic construct
  misc_feature 1..27: note = RANBP2-like and GRIP domain-containing protein 2 (188-196)
  source 1..27: mol_type = other RNA
cacgaggccgaaagaaacatcgctctg

SEQ ID NO: 54139 - RNA, 27 nt, synthetic construct
  misc_feature 1..27: note = Heterogeneous nuclear ribonucleoprotein L (348-356)
  source 1..27: mol_type = other RNA
cacccccctccaccgccccctccaccc

SEQ ID NO: 54140 - RNA, 30 nt, synthetic construct
  misc_feature 1..30: note = Nodal modulator 3 (227-236)
  source 1..30: mol_type = other RNA
cacagattcgagcaggccttttacacctat

SEQ ID NO: 54141 - RNA, 27 nt, synthetic construct
  misc_feature 1..27: note = Mediator of RNA polymerase II transcription subunit 19 (27-35)
  source 1..27: mol_type = other RNA
aagccccctccaccgccccctccaccc

SEQ ID NO: 54142 - RNA, 27 nt, synthetic construct
  misc_feature 1..27: note = Afadin (1323-1331)
  source 1..27: mol_type = other RNA
ctgccccctccaccgccccctccaccc

SEQ ID NO: 54143 - RNA, 27 nt, synthetic construct
  misc_feature 1..27: note = Tubulin beta-2A chain (233-241)
  source 1..27: mol_type = other RNA
ctgagattccccggccagctcaacgcc

SEQ ID NO: 54144 - RNA, 27 nt, synthetic construct
  misc_feature 1..27: note = Keratinocyte-associated protein 2 (1-9)
  source 1..27: mol_type = other RNA
atggtggtcggcaccgggacaagcctg

SEQ ID NO: 54145 - RNA, 27 nt, synthetic construct
  misc_feature 1..27: note = Heat shock protein HSP 90-beta (28-36)
  source 1..27: mol_type = other RNA
aacccccaggagagaaccctgacactc

SEQ ID NO: 54146 - RNA, 27 nt, synthetic construct
  misc_feature 1..27: note = N-alpha-acetyltransferase 50 (23-31)
  source 1..27: mol_type = other RNA
aaccaggtgatcttccccgtcagctac

SEQ ID NO: 54147 - RNA, 27 nt, synthetic construct
  misc_feature 1..27: note = Origin recognition complex subunit 1 (665-673)
  source 1..27: mol_type = other RNA
aacagagtgagctccaggctgggcctc

SEQ ID NO: 54148 - RNA, 27 nt, synthetic construct
  misc_feature 1..27: note = Alanine-tRNA ligase, cytoplasmic (55-63)
  source 1..27: mol_type = other RNA
aacaccatcgaccccagccaccctatg

SEQ ID NO: 54149 - RNA, 27 nt, synthetic construct
  misc_feature 1..27: note = Histone H4 (34-42)
  source 1..27: mol_type = other RNA
aacgtgatcagagacgccgtcacctac

SEQ ID NO: 54150 - RNA, 27 nt, synthetic construct
  misc_feature 1..27: note = Anaphase-promoting complex subunit 7 (184-192)
  source 1..27: mol_type = other RNA
caggagagacccagcgtgacctcctac

SEQ ID NO: 54151 - RNA, 27 nt, synthetic construct
  misc_feature 1..27: note = Syntaxin-binding protein 2 (143-151)
  source 1..27: mol_type = other RNA
agcctggacgccccccactccacctac

SEQ ID NO: 54152 - RNA, 27 nt, synthetic construct
  misc_feature 1..27: note = Fructose-bisphosphate aldolase A (356-364)
  source 1..27: mol_type = other RNA
agcctgttcgtgtccaaccacgcctac

SEQ ID NO: 54153 - RNA, 27 nt, synthetic construct
  misc_feature 1..27: note = Abl interactor 1 (398-406)
  source 1..27: mol_type = other RNA
agcccccctccaccgccccctccaccc

SEQ ID NO: 54154 - RNA, 27 nt, synthetic construct
  misc_feature 1..27: note = T-complex protein 1 subunit eta (208-216)
  source 1..27: mol_type = other RNA
agccagctggtggccggcgtcgctttc

SEQ ID NO: 54155 - RNA, 27 nt, synthetic construct
  misc_feature 1..27: note = FERM domain-containing protein 4A (824-832)
  source 1..27: mol_type = other RNA
agccagtcccaaccctcttcacagtac

SEQ ID NO: 54156 - RNA, 27 nt, synthetic construct
  misc_feature 1..27: note = 60S ribosome subunit biogenesis protein NIP7 homolog (126-134)
  source 1..27: mol_type = other RNA
agccagtaccaaggcgtggtcgtttat

SEQ ID NO: 54157 - RNA, 24 nt, synthetic construct
  misc_feature 1..24: note = Dolichol-phosphate mannosyltransferase subunit 3 (78-85)
  source 1..24: mol_type = other RNA
gtgggctacagagtcgccaccttc

SEQ ID NO: 54158 - RNA, 27 nt, synthetic construct
  misc_feature 1..27: note = Protein enabled homolog (379-387)
  source 1..27: mol_type = other RNA
gtgccccctccaccgccccctccaccc

SEQ ID NO: 54159 - RNA, 27 nt, synthetic construct
  misc_feature 1..27: note = Endoplasmin (727-735)
  source 1..27: mol_type = other RNA
tacctgctccccgacaccaaggcctat

SEQ ID NO: 54160 - RNA, 27 nt, synthetic construct
  misc_feature 1..27: note = Elongation factor 2 (489-497)
  source 1..27: mol_type = other RNA
gagcacgcccataacatgagagtgatg

SEQ ID NO: 54161 - RNA, 27 nt, synthetic construct
  misc_feature 1..27: note = T-complex protein 1 subunit eta (282-290)
  source 1..27: mol_type = other RNA
caccatagcggcgccaaggtggtcctg

SEQ ID NO: 54162 - RNA, 30 nt, synthetic construct
  misc_feature 1..30: note = 60S ribosomal protein L8 (49-58)
  source 1..30: mol_type = other RNA
atccacgaccccggcagaggggcccctctg

SEQ ID NO: 54163 - RNA, 33 nt, synthetic construct
  misc_feature 1..33: note = Heat shock protein HSP 90-beta (441-451)
  source 1..33: mol_type = other RNA
atccacgaggacagcaccaacagaaggcggctg

SEQ ID NO: 54164 - RNA, 27 nt, synthetic construct
  misc_feature 1..27: note = F-actin-capping protein subunit beta (235-243)
  source 1..27: mol_type = other RNA
aagaccaaagacatcgtgaacggcctg

SEQ ID NO: 54165 - RNA, 27 nt, synthetic construct
  misc_feature 1..27: note = Transcription activator BRG1 (899-907)
  source 1..27: mol_type = other RNA
acccactacgtggcccccagaaggctg

SEQ ID NO: 54166 - RNA, 27 nt, synthetic construct
  misc_feature 1..27: note = Actin-related protein 2 (378-386)
  source 1..27: mol_type = other RNA
taccaggagaagggcgtgagagtcctg

SEQ ID NO: 54167 - RNA, 27 nt, synthetic construct
  misc_feature 1..27: note = Centromere protein W (77-85)
  source 1..27: mol_type = other RNA
gccgctgcaaaggtgatcctgaaaaag

SEQ ID NO: 54168 - RNA, 27 nt, synthetic construct
  misc_feature 1..27: note = Histone H1.1 (63-71)
  source 1..27: mol_type = other RNA
gccgctctgaagaaagcactcgccgcg

SEQ ID NO: 54169 - RNA, 27 nt, synthetic construct
  misc_feature 1..27: note = MICOS complex subunit MIC60 (93-101)
  source 1..27: mol_type = other RNA
gccgcttacaacgtgcccctgcctaag

SEQ ID NO: 54170 - RNA, 30 nt, synthetic construct
  misc_feature 1..30: note = Crooked neck-like protein 1 (493-502)
  source 1..30: mol_type = other RNA
gccgaggctgaagcagtgagagaggtctac

SEQ ID NO: 54171 - RNA, 27 nt, synthetic construct
  misc_feature 1..27: note = Dystonin (6939-6947)
  source 1..27: mol_type = other RNA
gccgaggctgaacagaccctgagattc

SEQ ID NO: 54172 - RNA, 27 nt, synthetic construct
  misc_feature 1..27: note = Exportin-T (39-47)
  source 1..27: mol_type = other RNA
gccgaggctctggcacagagaacctac

SEQ ID NO: 54173 - RNA, 27 nt, synthetic construct
  misc_feature 1..27: note = DNA replication licensing factor MCM5 (620-628)
  source 1..27: mol_type = other RNA
gccgaggctctgagcaagatgaaactc

SEQ ID NO: 54174 - RNA, 27 nt, synthetic construct
  misc_feature 1..27: note = Chondroitin sulfate glucuronyltransferase (568-576)
  source 1..27: mol_type = other RNA
gccgaggctcccagccaggtgagactg

SEQ ID NO: 54175 - RNA, 27 nt, synthetic construct
  misc_feature 1..27: note = 78 kDa glucose-regulated protein (157-165)
  source 1..27: mol_type = other RNA
gccgaggcttacctgggcaagaaagtg

SEQ ID NO: 54176 - RNA, 30 nt, synthetic construct
  misc_feature 1..30: note = X-ray repair cross-complementing protein 6 (224-233)
  source 1..30: mol_type = other RNA
gccgaggacgaagatctgagagtgcacttc

SEQ ID NO: 54177 - RNA, 27 nt, synthetic construct
  misc_feature 1..27: note = WD and tetratricopeptide repeats protein 1 (45-53)
  source 1..27: mol_type = other RNA
gccgaggacggcctgatcagacagtac

SEQ ID NO: 54178 - RNA, 30 nt, synthetic construct
  misc_feature 1..30: note = DNA replication licensing factor MCM3 (278-287)
  source 1..30: mol_type = other RNA
gccgaggacatcgctaagattaaaaagttc

SEQ ID NO: 54179 - RNA, 30 nt, synthetic construct
  misc_feature 1..30: note = Transmembrane emp24 domain-containing protein 3 (50-59)
  source 1..30: mol_type = other RNA
gccgaggacctgaacagcagagtgtcctac

SEQ ID NO: 54180 - RNA, 30 nt, synthetic construct
  misc_feature 1..30: note = Transmembrane emp24 domain-containing protein 7 (179-188)
  source 1..30: mol_type = other RNA
gccgaggacctgaacaccagagtggcttac

SEQ ID NO: 54181 - RNA, 33 nt, synthetic construct
  misc_feature 1..33: note = Retinoblastoma-like protein 1 (193-203)
  source 1..33: mol_type = other RNA
gccgaggaagagatcggcacccccagaaagttc

SEQ ID NO: 54182 - RNA, 27 nt, synthetic construct
  misc_feature 1..27: note = Clathrin heavy chain 1 (360-368)
  source 1..27: mol_type = other RNA
gccgaggaactgttcgctagaaagttt

SEQ ID NO: 54183 - RNA, 27 nt, synthetic construct
  misc_feature 1..27: note = Alpha-2-macroglobulin receptor-associated protein (250-258)
  source 1..27: mol_type = other RNA
gccgagttcgaagagcccagagtgatc

SEQ ID NO: 54184 - RNA, 27 nt, synthetic construct
  misc_feature 1..27: note = Immunoglobulin-binding protein 1 (122-130)
  source 1..27: mol_type = other RNA
gccgagttcgaactgcccaagaccatg

SEQ ID NO: 54185 - RNA, 27 nt, synthetic construct
  misc_feature 1..27: note = Myeloid leukemia factor 2 (224-232)
  source 1..27: mol_type = other RNA
gccgagggcccccctagactggctatc

SEQ ID NO: 54186 - RNA, 33 nt, synthetic construct
  misc_feature 1..33: note = Histone-lysine N-methyltransferase NSD3 (1027-1037)
  source 1..33: mol_type = other RNA
gccgagggccagaccagcatcaacaagacattc

SEQ ID NO: 54187 - RNA, 27 nt, synthetic construct
  misc_feature 1..27: note = Plectin (1687-1695)
  source 1..27: mol_type = other RNA
gccgagggcaccgctcagcaaagactg

SEQ ID NO: 54188 - RNA, 27 nt, synthetic construct
  misc_feature 1..27: note = RNA-binding protein 34 (222-230)
  source 1..27: mol_type = other RNA
gccgagggcaccctgagcaagaaactc

SEQ ID NO: 54189 - RNA, 27 nt, synthetic construct
  misc_feature 1..27: note = Perilipin-2 (303-311)
  source 1..27: mol_type = other RNA
gccgagcacatcgaaagcagaaccctg

SEQ ID NO: 54190 - RNA, 27 nt, synthetic construct
  misc_feature 1..27: note = Secernin-1 (219-227)
  source 1..27: mol_type = other RNA
gccgagcaccccgaactgagaagctac

SEQ ID NO: 54191 - RNA, 30 nt, synthetic construct
  misc_feature 1..30: note = DNA dC-dU-editing enzyme APOBEC-3D (121-130)
  source 1..30: mol_type = other RNA
gccgagcaccccaacgtgaccctgacaatc

SEQ ID NO: 54192 - RNA, 27 nt, synthetic construct
  misc_feature 1..27: note = Vacuolar protein sorting-associated protein 13A (547-555)
  source 1..27: mol_type = other RNA
gccgagcacagcaccgtgatcacattc

SEQ ID NO: 54193 - RNA, 27 nt, synthetic construct
  misc_feature 1..27: note = Syntaxin-18 (279-287)
  source 1..27: mol_type = other RNA
gccgagatcgacagcattcaccagctg

SEQ ID NO: 54194 - RNA, 30 nt, synthetic construct
  misc_feature 1..30: note = Nesprin-2 (1575-1584)
  source 1..30: mol_type = other RNA
gccgagatcgaaattgtgaaggaggaattc

SEQ ID NO: 54195 - RNA, 33 nt, synthetic construct
  misc_feature 1..33: note = WD repeat-containing protein 91 (30-40)
  source 1..33: mol_type = other RNA
gccgagatcaaggctgacaaagaaaagggcttc

SEQ ID NO: 54196 - RNA, 27 nt, synthetic construct
  misc_feature 1..27: note = Tubulin-specific chaperone A (54-62)
  source 1..27: mol_type = other RNA
gccgagatcctgcaggaaagcagaatg

SEQ ID NO: 54197 - RNA, 33 nt, synthetic construct
  misc_feature 1..33: note = MAP3K12-binding inhibitory protein 1 (172-182)
  source 1..33: mol_type = other RNA
gccgagatcaacgaaaataacgtgagagagttc

SEQ ID NO: 54198 - RNA, 30 nt, synthetic construct
  misc_feature 1..30: note = Myosin light polypeptide 6 (107-116)
  source 1..30: mol_type = other RNA
gccgagatcagacacgtgctggtcaccctc

SEQ ID NO: 54199 - RNA, 27 nt, synthetic construct
  misc_feature 1..27: note = BAG64702.1 (1-9)
  source 1..27: mol_type = other RNA
gccgagatcaccgacaagctgggcctc

SEQ ID NO: 54200 - RNA, 27 nt, synthetic construct
  misc_feature 1..27: note = Nuclear migration protein nudC (2-10)
  source 1..27: mol_type = other RNA
gccgagaagctgatcacccagacattc

SEQ ID NO: 54201 - RNA, 30 nt, synthetic construct
  misc_feature 1..30: note = Spectrin alpha chain, non-erythrocytic 1 (381-390)
  source 1..30: mol_type = other RNA
gccgagctggacagacagatcaagagcttc

SEQ ID NO: 54202 - RNA, 30 nt, synthetic construct
  misc_feature 1..30: note = Transcriptional regulator ATRX (1293-1302)
  source 1..30: mol_type = other RNA
gccgagctggaagagaaccagagaagctac

SEQ ID NO: 54203 - RNA, 27 nt, synthetic construct
  misc_feature 1..27: note Dolichyl-diphosphooligosaccharide-proteinosyltransferase subunit 2 (288-296)
  source 1..27: mol_type = other RNA
gccgagctgaccccccaccagacattc

SEQ ID NO: 54204 - RNA, 27 nt, synthetic construct
  misc_feature 1..27: note = Nuclear receptor corepressor 1 (522-530)
  source 1..27: mol_type = other RNA
gccgagaacgaccccaccagacagtac

SEQ ID NO: 54205 - RNA, 27 nt, synthetic construct
  misc_feature 1..27: note = General transcription factor 3C polypeptide 1 (42-50)
  source 1..27: mol_type = other RNA
gccgagaacggcctgaccgtgagactc

SEQ ID NO: 54206 - RNA, 33 nt, synthetic construct
  misc_feature 1..33: note = Eukaryotic translation initiation factor 4 gamma 1 (544-554)
  source 1..33: mol_type = other RNA
gccgagaacatccagcccggcgaacaaaagtac

SEQ ID NO: 54207 - RNA, 27 nt, synthetic construct
  misc_feature 1..27: note = Glycogen phosphorylase, muscle form (273-281)
  source 1..27: mol_type = other RNA
gccgagaacatcagcagagtgctgtac

SEQ ID NO: 54208 - RNA, 27 nt, synthetic construct
  misc_feature 1..27: note = X-ray repair cross-complementing protein 5 (48-56)
  source 1..27: mol_type = other RNA
gccgagaacaaggacgaaatcgctctg

SEQ ID NO: 54209 - RNA, 27 nt, synthetic construct
  misc_feature 1..27: note = Protein kinase C delta type (405-413)
  source 1..27: mol_type = other RNA
gccgagaaccccttcctgacccacctc

SEQ ID NO: 54210 - RNA, 30 nt, synthetic construct
  misc_feature 1..30: note = ATP-dependent RNA helicase DDX42 (93-102)
  source 1..30: mol_type = other RNA
gccgagaacagccccaccagacagcaattc

SEQ ID NO: 54211 - RNA, 27 nt, synthetic construct
  misc_feature 1..27: note = E3 ubiquitin-protein ligase TTC3 (1392-1400)
  source 1..27: mol_type = other RNA
gccgagaacgtggctggccaccagatc

SEQ ID NO: 54212 - RNA, 27 nt, synthetic construct
  misc_feature 1..27: note = RAB6A-GEF complex partner protein 1 (906-914)
  source 1..27: mol_type = other RNA
gccgagaacgtgcccgctagcaagttc

SEQ ID NO: 54213 - RNA, 33 nt, synthetic construct
  misc_feature 1..33: note = Vigilin (1010-1020)
  source 1..33: mol_type = other RNA
gccgagcaggaagacagagctctgaggagcttc

SEQ ID NO: 54214 - RNA, 27 nt, synthetic construct
  misc_feature 1..27: note = Plectin (2014-2022)
  source 1..27: mol_type = other RNA
gccgagcaggaaagcgctagacaactg

SEQ ID NO: 54215 - RNA, 33 nt, synthetic construct
  misc_feature 1..33: note = B-cell receptor-associated protein 31 (21-31)
  source 1..33: mol_type = other RNA
gccgagagcgcttccgaagcagccaagaaatac

SEQ ID NO: 54216 - RNA, 27 nt, synthetic construct
  misc_feature 1..27: note = T-complex protein 1 subunit beta (113-121)
  source 1..27: mol_type = other RNA
gccgagagcctgatcgctaagaaaatt

SEQ ID NO: 54217 - RNA, 27 nt, synthetic construct
  misc_feature 1..27: note = Sphingomyelin phosphodiesterase 4 (513-521)
  source 1..27: mol_type = other RNA
gccgagagccccgctggccactccttc

SEQ ID NO: 54218 - RNA, 27 nt, synthetic construct
  misc_feature 1..27: note = Protein THEMIS2 (120-128)
  source 1..27: mol_type = other RNA
gccgagagccccgaaagagtgctgctc

SEQ ID NO: 54219 - RNA, 33 nt, synthetic construct
  misc_feature 1..33: note = Chitinase domain-containing protein 1 (57-67)
  source 1..33: mol_type = other RNA
gccgagagcgtggtcctggaacacagatcctac

SEQ ID NO: 54220 - RNA, 27 nt, synthetic construct
  misc_feature 1..27: note = Poly(A)-specific ribonuclease PARN (455-463)
  source 1..27: mol_type = other RNA
gccgagagctacagaatccagacctat

SEQ ID NO: 54221 - RNA, 30 nt, synthetic construct
  misc_feature 1..30: note = Translation initiation factor eIF-2B subunit epsilon (406-415)
  source 1..30: mol_type = other RNA
gccgaggtgggcgctgcagggaagggatac

SEQ ID NO: 54222 - RNA, 33 nt, synthetic construct
  misc_feature 1..33: note = RNA-binding protein 8A (78-88)
  source 1..33: mol_type = other RNA
gccgagtacggcgaaatcaagaacattcacctg

SEQ ID NO: 54223 - RNA, 27 nt, synthetic construct
  misc_feature 1..27: note = Histone deacetylase 1 (239-247)
  source 1..27: mol_type = other RNA
gccatcttcaagcccgtgatgagcaaa

SEQ ID NO: 54224 - RNA, 27 nt, synthetic construct
  misc_feature 1..27: note = Pre-mRNA-processing factor 6 (764-772)
  source 1..27: mol_type = other RNA
gccatcctggagaagagcagactcaaa

SEQ ID NO: 54225 - RNA, 33 nt, synthetic construct
  misc_feature 1..33: note = Serine/threonine-protein phosphatase 2A 65 kDa regulatory subunit A alpha isoform (457-467)
  source 1..33: mol_type = other RNA
gccatcagagaggctgcaaccagcaacctgaag

SEQ ID NO: 54226 - RNA, 27 nt, synthetic construct
  misc_feature 1..27: note = Cleavage and polyadenylation specificity factor subunit 7 (346-354)
  source 1..27: mol_type = other RNA
gccatcagctcctctgctatttcaaag

SEQ ID NO: 54227 - RNA, 27 nt, synthetic construct
  misc_feature 1..27: note = 39S ribosomal protein L20, mitochondrial (106-114)
  source 1..27: mol_type = other RNA
gccatctacgagcccaagaccttcaaa

SEQ ID NO: 54228 - RNA, 27 nt, synthetic construct
  misc_feature 1..27: note = Melanoma-associated antigen F1 (61-69)
  source 1..27: mol_type = other RNA
gccctggctgcaaaggccctcgcgaga

SEQ ID NO: 54229 - RNA, 27 nt, synthetic construct
  misc_feature 1..27: note = Proteasome subunit alpha type-4 (120-128)
  source 1..27: mol_type = other RNA
gccctggctatcaaggtgctcaacaaa

SEQ ID NO: 54230 - RNA, 27 nt, synthetic construct
  misc_feature 1..27: note = Lysine-specific demethylase 2B (171-179)
  source 1..27: mol_type = other RNA
gccctggctaacaagcccctcagaagg

SEQ ID NO: 54231 - RNA, 27 nt, synthetic construct
  misc_feature 1..27: note = Eukaryotic translation initiation factor 3 subunit C-like protein (251-259)
  source 1..27: mol_type = other RNA
gccctggctagcagattcctcaagaaa

SEQ ID NO: 54232 - RNA, 27 nt, synthetic construct
  misc_feature 1..27: note = Translation factor GUF1, mitochondrial (274-282)
  source 1..27: mol_type = other RNA
gccctgttcgacggcgtggtcagcaag

SEQ ID NO: 54233 - RNA, 27 nt, synthetic construct
  misc_feature 1..27: note = V-type proton ATPase subunit E 1 (214-222)
  source 1..27: mol_type = other RNA
gccctgttcggcgctaacgcaaataga

SEQ ID NO: 54234 - RNA, 30 nt, synthetic construct
  misc_feature 1..30: note = Sorting nexin-5 (315-324)
  source 1..30: mol_type = other RNA
gccctgatcgactacgagaacagcaataag

SEQ ID NO: 54235 - RNA, 30 nt, synthetic construct
  misc_feature 1..30: note = T-complex protein 1 subunit zeta (279-288)
  source 1..30: mol_type = other RNA
gccctgatcaagcacaaacccagcgtgaag

SEQ ID NO: 54236 - RNA, 30 nt, synthetic construct
  misc_feature 1..30: note = 60S ribosomal protein L9 (159-168)
  source 1..30: mol_type = other RNA
gccctgatccagcaagctaccacagtgaag

SEQ ID NO: 54237 - RNA, 30 nt, synthetic construct
  misc_feature 1..30: note = Actin-related protein 2/3 complex subunit 5 (58-67)
  source 1..30: mol_type = other RNA
gccctgaagaacccccctatcaataccaaa

SEQ ID NO: 54238 - RNA, 30 nt, synthetic construct
  misc_feature 1..30: note = 40S ribosomal protein S15a (10-19)
  source 1..30: mol_type = other RNA
gccctgaagagcatcaacaatgctgagaaa

SEQ ID NO: 54239 - RNA, 27 nt, synthetic construct
  misc_feature 1..27: note = Eukaryotic translation initiation factor 4 gamma 1 (785-793)
  source 1..27: mol_type = other RNA
gccctgaaggtgcccaccacagagaaa

SEQ ID NO: 54240 - RNA, 33 nt, synthetic construct; identical to SEQ ID NO: 30013
  misc_feature 1..33: note = Prefoldin subunit 6 (48-58)
  source 1..33: mol_type = other RNA

SEQ ID NO: 54241 - RNA, 27 nt, synthetic construct
  misc_feature 1..27: note = Serine hydroxymethyltransferase, mitochondrial (340-348)
  source 1..27: mol_type = other RNA
gccctgctcgagagaggctacagcctt

SEQ ID NO: 54242 - RNA, 27 nt, synthetic construct
  misc_feature 1..27: note = Interferon alpha-inducible protein 6 (113-121)
  source 1..27: mol_type = other RNA
gccctgatgggctacgctacccacaag

SEQ ID NO: 54243 - RNA, 27 nt, synthetic construct
  misc_feature 1..27: note = Engulfment and cell motility protein 2 (573-581)
  source 1..27: mol_type = other RNA
gccctgaaccacaaggtgctccattac

SEQ ID NO: 54244 - RNA, 27 nt, synthetic construct
  misc_feature 1..27: note = 60S ribosomal protein L4 (132-140)
  source 1..27: mol_type = other RNA
gccctgcccgctctcgtgatgagcaag

SEQ ID NO: 54245 - RNA, 27 nt, synthetic construct
  misc_feature 1..27: note = AT-rich interactive domain-containing protein 4B (407-415)
  source 1..27: mol_type = other RNA
gccctgcccgagaaggtggtcaacaaa

SEQ ID NO: 54246 - RNA, 30 nt, synthetic construct
  misc_feature 1..30: note = m7GpppX diphosphatase (320-329)
  source 1..30: mol_type = other RNA
gccctgagagctgacgatcccctccttaag

SEQ ID NO: 54247 - RNA, 27 nt, synthetic construct
  misc_feature 1..27: note = Probable helicase senataxin (1619-1627)
  source 1..27: mol_type = other RNA
gccctgagcccctccctcaagaacaaa

SEQ ID NO: 54248 - RNA, 27 nt, synthetic construct
  misc_feature 1..27: note = Transcription initiation factor IIE subunit beta (16-24)
  source 1..27: mol_type = other RNA
gccctgagcacccccgtggtcgagaag

SEQ ID NO: 54249 - RNA, 30 nt, synthetic construct
  misc_feature 1..30: note = Nuclear receptor corepressor 1 (607-616)
  source 1..30: mol_type = other RNA
gccctggtgagcacccccgtcagaacaaag

SEQ ID NO: 54250 - RNA, 27 nt, synthetic construct
  misc_feature 1..27: note = F-box only protein 21 (373-381)
  source 1..27: mol_type = other RNA
gccctgtacggcgtggtcaacgttaag

SEQ ID NO: 54251 - RNA, 33 nt, synthetic construct
  misc_feature 1..33: note = Cytochrome c oxidase subunit 7A-related protein, mitochondrial (104-114)
  source 1..33: mol_type = other RNA
gccctgtacatggctagccagcccaagaacaaa

SEQ ID NO: 54252 - RNA, 27 nt, synthetic construct
  misc_feature 1..27: note = Anaphase-promoting complex subunit 1 (1587-1595)
  source 1..27: mol_type = other RNA
gccctgtacccccacttccctgctcat

SEQ ID NO: 54253 - RNA, 27 nt, synthetic construct
  misc_feature 1..27: note = Nucleosome assembly protein 1-like 4 (97-105)
  source 1..27: mol_type = other RNA
gccctgtaccagcccctcttcgacaag

SEQ ID NO: 54254 - RNA, 27 nt, synthetic construct
  misc_feature 1..27: note = Mitochondrial ubiquitin ligase activator of NFKB 1 (24-32)
  source 1..27: mol_type = other RNA
gccctgtacagcgtgtatagacagaag

SEQ ID NO: 54255 - RNA, 27 nt, synthetic construct
  misc_feature 1..27: note = Pyruvate kinase PKM (21-29)
  source 1..27: mol_type = other RNA
gccatggctgacaccttcctggagcac

SEQ ID NO: 54256 - RNA, 27 nt, synthetic construct
  misc_feature 1..27: note = Baculoviral IAP repeat-containing protein 6 (2448-2456)
  source 1..27: mol_type = other RNA
gccatgaagcccaaacctctgagcgtg

SEQ ID NO: 54257 - RNA, 33 nt, synthetic construct
  misc_feature 1..33: note = NAD(P)H dehydrogenase (quinone) 1 (128-138)
  source 1..33: mol_type = other RNA
gccatgtacgacaagggccccttcagaagcaaa

SEQ ID NO: 54258 - RNA, 24 nt, synthetic construct
  misc_feature 1..24: note = Lysine-specific demethylase 5D (795-802)
  source 1..24: mol_type = other RNA
gccaacaaggtgagagtcgctctg

SEQ ID NO: 54259 - RNA, 27 nt, synthetic construct
  misc_feature 1..27: note = Major facilitator superfamily domain-containing protein 12 (11-19)
  source 1..27: mol_type = other RNA
gcccccagccctagaccactgtccctc

SEQ ID NO: 54260 - RNA, 27 nt, synthetic construct
  misc_feature 1..27: note = THO complex subunit 4 (51-59)
  source 1..27: mol_type = other RNA
gccccctacagcagacctaagcagctg

SEQ ID NO: 54261 - RNA, 27 nt, synthetic construct
  misc_feature 1..27: note = 40S ribosomal protein S3 (44-52)
  source 1..27: mol_type = other RNA
gcccaggctgagagcctgagatacaag

SEQ ID NO: 54262 - RNA, 33 nt, synthetic construct
  misc_feature 1..33: note = Hydroxymethylglutaryl-CoA synthase, cytoplasmic (393-403)
  source 1..33: mol_type = other RNA
gcccagtacagcccccaacagctggctggcaag

SEQ ID NO: 54263 - RNA, 30 nt, synthetic construct; identical to SEQ ID NO: 30036
  misc_feature 1..30: note = Nucleolar protein 58 (344-353)
  source 1..30: mol_type = other RNA

SEQ ID NO: 54264 - RNA, 27 nt, synthetic construct
  misc_feature 1..27: note = Casein kinase II subunit beta (204-212)
  source 1..27: mol_type = other RNA
gccagcaacttcaagtcccccgtgaaa

SEQ ID NO: 54265 - RNA, 27 nt, synthetic construct
  misc_feature 1..27: note = Sec1 family domain-containing protein 1 (482-490)
  source 1..27: mol_type = other RNA
gccagctacggctccaccacaactaag

SEQ ID NO: 54266 - RNA, 33 nt, synthetic construct
  misc_feature 1..33: note = Actin, cytoplasmic 2 (19-29)
  source 1..33: mol_type = other RNA
gccaccgctgcaagctcctcttcactggagaag

SEQ ID NO: 54267 - RNA, 30 nt, synthetic construct
  misc_feature 1..30: note = Receptor expression-enhancing protein 3 (130-139)
  source 1..30: mol_type = other RNA
gccaccgctgcagtgacagccgcggtcaag

SEQ ID NO: 54268 - RNA, 27 nt, synthetic construct
  misc_feature 1..27: note = Mediator of RNA polymerase II transcription subunit 12 (294-302)
  source 1..27: mol_type = other RNA
gccaccgctggcttcacaatcgggaga

SEQ ID NO: 54269 - RNA, 27 nt, synthetic construct
  misc_feature 1..27: note = Kinetochore protein Nuf2 (353-361)
  source 1..27: mol_type = other RNA
gccaccgctcagttcaagatcaacaaa

SEQ ID NO: 54270 - RNA, 27 nt, synthetic construct
  misc_feature 1..27: note = E3 ubiquitin-protein ligase makorin-1 (117-125)
  source 1..27: mol_type = other RNA
gccaccgctacagagctgactacgaag

SEQ ID NO: 54271 - RNA, 27 nt, synthetic construct
  misc_feature 1..27: note = Adenomatous polyposis coli protein (1083-1091)
  source 1..27: mol_type = other RNA
gccaccgacatccccagctcccagaag

SEQ ID NO: 54272 - RNA, 27 nt, synthetic construct
  misc_feature 1..27: note = Myosin-9 (540-548)
  source 1..27: mol_type = other RNA
gccaccgacaagagcttcgtggagaaa

SEQ ID NO: 54273 - RNA, 27 nt, synthetic construct
  misc_feature 1..27: note = Probable ATP-dependent RNA helicase DHX37 (603-611)
  source 1..27: mol_type = other RNA
gccaccttccccgtggctcctagatac

SEQ ID NO: 54274 - RNA, 33 nt, synthetic construct
  misc_feature 1..33: note = Protein transport protein Sec31A (61-71)
  source 1..33: mol_type = other RNA
gccaccttcagctcctctcacagataccataag

SEQ ID NO: 54275 - RNA, 27 nt, synthetic construct
  misc_feature 1..27: note = Exosome complex component RRP41 (79-87)
  source 1..27: mol_type = other RNA
gccaccttcagcacaggcgagagaaag

SEQ ID NO: 54276 - RNA, 30 nt, synthetic construct; identical to SEQ ID NO: 30049
  misc_feature 1..30: note = Angio-associated migratory cell protein (18-27)
  source 1..30: mol_type = other RNA

SEQ ID NO: 54277 - RNA, 27 nt, synthetic construct
  misc_feature 1..27: note = Trans-3-hydroxy-L-proline dehydratase (302-310)
  source 1..27: mol_type = other RNA
gccaccggcagcgtgttcacagggaag

SEQ ID NO: 54278 - RNA, 27 nt, synthetic construct
  misc_feature 1..27: note = Lamina-associated polypeptide 2, isoform alpha (583-591)
  source 1..27: mol_type = other RNA
gccacccacacagctttcgtggcaaag

SEQ ID NO: 54279 - RNA, 27 nt, synthetic construct
  misc_feature 1..27: note = Helicase with zinc finger domain 2 (1314-1322)
  source 1..27: mol_type = other RNA
gccaccatcacaaaggtgctgcagaaa

SEQ ID NO: 54280 - RNA, 27 nt, synthetic construct
  misc_feature 1..27: note = Hexokinase-2 (388-396)
  source 1..27: mol_type = other RNA
gccaccctggctgcagtgctccagaga

SEQ ID NO: 54281 - RNA, 30 nt, synthetic construct
  misc_feature 1..30: note = Fanconi anemia group I protein (1123-1132)
  source 1..30: mol_type = other RNA
gccaccctgcccaaccagcctgtggagaag

SEQ ID NO: 54282 - RNA, 27 nt, synthetic construct
  misc_feature 1..27: note = Pescadillo homolog (14-22)
  source 1..27: mol_type = other RNA
gccaccaactacatcacaagaaataag

SEQ ID NO: 54283 - RNA, 27 nt, synthetic construct
  misc_feature 1..27: note = Nucleolar and spindle-associated protein 1 (346-354)
  source 1..27: mol_type = other RNA
gccacccagacacccgtgagcaacaag

SEQ ID NO: 54284 - RNA, 27 nt, synthetic construct
  misc_feature 1..27: note = Retinoblastoma-associated protein (27-35)
  source 1..27: mol_type = other RNA
gccaccagcgctttccagacacaaaag

SEQ ID NO: 54285 - RNA, 27 nt, synthetic construct
  misc_feature 1..27: note = DNA repair protein XRCC2 (193-201)
  source 1..27: mol_type = other RNA
gccaccacacagactatcatgcaaaag

SEQ ID NO: 54286 - RNA, 30 nt, synthetic construct
  misc_feature 1..30: note = Derlin-1 (21-30)
  source 1..30: mol_type = other RNA
gccaccgtggctgtccccctggttggcaag

SEQ ID NO: 54287 - RNA, 27 nt, synthetic construct
  misc_feature 1..27: note = Pre-mRNA-processing-splicing factor 8 (765-773)
  source 1..27: mol_type = other RNA
gccaccgtggacaagacagtctgcaaa

SEQ ID NO: 54288 - RNA, 30 nt, synthetic construct
  misc_feature 1..30: note = Importin subunit beta-1 (862-871)
  source 1..30: mol_type = other RNA
gccacctgggctacaaaggagctgagaaaa

SEQ ID NO: 54289 - RNA, 30 nt, synthetic construct
  misc_feature 1..30: note = 60S ribosomal protein L13 (23-32)
  source 1..30: mol_type = other RNA
gccacctggttcaaccagcccgctagaaag

SEQ ID NO: 54290 - RNA, 30 nt, synthetic construct
  misc_feature 1..30: note = DNA (cytosine-5)-methyltransferase 3A (168-177)
  source 1..30: mol_type = other RNA
gccacctacaacaagcagcccatgtataga

SEQ ID NO: 54291 - RNA, 27 nt, synthetic construct
  misc_feature 1..27: note = Putative rhophilin-2-like protein RHPN2P1 (502-510)
  source 1..27: mol_type = other RNA
gccacctacagcgtgggcatgcagaag

SEQ ID NO: 54292 - RNA, 30 nt, synthetic construct
  misc_feature 1..30: note = TRAF2 and NCK-interacting protein kinase (83-92)
  source 1..30: mol_type = other RNA
gccacctactatggcgctttcatcaagaaa

SEQ ID NO: 54293 - RNA, 27 nt, synthetic construct
  misc_feature 1..27: note = T-complex protein 1 subunit gamma (73-81)
  source 1..27: mol_type = other RNA
gccgtggctcacgcactgaccgagaag

SEQ ID NO: 54294 - RNA, 30 nt, synthetic construct; identical to SEQ ID NO: 30067
  misc_feature 1..30: note = WD repeat-containing protein 3 (14-23)
  source 1..30: mol_type = other RNA

SEQ ID NO: 54295 - RNA, 33 nt, synthetic construct
  misc_feature 1..33: note = Importin subunit alpha-1 (338-348)
  source 1..33: mol_type = other RNA
gccgtgttccccagcctgctcaccaaccctaag

SEQ ID NO: 54296 - RNA, 30 nt, synthetic construct
  misc_feature 1..30: note = Nucleoside diphosphate kinase 6 (39-48)
  source 1..30: mol_type = other RNA
gccgtgcaccagcaaatcctgagcaacaag

SEQ ID NO: 54297 - RNA, 27 nt, synthetic construct
  misc_feature 1..27: note = Methylsterol monooxygenase 1 (15-23)
  source 1..27: mol_type = other RNA
gccgtgatcgaggacacctggcactac

SEQ ID NO: 54298 - RNA, 33 nt, synthetic construct
  misc_feature 1..33: note = Protein HIRA (394-404)
  source 1..33: mol_type = other RNA
gccgtgatcgagaaccccgaaatgctgaagtac

SEQ ID NO: 54299 - RNA, 27 nt, synthetic construct
  misc_feature 1..27: note = Probable phospholipid-transporting ATPase IF (301-309)
  source 1..27: mol_type = other RNA
gccgtgatcagcaccattctgaagtac

SEQ ID NO: 54300 - RNA, 27 nt, synthetic construct
  misc_feature 1..27: note = Integrator complex subunit 12 (240-248)
  source 1..27: mol_type = other RNA
gccgtgaaggaccccctggtcaaaaag

SEQ ID NO: 54301 - RNA, 27 nt, synthetic construct
  misc_feature 1..27: note = Nuclear pore complex protein Nup160 (1177-1185)
  source 1..27: mol_type = other RNA
gccgtgctgggcaaggggcaccagtac

SEQ ID NO: 54302 - RNA, 27 nt, synthetic construct
  misc_feature 1..27: note = Cyclin-I (179-187)
  source 1..27: mol_type = other RNA
gccgtgctgaccaagcagctccttcac

SEQ ID NO: 54303 - RNA, 30 nt, synthetic construct
  misc_feature 1..30: note = Signal peptidase complex catalytic subunit SEC11C (180-189)
  source 1..30: mol_type = other RNA
gccgtgatgggcgcttacgtcctgctcaag

SEQ ID NO: 54304 - RNA, 30 nt, synthetic construct
  misc_feature 1..30: note = Structural maintenance of chromosomes protein 4 (1190-1199)
  source 1..30: mol_type = other RNA
gccgtgaaccccaaggagatcgctagcaaa

SEQ ID NO: 54305 - RNA, 27 nt, synthetic construct
  misc_feature 1..27: note = Sororin (53-61)
  source 1..27: mol_type = other RNA
gccgtgagaaagcccatcgtcctgaaa

SEQ ID NO: 54306 - RNA, 27 nt, synthetic construct
  misc_feature 1..27: note = Histone H2B type 1-K (118-126)
  source 1..27: mol_type = other RNA
gccgtgaccaagtacacaagcgctaaa

SEQ ID NO: 54307 - RNA, 33 nt, synthetic construct
  misc_feature 1..33: note = Nuclear pore complex protein Nup160 (1113-1123)
  source 1..33: mol_type = other RNA
gccgtgtacgacagacccggcgctagccctaag

SEQ ID NO: 54308 - RNA, 27 nt, synthetic construct
  misc_feature 1..27: note = Integrator complex subunit 8 (269-277)
  source 1..27: mol_type = other RNA
gccgtgtacgagaacgctagagaaaag

SEQ ID NO: 54309 - RNA, 27 nt, synthetic construct
  misc_feature 1..27: note = Toll-interacting protein (84-92)
  source 1..27: mol_type = other RNA
gccgtgtacgagacccccacagctcac

SEQ ID NO: 54310 - RNA, 33 nt, synthetic construct
  misc_feature 1..33: note = Ras GTPase-activating protein-binding protein 1 (54-64)
  source 1..33: mol_type = other RNA
gccgtgtacggccagaaggagatccacagaaaa

SEQ ID NO: 54311 - RNA, 27 nt, synthetic construct
  misc_feature 1..27: note = Amyloid protein-binding protein 2 (337-345)
  source 1..27: mol_type = other RNA
gcctacagctcctatgtgcaccagtac

SEQ ID NO: 54312 - RNA, 27 nt, synthetic construct
  misc_feature 1..27: note = 182 kDa tankyrase-1-binding protein (415-423)
  source 1..27: mol_type = other RNA
gacgcccacctgagacccaccagcctc

SEQ ID NO: 54313 - RNA, 24 nt, synthetic construct
  misc_feature 1..24: note = Cytoplasmic FMR1-interacting protein 2 (285-292)
  source 1..24: mol_type = other RNA
gacgccaagaaaagaatcaacctg

SEQ ID NO: 54314 - RNA, 27 nt, synthetic construct
  misc_feature 1..27: note = Heat shock protein 105 kDa (255-263)
  source 1..27: mol_type = other RNA
gacgccaagagcaaaatcagagctctg

SEQ ID NO: 54315 - RNA, 27 nt, synthetic construct
  misc_feature 1..27: note = Chromodomain-helicase-DNA-binding protein 2 (106-114)
  source 1..27: mol_type = other RNA
gacgaggccctgatcggcaagaaattc

SEQ ID NO: 54316 - RNA, 30 nt, synthetic construct
  misc_feature 1..30: note = Pre-mRNA-processing-splicing factor 8 (1104-1113)
  source 1..30: mol_type = other RNA
gacgaggccagagatctgatccagaggtac

SEQ ID NO: 54317 - RNA, 30 nt, synthetic construct
  misc_feature 1..30: note = EH domain-containing protein 4 (201-210)
  source 1..30: mol_type = other RNA
gacgagttcagcgaagccatcaaggctttt

SEQ ID NO: 54318 - RNA, 33 nt, synthetic construct
  misc_feature 1..33: note = 26S protease regulatory subunit 10B (247-257)
  source 1..33: mol_type = other RNA
gacgagatcgatgccattggcgggagaaggttc

SEQ ID NO: 54319 - RNA, 30 nt, synthetic construct
  misc_feature 1..30: note = U4/U6 small nuclear ribonucleoprotein Prp31 (322-331)
  source 1..30: mol_type = other RNA
gacgagatcgaaagaaagttcgataaatgg

SEQ ID NO: 54320 - RNA, 27 nt, synthetic construct
  misc_feature 1..27: note = Zinc finger MYND domain-containing protein 11 (348-356)
  source 1..27: mol_type = other RNA
gacgagctggaactccaccagagattc

SEQ ID NO: 54321 - RNA, 30 nt, synthetic construct
  misc_feature 1..30: note = General transcription factor IIH subunit 5 (24-33)
  source 1..30: mol_type = other RNA
gacgagagcaacgccctgggcaagaaattc

SEQ ID NO: 54322 - RNA, 27 nt, synthetic construct
  misc_feature 1..27: note = Ubiquitin carboxyl-terminal hydrolase 19 (1197-1205)
  source 1..27: mol_type = other RNA
gacgagagccaggtggtcaccagatac

SEQ ID NO: 54323 - RNA, 27 nt, synthetic construct
  misc_feature 1..27: note = Serrate RNA effector molecule homolog (164-172)
  source 1..27: mol_type = other RNA
gacgagaccgaagccgtgaagagatac

SEQ ID NO: 54324 - RNA, 30 nt, synthetic construct
  misc_feature 1..30: note = 60S ribosomal protein L26 (53-62)
  source 1..30: mol_type = other RNA
gacgaggtgcaggtcgttagaggccactac

SEQ ID NO: 54325 - RNA, 27 nt, synthetic construct
  misc_feature 1..27: note = Ras GTPase-activating protein-binding protein 2 (60-68)
  source 1..27: mol_type = other RNA
gacatccaccataaggtgctgagcctc

SEQ ID NO: 54326 - RNA, 27 nt, synthetic construct
  misc_feature 1..27: note = Heat shock 70 kDa protein 4 (255-263)
  source 1..27: mol_type = other RNA
gacatcaagagcaaaattagagccctg

SEQ ID NO: 54327 - RNA, 27 nt, synthetic construct
  misc_feature 1..27: note = Heterogeneous nuclear ribonucleoprotein F (196-204)
  source 1..27: mol_type = other RNA
gacccccctctgaagttcatgagcgtg

SEQ ID NO: 54328 - RNA, 27 nt, synthetic construct
  misc_feature 1..27: note = Cullin-1 (348-356)
  source 1..27: mol_type = other RNA
gacgtgcacaagaaatacaacgccctg

SEQ ID NO: 54329 - RNA, 27 nt, synthetic construct
  misc_feature 1..27: note = Spectrin alpha chain, non-erythrocytic 1 (50-58)
  source 1..27: mol_type = other RNA
gacgtgaaggccaaactgcacgagctc

SEQ ID NO: 54330 - RNA, 27 nt, synthetic construct
  misc_feature 1..27: note = Coatomer subunit beta (34-42)
  source 1..27: mol_type = other RNA
gacgtgaagagcaaaaccgaggccctg

SEQ ID NO: 54331 - RNA, 24 nt, synthetic construct
  misc_feature 1..24: note = Pumilio homolog 3 (320-327)
  source 1..24: mol_type = other RNA
gaggccgtgatcaagcacagcctg

SEQ ID NO: 54332 - RNA, 30 nt, synthetic construct
  misc_feature 1..30: note = NADH dehydrogenase (ubiquinone) 1 alpha subcomplex subunit 13 (122-131)
  source 1..30: mol_type = other RNA
gaggaagccctgcacgctagccatggcttc

SEQ ID NO: 54333 - RNA, 27 nt, synthetic construct
  misc_feature 1..27: note = DDB1- and CUL4-associated factor 10 (132-140)
  source 1..27: mol_type = other RNA
gaggaagccaacgtgggcagagggtac

SEQ ID NO: 54334 - RNA, 33 nt, synthetic construct
  misc_feature 1..33: note = 15 kDa selenoprotein (76-86)
  source 1..33: mol_type = other RNA
gaggaagcccagttcgagaccaagaaactgtac

SEQ ID NO: 54335 - RNA, 30 nt, synthetic construct
  misc_feature 1..30: note = Negative elongation factor E (10-19)
  source 1..30: mol_type = other RNA
gaggaagaggaagccctgcagaagaaattc

SEQ ID NO: 54336 - RNA, 27 nt, synthetic construct
  misc_feature 1..27: note = 60S ribosomal protein L13 (171-179)
  source 1..27: mol_type = other RNA
gaggaagagaagaacttcaaagccttt

SEQ ID NO: 54337 - RNA, 30 nt, synthetic construct
  misc_feature 1..30: note = Coiled-coil domain-containing protein 66 (780-789)
  source 1..30: mol_type = other RNA
gaggaagagcccctgaacatccacagcttc

SEQ ID NO: 54338 - RNA, 27 nt, synthetic construct
  misc_feature 1..27: note = HLA class II histocompatibility antigen, DR alpha chain (41-49)
  source 1..27: mol_type = other RNA
gaggaattcggcagatttgccagcttc

SEQ ID NO: 54339 - RNA, 30 nt, synthetic construct
  misc_feature 1..30: note = E3 ubiquitin-protein ligase MGRN1 (140-149)
  source 1..30: mol_type = other RNA
gaggaattcctgaacggcagagccgtgtac

SEQ ID NO: 54340 - RNA, 27 nt, synthetic construct
  misc_feature 1..27: note = Cullin-4A (269-277)
  source 1..27: mol_type = other RNA
gaggaaggcgacagagtgatcacctac

SEQ ID NO: 54341 - RNA, 27 nt, synthetic construct
  misc_feature 1..27: note = WD repeat-containing protein 36 (776-784)
  source 1..27: mol_type = other RNA
gaggaaggcctggtgaacaataagtac

SEQ ID NO: 54342 - RNA, 30 nt, synthetic construct
  misc_feature 1..30: note = A-kinase anchor protein 2 (256-265)
  source 1..30: mol_type = other RNA
gaggaacacctggagagccataagaaatac

SEQ ID NO: 54343 - RNA, 27 nt, synthetic construct
  misc_feature 1..27: note = Unconventional myosin-Ie (749-757)
  source 1..27: mol_type = other RNA
gaggaacaccccgagctgcagcaattc

SEQ ID NO: 54344 - RNA, 27 nt, synthetic construct
  misc_feature 1..27: note = Vimentin (229-237)
  source 1..27: mol_type = other RNA
gaggaaatcgccttcctgaagaaactc

SEQ ID NO: 54345 - RNA, 30 nt, synthetic construct
  misc_feature 1..30: note = PH domain leucine-rich repeat-containing protein phosphatase 1 (287-296)
  source 1..30: mol_type = other RNA
gaggaaatcgacctgagcggcaacaagctc

SEQ ID NO: 54346 - RNA, 24 nt, synthetic construct
  misc_feature 1..24: note = Probable ATP-dependent RNA helicase DDX56 (421-428)
  source 1..24: mol_type = other RNA
gaggaaatcgagggcttcagatac

SEQ ID NO: 54347 - RNA, 27 nt, synthetic construct
  misc_feature 1..27: note = Paxillin (389-397)
  source 1..27: mol_type = other RNA
gaggaaatcggcagcagaaacttcttt

SEQ ID NO: 54348 - RNA, 27 nt, synthetic construct
  misc_feature 1..27: note = Retinoblastoma-like protein 1 (195-203)
  source 1..27: mol_type = other RNA
gaggaaatcggcacccccagaaagttc

SEQ ID NO: 54349 - RNA, 30 nt, synthetic construct
  misc_feature 1..30: note = Bloom syndrome protein (942-951)
  source 1..30: mol_type = other RNA
gaggaaatccccgtgagctcccactacttc

SEQ ID NO: 54350 - RNA, 30 nt, synthetic construct
  misc_feature 1..30: note = Kinesin-like protein KIF21A (473-482)
  source 1..30: mol_type = other RNA
gaggaaatcagcaacatgattcactcctac

SEQ ID NO: 54351 - RNA, 33 nt, synthetic construct
  misc_feature 1..33: note = Thioredoxin-related transmembrane protein 2 (148-158)
  source 1..33: mol_type = other RNA
gaggaactggagagagacaagagggtgacctgg

SEQ ID NO: 54352 - RNA, 24 nt, synthetic construct
  misc_feature 1..24: note = Clathrin heavy chain 1 (361-368)
  source 1..24: mol_type = other RNA
gaggaactgttcgccagaaagttt

SEQ ID NO: 54353 - RNA, 27 nt, synthetic construct
  misc_feature 1..27: note = 2',3'-cyclic-nucleotide 3'-phosphodiesterase (191-199)
  source 1..27: mol_type = other RNA
gaggaactgggcaaccacaaggccttc

SEQ ID NO: 54354 - RNA, 27 nt, synthetic construct
  misc_feature 1..27: note = Protein FAM192A (107-115)
  source 1..27: mol_type = other RNA
gaggaactgaaggagctcaaagaatac

SEQ ID NO: 54355 - RNA, 30 nt, synthetic construct
  misc_feature 1..30: note = Proteasome subunit beta type-4 (119-128)
  source 1..30: mol_type = other RNA
gaggaactgctcggcgacgggcacagctac

SEQ ID NO: 54356 - RNA, 30 nt, synthetic construct
  misc_feature 1..30: note = Sorting nexin-14 (340-349)
  source 1..30: mol_type = other RNA
gaggaactgcagaagatctacaaaacctat

SEQ ID NO: 54357 - RNA, 27 nt, synthetic construct
  misc_feature 1..27: note = Krueppel-like factor 6 (124-132)
  source 1..27: mol_type = other RNA
gaggaactgagccccaccgccaagttc

SEQ ID NO: 54358 - RNA, 33 nt, synthetic construct
  misc_feature 1..33: note = Eukaryotic initiation factor 4A-I (239-249)
  source 1..33: mol_type = other RNA
gaggaactgaccctcgagggcatcagacagttc

SEQ ID NO: 54359 - RNA, 30 nt, synthetic construct
  misc_feature 1..30: note = Coiled-coil domain-containing protein 93 (132-141)
  source 1..30: mol_type = other RNA
gaggaaatgggcgactacatcagaagctat

SEQ ID NO: 54360 - RNA, 30 nt, synthetic construct
  misc_feature 1..30: note = Nuclear pore complex protein Nup153 (1104-1113)
  source 1..30: mol_type = other RNA
gaggaaatgcccgccaccaagggcgggttc

SEQ ID NO: 54361 - RNA, 30 nt, synthetic construct
  misc_feature 1..30: note = Folliculin-interacting protein 1 (434-443)
  source 1..30: mol_type = other RNA
gaggaaaacgccgtggacgtcaagcagtac

SEQ ID NO: 54362 - RNA, 27 nt, synthetic construct
  misc_feature 1..27: note = Tropomodulin-3 (310-318)
  source 1..27: mol_type = other RNA
gaggaaaacaccaatatcctgaagttc

SEQ ID NO: 54363 - RNA, 27 nt, synthetic construct
  misc_feature 1..27: note = G2/mitotic-specific cyclin-B1 (183-191)
  source 1..27: mol_type = other RNA
gaggaacaggccgtgagacccaagtac

SEQ ID NO: 54364 - RNA, 27 nt, synthetic construct
  misc_feature 1..27: note = Targeting protein for Xklp2 (170-178)
  source 1..27: mol_type = other RNA
gaggaacaggagctggaaaagagcatg

SEQ ID NO: 54365 - RNA, 27 nt, synthetic construct
  misc_feature 1..27: note = Nuclear receptor-binding protein (235-243)
  source 1..27: mol_type = other RNA
gaggaacagaagaacctgcacttcttt

SEQ ID NO: 54366 - RNA, 30 nt, synthetic construct
  misc_feature 1..30: note = Cyclin-G-associated kinase (740-749)
  source 1..30: mol_type = other RNA
gaggaacagcaagacatcctgagcaagttc

SEQ ID NO: 54367 - RNA, 30 nt, synthetic construct
  misc_feature 1..30: note = Nitrogen permease regulator 2-like protein (336-345)
  source 1..30: mol_type = other RNA
gaggaacagagccaccccgccagactgtac

SEQ ID NO: 54368 - RNA, 27 nt, synthetic construct
  misc_feature 1..27: note = OTU domain-containing protein 5 (177-185)
  source 1..27: mol_type = other RNA
gaggaacaggtggccagagagagctac

SEQ ID NO: 54369 - RNA, 27 nt, synthetic construct
  misc_feature 1..27: note = Histone-binding protein RBBP4 (13-21)
  source 1..27: mol_type = other RNA
gaggaaagagtgatcaacgaggaatac

SEQ ID NO: 54370 - RNA, 27 nt, synthetic construct
  misc_feature 1..27: note = Sorting nexin-24 (11-19)
  source 1..27: mol_type = other RNA
gaggaaagcgacctggagagaggctac

SEQ ID NO: 54371 - RNA, 27 nt, synthetic construct
  misc_feature 1..27: note = Poly(rC)-binding protein 2 (41-49)
  source 1..27: mol_type = other RNA
gaggaaagcggcgccagaatcaacatt

SEQ ID NO: 54372 - RNA, 27 nt, synthetic construct
  misc_feature 1..27: note = Vacuolar fusion protein CCZ1 homolog (215-223)
  source 1..27: mol_type = other RNA
gaggaaagcctgaacatcgtgaagtac

SEQ ID NO: 54373 - RNA, 30 nt, synthetic construct
  misc_feature 1..30: note = ATP-dependent RNA helicase DDX19B (301-310)
  source 1..30: mol_type = other RNA
gaggaaaccctggacacaatcaagcagtac

SEQ ID NO: 54374 - RNA, 30 nt, synthetic construct
  misc_feature 1..30: note = Elongation factor 1-gamma (325-334)
  source 1..30: mol_type = other RNA
gaggaaacccagacactggtgagagagtac

SEQ ID NO: 54375 - RNA, 30 nt, synthetic construct
  misc_feature 1..30: note = Adenylate cyclase type 3 (1088-1097)
  source 1..30: mol_type = other RNA
gaggaaacccaggtgatcctgagagagtac

SEQ ID NO: 54376 - RNA, 30 nt, synthetic construct
  misc_feature 1..30: note = Cleavage and polyadenylation specificity factor subunit 1 (1111-1120)
  source 1..30: mol_type = other RNA
gaggaaaccgtgagcggcctgaaggggtac

SEQ ID NO: 54377 - RNA, 30 nt, synthetic construct
  misc_feature 1..30: note = MICOS complex subunit MIC19 (168-177)
  source 1..30: mol_type = other RNA
gaggaagtggaggccaagttcaaaagatac

SEQ ID NO: 54378 - RNA, 24 nt, synthetic construct
  misc_feature 1..24: note = G patch domain-containing protein 4 (211-218)
  source 1..24: mol_type = other RNA
gaggaagtggagagcagagcctac

SEQ ID NO: 54379 - RNA, 30 nt, synthetic construct
  misc_feature 1..30: note = Chromodomain-helicase-DNA-binding protein 1-like (214-223)
  source 1..30: mol_type = other RNA
gaggaagtgggcgacttcatccagagatac

SEQ ID NO: 54380 - RNA, 27 nt, synthetic construct
  misc_feature 1..27: note = Ferritin light chain (137-145)
  source 1..27: mol_type = other RNA
gaggaagtgaagctgatcaaaaagatg

SEQ ID NO: 54381 - RNA, 27 nt, synthetic construct
  misc_feature 1..27: note = Alanine-tRNA ligase, cytoplasmic (378-386)
  source 1..27: mol_type = other RNA
gaggaagtgcagttcctgaagaccctc

SEQ ID NO: 54382 - RNA, 30 nt, synthetic construct
  misc_feature 1..30: note = Glutaredoxin-3 (139-148)
  source 1..30: mol_type = other RNA
gaggaagtgagacagggcctgaaggcctac

SEQ ID NO: 54383 - RNA, 24 nt, synthetic construct
  misc_feature 1..24: note = Pre-B-cell leukemia transcription factor 3 (11-18)
  source 1..24: mol_type = other RNA
gagatcaaggaaaaaaccggcctg

SEQ ID NO: 54384 - RNA, 27 nt, synthetic construct
  misc_feature 1..27: note = AP-2 complex subunit alpha-1 (29-37)
  source 1..27: mol_type = other RNA
gagatcaagagaattaacaaagaactg

SEQ ID NO: 54385 - RNA, 27 nt, synthetic construct
  misc_feature 1..27: note = 40S ribosomal protein S24 (39-47)
  source 1..27: mol_type = other RNA
gagatcagagaaaagctggccaaaatg

SEQ ID NO: 54386 - RNA, 27 nt, synthetic construct
  misc_feature 1..27: note = Crooked neck-like protein 1 (571-579)
  source 1..27: mol_type = other RNA
gagatcagacagaagaacctgagcctc

SEQ ID NO: 54387 - RNA, 27 nt, synthetic construct
  misc_feature 1..27: note = Enhancer of mRNA-decapping protein 3 (285-293)
  source 1..27: mol_type = other RNA
gagctgcacaagaaactccttagcgtg

SEQ ID NO: 54388 - RNA, 27 nt, synthetic construct
  misc_feature 1..27: note = Alpha-2-macroglobulin receptor-associated protein (20-28)
  source 1..27: mol_type = other RNA
gagctgaaggaaaaactcagaagcatc

SEQ ID NO: 54389 - RNA, 24 nt, synthetic construct
  misc_feature 1..24: note = Neuroblastoma-amplified sequence (1048-1055)
  source 1..24: mol_type = other RNA
gagctgctcgaaaagcacggcctt

SEQ ID NO: 54390 - RNA, 27 nt, synthetic construct
  misc_feature 1..27: note = Heat shock protein HSP 90-beta (529-537)
  source 1..27: mol_type = other RNA
gagagaatcatgaaggcccaggctctg

SEQ ID NO: 54391 - RNA, 27 nt, synthetic construct
  misc_feature 1..27: note = Protein phosphatase 1 regulatory subunit 7 (95-103)
  source 1..27: mol_type = other RNA
gaggtgctgaagaaagtcaagaccctc

SEQ ID NO: 54392 - RNA, 24 nt, synthetic construct
  misc_feature 1..24: note = Heterogeneous nuclear ribonucleoprotein M (130-137)
  source 1..24: mol_type = other RNA
gaggtgctgaacaagcacagcctc

SEQ ID NO: 54393 - RNA, 27 nt, synthetic construct
  misc_feature 1..27: note = Exosome component 10 (254-262)
  source 1..27: mol_type = other RNA
ttcgcccacccctaccagtatgagctg

SEQ ID NO: 54394 - RNA, 27 nt, synthetic construct
  misc_feature 1..27: note = Long-chain-fatty-acid-CoA ligase 3 (551-559)
  source 1..27: mol_type = other RNA
ttcgaggacgaaaacggccagagatgg

SEQ ID NO: 54395 - RNA, 30 nt, synthetic construct
  misc_feature 1..30: note = X-ray repair cross-complementing protein 6 (478-487)
  source 1..30: mol_type = other RNA
ttcgagaaccccgtgctgcagcaacacttt

SEQ ID NO: 54396 - RNA, 27 nt, synthetic construct
  misc_feature 1..27: note = Cyclin-dependent kinase 14 (275-283)
  source 1..27: mol_type = other RNA
ttcggcctggccagagctaagagcgtg

SEQ ID NO: 54397 - RNA, 27 nt, synthetic construct
  misc_feature 1..27: note = Translocation protein SEC62 (278-286)
  source 1..27: mol_type = other RNA
ttcagacccctgtacacccacgagtat

SEQ ID NO: 54398 - RNA, 24 nt, synthetic construct
  misc_feature 1..24: note = Myosin-9 (831-838)
  source 1..24: mol_type = other RNA
ttcaccaaggtgaaacccctgctc

SEQ ID NO: 54399 - RNA, 27 nt, synthetic construct
  misc_feature 1..27: note = Gamma-interferon-inducible protein 16 (533-541)
  source 1..27: mol_type = other RNA
ttcgtgtacgagcccaaggaacagaaa

SEQ ID NO: 54400 - RNA, 30 nt, synthetic construct
  misc_feature 1..30: note = Constitutive coactivator of peroxisome proliferator-activated receptor gamma (663-672)
  source 1..30: mol_type = other RNA
ttcgtgtaccccggcaaccctctgagacac

SEQ ID NO: 54401 - RNA, 27 nt, synthetic construct
  misc_feature 1..27: note = Serine/threonine-protein phosphatase 2A 65 kDa regulatory subunit A alpha isoform (190-198)
  source 1..27: mol_type = other RNA
ggcgagttcgccaaggtgctggaactc

SEQ ID NO: 54402 - RNA, 33 nt, synthetic construct
  misc_feature 1..33: note = DNA replication licensing factor MCM5 (552-562)
  source 1..33: mol_type = other RNA
ggcgagatcgacctggccaagctcaaaaagttc

SEQ ID NO: 54403 - RNA, 27 nt, synthetic construct
  misc_feature 1..27: note = Serine/threonine-protein phosphatase PP1-beta catalytic subunit (216-224)
  source 1..27: mol_type = other RNA
ggcgagaacgacagaggggtgagcttc

SEQ ID NO: 54404 - RNA, 30 nt, synthetic construct
  misc_feature 1..30: note = HLA class I histocompatibility antigen, B-7 alpha chain (42-51)
  source 1..30: mol_type = other RNA
ggcgagcccagattcatcagcgtggggtac

SEQ ID NO: 54405 - RNA, 30 nt, synthetic construct
  misc_feature 1..30: note = Protein SCAF11 (201-210)
  source 1..30: mol_type = other RNA
ggcgagagctccttcacctacagagcctat

SEQ ID NO: 54406 - RNA, 27 nt, synthetic construct
  misc_feature 1..27: note = Rho GTPase-activating protein 21 (129-137)
  source 1..27: mol_type = other RNA
ggcgagagcgtgatcgggaagacctac

SEQ ID NO: 54407 - RNA, 33 nt, synthetic construct
  misc_feature 1..33: note = Arfaptin-1 (19-29)
  source 1..33: mol_type = other RNA
ggcgaggtggacgatagcagagaacactccttc

SEQ ID NO: 54408 - RNA, 27 nt, synthetic construct
  misc_feature 1..27: note = AP-2 complex subunit mu (12-20)
  source 1..27: mol_type = other RNA
ggcgaggtgctgatcagcagagtctac

SEQ ID NO: 54409 - RNA, 27 nt, synthetic construct
  misc_feature 1..27: note = Endoplasmic reticulum-Golgi intermediate compartment protein 3 (255-263)
  source 1..27: mol_type = other RNA
ggcgaggtgctgagaaccaaccagttc

SEQ ID NO: 54410 - RNA, 30 nt, synthetic construct
  misc_feature 1..30: note = Proline and serine-rich protein 1 (157-166)
  source 1..30: mol_type = other RNA
ggcatcttccccgggacccctctgaagaaa

SEQ ID NO: 54411 - RNA, 30 nt, synthetic construct
  misc_feature 1..30: note = Ubiquitin carboxyl-terminal hydrolase 36 (460-469)
  source 1..30: mol_type = other RNA
ggcatcattagctcccccctgaccgggaag

SEQ ID NO: 54412 - RNA, 27 nt, synthetic construct
  misc_feature 1..27: note = Alpha-2-macroglobulin receptor-associated protein (145-153)
  source 1..27: mol_type = other RNA
ggcctggacgatcccagactcgagaag

SEQ ID NO: 54413 - RNA, 33 nt, synthetic construct
  misc_feature 1..33: note = Targeting protein for Xklp2 (12-22)
  source 1..33: mol_type = other RNA
ggcctgttccaggggaagacccccctcagaaaa

SEQ ID NO: 54414 - RNA, 30 nt, synthetic construct
  misc_feature 1..30: note = Glutathione S-transferase kappa 1 (142-151)
  source 1..30: mol_type = other RNA
ggcctgctcgagaagatcgccacccccaaa

SEQ ID NO: 54415 - RNA, 27 nt, synthetic construct
  misc_feature 1..27: note = Kelch repeat and BTB domain-containing protein 7 (280-288)
  source 1..27: mol_type = other RNA
ggcctgctcaccaagcccatcgtgaaa

SEQ ID NO: 54416 - RNA, 27 nt, synthetic construct
  misc_feature 1..27: note = Microtubule-associated protein 4 (735-743)
  source 1..27: mol_type = other RNA
ggcctgaacaagaaacccatgagcctc

SEQ ID NO: 54417 - RNA, 27 nt, synthetic construct
  misc_feature 1..27: note = Epidermal growth factor receptor substrate 15-like 1 (46-54)
  source 1..27: mol_type = other RNA
ggcctgagcgacatcattctcgggaag

SEQ ID NO: 54418 - RNA, 27 nt, synthetic construct
  misc_feature 1..27: note = Calcium homeostasis endoplasmic reticulum protein (680-688)
  source 1..27: mol_type = other RNA
ggcctgtacgagttctttagagccaag

SEQ ID NO: 54419 - RNA, 27 nt, synthetic construct
  misc_feature 1..27: note = Cyclin-dependent kinase 9 (136-144)
  source 1..27: mol_type = other RNA
ggcctgtactatatccacagaaacaag

SEQ ID NO: 54420 - RNA, 30 nt, synthetic construct
  misc_feature 1..30: note = 26S proteasome non-ATPase regulatory subunit 8 (146-155)
  source 1..30: mol_type = other RNA
ggcagctacaacaaggtgttcctggccaaa

SEQ ID NO: 54421 - RNA, 27 nt, synthetic construct
  misc_feature 1..27: note = RNA polymerase II-associated protein 3 (188-196)
  source 1..27: mol_type = other RNA
ggcagctactccaaggccttcgctaga

SEQ ID NO: 54422 - RNA, 30 nt, synthetic construct
  misc_feature 1..30: note = Zinc finger E-box-binding homeobox 1 (190-199)
  source 1..30: mol_type = other RNA
ggcagctactcctctcacatctcaagtaag

SEQ ID NO: 54423 - RNA, 27 nt, synthetic construct
  misc_feature 1..27: note = Dynein light chain 1, cytoplasmic (63-71)
  source 1..27: mol_type = other RNA
ggcagctacgtgacccacgagacaaag

SEQ ID NO: 54424 - RNA, 30 nt, synthetic construct
  misc_feature 1..30: note = 39S ribosomal protein L2, mitochondrial (222-231)
  source 1..30: mol_type = other RNA
ggcaccgccatcattcagctgcccagcaag

SEQ ID NO: 54425 - RNA, 27 nt, synthetic construct
  misc_feature 1..27: note = Fidgetin-like protein 1 (444-452)
  source 1..27: mol_type = other RNA
ggcaccgggaagacactgatcggaaaa

SEQ ID NO: 54426 - RNA, 27 nt, synthetic construct
  misc_feature 1..27: note = ATP-binding cassette sub-family F member 3 (103-111)
  source 1..27: mol_type = other RNA
ggcaccaagctgcccgggctccttaaa

SEQ ID NO: 54427 - RNA, 27 nt, synthetic construct
  misc_feature 1..27: note = WD repeat-containing protein 46 (390-398)
  source 1..27: mol_type = other RNA
ggcacctaccagcccctgagcacaaga

SEQ ID NO: 54428 - RNA, 27 nt, synthetic construct
  misc_feature 1..27: note = Protein quaking (198-206)
  source 1..27: mol_type = other RNA
ggcacctacagagacgccaacatcaag

SEQ ID NO: 54429 - RNA, 27 nt, synthetic construct
  misc_feature 1..27: note = Rho-associated protein kinase 1 (285-293)
  source 1..27: mol_type = other RNA
ggcacctacagcaagatcatgaaccac

SEQ ID NO: 54430 - RNA, 27 nt, synthetic construct
  misc_feature 1..27: note = Protein phosphatase 1 regulatory subunit 7 (159-167)
  source 1..27: mol_type = other RNA
ggcgtggacaagctgaccagactcaaa

SEQ ID NO: 54431 - RNA, 27 nt, synthetic construct
  misc_feature 1..27: note = Profilin-1 (118-126)
  source 1..27: mol_type = other RNA
ggcgtgcacgggggactgatcaacaag

SEQ ID NO: 54432 - RNA, 33 nt, synthetic construct
  misc_feature 1..33: note = Exosome complex component RRP40 (136-146)
  source 1..33: mol_type = other RNA
ggcgtgatcgggcaggacggactgctcttcaag

SEQ ID NO: 54433 - RNA, 27 nt, synthetic construct
  misc_feature 1..27: note = Ubiquinol-cytochrome-c reductase complex assembly factor 1 (118-126)
  source 1..27: mol_type = other RNA
ggcgtgaacccctacatcctgaagaaa

SEQ ID NO: 54434 - RNA, 27 nt, synthetic construct
  misc_feature 1..27: note = Eukaryotic translation initiation factor 3 subunit C-like protein (190-198)
  source 1..27: mol_type = other RNA
ggcgtgagcgccgctaccttcctgaag

SEQ ID NO: 54435 - RNA, 27 nt, synthetic construct
  misc_feature 1..27: note = Antizyme inhibitor 1 (319-327)
  source 1..27: mol_type = other RNA
ggcgtgtacgggagcttcgcctccaag

SEQ ID NO: 54436 - RNA, 30 nt, synthetic construct
  misc_feature 1..30: note = Nuclear pore complex protein Nup160 (105-114)
  source 1..30: mol_type = other RNA
ggcgtgtacgtcagcgagacccagaacaga

SEQ ID NO: 54437 - RNA, 27 nt, synthetic construct
  misc_feature 1..27: note = Alanine-tRNA ligase, cytoplasmic (301-309)
  source 1..27: mol_type = other RNA
cacgccagaaccatcacagtggctctg

SEQ ID NO: 54438 - RNA, 27 nt, synthetic construct
  misc_feature 1..27: note = Transketolase (243-251)
  source 1..27: mol_type = other RNA
cacgccagcgacagaatcattgctctg

SEQ ID NO: 54439 - RNA, 27 nt, synthetic construct
  misc_feature 1..27: note = Stathmin (64-72)
  source 1..27: mol_type = other RNA
cacgaggccgaagtgctgaagcagctc

SEQ ID NO: 54440 - RNA, 27 nt, synthetic construct
  misc_feature 1..27: note = WD repeat-containing protein 6 (315-323)
  source 1..27: mol_type = other RNA
cacgagggcgaaatcctgcaggccttc

SEQ ID NO: 54441 - RNA, 33 nt, synthetic construct
  misc_feature 1..33: note = Carbohydrate sulfotransferase 10 (215-225)
  source 1..33: mol_type = other RNA
cacgagatcgcccccggcattataagaaagtac

SEQ ID NO: 54442 - RNA, 27 nt, synthetic construct
  misc_feature 1..27: note = Nardilysin (1054-1062)
  source 1..27: mol_type = other RNA
cacgagatcgaagccctgaagagcttc

SEQ ID NO: 54443 - RNA, 24 nt, synthetic construct
  misc_feature 1..24: note = LanC-like protein 1 (89-96)
  source 1..24: mol_type = other RNA
cacggctacgtgaagcagagcctg

SEQ ID NO: 54444 - RNA, 27 nt, synthetic construct
  misc_feature 1..27: note = Histone H2A.V (87-95)
  source 1..27: mol_type = other RNA
cacatccataagagcctgattggcaaa

SEQ ID NO: 54445 - RNA, 27 nt, synthetic construct
  misc_feature 1..27: note = E3 ubiquitin-protein ligase TRIP12 (1751-1759)
  source 1..27: mol_type = other RNA
cacctggaggacatcgtgagacagaag

SEQ ID NO: 54446 - RNA, 27 nt, synthetic construct
  misc_feature 1..27: note = Unconventional myosin-VI (430-438)
  source 1..27: mol_type = other RNA
cacctgttcgaccatgtggtcaacaga

SEQ ID NO: 54447 - RNA, 27 nt, synthetic construct
  misc_feature 1..27: note = Nardilysin (708-716)
  source 1..27: mol_type = other RNA
cacctgatcagccccctcattcagaag

SEQ ID NO: 54448 - RNA, 33 nt, synthetic construct
  misc_feature 1..33: note = Hermansky-Pudlak syndrome 5 protein (400-410)
  source 1..33: mol_type = other RNA
cacctgaagagccagctcgaccatggcacctac

SEQ ID NO: 54449 - RNA, 27 nt, synthetic construct
  misc_feature 1..27: note = Integrin-linked protein kinase (248-256)
  source 1..27: mol_type = other RNA
cacaccctggagcccctcatccctaga

SEQ ID NO: 54450 - RNA, 30 nt, synthetic construct
  misc_feature 1..30: note = Serine/threonine-protein kinase WNK1 (339-348)
  source 1..30: mol_type = other RNA
cacaccagaacaccccctatcattcatagg

SEQ ID NO: 54451 - RNA, 27 nt, synthetic construct
  misc_feature 1..27: note = Centromere protein M (122-130)
  source 1..27: mol_type = other RNA
cacacctaccagagccccctgctctat

SEQ ID NO: 54452 - RNA, 30 nt, synthetic construct
  misc_feature 1..30: note = T-complex protein 1 subunit epsilon (135-144)
  source 1..30: mol_type = other RNA
cacgtgatcgagaccctgattggcaagaaa

SEQ ID NO: 54453 - RNA, 27 nt, synthetic construct
  misc_feature 1..27: note = Gamma-interferon-inducible protein 16 (241-249)
  source 1..27: mol_type = other RNA
cacgtgaaggtcctgaacaccagcctc

SEQ ID NO: 54454 - RNA, 27 nt, synthetic construct
  misc_feature 1..27: note = Ankyrin repeat family A protein 2 (113-121)
  source 1..27: mol_type = other RNA
cacgtgtacacccccagcacaactaag

SEQ ID NO: 54455 - RNA, 30 nt, synthetic construct
  misc_feature 1..30: note = Little elongation complex subunit 1 (1936-1945)
  source 1..30: mol_type = other RNA
cacgtgtacgtcggcaacatcagcaagaaa

SEQ ID NO: 54456 - RNA, 33 nt, synthetic construct
  misc_feature 1..33: note = Deoxynucleoside triphosphate triphosphohydrolase SAMHD1 (397-407)
  source 1..33: mol_type = other RNA
atcgagattaccggcgccgggggaaagaaatac

SEQ ID NO: 54457 - RNA, 27 nt, synthetic construct
  misc_feature 1..27: note = Lanosterol 14-alpha demethylase (175-183)
  source 1..27: mol_type = other RNA
atcgagaaggaaaccaaagagtacttc

SEQ ID NO: 54458 - RNA, 27 nt, synthetic construct
  misc_feature 1..27: note = NADH dehydrogenase (ubiquinone) 1 beta subcomplex subunit 4 (60-68)
  source 1..27: mol_type = other RNA
atcgagaaccccgccctgctcagatgg

SEQ ID NO: 54459 - RNA, 27 nt, synthetic construct
  misc_feature 1..27: note = Constitutive coactivator of PPAR-gamma-like protein 1 (325-333)
  source 1..27: mol_type = other RNA
atcggctactatagcgccacctccaag

SEQ ID NO: 54460 - RNA, 27 nt, synthetic construct
  misc_feature 1..27: note = T-complex protein 1 subunit gamma (155-163)
  source 1..27: mol_type = other RNA
atcattaacagctccataaccacaaag

SEQ ID NO: 54461 - RNA, 27 nt, synthetic construct
  misc_feature 1..27: note = TFIIH basal transcription factor complex helicase XPD subunit (533-541)
  source 1..27: mol_type = other RNA
atcctggagaacattcagagaaataag

SEQ ID NO: 54462 - RNA, 27 nt, synthetic construct
  misc_feature 1..27: note = Thymidine kinase, cytosolic (24-32)
  source 1..27: mol_type = other RNA
atcctgggccccatgttcagcgggaag

SEQ ID NO: 54463 - RNA, 27 nt, synthetic construct
  misc_feature 1..27: note = Pre-mRNA-processing-splicing factor 8 (2105-2113)
  source 1..27: mol_type = other RNA
atcctgcccaagaacgtgctcaaaaag

SEQ ID NO: 54464 - RNA, 30 nt, synthetic construct
  misc_feature 1..30: note = BAG35700.1 (99-108)
  source 1..30: mol_type = other RNA
atcctgagagacggcattaccgccgggaag

SEQ ID NO: 54465 - RNA, 27 nt, synthetic construct
  misc_feature 1..27: note = Trifunctional purine biosynthetic protein adenosine-3 (190-198)
  source 1..27: mol_type = other RNA
atcctgagcggccccttcgtgcagaag

SEQ ID NO: 54466 - RNA, 27 nt, synthetic construct
  misc_feature 1..27: note = Actin, gamma-enteric smooth muscle (150-158)
  source 1..27: mol_type = other RNA
atcctgaccgagagaggctacagcttc

SEQ ID NO: 54467 - RNA, 27 nt, synthetic construct
  misc_feature 1..27: note = Ornithine decarboxylase (218-226)
  source 1..27: mol_type = other RNA
atcctgtacgaccacgcccatgtgaag

SEQ ID NO: 54468 - RNA, 27 nt, synthetic construct
  misc_feature 1..27: note = Peroxiredoxin-6 (147-155)
  source 1..27: mol_type = other RNA
atcctgtaccccgccaccacaggcaga

SEQ ID NO: 54469 - RNA, 27 nt, synthetic construct
  misc_feature 1..27: note = LYR motif-containing protein 1 (79-87)
  source 1..27: mol_type = other RNA
atcccctaccctagaccaattcacctg

SEQ ID NO: 54470 - RNA, 27 nt, synthetic construct
  misc_feature 1..27: note = SWI/SNF complex subunit SMARCC2 (39-47)
  source 1..27: mol_type = other RNA
atccaggccgagccccctaccaacaag

SEQ ID NO: 54471 - RNA, 30 nt, synthetic construct
  misc_feature 1..30: note = Lysine-specific histone demethylase 1B (637-646)
  source 1..30: mol_type = other RNA
atccagttcaacccccctctgagcgagaag

SEQ ID NO: 54472 - RNA, 27 nt, synthetic construct
  misc_feature 1..27: note = Induced myeloid leukemia cell differentiation protein Mcl-1 (115-123)
  source 1..27: mol_type = other RNA
atcagcttcggcgcctttgtggctaag

SEQ ID NO: 54473 - RNA, 27 nt, synthetic construct
  misc_feature 1..27: note = 3-hydroxy-3-methylglutaryl-coenzyme A reductase (354-362)
  source 1..27: mol_type = other RNA
atcaccagccccgtggtcacacagaag

SEQ ID NO: 54474 - RNA, 27 nt, synthetic construct
  misc_feature 1..27: note = Pre-mRNA-processing factor 40 homolog A (229-237)
  source 1..27: mol_type = other RNA
atcgtggccggcagcctgattaccaag

SEQ ID NO: 54475 - RNA, 27 nt, synthetic construct
  misc_feature 1..27: note = V-type proton ATPase 16 kDa proteolipid subunit (147-155)
  source 1..27: mol_type = other RNA
atcgtggccctgattctcagcaccaag

SEQ ID NO: 54476 - RNA, 27 nt, synthetic construct
  misc_feature 1..27: note = HLA class II histocompatibility antigen, DP alpha 1 chain (238-246)
  source 1..27: mol_type = other RNA
atcgtgggcaccgtcctgattataaag

SEQ ID NO: 54477 - RNA, 33 nt, synthetic construct; identical to SEQ ID NO: 30250
  misc_feature 1..33: note = ATP synthase subunit g, mitochondrial (56-66)
  source 1..33: mol_type = other RNA

SEQ ID NO: 54478 - RNA, 30 nt, synthetic construct
  misc_feature 1..30: note = Interferon regulatory factor 9 (119-128)
  source 1..30: mol_type = other RNA
atcgtgagcggccagcccgggacccaaaag

SEQ ID NO: 54479 - RNA, 30 nt, synthetic construct; identical to SEQ ID NO: 30252
  misc_feature 1..30: note = Cleavage and polyadenylation specificity factor subunit 2 (17-26)
  source 1..30: mol_type = other RNA

SEQ ID NO: 54480 - RNA, 27 nt, synthetic construct
  misc_feature 1..27: note = Serine palmitoyltransferase 2 (237-245)
  source 1..27: mol_type = other RNA
atcgtgtacggccagcccagaaccagg

SEQ ID NO: 54481 - RNA, 27 nt, synthetic construct
  misc_feature 1..27: note = Sentrin-specific protease 6 (648-656)
  source 1..27: mol_type = other RNA
atcgtgtacccccctccaccggccaag

SEQ ID NO: 54482 - RNA, 30 nt, synthetic construct
  misc_feature 1..30: note = Elongation factor 1-gamma (428-437)
  source 1..30: mol_type = other RNA
aaggccttcaaccagggcaaaatctttaag

SEQ ID NO: 54483 - RNA, 27 nt, synthetic construct
  misc_feature 1..27: note = Tyrosine-protein kinase BAZ1B (885-893)
  source 1..27: mol_type = other RNA
aaggccttccaggagggcatcgctaaa

SEQ ID NO: 54484 - RNA, 30 nt, synthetic construct
  misc_feature 1..30: note = Zinc finger CCCH domain-containing protein 4 (890-899)
  source 1..30: mol_type = other RNA
aaggccaaagagccccctttcgtgagaaag

SEQ ID NO: 54485 - RNA, 27 nt, synthetic construct
  misc_feature 1..27: note = Squalene monooxygenase (318-326)
  source 1..27: mol_type = other RNA
aaggccaaccacgctgagctgatcctc

SEQ ID NO: 54486 - RNA, 27 nt, synthetic construct
  misc_feature 1..27: note = RNA cytidine acetyltransferase (367-375)
  source 1..27: mol_type = other RNA
aaggccagcgaggtgttcctgcagaga

SEQ ID NO: 54487 - RNA, 27 nt, synthetic construct
  misc_feature 1..27: note = Ribonuclease inhibitor (226-234)
  source 1..27: mol_type = other RNA
aaggccagcctgagagagctcgctctt

SEQ ID NO: 54488 - RNA, 27 nt, synthetic construct
  misc_feature 1..27: note = UDP-glucose:glycoprotein glucosyltransferase 2 (5-13)
  source 1..27: mol_type = other RNA
aaggccaccaacgtggtcagactgctc

SEQ ID NO: 54489 - RNA, 27 nt, synthetic construct
  misc_feature 1..27: note = Bifunctional apoptosis regulator (261-269)
  source 1..27: mol_type = other RNA
aaggccgtgaaccccggcagaagcctg

SEQ ID NO: 54490 - RNA, 27 nt, synthetic construct
  misc_feature 1..27: note = SWI/SNF-related matrix-associated actin-dependent regulator of chromatin subfamily E member 1 (113-121)
  source 1..27: mol_type = other RNA
aaggcctaccacaacagccccgcttat

SEQ ID NO: 54491 - RNA, 27 nt, synthetic construct
  misc_feature 1..27: note = Zinc finger protein 302 (72-80)
  source 1..27: mol_type = other RNA
aaggcctaccccttccctctgagccac

SEQ ID NO: 54492 - RNA, 27 nt, synthetic construct
  misc_feature 1..27: note = Phosphatidylinositol 4-phosphate 5-kinase type-1 alpha (187-195)
  source 1..27: mol_type = other RNA
aaggaggccgaattcctgcagaaactc

SEQ ID NO: 54493 - RNA, 33 nt, synthetic construct
  misc_feature 1..33: note = Transmembrane emp24 domain-containing protein 10 (87-97)
  source 1..33: mol_type = other RNA
aaggaggacgccaccaaaggcaagttcgctttt

SEQ ID NO: 54494 - RNA, 27 nt, synthetic construct
  misc_feature 1..27: note = COP9 signalosome complex subunit 6 (78-86)
  source 1..27: mol_type = other RNA
aaggaggaacagttcaaacaagtgttt

SEQ ID NO: 54495 - RNA, 27 nt, synthetic construct
  misc_feature 1..27: note = Septin-7 (100-108)
  source 1..27: mol_type = other RNA
aaggagggcggggtgcagctgctcctt

SEQ ID NO: 54496 - RNA, 30 nt, synthetic construct
  misc_feature 1..30: note = Phosphatidylinositol-binding clathrin assembly protein (231-240)
  source 1..30: mol_type = other RNA
aaggagggcctggacatctacaaaaagttc

SEQ ID NO: 54497 - RNA, 33 nt, synthetic construct
  misc_feature 1..33: note = Adenosylhomocysteinase 2 (20-30)
  source 1..33: mol_type = other RNA
aaggagatcgaagacgccgagaaatacagcttc

SEQ ID NO: 54498 - RNA, 27 nt, synthetic construct
  misc_feature 1..27: note = Heat shock protein HSP 90-alpha A2 (41-49)
  source 1..27: mol_type = other RNA
aaggagatcttcctgagagaactcatt

SEQ ID NO: 54499 - RNA, 30 nt, synthetic construct
  misc_feature 1..30: note = Putative homeodomain transcription factor 2 (737-746)
  source 1..30: mol_type = other RNA
aaggagctggacagccccttcagactctac

SEQ ID NO: 54500 - RNA, 30 nt, synthetic construct
  misc_feature 1..30: note = DnaJ homolog subfamily B member 14 (282-291)
  source 1..30: mol_type = other RNA
aaggagctggaaagactcaccagcctttac

SEQ ID NO: 54501 - RNA, 27 nt, synthetic construct
  misc_feature 1..27: note = Ezrin (61-69)
  source 1..27: mol_type = other RNA
aaggagaaccccctgcagttcaaattt

SEQ ID NO: 54502 - RNA, 30 nt, synthetic construct
  misc_feature 1..30: note = Integrator complex subunit 11 (493-502)
  source 1..30: mol_type = other RNA
aaggagcaggaaaccgccctgagagtgtac

SEQ ID NO: 54503 - RNA, 27 nt, synthetic construct
  misc_feature 1..27: note = Hypoxia-inducible factor 1-alpha (32-40)
  source 1..27: mol_type = other RNA
aaggagagcgaagtgttctacgagctg

SEQ ID NO: 54504 - RNA, 27 nt, synthetic construct
  misc_feature 1..27: note = Moesin (72-80)
  source 1..27: mol_type = other RNA
aaggagagccccctgctcttcaaattt

SEQ ID NO: 54505 - RNA, 27 nt, synthetic construct
  misc_feature 1..27: note = Transcription elongation factor B polypeptide 2 (19-27)
  source 1..27: mol_type = other RNA
aaggagagctccaccgtgttcgaactg

SEQ ID NO: 54506 - RNA, 27 nt, synthetic construct
  misc_feature 1..27: note = CCAAT/enhancer-binding protein zeta (652-660)
  source 1..27: mol_type = other RNA
aaggagaccgaaatcgtgaaaaagctg

SEQ ID NO: 54507 - RNA, 27 nt, synthetic construct
  misc_feature 1..27: note = Small kinetochore-associated protein (78-86)
  source 1..27: mol_type = other RNA
aaggaggtggacgtcagcaaacagctg

SEQ ID NO: 54508 - RNA, 27 nt, synthetic construct
  misc_feature 1..27: note = RANBP2-like and GRIP domain-containing protein 1 (31-39)
  source 1..27: mol_type = other RNA
aaggagtacgacctggccaaaaagtat

SEQ ID NO: 54509 - RNA, 27 nt, synthetic construct
  misc_feature 1..27: note = Mitochondrial fission 1 protein (85-93)
  source 1..27: mol_type = other RNA
aaggagtacgaaaaagccctgaagtat

SEQ ID NO: 54510 - RNA, 27 nt, synthetic construct
  misc_feature 1..27: note = Spliceosome RNA helicase DDX39B (131-139)
  source 1..27: mol_type = other RNA
aaggagtacgaaagattcagcaaatat

SEQ ID NO: 54511 - RNA, 27 nt, synthetic construct
  misc_feature 1..27: note = Activating signal cointegrator 1 complex subunit 2 (170-178)
  source 1..27: mol_type = other RNA
aagggcaacagccccctgctccagaaa

SEQ ID NO: 54512 - RNA, 27 nt, synthetic construct
  misc_feature 1..27: note = Fibroblast growth factor receptor 1 (669-677)
  source 1..27: mol_type = other RNA
aagatcgccgacttcggcctggctaga

SEQ ID NO: 54513 - RNA, 30 nt, synthetic construct
  misc_feature 1..30: note = Kinetochore protein Nuf2 (447-456)
  source 1..30: mol_type = other RNA
aagatcgacgagaaaaccgccgaactgaag

SEQ ID NO: 54514 - RNA, 27 nt, synthetic construct
  misc_feature 1..27: note = 60S ribosomal protein L7-like 1 (114-122)
  source 1..27: mol_type = other RNA
aagatcttcagcggcgtgtttgtcaaa

SEQ ID NO: 54515 - RNA, 27 nt, synthetic construct
  misc_feature 1..27: note = Tyrosine-protein kinase JAK2 (842-850)
  source 1..27: mol_type = other RNA
aagatcggcgacttcgggctgaccaaa

SEQ ID NO: 54516 - RNA, 27 nt, synthetic construct
  misc_feature 1..27: note = Replication factor C subunit 1 (306-314)
  source 1..27: mol_type = other RNA
aagatcggcgaggtgagctcccccaaa

SEQ ID NO: 54517 - RNA, 27 nt, synthetic construct
  misc_feature 1..27: note = Replication factor C subunit 2 (176-184)
  source 1..27: mol_type = other RNA
aagatcattgagcccatacagagcaga

SEQ ID NO: 54518 - RNA, 30 nt, synthetic construct
  misc_feature 1..30: note = T-complex protein 1 subunit eta (48-57)
  source 1..30: mol_type = other RNA
aagatcaaagagattgccgtgaccgtcaag

SEQ ID NO: 54519 - RNA, 27 nt, synthetic construct
  misc_feature 1..27: note = 40S ribosomal protein S18 (78-86)
  source 1..27: mol_type = other RNA
aagatccccgactggttcctgaacaga

SEQ ID NO: 54520 - RNA, 27 nt, synthetic construct
  misc_feature 1..27: note = SAGA-associated factor 29 (50-58)
  source 1..27: mol_type = other RNA
aagatcagcccctactatagaaccaaa

SEQ ID NO: 54521 - RNA, 27 nt, synthetic construct
  misc_feature 1..27: note = B-cell linker protein (6-14)
  source 1..27: mol_type = other RNA
aagatcaccgtgcccgccagccagaaa

SEQ ID NO: 54522 - RNA, 30 nt, synthetic construct
  misc_feature 1..30: note = COMM domain-containing protein 2 (42-51)
  source 1..30: mol_type = other RNA
aagatctacgagggcgccgctagaaaactg

SEQ ID NO: 54523 - RNA, 24 nt, synthetic construct
  misc_feature 1..24: note = SWI/SNF-related matrix-associated actin-dependent regulator of chromatin subfamily A member 5 (411-418)
  source 1..24: mol_type = other RNA
aagatctacgtgggcctgagcaaa

SEQ ID NO: 54524 - RNA, 27 nt, synthetic construct
  misc_feature 1..27: note = Cyclin-dependent kinase 4 (81-89)
  source 1..27: mol_type = other RNA
aagctggccgacttcggcctcgctaga

SEQ ID NO: 54525 - RNA, 27 nt, synthetic construct
  misc_feature 1..27: note = DNA-dependent protein kinase catalytic subunit (1617-1625)
  source 1..27: mol_type = other RNA
aagctggccaccacaatcctccagcac

SEQ ID NO: 54526 - RNA, 27 nt, synthetic construct
  misc_feature 1..27: note = Myc proto-oncogene protein (341-349)
  source 1..27: mol_type = other RNA
aagctggacagcgtgagagtcctcagg

SEQ ID NO: 54527 - RNA, 33 nt, synthetic construct
  misc_feature 1..33: note = Translationally-controlled tumor protein (102-112)
  source 1..33: mol_type = other RNA
aagctggaggaacagagacccgagagggtgaaa

SEQ ID NO: 54528 - RNA, 33 nt, synthetic construct
  misc_feature 1..33: note = Cleavage stimulation factor subunit 1 (198-208)
  source 1..33: mol_type = other RNA
aagctgttcgactacagcaaaccctccgccaag

SEQ ID NO: 54529 - RNA, 27 nt, synthetic construct
  misc_feature 1..27: note = Baculoviral IAP repeat-containing protein 2 (45-53)
  source 1..27: mol_type = other RNA
aagctgggcgacagccccatccagaaa

SEQ ID NO: 54530 - RNA, 27 nt, synthetic construct
  misc_feature 1..27: note = Nucleolar protein 58 (93-101)
  source 1..27: mol_type = other RNA
aagctgggcggggtgatcaaagagaag

SEQ ID NO: 54531 - RNA, 30 nt, synthetic construct
  misc_feature 1..30: note = Serine/threonine-protein kinase Chk1 (461-470)
  source 1..30: mol_type = other RNA
aagctgatcgacattgtgagctcccagaaa

SEQ ID NO: 54532 - RNA, 27 nt, synthetic construct
  misc_feature 1..27: note = SHC SH2 domain-binding protein 1 (262-270)
  source 1..27: mol_type = other RNA
aagctgatcgagaaccccctccttaga

SEQ ID NO: 54533 - RNA, 33 nt, synthetic construct
  misc_feature 1..33: note = 40S ribosomal protein S9 (30-40)
  source 1..33: mol_type = other RNA
aagctgatcggcgagtacgggctcagaaacaaa

SEQ ID NO: 54534 - RNA, 33 nt, synthetic construct
  misc_feature 1..33: note = 60S ribosomal protein L19 (24-34)
  source 1..33: mol_type = other RNA
aagctgatcaaagacggcctcattataagaaag

SEQ ID NO: 54535 - RNA, 33 nt, synthetic construct
  misc_feature 1..33: note = Myc proto-oncogene protein (413-423)
  source 1..33: mol_type = other RNA
aagctgatcagcgaggaagacctccttagaaaa

SEQ ID NO: 54536 - RNA, 30 nt, synthetic construct
  misc_feature 1..30: note = 60S ribosomal protein L4 (173-182)
  source 1..30: mol_type = other RNA
aagctgaaagcctggaacgacatcaagaaa

SEQ ID NO: 54537 - RNA, 27 nt, synthetic construct
  misc_feature 1..27: note = Galactosylgalactosylxylosylprotein 3-beta-glucuronosyltransferase 3 (4-12)
  source 1..27: mol_type = other RNA
aagctgaaaaacgtgttcctcgcctac

SEQ ID NO: 54538 - RNA, 27 nt, synthetic construct
  misc_feature 1..27: note = BRISC and BRCA1-A complex member 1 (297-305)
  source 1..27: mol_type = other RNA
aagctgctcgcccacccccttcagaga

SEQ ID NO: 54539 - RNA, 30 nt, synthetic construct
  misc_feature 1..30: note = SWI/SNF-related matrix-associated actin-dependent regulator of chromatin subfamily D member 3 (176-185)
  source 1..30: mol_type = other RNA
aagctgctcgacgatcccagcaaacagaag

SEQ ID NO: 54540 - RNA, 27 nt, synthetic construct
  misc_feature 1..27: note = Tyrosine-tRNA ligase, cytoplasmic (319-327)
  source 1..27: mol_type = other RNA
aagctgctcgaccccatcagagagaaa

SEQ ID NO: 54541 - RNA, 33 nt, synthetic construct
  misc_feature 1..33: note = T-complex protein 1 subunit eta (55-65)
  source 1..33: mol_type = other RNA
aagctgctcgacgtggtccaccccgccgctaaa

SEQ ID NO: 54542 - RNA, 33 nt, synthetic construct
  misc_feature 1..33: note = 40S ribosomal protein S16 (49-59)
  source 1..33: mol_type = other RNA
aagctgctcgagcccgtgcttctgttgggcaaa

SEQ ID NO: 54543 - RNA, 27 nt, synthetic construct
  misc_feature 1..27: note = Prefoldin subunit 6 (58-66)
  source 1..27: mol_type = other RNA
aagctgctcggccccgtgcttgtcaaa

SEQ ID NO: 54544 - RNA, 30 nt, synthetic construct
  misc_feature 1..30: note = Nucleolar protein 7 (112-121)
  source 1..30: mol_type = other RNA
aagctgctccccgacaccatccttgagaaa

SEQ ID NO: 54545 - RNA, 27 nt, synthetic construct
  misc_feature 1..27: note = Target of rapamycin complex 2 subunit MAPKAP1 (222-230)
  source 1..27: mol_type = other RNA
aagctgaacgacaatgtgagcgcctac

SEQ ID NO: 54546 - RNA, 27 nt, synthetic construct
  misc_feature 1..27: note = 116 kDa U5 small nuclear ribonucleoprotein component (409-417)
  source 1..27: mol_type = other RNA
aagctgaacatcagacccctccttagg

SEQ ID NO: 54547 - RNA, 30 nt, synthetic construct
  misc_feature 1..30: note = 60S ribosomal protein L4 (327-336)
  source 1..30: mol_type = other RNA
aagctgaacccctacgccaaaaccatgaga

SEQ ID NO: 54548 - RNA, 27 nt, synthetic construct
  misc_feature 1..27: note = Activator of 90 kDa heat shock protein ATPase homolog 1 (10-18)
  source 1..27: mol_type = other RNA
aagctgaactggaccggcacaagcaaa

SEQ ID NO: 54549 - RNA, 27 nt, synthetic construct
  misc_feature 1..27: note = U5 small nuclear ribonucleoprotein 200 kDa helicase (885-893)
  source 1..27: mol_type = other RNA
aagctgcccgaggaagtggtcaaaaag

SEQ ID NO: 54550 - RNA, 27 nt, synthetic construct
  misc_feature 1..27: note = Class E basic helix-loop-helix protein 40 (51-59)
  source 1..27: mol_type = other RNA
aagctgccccacagactcatcgagaaa

SEQ ID NO: 54551 - RNA, 30 nt, synthetic construct
  misc_feature 1..30: note = 60S ribosomal protein L27a (116-125)
  source 1..30: mol_type = other RNA
aagctgcccaaacagcctgtgatcgtcaag

SEQ ID NO: 54552 - RNA, 30 nt, synthetic construct
  misc_feature 1..30: note = Hematopoietic SH2 domain-containing protein (6-15)
  source 1..30: mol_type = other RNA
aagctgcccctccctcttccaccgagactg

SEQ ID NO: 54553 - RNA, 27 nt, synthetic construct
  misc_feature 1..27: note = EH domain-containing protein 1 (475-483)
  source 1..27: mol_type = other RNA
aagctgcccaacaccgtgctcggcaaa

SEQ ID NO: 54554 - RNA, 27 nt, synthetic construct
  misc_feature 1..27: note = Protein SET (75-83)
  source 1..27: mol_type = other RNA
aagctgagacagcccttctttcaaaaa

SEQ ID NO: 54555 - RNA, 27 nt, synthetic construct
  misc_feature 1..27: note = Phosphatidylethanolamine-binding protein 1 (88-96)
  source 1..27: mol_type = other RNA
aagctgtacgagcagctcagcggcaaa

SEQ ID NO: 54556 - RNA, 27 nt, synthetic construct
  misc_feature 1..27: note = Cilia- and flagella-associated protein 20 (182-190)
  source 1..27: mol_type = other RNA
aagctgtacctccccgtgcagaacaaa

SEQ ID NO: 54557 - RNA, 27 nt, synthetic construct
  misc_feature 1..27: note = Polyribonucleotide 5'-hydroxyl-kinase Clp1 (198-206)
  source 1..27: mol_type = other RNA
aagctgtacaacaaaatcaccagcaga

SEQ ID NO: 54558 - RNA, 27 nt, synthetic construct
  misc_feature 1..27: note = DnaJ homolog subfamily B member 14 (36-44)
  source 1..27: mol_type = other RNA
aagctgtaccccctccctagcgccaga

SEQ ID NO: 54559 - RNA, 27 nt, synthetic construct
  misc_feature 1..27: note = Elongator complex protein 3 (316-324)
  source 1..27: mol_type = other RNA
aagctgtaccccaccctcgtgatcaga

SEQ ID NO: 54560 - RNA, 33 nt, synthetic construct
  misc_feature 1..33: note = Nodal modulator 2 (57-67)
  source 1..33: mol_type = other RNA
aagctgtacaccaaacacggcacactcaagtat

SEQ ID NO: 54561 - RNA, 30 nt, synthetic construct
  misc_feature 1..30: note = Midasin (592-601)
  source 1..30: mol_type = other RNA
aagatggccgaggtgatcggcagcaaactg

SEQ ID NO: 54562 - RNA, 27 nt, synthetic construct
  misc_feature 1..27: note = BCL-6 corepressor (460-468)
  source 1..27: mol_type = other RNA
aagatggcccccaccgtgctggtccac

SEQ ID NO: 54563 - RNA, 27 nt, synthetic construct
  misc_feature 1..27: note = Low density lipoprotein receptor adapter protein 1 (123-131)
  source 1..27: mol_type = other RNA
aagatgcacgacaaagtgttcgcctac

SEQ ID NO: 54564 - RNA, 33 nt, synthetic construct
  misc_feature 1..33: note = Protein FAM136A (128-138)
  source 1..33: mol_type = other RNA
aagatgaaagaggccctgctcagcatcggcaag

SEQ ID NO: 54565 - RNA, 27 nt, synthetic construct
  misc_feature 1..27: note = Protein LAP2 (174-182)
  source 1..27: mol_type = other RNA
aagatgctgcccaaaaccatgaacaga

SEQ ID NO: 54566 - RNA, 33 nt, synthetic construct
  misc_feature 1..33: note = Selenoprotein T (32-42)
  source 1..33: mol_type = other RNA
aagatgcagtacgccaccggccccctgctcaaa

SEQ ID NO: 54567 - RNA, 27 nt, synthetic construct
  misc_feature 1..27: note = Enhancer of rudimentary homolog (34-42)
  source 1..27: mol_type = other RNA
aagatgtacgaggaacacctgaaaaga

SEQ ID NO: 54568 - RNA, 30 nt, synthetic construct
  misc_feature 1..30: note = cAMP-dependent protein kinase catalytic subunit beta (71-80)
  source 1..30: mol_type = other RNA
aagcagatcgagcacaccctgaacgaaaaa

SEQ ID NO: 54569 - RNA, 30 nt, synthetic construct
  misc_feature 1..30: note = Pumilio homolog 3 (310-319)
  source 1..30: mol_type = other RNA
aagcagatcctgacccccatggcccaaaaa

SEQ ID NO: 54570 - RNA, 33 nt, synthetic construct
  misc_feature 1..33: note = Small EDRK-rich factor 2 (37-47)
  source 1..33: mol_type = other RNA
aagcagagagacagcgagatcatgcaacagaaa

SEQ ID NO: 54571 - RNA, 33 nt, synthetic construct
  misc_feature 1..33: note = T-complex protein 1 subunit theta (98-108)
  source 1..33: mol_type = other RNA
aagcagtacggcaacgaggtgttcctggccaaa

SEQ ID NO: 54572 - RNA, 27 nt, synthetic construct
  misc_feature 1..27: note = 60S ribosomal protein L10a (47-55)
  source 1..27: mol_type = other RNA
aagagattcagcggcaccgtgaggctg

SEQ ID NO: 54573 - RNA, 27 nt, synthetic construct
  misc_feature 1..27: note = A-kinase anchor protein 13 (266-274)
  source 1..27: mol_type = other RNA
aagagacaggaggtgatctacgaactg

SEQ ID NO: 54574 - RNA, 27 nt, synthetic construct
  misc_feature 1..27: note = DNA replication licensing factor MCM4 (216-224)
  source 1..27: mol_type = other RNA
aagagcttcgacaaaaacctgtacaga

SEQ ID NO: 54575 - RNA, 30 nt, synthetic construct
  misc_feature 1..30: note = Renin receptor (255-264)
  source 1..30: mol_type = other RNA
aagagcttcgacacctccctgatcagaaaa

SEQ ID NO: 54576 - RNA, 27 nt, synthetic construct
  misc_feature 1..27: note = Chromosome alignment-maintaining phosphoprotein 1 (334-342)
  source 1..27: mol_type = other RNA
aagagcggcccccctgagctgagaaaa

SEQ ID NO: 54577 - RNA, 27 nt, synthetic construct
  misc_feature 1..27: note = Aurora kinase B (125-133)
  source 1..27: mol_type = other RNA
aagagccacttcatcgtggccctgaaa

SEQ ID NO: 54578 - RNA, 30 nt, synthetic construct
  misc_feature 1..30: note = Cytoplasmic FMR1-interacting protein 2 (777-786)
  source 1..30: mol_type = other RNA
aagagcctggaccaggccatctccagattc

SEQ ID NO: 54579 - RNA, 30 nt, synthetic construct
  misc_feature 1..30: note = WD repeat-containing protein 36 (360-369)
  source 1..30: mol_type = other RNA
aagagcctgggccacgggctcatcaacaaa

SEQ ID NO: 54580 - RNA, 27 nt, synthetic construct
  misc_feature 1..27: note = Mediator of RNA polymerase II transcription subunit 27 (195-203)
  source 1..27: mol_type = other RNA
aagagcaactaccaggtgttccaaaaa

SEQ ID NO: 54581 - RNA, 27 nt, synthetic construct
  misc_feature 1..27: note = Transport and Golgi organization protein 6 homolog (711-719)
  source 1..27: mol_type = other RNA
aagagctccgacttcgccgtgctgaaa

SEQ ID NO: 54582 - RNA, 27 nt, synthetic construct
  misc_feature 1..27: note = Histone H3.3 (57-65)
  source 1..27: mol_type = other RNA
aagagcaccgagctgctcatcagaaaa

SEQ ID NO: 54583 - RNA, 27 nt, synthetic construct
  misc_feature 1..27: note = Nucleolar protein 7 (170-178)
  source 1..27: mol_type = other RNA
aagagctacctggccgtgagactcaaa

SEQ ID NO: 54584 - RNA, 27 nt, synthetic construct
  misc_feature 1..27: note = 116 kDa U5 small nuclear ribonucleoprotein component (612-620)
  source 1..27: mol_type = other RNA
aagagctacccctccctgaccacaaaa

SEQ ID NO: 54585 - RNA, 30 nt, synthetic construct
  misc_feature 1..30: note = Pre-mRNA-processing-splicing factor 8 (1792-1801)
  source 1..30: mol_type = other RNA
aagaccttcgagggcaacctgacaactaaa

SEQ ID NO: 54586 - RNA, 27 nt, synthetic construct
  misc_feature 1..27: note = Zinc finger and BTB domain-containing protein 40 (1053-1061)
  source 1..27: mol_type = other RNA
aagaccttccccaacacaatcgagcac

SEQ ID NO: 54587 - RNA, 27 nt, synthetic construct
  misc_feature 1..27: note = Protein FAM3C (112-120)
  source 1..27: mol_type = other RNA
aagaccggcgaggtgctggacacaaaa

SEQ ID NO: 54588 - RNA, 30 nt, synthetic construct
  misc_feature 1..30: note = Pseudouridylate synthase 7 homolog (77-86)
  source 1..30: mol_type = other RNA
aagaccaaagaccccacagccgctctgaga

SEQ ID NO: 54589 - RNA, 30 nt, synthetic construct
  misc_feature 1..30: note = 60S ribosomal protein L4 (163-172)
  source 1..30: mol_type = other RNA
aagaccaaagaggccgtgctgctccttaag

SEQ ID NO: 54590 - RNA, 30 nt, synthetic construct
  misc_feature 1..30: note = Cyclin-dependent kinase 11A (11-20)
  source 1..30: mol_type = other RNA
aagaccctggacgagatcctccaggaaaaa

SEQ ID NO: 54591 - RNA, 33 nt, synthetic construct
  misc_feature 1..33: note = RNA cytidine acetyltransferase (184-194)
  source 1..33: mol_type = other RNA
aagaccctggaccaggccaaagctgtgctcaag

SEQ ID NO: 54592 - RNA, 27 nt, synthetic construct
  misc_feature 1..27: note = Huntingtin (1402-1410)
  source 1..27: mol_type = other RNA
aagaccaacctgacaagcgtgactaaa

SEQ ID NO: 54593 - RNA, 27 nt, synthetic construct
  misc_feature 1..27: note = Actin-related protein 2/3 complex subunit 2 (214-222)
  source 1..27: mol_type = other RNA
aagaccagcgacttcctgaaagtgctc

SEQ ID NO: 54594 - RNA, 27 nt, synthetic construct
  misc_feature 1..27: note = Cyclin-dependent kinase 11B (551-559)
  source 1..27: mol_type = other RNA
aagaccagcaacctgctcctttcccac

SEQ ID NO: 54595 - RNA, 27 nt, synthetic construct
  misc_feature 1..27: note = 26S proteasome non-ATPase regulatory subunit 1 (302-310)
  source 1..27: mol_type = other RNA
aagaccagctccgccttcgtgggcaaa

SEQ ID NO: 54596 - RNA, 27 nt, synthetic construct
  misc_feature 1..27: note = Zinc finger FYVE domain-containing protein 16 (1328-1336)
  source 1..27: mol_type = other RNA
aagaccagctccggcttcctggccaaa

SEQ ID NO: 54597 - RNA, 33 nt, synthetic construct
  misc_feature 1..33: note = Cyclic AMP-dependent transcription factor ATF-6 beta (655-665)
  source 1..33: mol_type = other RNA
aagaccagcacagtgcccccttccctgagaaaa

SEQ ID NO: 54598 - RNA, 27 nt, synthetic construct
  misc_feature 1..27: note = Bridging integrator 3 (67-75)
  source 1..27: mol_type = other RNA
aagaccgtgatcgagcccctgaaaaag

SEQ ID NO: 54599 - RNA, 30 nt, synthetic construct
  misc_feature 1..30: note = DNA damage-binding protein 1 (191-200)
  source 1..30: mol_type = other RNA
aagacctacgaggtgagcctgagagaaaaa

SEQ ID NO: 54600 - RNA, 33 nt, synthetic construct
  misc_feature 1..33: note = 26S proteasome non-ATPase regulatory subunit 11 (175-185)
  source 1..33: mol_type = other RNA
aagacctaccacgccctgagcaacctccccaaa

SEQ ID NO: 54601 - RNA, 33 nt, synthetic construct
  misc_feature 1..33: note = High mobility group protein B1 (76-86)
  source 1..33: mol_type = other RNA
aagacctacatcccccctaaaggcgagacaaag

SEQ ID NO: 54602 - RNA, 33 nt, synthetic construct
  misc_feature 1..33: note = DNA-directed RNA polymerase II subunit RPB1 (697-707)
  source 1..33: mol_type = other RNA
aagacctaccaggacatccaaaacacaattaaa

SEQ ID NO: 54603 - RNA, 27 nt, synthetic construct
  misc_feature 1..27: note = Interferon-induced, double-stranded RNA-activated protein kinase (291-299)
  source 1..27: mol_type = other RNA
aagacctacgtgatcaaaagagtcaag

SEQ ID NO: 54604 - RNA, 27 nt, synthetic construct
  misc_feature 1..27: note = T-complex protein 1 subunit theta (296-304)
  source 1..27: mol_type = other RNA
aaggtggccgacatggctctgcactac

SEQ ID NO: 54605 - RNA, 30 nt, synthetic construct
  misc_feature 1..30: note = RNA-binding protein 43 (71-80)
  source 1..30: mol_type = other RNA
aaggtggccgagaacgtcatcagacagaaa

SEQ ID NO: 54606 - RNA, 27 nt, synthetic construct
  misc_feature 1..27: note = Serine/threonine-protein kinase Chk2 (245-253)
  source 1..27: mol_type = other RNA
aaggtggccatcaaaattataagcaag

SEQ ID NO: 54607 - RNA, 30 nt, synthetic construct
  misc_feature 1..30: note = 60S ribosomal protein L7a (11-20)
  source 1..30: mol_type = other RNA
aaggtggcccccgctcctgcagtcgttaaa

SEQ ID NO: 54608 - RNA, 33 nt, synthetic construct
  misc_feature 1..33: note = 60S ribosomal protein L7a (11-21)
  source 1..33: mol_type = other RNA
aaggtggcccccgctcctgcagtcgttaaaaag

SEQ ID NO: 54609 - RNA, 30 nt, synthetic construct
  misc_feature 1..30: note = Heat shock cognate 71 kDa protein (601-610)
  source 1..30: mol_type = other RNA
aaggtgtgcaaccccatcattaccaaactg

SEQ ID NO: 54610 - RNA, 30 nt, synthetic construct
  misc_feature 1..30: note = 60S ribosomal protein L13a (103-112)
  source 1..30: mol_type = other RNA
aaggtgttcgacggcatcccccctccatac

SEQ ID NO: 54611 - RNA, 30 nt, synthetic construct
  misc_feature 1..30: note = GMP synthase (glutamine-hydrolyzing) (207-216)
  source 1..30: mol_type = other RNA
aaggtgttcggcgggaccgtccacaaaaag

SEQ ID NO: 54612 - RNA, 27 nt, synthetic construct
  misc_feature 1..27: note = Cytoskeleton-associated protein 5 (96-104)
  source 1..27: mol_type = other RNA
aaggtgttcaaccagcccaaagccaag

SEQ ID NO: 54613 - RNA, 30 nt, synthetic construct
  misc_feature 1..30: note = Thioredoxin (64-73)
  source 1..30: mol_type = other RNA
aaggtgggcgagttcagcggggccaacaaa

SEQ ID NO: 54614 - RNA, 27 nt, synthetic construct
  misc_feature 1..27: note = 28S ribosomal protein S17, mitochondrial (90-98)
  source 1..27: mol_type = other RNA
aaggtgatcgaccccgtcaccggcaaa

SEQ ID NO: 54615 - RNA, 27 nt, synthetic construct
  misc_feature 1..27: note = Serine hydroxymethyltransferase, mitochondrial (238-246)
  source 1..27: mol_type = other RNA
aaggtgatccccagccctttcaaacac

SEQ ID NO: 54616 - RNA, 30 nt, synthetic construct
  misc_feature 1..30: note = Structural maintenance of chromosomes protein 4 (512-521)
  source 1..30: mol_type = other RNA
aaggtgctggacgccatcattcaggagaaa

SEQ ID NO: 54617 - RNA, 30 nt, synthetic construct
  misc_feature 1..30: note = Eukaryotic translation initiation factor 3 subunit L (292-301)
  source 1..30: mol_type = other RNA
aaggtgctggagaacatcgaactcaataaa

SEQ ID NO: 54618 - RNA, 33 nt, synthetic construct
  misc_feature 1..33: note = G2/mitotic-specific cyclin-B2 (318-328)
  source 1..33: mol_type = other RNA
aaggtgctgggccaggggaaatggaacctcaag

SEQ ID NO: 54619 - RNA, 27 nt, synthetic construct
  misc_feature 1..27: note = Tryptophan-tRNA ligase, mitochondrial (333-341)
  source 1..27: mol_type = other RNA
aaggtgctgcagatcggcagcgccaaa

SEQ ID NO: 54620 - RNA, 30 nt, synthetic construct
  misc_feature 1..30: note = Septin-7 (185-194)
  source 1..30: mol_type = other RNA
aaggtgaacatcattcccctgatagccaaa

SEQ ID NO: 54621 - RNA, 30 nt, synthetic construct
  misc_feature 1..30: note = Septin-2 (174-183)
  source 1..30: mol_type = other RNA
aaggtgaacatcgtccccgttattgccaaa

SEQ ID NO: 54622 - RNA, 27 nt, synthetic construct
  misc_feature 1..27: note = Transferrin receptor protein 1 (495-503)
  source 1..27: mol_type = other RNA
aaggtgagcgcctcccccctgctctac

SEQ ID NO: 54623 - RNA, 27 nt, synthetic construct
  misc_feature 1..27: note = B-lymphocyte antigen CD19 (291-299)
  source 1..27: mol_type = other RNA
aaggtgagcgccgtcaccctggcttac

SEQ ID NO: 54624 - RNA, 27 nt, synthetic construct
  misc_feature 1..27: note = Astrotactin-2 (149-157)
  source 1..27: mol_type = other RNA
aaggtgagcgactacatcctgcagcac

SEQ ID NO: 54625 - RNA, 27 nt, synthetic construct
  misc_feature 1..27: note = Thioredoxin-related transmembrane protein 2 (207-215)
  source 1..27: mol_type = other RNA
aaggtgagcacctcccccctgacaaaa

SEQ ID NO: 54626 - RNA, 30 nt, synthetic construct
  misc_feature 1..30: note = Rab GDP dissociation inhibitor beta (23-32)
  source 1..30: mol_type = other RNA
aaggtgaccgagggcagcttcgtctacaaa

SEQ ID NO: 54627 - RNA, 27 nt, synthetic construct
  misc_feature 1..27: note = Unconventional myosin-Id (707-715)
  source 1..27: mol_type = other RNA
aaggtgtggagaggcaccctggccagg

SEQ ID NO: 54628 - RNA, 27 nt, synthetic construct
  misc_feature 1..27: note = Nipped-B-like protein (52-60)
  source 1..27: mol_type = other RNA
aaggtgtacgacaaagccatcaacaga

SEQ ID NO: 54629 - RNA, 33 nt, synthetic construct
  misc_feature 1..33: note = 78 kDa glucose-regulated protein (446-456)
  source 1..33: mol_type = other RNA
aaggtgtacgagggcgaaagacccctgaccaaa

SEQ ID NO: 54630 - RNA, 27 nt, synthetic construct
  misc_feature 1..27: note = Eukaryotic translation initiation factor 3 subunit L (70-78)
  source 1..27: mol_type = other RNA
aaggtgtacgagctgcaggccagcaga

SEQ ID NO: 54631 - RNA, 27 nt, synthetic construct
  misc_feature 1..27: note = E3 ubiquitin-protein ligase RAD18 (115-123)
  source 1..27: mol_type = other RNA
aaggtgtacacccccgtcgccagcaga

SEQ ID NO: 54632 - RNA, 30 nt, synthetic construct
  misc_feature 1..30: note = Motile sperm domain-containing protein 2 (172-181)
  source 1..30: mol_type = other RNA
aaggtgtactatcccaaatacctgagcaag

SEQ ID NO: 54633 - RNA, 30 nt, synthetic construct; identical to SEQ ID NO: 30406
  misc_feature 1..30: note = Ubiquitin-associated protein 2-like (87-96)
  source 1..30: mol_type = other RNA

SEQ ID NO: 54634 - RNA, 27 nt, synthetic construct
  misc_feature 1..27: note = Microtubule-associated protein RP/EB family member 1 (67-75)
  source 1..27: mol_type = other RNA
ctggagcacgaatacatccagaacttc

SEQ ID NO: 54635 - RNA, 24 nt, synthetic construct
  misc_feature 1..24: note = Hyaluronan mediated motility receptor (121-128)
  source 1..24: mol_type = other RNA
ctggagaagcagctcatcgaactt

SEQ ID NO: 54636 - RNA, 30 nt, synthetic construct
  misc_feature 1..30: note = DNA replication licensing factor MCM2 (790-799)
  source 1..30: mol_type = other RNA
ctggagagcttcatcgacacccagaagttt

SEQ ID NO: 54637 - RNA, 30 nt, synthetic construct
  misc_feature 1..30: note = Guanine nucleotide-binding protein G(s) subunit alpha isoforms short (286-295)
  source 1..30: mol_type = other RNA
ctgctcgccgagaaggtgcttgctggcaaa

SEQ ID NO: 54638 - RNA, 33 nt, synthetic construct
  misc_feature 1..33: note = Eukaryotic translation initiation factor 3 subunit C-like protein (634-644)
  source 1..33: mol_type = other RNA
ctgctcgacatccagagctccggcagagccaag

SEQ ID NO: 54639 - RNA, 27 nt, synthetic construct
  misc_feature 1..27: note = Prelamin-A/C (140-148)
  source 1..27: mol_type = other RNA
ctgctcaacagcaaggaggccgctctt

SEQ ID NO: 54640 - RNA, 33 nt, synthetic construct
  misc_feature 1..33: note = T-complex protein 1 subunit beta (109-119)
  source 1..33: mol_type = other RNA
ctgctcagagaggccgaaagccttatcgctaag

SEQ ID NO: 54641 - RNA, 33 nt, synthetic construct
  misc_feature 1..33: note = Methionine synthase reductase (6-16)
  source 1..33: mol_type = other RNA
ctgctctacgccacccagcaaggccaggctaag

SEQ ID NO: 54642 - RNA, 30 nt, synthetic construct
  misc_feature 1..30: note = Replication factor C subunit 5 (57-66)
  source 1..30: mol_type = other RNA
ctgctctacggcccccctgggaccggaaag

SEQ ID NO: 54643 - RNA, 27 nt, synthetic construct
  misc_feature 1..27: note = Leucine-rich repeat-containing protein 58 (83-91)
  source 1..27: mol_type = other RNA
ctgccccacaacagactcgtgagcctt

SEQ ID NO: 54644 - RNA, 27 nt, synthetic construct
  misc_feature 1..27: note = Ribosomal RNA processing protein 1 homolog B (585-593)
  source 1..27: mol_type = other RNA
ctgcccagccagaagaccgcctccctc

SEQ ID NO: 54645 - RNA, 27 nt, synthetic construct
  misc_feature 1..27: note = Proteasome assembly chaperone 2 (40-48)
  source 1..27: mol_type = other RNA
ctgcccagcagaaagctcgtggccctt

SEQ ID NO: 54646 - RNA, 27 nt, synthetic construct
  misc_feature 1..27: note = Squalene monooxygenase (548-556)
  source 1..27: mol_type = other RNA
ctgagctccggcgccgtgctctacaag

SEQ ID NO: 54647 - RNA, 27 nt, synthetic construct
  misc_feature 1..27: note = Neuroguidin (201-209)
  source 1..27: mol_type = other RNA
ctgagctcctctgtgatcagagagctc

SEQ ID NO: 54648 - RNA, 27 nt, synthetic construct
  misc_feature 1..27: note = 60S ribosomal protein L34 (11-19)
  source 1..27: mol_type = other RNA
ctgagctacaacaccgcctccaataag

SEQ ID NO: 54649 - RNA, 30 nt, synthetic construct
  misc_feature 1..30: note = Importin subunit alpha-1 (344-353)
  source 1..30: mol_type = other RNA
ctgaccaaccccaagacaaatatccagaaa

SEQ ID NO: 54650 - RNA, 30 nt, synthetic construct; identical to SEQ ID NO: 30423
  misc_feature 1..30: note = 40S ribosomal protein S7 (131-140)
  source 1..30: mol_type = other RNA

SEQ ID NO: 54651 - RNA, 27 nt, synthetic construct
  misc_feature 1..27: note = Filamin-A (1766-1774)
  source 1..27: mol_type = other RNA
ctggtgatccccttcaccattaagaaa

SEQ ID NO: 54652 - RNA, 27 nt, synthetic construct
  misc_feature 1..27: note = PRELI domain containing protein 3B (186-194)
  source 1..27: mol_type = other RNA
atggccgctgcagccttcgcggagaag

SEQ ID NO: 54653 - RNA, 27 nt, synthetic construct
  misc_feature 1..27: note = Cyclin-T1 (410-418)
  source 1..27: mol_type = other RNA
atggaggccaacgtgaagagccagtac

SEQ ID NO: 54654 - RNA, 27 nt, synthetic construct
  misc_feature 1..27: note = Transformation/transcription domain-associated protein (1736-1744)
  source 1..27: mol_type = other RNA
atggaggaagagatccccaagaactac

SEQ ID NO: 54655 - RNA, 27 nt, synthetic construct
  misc_feature 1..27: note = Nucleolar protein 58 (64-72)
  source 1..27: mol_type = other RNA
atggagggcaagatcaacaaacagctg

SEQ ID NO: 54656 - RNA, 27 nt, synthetic construct
  misc_feature 1..27: note = Ribonucleoside-diphosphate reductase subunit M2 (228-236)
  source 1..27: mol_type = other RNA
atggagaacatccacagcgaaatgtac

SEQ ID NO: 54657 - RNA, 30 nt, synthetic construct
  misc_feature 1..30: note Dolichyl-diphosphooligosaccharide-proteinosyltransferase 48 kDa subunit (18-27)
  source 1..30: mol_type = other RNA
atggagcccagcaccgccgctagagcatgg

SEQ ID NO: 54658 - RNA, 33 nt, synthetic construct
  misc_feature 1..33: note = Large proline-rich protein BAG6 (929-939)
  source 1..33: mol_type = other RNA
atgcccgtgggccctgacgccatcctgagatac

SEQ ID NO: 54659 - RNA, 27 nt, synthetic construct
  misc_feature 1..27: note = 60S ribosomal protein L26 (30-38)
  source 1..27: mol_type = other RNA
atgagctcccccctgtctaaggagctc

SEQ ID NO: 54660 - RNA, 27 nt, synthetic construct
  misc_feature 1..27: note = Histone deacetylase 1 (37-45)
  source 1..27: mol_type = other RNA
atgacccacaacctgctccttaattac

SEQ ID NO: 54661 - RNA, 27 nt, synthetic construct
  misc_feature 1..27: note = Myosin-7B (138-146)
  source 1..27: mol_type = other RNA
aacgaggccagcgtgctgcacaatctc

SEQ ID NO: 54662 - RNA, 27 nt, synthetic construct
  misc_feature 1..27: note = DnaJ homolog subfamily B member 5 (16-24)
  source 1..27: mol_type = other RNA
aacgaggacgaaatcaagaaagcctac

SEQ ID NO: 54663 - RNA, 27 nt, synthetic construct
  misc_feature 1..27: note = Nuclear factor interleukin-3-regulated protein (343-351)
  source 1..27: mol_type = other RNA
aacgagttcgaagccacccagaagctg

SEQ ID NO: 54664 - RNA, 27 nt, synthetic construct
  misc_feature 1..27: note = Ras-related protein Rab-7a (184-192)
  source 1..27: mol_type = other RNA
aacgagttccccgaacctatcaagctg

SEQ ID NO: 54665 - RNA, 30 nt, synthetic construct
  misc_feature 1..30: note = Kinetochore protein NDC80 homolog (555-564)
  source 1..30: mol_type = other RNA
aacgagctggacgccgtgcagagagaatac

SEQ ID NO: 54666 - RNA, 27 nt, synthetic construct
  misc_feature 1..27: note = Putative eukaryotic translation initiation factor 2 subunit 3-like protein (71-79)
  source 1..27: mol_type = other RNA
aacgagctggaaagaaatatcaccatt

SEQ ID NO: 54667 - RNA, 27 nt, synthetic construct
  misc_feature 1..27: note = Fizzy-related protein homolog (412-420)
  source 1..27: mol_type = other RNA
aacgagctggtgagcacccacggctac

SEQ ID NO: 54668 - RNA, 27 nt, synthetic construct
  misc_feature 1..27: note = Mediator of RNA polymerase II transcription subunit 23 (148-156)
  source 1..27: mol_type = other RNA
aacgagaatgacatcattacccacttc

SEQ ID NO: 54669 - RNA, 27 nt, synthetic construct
  misc_feature 1..27: note = CUGBP Elav-like family member 2 (120-128)
  source 1..27: mol_type = other RNA
aacgagaatgacatcagagtgatgttc

SEQ ID NO: 54670 - RNA, 27 nt, synthetic construct
  misc_feature 1..27: note = Serine/threonine-protein kinase PAK 2 (445-453)
  source 1..27: mol_type = other RNA
aacgagaatcccctgagagccctctac

SEQ ID NO: 54671 - RNA, 27 nt, synthetic construct
  misc_feature 1..27: note = Serine/threonine/tyrosine-interacting-like protein 1 (124-132)
  source 1..27: mol_type = other RNA
aacgagcagaccctgcaaagaagctgg

SEQ ID NO: 54672 - RNA, 27 nt, synthetic construct
  misc_feature 1..27: note = Monocarboxylate transporter 7 (57-65)
  source 1..27: mol_type = other RNA
aacgagagcaattccagaatctcttgg

SEQ ID NO: 54673 - RNA, 27 nt, synthetic construct
  misc_feature 1..27: note = Oxysterol-binding protein-related protein 9 (671-679)
  source 1..27: mol_type = other RNA
aacgagtacgaaagcagatccctgtgg

SEQ ID NO: 54674 - RNA, 27 nt, synthetic construct
  misc_feature 1..27: note = DnaJ homolog subfamily A member 1 (120-128)
  source 1..27: mol_type = other RNA
aacggcgccaccagaaagctggctctc

SEQ ID NO: 54675 - RNA, 27 nt, synthetic construct
  misc_feature 1..27: note = Lysine-specific histone demethylase 1A (474-482)
  source 1..27: mol_type = other RNA
aacctgaaggagaaaatcaaggaactc

SEQ ID NO: 54676 - RNA, 27 nt, synthetic construct
  misc_feature 1..27: note = Histone-binding protein RBBP4 (245-253)
  source 1..27: mol_type = other RNA
aacctgaagctcaaacttcacagcttc

SEQ ID NO: 54677 - RNA, 27 nt, synthetic construct
  misc_feature 1..27: note = AP-3 complex subunit delta-1 (372-380)
  source 1..27: mol_type = other RNA
aacctgatggagatcgtgaagaaactc

SEQ ID NO: 54678 - RNA, 24 nt, synthetic construct
  misc_feature 1..24: note = Serine/threonine-protein phosphatase 2A 65 kDa regulatory subunit A beta isoform isoform b (350-357)
  source 1..24: mol_type = other RNA
aaccagcacgtgaagagcgccctg

SEQ ID NO: 54679 - RNA, 27 nt, synthetic construct
  misc_feature 1..27: note = Copine-8 (263-271)
  source 1..27: mol_type = other RNA
aacgtgtacgaggtcgttaatcccaag

SEQ ID NO: 54680 - RNA, 30 nt, synthetic construct
  misc_feature 1..30: note = Polypyrimidine tract-binding protein 1 (440-449)
  source 1..30: mol_type = other RNA
caggaggaccaaggcctgaccaaggattac

SEQ ID NO: 54681 - RNA, 30 nt, synthetic construct
  misc_feature 1..30: note = Forkhead box protein K2 (318-327)
  source 1..30: mol_type = other RNA
caggaggaacccggcaaggggagcttctgg

SEQ ID NO: 54682 - RNA, 33 nt, synthetic construct
  misc_feature 1..33: note = RNA polymerase II subunit A C-terminal domain phosphatase SSU72 (177-187)
  source 1..33: mol_type = other RNA
caggagttcgaagagaagagcggcagaaccttt

SEQ ID NO: 54683 - RNA, 27 nt, synthetic construct
  misc_feature 1..27: note = Alpha-galactosidase A (357-365)
  source 1..27: mol_type = other RNA
caggagatcggcgggcccagaagctac

SEQ ID NO: 54684 - RNA, 33 nt, synthetic construct
  misc_feature 1..33: note = Splicing factor 3B subunit 1 (41-51)
  source 1..33: mol_type = other RNA
caggagatctacggcgggagcgactccagattc

SEQ ID NO: 54685 - RNA, 30 nt, synthetic construct
  misc_feature 1..30: note = Translin-associated protein X (44-53)
  source 1..30: mol_type = other RNA
caggagctggacgccagacacgataagtac

SEQ ID NO: 54686 - RNA, 27 nt, synthetic construct
  misc_feature 1..27: note = Mis18-binding protein 1 (582-590)
  source 1..27: mol_type = other RNA
caggagctgatcggcaagaaagaatac

SEQ ID NO: 54687 - RNA, 30 nt, synthetic construct
  misc_feature 1..30: note = Desmin (113-122)
  source 1..30: mol_type = other RNA
caggagctgaacgacagattcgccaattac

SEQ ID NO: 54688 - RNA, 30 nt, synthetic construct
  misc_feature 1..30: note = DNA-(apurinic or apyrimidinic site) lyase (109-118)
  source 1..30: mol_type = other RNA
caggagctgcccggcctcagccaccaatac

SEQ ID NO: 54689 - RNA, 30 nt, synthetic construct
  misc_feature 1..30: note = Protein phosphatase 1G (202-211)
  source 1..30: mol_type = other RNA
caggagaacggccccaccgccaaggcttac

SEQ ID NO: 54690 - RNA, 27 nt, synthetic construct
  misc_feature 1..27: note = tRNA (cytosine(34)-C(5))-methyltransferase (545-553)
  source 1..27: mol_type = other RNA
caggagaaccccttctttagaaagctg

SEQ ID NO: 54691 - RNA, 27 nt, synthetic construct
  misc_feature 1..27: note = Condensin-2 complex subunit H2 (444-452)
  source 1..27: mol_type = other RNA
caggagaccgaactgagccaaagaatc

SEQ ID NO: 54692 - RNA, 27 nt, synthetic construct
  misc_feature 1..27: note = Protein C10 (28-36)
  source 1..27: mol_type = other RNA
caggaggtgatcaaggcctacggcttc

SEQ ID NO: 54693 - RNA, 24 nt, synthetic construct
  misc_feature 1..24: note = 60S ribosomal protein L6 (269-276)
  source 1..24: mol_type = other RNA
cagggctacctgagaagcgtgttc

SEQ ID NO: 54694 - RNA, 27 nt, synthetic construct
  misc_feature 1..27: note = Histone deacetylase 2 (240-248)
  source 1..27: mol_type = other RNA
cagatcttcaagcccattataagcaaa

SEQ ID NO: 54695 - RNA, 27 nt, synthetic construct
  misc_feature 1..27: note = 60S ribosomal protein L7 (116-124)
  source 1..27: mol_type = other RNA
cagatcttcaacggcacctttgtgaag

SEQ ID NO: 54696 - RNA, 30 nt, synthetic construct
  misc_feature 1..30: note = Ubiquitin-60S ribosomal protein L40 (7-16)
  source 1..30: mol_type = other RNA
cagatcttcgtgaagaccctgacaggcaaa

SEQ ID NO: 54697 - RNA, 33 nt, synthetic construct
  misc_feature 1..33: note = 40S ribosomal protein S16 (79-89)
  source 1..33: mol_type = other RNA
cagatctacgccattagacaaagcatatccaag

SEQ ID NO: 54698 - RNA, 24 nt, synthetic construct
  misc_feature 1..24: note = 60S ribosomal protein L15 (91-98)
  source 1..24: mol_type = other RNA
cagctgaagttcgccagaagcctc

SEQ ID NO: 54699 - RNA, 27 nt, synthetic construct
  misc_feature 1..27: note = Cleft lip and palate transmembrane protein 1 (316-324)
  source 1..27: mol_type = other RNA
cagctgtacgccgctcaaagcaccaag

SEQ ID NO: 54700 - RNA, 27 nt, synthetic construct
  misc_feature 1..27: note = Myosin-9 (648-656)
  source 1..27: mol_type = other RNA
cagctgtacaaggagcaactcgccaaa

SEQ ID NO: 54701 - RNA, 27 nt, synthetic construct
  misc_feature 1..27: note = F-box only protein 5 (293-301)
  source 1..27: mol_type = other RNA
cagctgtacagcaaggccatccaaaga

SEQ ID NO: 54702 - RNA, 24 nt, synthetic construct
  misc_feature 1..24: note = 40S ribosomal protein S11 (18-25)
  source 1..24: mol_type = other RNA
cagaacaagaaaagagtgctgctc

SEQ ID NO: 54703 - RNA, 27 nt, synthetic construct
  misc_feature 1..27: note = TRAF3-interacting JNK-activating modulator (38-46)
  source 1..27: mol_type = other RNA
cagagcacccaaagatccctggccctc

SEQ ID NO: 54704 - RNA, 27 nt, synthetic construct
  misc_feature 1..27: note = U5 small nuclear ribonucleoprotein 200 kDa helicase (438-446)
  source 1..27: mol_type = other RNA
cagacctacgtgggcatcacagagaag

SEQ ID NO: 54705 - RNA, 27 nt, synthetic construct
  misc_feature 1..27: note = 40S ribosomal protein S9 (113-121)
  source 1..27: mol_type = other RNA
caggtgttcaagctgggcctcgccaaa

SEQ ID NO: 54706 - RNA, 27 nt, synthetic construct
  misc_feature 1..27: note = Eukaryotic translation initiation factor 3 subunit E (354-362)
  source 1..27: mol_type = other RNA
caggtgatcgagaagaccaaaagcctg

SEQ ID NO: 54707 - RNA, 27 nt, synthetic construct
  misc_feature 1..27: note = TCF3 fusion partner (94-102)
  source 1..27: mol_type = other RNA
caggtgaacgagagagtcctgaatagg

SEQ ID NO: 54708 - RNA, 27 nt, synthetic construct
  misc_feature 1..27: note = Inorganic pyrophosphatase (9-17)
  source 1..27: mol_type = other RNA
agagccgctcccttcagcctggagtac

SEQ ID NO: 54709 - RNA, 27 nt, synthetic construct
  misc_feature 1..27: note = ATP-dependent RNA helicase DDX19B (56-64)
  source 1..27: mol_type = other RNA
agagccgctcagagcctgctcaacaag

SEQ ID NO: 54710 - RNA, 27 nt, synthetic construct
  misc_feature 1..27: note = LBH domain-containing protein 1 (95-103)
  source 1..27: mol_type = other RNA
agagccaacatcaccctgagcggcaag

SEQ ID NO: 54711 - RNA, 27 nt, synthetic construct
  misc_feature 1..27: note = Midasin (1000-1008)
  source 1..27: mol_type = other RNA
agagccagccaccccatcgtgcagaag

SEQ ID NO: 54712 - RNA, 27 nt, synthetic construct
  misc_feature 1..27: note = Perilipin-2 (230-238)
  source 1..27: mol_type = other RNA
agagcctaccagcaagctctgagcagg

SEQ ID NO: 54713 - RNA, 30 nt, synthetic construct
  misc_feature 1..30: note = Protein VPRBP (31-40)
  source 1..30: mol_type = other RNA
agagaggccgaccagcccctgaggacctac

SEQ ID NO: 54714 - RNA, 27 nt, synthetic construct
  misc_feature 1..27: note = Signal peptidase complex subunit 2 (185-193)
  source 1..27: mol_type = other RNA
agagaggccgaattcaccaagagcatc

SEQ ID NO: 54715 - RNA, 27 nt, synthetic construct
  misc_feature 1..27: note = NADH dehydrogenase (ubiquinone) 1 beta subcomplex subunit 11, mitochondrial (120-128)
  source 1..27: mol_type = other RNA
agagaggccgaaaggctggtgaagtac

SEQ ID NO: 54716 - RNA, 27 nt, synthetic construct
  misc_feature 1..27: note = Ubiquilin-2 (597-605)
  source 1..27: mol_type = other RNA
agagaggccaacctgcaggctctcatc

SEQ ID NO: 54717 - RNA, 27 nt, synthetic construct
  misc_feature 1..27: note = Gamma-taxilin (154-162)
  source 1..27: mol_type = other RNA
agagaggaacacatcgacaaggtgttc

SEQ ID NO: 54718 - RNA, 30 nt, synthetic construct
  misc_feature 1..30: note = Nuclear receptor-binding protein (234-243)
  source 1..30: mol_type = other RNA
agagaggaacagaagaacctgcacttcttt

SEQ ID NO: 54719 - RNA, 30 nt, synthetic construct
  misc_feature 1..30: note = Exostosin-2 (567-576)
  source 1..30: mol_type = other RNA
agagagttccccgacaggctggtgggctac

SEQ ID NO: 54720 - RNA, 30 nt, synthetic construct
  misc_feature 1..30: note = Di-N-acetylchitobiase (169-178)
  source 1..30: mol_type = other RNA
agagagatcgaaggcagccaggtgaccttc

SEQ ID NO: 54721 - RNA, 27 nt, synthetic construct
  misc_feature 1..27: note = Ataxin-2-like protein (324-332)
  source 1..27: mol_type = other RNA
agagagatcgaaagctccccccagtac

SEQ ID NO: 54722 - RNA, 30 nt, synthetic construct
  misc_feature 1..30: note = Sorting nexin-17 (146-155)
  source 1..30: mol_type = other RNA
agagagaaggaagacggcgccttcagcttt

SEQ ID NO: 54723 - RNA, 30 nt, synthetic construct
  misc_feature 1..30: note = Ras-related GTP-binding protein A (97-106)
  source 1..30: mol_type = other RNA
agagagctggaaaaggacatgcactactat

SEQ ID NO: 54724 - RNA, 27 nt, synthetic construct
  misc_feature 1..27: note = Tropomyosin alpha-3 chain (7-15)
  source 1..27: mol_type = other RNA
agagagatggacgaacagatcaggctg

SEQ ID NO: 54725 - RNA, 30 nt, synthetic construct
  misc_feature 1..30: note = Tetratricopeptide repeat protein 39C (46-55)
  source 1..30: mol_type = other RNA
agagagagcgaccagctgttcaagcaatac

SEQ ID NO: 54726 - RNA, 27 nt, synthetic construct
  misc_feature 1..27: note = Aurora kinase A (180-188)
  source 1..27: mol_type = other RNA
agagaggtggaaatccagagccacctg

SEQ ID NO: 54727 - RNA, 33 nt, synthetic construct
  misc_feature 1..33: note = Histone H2B type 2-E (48-58)
  source 1..33: mol_type = other RNA
agaatcgccggcgaggctagcaggctggcacac

SEQ ID NO: 54728 - RNA, 33 nt, synthetic construct
  misc_feature 1..33: note = 40S ribosomal protein S19 (133-143)
  source 1..33: mol_type = other RNA
agaatcgccggccaggtggctgcagccaacaag

SEQ ID NO: 54729 - RNA, 33 nt, synthetic construct
  misc_feature 1..33: note = 60S ribosomal protein L18a (31-41)
  source 1..33: mol_type = other RNA
agaatcttcgcccccaaccacgtggtcgctaag

SEQ ID NO: 54730 - RNA, 27 nt, synthetic construct
  misc_feature 1..27: note = 60S ribosomal protein L10 (32-40)
  source 1..27: mol_type = other RNA
agaatcttcgacctgggcaggaagaaa

SEQ ID NO: 54731 - RNA, 33 nt, synthetic construct
  misc_feature 1..33: note = Nuclear pore complex protein Nup214 (26-36)
  source 1..33: mol_type = other RNA
agaatcttcgacagccccgaggaactgcctaag

SEQ ID NO: 54732 - RNA, 30 nt, synthetic construct
  misc_feature 1..30: note = Ribonucleoside-diphosphate reductase subunit M2 (50-59)
  source 1..30: mol_type = other RNA
agaatcttccaggagcccaccgaacctaag

SEQ ID NO: 54733 - RNA, 27 nt, synthetic construct
  misc_feature 1..27: note = Unconventional myosin-Ie (627-635)
  source 1..27: mol_type = other RNA
agaatcttccagaagtttctgcaaagg

SEQ ID NO: 54734 - RNA, 27 nt, synthetic construct
  misc_feature 1..27: note = Sorbitol dehydrogenase (56-64)
  source 1..27: mol_type = other RNA
agaatcggcaacttcattgtgaagaaa

SEQ ID NO: 54735 - RNA, 30 nt, synthetic construct
  misc_feature 1..30: note = Serine/threonine-protein kinase Nek6 (243-252)
  source 1..30: mol_type = other RNA
agaatccacgagaacggctacaatttcaag

SEQ ID NO: 54736 - RNA, 27 nt, synthetic construct
  misc_feature 1..27: note = U3 small nucleolar ribonucleoprotein protein MPP10 (48-56)
  source 1..27: mol_type = other RNA
agaatccacggcagccccctgcagaag

SEQ ID NO: 54737 - RNA, 27 nt, synthetic construct
  misc_feature 1..27: note = 60S ribosomal protein L31 (32-40)
  source 1..27: mol_type = other RNA
agaatccacggcgtggggttcaagaaa

SEQ ID NO: 54738 - RNA, 27 nt, synthetic construct
  misc_feature 1..27: note = Importin-8 (433-441)
  source 1..27: mol_type = other RNA
agaatcattgacctggtgctccagaag

SEQ ID NO: 54739 - RNA, 27 nt, synthetic construct
  misc_feature 1..27: note = Replication factor C subunit 4 (185-193)
  source 1..27: mol_type = other RNA
agaatcattgagcccctgaccagcagg

SEQ ID NO: 54740 - RNA, 27 nt, synthetic construct
  misc_feature 1..27: note = Putative Polycomb group protein ASXL1 (573-581)
  source 1..27: mol_type = other RNA
agaatcaagcccccttgggtggtcaaa

SEQ ID NO: 54741 - RNA, 27 nt, synthetic construct
  misc_feature 1..27: note = 26S proteasome non-ATPase regulatory subunit 8 (196-204)
  source 1..27: mol_type = other RNA
agaatcctgttctttaacacccccaag

SEQ ID NO: 54742 - RNA, 27 nt, synthetic construct
  misc_feature 1..27: note = 60S ribosomal protein L10a (122-130)
  source 1..27: mol_type = other RNA
agaatcctgggccccgggctcaacaag

SEQ ID NO: 54743 - RNA, 27 nt, synthetic construct
  misc_feature 1..27: note = 40S ribosomal protein S7 (97-105)
  source 1..27: mol_type = other RNA
agaatcctgcccaagcctaccaggaaa

SEQ ID NO: 54744 - RNA, 27 nt, synthetic construct
  misc_feature 1..27: note = 40S ribosomal protein S11 (71-79)
  source 1..27: mol_type = other RNA
agaatcctgagcggcgtggtcaccaag

SEQ ID NO: 54745 - RNA, 30 nt, synthetic construct
  misc_feature 1..30: note = Helicase-like transcription factor (514-523)
  source 1..30: mol_type = other RNA
agaatcagggagcccgccctgctcagcaag

SEQ ID NO: 54746 - RNA, 33 nt, synthetic construct
  misc_feature 1..33: note = Heat shock 70 kDa protein 14 (56-66)
  source 1..33: mol_type = other RNA
agaatcaggaacattagcaataccgtgatgaag

SEQ ID NO: 54747 - RNA, 33 nt, synthetic construct
  misc_feature 1..33: note = Protein PML (31-41)
  source 1..33: mol_type = other RNA
agaatcaggaccggcagcgccctggtgcagcgg

SEQ ID NO: 54748 - RNA, 27 nt, synthetic construct
  misc_feature 1..27: note = DNA-directed RNA polymerases I, II, and III subunit RPABC2 (51-59)
  source 1..27: mol_type = other RNA
agaatcaccacaccctacatgactaag

SEQ ID NO: 54749 - RNA, 27 nt, synthetic construct
  misc_feature 1..27: note = Translational activator GCN1 (122-130)
  source 1..27: mol_type = other RNA
agaatcgtgttccccagcagggccaag

SEQ ID NO: 54750 - RNA, 27 nt, synthetic construct
  misc_feature 1..27: note = Zinc finger protein 195 (247-255)
  source 1..27: mol_type = other RNA
agaatctacgccggcggggagcactat

SEQ ID NO: 54751 - RNA, 33 nt, synthetic construct
  misc_feature 1..33: note = Fragile X mental retardation syndrome-related protein 1 (263-273)
  source 1..33: mol_type = other RNA
agaatctacggcgagagcgccgacgctgtgaag

SEQ ID NO: 54752 - RNA, 27 nt, synthetic construct
  misc_feature 1..27: note = Dual specificity tyrosine-phosphorylation-regulated kinase 1A (317-325)
  source 1..27: mol_type = other RNA
agaatctaccagtatattcaaagcagg

SEQ ID NO: 54753 - RNA, 30 nt, synthetic construct
  misc_feature 1..30: note = Integrator complex subunit 1 (219-228)
  source 1..30: mol_type = other RNA
agactggccgaggctgcagtggccgaaaag

SEQ ID NO: 54754 - RNA, 30 nt, synthetic construct
  misc_feature 1..30: note = RNA pseudouridylate synthase domain-containing protein 4 (45-54)
  source 1..30: mol_type = other RNA
agactggccgagaagctcagggctcagaaa

SEQ ID NO: 54755 - RNA, 27 nt, synthetic construct
  misc_feature 1..27: note = Ubiquitin carboxyl-terminal hydrolase 19 (897-905)
  source 1..27: mol_type = other RNA
agactggccgaggtgatcaagaacagg

SEQ ID NO: 54756 - RNA, 30 nt, synthetic construct
  misc_feature 1..30: note = Phosducin-like protein 3 (78-87)
  source 1..30: mol_type = other RNA
agactggccgagtggaaggctaccaaactc

SEQ ID NO: 54757 - RNA, 33 nt, synthetic construct
  misc_feature 1..33: note = 40S ribosomal protein S21 (71-81)
  source 1..33: mol_type = other RNA
agactggccaaggctgacggcatcgtgagcaaa

SEQ ID NO: 54758 - RNA, 27 nt, synthetic construct
  misc_feature 1..27: note = Golgi phosphoprotein 3 (176-184)
  source 1..27: mol_type = other RNA
agactggccaagaacctcgtggagaaa

SEQ ID NO: 54759 - RNA, 33 nt, synthetic construct
  misc_feature 1..33: note = 60S ribosomal protein L19 (9-19)
  source 1..33: mol_type = other RNA
agactggccagctccgtgctcaggtgcggcaag

SEQ ID NO: 54760 - RNA, 30 nt, synthetic construct
  misc_feature 1..30: note = Guanine nucleotide-binding protein G(I)/G(S)/G(O) subunit gamma-5 (18-27)
  source 1..30: mol_type = other RNA
agactggaggccggcctcaacagggtgaag

SEQ ID NO: 54761 - RNA, 30 nt, synthetic construct
  misc_feature 1..30: note = 40S ribosomal protein S9 (70-79)
  source 1..30: mol_type = other RNA
agactgttcgagggcaacgccctccttagg

SEQ ID NO: 54762 - RNA, 27 nt, synthetic construct
  misc_feature 1..27: note = Cartilage-associated protein (107-115)
  source 1..27: mol_type = other RNA
agactgttcggcgggctccttaggcgg

SEQ ID NO: 54763 - RNA, 24 nt, synthetic construct
  misc_feature 1..24: note = 60S ribosomal protein L13 (190-197)
  source 1..24: mol_type = other RNA
agactgttcggcatcagggccaag

SEQ ID NO: 54764 - RNA, 27 nt, synthetic construct
  misc_feature 1..27: note = Ubiquitin-associated domain-containing protein 2 (164-172)
  source 1..27: mol_type = other RNA
agactgttcccccctctcaggcagcgg

SEQ ID NO: 54765 - RNA, 27 nt, synthetic construct
  misc_feature 1..27: note = Heterogeneous nuclear ribonucleoprotein R (146-154)
  source 1..27: mol_type = other RNA
agactgttcgtgggcagcatccccaag

SEQ ID NO: 54766 - RNA, 33 nt, synthetic construct
  misc_feature 1..33: note = Heterogeneous nuclear ribonucleoprotein Q (244-254)
  source 1..33: mol_type = other RNA
agactgttcgtgggcagcatccccaagtccaaa

SEQ ID NO: 54767 - RNA, 27 nt, synthetic construct
  misc_feature 1..27: note = DNA damage-binding protein 1 (327-335)
  source 1..27: mol_type = other RNA
agactgggcgacagccagctcgtgaag

SEQ ID NO: 54768 - RNA, 27 nt, synthetic construct
  misc_feature 1..27: note = Semaphorin-7A (24-32)
  source 1..27: mol_type = other RNA
agactgggcctcccccttaggctgcgg

SEQ ID NO: 54769 - RNA, 27 nt, synthetic construct
  misc_feature 1..27: note = Cleavage and polyadenylation specificity factor subunit 1 (387-395)
  source 1..27: mol_type = other RNA
agactgggcaacagcctccttctgaag

SEQ ID NO: 54770 - RNA, 27 nt, synthetic construct
  misc_feature 1..27: note = Pentatricopeptide repeat domain-containing protein 3, mitochondrial (15-23)
  source 1..27: mol_type = other RNA
agactgggccagcccctcaccgggagg

SEQ ID NO: 54771 - RNA, 30 nt, synthetic construct
  misc_feature 1..30: note = Egl nine homolog 2 (270-279)
  source 1..30: mol_type = other RNA
agactgggcagctacgtgatcaacgggagg

SEQ ID NO: 54772 - RNA, 33 nt, synthetic construct
  misc_feature 1..33: note = Parkinson disease 7 domain-containing protein 1 (68-78)
  source 1..33: mol_type = other RNA
agactgaaggcctacgctagccccgcaaaactc

SEQ ID NO: 54773 - RNA, 27 nt, synthetic construct
  misc_feature 1..27: note = Protein RRP5 homolog (385-393)
  source 1..27: mol_type = other RNA
agactgaaggacggcgtgctcgcctac

SEQ ID NO: 54774 - RNA, 33 nt, synthetic construct
  misc_feature 1..33: note = Nuclear pore complex protein Nup98-Nup96 (515-525)
  source 1..33: mol_type = other RNA
agactgaagcccaccaaccctgccgctcagaaa

SEQ ID NO: 54775 - RNA, 30 nt, synthetic construct
  misc_feature 1..30: note = HAUS augmin-like complex subunit 1 (226-235)
  source 1..30: mol_type = other RNA
agactgaagcagcaaaccatccccctcaaa

SEQ ID NO: 54776 - RNA, 33 nt, synthetic construct
  misc_feature 1..33: note = FERM, RhoGEF and pleckstrin domain-containing protein 2 (321-331)
  source 1..33: mol_type = other RNA
agactgctcgaccagcccaagcctaaagccaag

SEQ ID NO: 54777 - RNA, 30 nt, synthetic construct
  misc_feature 1..30: note = Glycogen synthase kinase-3 beta (319-328)
  source 1..30: mol_type = other RNA
agactgctcgagtacacccccacagccagg

SEQ ID NO: 54778 - RNA, 33 nt, synthetic construct
  misc_feature 1..33: note = Nucleolar protein 56 (77-87)
  source 1..33: mol_type = other RNA
agactgctccttgagacccacctgcccagcaag

SEQ ID NO: 54779 - RNA, 30 nt, synthetic construct
  misc_feature 1..30: note = Histone H2B type 2-F (100-109)
  source 1..30: mol_type = other RNA
agactgctccttcccggcgagctggccaag

SEQ ID NO: 54780 - RNA, 33 nt, synthetic construct
  misc_feature 1..33: note = Poly (ADP-ribose) polymerase 14 (858-868)
  source 1..33: mol_type = other RNA
agactgctccccggcaacgccaccatcagcaag

SEQ ID NO: 54781 - RNA, 27 nt, synthetic construct
  misc_feature 1..27: note = BTB/POZ domain-containing protein KCTD20 (259-267)
  source 1..27: mol_type = other RNA
agactgaacgcccccctcagccagatg

SEQ ID NO: 54782 - RNA, 30 nt, synthetic construct
  misc_feature 1..30: note = Tubulin gamma-1 chain (156-165)
  source 1..30: mol_type = other RNA
agactgaacgacaggtaccccaagaaactc

SEQ ID NO: 54783 - RNA, 30 nt, synthetic construct
  misc_feature 1..30: note = LYR motif-containing protein 2 (5-14)
  source 1..30: mol_type = other RNA
agactgccccctgccaccctcacacttaag

SEQ ID NO: 54784 - RNA, 27 nt, synthetic construct
  misc_feature 1..27: note = NF-kappa-B inhibitor beta (339-347)
  source 1..27: mol_type = other RNA
agactgccccctaccccagccagcaag

SEQ ID NO: 54785 - RNA, 27 nt, synthetic construct
  misc_feature 1..27: note = Kinesin-like protein KIF18B (390-398)
  source 1..27: mol_type = other RNA
agactgcccagctccaccctcaagagg

SEQ ID NO: 54786 - RNA, 30 nt, synthetic construct
  misc_feature 1..30: note = Histone deacetylase 5 (529-538)
  source 1..30: mol_type = other RNA
agactgcaggagaccggcctccttagcaag

SEQ ID NO: 54787 - RNA, 33 nt, synthetic construct
  misc_feature 1..33: note = Egl nine homolog 2 (218-228)
  source 1..33: mol_type = other RNA
agactgagggacggccagctcgtgagccaacgg

SEQ ID NO: 54788 - RNA, 27 nt, synthetic construct
  misc_feature 1..27: note = HCLS1-associated protein X-1 (118-126)
  source 1..27: mol_type = other RNA
agactgagggagggccagaccctccgg

SEQ ID NO: 54789 - RNA, 27 nt, synthetic construct
  misc_feature 1..27: note = AP-5 complex subunit zeta-1 (429-437)
  source 1..27: mol_type = other RNA
agactgagcttccccaacctctttaag

SEQ ID NO: 54790 - RNA, 27 nt, synthetic construct
  misc_feature 1..27: note = A-kinase anchor protein 11 (941-949)
  source 1..27: mol_type = other RNA
agactgagcaagtccatcattaaacac

SEQ ID NO: 54791 - RNA, 30 nt, synthetic construct
  misc_feature 1..30: note = 40S ribosomal protein S4, X isoform (202-211)
  source 1..30: mol_type = other RNA
agactgagcaacatcttcgtgattggcaag

SEQ ID NO: 54792 - RNA, 30 nt, synthetic construct
  misc_feature 1..30: note = Prelamin-A/C (307-316)
  source 1..30: mol_type = other RNA
agactgagcccctcccctacctctcagagg

SEQ ID NO: 54793 - RNA, 30 nt, synthetic construct
  misc_feature 1..30: note = 60S ribosomal protein L34 (10-19)
  source 1..30: mol_type = other RNA
agactgagctacaacaccgcctccaataag

SEQ ID NO: 54794 - RNA, 30 nt, synthetic construct
  misc_feature 1..30: note = Proliferating cell nuclear antigen (5-14)
  source 1..30: mol_type = other RNA
agactggtgcagggcagcatcctcaagaaa

SEQ ID NO: 54795 - RNA, 30 nt, synthetic construct
  misc_feature 1..30: note = E3 ubiquitin-protein ligase MARCH6 (597-606)
  source 1..30: mol_type = other RNA
agactgtacgagcacatcaagaacgacaaa

SEQ ID NO: 54796 - RNA, 27 nt, synthetic construct
  misc_feature 1..27: note = ATP-binding cassette sub-family D member 1 (172-180)
  source 1..27: mol_type = other RNA
agactgtacttcagccagcaaacctat

SEQ ID NO: 54797 - RNA, 27 nt, synthetic construct
  misc_feature 1..27: note = Kelch-like protein 20 (534-542)
  source 1..27: mol_type = other RNA
agactgtacggcgggatgaactatagg

SEQ ID NO: 54798 - RNA, 30 nt, synthetic construct
  misc_feature 1..30: note = Protein KIAA0100 (809-818)
  source 1..30: mol_type = other RNA
agactgtacggcaacacccccatgaggcgg

SEQ ID NO: 54799 - RNA, 30 nt, synthetic construct
  misc_feature 1..30: note = Terminal uridylyltransferase 4 (269-278)
  source 1..30: mol_type = other RNA
agactgtacggcagctccctcaccaggttc

SEQ ID NO: 54800 - RNA, 33 nt, synthetic construct
  misc_feature 1..33: note = TNF receptor-associated factor 1 (308-318)
  source 1..33: mol_type = other RNA
agactgtacctcaacggcgacgggaccggaaag

SEQ ID NO: 54801 - RNA, 27 nt, synthetic construct
  misc_feature 1..27: note = DnaJ homolog subfamily B member 12 (36-44)
  source 1..27: mol_type = other RNA
agactgtaccccacccctagggtgcgg

SEQ ID NO: 54802 - RNA, 30 nt, synthetic construct
  misc_feature 1..30: note = E3 ubiquitin-protein ligase UBR5 (2771-2780)
  source 1..30: mol_type = other RNA
agactgtacgtgcccctctatagctccaag

SEQ ID NO: 54803 - RNA, 30 nt, synthetic construct
  misc_feature 1..30: note = 60S ribosomal protein L4 (100-109)
  source 1..30: mol_type = other RNA
agaatgttcgcccccaccaagacatggagg

SEQ ID NO: 54804 - RNA, 33 nt, synthetic construct
  misc_feature 1..33: note = DNA methyltransferase 1-associated protein 1 (326-336)
  source 1..33: mol_type = other RNA
agaatgaagctgcccagctccgtgggccagaaa

SEQ ID NO: 54805 - RNA, 27 nt, synthetic construct
  misc_feature 1..27: note Dolichyl-diphosphooligosaccharide-proteinosyltransferase subunit 2 (619-627)
  source 1..27: mol_type = other RNA
agaatgctggcccagcaagctgtgaag

SEQ ID NO: 54806 - RNA, 24 nt, synthetic construct
  misc_feature 1..24: note = Proteasome subunit beta type-5 (80-87)
  source 1..24: mol_type = other RNA
agaaacaaggagaggatcagcgtg

SEQ ID NO: 54807 - RNA, 27 nt, synthetic construct
  misc_feature 1..27: note = Chromosome transmission fidelity protein 8 homolog (109-117)
  source 1..27: mol_type = other RNA
agacccaagcctatcattaccagcgtg

SEQ ID NO: 54808 - RNA, 24 nt, synthetic construct
  misc_feature 1..24: note = Zinc finger MIZ domain-containing protein 1 (589-596)
  source 1..24: mol_type = other RNA
agacccagcgtgaggtccgtcctg

SEQ ID NO: 54809 - RNA, 27 nt, synthetic construct
  misc_feature 1..27: note = Apoptosis inhibitor 5 (189-197)
  source 1..27: mol_type = other RNA
agacaggccgtgcccctgttcagcaag

SEQ ID NO: 54810 - RNA, 27 nt, synthetic construct
  misc_feature 1..27: note = 39S ribosomal protein L55, mitochondrial (47-55)
  source 1..27: mol_type = other RNA
agacagttctggaccaggacaaagaaa

SEQ ID NO: 54811 - RNA, 27 nt, synthetic construct
  misc_feature 1..27: note = Phosphate carrier protein, mitochondrial (224-232)
  source 1..27: mol_type = other RNA
agacagatcccctacaccatgatgaag

SEQ ID NO: 54812 - RNA, 27 nt, synthetic construct
  misc_feature 1..27: note = 60S ribosomal protein L7a (89-97)
  source 1..27: mol_type = other RNA
agacagaccgccacacaactgctcaag

SEQ ID NO: 54813 - RNA, 27 nt, synthetic construct
  misc_feature 1..27: note = Formin-binding protein 1 (239-247)
  source 1..27: mol_type = other RNA
agacaggtgatccccattataggcaag

SEQ ID NO: 54814 - RNA, 27 nt, synthetic construct
  misc_feature 1..27: note = F-box only protein 33 (21-29)
  source 1..27: mol_type = other RNA
agacagtacgacaagttcctgacccac

SEQ ID NO: 54815 - RNA, 27 nt, synthetic construct
  misc_feature 1..27: note = Protein-lysine N-methyltransferase EEF2KMT (18-26)
  source 1..27: mol_type = other RNA
agaaggttcctggccgctcggaccctc

SEQ ID NO: 54816 - RNA, 27 nt, synthetic construct
  misc_feature 1..27: note = Growth factor receptor-bound protein 2 (137-145)
  source 1..27: mol_type = other RNA
agaaggggcgacttcatccacgtgatg

SEQ ID NO: 54817 - RNA, 27 nt, synthetic construct
  misc_feature 1..27: note = 60S ribosomal protein L23 (89-97)
  source 1..27: mol_type = other RNA
agaaggaaggacggcgtgttcctgtac

SEQ ID NO: 54818 - RNA, 27 nt, synthetic construct
  misc_feature 1..27: note = Neuroepithelial cell-transforming gene 1 protein (32-40)
  source 1..27: mol_type = other RNA
agaaggcaggaggccatctacgaaatg

SEQ ID NO: 54819 - RNA, 27 nt, synthetic construct
  misc_feature 1..27: note = Isoleucine-tRNA ligase, cytoplasmic (402-410)
  source 1..27: mol_type = other RNA
agaagcgacacccccctgatctacaag

SEQ ID NO: 54820 - RNA, 27 nt, synthetic construct
  misc_feature 1..27: note = Uncharacterized protein KIAA1551 (365-373)
  source 1..27: mol_type = other RNA
agaagcctgggctcctctcccgtgaag

SEQ ID NO: 54821 - RNA, 30 nt, synthetic construct
  misc_feature 1..30: note = 60S ribosomal protein L30 (106-115)
  source 1..30: mol_type = other RNA
agaagcatgcccgagcagaccggcgaaaag

SEQ ID NO: 54822 - RNA, 27 nt, synthetic construct
  misc_feature 1..27: note = Structural maintenance of chromosomes protein 3 (132-140)
  source 1..27: mol_type = other RNA
agaagcaacccctactatatcgtgaag

SEQ ID NO: 54823 - RNA, 30 nt, synthetic construct
  misc_feature 1..30: note = Protein BRICK1 (44-53)
  source 1..30: mol_type = other RNA
agaagcaggctggccaccctcaacgagaag

SEQ ID NO: 54824 - RNA, 27 nt, synthetic construct
  misc_feature 1..27: note = Protein PRRC2C (2148-2156)
  source 1..27: mol_type = other RNA
agaagcaccgaccccgtgacaactaag

SEQ ID NO: 54825 - RNA, 33 nt, synthetic construct
  misc_feature 1..33: note = Cytoskeleton-associated protein 2-like (319-329)
  source 1..33: mol_type = other RNA
agaagctaccccgtgaccgagcagagggtcaag

SEQ ID NO: 54826 - RNA, 27 nt, synthetic construct
  misc_feature 1..27: note = Heterogeneous nuclear ribonucleoprotein F (192-200)
  source 1..27: mol_type = other RNA
agaagctactccgacccccctctgaag

SEQ ID NO: 54827 - RNA, 27 nt, synthetic construct
  misc_feature 1..27: note = Vimentin (28-36)
  source 1..27: mol_type = other RNA
agaagctacgtgaccacatccactagg

SEQ ID NO: 54828 - RNA, 27 nt, synthetic construct
  misc_feature 1..27: note = Sorting and assembly machinery component 50 homolog (240-248)
  source 1..27: mol_type = other RNA
agaaccgccagcttcgctgtgaggaag

SEQ ID NO: 54829 - RNA, 30 nt, synthetic construct
  misc_feature 1..30: note = T-complex protein 1 subunit eta (114-123)
  source 1..30: mol_type = other RNA
agaaccgccacacagctggctgtgaacaag

SEQ ID NO: 54830 - RNA, 30 nt, synthetic construct
  misc_feature 1..30: note = UAP56-interacting factor (226-235)
  source 1..30: mol_type = other RNA
agaaccgccgtgcccagcttcctgacaaag

SEQ ID NO: 54831 - RNA, 27 nt, synthetic construct
  misc_feature 1..27: note = Plectin (471-479)
  source 1..27: mol_type = other RNA
agaaccgagtacaacctgaggctcaag

SEQ ID NO: 54832 - RNA, 27 nt, synthetic construct
  misc_feature 1..27: note = Cyclin-dependent kinase 12 (1374-1382)
  source 1..27: mol_type = other RNA
agaaccttcagcggctccctgtctcac

SEQ ID NO: 54833 - RNA, 30 nt, synthetic construct
  misc_feature 1..30: note = Cold shock domain-containing protein E1 (78-87)
  source 1..30: mol_type = other RNA
agaaccggcaagcccatcgccgtgaaactg

SEQ ID NO: 54834 - RNA, 27 nt, synthetic construct
  misc_feature 1..27: note = Eukaryotic translation initiation factor 4H (221-229)
  source 1..27: mol_type = other RNA
agaaccggcccccctatggggagcagg

SEQ ID NO: 54835 - RNA, 30 nt, synthetic construct
  misc_feature 1..30: note = Eukaryotic translation initiation factor 4H (155-164)
  source 1..30: mol_type = other RNA
agaaccggcccccctatggggagcaggttc

SEQ ID NO: 54836 - RNA, 27 nt, synthetic construct
  misc_feature 1..27: note = Cell division cycle 5-like protein (83-91)
  source 1..27: mol_type = other RNA
agaaccatcgcccccattataggcagg

SEQ ID NO: 54837 - RNA, 27 nt, synthetic construct
  misc_feature 1..27: note = Biogenesis of lysosome-related organelles complex 1 subunit 1 (106-114)
  source 1..27: mol_type = other RNA
agaaccatcgccacagctctggagtac

SEQ ID NO: 54838 - RNA, 27 nt, synthetic construct
  misc_feature 1..27: note = Beta-catenin-like protein 1 (270-278)
  source 1..27: mol_type = other RNA
agaaccatcttccccctgtttatgaag

SEQ ID NO: 54839 - RNA, 30 nt, synthetic construct
  misc_feature 1..30: note = 60S ribosomal protein L37a (4-13)
  source 1..30: mol_type = other RNA
agaaccaagaaagtgggcatcgtcgggaag

SEQ ID NO: 54840 - RNA, 30 nt, synthetic construct
  misc_feature 1..30: note = 39S ribosomal protein L2, mitochondrial (69-78)
  source 1..30: mol_type = other RNA
agaaccaagtacacaatcactcccgtgaaa

SEQ ID NO: 54841 - RNA, 30 nt, synthetic construct
  misc_feature 1..30: note = Peroxisomal multifunctional enzyme type 2 (251-260)
  source 1..30: mol_type = other RNA
agaaccctgggcgccatcgtgaggcagaag

SEQ ID NO: 54842 - RNA, 27 nt, synthetic construct
  misc_feature 1..27: note = Cytosolic carboxypeptidase 1 (1067-1075)
  source 1..27: mol_type = other RNA
agaaccctgcccaagatcctcagccac

SEQ ID NO: 54843 - RNA, 30 nt, synthetic construct
  misc_feature 1..30: note = Ubiquitin-40S ribosomal protein S27a (74-83)
  source 1..30: mol_type = other RNA
agaaccctgagcgactacaacatccagaag

SEQ ID NO: 54844 - RNA, 27 nt, synthetic construct
  misc_feature 1..27: note = RAD50-interacting protein 1 (155-163)
  source 1..27: mol_type = other RNA
agaaccaactggcccaatacaggcaag

SEQ ID NO: 54845 - RNA, 33 nt, synthetic construct
  misc_feature 1..33: note = Dynamin-binding protein (144-154)
  source 1..33: mol_type = other RNA
agaaccagggactacgccagcctgccccctaag

SEQ ID NO: 54846 - RNA, 27 nt, synthetic construct
  misc_feature 1..27: note = ATP-dependent RNA helicase DDX24 (666-674)
  source 1..27: mol_type = other RNA
agaaccagcgagatctacgtgcacagg

SEQ ID NO: 54847 - RNA, 27 nt, synthetic construct
  misc_feature 1..27: note = Sterol regulatory element-binding protein 2 (332-340)
  source 1..27: mol_type = other RNA
agaaccacacacaacatcattgagaag

SEQ ID NO: 54848 - RNA, 30 nt, synthetic construct
  misc_feature 1..30: note = Cleavage and polyadenylation specificity factor subunit 2 (358-367)
  source 1..30: mol_type = other RNA
agaaccacacccggcactctggccaggttc

SEQ ID NO: 54849 - RNA, 30 nt, synthetic construct
  misc_feature 1..30: note = Diphosphoinositol polyphosphate phosphohydrolase 1 (10-19)
  source 1..30: mol_type = other RNA
agaacctacgacggcgatgggtataagaaa

SEQ ID NO: 54850 - RNA, 30 nt, synthetic construct
  misc_feature 1..30: note = Diphosphoinositol polyphosphate phosphohydrolase 2 (7-16)
  source 1..30: mol_type = other RNA
agaacctacgacagggagggcttcaagaaa

SEQ ID NO: 54851 - RNA, 30 nt, synthetic construct
  misc_feature 1..30: note = Coatomer subunit beta' (759-768)
  source 1..30: mol_type = other RNA
agaacctacctgcccagccaggtgtccagg

SEQ ID NO: 54852 - RNA, 27 nt, synthetic construct
  misc_feature 1..27: note = Exocyst complex component 4 (74-82)
  source 1..27: mol_type = other RNA
agaacctaccagagcatcacagagagg

SEQ ID NO: 54853 - RNA, 30 nt, synthetic construct
  misc_feature 1..30: note = Lon protease homolog 2, peroxisomal (371-380)
  source 1..30: mol_type = other RNA
agaacctacgtgggcagcatgcccgggagg

SEQ ID NO: 54854 - RNA, 27 nt, synthetic construct
  misc_feature 1..27: note = Plakophilin-4 (418-426)
  source 1..27: mol_type = other RNA
agaacctactatagccccgtgtacagg

SEQ ID NO: 54855 - RNA, 33 nt, synthetic construct
  misc_feature 1..33: note = tRNA pseudouridine synthase-like 1 (270-280)
  source 1..33: mol_type = other RNA
agagtggcccccgctcacggcctgttcctcaag

SEQ ID NO: 54856 - RNA, 30 nt, synthetic construct
  misc_feature 1..30: note = Protein ERGIC-53 (12-21)
  source 1..30: mol_type = other RNA
agagtggcccccagcctgaagtcccagagg

SEQ ID NO: 54857 - RNA, 33 nt, synthetic construct
  misc_feature 1..33: note = Chromobox protein homolog 6 (9-19)
  source 1..33: mol_type = other RNA
agagtgttcgccgctgagagcatcattaagagg

SEQ ID NO: 54858 - RNA, 27 nt, synthetic construct
  misc_feature 1..27: note = F-box only protein 3 (143-151)
  source 1..27: mol_type = other RNA
agagtgttcgacgtccccatcaggcgg

SEQ ID NO: 54859 - RNA, 33 nt, synthetic construct
  misc_feature 1..33: note = ATP synthase mitochondrial F1 complex assembly factor 1 (45-55)
  source 1..33: mol_type = other RNA
agagtgttccccgtcaggcctggcagcgggcgg

SEQ ID NO: 54860 - RNA, 30 nt, synthetic construct
  misc_feature 1..30: note = tRNA (guanine(26)-N(2))-dimethyltransferase (327-336)
  source 1..30: mol_type = other RNA
agagtgttcaccggccaggccaaggtcaaa

SEQ ID NO: 54861 - RNA, 27 nt, synthetic construct
  misc_feature 1..27: note = Poly (ADP-ribose) polymerase 3 (110-118)
  source 1..27: mol_type = other RNA
agagtgggcgaggtcgggcagagcaag

SEQ ID NO: 54862 - RNA, 30 nt, synthetic construct
  misc_feature 1..30: note = Poly (ADP-ribose) polymerase 1 (591-600)
  source 1..30: mol_type = other RNA
agagtgggcaccgtcatcgggagcaacaag

SEQ ID NO: 54863 - RNA, 33 nt, synthetic construct
  misc_feature 1..33: note = Bifunctional methylenetetrahydrofolate dehydrogenase/cyclohydrolase, mitochondrial (278-288)
  source 1..33: mol_type = other RNA
agagtgcacgaccccgtcaccgccaagcctaaa

SEQ ID NO: 54864 - RNA, 30 nt, synthetic construct
  misc_feature 1..30: note = Choline/ethanolaminephosphotransferase 1 (267-276)
  source 1..30: mol_type = other RNA
agagtgatcttcaccggcggggtcggaaag

SEQ ID NO: 54865 - RNA, 33 nt, synthetic construct
  misc_feature 1..33: note = Drebrin-like protein (68-78)
  source 1..33: mol_type = other RNA
agagtgaaggaccccaacagcggcctgcctaaa

SEQ ID NO: 54866 - RNA, 27 nt, synthetic construct
  misc_feature 1..27: note = YEATS domain-containing protein 4 (11-19)
  source 1..27: mol_type = other RNA
agagtgaagggcgtcaccatcgttaaa

SEQ ID NO: 54867 - RNA, 30 nt, synthetic construct
  misc_feature 1..30: note = 60S ribosomal protein L8 (147-156)
  source 1..30: mol_type = other RNA
agagtgaagctgcccagcggctccaaaaag

SEQ ID NO: 54868 - RNA, 30 nt, synthetic construct
  misc_feature 1..30: note = Sorting nexin-3 (52-61)
  source 1..30: mol_type = other RNA
agagtgaagaccaacctgcccatcttcaaa

SEQ ID NO: 54869 - RNA, 30 nt, synthetic construct
  misc_feature 1..30: note = Copper transport protein ATOX1 (20-29)
  source 1..30: mol_type = other RNA
agagtgctgaacaagctcggcggggtcaaa

SEQ ID NO: 54870 - RNA, 27 nt, synthetic construct
  misc_feature 1..27: note = U3 small nucleolar RNA-associated protein 14 homolog A (631-639)
  source 1..27: mol_type = other RNA
agagtgctgccctaccctttcacccac

SEQ ID NO: 54871 - RNA, 27 nt, synthetic construct
  misc_feature 1..27: note = 60S ribosomal export protein NMD3 (397-405)
  source 1..27: mol_type = other RNA
agagtgcccgacgtcgttctgatcaag

SEQ ID NO: 54872 - RNA, 33 nt, synthetic construct
  misc_feature 1..33: note = Protein FAM136A (8-18)
  source 1..33: mol_type = other RNA
agagtgcaggaggccgtcgaaagcatggttaag

SEQ ID NO: 54873 - RNA, 30 nt, synthetic construct
  misc_feature 1..30: note = Acetolactate synthase-like protein (181-190)
  source 1..30: mol_type = other RNA
agagtgagggacatcgtccccaccctgcgg

SEQ ID NO: 54874 - RNA, 27 nt, synthetic construct
  misc_feature 1..27: note = Inosine-5'-monophosphate dehydrogenase 2 (126-134)
  source 1..27: mol_type = other RNA
agagtgagggacgtcttcgaggccaag

SEQ ID NO: 54875 - RNA, 30 nt, synthetic construct
  misc_feature 1..30: note = Transmembrane protein 107 (3-12)
  source 1..30: mol_type = other RNA
agagtgagcggcctggtcccctccaggttc

SEQ ID NO: 54876 - RNA, 27 nt, synthetic construct
  misc_feature 1..27: note = Mitochondrial import receptor subunit TOM5 homolog (39-47)
  source 1..27: mol_type = other RNA
agagtgacccccttcatcctgaagaaa

SEQ ID NO: 54877 - RNA, 27 nt, synthetic construct
  misc_feature 1..27: note Dolichyl-diphosphooligosaccharide-proteinosyltransferase subunit 2 (256-264)
  source 1..27: mol_type = other RNA
agagtgacctaccccgccaaggctaaa

SEQ ID NO: 54878 - RNA, 33 nt, synthetic construct
  misc_feature 1..33: note = Fanconi anemia group D2 protein (185-195)
  source 1..33: mol_type = other RNA
agagtggtcgacggcaaggatctgaccacaaaa

SEQ ID NO: 54879 - RNA, 33 nt, synthetic construct
  misc_feature 1..33: note = Ribosome biogenesis protein WDR12 (281-291)
  source 1..33: mol_type = other RNA
agagtgtgggacgtcgagagcggctccctgaag

SEQ ID NO: 54880 - RNA, 27 nt, synthetic construct
  misc_feature 1..27: note = Splicing factor 3B subunit 3 (968-976)
  source 1..27: mol_type = other RNA
agagtgtacgacctgggcaagaaaaag

SEQ ID NO: 54881 - RNA, 33 nt, synthetic construct
  misc_feature 1..33: note = WD repeat-containing protein 74 (208-218)
  source 1..33: mol_type = other RNA
agagtgtacgaccccgccagccctcagaggcgg

SEQ ID NO: 54882 - RNA, 30 nt, synthetic construct
  misc_feature 1..30: note = Arf-GAP with coiled-coil, ANK repeat and PH domain-containing protein 2 (477-486)
  source 1..30: mol_type = other RNA
agagtgtacgaggccaacgtcgaaaagatg

SEQ ID NO: 54883 - RNA, 33 nt, synthetic construct
  misc_feature 1..33: note = Centrosomal protein of 104 kDa (621-631)
  source 1..33: mol_type = other RNA
agagtgtacgaggtcagggaaaccgccgttcgg

SEQ ID NO: 54884 - RNA, 27 nt, synthetic construct
  misc_feature 1..27: note = Programmed cell death 6-interacting protein (606-614)
  source 1..27: mol_type = other RNA
agagtgtacggcgggctgaccacaaag

SEQ ID NO: 54885 - RNA, 27 nt, synthetic construct
  misc_feature 1..27: note = Probable E3 ubiquitin-protein ligase TRIM8 (538-546)
  source 1..27: mol_type = other RNA
agagtgtacggccagcccagcaccaag

SEQ ID NO: 54886 - RNA, 33 nt, synthetic construct
  misc_feature 1..33: note = Probable E3 ubiquitin-protein ligase TRIM8 (538-548)
  source 1..33: mol_type = other RNA
agagtgtacggccagcccagcaccaagcactat

SEQ ID NO: 54887 - RNA, 33 nt, synthetic construct
  misc_feature 1..33: note = UPF0769 protein C21orf59 (33-43)
  source 1..33: mol_type = other RNA
agagtgtacaacggcaggctgaaggtccagcgg

SEQ ID NO: 54888 - RNA, 33 nt, synthetic construct
  misc_feature 1..33: note = Serine/threonine-protein kinase pim-2 (201-211)
  source 1..33: mol_type = other RNA
agagtgtacagcccccctgagtggatctccagg

SEQ ID NO: 54889 - RNA, 30 nt, synthetic construct
  misc_feature 1..30: note = E3 ubiquitin-protein ligase Itchy homolog (177-186)
  source 1..30: mol_type = other RNA
agagtgtactatgtcgaccacgttgagaag

SEQ ID NO: 54890 - RNA, 27 nt, synthetic construct
  misc_feature 1..27: note = Superkiller viralicidic activity 2-like 2 (738-746)
  source 1..27: mol_type = other RNA
agcgccatctcctctgtgagactgtac

SEQ ID NO: 54891 - RNA, 27 nt, synthetic construct
  misc_feature 1..27: note = Ubiquilin-1 (452-460)
  source 1..27: mol_type = other RNA
agcgccatgtccaaccccagagctatg

SEQ ID NO: 54892 - RNA, 30 nt, synthetic construct
  misc_feature 1..30: note = 40S ribosomal protein S21 (18-27)
  source 1..30: mol_type = other RNA
agcgcctccaacagaatcattggcgctaag

SEQ ID NO: 54893 - RNA, 27 nt, synthetic construct
  misc_feature 1..27: note = Condensin-2 complex subunit G2 (606-614)
  source 1..27: mol_type = other RNA
agcgaggccgctgcacccagagccttc

SEQ ID NO: 54894 - RNA, 27 nt, synthetic construct
  misc_feature 1..27: note = Ferritin heavy chain (79-87)
  source 1..27: mol_type = other RNA
agcgaggccgctatcaacagacagatt

SEQ ID NO: 54895 - RNA, 27 nt, synthetic construct
  misc_feature 1..27: note = Microtubule-actin cross-linking factor 1, isoforms 1/2/3/5 (3831-3839)
  source 1..27: mol_type = other RNA
agcgaggccgaacagaccctgagattc

SEQ ID NO: 54896 - RNA, 27 nt, synthetic construct
  misc_feature 1..27: note = Single-stranded DNA-binding protein 2 (86-94)
  source 1..27: mol_type = other RNA
agcgaggccaaggctttccacgactac

SEQ ID NO: 54897 - RNA, 30 nt, synthetic construct
  misc_feature 1..30: note = PERQ amino acid-rich with GYF domain-containing protein 2 (1182-1191)
  source 1..30: mol_type = other RNA
agcgaggccaaggaattcgctaaacagttt

SEQ ID NO: 54898 - RNA, 33 nt, synthetic construct; identical to SEQ ID NO: 30671
  misc_feature 1..33: note = Transcriptional adapter 1 (16-26)
  source 1..33: mol_type = other RNA

SEQ ID NO: 54899 - RNA, 27 nt, synthetic construct
  misc_feature 1..27: note = Cytoplasmic dynein 1 heavy chain 1 (1405-1413)
  source 1..27: mol_type = other RNA
agcgaggccctgaaggacagacactgg

SEQ ID NO: 54900 - RNA, 27 nt, synthetic construct
  misc_feature 1..27: note = Zinc finger protein 296 (189-197)
  source 1..27: mol_type = other RNA
agcgaggcccccgaagctcctctgctc

SEQ ID NO: 54901 - RNA, 30 nt, synthetic construct; identical to SEQ ID NO: 30674
  misc_feature 1..30: note = ATP-dependent RNA helicase DDX50 (2-11)
  source 1..30: mol_type = other RNA

SEQ ID NO: 54902 - RNA, 27 nt, synthetic construct
  misc_feature 1..27: note = UV-stimulated scaffold protein A (35-43)
  source 1..27: mol_type = other RNA
agcgaggaacagctgtccagagcctac

SEQ ID NO: 54903 - RNA, 27 nt, synthetic construct
  misc_feature 1..27: note = X-ray repair cross-complementing protein 5 (650-658)
  source 1..27: mol_type = other RNA
agcgaggaacagagattcaacaatttt

SEQ ID NO: 54904 - RNA, 27 nt, synthetic construct
  misc_feature 1..27: note = WD repeat-containing protein 63 (190-198)
  source 1..27: mol_type = other RNA
agcgagttcggcgcccccatcaagttt

SEQ ID NO: 54905 - RNA, 30 nt, synthetic construct
  misc_feature 1..30: note = Pre-mRNA-processing-splicing factor 8 (1377-1386)
  source 1..30: mol_type = other RNA
agcgagttcatcgactcccagagagtgtgg

SEQ ID NO: 54906 - RNA, 27 nt, synthetic construct
  misc_feature 1..27: note = Programmed cell death protein 6 (83-91)
  source 1..27: mol_type = other RNA
agcgagttcaccggcgtgtggaagtac

SEQ ID NO: 54907 - RNA, 33 nt, synthetic construct
  misc_feature 1..33: note = Proteasome subunit beta type-5 (72-82)
  source 1..33: mol_type = other RNA
agcgagggcaacagaatctccggggccaccttc

SEQ ID NO: 54908 - RNA, 33 nt, synthetic construct
  misc_feature 1..33: note = WD repeat-containing protein 62 (1273-1283)
  source 1..33: mol_type = other RNA
agcgagggccaggaacccgccctgagatcctgg

SEQ ID NO: 54909 - RNA, 30 nt, synthetic construct
  misc_feature 1..30: note = E3 ubiquitin-protein ligase MARCH6 (14-23)
  source 1..30: mol_type = other RNA
agcgagggcacccccgaaaagcctctgtac

SEQ ID NO: 54910 - RNA, 30 nt, synthetic construct
  misc_feature 1..30: note = Serine hydroxymethyltransferase, mitochondrial (67-76)
  source 1..30: mol_type = other RNA
agcgagggctaccccgggaagagatattac

SEQ ID NO: 54911 - RNA, 27 nt, synthetic construct
  misc_feature 1..27: note = Serine hydroxymethyltransferase, cytosolic (74-82)
  source 1..27: mol_type = other RNA
agcgagggctaccccgggcagagatat

SEQ ID NO: 54912 - RNA, 27 nt, synthetic construct
  misc_feature 1..27: note = Pre-mRNA-splicing factor CWC22 homolog (326-334)
  source 1..27: mol_type = other RNA
agcgagatcgacaagagagtgcagtac

SEQ ID NO: 54913 - RNA, 27 nt, synthetic construct
  misc_feature 1..27: note = Talin-1 (290-298)
  source 1..27: mol_type = other RNA
agcgagatcgaagccaaggtgagatac

SEQ ID NO: 54914 - RNA, 27 nt, synthetic construct
  misc_feature 1..27: note = Beta-parvin (141-149)
  source 1..27: mol_type = other RNA
agcgagatcggccagaagcaaaaactg

SEQ ID NO: 54915 - RNA, 33 nt, synthetic construct
  misc_feature 1..33: note = Ribosome-binding protein 1 (242-252)
  source 1..33: mol_type = other RNA
agcgagaaggccggcatcattcaggacacctgg

SEQ ID NO: 54916 - RNA, 27 nt, synthetic construct
  misc_feature 1..27: note = Nuclear pore complex protein Nup155 (295-303)
  source 1..27: mol_type = other RNA
agcgagaagggcgtgatccaggtctac

SEQ ID NO: 54917 - RNA, 27 nt, synthetic construct
  misc_feature 1..27: note = Plectin (3212-3220)
  source 1..27: mol_type = other RNA
agcgagctgcaggccagagaaaccttc

SEQ ID NO: 54918 - RNA, 27 nt, synthetic construct
  misc_feature 1..27: note = Inositol 1,4,5-trisphosphate receptor type 1 (2099-2107)
  source 1..27: mol_type = other RNA
agcgagaacgccgaaagaatcctgtac

SEQ ID NO: 54919 - RNA, 27 nt, synthetic construct
  misc_feature 1..27: note = AP-2 complex subunit mu (347-355)
  source 1..27: mol_type = other RNA
agcgagaacgccatcgtgtggaagatt

SEQ ID NO: 54920 - RNA, 27 nt, synthetic construct
  misc_feature 1..27: note = DnaJ homolog subfamily A member 2 (20-28)
  source 1..27: mol_type = other RNA
agcgagaacgaactgaagaaagcctac

SEQ ID NO: 54921 - RNA, 33 nt, synthetic construct
  misc_feature 1..33: note = DNA-dependent protein kinase catalytic subunit (2174-2184)
  source 1..33: mol_type = other RNA
agcgagaacaatggcggggaaggaatccactac

SEQ ID NO: 54922 - RNA, 30 nt, synthetic construct
  misc_feature 1..30: note = Mediator of RNA polymerase II transcription subunit 12 (891-900)
  source 1..30: mol_type = other RNA
agcgagaaccccgccaatagatactccttc

SEQ ID NO: 54923 - RNA, 27 nt, synthetic construct
  misc_feature 1..27: note = F-box/LRR-repeat protein 3 (261-269)
  source 1..27: mol_type = other RNA
agcgagaaccccggccagacccacttc

SEQ ID NO: 54924 - RNA, 33 nt, synthetic construct
  misc_feature 1..33: note = Protein sel-1 homolog 1 (20-30)
  source 1..33: mol_type = other RNA
agcgagcagcaacactccgcccaggctatgttc

SEQ ID NO: 54925 - RNA, 27 nt, synthetic construct
  misc_feature 1..27: note = HLA class II histocompatibility antigen, DRB1-11 beta chain (221-229)
  source 1..27: mol_type = other RNA
agcgagtccgcccagtctaagatgctg

SEQ ID NO: 54926 - RNA, 33 nt, synthetic construct
  misc_feature 1..33: note = Eukaryotic initiation factor 4A-I (40-50)
  source 1..33: mol_type = other RNA
agcgagtccctgctcagaggcatctacgcctat

SEQ ID NO: 54927 - RNA, 27 nt, synthetic construct
  misc_feature 1..27: note = Retinoic acid receptor alpha (17-25)
  source 1..27: mol_type = other RNA
agcgagtccagaatggtggtcaccttc

SEQ ID NO: 54928 - RNA, 27 nt, synthetic construct
  misc_feature 1..27: note = Vacuolar protein sorting-associated protein 51 homolog (16-24)
  source 1..27: mol_type = other RNA
agcgagaccgacatggtgagacagatc

SEQ ID NO: 54929 - RNA, 27 nt, synthetic construct
  misc_feature 1..27: note = 26S proteasome non-ATPase regulatory subunit 2 (546-554)
  source 1..27: mol_type = other RNA
agcgagaccgaactgaaggacacatac

SEQ ID NO: 54930 - RNA, 27 nt, synthetic construct
  misc_feature 1..27: note = Misshapen-like kinase 1 (969-977)
  source 1..27: mol_type = other RNA
agcgagacccccgaaatcagaaagtac

SEQ ID NO: 54931 - RNA, 27 nt, synthetic construct
  misc_feature 1..27: note = Serine/threonine-protein kinase Nek6 (224-232)
  source 1..27: mol_type = other RNA
agcgagaccacagccgctcactccctg

SEQ ID NO: 54932 - RNA, 27 nt, synthetic construct
  misc_feature 1..27: note = U5 small nuclear ribonucleoprotein 200 kDa helicase (1230-1238)
  source 1..27: mol_type = other RNA
agcgaggtgatcctgcaccatgaatac

SEQ ID NO: 54933 - RNA, 27 nt, synthetic construct
  misc_feature 1..27: note = Arginine-glutamic acid dipeptide repeats protein (1257-1265)
  source 1..27: mol_type = other RNA
agcgagtacgccagaccccacgtgatg

SEQ ID NO: 54934 - RNA, 30 nt, synthetic construct
  misc_feature 1..30: note = Proteasome subunit alpha type-5 (6-15)
  source 1..30: mol_type = other RNA
agcgagtacgacagaggcgtgaacaccttc

SEQ ID NO: 54935 - RNA, 30 nt, synthetic construct
  misc_feature 1..30: note = Nucleolar protein 56 (275-284)
  source 1..30: mol_type = other RNA
agcgagtacagacagtccctgcacacctat

SEQ ID NO: 54936 - RNA, 24 nt, synthetic construct
  misc_feature 1..24: note = Pleiotropic regulator 1 (226-233)
  source 1..24: mol_type = other RNA
agcggcaagctgaaactctccctt

SEQ ID NO: 54937 - RNA, 27 nt, synthetic construct
  misc_feature 1..27: note = Manganese-transporting ATPase 13A1 (75-83)
  source 1..27: mol_type = other RNA
agcatcgccgctcccttcacctccaag

SEQ ID NO: 54938 - RNA, 27 nt, synthetic construct
  misc_feature 1..27: note = Myotubularin-related protein 10 (210-218)
  source 1..27: mol_type = other RNA
agcatcctgggcacccccctctccaag

SEQ ID NO: 54939 - RNA, 30 nt, synthetic construct
  misc_feature 1..30: note = U2 small nuclear ribonucleoprotein A' (119-128)
  source 1..30: mol_type = other RNA
agcatcctgagaaaccccgtgaccaataag

SEQ ID NO: 54940 - RNA, 30 nt, synthetic construct
  misc_feature 1..30: note = Cytospin-A (887-896)
  source 1..30: mol_type = other RNA
agcatctccggccccatttctacctcaaag

SEQ ID NO: 54941 - RNA, 33 nt, synthetic construct
  misc_feature 1..33: note = Double-stranded RNA-specific adenosine deaminase (1110-1120)
  source 1..33: mol_type = other RNA
agcatctacgactccaagagacagtctggcaaa

SEQ ID NO: 54942 - RNA, 27 nt, synthetic construct
  misc_feature 1..27: note = Importin-8 (234-242)
  source 1..27: mol_type = other RNA
agcctggccgagatcctccttaagaaa

SEQ ID NO: 54943 - RNA, 30 nt, synthetic construct
  misc_feature 1..30: note = Heterogeneous nuclear ribonucleoprotein K (154-163)
  source 1..30: mol_type = other RNA
agcctggccggcgggatcattggagtgaag

SEQ ID NO: 54944 - RNA, 27 nt, synthetic construct
  misc_feature 1..27: note = G2/M phase-specific E3 ubiquitin-protein ligase (424-432)
  source 1..27: mol_type = other RNA
agcctgttcgagggctccctctctaag

SEQ ID NO: 54945 - RNA, 27 nt, synthetic construct
  misc_feature 1..27: note = Serine/threonine-protein phosphatase 2A 56 kDa regulatory subunit epsilon isoform (278-286)
  source 1..27: mol_type = other RNA
agcctgttccacgcccagctcgcttac

SEQ ID NO: 54946 - RNA, 27 nt, synthetic construct
  misc_feature 1..27: note = Adenylate cyclase type 6 (161-169)
  source 1..27: mol_type = other RNA
agcctgttccccaaggccctccagaga

SEQ ID NO: 54947 - RNA, 27 nt, synthetic construct
  misc_feature 1..27: note = Cytochrome c oxidase subunit 6C (30-38)
  source 1..27: mol_type = other RNA
agcctgggcgtggccgctctctacaag

SEQ ID NO: 54948 - RNA, 30 nt, synthetic construct
  misc_feature 1..30: note = Histone H2A.V (91-100)
  source 1..30: mol_type = other RNA
agcctgatcggcaagaaagggcagcaaaag

SEQ ID NO: 54949 - RNA, 27 nt, synthetic construct
  misc_feature 1..27: note = N-alpha-acetyltransferase 30 (63-71)
  source 1..27: mol_type = other RNA
agcctgaagtccaaagtgctctctgtc

SEQ ID NO: 54950 - RNA, 27 nt, synthetic construct
  misc_feature 1..27: note = COP9 signalosome complex subunit 2 (433-441)
  source 1..27: mol_type = other RNA
agcctgaaccaggccgtggtctccaag

SEQ ID NO: 54951 - RNA, 30 nt, synthetic construct
  misc_feature 1..30: note = Cell division cycle-associated protein 2 (247-256)
  source 1..30: mol_type = other RNA
agcctgcccgccaacacccctctcagaaag

SEQ ID NO: 54952 - RNA, 27 nt, synthetic construct
  misc_feature 1..27: note = Zinc finger protein 697 (327-335)
  source 1..27: mol_type = other RNA
agcctgtcctctcacctcctttcacat

SEQ ID NO: 54953 - RNA, 33 nt, synthetic construct
  misc_feature 1..33: note = Protection of telomeres protein 1 (417-427)
  source 1..33: mol_type = other RNA
agcctgtacgactccaagatctggaccacaaaa

SEQ ID NO: 54954 - RNA, 33 nt, synthetic construct
  misc_feature 1..33: note = MICOS complex subunit MIC26 (41-51)
  source 1..33: mol_type = other RNA
agcctgtactccgtgcccgagggccagtctaag

SEQ ID NO: 54955 - RNA, 27 nt, synthetic construct
  misc_feature 1..27: note = A-kinase anchor protein 13 (930-938)
  source 1..27: mol_type = other RNA
agccccctgaccaagtccatctctctc

SEQ ID NO: 54956 - RNA, 24 nt, synthetic construct
  misc_feature 1..24: note = Elongation factor 2 (95-102)
  source 1..24: mol_type = other RNA
agccccaacaagcacaatagactg

SEQ ID NO: 54957 - RNA, 27 nt, synthetic construct
  misc_feature 1..27: note = WD repeat-containing protein 3 (558-566)
  source 1..27: mol_type = other RNA
agccccaaccagaagctgctcgccgtg

SEQ ID NO: 54958 - RNA, 24 nt, synthetic construct
  misc_feature 1..24: note = Gamma-interferon-inducible protein 16 (166-173)
  source 1..24: mol_type = other RNA
agcccctcccctaagacctctctg

SEQ ID NO: 54959 - RNA, 24 nt, synthetic construct
  misc_feature 1..24: note = Elongation factor 2 (2-9)
  source 1..24: mol_type = other RNA
agccccgtggtcagagttgccgtg

SEQ ID NO: 54960 - RNA, 27 nt, synthetic construct
  misc_feature 1..27: note = Uridine diphosphate glucose pyrophosphatase (83-91)
  source 1..27: mol_type = other RNA
agcccctacctgagacctctcaccctt

SEQ ID NO: 54961 - RNA, 27 nt, synthetic construct
  misc_feature 1..27: note = Ubiquitin carboxyl-terminal hydrolase 48 (410-418)
  source 1..27: mol_type = other RNA
agcagaaacgcctacatgctggtgtat

SEQ ID NO: 54962 - RNA, 27 nt, synthetic construct
  misc_feature 1..27: note = RNA-binding protein EWS (328-336)
  source 1..27: mol_type = other RNA
agctccgccccccctctgaccggcaag

SEQ ID NO: 54963 - RNA, 27 nt, synthetic construct
  misc_feature 1..27: note = Immediate early response gene 5 protein (275-283)
  source 1..27: mol_type = other RNA
agctccttctctggcctgctcagaaag

SEQ ID NO: 54964 - RNA, 27 nt, synthetic construct
  misc_feature 1..27: note = 40S ribosomal protein S5 (184-192)
  source 1..27: mol_type = other RNA
agctccaactcttacgccatcaagaaa

SEQ ID NO: 54965 - RNA, 27 nt, synthetic construct
  misc_feature 1..27: note = Proteasome activator complex subunit 4 (977-985)
  source 1..27: mol_type = other RNA
agctcctactctcaggtgagaaacaag

SEQ ID NO: 54966 - RNA, 27 nt, synthetic construct
  misc_feature 1..27: note = PCI domain-containing protein 2 (203-211)
  source 1..27: mol_type = other RNA
agcaccgcccagagagtgacatacaag

SEQ ID NO: 54967 - RNA, 27 nt, synthetic construct
  misc_feature 1..27: note = MAP7 domain-containing protein 1 (454-462)
  source 1..27: mol_type = other RNA
agcaccgcctccgagctgtctcccaag

SEQ ID NO: 54968 - RNA, 27 nt, synthetic construct
  misc_feature 1..27: note = 60S ribosomal protein L18 (41-49)
  source 1..27: mol_type = other RNA
agcaccttcaaccaggtggtcctgaag

SEQ ID NO: 54969 - RNA, 27 nt, synthetic construct
  misc_feature 1..27: note = WD repeat and coiled-coil-containing protein C2orf44 (449-457)
  source 1..27: mol_type = other RNA
agcaccttctccgcccccctgaacaag

SEQ ID NO: 54970 - RNA, 27 nt, synthetic construct
  misc_feature 1..27: note = Kanadaptin (238-246)
  source 1..27: mol_type = other RNA
agcacccacggcacattcctgaacaag

SEQ ID NO: 54971 - RNA, 27 nt, synthetic construct
  misc_feature 1..27: note = Double-stranded RNA-binding protein Staufen homolog 2 (41-49)
  source 1..27: mol_type = other RNA
agcaccctgcccaagcctgtgcagaaa

SEQ ID NO: 54972 - RNA, 27 nt, synthetic construct
  misc_feature 1..27: note = F-box only protein 11 (143-151)
  source 1..27: mol_type = other RNA
agcaccaactcccaccccatcctgaga

SEQ ID NO: 54973 - RNA, 27 nt, synthetic construct
  misc_feature 1..27: note = LisH domain-containing protein ARMC9 (382-390)
  source 1..27: mol_type = other RNA
agcacctccgacgtggtcagacagtac

SEQ ID NO: 54974 - RNA, 27 nt, synthetic construct
  misc_feature 1..27: note = E3 ubiquitin-protein ligase CHFR (78-86)
  source 1..27: mol_type = other RNA
agcacctccggcacagtgatcaacaag

SEQ ID NO: 54975 - RNA, 27 nt, synthetic construct
  misc_feature 1..27: note = Lysine-specific histone demethylase 1A (633-641)
  source 1..27: mol_type = other RNA
agcacctcccagacattcatctacaag

SEQ ID NO: 54976 - RNA, 27 nt, synthetic construct
  misc_feature 1..27: note = Heterogeneous nuclear ribonucleoprotein U-like protein 2 (165-173)
  source 1..27: mol_type = other RNA
agcacctacggcgtgacaaaggggaaa

SEQ ID NO: 54977 - RNA, 27 nt, synthetic construct
  misc_feature 1..27: note = Cathepsin Z (38-46)
  source 1..27: mol_type = other RNA
agcacctaccccagacctcacgagtat

SEQ ID NO: 54978 - RNA, 27 nt, synthetic construct
  misc_feature 1..27: note = Nucleolar pre-ribosomal-associated protein 1 (2084-2092)
  source 1..27: mol_type = other RNA
agcgtggccgagcaccccctgtccaga

SEQ ID NO: 54979 - RNA, 27 nt, synthetic construct
  misc_feature 1..27: note = MOB kinase activator 1A (188-196)
  source 1..27: mol_type = other RNA
agcgtggccaagaccatcctgaaaaga

SEQ ID NO: 54980 - RNA, 30 nt, synthetic construct
  misc_feature 1..30: note = Lysine-specific demethylase 5C (959-968)
  source 1..30: mol_type = other RNA
agcgtggccccctcccctgctgtcgacaag

SEQ ID NO: 54981 - RNA, 27 nt, synthetic construct
  misc_feature 1..27: note = Lysine-specific demethylase 5A (796-804)
  source 1..27: mol_type = other RNA
agcgtggcccagctgctcctttccaag

SEQ ID NO: 54982 - RNA, 27 nt, synthetic construct
  misc_feature 1..27: note = Probable cation-transporting ATPase 13A4 (871-879)
  source 1..27: mol_type = other RNA
agcgtggcctcccccttcacctctaag

SEQ ID NO: 54983 - RNA, 27 nt, synthetic construct
  misc_feature 1..27: note = Sentrin-specific protease 5 (115-123)
  source 1..27: mol_type = other RNA
agcgtggacggccccgtctcccagaag

SEQ ID NO: 54984 - RNA, 27 nt, synthetic construct
  misc_feature 1..27: note = Exostosin-2 (692-700)
  source 1..27: mol_type = other RNA
agcgtgttcggcaccatgcccctgaag

SEQ ID NO: 54985 - RNA, 27 nt, synthetic construct
  misc_feature 1..27: note = SRR1-like protein (301-309)
  source 1..27: mol_type = other RNA
agcgtgcactggttccccgtccagaag

SEQ ID NO: 54986 - RNA, 27 nt, synthetic construct
  misc_feature 1..27: note = Epidermal growth factor receptor kinase substrate 8 (380-388)
  source 1..27: mol_type = other RNA
agcgtgctgtcccccctccttaacaag

SEQ ID NO: 54987 - RNA, 27 nt, synthetic construct
  misc_feature 1..27: note = Nodal modulator 2 (130-138)
  source 1..27: mol_type = other RNA
agcgtgaacggcaaggtcctgtccaaa

SEQ ID NO: 54988 - RNA, 27 nt, synthetic construct
  misc_feature 1..27: note = Ubiquitin carboxyl-terminal hydrolase 11 (442-450)
  source 1..27: mol_type = other RNA
agcgtgcccctgcctatctcccacaag

SEQ ID NO: 54989 - RNA, 30 nt, synthetic construct
  misc_feature 1..30: note = Cytoplasmic dynein 1 light intermediate chain 1 (419-428)
  source 1..30: mol_type = other RNA
agcgtgtcccccatccctgccggctctaag

SEQ ID NO: 54990 - RNA, 30 nt, synthetic construct
  misc_feature 1..30: note = Zinc finger protein 697 (10-19)
  source 1..30: mol_type = other RNA
agcgtgtcctctcacctgttcacccataag

SEQ ID NO: 54991 - RNA, 27 nt, synthetic construct
  misc_feature 1..27: note = Zinc finger protein 619 (226-234)
  source 1..27: mol_type = other RNA
agcgtgtccacccacctgatcacaaag

SEQ ID NO: 54992 - RNA, 27 nt, synthetic construct
  misc_feature 1..27: note = Fatty acyl-CoA reductase 1 (39-47)
  source 1..27: mol_type = other RNA
agcgtgtacgtcctggttagacagaag

SEQ ID NO: 54993 - RNA, 27 nt, synthetic construct
  misc_feature 1..27: note = Histone H2B type 2-F (39-47)
  source 1..27: mol_type = other RNA
agcgtgtacgtctataaggttctgaaa

SEQ ID NO: 54994 - RNA, 27 nt, synthetic construct
  misc_feature 1..27: note = Nucleolar RNA helicase 2 (15-23)
  source 1..27: mol_type = other RNA
accgccatgaagaaaggcgagacactg

SEQ ID NO: 54995 - RNA, 30 nt, synthetic construct
  misc_feature 1..30: note = Pre-mRNA-processing-splicing factor 8 (1079-1088)
  source 1..30: mol_type = other RNA
accgaggccgctcaccccatcagactgttc

SEQ ID NO: 54996 - RNA, 30 nt, synthetic construct
  misc_feature 1..30: note = NHP2-like protein 1 (2-11)
  source 1..30: mol_type = other RNA
accgaggccgacgtgaaccccaaggcttac

SEQ ID NO: 54997 - RNA, 27 nt, synthetic construct
  misc_feature 1..27: note = Splicing factor, proline- and glutamine-rich (309-317)
  source 1..27: mol_type = other RNA
accgaggacgaattcaagagactgttt

SEQ ID NO: 54998 - RNA, 30 nt, synthetic construct
  misc_feature 1..30: note = 60S ribosomal protein L13 (170-179)
  source 1..30: mol_type = other RNA
accgaggaagagaagaacttcaaagccttt

SEQ ID NO: 54999 - RNA, 30 nt, synthetic construct
  misc_feature 1..30: note = Protein SET (136-145)
  source 1..30: mol_type = other RNA
accgagttcgaagacatcaagagcggctac

SEQ ID NO: 55000 - RNA, 30 nt, synthetic construct
  misc_feature 1..30: note = Neutral alpha-glucosidase AB (174-183)
  source 1..30: mol_type = other RNA
accgagggcggggaaccctacagactgtat

SEQ ID NO: 55001 - RNA, 27 nt, synthetic construct
  misc_feature 1..27: note = T-complex protein 1 subunit theta (342-350)
  source 1..27: mol_type = other RNA
accgagatcgaactggccaagcagatt

SEQ ID NO: 55002 - RNA, 27 nt, synthetic construct
  misc_feature 1..27: note = RNA-binding protein 27 (734-742)
  source 1..27: mol_type = other RNA
accgagctggacctccacaagagactt

SEQ ID NO: 55003 - RNA, 27 nt, synthetic construct
  misc_feature 1..27: note = RNA-binding protein 26 (793-801)
  source 1..27: mol_type = other RNA
accgagctggacctctacaagaaaatg

SEQ ID NO: 55004 - RNA, 27 nt, synthetic construct
  misc_feature 1..27: note = Cell cycle progression protein 1 (432-440)
  source 1..27: mol_type = other RNA
accgagctggaaagaaagctcacattc

SEQ ID NO: 55005 - RNA, 30 nt, synthetic construct
  misc_feature 1..30: note = Exocyst complex component 4 (67-76)
  source 1..30: mol_type = other RNA
accgagctgacaactgccatcagaacgtac

SEQ ID NO: 55006 - RNA, 27 nt, synthetic construct
  misc_feature 1..27: note = Geranylgeranyl pyrophosphate synthase (238-246)
  source 1..27: mol_type = other RNA
accgagaacatcgacattaagaaatac

SEQ ID NO: 55007 - RNA, 33 nt, synthetic construct
  misc_feature 1..33: note = Fructose-bisphosphate aldolase A (103-113)
  source 1..33: mol_type = other RNA
accgagaacacagaagagaatagaaggttctac

SEQ ID NO: 55008 - RNA, 27 nt, synthetic construct
  misc_feature 1..27: note = Probable cation-transporting ATPase 13A3 (132-140)
  source 1..27: mol_type = other RNA
accgagagccagcaaatcagatacttc

SEQ ID NO: 55009 - RNA, 27 nt, synthetic construct
  misc_feature 1..27: note = Nuclear factor erythroid 2-related factor 2 (198-206)
  source 1..27: mol_type = other RNA
accgaggtggacaactaccacttctat

SEQ ID NO: 55010 - RNA, 24 nt, synthetic construct
  misc_feature 1..24: note = Basigin (48-55)
  source 1..24: mol_type = other RNA
accgaggtgacaggccacagatgg

SEQ ID NO: 55011 - RNA, 27 nt, synthetic construct
  misc_feature 1..27: note = Myosin phosphatase Rho-interacting protein (441-449)
  source 1..27: mol_type = other RNA
accgagtaccccgtgcagagaaactat

SEQ ID NO: 55012 - RNA, 33 nt, synthetic construct
  misc_feature 1..33: note = GPI transamidase component PIG-T (450-460)
  source 1..33: mol_type = other RNA
accgagtacacacccgaccctaaccacggcttc

SEQ ID NO: 55013 - RNA, 27 nt, synthetic construct
  misc_feature 1..27: note = Protein kinase C delta-binding protein (181-189)
  source 1..27: mol_type = other RNA
accggcctgcagaaggtgcaaagcctc

SEQ ID NO: 55014 - RNA, 27 nt, synthetic construct
  misc_feature 1..27: note = Alpha-enolase (72-80)
  source 1..27: mol_type = other RNA
accatcgcccccgctctggtgagcaag

SEQ ID NO: 55015 - RNA, 27 nt, synthetic construct
  misc_feature 1..27: note = Histidine triad nucleotide-binding protein 1 (17-25)
  source 1..27: mol_type = other RNA
accatcttcggcaagattataagaaaa

SEQ ID NO: 55016 - RNA, 27 nt, synthetic construct
  misc_feature 1..27: note = NHP2-like protein 1 (105-113)
  source 1..27: mol_type = other RNA
accatcaaggagggcagccagctgaaa

SEQ ID NO: 55017 - RNA, 27 nt, synthetic construct
  misc_feature 1..27: note = H/ACA ribonucleoprotein complex subunit 3 (47-55)
  source 1..27: mol_type = other RNA
accatcaagaaaagattcaaggtgctg

SEQ ID NO: 55018 - RNA, 27 nt, synthetic construct
  misc_feature 1..27: note = Signal peptidase complex subunit 2 (129-137)
  source 1..27: mol_type = other RNA
accatctacacaagctataaggagaaa

SEQ ID NO: 55019 - RNA, 24 nt, synthetic construct
  misc_feature 1..24: note = Retinoblastoma-like protein 1 (803-810)
  source 1..24: mol_type = other RNA
accatctacgtgggcagagtcaag

SEQ ID NO: 55020 - RNA, 24 nt, synthetic construct
  misc_feature 1..24: note = Interferon-related developmental regulator 1 (118-125)
  source 1..24: mol_type = other RNA
accctgggccccatcctcaagaaa

SEQ ID NO: 55021 - RNA, 27 nt, synthetic construct
  misc_feature 1..27: note = Protein BRICK1 (49-57)
  source 1..27: mol_type = other RNA
accctgaacgagaagctcacagccctt

SEQ ID NO: 55022 - RNA, 27 nt, synthetic construct
  misc_feature 1..27: note = GPI mannosyltransferase 3 (40-48)
  source 1..27: mol_type = other RNA
accctgtacttcaacacacaggagaag

SEQ ID NO: 55023 - RNA, 27 nt, synthetic construct
  misc_feature 1..27: note = Splicing factor 3B subunit 3 (759-767)
  source 1..27: mol_type = other RNA
accaacacactgagaatcctcgccctt

SEQ ID NO: 55024 - RNA, 27 nt, synthetic construct
  misc_feature 1..27: note = Ubiquitin-like protein 7 (248-256)
  source 1..27: mol_type = other RNA
acccccagctccagacctgcctctctg

SEQ ID NO: 55025 - RNA, 27 nt, synthetic construct
  misc_feature 1..27: note = Exportin-6 (55-63)
  source 1..27: mol_type = other RNA
accagaaacgactacgtgatgatgtat

SEQ ID NO: 55026 - RNA, 27 nt, synthetic construct
  misc_feature 1..27: note = Perilipin-2 (63-71)
  source 1..27: mol_type = other RNA
accagcgccctgcccatcattcagaag

SEQ ID NO: 55027 - RNA, 27 nt, synthetic construct
  misc_feature 1..27: note = Huntingtin (1215-1223)
  source 1..27: mol_type = other RNA
accagcggccccgtgacaacttccaag

SEQ ID NO: 55028 - RNA, 24 nt, synthetic construct
  misc_feature 1..24: note = YTH domain-containing protein 1 (327-334)
  source 1..24: mol_type = other RNA
accagcaagctgaaatacgtgctc

SEQ ID NO: 55029 - RNA, 27 nt, synthetic construct
  misc_feature 1..27: note = Male-specific lethal 3 homolog (328-336)
  source 1..27: mol_type = other RNA
accacaggcgagcccgccactcctaag

SEQ ID NO: 55030 - RNA, 30 nt, synthetic construct
  misc_feature 1..30: note = Flap endonuclease 1 (60-69)
  source 1..30: mol_type = other RNA
accacaagccacctgatgggcatgttctac

SEQ ID NO: 55031 - RNA, 27 nt, synthetic construct
  misc_feature 1..27: note = Elongation factor 1-alpha 1 (22-30)
  source 1..27: mol_type = other RNA
accacaactggccacctgatctacaag

SEQ ID NO: 55032 - RNA, 27 nt, synthetic construct
  misc_feature 1..27: note = Derlin-1 (22-30)
  source 1..27: mol_type = other RNA
accgtggccgtccccctggttggcaag

SEQ ID NO: 55033 - RNA, 27 nt, synthetic construct
  misc_feature 1..27: note = COP9 signalosome complex subunit 3 (378-386)
  source 1..27: mol_type = other RNA
accgtgaacccccagttcgtccaaaag

SEQ ID NO: 55034 - RNA, 30 nt, synthetic construct
  misc_feature 1..30: note = HIG1 domain family member 2A, mitochondrial (27-36)
  source 1..30: mol_type = other RNA
accgtgtacagaaaccccgagagcttcaag

SEQ ID NO: 55035 - RNA, 27 nt, synthetic construct
  misc_feature 1..27: note = Talin-1 (1188-1196)
  source 1..27: mol_type = other RNA
gtggccaaggctgtcacccaggcactg

SEQ ID NO: 55036 - RNA, 27 nt, synthetic construct
  misc_feature 1..27: note = DNA damage-binding protein 1 (510-518)
  source 1..27: mol_type = other RNA
gtggccgtcggcagagctctgtactat

SEQ ID NO: 55037 - RNA, 27 nt, synthetic construct
  misc_feature 1..27: note = Translin-associated protein X (128-136)
  source 1..27: mol_type = other RNA
gtggaggccgtcagcttccagcacttt

SEQ ID NO: 55038 - RNA, 33 nt, synthetic construct; identical to SEQ ID NO: 30811
  misc_feature 1..33: note = Nodal modulator 3 (448-458)
  source 1..33: mol_type = other RNA

SEQ ID NO: 55039 - RNA, 27 nt, synthetic construct
  misc_feature 1..27: note = 3-phosphoinositide-dependent protein kinase 1 (325-333)
  source 1..27: mol_type = other RNA
gtggagaacaatctgatcctcaagatg

SEQ ID NO: 55040 - RNA, 27 nt, synthetic construct
  misc_feature 1..27: note = Sodium-coupled neutral amino acid transporter 2 (354-362)
  source 1..27: mol_type = other RNA
gtggagagcgaactgctccacacctac

SEQ ID NO: 55041 - RNA, 27 nt, synthetic construct
  misc_feature 1..27: note = Intraflagellar transport protein 81 homolog (196-204)
  source 1..27: mol_type = other RNA
gtggagaccgcccagaaccaccaatgg

SEQ ID NO: 55042 - RNA, 30 nt, synthetic construct; identical to SEQ ID NO: 30815
  misc_feature 1..30: note = Cleavage and polyadenylation specificity factor subunit 3 (444-453)
  source 1..30: mol_type = other RNA

SEQ ID NO: 55043 - RNA, 27 nt, synthetic construct
  misc_feature 1..27: note = Centrosomal protein of 57 kDa (326-334)
  source 1..27: mol_type = other RNA
gtgatcaacagcattcccctggccaag

SEQ ID NO: 55044 - RNA, 27 nt, synthetic construct
  misc_feature 1..27: note = DNA-directed RNA polymerase I subunit RPA2 (81-89)
  source 1..27: mol_type = other RNA
gtgatcagcccccctaccgtcccaaag

SEQ ID NO: 55045 - RNA, 33 nt, synthetic construct
  misc_feature 1..33: note = Ras GTPase-activating protein-binding protein 1 (113-123)
  source 1..33: mol_type = other RNA
gtgctggcccccgagggcagcgtcgctaacaag

SEQ ID NO: 55046 - RNA, 33 nt, synthetic construct
  misc_feature 1..33: note = Ras GTPase-activating protein-binding protein 2 (113-123)
  source 1..33: mol_type = other RNA
gtgctggcccccgagggcagcgtccctaacaag

SEQ ID NO: 55047 - RNA, 27 nt, synthetic construct
  misc_feature 1..27: note = Interferon-stimulated gene 20 kDa protein (132-140)
  source 1..27: mol_type = other RNA
gtgctgagcgagagactccttcacaag

SEQ ID NO: 55048 - RNA, 27 nt, synthetic construct
  misc_feature 1..27: note = DNA-directed RNA polymerase II subunit RPB2 (1020-1028)
  source 1..27: mol_type = other RNA
gtgctgtacaacggcttcaccgggaga

SEQ ID NO: 55049 - RNA, 27 nt, synthetic construct
  misc_feature 1..27: note = Long-chain-fatty-acid-CoA ligase 4 (576-584)
  source 1..27: mol_type = other RNA
gtgcccaaccagaagagactgaccctc

SEQ ID NO: 55050 - RNA, 27 nt, synthetic construct
  misc_feature 1..27: note = Protein kintoun (155-163)
  source 1..27: mol_type = other RNA
gtgcccagaatccagcctcaaagcctg

SEQ ID NO: 55051 - RNA, 27 nt, synthetic construct
  misc_feature 1..27: note = Leucine-rich repeat-containing protein 20 (35-43)
  source 1..27: mol_type = other RNA
gtgagcttccccatcggcatttacaag

SEQ ID NO: 55052 - RNA, 24 nt, synthetic construct
  misc_feature 1..24: note = Vimentin (31-38)
  source 1..24: mol_type = other RNA
gtgaccacaagcactagaacgtac

SEQ ID NO: 55053 - RNA, 27 nt, synthetic construct
  misc_feature 1..27: note = Nucleolar and spindle-associated protein 1 (308-316)
  source 1..27: mol_type = other RNA
gtgaccgtcagcggcgggacacccaag

SEQ ID NO: 55054 - RNA, 30 nt, synthetic construct
  misc_feature 1..30: note = Septin-7 (317-326)
  source 1..30: mol_type = other RNA
gtgacctacaacggcgtcgacaataacaag

SEQ ID NO: 55055 - RNA, 27 nt, synthetic construct
  misc_feature 1..27: note = Histone deacetylase 9 (78-86)
  source 1..27: mol_type = other RNA
gtggtcgaccccgttgtgagagagaag

SEQ ID NO: 55056 - RNA, 27 nt, synthetic construct
  misc_feature 1..27: note = Probable 18S rRNA (guanine-N(7))-methyltransferase (188-196)
  source 1..27: mol_type = other RNA
gtggtcgactaccccaacagcgccaag

SEQ ID NO: 55057 - RNA, 27 nt, synthetic construct
  misc_feature 1..27: note = Heterogeneous nuclear ribonucleoproteins A2/B1 (39-47)
  source 1..27: mol_type = other RNA
gtggtcatgagagaccccgccagcaag

SEQ ID NO: 55058 - RNA, 27 nt, synthetic construct
  misc_feature 1..27: note = Heterogeneous nuclear ribonucleoprotein A3 (65-73)
  source 1..27: mol_type = other RNA
gtggtcatgagagacccccagaccaag

SEQ ID NO: 55059 - RNA, 30 nt, synthetic construct
  misc_feature 1..30: note = Transmembrane protein 263 (101-110)
  source 1..30: mol_type = other RNA
gtggtcaacaaggttcccctgaccggcaaa

SEQ ID NO: 55060 - RNA, 33 nt, synthetic construct
  misc_feature 1..33: note = X-ray repair cross-complementing protein 5 (574-584)
  source 1..33: mol_type = other RNA
gtggtccaggacggcatcaccctgattacaaag

SEQ ID NO: 55061 - RNA, 27 nt, synthetic construct
  misc_feature 1..27: note = 60S ribosomal protein L22-like 1 (65-73)
  source 1..27: mol_type = other RNA
gtggtcagcgagaagcagttctccaaa

SEQ ID NO: 55062 - RNA, 27 nt, synthetic construct
  misc_feature 1..27: note = Glutathione S-transferase P (6-14)
  source 1..27: mol_type = other RNA
gtggtctacttccccgttagaggcagg

SEQ ID NO: 55063 - RNA, 27 nt, synthetic construct
  misc_feature 1..27: note = Adenylosuccinate lyase (363-371)
  source 1..27: mol_type = other RNA
gtggtctaccccaaggttatcgagaga

SEQ ID NO: 55064 - RNA, 27 nt, synthetic construct
  misc_feature 1..27: note = ER membrane protein complex subunit 1 (790-798)
  source 1..27: mol_type = other RNA
gtggtctaccagtattggaacaccaag

SEQ ID NO: 55065 - RNA, 33 nt, synthetic construct
  misc_feature 1..33: note = NmrA-like family domain-containing protein 1 (109-119)
  source 1..33: mol_type = other RNA
gtggtctacagcggcctggagaacatcaagaaa

SEQ ID NO: 55066 - RNA, 27 nt, synthetic construct
  misc_feature 1..27: note = JmjC domain-containing protein 8 (81-89)
  source 1..27: mol_type = other RNA
tacgccttcgtgagacccgtcatcctg

SEQ ID NO: 55067 - RNA, 27 nt, synthetic construct
  misc_feature 1..27: note = CCR4-NOT transcription complex subunit 1 (93-101)
  source 1..27: mol_type = other RNA
tacgccatcgacaaccccctgcactat

SEQ ID NO: 55068 - RNA, 27 nt, synthetic construct
  misc_feature 1..27: note = WD repeat-containing protein 82 (63-71)
  source 1..27: mol_type = other RNA
tacgccaacagcaaggctgtgaccctg

SEQ ID NO: 55069 - RNA, 27 nt, synthetic construct
  misc_feature 1..27: note = Splicing factor 3B subunit 1 (761-769)
  source 1..27: mol_type = other RNA
tacgccaactattacaccagagaggtg

SEQ ID NO: 55070 - RNA, 27 nt, synthetic construct
  misc_feature 1..27: note = WD repeat-containing protein 3 (84-92)
  source 1..27: mol_type = other RNA
tacgaggacggcagcatcagaattttc

SEQ ID NO: 55071 - RNA, 30 nt, synthetic construct
  misc_feature 1..30: note = NADH dehydrogenase (ubiquinone) 1 beta subcomplex subunit 11, mitochondrial (67-76)
  source 1..30: mol_type = other RNA
tacgagaagaaccccgacagccacggctat

SEQ ID NO: 55072 - RNA, 27 nt, synthetic construct
  misc_feature 1..27: note = Lon protease homolog 2, peroxisomal (599-607)
  source 1..27: mol_type = other RNA
tacgagatggaagtgagccagagactg

SEQ ID NO: 55073 - RNA, 27 nt, synthetic construct
  misc_feature 1..27: note = AN1-type zinc finger protein 5 (21-29)
  source 1..27: mol_type = other RNA
tacggcaaccccagaaccaatgggatg

SEQ ID NO: 55074 - RNA, 27 nt, synthetic construct
  misc_feature 1..27: note = Cullin-3 (34-42)
  source 1..27: mol_type = other RNA
tacagaaacgcctataccatggtgctg

SEQ ID NO: 55075 - RNA, 27 nt, synthetic construct
  misc_feature 1..27: note = MICOS complex subunit MIC27 (44-52)
  source 1..27: mol_type = other RNA
tacaccgccccccctctgcagagcaag

SEQ ID NO: 55076 - RNA, 27 nt, synthetic construct
  misc_feature 1..27: note = ATP-dependent RNA helicase DDX3X (200-208)
  source 1..27: mol_type = other RNA
tacaccagacccacacctgtgcagaag

SEQ ID NO: 55077 - RNA, 27 nt, synthetic construct
  misc_feature 1..27: note = Vimentin (30-38)
  source 1..27: mol_type = other RNA
tacgtgaccacaagcactagaacgtat

SEQ ID NO: 55078 - RNA, 27 nt, synthetic construct
  misc_feature 1..27: note = Serine/threonine-protein kinase mTOR (853-861)
  source 1..27: mol_type = other RNA
tacgtggtcgagccctatagaaagtac

SEQ ID NO: 55079 - RNA, 27 nt, synthetic construct
  misc_feature 1..27: note = Enhancer of filamentation 1 (164-172)
  source 1..27: mol_type = other RNA
tacgtgtatgagtaccccagcagatat

SEQ ID NO: 55080 - RNA, 30 nt, synthetic construct
  misc_feature 1..30: note = Nucleolar pre-ribosomal-associated protein 1 (1468-1477)
  source 1..30: mol_type = other RNA
tactatagccacctggagggcgccagattc

SEQ ID NO: 55081 - RNA, 27 nt, synthetic construct
  misc_feature 1..27: note = Selenoprotein H (10-18)
  source 1..27: mol_type = other RNA
gccgaggctgcagtggtcgccgttgcg

SEQ ID NO: 55082 - RNA, 27 nt, synthetic construct
  misc_feature 1..27: note = Transcription factor BTF3 (128-136)
  source 1..27: mol_type = other RNA
gccgaggctctgcccaagcagagcgtg

SEQ ID NO: 55083 - RNA, 27 nt, synthetic construct
  misc_feature 1..27: note = E3 ubiquitin-protein ligase HUWE1 (1156-1164)
  source 1..27: mol_type = other RNA
gccgaggacaaggatacccccgctctg

SEQ ID NO: 55084 - RNA, 33 nt, synthetic construct
  misc_feature 1..33: note = Centromere protein H (228-238)
  source 1..33: mol_type = other RNA
gccgaggaccccgctctgaaggaaatcgtgctc

SEQ ID NO: 55085 - RNA, 33 nt, synthetic construct
  misc_feature 1..33: note = Probable ATP-dependent RNA helicase DDX56 (121-131)
  source 1..33: mol_type = other RNA
gccgaggacagcgtgtcccagagagctgtcctg

SEQ ID NO: 55086 - RNA, 27 nt, synthetic construct
  misc_feature 1..27: note = Transforming acidic coiled-coil-containing protein 3 (469-477)
  source 1..27: mol_type = other RNA
gccgaggacacccccgtggtccagctg

SEQ ID NO: 55087 - RNA, 30 nt, synthetic construct
  misc_feature 1..30: note = Beta-hexosaminidase subunit alpha (266-275)
  source 1..30: mol_type = other RNA
gccgagttcgacacccccggccacacactg

SEQ ID NO: 55088 - RNA, 30 nt, synthetic construct
  misc_feature 1..30: note = 26S proteasome non-ATPase regulatory subunit 8 (113-122)
  source 1..30: mol_type = other RNA
gccgagttccacaccgaactggagagactc

SEQ ID NO: 55089 - RNA, 27 nt, synthetic construct
  misc_feature 1..27: note = Zinc phosphodiesterase ELAC protein 2 (677-685)
  source 1..27: mol_type = other RNA
gccgagttcatcatgctgaaccacttt

SEQ ID NO: 55090 - RNA, 30 nt, synthetic construct
  misc_feature 1..30: note = Calmodulin (11-20)
  source 1..30: mol_type = other RNA
gccgagttcaaggaagcttttagcctgttc

SEQ ID NO: 55091 - RNA, 30 nt, synthetic construct
  misc_feature 1..30: note = BRCA1-A complex subunit BRE (90-99)
  source 1..30: mol_type = other RNA
gccgagttcctgcccgaccctagcgctctc

SEQ ID NO: 55092 - RNA, 36 nt, synthetic construct
  misc_feature 1..36: note = DNA dC-dU-editing enzyme APOBEC-3B (105-116)
  source 1..36: mol_type = other RNA
gccgagttcctgagcgaacaccccaacgtgaccctc

SEQ ID NO: 55093 - RNA, 27 nt, synthetic construct
  misc_feature 1..27: note = ATP-dependent RNA helicase DHX8 (979-987)
  source 1..27: mol_type = other RNA
gccgagttccccctggaacctatgctc

SEQ ID NO: 55094 - RNA, 27 nt, synthetic construct
  misc_feature 1..27: note = Cytochrome c oxidase subunit 6B1 (9-17)
  source 1..27: mol_type = other RNA
gccgagggcaccttccccgggaagatc

SEQ ID NO: 55095 - RNA, 27 nt, synthetic construct
  misc_feature 1..27: note = SRSF protein kinase 1 (114-122)
  source 1..27: mol_type = other RNA
gccgagcactacaccgaaacagctctg

SEQ ID NO: 55096 - RNA, 33 nt, synthetic construct
  misc_feature 1..33: note = DNA repair protein RAD50 (134-144)
  source 1..33: mol_type = other RNA
gccgagatcgacagagaaatgattagctccctg

SEQ ID NO: 55097 - RNA, 27 nt, synthetic construct
  misc_feature 1..27: note = Insulin-like growth factor 2 mRNA-binding protein 2 (201-209)
  source 1..27: mol_type = other RNA
gccgagatcgaaattatgaagaaactg

SEQ ID NO: 55098 - RNA, 36 nt, synthetic construct
  misc_feature 1..36: note = Sodium/potassium-transporting ATPase subunit alpha-1 (69-80)
  source 1..36: mol_type = other RNA
gccgagatcctggctagagacggccccaacgcactc

SEQ ID NO: 55099 - RNA, 33 nt, synthetic construct
  misc_feature 1..33: note = Lamin-B1 (347-357)
  source 1..33: mol_type = other RNA
gccgagatcagagaccagatgcaacagcagctg

SEQ ID NO: 55100 - RNA, 27 nt, synthetic construct
  misc_feature 1..27: note = Transcription factor 25 (361-369)
  source 1..27: mol_type = other RNA
gccgagatcagccagccccctgctctg

SEQ ID NO: 55101 - RNA, 36 nt, synthetic construct
  misc_feature 1..36: note = BAG64702.1 (100-111)
  source 1..36: mol_type = other RNA
gccgagatcaccgacaagctgggcctccacagcctt

SEQ ID NO: 55102 - RNA, 30 nt, synthetic construct
  misc_feature 1..30: note = Importin subunit alpha-1 (451-460)
  source 1..30: mol_type = other RNA
gccgagaagctgggcgaaaccgagaaactc

SEQ ID NO: 55103 - RNA, 27 nt, synthetic construct
  misc_feature 1..27: note = T-complex protein 1 subunit epsilon (350-358)
  source 1..27: mol_type = other RNA
gccgagaagctgggcttcgctgggctc

SEQ ID NO: 55104 - RNA, 30 nt, synthetic construct
  misc_feature 1..30: note = Coiled-coil domain-containing protein 85B (121-130)
  source 1..30: mol_type = other RNA
gccgagctggaaggcagacaggaggaactc

SEQ ID NO: 55105 - RNA, 30 nt, synthetic construct
  misc_feature 1..30: note = Centrosomal protein of 55 kDa (140-149)
  source 1..30: mol_type = other RNA
gccgagctggaaagcaagaccaacacactc

SEQ ID NO: 55106 - RNA, 36 nt, synthetic construct
  misc_feature 1..36: note = Tropomodulin-3 (286-297)
  source 1..36: mol_type = other RNA
gccgagctgaagatcgacaaccagagacaacagctc

SEQ ID NO: 55107 - RNA, 27 nt, synthetic construct
  misc_feature 1..27: note = COMM domain-containing protein 4 (192-200)
  source 1..27: mol_type = other RNA
gccgagctgaagcaggctcaaaccctc

SEQ ID NO: 55108 - RNA, 27 nt, synthetic construct
  misc_feature 1..27: note = trabeculin-alpha (1770-1778)
  source 1..27: mol_type = other RNA
gccgagctgaagcaggtgcaaaccctc

SEQ ID NO: 55109 - RNA, 30 nt, synthetic construct
  misc_feature 1..30: note = Microtubule-associated protein RP/EB family member 1 (194-203)
  source 1..30: mol_type = other RNA
gccgagctgatgcagcaagtgaacgtcctc

SEQ ID NO: 55110 - RNA, 33 nt, synthetic construct
  misc_feature 1..33: note = 14-3-3 protein theta (34-44)
  source 1..33: mol_type = other RNA
gccgagctgagcaacgaagagagaaatctcctt

SEQ ID NO: 55111 - RNA, 33 nt, synthetic construct
  misc_feature 1..33: note = Sodium/potassium-transporting ATPase subunit alpha-1 (677-687)
  source 1..33: mol_type = other RNA
gccgagaacggcttcctgcccatccacctcctt

SEQ ID NO: 55112 - RNA, 33 nt, synthetic construct
  misc_feature 1..33: note = Armadillo repeat-containing X-linked protein 3 (271-281)
  source 1..33: mol_type = other RNA
gccgagaaccccgctatgaccagagaactgctc

SEQ ID NO: 55113 - RNA, 27 nt, synthetic construct
  misc_feature 1..27: note = Eukaryotic translation initiation factor 4 gamma 1 (1379-1387)
  source 1..27: mol_type = other RNA
gccgagcagaaggtggaatacaccctg

SEQ ID NO: 55114 - RNA, 27 nt, synthetic construct
  misc_feature 1..27: note = Double-strand-break repair protein rad21 homolog (576-584)
  source 1..27: mol_type = other RNA
gccgagagcatctccctgctcgaactt

SEQ ID NO: 55115 - RNA, 27 nt, synthetic construct
  misc_feature 1..27: note = Uncharacterized protein C6orf226 (67-75)
  source 1..27: mol_type = other RNA
gccgagagcctgccccctccaaccctc

SEQ ID NO: 55116 - RNA, 33 nt, synthetic construct
  misc_feature 1..33: note = Endoplasmin (528-538)
  source 1..33: mol_type = other RNA
gccgagagctcccccttcgtggaaagactgctc

SEQ ID NO: 55117 - RNA, 27 nt, synthetic construct
  misc_feature 1..27: note = Magnesium transporter protein 1 (299-307)
  source 1..27: mol_type = other RNA
gccgagacccacatcgtgctgctcttc

SEQ ID NO: 55118 - RNA, 27 nt, synthetic construct
  misc_feature 1..27: note = DNA-directed RNA polymerase I subunit RPA1 (1590-1598)
  source 1..27: mol_type = other RNA
gccgaggtgctggacctcagaaggctt

SEQ ID NO: 55119 - RNA, 33 nt, synthetic construct
  misc_feature 1..33: note = Syntaxin-binding protein 1 (297-307)
  source 1..33: mol_type = other RNA
gccgaggtgagccaggaagtcaccagatccctg

SEQ ID NO: 55120 - RNA, 30 nt, synthetic construct
  misc_feature 1..30: note = Cytochrome b-c1 complex subunit 9 (42-51)
  source 1..30: mol_type = other RNA
gccatctacgaccacattaacgagggcgtg

SEQ ID NO: 55121 - RNA, 30 nt, synthetic construct
  misc_feature 1..30: note = Rab GDP dissociation inhibitor beta (137-146)
  source 1..30: mol_type = other RNA
gccagatacggcaagagcccctatctgtac

SEQ ID NO: 55122 - RNA, 27 nt, synthetic construct
  misc_feature 1..27: note = Replication factor C subunit 4 (343-351)
  source 1..27: mol_type = other RNA
gacgagcacctgcagctcatcagcctt

SEQ ID NO: 55123 - RNA, 33 nt, synthetic construct
  misc_feature 1..33: note = Small nuclear ribonucleoprotein Sm D2 (22-32)
  source 1..33: mol_type = other RNA
gaggaattcaacaccggccccctgagcgtgctc

SEQ ID NO: 55124 - RNA, 27 nt, synthetic construct
  misc_feature 1..27: note = Transmembrane emp24 domain-containing protein 10 (136-144)
  source 1..27: mol_type = other RNA
gaggaaatcgccaaggtggagaaactg

SEQ ID NO: 55125 - RNA, 27 nt, synthetic construct
  misc_feature 1..27: note = Protein RRP5 homolog (820-828)
  source 1..27: mol_type = other RNA
gaggaactgcagggcgtgagaagcctc

SEQ ID NO: 55126 - RNA, 33 nt, synthetic construct
  misc_feature 1..33: note = T-complex protein 1 subunit delta (363-373)
  source 1..33: mol_type = other RNA
gaggaagtgaacctgaatggcagcgggaagctc

SEQ ID NO: 55127 - RNA, 27 nt, synthetic construct
  misc_feature 1..27: note = Nucleophosmin (92-100)
  source 1..27: mol_type = other RNA
ttcgagatcaccccccctgtggtcctg

SEQ ID NO: 55128 - RNA, 27 nt, synthetic construct
  misc_feature 1..27: note = Actin, cytoplasmic 1 (223-231)
  source 1..27: mol_type = other RNA
ttcgagcaggaaatggccaccgctgca

SEQ ID NO: 55129 - RNA, 27 nt, synthetic construct
  misc_feature 1..27: note = Serine/arginine repetitive matrix protein 2 (873-881)
  source 1..27: mol_type = other RNA
ttcgagagctcccccgaccctgaactg

SEQ ID NO: 55130 - RNA, 30 nt, synthetic construct; identical to SEQ ID NO: 30903
  misc_feature 1..30: note = Mitochondrial Rho GTPase 2 (11-20)
  source 1..30: mol_type = other RNA

SEQ ID NO: 55131 - RNA, 36 nt, synthetic construct
  misc_feature 1..36: note = Heterogeneous nuclear ribonucleoprotein C-like 1 (69-80)
  source 1..36: mol_type = other RNA
ggcgaggacgggagaatgatcgccggacaggtgctg

SEQ ID NO: 55132 - RNA, 30 nt, synthetic construct; identical to SEQ ID NO: 30905
  misc_feature 1..30: note = Cytoplasmic dynein 1 heavy chain 1 (1073-1082)
  source 1..30: mol_type = other RNA

SEQ ID NO: 55133 - RNA, 30 nt, synthetic construct
  misc_feature 1..30: note = HDAC2 protein (482-491)
  source 1..30: mol_type = other RNA
ggcgaggaccccgataagagaatcagcatt

SEQ ID NO: 55134 - RNA, 27 nt, synthetic construct
  misc_feature 1..27: note = Histone-binding protein RBBP7 (146-154)
  source 1..27: mol_type = other RNA
ggcgagttcgggggatttggtagcgtg

SEQ ID NO: 55135 - RNA, 33 nt, synthetic construct; identical to SEQ ID NO: 30908
  misc_feature 1..33: note = PC4 and SFRS1-interacting protein (251-261)
  source 1..33: mol_type = other RNA

SEQ ID NO: 55136 - RNA, 27 nt, synthetic construct
  misc_feature 1..27: note = Nardilysin-arginine dibasic convertase), isoform CRA_d (823-831)
  source 1..27: mol_type = other RNA
ggcgagcacgggctgatcattagagtg

SEQ ID NO: 55137 - RNA, 33 nt, synthetic construct
  misc_feature 1..33: note = Elongation factor 2 (42-52)
  source 1..33: mol_type = other RNA
ggcgagcacatcattgccggggctggagaactg

SEQ ID NO: 55138 - RNA, 27 nt, synthetic construct
  misc_feature 1..27: note = Ragulator complex protein LAMTOR4 (44-52)
  source 1..27: mol_type = other RNA
ggcgagcacaccctgctcgtgacagtc

SEQ ID NO: 55139 - RNA, 33 nt, synthetic construct
  misc_feature 1..33: note = 26S protease regulatory subunit 10B (338-348)
  source 1..33: mol_type = other RNA
ggcgagatcgactacgaagccattgtgaagctg

SEQ ID NO: 55140 - RNA, 33 nt, synthetic construct
  misc_feature 1..33: note = Golgin subfamily B member 1 (2640-2650)
  source 1..33: mol_type = other RNA
ggcgagatcgaagacaagctgaaaaaggagctc

SEQ ID NO: 55141 - RNA, 33 nt, synthetic construct
  misc_feature 1..33: note = Coatomer subunit beta' (518-528)
  source 1..33: mol_type = other RNA
ggcgagatccaggaaattgtgaagaccgggctg

SEQ ID NO: 55142 - RNA, 27 nt, synthetic construct
  misc_feature 1..27: note = Prolyl 4-hydroxylase subunit alpha-1 (197-205)
  source 1..27: mol_type = other RNA
ggcgagatcagcaccattgacaaggtg

SEQ ID NO: 55143 - RNA, 27 nt, synthetic construct
  misc_feature 1..27: note = Filamin-A (1802-1810)
  source 1..27: mol_type = other RNA
ggcgagatcaccggggaagtgagaatg

SEQ ID NO: 55144 - RNA, 27 nt, synthetic construct
  misc_feature 1..27: note = Coatomer subunit beta' (549-557)
  source 1..27: mol_type = other RNA
ggcgagatcgtgaccattgcccacctg

SEQ ID NO: 55145 - RNA, 30 nt, synthetic construct
  misc_feature 1..30: note = Proliferating cell nuclear antigen (173-182)
  source 1..30: mol_type = other RNA
ggcgagctggggaacggaaatatcaagctc

SEQ ID NO: 55146 - RNA, 27 nt, synthetic construct
  misc_feature 1..27: note = E3 SUMO-protein ligase PIAS3 (130-138)
  source 1..27: mol_type = other RNA
ggcgagctgatcagacccaccacactc

SEQ ID NO: 55147 - RNA, 27 nt, synthetic construct
  misc_feature 1..27: note = Prohibitin (137-145)
  source 1..27: mol_type = other RNA
ggcgagctgatcacccagagagaactc

SEQ ID NO: 55148 - RNA, 30 nt, synthetic construct
  misc_feature 1..30: note = 40S ribosomal protein S21 (63-72)
  source 1..30: mol_type = other RNA
ggcgagagcgacgattccatcctgagactc

SEQ ID NO: 55149 - RNA, 33 nt, synthetic construct
  misc_feature 1..33: note = Ubiquitin carboxyl-terminal hydrolase 22 (352-362)
  source 1..33: mol_type = other RNA
ggcgagagccacgtgtccgggaccacaactctg

SEQ ID NO: 55150 - RNA, 33 nt, synthetic construct
  misc_feature 1..33: note = Maspardin (165-175)
  source 1..33: mol_type = other RNA
ggccagagcgagctggcctccagactcaccctt

SEQ ID NO: 55151 - RNA, 30 nt, synthetic construct
  misc_feature 1..30: note = RNA-binding protein EWS (382-391)
  source 1..30: mol_type = other RNA
cacgaggcccagcatggcgtgaccagcctg

SEQ ID NO: 55152 - RNA, 27 nt, synthetic construct
  misc_feature 1..27: note = Kinesin-associated protein 3 (357-365)
  source 1..27: mol_type = other RNA
cacgaggacctgctcaacatcaccctt

SEQ ID NO: 55153 - RNA, 27 nt, synthetic construct
  misc_feature 1..27: note = Chromodomain-helicase-DNA-binding protein 6 (1642-1650)
  source 1..27: mol_type = other RNA
cacgaggaccccggccaggccaccctg

SEQ ID NO: 55154 - RNA, 27 nt, synthetic construct
  misc_feature 1..27: note = V-type proton ATPase subunit D (113-121)
  source 1..27: mol_type = other RNA
cacgagggcaccgacagctacgaactg

SEQ ID NO: 55155 - RNA, 30 nt, synthetic construct
  misc_feature 1..30: note = Taperin (362-371)
  source 1..30: mol_type = other RNA
cacgagatcgaagtgattggcgggtacctg

SEQ ID NO: 55156 - RNA, 27 nt, synthetic construct
  misc_feature 1..27: note = Transcription elongation factor SPT6 (746-754)
  source 1..27: mol_type = other RNA
cacgagctggaccagggccaacagctc

SEQ ID NO: 55157 - RNA, 33 nt, synthetic construct; identical to SEQ ID NO: 30930
  misc_feature 1..33: note = Coronin-1C (313-323)
  source 1..33: mol_type = other RNA

SEQ ID NO: 55158 - RNA, 27 nt, synthetic construct
  misc_feature 1..27: note = Importin subunit alpha-4 (468-476)
  source 1..27: mol_type = other RNA
cacgagaacgaagacatctacaagctg

SEQ ID NO: 55159 - RNA, 30 nt, synthetic construct; identical to SEQ ID NO: 30932
  misc_feature 1..30: note = Pre-mRNA-processing factor 19 (305-314)
  source 1..30: mol_type = other RNA

SEQ ID NO: 55160 - RNA, 27 nt, synthetic construct
  misc_feature 1..27: note = Single-stranded DNA-binding protein, mitochondrial (16-24)
  source 1..27: mol_type = other RNA
cacgagagcgaaaccacaacttccctg

SEQ ID NO: 55161 - RNA, 27 nt, synthetic construct
  misc_feature 1..27: note = Vacuolar protein sorting-associated protein 33A (58-66)
  source 1..27: mol_type = other RNA
cacgaggtggaaaagatgttcaccctg

SEQ ID NO: 55162 - RNA, 27 nt, synthetic construct
  misc_feature 1..27: note = STAGA complex 65 subunit gamma (219-227)
  source 1..27: mol_type = other RNA
cacgaggtgggcatcgggagcgtcctg

SEQ ID NO: 55163 - RNA, 27 nt, synthetic construct
  misc_feature 1..27: note = DNA replication licensing factor MCM4 (588-596)
  source 1..27: mol_type = other RNA
cacgaggtgatggaacagcaaaccctg

SEQ ID NO: 55164 - RNA, 27 nt, synthetic construct
  misc_feature 1..27: note = F-box only protein 38 (323-331)
  source 1..27: mol_type = other RNA
cacgaggtgagaatccagcccagcctg

SEQ ID NO: 55165 - RNA, 30 nt, synthetic construct
  misc_feature 1..30: note = 3-hydroxy-3-methylglutaryl-coenzyme A reductase (619-628)
  source 1..30: mol_type = other RNA
cacgagtacttccccgaaatgcagatcctg

SEQ ID NO: 55166 - RNA, 27 nt, synthetic construct
  misc_feature 1..27: note = Protein C-ets-1 (189-197)
  source 1..27: mol_type = other RNA
caccccatcagctccgaggaactgctc

SEQ ID NO: 55167 - RNA, 33 nt, synthetic construct
  misc_feature 1..33: note = DNA repair endonuclease XPF (748-758)
  source 1..33: mol_type = other RNA
atcgagttcgaccccagcaagcctttttccctg

SEQ ID NO: 55168 - RNA, 27 nt, synthetic construct
  misc_feature 1..27: note = Proliferating cell nuclear antigen (197-205)
  source 1..27: mol_type = other RNA
atcgagatgaacgaacccgtgcagctg

SEQ ID NO: 55169 - RNA, 30 nt, synthetic construct
  misc_feature 1..30: note = Nuclear poreoprotein p62 (366-375)
  source 1..30: mol_type = other RNA
atcgagaacggcgaaaagattaccagcctg

SEQ ID NO: 55170 - RNA, 30 nt, synthetic construct
  misc_feature 1..30: note = Melanoma-associated antigen F1 (112-121)
  source 1..30: mol_type = other RNA
atcctgttccccgacattatagccagagct

SEQ ID NO: 55171 - RNA, 30 nt, synthetic construct; identical to SEQ ID NO: 30944
  misc_feature 1..30: note = Clathrin light chain A (227-236)
  source 1..30: mol_type = other RNA

SEQ ID NO: 55172 - RNA, 27 nt, synthetic construct
  misc_feature 1..27: note = NAD(P)H dehydrogenase (quinone) 1 (143-151)
  source 1..27: mol_type = other RNA
atctgggacgagacccccctgtacttc

SEQ ID NO: 55173 - RNA, 24 nt, synthetic construct
  misc_feature 1..24: note = Guanine nucleotide-binding protein subunit beta-2-like 1 (106-113)
  source 1..24: mol_type = other RNA
aaggacgtgctgagcgtcgccttc

SEQ ID NO: 55174 - RNA, 33 nt, synthetic construct
  misc_feature 1..33: note = T-complex protein 1 subunit theta (367-377)
  source 1..33: mol_type = other RNA
aaggaggacggcgccatcagcaccattgtgctg

SEQ ID NO: 55175 - RNA, 27 nt, synthetic construct
  misc_feature 1..27: note = Ubiquitin carboxyl-terminal hydrolase 48 (790-798)
  source 1..27: mol_type = other RNA
aaggaggacagcaaactgatcgccctc

SEQ ID NO: 55176 - RNA, 27 nt, synthetic construct
  misc_feature 1..27: note = Myosin-9 (1084-1092)
  source 1..27: mol_type = other RNA
aaggaggaagagctgcaggccgctctc

SEQ ID NO: 55177 - RNA, 30 nt, synthetic construct
  misc_feature 1..30: note = Plasminogen activator inhibitor 1 RNA-binding protein (8-17)
  source 1..30: mol_type = other RNA
aaggaggaaacccagccccctgtggccctg

SEQ ID NO: 55178 - RNA, 30 nt, synthetic construct
  misc_feature 1..30: note = Chitinase domain-containing protein 1 (269-278)
  source 1..30: mol_type = other RNA
aaggagttcgaacagctggcccccgtgctc

SEQ ID NO: 55179 - RNA, 30 nt, synthetic construct
  misc_feature 1..30: note = ATP-dependent RNA helicase DDX24 (116-125)
  source 1..30: mol_type = other RNA
aaggagttcgaagtgaaagaccccgagctg

SEQ ID NO: 55180 - RNA, 33 nt, synthetic construct
  misc_feature 1..33: note = E3 ubiquitin-protein ligase listerin (1308-1318)
  source 1..33: mol_type = other RNA
aaggagttctttagccagggcatccactccctg

SEQ ID NO: 55181 - RNA, 30 nt, synthetic construct
  misc_feature 1..30: note = Inhibitor of growth protein 4 (52-61)
  source 1..30: mol_type = other RNA
aaggagttcggcgacgataaagtgcagctg

SEQ ID NO: 55182 - RNA, 30 nt, synthetic construct
  misc_feature 1..30: note = Eukaryotic translation initiation factor 4 gamma 1 (1365-1374)
  source 1..30: mol_type = other RNA
aaggagttcctgcccgaaggccaggacatc

SEQ ID NO: 55183 - RNA, 33 nt, synthetic construct
  misc_feature 1..33: note = Serine-tRNA ligase, cytoplasmic (457-467)
  source 1..33: mol_type = other RNA
aaggagttcatgccccctggcctgcaggaactc

SEQ ID NO: 55184 - RNA, 36 nt, synthetic construct
  misc_feature 1..36: note = Heterogeneous nuclear ribonucleoprotein Q (66-77)
  source 1..36: mol_type = other RNA
aaggagttcaacgaagacggcgccctggctgtgctc

SEQ ID NO: 55185 - RNA, 27 nt, synthetic construct
  misc_feature 1..27: note = Protein zer-1 homolog (579-587)
  source 1..27: mol_type = other RNA
aaggagttccccgaaaaacaggagctg

SEQ ID NO: 55186 - RNA, 27 nt, synthetic construct
  misc_feature 1..27: note = Regulator of G-protein signaling 10 (61-69)
  source 1..27: mol_type = other RNA
aaggagttcagcgaagagaacgtgctg

SEQ ID NO: 55187 - RNA, 36 nt, synthetic construct
  misc_feature 1..36: note = Apolipoprotein L2 (196-207)
  source 1..36: mol_type = other RNA
aaggagttcgtgggcgggaacacccccaatgtcctg

SEQ ID NO: 55188 - RNA, 27 nt, synthetic construct
  misc_feature 1..27: note = Cyclin-dependent kinase 9 (56-64)
  source 1..27: mol_type = other RNA
aaggagggcttccccatcaccgccctg

SEQ ID NO: 55189 - RNA, 33 nt, synthetic construct
  misc_feature 1..33: note = Vacuolar protein sorting-associated protein 33A (56-66)
  source 1..33: mol_type = other RNA
aaggagcacgaagtggagaaaatgttcaccctg

SEQ ID NO: 55190 - RNA, 36 nt, synthetic construct
  misc_feature 1..36: note = Serine/Arginine-related protein 53 (223-234)
  source 1..36: mol_type = other RNA
aaggagatcgaccccaccagcattcctacagccata

SEQ ID NO: 55191 - RNA, 27 nt, synthetic construct
  misc_feature 1..27: note = Ran GTPase-activating protein 1 (43-51)
  source 1..27: mol_type = other RNA
aaggagatcgaagacttcgatagcctg

SEQ ID NO: 55192 - RNA, 30 nt, synthetic construct
  misc_feature 1..30: note = RNA cytidine acetyltransferase (729-738)
  source 1..30: mol_type = other RNA
aaggagatcgaactgcccagcggccagctc

SEQ ID NO: 55193 - RNA, 27 nt, synthetic construct
  misc_feature 1..27: note = Transcription initiation factor IIB (272-280)
  source 1..27: mol_type = other RNA
aaggagatcggcgacattgccggggtg

SEQ ID NO: 55194 - RNA, 27 nt, synthetic construct
  misc_feature 1..27: note = Ras suppressor protein 1 (177-185)
  source 1..27: mol_type = other RNA
aaggagatcggcgaactgacccagctc

SEQ ID NO: 55195 - RNA, 30 nt, synthetic construct
  misc_feature 1..30: note = V-type proton ATPase 116 kDa subunit a isoform 1 (109-118)
  source 1..30: mol_type = other RNA
aaggagatcaacaccaatcaggaagccctg

SEQ ID NO: 55196 - RNA, 27 nt, synthetic construct
  misc_feature 1..27: note = Scavenger receptor class B member 1 (57-65)
  source 1..27: mol_type = other RNA
aaggagatccccattcctttctacctg

SEQ ID NO: 55197 - RNA, 30 nt, synthetic construct
  misc_feature 1..30: note = Centromere protein F (1675-1684)
  source 1..30: mol_type = other RNA
aaggagatccaggaactggagcaactcctt

SEQ ID NO: 55198 - RNA, 30 nt, synthetic construct
  misc_feature 1..30: note = Spatacsin (1706-1715)
  source 1..30: mol_type = other RNA
aaggagatcacccaggaaatgcaaacactg

SEQ ID NO: 55199 - RNA, 36 nt, synthetic construct
  misc_feature 1..36: note = Importin-11 (778-789)
  source 1..36: mol_type = other RNA
aaggagatcaccacagaaggccaggtgcaagtcctg

SEQ ID NO: 55200 - RNA, 30 nt, synthetic construct
  misc_feature 1..30: note = Eukaryotic translation initiation factor 3 subunit E (29-38)
  source 1..30: mol_type = other RNA
aaggagatctacaacgaaaaagagctgctc

SEQ ID NO: 55201 - RNA, 30 nt, synthetic construct
  misc_feature 1..30: note = Double-stranded RNA-binding protein Staufen homolog 2 (288-297)
  source 1..30: mol_type = other RNA
aaggagaaagaacccgactacgtgctgctc

SEQ ID NO: 55202 - RNA, 30 nt, synthetic construct
  misc_feature 1..30: note = Double-stranded RNA-binding protein Staufen homolog 1 (258-267)
  source 1..30: mol_type = other RNA
aaggagaaagaacccgagtacaccctgctc

SEQ ID NO: 55203 - RNA, 27 nt, synthetic construct
  misc_feature 1..27: note = Protein transport protein Sec16A (1490-1498)
  source 1..27: mol_type = other RNA
aaggagaaacccgaagaggaaagcctg

SEQ ID NO: 55204 - RNA, 30 nt, synthetic construct
  misc_feature 1..30: note = Heat shock protein HSP 90-alpha A2 (280-289)
  source 1..30: mol_type = other RNA
aaggagaaatacatcgaccaggaagagctg

SEQ ID NO: 55205 - RNA, 30 nt, synthetic construct
  misc_feature 1..30: note = Alpha-2-macroglobulin receptor-associated protein (272-281)
  source 1..30: mol_type = other RNA
aaggagctggaagccttcagagaggaactc

SEQ ID NO: 55206 - RNA, 30 nt, synthetic construct
  misc_feature 1..30: note = Ribosome-binding protein 1 (235-244)
  source 1..30: mol_type = other RNA
aaggagctggaaagccaggtgtccggcctc

SEQ ID NO: 55207 - RNA, 33 nt, synthetic construct
  misc_feature 1..33: note = Probable ATP-dependent RNA helicase DDX56 (208-218)
  source 1..33: mol_type = other RNA
aaggagctgatcctccacaaccccgtgaccctt

SEQ ID NO: 55208 - RNA, 30 nt, synthetic construct; identical to SEQ ID NO: 30981
  misc_feature 1..30: note = CDK5 regulatory subunit-associated protein 2 (665-674)
  source 1..30: mol_type = other RNA

SEQ ID NO: 55209 - RNA, 27 nt, synthetic construct
  misc_feature 1..27: note = Aurora kinase B (57-65)
  source 1..27: mol_type = other RNA
aaggagcccgtgacccctagcgccctg

SEQ ID NO: 55210 - RNA, 27 nt, synthetic construct
  misc_feature 1..27: note = CDK5 regulatory subunit-associated protein 2 (559-567)
  source 1..27: mol_type = other RNA
aaggagcaggacatctacacccacctg

SEQ ID NO: 55211 - RNA, 27 nt, synthetic construct
  misc_feature 1..27: note = Plectin (2047-2055)
  source 1..27: mol_type = other RNA
aaggagcaggaactgcaacagaccctc

SEQ ID NO: 55212 - RNA, 30 nt, synthetic construct
  misc_feature 1..30: note = Nucleoprotein TPR (995-1004)
  source 1..30: mol_type = other RNA
aaggagagcgccgaattccagacccaactg

SEQ ID NO: 55213 - RNA, 30 nt, synthetic construct; identical to SEQ ID NO: 30986
  misc_feature 1..30: note = Antizyme inhibitor 1 (203-212)
  source 1..30: mol_type = other RNA

SEQ ID NO: 55214 - RNA, 27 nt, synthetic construct
  misc_feature 1..27: note = Gamma-interferon-inducible protein 16 (299-307)
  source 1..27: mol_type = other RNA
aaggagaccctgaaaatcgacattctc

SEQ ID NO: 55215 - RNA, 27 nt, synthetic construct
  misc_feature 1..27: note = Periodic tryptophan protein 1 homolog (19-27)
  source 1..27: mol_type = other RNA
aaggagacccccgacaaagtggaactg

SEQ ID NO: 55216 - RNA, 39 nt, synthetic construct
  misc_feature 1..39: note = Sequestosome-1 (324-336)
  source 1..39: mol_type = other RNA
aaggaggtggaccccagcaccggcgaactgcagtccctc

SEQ ID NO: 55217 - RNA, 27 nt, synthetic construct
  misc_feature 1..27: note = DNA replication licensing factor MCM6 (332-340)
  source 1..27: mol_type = other RNA
aaggagtgggaaaaagtgttcgagatg

SEQ ID NO: 55218 - RNA, 33 nt, synthetic construct
  misc_feature 1..33: note = Lupus La protein (75-85)
  source 1..33: mol_type = other RNA
aaggagtggctggaagacaaaggccaggtgctc

SEQ ID NO: 55219 - RNA, 27 nt, synthetic construct
  misc_feature 1..27: note = 40S ribosomal protein S2 (58-66)
  source 1..27: mol_type = other RNA
aaggagtggatgcccgtgaccaaactg

SEQ ID NO: 55220 - RNA, 27 nt, synthetic construct
  misc_feature 1..27: note = DNA-directed RNA polymerases I, II, and III subunit RPABC4 (50-58)
  source 1..27: mol_type = other RNA
aagagactggtggtcttcgacgccagg

SEQ ID NO: 55221 - RNA, 33 nt, synthetic construct
  misc_feature 1..33: note = Dual specificity protein kinase CLK3 (601-611)
  source 1..33: mol_type = other RNA
ctggagttcgaccccgcccagagaatcaccctc

SEQ ID NO: 55222 - RNA, 27 nt, synthetic construct
  misc_feature 1..27: note = Microtubule-associated protein RP/EB family member 2 (98-106)
  source 1..27: mol_type = other RNA
ctggagcacgaatacatccataacttc

SEQ ID NO: 55223 - RNA, 27 nt, synthetic construct
  misc_feature 1..27: note = Mitochondrial import inner membrane translocase subunit TIM50 (324-332)
  source 1..27: mol_type = other RNA
ctggagcaggaagagcaacagagactc

SEQ ID NO: 55224 - RNA, 30 nt, synthetic construct
  misc_feature 1..30: note = Cyclin-dependent kinase 7 (5-14)
  source 1..30: mol_type = other RNA
ctggaggtgatcattaaggacaacagcctc

SEQ ID NO: 55225 - RNA, 33 nt, synthetic construct
  misc_feature 1..33: note = POTE ankyrin domain family member F (794-804)
  source 1..33: mol_type = other RNA
ctgagagtggcccccgaggaacaccctgtcctc

SEQ ID NO: 55226 - RNA, 30 nt, synthetic construct
  misc_feature 1..30: note = Eukaryotic translation initiation factor 4 gamma 1 (1290-1299)
  source 1..30: mol_type = other RNA
atggagatcgacattccccacgtgtggctg

SEQ ID NO: 55227 - RNA, 27 nt, synthetic construct
  misc_feature 1..27: note = MICOS complex subunit MIC60 (474-482)
  source 1..27: mol_type = other RNA
atggagaacgaaatgagaacccagctg

SEQ ID NO: 55228 - RNA, 30 nt, synthetic construct
  misc_feature 1..30: note = Interleukin enhancer-binding factor 3 (561-570)
  source 1..30: mol_type = other RNA
atggaggtggaagtcgacggccagaagttc

SEQ ID NO: 55229 - RNA, 27 nt, synthetic construct
  misc_feature 1..27: note = Pre-mRNA-processing-splicing factor 8 (1868-1876)
  source 1..27: mol_type = other RNA
atgctggaccccctcgaggtgcacctt

SEQ ID NO: 55230 - RNA, 27 nt, synthetic construct
  misc_feature 1..27: note = Elongation factor 2 (673-681)
  source 1..27: mol_type = other RNA
aacgagatcaaggacagcgtggtcgcc

SEQ ID NO: 55231 - RNA, 24 nt, synthetic construct
  misc_feature 1..24: note = Heterogeneous nuclear ribonucleoprotein K (38-45)
  source 1..24: mol_type = other RNA
aacaccgacgagatggtggaactg

SEQ ID NO: 55232 - RNA, 30 nt, synthetic construct
  misc_feature 1..30: note = Poly(U)-binding-splicing factor PUF60 (318-327)
  source 1..30: mol_type = other RNA
caggaggccgtggctggcgcagccgtcctg

SEQ ID NO: 55233 - RNA, 33 nt, synthetic construct
  misc_feature 1..33: note = Tyrosine-protein kinase BAZ1B (891-901)
  source 1..33: mol_type = other RNA
caggagttcctgaccgacatgaagcaagtgttt

SEQ ID NO: 55234 - RNA, 27 nt, synthetic construct
  misc_feature 1..27: note = Pumilio homolog 3 (495-503)
  source 1..27: mol_type = other RNA
caggagcacgcccaagaagtggtcctg

SEQ ID NO: 55235 - RNA, 27 nt, synthetic construct
  misc_feature 1..27: note = Nuclear pore complex protein Nup205 (13-21)
  source 1..27: mol_type = other RNA
caggagatccccgaacctctgcaactc

SEQ ID NO: 55236 - RNA, 27 nt, synthetic construct
  misc_feature 1..27: note = Fc receptor-like A (166-174)
  source 1..27: mol_type = other RNA
caggagctgttccccgcccctatcctc

SEQ ID NO: 55237 - RNA, 33 nt, synthetic construct
  misc_feature 1..33: note = 40S ribosomal protein S9 (27-37)
  source 1..33: mol_type = other RNA
caggagctgaagctcatcggcgaatacgggctt

SEQ ID NO: 55238 - RNA, 36 nt, synthetic construct
  misc_feature 1..36: note = Heterogeneous nuclear ribonucleoprotein H (438-449)
  source 1..36: mol_type = other RNA
caggagaacagctccgacttccaatctaatatcgcc

SEQ ID NO: 55239 - RNA, 33 nt, synthetic construct; identical to SEQ ID NO: 31012
  misc_feature 1..33: note = T-complex protein 1 subunit theta (95-105)
  source 1..33: mol_type = other RNA

SEQ ID NO: 55240 - RNA, 24 nt, synthetic construct
  misc_feature 1..24: note = Coatomer subunit epsilon (97-104)
  source 1..24: mol_type = other RNA
agagacagcatcgtggccgagctg

SEQ ID NO: 55241 - RNA, 30 nt, synthetic construct
  misc_feature 1..30: note = Ribosome-binding protein 1 (360-369)
  source 1..30: mol_type = other RNA
agagaggccgaagagacccagagcacactg

SEQ ID NO: 55242 - RNA, 33 nt, synthetic construct
  misc_feature 1..33: note = Nodal modulator 2 (274-284)
  source 1..33: mol_type = other RNA
agagaggacggcagcttctccttttactctctg

SEQ ID NO: 55243 - RNA, 27 nt, synthetic construct
  misc_feature 1..27: note = Guanine nucleotide-binding protein G(s) subunit alpha isoforms short (244-252)
  source 1..27: mol_type = other RNA
agagaggacaaccagaccaataggctg

SEQ ID NO: 55244 - RNA, 27 nt, synthetic construct
  misc_feature 1..27: note = Nucleolar complex protein 2 homolog (609-617)
  source 1..27: mol_type = other RNA
agagaggaaggcacccccctgacactc

SEQ ID NO: 55245 - RNA, 27 nt, synthetic construct
  misc_feature 1..27: note = DNA topoisomerase 1 (708-716)
  source 1..27: mol_type = other RNA
agagaggaaaacaagcagatcgccctg

SEQ ID NO: 55246 - RNA, 27 nt, synthetic construct
  misc_feature 1..27: note = Eukaryotic initiation factor 4A-II (256-264)
  source 1..27: mol_type = other RNA
agagaggaatggaagctggacaccctc

SEQ ID NO: 55247 - RNA, 30 nt, synthetic construct
  misc_feature 1..30: note = Spermine synthase (251-260)
  source 1..30: mol_type = other RNA
agagagttcgactacgtgatcaacgatctg

SEQ ID NO: 55248 - RNA, 30 nt, synthetic construct
  misc_feature 1..30: note = DNA mismatch repair protein Msh6 (1321-1330)
  source 1..30: mol_type = other RNA
agagagttcgaaaagatgaaccagagcctg

SEQ ID NO: 55249 - RNA, 36 nt, synthetic construct
  misc_feature 1..36: note = Heterogeneous nuclear ribonucleoprotein R (69-80)
  source 1..36: mol_type = other RNA
agagagttcaacgaagagggcgccctgagcgtgctc

SEQ ID NO: 55250 - RNA, 27 nt, synthetic construct
  misc_feature 1..27: note = Inner centromere protein (47-55)
  source 1..27: mol_type = other RNA
agagagttcagcaaggaacccgagctg

SEQ ID NO: 55251 - RNA, 27 nt, synthetic construct
  misc_feature 1..27: note = Eukaryotic translation initiation factor 3 subunit I (20-28)
  source 1..27: mol_type = other RNA
agagagggcgacctgctcttcaccgtg

SEQ ID NO: 55252 - RNA, 27 nt, synthetic construct
  misc_feature 1..27: note = ZW10 interactor (104-112)
  source 1..27: mol_type = other RNA
agagagcacgtggaagccatcaagatt

SEQ ID NO: 55253 - RNA, 33 nt, synthetic construct
  misc_feature 1..33: note = ZW10 interactor (104-114)
  source 1..33: mol_type = other RNA
agagagcacgtggaagccatcaagattggcctg

SEQ ID NO: 55254 - RNA, 33 nt, synthetic construct
  misc_feature 1..33: note = Histone H3.3 (73-83)
  source 1..33: mol_type = other RNA
agagagatcgcccaggacttcaagaccgatctg

SEQ ID NO: 55255 - RNA, 33 nt, synthetic construct
  misc_feature 1..33: note = Serine/threonine-protein phosphatase PP1-alpha catalytic subunit (21-31)
  source 1..33: mol_type = other RNA
agagagatcttcctgagccagcccattctcctt

SEQ ID NO: 55256 - RNA, 30 nt, synthetic construct
  misc_feature 1..30: note = Structural maintenance of chromosomes flexible hinge domain-containing protein 1 (393-402)
  source 1..30: mol_type = other RNA
agagagatccaggacgatatgcaaaccctg

SEQ ID NO: 55257 - RNA, 27 nt, synthetic construct
  misc_feature 1..27: note = DNA-dependent protein kinase catalytic subunit (2753-2761)
  source 1..27: mol_type = other RNA
agagagaaggaaatcaaaagcgagctg

SEQ ID NO: 55258 - RNA, 27 nt, synthetic construct
  misc_feature 1..27: note = Actin-related protein 2 (125-133)
  source 1..27: mol_type = other RNA
agagagaagatcgtggaagtcatgttc

SEQ ID NO: 55259 - RNA, 27 nt, synthetic construct
  misc_feature 1..27: note = Aurora kinase A (151-159)
  source 1..27: mol_type = other RNA
agagagaagcagagcaaattcatcctg

SEQ ID NO: 55260 - RNA, 30 nt, synthetic construct
  misc_feature 1..30: note = Myosin-9 (1110-1119)
  source 1..30: mol_type = other RNA
agagagctggaaagccagatctccgagctc

SEQ ID NO: 55261 - RNA, 30 nt, synthetic construct
  misc_feature 1..30: note = TRAF3-interacting JNK-activating modulator (73-82)
  source 1..30: mol_type = other RNA
agagagctggaaagccagctccacgtgctt

SEQ ID NO: 55262 - RNA, 33 nt, synthetic construct
  misc_feature 1..33: note = NADH dehydrogenase (ubiquinone) 1 alpha subcomplex subunit 13 (79-89)
  source 1..33: mol_type = other RNA
agagagaacctggaagaggaagccatcattatg

SEQ ID NO: 55263 - RNA, 36 nt, synthetic construct
  misc_feature 1..36: note = T-complex protein 1 subunit delta (160-171)
  source 1..36: mol_type = other RNA
agagagaccctgctcaacagcgccacaacttccctt

SEQ ID NO: 55264 - RNA, 33 nt, synthetic construct
  misc_feature 1..33: note = Elongation factor 2 (80-90)
  source 1..33: mol_type = other RNA
agagagaccgtgagcgaagagtccaacgtcctg

SEQ ID NO: 55265 - RNA, 30 nt, synthetic construct
  misc_feature 1..30: note = Epsilon-sarcoglycan (213-222)
  source 1..30: mol_type = other RNA
agagaggtggaaaacccccagaatcaactg

SEQ ID NO: 55266 - RNA, 27 nt, synthetic construct
  misc_feature 1..27: note = Protein disulfide-isomerase A6 (18-26)
  source 1..27: mol_type = other RNA
agagaggtgatccagagcgactccctg

SEQ ID NO: 55267 - RNA, 30 nt, synthetic construct
  misc_feature 1..30: note = Proteasome subunit beta type-4 (165-174)
  source 1..30: mol_type = other RNA
agagaggtgctggaaaagcagcccgtcctc

SEQ ID NO: 55268 - RNA, 27 nt, synthetic construct
  misc_feature 1..27: note = SWI/SNF complex subunit SMARCC2 (599-607)
  source 1..27: mol_type = other RNA
agagagtggaccgaacaggagacactg

SEQ ID NO: 55269 - RNA, 30 nt, synthetic construct
  misc_feature 1..30: note = Transcription factor E2F7 (615-624)
  source 1..30: mol_type = other RNA
agagagtacgaagacggccccctgagcctc

SEQ ID NO: 55270 - RNA, 33 nt, synthetic construct
  misc_feature 1..33: note = GDP-L-fucose synthase (38-48)
  source 1..33: mol_type = other RNA
agagagtacaacgaagtggagcccatcattctg

SEQ ID NO: 55271 - RNA, 33 nt, synthetic construct
  misc_feature 1..33: note = Vimentin (381-391)
  source 1..33: mol_type = other RNA
agagagtaccaggacctgctcaacgtgaagatg

SEQ ID NO: 55272 - RNA, 27 nt, synthetic construct
  misc_feature 1..27: note = Metastasis-associated protein MTA2 (188-196)
  source 1..27: mol_type = other RNA
agacagatcgaccaattcctggtggtc

SEQ ID NO: 55273 - RNA, 27 nt, synthetic construct
  misc_feature 1..27: note = Runt-related transcription factor 3 (264-272)
  source 1..27: mol_type = other RNA
agaagcttccccaccctgcctacactc

SEQ ID NO: 55274 - RNA, 33 nt, synthetic construct
  misc_feature 1..33: note = HLA class I histocompatibility antigen, B-15 alpha chain (352-362)
  source 1..33: mol_type = other RNA
agcgcccagggctccgacgtgtctctgaccgct

SEQ ID NO: 55275 - RNA, 27 nt, synthetic construct
  misc_feature 1..27: note = Asparagine synthetase (glutamine-hydrolyzing) (159-167)
  source 1..27: mol_type = other RNA
agcgaggccaagggcctggtgaccctc

SEQ ID NO: 55276 - RNA, 27 nt, synthetic construct
  misc_feature 1..27: note = Chromodomain-helicase-DNA-binding protein 4 (1833-1841)
  source 1..27: mol_type = other RNA
agcgaggacccctcccacccttctatg

SEQ ID NO: 55277 - RNA, 27 nt, synthetic construct
  misc_feature 1..27: note = SRA stem-loop-interacting RNA-binding protein, mitochondrial (69-77)
  source 1..27: mol_type = other RNA
agcgaggaaggcctgagaaacgccctc

SEQ ID NO: 55278 - RNA, 30 nt, synthetic construct
  misc_feature 1..30: note = Poly (ADP-ribose) polymerase 9 (292-301)
  source 1..30: mol_type = other RNA
agcgagttcatcctgggcaagtccgaactc

SEQ ID NO: 55279 - RNA, 30 nt, synthetic construct
  misc_feature 1..30: note = Cold shock domain-containing protein E1 (183-192)
  source 1..30: mol_type = other RNA
agcgagttcaagggcgacctggaaaccctc

SEQ ID NO: 55280 - RNA, 30 nt, synthetic construct
  misc_feature 1..30: note = Cold shock domain-containing protein E1 (519-528)
  source 1..30: mol_type = other RNA
agcgagttctccggcgacgtggattctctg

SEQ ID NO: 55281 - RNA, 27 nt, synthetic construct
  misc_feature 1..27: note = Zinc finger protein 451 (35-43)
  source 1..27: mol_type = other RNA
agcgagggccccctgagacctgtgctc

SEQ ID NO: 55282 - RNA, 27 nt, synthetic construct
  misc_feature 1..27: note = Protein SON (1526-1534)
  source 1..27: mol_type = other RNA
agcgagcacggcatcaacattgacctg

SEQ ID NO: 55283 - RNA, 33 nt, synthetic construct
  misc_feature 1..33: note = Spectrin beta chain, non-erythrocytic 1 (1024-1034)
  source 1..33: mol_type = other RNA
agcgagcaccccgaccaggcccaagctatcctg

SEQ ID NO: 55284 - RNA, 36 nt, synthetic construct
  misc_feature 1..36: note = Copper transport protein ATOX1 (44-55)
  source 1..36: mol_type = other RNA
agcgagcactccatggacaccctgctcgccacactt

SEQ ID NO: 55285 - RNA, 27 nt, synthetic construct
  misc_feature 1..27: note = Coatomer subunit zeta-1 (34-42)
  source 1..27: mol_type = other RNA
agcgagatcgccctgctcgaaggcctt

SEQ ID NO: 55286 - RNA, 30 nt, synthetic construct
  misc_feature 1..30: note = Cyclin-dependent kinase 1 (208-217)
  source 1..30: mol_type = other RNA
agcgagatcgaccagctgttcagaattttt

SEQ ID NO: 55287 - RNA, 27 nt, synthetic construct
  misc_feature 1..27: note = Rho guanine nucleotide exchange factor 18 (689-697)
  source 1..27: mol_type = other RNA
agcgagatcgaaggcattcagtccctg

SEQ ID NO: 55288 - RNA, 30 nt, synthetic construct
  misc_feature 1..30: note = Neuroblast differentiation-associated protein AHNAK (845-854)
  source 1..30: mol_type = other RNA
agcgagatcaaggtgcccgacgtcgaactg

SEQ ID NO: 55289 - RNA, 30 nt, synthetic construct
  misc_feature 1..30: note = Eukaryotic translation initiation factor 4B (442-451)
  source 1..30: mol_type = other RNA
agcgagaagtccctggaaaacgagaccctc

SEQ ID NO: 55290 - RNA, 27 nt, synthetic construct
  misc_feature 1..27: note = 116 kDa U5 small nuclear ribonucleoprotein component (91-99)
  source 1..27: mol_type = other RNA
agcgagctgatcagaaacgtgaccctc

SEQ ID NO: 55291 - RNA, 33 nt, synthetic construct
  misc_feature 1..33: note = E3 ubiquitin-protein ligase UBR5 (466-476)
  source 1..33: mol_type = other RNA
agcgagctgcagggcgaaagaatcgtgtccctc

SEQ ID NO: 55292 - RNA, 27 nt, synthetic construct
  misc_feature 1..27: note = Death-associated protein kinase 3 (429-437)
  source 1..27: mol_type = other RNA
agcgagatgagattcgtgcaggacctg

SEQ ID NO: 55293 - RNA, 27 nt, synthetic construct
  misc_feature 1..27: note = Leucine-rich repeat-containing protein 47 (315-323)
  source 1..27: mol_type = other RNA
agcgagaaccccgtgcctctgaccgtc

SEQ ID NO: 55294 - RNA, 27 nt, synthetic construct
  misc_feature 1..27: note = Protein SON (197-205)
  source 1..27: mol_type = other RNA
agcgagccccacatcctggaaaccctc

SEQ ID NO: 55295 - RNA, 27 nt, synthetic construct
  misc_feature 1..27: note = Programmed cell death protein 5 (88-96)
  source 1..27: mol_type = other RNA
agcgagcagggcctgatcgaaattctc

SEQ ID NO: 55296 - RNA, 27 nt, synthetic construct
  misc_feature 1..27: note = DNA replication licensing factor MCM4 (142-150)
  source 1..27: mol_type = other RNA
agcgagcagtccctgggccaaaagctc

SEQ ID NO: 55297 - RNA, 27 nt, synthetic construct
  misc_feature 1..27: note = Guanylate-binding protein 1 (360-368)
  source 1..27: mol_type = other RNA
agcgagagagaagccatcgaggtgttc

SEQ ID NO: 55298 - RNA, 27 nt, synthetic construct
  misc_feature 1..27: note = Signal peptidase complex catalytic subunit SEC11C (57-65)
  source 1..27: mol_type = other RNA
agcgagtcccccatcgtggtcgttctg

SEQ ID NO: 55299 - RNA, 27 nt, synthetic construct
  misc_feature 1..27: note = Actin-related protein 2/3 complex subunit 1B (242-250)
  source 1..27: mol_type = other RNA
agcgagaccctgcccctccttgccctg

SEQ ID NO: 55300 - RNA, 36 nt, synthetic construct
  misc_feature 1..36: note = Annexin A2 (296-307)
  source 1..36: mol_type = other RNA
agcgaggtggacatgctgaagatcagatccgaattc

SEQ ID NO: 55301 - RNA, 27 nt, synthetic construct
  misc_feature 1..27: note = Proteasome maturation protein (124-132)
  source 1..27: mol_type = other RNA
agcgaggtgatgggcgaaccccacctg

SEQ ID NO: 55302 - RNA, 27 nt, synthetic construct
  misc_feature 1..27: note = AP-1 complex subunit beta-1 (347-355)
  source 1..27: mol_type = other RNA
agccaggccaacatcgctcaagtgctg

SEQ ID NO: 55303 - RNA, 27 nt, synthetic construct
  misc_feature 1..27: note = Rab GTPase-activating protein 1-like (162-170)
  source 1..27: mol_type = other RNA
agccagtaccccttccctgtgaccctg

SEQ ID NO: 55304 - RNA, 33 nt, synthetic construct
  misc_feature 1..33: note = Probable ATP-dependent RNA helicase DDX41 (118-128)
  source 1..33: mol_type = other RNA
agcgtggccgagggcagagctctgatgtccgtc

SEQ ID NO: 55305 - RNA, 27 nt, synthetic construct
  misc_feature 1..27: note = General vesicular transport factor p115 (18-26)
  source 1..27: mol_type = other RNA
accgaggccgaaacaatccagaagctg

SEQ ID NO: 55306 - RNA, 27 nt, synthetic construct
  misc_feature 1..27: note = SH2 domain-containing protein 3C (769-777)
  source 1..27: mol_type = other RNA
accgagcacggcgtggaagtcgttctg

SEQ ID NO: 55307 - RNA, 30 nt, synthetic construct
  misc_feature 1..30: note = Nucleolin (452-461)
  source 1..30: mol_type = other RNA
accgagatcgacggcagaagcatttccctg

SEQ ID NO: 55308 - RNA, 27 nt, synthetic construct
  misc_feature 1..27: note = Adenosylhomocysteinase (244-252)
  source 1..27: mol_type = other RNA
accgagatcgaccccattaacgccctg

SEQ ID NO: 55309 - RNA, 30 nt, synthetic construct
  misc_feature 1..30: note = Polyadenylate-binding protein-interacting protein 1 (66-75)
  source 1..30: mol_type = other RNA
accgagatcgaacagttcgccgagacactg

SEQ ID NO: 55310 - RNA, 27 nt, synthetic construct
  misc_feature 1..27: note = Suppressor of SWI4 1 homolog (72-80)
  source 1..27: mol_type = other RNA
accgagatcggccccagaatgacactg

SEQ ID NO: 55311 - RNA, 33 nt, synthetic construct
  misc_feature 1..33: note = Microtubule-associated protein 4 (428-438)
  source 1..33: mol_type = other RNA
accgagatcagctccgccgaaaaggtggctctg

SEQ ID NO: 55312 - RNA, 24 nt, synthetic construct
  misc_feature 1..24: note = Histone H3.1 (59-66)
  source 1..24: mol_type = other RNA
accgagctgctcatcagaaagctt

SEQ ID NO: 55313 - RNA, 30 nt, synthetic construct
  misc_feature 1..30: note = Chromodomain-helicase-DNA-binding protein 4 (1265-1274)
  source 1..30: mol_type = other RNA
accgagctgcagggcatgaacgaatacctc

SEQ ID NO: 55314 - RNA, 33 nt, synthetic construct
  misc_feature 1..33: note = Transcription factor BTF3 (106-116)
  source 1..33: mol_type = other RNA
accgagatgctgcccagcatcctcaaccagctt

SEQ ID NO: 55315 - RNA, 27 nt, synthetic construct
  misc_feature 1..27: note = Probable ATP-dependent RNA helicase DDX6 (6-14)
  source 1..27: mol_type = other RNA
accgagaaccccgtgatcatgggcctg

SEQ ID NO: 55316 - RNA, 27 nt, synthetic construct
  misc_feature 1..27: note = Poly(rC)-binding protein 1 (6-14)
  source 1..27: mol_type = other RNA
accgagagcggcctgaacgtgacactc

SEQ ID NO: 55317 - RNA, 27 nt, synthetic construct
  misc_feature 1..27: note = Steroid hormone receptor ERR1 (88-96)
  source 1..27: mol_type = other RNA
accgagacagaaccccctgtggccctg

SEQ ID NO: 55318 - RNA, 24 nt, synthetic construct
  misc_feature 1..24: note = Elongation factor 1-alpha 1 (287-294)
  source 1..24: mol_type = other RNA
accgaggtgaagagcgtcgaaatg

SEQ ID NO: 55319 - RNA, 27 nt, synthetic construct
  misc_feature 1..27: note = Pinin (538-546)
  source 1..27: mol_type = other RNA
accgaggtgcccgtcgaacctgttctg

SEQ ID NO: 55320 - RNA, 27 nt, synthetic construct
  misc_feature 1..27: note = Cytoskeleton-associated protein 4 (55-63)
  source 1..27: mol_type = other RNA
accgaggtgagagaactggtcagcctc

SEQ ID NO: 55321 - RNA, 27 nt, synthetic construct
  misc_feature 1..27: note = Asparagine synthetase (glutamine-hydrolyzing) (269-277)
  source 1..27: mol_type = other RNA
accctgctcaagcagcttaaagaggcc

SEQ ID NO: 55322 - RNA, 33 nt, synthetic construct
  misc_feature 1..33: note = Integrin beta-7 (702-712)
  source 1..33: mol_type = other RNA
gtggaggacgatgccagaggcaccgtcgttctg

SEQ ID NO: 55323 - RNA, 30 nt, synthetic construct; identical to SEQ ID NO: 31096
  misc_feature 1..30: note = Eukaryotic translation initiation factor 3 subunit A (253-262)
  source 1..30: mol_type = other RNA

SEQ ID NO: 55324 - RNA, 33 nt, synthetic construct
  misc_feature 1..33: note = Serine/threonine-protein phosphatase 2A 65 kDa regulatory subunit A alpha isoform (436-446)
  source 1..33: mol_type = other RNA
gtggagttctttgacgaaaagctgaacagcctc

SEQ ID NO: 55325 - RNA, 27 nt, synthetic construct
  misc_feature 1..27: note = F-box only protein 7 (135-143)
  source 1..27: mol_type = other RNA
gtggagggccaggtcccccacagcctg

SEQ ID NO: 55326 - RNA, 27 nt, synthetic construct
  misc_feature 1..27: note = GPN-loop GTPase 2 (169-177)
  source 1..27: mol_type = other RNA
gtggagctgccccacatcaacctcctt

SEQ ID NO: 55327 - RNA, 27 nt, synthetic construct
  misc_feature 1..27: note = Melanoma-associated antigen 12 (279-287)
  source 1..27: mol_type = other RNA
gtggagaccagctacgtcaaggttctg

SEQ ID NO: 55328 - RNA, 27 nt, synthetic construct
  misc_feature 1..27: note = Melanoma-associated antigen D2 (37-45)
  source 1..27: mol_type = other RNA
gtggaggtccccgaaacccctaaggcc

SEQ ID NO: 55329 - RNA, 27 nt, synthetic construct
  misc_feature 1..27: note = Vigilin (656-664)
  source 1..27: mol_type = other RNA
gtggaggtcagcatccccgccaagctg

SEQ ID NO: 55330 - RNA, 27 nt, synthetic construct
  misc_feature 1..27: note = Basic leucine zipper and W2 domain-containing protein 2 (305-313)
  source 1..27: mol_type = other RNA
gtggagtggaacaagaaagaagagctg

SEQ ID NO: 55331 - RNA, 30 nt, synthetic construct
  misc_feature 1..30: note = Stomatin-like protein 3 (151-160)
  source 1..30: mol_type = other RNA
gtgctgggcacccagacactcagccaaatc

SEQ ID NO: 55332 - RNA, 27 nt, synthetic construct
  misc_feature 1..27: note = Condensin complex subunit 1 (162-170)
  source 1..27: mol_type = other RNA
tgggaggaagagagacagcccatcctg

SEQ ID NO: 55333 - RNA, 27 nt, synthetic construct
  misc_feature 1..27: note = Catenin beta-1 (66-74)
  source 1..27: mol_type = other RNA
tgggagcagggcttcagccaatccttt

SEQ ID NO: 55334 - RNA, 27 nt, synthetic construct
  misc_feature 1..27: note = Myosin light polypeptide 6 (141-149)
  source 1..27: mol_type = other RNA
tacgaggaactggtgagaatggtcctc

SEQ ID NO: 55335 - RNA, 30 nt, synthetic construct; identical to SEQ ID NO: 31108
  misc_feature 1..30: note = Nucleophosmin (67-76)
  source 1..30: mol_type = other RNA

SEQ ID NO: 55336 - RNA, 27 nt, synthetic construct
  misc_feature 1..27: note = 60S ribosomal protein L6 (240-248)
  source 1..27: mol_type = other RNA
tacgagatcaccgaacagagaaagatt

SEQ ID NO: 55337 - RNA, 30 nt, synthetic construct
  misc_feature 1..30: note = Septin-11 (95-104)
  source 1..30: mol_type = other RNA
tacgagctgcaggaaagcaacgtgagactc

SEQ ID NO: 55338 - RNA, 30 nt, synthetic construct; identical to SEQ ID NO: 31111
  misc_feature 1..30: note = Glutamine-dependent NAD(+) synthetase (58-67)
  source 1..30: mol_type = other RNA

SEQ ID NO: 55339 - RNA, 36 nt, synthetic construct
  misc_feature 1..36: note = Mitogen-activated protein kinase kinase kinase 5 (675-686)
  source 1..36: mol_type = other RNA
tacgagtatgacgaaaacggcgatagagtggtcctg

SEQ ID NO: 55340 - RNA, 27 nt, synthetic construct
  misc_feature 1..27: note = 60S ribosomal protein L7a (158-166)
  source 1..27: mol_type = other RNA
gcccacgacgtggatcccatcgagctg

SEQ ID NO: 55341 - RNA, 30 nt, synthetic construct
  misc_feature 1..30: note = 40S ribosomal protein S29 (47-56)
  source 1..30: mol_type = other RNA
gccaaggacatcggcttcattaaactggat

SEQ ID NO: 55342 - RNA, 24 nt, synthetic construct
  misc_feature 1..24: note = Long-chain-fatty-acid-CoA ligase 4 (42-49)
  source 1..24: mol_type = other RNA
ttcgaccacgccgtgagcaagttt

SEQ ID NO: 55343 - RNA, 27 nt, synthetic construct
  misc_feature 1..27: note = Eukaryotic translation initiation factor 3 subunit L (478-486)
  source 1..27: mol_type = other RNA
ttcctggacctcaccgagcaggaattt

SEQ ID NO: 55344 - RNA, 27 nt, synthetic construct
  misc_feature 1..27: note = Ubiquitin-like modifier-activating enzyme 1 (637-645)
  source 1..27: mol_type = other RNA
ttccccaacgccatcgagcacaccctg

SEQ ID NO: 55345 - RNA, 27 nt, synthetic construct
  misc_feature 1..27: note = Bcl-2-associated transcription factor 1 (338-346)
  source 1..27: mol_type = other RNA
ttcaccgacgaggaaagcagagtgttt

SEQ ID NO: 55346 - RNA, 30 nt, synthetic construct
  misc_feature 1..30: note = Bcl-2-associated transcription factor 1 (338-347)
  source 1..30: mol_type = other RNA
ttcaccgacgaggaaagcagagtgtttctg

SEQ ID NO: 55347 - RNA, 27 nt, synthetic construct
  misc_feature 1..27: note = Disco-interacting protein 2 homolog B (444-452)
  source 1..27: mol_type = other RNA
ttctacgacgagagaatcgtggtcgtt

SEQ ID NO: 55348 - RNA, 27 nt, synthetic construct
  misc_feature 1..27: note = WD repeat-containing protein 46 (188-196)
  source 1..27: mol_type = other RNA
cacttcgacctgaacctcagacagttt

SEQ ID NO: 55349 - RNA, 30 nt, synthetic construct
  misc_feature 1..30: note = HLA class I histocompatibility antigen, A-24 alpha chain (216-225)
  source 1..30: mol_type = other RNA
caccccatcagcgaccatgaggccaccctg

SEQ ID NO: 55350 - RNA, 27 nt, synthetic construct
  misc_feature 1..27: note = Integrator complex subunit 2 (1006-1014)
  source 1..27: mol_type = other RNA
atcgccgaccccaacattgctaagctg

SEQ ID NO: 55351 - RNA, 27 nt, synthetic construct
  misc_feature 1..27: note = Heterogeneous nuclear ribonucleoprotein M (188-196)
  source 1..27: mol_type = other RNA
atccccaacgagattatacacgccctg

SEQ ID NO: 55352 - RNA, 27 nt, synthetic construct
  misc_feature 1..27: note = UPF0428 protein CXorf56 (100-108)
  source 1..27: mol_type = other RNA
atcgtggacggcgccgtcgttaagttc

SEQ ID NO: 55353 - RNA, 27 nt, synthetic construct
  misc_feature 1..27: note = Long-chain-fatty-acid-CoA ligase 4 (41-49)
  source 1..27: mol_type = other RNA
ctgttcgaccacgccgtgagcaagttt

SEQ ID NO: 55354 - RNA, 27 nt, synthetic construct
  misc_feature 1..27: note = Cleavage stimulation factor subunit 1 (370-378)
  source 1..27: mol_type = other RNA
ctgcccgacgagagaaccatcagcctc

SEQ ID NO: 55355 - RNA, 30 nt, synthetic construct
  misc_feature 1..30: note = Nucleolar transcription factor 1 (365-374)
  source 1..30: mol_type = other RNA
ctgcccgaggaagagcagcaaagagtgctc

SEQ ID NO: 55356 - RNA, 27 nt, synthetic construct
  misc_feature 1..27: note = Microtubule-associated protein 4 (308-316)
  source 1..27: mol_type = other RNA
ctgcccaccgagaaggaagtggccctc

SEQ ID NO: 55357 - RNA, 24 nt, synthetic construct
  misc_feature 1..24: note = Fructose-bisphosphate aldolase A (271-278)
  source 1..24: mol_type = other RNA
ctgagcgaccaccatatctacctc

SEQ ID NO: 55358 - RNA, 27 nt, synthetic construct
  misc_feature 1..27: note = MMS19 nucleotide excision repair protein homolog (636-644)
  source 1..27: mol_type = other RNA
atgcccgagaaggaacctagcgtgctg

SEQ ID NO: 55359 - RNA, 27 nt, synthetic construct
  misc_feature 1..27: note = AF4/FMR2 family member 4 (1053-1061)
  source 1..27: mol_type = other RNA
atgcccagccctgtgtccccaaagctg

SEQ ID NO: 55360 - RNA, 27 nt, synthetic construct
  misc_feature 1..27: note = Ras-related C3 botulinum toxin substrate 1 (45-53)
  source 1..27: mol_type = other RNA
atggtggacggcaagcccgtcaacctg

SEQ ID NO: 55361 - RNA, 27 nt, synthetic construct
  misc_feature 1..27: note = Bone morphogenetic protein receptor type-1B (507-515)
  source 1..27: mol_type = other RNA
aaccccgccagcagactgaccgctctc

SEQ ID NO: 55362 - RNA, 27 nt, synthetic construct
  misc_feature 1..27: note = Multiple epidermal growth factor-like domains protein 8 (2530-2538)
  source 1..27: mol_type = other RNA
cccgcccctccaccgccccctccaccc

SEQ ID NO: 55363 - RNA, 30 nt, synthetic construct
  misc_feature 1..30: note = Keratin, type II cytoskeletal 1 (338-347)
  source 1..30: mol_type = other RNA
agcatggacaacaatagatccctggatctc

SEQ ID NO: 55364 - RNA, 27 nt, synthetic construct
  misc_feature 1..27: note = Nuclear pore complex protein Nup155 (220-228)
  source 1..27: mol_type = other RNA
agcaccgacaacggcagaatcttcctg

SEQ ID NO: 55365 - RNA, 27 nt, synthetic construct
  misc_feature 1..27: note = Coatomer subunit epsilon (111-119)
  source 1..27: mol_type = other RNA
agcgtggacgtcaccaacacaactttc

SEQ ID NO: 55366 - RNA, 27 nt, synthetic construct
  misc_feature 1..27: note = Fatty acid synthase (545-553)
  source 1..27: mol_type = other RNA
accttcgacgatatcgtgcacagcttt

SEQ ID NO: 55367 - RNA, 27 nt, synthetic construct
  misc_feature 1..27: note = Tumor suppressor candidate 3 (165-173)
  source 1..27: mol_type = other RNA
accttcgacctgcagagaatcggcttt

SEQ ID NO: 55368 - RNA, 27 nt, synthetic construct
  misc_feature 1..27: note = Rho GTPase-activating protein 24 (436-444)
  source 1..27: mol_type = other RNA
acctacgacaacgtgcaccagcaattc

SEQ ID NO: 55369 - RNA, 27 nt, synthetic construct
  misc_feature 1..27: note = ATP-dependent RNA helicase A (697-705)
  source 1..27: mol_type = other RNA
gtgttcgaccccgtccctgttggcgtg

SEQ ID NO: 55370 - RNA, 30 nt, synthetic construct
  misc_feature 1..30: note = 10 kDa heat shock protein, mitochondrial (81-90)
  source 1..30: mol_type = other RNA
gtgctggacgataaggactacttcctcttt

SEQ ID NO: 55371 - RNA, 30 nt, synthetic construct
  misc_feature 1..30: note = Metastasis-associated protein MTA3 (135-144)
  source 1..30: mol_type = other RNA
gtgtacgaccccagcctgaagaccctcctt

SEQ ID NO: 55372 - RNA, 24 nt, synthetic construct
  misc_feature 1..24: note = ADP-ribosylation factor GTPase-activating protein 3 (312-319)
  source 1..24: mol_type = other RNA
tacttcgacgagcccgtggaactg

SEQ ID NO: 55373 - RNA, 27 nt, synthetic construct
  misc_feature 1..27: note = Transcription factor HES-1 (155-163)
  source 1..27: mol_type = other RNA
taccccggccagcctcacccagccctg

SEQ ID NO: 55374 - RNA, 27 nt, synthetic construct
  misc_feature 1..27: note = Nuclear nucleic acid-binding protein C1D (10-18)
  source 1..27: mol_type = other RNA
taccccgtggagatccacgaatatctg

SEQ ID NO: 55375 - RNA, 27 nt, synthetic construct
  misc_feature 1..27: note = Pecanex-like protein 1 (22-30)
  source 1..27: mol_type = other RNA
tactatgacccccaccaggccaccttc

SEQ ID NO: 55376 - RNA, 27 nt, synthetic construct
  misc_feature 1..27: note = ATP-binding cassette sub-family F member 3 (500-508)
  source 1..27: mol_type = other RNA
tactatgaccccaagcacgtgatcttc

SEQ ID NO: 55377 - RNA, 30 nt, synthetic construct
  misc_feature 1..30: note = Melanoma antigen preferentially expressed in tumors (300-309)
  source 1..30: mol_type = other RNA
gccctgtacgtggacagcctcttctttctt

SEQ ID NO: 55378 - RNA, 27 nt, synthetic construct
  misc_feature 1..27: note = Fatty acid synthase (986-994)
  source 1..27: mol_type = other RNA
gcccaggctgaggtgtacaaggaactg

SEQ ID NO: 55379 - RNA, 30 nt, synthetic construct
  misc_feature 1..30: note = 2',3'-cyclic-nucleotide 3'-phosphodiesterase (249-258)
  source 1..30: mol_type = other RNA
gcccagcaagacgtgctgaagaaaagctac

SEQ ID NO: 55380 - RNA, 24 nt, synthetic construct
  misc_feature 1..24: note = Cytochrome c oxidase subunit 2 (156-163)
  source 1..24: mol_type = other RNA
agccaggacgtgctgcactcctgg

SEQ ID NO: 55381 - RNA, 27 nt, synthetic construct
  misc_feature 1..27: note = RNA exonuclease 4 (126-134)
  source 1..27: mol_type = other RNA
gccagagtgagcatcgtcaaccagtac

SEQ ID NO: 55382 - RNA, 30 nt, synthetic construct
  misc_feature 1..30: note = RNA-binding protein 14 (646-655)
  source 1..30: mol_type = other RNA
gccagatacagcggctcctataacgactac

SEQ ID NO: 55383 - RNA, 30 nt, synthetic construct
  misc_feature 1..30: note = Talin-1 (1272-1281)
  source 1..30: mol_type = other RNA
ggcagattcgggcaggactttagcaccttc

SEQ ID NO: 55384 - RNA, 27 nt, synthetic construct
  misc_feature 1..27: note = YTH domain-containing family protein 2 (30-38)
  source 1..27: mol_type = other RNA
ggcagagtgttcatcattaagagctac

SEQ ID NO: 55385 - RNA, 27 nt, synthetic construct
  misc_feature 1..27: note = ATP-dependent RNA helicase DDX42 (228-236)
  source 1..27: mol_type = other RNA
aagagattcggcaaagcctacaacctg

SEQ ID NO: 55386 - RNA, 27 nt, synthetic construct
  misc_feature 1..27: note = Eukaryotic translation initiation factor 3 subunit E (73-81)
  source 1..27: mol_type = other RNA
aagagaaccacagtggtcgcccagctg

SEQ ID NO: 55387 - RNA, 27 nt, synthetic construct
  misc_feature 1..27: note = Proteasome subunit beta type-5 (113-121)
  source 1..27: mol_type = other RNA
agaagggccatctaccaggctacctat

SEQ ID NO: 55388 - RNA, 27 nt, synthetic construct
  misc_feature 1..27: note = DNA replication licensing factor MCM5 (602-610)
  source 1..27: mol_type = other RNA
agaaggagctccatccccattaccgtg

SEQ ID NO: 55389 - RNA, 39 nt, synthetic construct
  misc_feature 1..39: note = HLA class I histocompatibility antigen, B-15 alpha chain (193-205)
  source 1..39: mol_type = other RNA
agaaggtacctggagaacggcaaggaaaccctccagcgg

SEQ ID NO: 55390 - RNA, 30 nt, synthetic construct
  misc_feature 1..30: note = Probable bifunctional methylenetetrahydrofolate dehydrogenase/cyclohydrolase 2 (246-255)
  source 1..30: mol_type = other RNA
cacagatacacccccaaggagcagctgaaa

SEQ ID NO: 55391 - RNA, 27 nt, synthetic construct
  misc_feature 1..27: note = 60S ribosomal protein L7 (199-207)
  source 1..27: mol_type = other RNA
aagagattcaaagaggccaacaatttt

SEQ ID NO: 55392 - RNA, 45 nt, synthetic construct
  misc_feature 1..45: note = Heat shock 70 kDa protein 1-like (171-185)
  source 1..45: mol_type = other RNA
gtgctgagaatcattaacgagcccaccgccgctgcaatagcctac

SEQ ID NO: 55393 - RNA, 27 nt, synthetic construct
  misc_feature 1..27: note = Polypyrimidine tract-binding protein 1 (169-177)
  source 1..27: mol_type = other RNA
gccgctgtggacgcaggcatggccatg

SEQ ID NO: 55394 - RNA, 33 nt, synthetic construct
  misc_feature 1..33: note = HLA class I histocompatibility antigen, alpha chain E (137-147)
  source 1..33: mol_type = other RNA
ttcgcctacgacggcaaggattatctgaccctc

SEQ ID NO: 55395 - RNA, 42 nt, synthetic construct
  misc_feature 1..42: note = HLA class I histocompatibility antigen, A-29 alpha chain (21-34)
  source 1..42: mol_type = other RNA
ttcatcgccgtgggctacgtcgacgatacccagtttgttaga

SEQ ID NO: 55396 - RNA, 30 nt, synthetic construct
  misc_feature 1..30: note = Ubiquitin-like protein ISG15 (45-54)
  source 1..30: mol_type = other RNA
ctggccgtgcaccccagcggcgtcgctctc

SEQ ID NO: 55397 - RNA, 27 nt, synthetic construct
  misc_feature 1..27: note = N-acetyltransferase 8 (174-182)
  source 1..27: mol_type = other RNA
atcctggacaccggcacaattcagctc

SEQ ID NO: 55398 - RNA, 27 nt, synthetic construct
  misc_feature 1..27: note = Protein prune homolog 2 (1910-1918)
  source 1..27: mol_type = other RNA
gccctgttcgacggcgatccccacctc

SEQ ID NO: 55399 - RNA, 27 nt, synthetic construct
  misc_feature 1..27: note = Phosphatidylinositol 4,5-bisphosphate 3-kinase catalytic subunit delta isoform (477-485)
  source 1..27: mol_type = other RNA
gaggtggccccccaccctgtctactat

SEQ ID NO: 55400 - RNA, 27 nt, synthetic construct
  misc_feature 1..27: note = Chloride intracellular channel protein 1 (167-175)
  source 1..27: mol_type = other RNA
ttcctggacggcaacgagctcaccctt

SEQ ID NO: 55401 - RNA, 27 nt, synthetic construct
  misc_feature 1..27: note = Carbonic anhydrase 9 (254-262)
  source 1..27: mol_type = other RNA
cacctgagcaccgccttcgctagagtg

SEQ ID NO: 55402 - RNA, 27 nt, synthetic construct
  misc_feature 1..27: note = 40S ribosomal protein S16 (49-57)
  source 1..27: mol_type = other RNA
aagctgctcgagcccgtgcttctgttg

SEQ ID NO: 55403 - RNA, 27 nt, synthetic construct
  misc_feature 1..27: note = Glutathione peroxidase 1 (40-48)
  source 1..27: mol_type = other RNA
ctgctcatcgagaacgtggccagcctt

SEQ ID NO: 55404 - RNA, 27 nt, synthetic construct
  misc_feature 1..27: note = Proliferating cell nuclear antigen (228-236)
  source 1..27: mol_type = other RNA
agcatgtccgccgacgtgcccctggtc

SEQ ID NO: 55405 - RNA, 39 nt, synthetic construct
  misc_feature 1..39: note = Dermokine (410-422)
  source 1..39: mol_type = other RNA
gccatcattgagggcgctgacgcaagctccctgcagaag

SEQ ID NO: 55406 - RNA, 33 nt, synthetic construct
  misc_feature 1..33: note = PRELI domain-containing protein 1, mitochondrial (142-152)
  source 1..33: mol_type = other RNA
gccgtgcaggagttcggcctggctagatttaag

SEQ ID NO: 55407 - RNA, 27 nt, synthetic construct
  misc_feature 1..27: note = Putative WAS protein family homolog 3 (42-50)
  source 1..27: mol_type = other RNA
aaggtgagcggcgacatcttctccaga

SEQ ID NO: 55408 - RNA, 39 nt, synthetic construct
  misc_feature 1..39: note = Mitochondrial import inner membrane translocase subunit Tim23 (156-168)
  source 1..39: mol_type = other RNA
accgtggccgctggcacaatgactgggatgctgtacaag

SEQ ID NO: 55409 - RNA, 33 nt, synthetic construct
  misc_feature 1..33: note = Tryptophan-tRNA ligase, mitochondrial (162-172)
  source 1..33: mol_type = other RNA
gtgctgcaggccgctgacatcctcctttacaag

SEQ ID NO: 55410 - RNA, 27 nt, synthetic construct
  misc_feature 1..27: note = Cytochrome c oxidase subunit 6A1, mitochondrial (29-37)
  source 1..27: mol_type = other RNA
gtgagcatgctgaacgtctacctcaag

SEQ ID NO: 55411 - RNA, 27 nt, synthetic construct
  misc_feature 1..27: note = 40S ribosomal protein S4, X isoform (171-179)
  source 1..27: mol_type = other RNA
ggcagaatcggggtgattaccaacagg

SEQ ID NO: 55412 - RNA, 51 nt, synthetic construct
  misc_feature 1..51: note = SLAM family member 6 (103-119)
  source 1..51: mol_type = other RNA
gacaccggcagctacagagcccagatctccacaaagacttctgctaaactg

SEQ ID NO: 55413 - RNA, 45 nt, synthetic construct
  misc_feature 1..45: note = Transferrin receptor protein 1 (680-694)
  source 1..45: mol_type = other RNA
agagtggagtaccacttcctgagcccctatgtctcccctaaggaa

SEQ ID NO: 55414 - RNA, 54 nt, synthetic construct
  misc_feature 1..54: note = Transferrin receptor protein 1 (680-697)
  source 1..54: mol_type = other RNA
agagtggagtaccacttcctgagcccctatgtctcccctaaggaatctccattt

SEQ ID NO: 55415 - RNA, 45 nt, synthetic construct
  misc_feature 1..45: note = HLA class I histocompatibility antigen, A-1 alpha chain (28-42)
  source 1..45: mol_type = other RNA
gacgatacccagttcgtgagatttgacagcgatgccgcttcccaa

SEQ ID NO: 55416 - RNA, 48 nt, synthetic construct
  misc_feature 1..48: note = HLA class I histocompatibility antigen, A-2 alpha chain (28-43)
  source 1..48: mol_type = other RNA
gacgatacccagttcgtgagatttgacagcgatgccgcttcccaaagg

SEQ ID NO: 55417 - RNA, 51 nt, synthetic construct
  misc_feature 1..51: note = HLA class I histocompatibility antigen, A-2 alpha chain (28-44)
  source 1..51: mol_type = other RNA
gacgatacccagttcgtgagatttgacagcgatgccgcttcccaaaggatg

SEQ ID NO: 55418 - RNA, 54 nt, synthetic construct
  misc_feature 1..54: note = HLA class I histocompatibility antigen, A-2 alpha chain (28-45)
  source 1..54: mol_type = other RNA
gacgatacccagttcgtgagatttgacagcgatgccgcttcccaaaggatggag

SEQ ID NO: 55419 - RNA, 51 nt, synthetic construct
  misc_feature 1..51: note = HLA class I histocompatibility antigen, Cw-7 alpha chain (153-169)
  source 1..51: mol_type = other RNA
gacctgagaagctggaccgccgctgatacagcagcccagatcactcaaagg

SEQ ID NO: 55420 - RNA, 39 nt, synthetic construct
  misc_feature 1..39: note = HLA class I histocompatibility antigen, alpha chain E (140-152)
  source 1..39: mol_type = other RNA
gacctgagaagctggaccgccgtggatacagctgcacag

SEQ ID NO: 55421 - RNA, 48 nt, synthetic construct
  misc_feature 1..48: note = HLA class I histocompatibility antigen, A-2 alpha chain (29-44)
  source 1..48: mol_type = other RNA
gacacccagttcgtgagatttgatagcgacgccgcttcccaaaggatg

SEQ ID NO: 55422 - RNA, 54 nt, synthetic construct
  misc_feature 1..54: note = HLA class I histocompatibility antigen, Cw-7 alpha chain (152-169)
  source 1..54: mol_type = other RNA
gaggacctgagaagctggaccgccgctgatacagcagcccagatcactcaaagg

SEQ ID NO: 55423 - RNA, 54 nt, synthetic construct
  misc_feature 1..54: note = HLA class I histocompatibility antigen, B-15 alpha chain (152-169)
  source 1..54: mol_type = other RNA
gaggacctgagctcctggaccgccgctgatacagcagcccagatcactcaaaga

SEQ ID NO: 55424 - RNA, 36 nt, synthetic construct
  misc_feature 1..36: note = HLA class I histocompatibility antigen, A-2 alpha chain (32-43)
  source 1..36: mol_type = other RNA
ttcgtgagatttgacagcgatgccgcttcccagagg

SEQ ID NO: 55425 - RNA, 45 nt, synthetic construct
  misc_feature 1..45: note = Heat shock cognate 71 kDa protein (484-498)
  source 1..45: mol_type = other RNA
ggcatcctgaacgtgagcgccgtcgacaagtccaccgggaaagag

SEQ ID NO: 55426 - RNA, 42 nt, synthetic construct
  misc_feature 1..42: note = HLA class I histocompatibility antigen, B-15 alpha chain (154-167)
  source 1..42: mol_type = other RNA
ctgagctcctggaccgccgctgacacagcagcccagatcact

SEQ ID NO: 55427 - RNA, 48 nt, synthetic construct
  misc_feature 1..48: note = HLA class I histocompatibility antigen, B-15 alpha chain (154-169)
  source 1..48: mol_type = other RNA
ctgagctcctggaccgccgctgacacagcagcccagatcactcaaaga

SEQ ID NO: 55428 - RNA, 54 nt, synthetic construct
  misc_feature 1..54: note = HLA class I histocompatibility antigen, Cw-7 alpha chain (151-168)
  source 1..54: mol_type = other RNA
aacgaggacctgagaagctggaccgccgctgatacagcagcccagatcactcaa

SEQ ID NO: 55429 - RNA, 42 nt, synthetic construct
  misc_feature 1..42: note = HLA class I histocompatibility antigen, B-15 alpha chain (155-168)
  source 1..42: mol_type = other RNA
agctcctggaccgccgctgacacagcagcccagatcactcaa

SEQ ID NO: 55430 - RNA, 42 nt, synthetic construct
  misc_feature 1..42: note = HLA class I histocompatibility antigen, B-15 alpha chain (55-68)
  source 1..42: mol_type = other RNA
acccagttcgtgagatttgacagcgatgccgcttcccccagg

SEQ ID NO: 55431 - RNA, 42 nt, synthetic construct
  misc_feature 1..42: note = HLA class I histocompatibility antigen, A-2 alpha chain (30-43)
  source 1..42: mol_type = other RNA
acccagttcgtgagatttgacagcgatgccgcttcccaaagg

SEQ ID NO: 55432 - RNA, 48 nt, synthetic construct
  misc_feature 1..48: note = HLA class I histocompatibility antigen, A-1 alpha chain (27-42)
  source 1..48: mol_type = other RNA
gtggacgatacccagttcgtcagatttgacagcgatgccgcttcccaa

SEQ ID NO: 55433 - RNA, 54 nt, synthetic construct
  misc_feature 1..54: note = HLA class I histocompatibility antigen, A-2 alpha chain (27-44)
  source 1..54: mol_type = other RNA
gtggacgatacccagttcgtcagatttgacagcgatgccgcttcccaaaggatg

SEQ ID NO: 55434 - RNA, 27 nt, synthetic construct
  misc_feature 1..27: note = Ankyrin repeat domain-containing protein 17 (744-752)
  source 1..27: mol_type = other RNA
gcccccagagtgcctgtccaggctctg

SEQ ID NO: 55435 - RNA, 27 nt, synthetic construct
  misc_feature 1..27: note = Probable ubiquitin carboxyl-terminal hydrolase FAF-Y (2050-2058)
  source 1..27: mol_type = other RNA
gccagattcctgtttaccacaggcttc

SEQ ID NO: 55436 - RNA, 42 nt, synthetic construct
  misc_feature 1..42: note = Transferrin receptor protein 1 (15-28)
  source 1..42: mol_type = other RNA
ggcgagcccctgagctacaccagattctccctcgccaggcag

SEQ ID NO: 55437 - RNA, 48 nt, synthetic construct
  misc_feature 1..48: note = Transferrin receptor protein 1 (15-30)
  source 1..48: mol_type = other RNA
ggcgagcccctgagctacaccagattctccctcgccaggcaggtggac

SEQ ID NO: 55438 - RNA, 51 nt, synthetic construct
  misc_feature 1..51: note = Transferrin receptor protein 1 (14-30)
  source 1..51: mol_type = other RNA
ggcggggagcccctgagctacaccagattctccctcgccaggcaggtggac

SEQ ID NO: 55439 - RNA, 54 nt, synthetic construct
  misc_feature 1..54: note = Transferrin receptor protein 1 (14-31)
  source 1..54: mol_type = other RNA
ggcggggagcccctgagctacaccagattctccctcgccaggcaggtggacgga

SEQ ID NO: 55440 - RNA, 27 nt, synthetic construct
  misc_feature 1..27: note = Annexin A3 (33-41)
  source 1..27: mol_type = other RNA
ggcatcgggaccgacgagaagatgctg

SEQ ID NO: 55441 - RNA, 27 nt, synthetic construct
  misc_feature 1..27: note = Microtubule-associated protein 1B (225-233)
  source 1..27: mol_type = other RNA
ggcctgagcgagttcaccgaatacctc

SEQ ID NO: 55442 - RNA, 27 nt, synthetic construct
  misc_feature 1..27: note = SCAN domain-containing protein 1 (121-129)
  source 1..27: mol_type = other RNA
ggccccagagaggccttcaggcagctg

SEQ ID NO: 55443 - RNA, 27 nt, synthetic construct
  misc_feature 1..27: note = Splicing factor 3B subunit 3 (430-438)
  source 1..27: mol_type = other RNA
ggccccagaagctccctgagggtgctc

SEQ ID NO: 55444 - RNA, 27 nt, synthetic construct
  misc_feature 1..27: note = Glyoxylate reductase/hydroxypyruvate reductase (162-170)
  source 1..27: mol_type = other RNA
ggcagaatcgggcaggccattgctagg

SEQ ID NO: 55445 - RNA, 30 nt, synthetic construct
  misc_feature 1..30: note = 40S ribosomal protein S11 (70-79)
  source 1..30: mol_type = other RNA
ggcagaatcctgagcggggtggtcaccaag

SEQ ID NO: 55446 - RNA, 27 nt, synthetic construct
  misc_feature 1..27: note = Eukaryotic initiation factor 4A-II (368-376)
  source 1..27: mol_type = other RNA
ggcagaaagggggtggccatcaacttc

SEQ ID NO: 55447 - RNA, 27 nt, synthetic construct
  misc_feature 1..27: note = 40S ribosomal protein S4, Y isoform 1 (190-198)
  source 1..27: mol_type = other RNA
ggcagagtgggggtcatcaccaacagg

SEQ ID NO: 55448 - RNA, 27 nt, synthetic construct
  misc_feature 1..27: note = Splicing factor 3B subunit 3 (957-965)
  source 1..27: mol_type = other RNA
ggcagagtgctgatcggggtcggaaag

SEQ ID NO: 55449 - RNA, 30 nt, synthetic construct
  misc_feature 1..30: note = Nucleolar RNA helicase 2 (403-412)
  source 1..30: mol_type = other RNA
atcccccagaagcaaagagagattaccctg

SEQ ID NO: 55450 - RNA, 27 nt, synthetic construct
  misc_feature 1..27: note = Probable ATP-dependent RNA helicase DDX4 (355-363)
  source 1..27: mol_type = other RNA
atcaccgccagcagattcaaggagctg

SEQ ID NO: 55451 - RNA, 27 nt, synthetic construct
  misc_feature 1..27: note = EH domain-containing protein 2 (480-488)
  source 1..27: mol_type = other RNA
aagctgcccaacagcgtgctcggcaga

SEQ ID NO: 55452 - RNA, 27 nt, synthetic construct
  misc_feature 1..27: note = Speriolin-like protein (246-254)
  source 1..27: mol_type = other RNA
aagctgagagagctcacccagaggtac

SEQ ID NO: 55453 - RNA, 27 nt, synthetic construct
  misc_feature 1..27: note = Ubiquitin carboxyl-terminal hydrolase 45 (297-305)
  source 1..27: mol_type = other RNA
ctgctccactaccttctggacgccgtg

SEQ ID NO: 55454 - RNA, 27 nt, synthetic construct
  misc_feature 1..27: note = 40S ribosomal protein S4, X isoform (238-246)
  source 1..27: mol_type = other RNA
ctgcccagaggcaaggggatcaggctc

SEQ ID NO: 55455 - RNA, 30 nt, synthetic construct
  misc_feature 1..30: note = DNA replication licensing factor MCM6 (215-224)
  source 1..30: mol_type = other RNA
ctgcccagaggcagcatccctaggtccctc

SEQ ID NO: 55456 - RNA, 33 nt, synthetic construct
  misc_feature 1..33: note = 2',3'-cyclic-nucleotide 3'-phosphodiesterase (303-313)
  source 1..33: mol_type = other RNA
ctgcccagaggcagcagggcccacatcaccctc

SEQ ID NO: 55457 - RNA, 27 nt, synthetic construct
  misc_feature 1..27: note = 39S ribosomal protein L20, mitochondrial (89-97)
  source 1..27: mol_type = other RNA
aacctggtgaagtgccaggtcgagctc

SEQ ID NO: 55458 - RNA, 33 nt, synthetic construct
  misc_feature 1..33: note = Trinucleotide repeat-containing gene 18 protein (554-564)
  source 1..33: mol_type = other RNA
aacagaaaggccctggctaaaggcctcgggctt

SEQ ID NO: 55459 - RNA, 33 nt, synthetic construct
  misc_feature 1..33: note = Transmembrane emp24 domain-containing protein 4 (23-33)
  source 1..33: mol_type = other RNA
aactaccccgagatcgccgctaaggacaaactg

SEQ ID NO: 55460 - RNA, 27 nt, synthetic construct
  misc_feature 1..27: note = Lymphocyte antigen 75 (791-799)
  source 1..27: mol_type = other RNA
cagatccccaagggcagaacccctaaa

SEQ ID NO: 55461 - RNA, 27 nt, synthetic construct
  misc_feature 1..27: note = Ribonucleoside-diphosphate reductase large subunit (742-750)
  source 1..27: mol_type = other RNA
agacccgccgctaaccctatccagttc

SEQ ID NO: 55462 - RNA, 27 nt, synthetic construct
  misc_feature 1..27: note = Aldo-keto reductase family 1 member C1 (91-99)
  source 1..27: mol_type = other RNA
agacccgagctggtgaggcctgccctc

SEQ ID NO: 55463 - RNA, 30 nt, synthetic construct
  misc_feature 1..30: note = Protein phosphatase 1 regulatory subunit 35 (234-243)
  source 1..30: mol_type = other RNA
agacccaggcctagcgaggacaccttcctg

SEQ ID NO: 55464 - RNA, 27 nt, synthetic construct
  misc_feature 1..27: note = Frizzled-2 (2-10)
  source 1..27: mol_type = other RNA
agacccaggagcgccctgcctcggctc

SEQ ID NO: 55465 - RNA, 27 nt, synthetic construct
  misc_feature 1..27: note = HLA class I histocompatibility antigen, alpha chain E (25-33)
  source 1..27: mol_type = other RNA
agcctgaagtacttccacacctccgtg

SEQ ID NO: 55466 - RNA, 27 nt, synthetic construct
  misc_feature 1..27: note = Histone H2B type 2-F (79-87)
  source 1..27: mol_type = other RNA
agcagactggcccactacaacaagagg

SEQ ID NO: 55467 - RNA, 27 nt, synthetic construct
  misc_feature 1..27: note = EH domain-containing protein 2 (484-492)
  source 1..27: mol_type = other RNA
agcgtgctgggcagaatctggaagctc

SEQ ID NO: 55468 - RNA, 33 nt, synthetic construct
  misc_feature 1..33: note = Heterogeneous nuclear ribonucleoprotein K (78-88)
  source 1..33: mol_type = other RNA
gtgcccgacagctccggccctgagagaatcctg

SEQ ID NO: 55469 - RNA, 27 nt, synthetic construct
  misc_feature 1..27: note = Vimentin (216-224)
  source 1..27: mol_type = other RNA
gccagactggacctcgagaggaaggtg

SEQ ID NO: 55470 - RNA, 27 nt, synthetic construct
  misc_feature 1..27: note = E3 ubiquitin-protein ligase HECTD1 (174-182)
  source 1..27: mol_type = other RNA
gccagactgggcgtgatcagcaaggtc

SEQ ID NO: 55471 - RNA, 30 nt, synthetic construct
  misc_feature 1..30: note = V-type proton ATPase subunit S1 (217-226)
  source 1..30: mol_type = other RNA
gccagactgagcctcacctacgagaggctt

SEQ ID NO: 55472 - RNA, 27 nt, synthetic construct
  misc_feature 1..27: note = Peroxisomal membrane protein PEX16 (38-46)
  source 1..27: mol_type = other RNA
ggcagattcgccgacagccacgagctg

SEQ ID NO: 55473 - RNA, 30 nt, synthetic construct
  misc_feature 1..30: note = 40S ribosomal protein S21 (44-53)
  source 1..30: mol_type = other RNA
ggcagattcaacgggcagtttaagacctac

SEQ ID NO: 55474 - RNA, 27 nt, synthetic construct
  misc_feature 1..27: note = Pro-interleukin-16 (881-889)
  source 1..27: mol_type = other RNA
ggcagattcagcgggctgctcggaagg

SEQ ID NO: 55475 - RNA, 27 nt, synthetic construct
  misc_feature 1..27: note = 60S ribosomal protein L13a (17-25)
  source 1..27: mol_type = other RNA
ggcagactggccgctatcgtggcaaag

SEQ ID NO: 55476 - RNA, 27 nt, synthetic construct
  misc_feature 1..27: note = Leucine-tRNA ligase, cytoplasmic (57-65)
  source 1..27: mol_type = other RNA
ggcagactgcacctcgggcataccttc

SEQ ID NO: 55477 - RNA, 27 nt, synthetic construct
  misc_feature 1..27: note = Amidophosphoribosyltransferase (354-362)
  source 1..27: mol_type = other RNA
ggcagaaccttcatccagcccaacatg

SEQ ID NO: 55478 - RNA, 27 nt, synthetic construct
  misc_feature 1..27: note = Ubiquitin-60S ribosomal protein L40 (58-66)
  source 1..27: mol_type = other RNA
ggcagaaccctgagcgactacaacatc

SEQ ID NO: 55479 - RNA, 30 nt, synthetic construct
  misc_feature 1..30: note = Lamin-B receptor (14-23)
  source 1..30: mol_type = other RNA
ggcagatggcccgggagctccctgtactat

SEQ ID NO: 55480 - RNA, 27 nt, synthetic construct
  misc_feature 1..27: note = 40S ribosomal protein S25 (103-111)
  source 1..27: mol_type = other RNA
cacagagcccaggtgatctacaccagg

SEQ ID NO: 55481 - RNA, 27 nt, synthetic construct
  misc_feature 1..27: note = Transcription activator BRG1 (1255-1263)
  source 1..27: mol_type = other RNA
cacagaatcggccagcaaaacgaggtg

SEQ ID NO: 55482 - RNA, 27 nt, synthetic construct
  misc_feature 1..27: note = H/ACA ribonucleoprotein complex subunit 3 (44-52)
  source 1..27: mol_type = other RNA
cacagaatcaccattaagaaaaggttc

SEQ ID NO: 55483 - RNA, 30 nt, synthetic construct
  misc_feature 1..30: note = Heterogeneous nuclear ribonucleoprotein H (274-283)
  source 1..30: mol_type = other RNA
cacagatacggcgacgggggaagcaccttc

SEQ ID NO: 55484 - RNA, 27 nt, synthetic construct
  misc_feature 1..27: note = Histone H2A type 1-A (88-96)
  source 1..27: mol_type = other RNA
atcagaaacgacgaggaactgaataag

SEQ ID NO: 55485 - RNA, 27 nt, synthetic construct
  misc_feature 1..27: note = Hsc70-interacting protein (153-161)
  source 1..27: mol_type = other RNA
aagagagccagcgtgttcgtcaaactg

SEQ ID NO: 55486 - RNA, 27 nt, synthetic construct
  misc_feature 1..27: note = Signal peptidase complex subunit 2 (164-172)
  source 1..27: mol_type = other RNA
aagagattcgacgataaatacaccctg

SEQ ID NO: 55487 - RNA, 27 nt, synthetic construct
  misc_feature 1..27: note = YEATS domain-containing protein 2 (299-307)
  source 1..27: mol_type = other RNA
aagagaatcgacattatacacaacctg

SEQ ID NO: 55488 - RNA, 27 nt, synthetic construct
  misc_feature 1..27: note = Protein arginine N-methyltransferase 1 (266-274)
  source 1..27: mol_type = other RNA
aagagaaacgactacgtgcacgccctg

SEQ ID NO: 55489 - RNA, 27 nt, synthetic construct
  misc_feature 1..27: note = Cyclic AMP-responsive element-binding protein 3-like protein 2 (270-278)
  source 1..27: mol_type = other RNA
aagagaaccctgatcgccgagggctac

SEQ ID NO: 55490 - RNA, 30 nt, synthetic construct
  misc_feature 1..30: note = DNA-dependent protein kinase catalytic subunit (263-272)
  source 1..30: mol_type = other RNA
aagagatacgccgtgcccagcgctggcctg

SEQ ID NO: 55491 - RNA, 27 nt, synthetic construct
  misc_feature 1..27: note = Small nuclear ribonucleoprotein Sm D2 (110-118)
  source 1..27: mol_type = other RNA
ctgagaaaccccctcatcgccggcaag

SEQ ID NO: 55492 - RNA, 30 nt, synthetic construct
  misc_feature 1..30: note = Solute carrier family 25 member 46 (98-107)
  source 1..30: mol_type = other RNA
aacagattcgccggctttgggatcggactg

SEQ ID NO: 55493 - RNA, 27 nt, synthetic construct
  misc_feature 1..27: note = General transcription factor II-I (491-499)
  source 1..27: mol_type = other RNA
aacagaatcaagttcgtgattaaaagg

SEQ ID NO: 55494 - RNA, 27 nt, synthetic construct
  misc_feature 1..27: note = L-lactate dehydrogenase A chain (111-119)
  source 1..27: mol_type = other RNA
cagagaaacgtgaatatcttcaagttt

SEQ ID NO: 55495 - RNA, 27 nt, synthetic construct
  misc_feature 1..27: note = Annexin A2 (67-75)
  source 1..27: mol_type = other RNA
cagagacaagacatcgccttcgcttac

SEQ ID NO: 55496 - RNA, 36 nt, synthetic construct
  misc_feature 1..36: note = 40S ribosomal protein S30 (114-125)
  source 1..36: mol_type = other RNA
agaaggttcgtgaacgtcgttcccacctttggcaag

SEQ ID NO: 55497 - RNA, 27 nt, synthetic construct
  misc_feature 1..27: note = 2'-5'-oligoadenylate synthase 1 (94-102)
  source 1..27: mol_type = other RNA
agaaggggcgagttcatccaggaaatt

SEQ ID NO: 55498 - RNA, 30 nt, synthetic construct
  misc_feature 1..30: note = NADH dehydrogenase (ubiquinone) 1 alpha subcomplex subunit 1 (52-61)
  source 1..30: mol_type = other RNA
agaaggatcagcggcgtggaccggtactat

SEQ ID NO: 55499 - RNA, 30 nt, synthetic construct
  misc_feature 1..30: note = Protein disulfide-isomerase A3 (4-13)
  source 1..30: mol_type = other RNA
agaaggctggccctcttccccggcgtggct

SEQ ID NO: 55500 - RNA, 27 nt, synthetic construct
  misc_feature 1..27: note = Reticulocalbin-1 (8-16)
  source 1..27: mol_type = other RNA
agaaggctgggcctcgcccttgggctg

SEQ ID NO: 55501 - RNA, 27 nt, synthetic construct
  misc_feature 1..27: note = S-adenosylmethionine synthase isoform type-1 (312-320)
  source 1..27: mol_type = other RNA
agaagggtgctggtccaggttagctac

SEQ ID NO: 55502 - RNA, 33 nt, synthetic construct
  misc_feature 1..33: note = Probable ATP-dependent RNA helicase DDX5 (24-34)
  source 1..33: mol_type = other RNA
agcagagccggccccctgtccgggaagaaattc

SEQ ID NO: 55503 - RNA, 27 nt, synthetic construct
  misc_feature 1..27: note = Membralin (120-128)
  source 1..27: mol_type = other RNA
agcagagcccccgtgttcctgcagttt

SEQ ID NO: 55504 - RNA, 30 nt, synthetic construct
  misc_feature 1..30: note = Dynamin-like 120 kDa protein, mitochondrial (499-508)
  source 1..30: mol_type = other RNA
agcagaatccagcaaattatagagggcaag

SEQ ID NO: 55505 - RNA, 27 nt, synthetic construct
  misc_feature 1..27: note = Growth hormone-inducible transmembrane protein (146-154)
  source 1..27: mol_type = other RNA
agcagaacccccgtgctgatgaacttc

SEQ ID NO: 55506 - RNA, 30 nt, synthetic construct
  misc_feature 1..30: note = Clathrin heavy chain 1 (1341-1350)
  source 1..30: mol_type = other RNA
agcagagtgaacatccccaaggtcctgagg

SEQ ID NO: 55507 - RNA, 27 nt, synthetic construct
  misc_feature 1..27: note = Heat shock-related 70 kDa protein 2 (344-352)
  source 1..27: mol_type = other RNA
accagaatccccaagattcagaaactg

SEQ ID NO: 55508 - RNA, 27 nt, synthetic construct
  misc_feature 1..27: note = Polyadenylate-binding protein 1 (289-297)
  source 1..27: mol_type = other RNA
accagataccagggcgtgaacctgtat

SEQ ID NO: 55509 - RNA, 33 nt, synthetic construct
  misc_feature 1..33: note = Histone H2B type 2-F (99-109)
  source 1..33: mol_type = other RNA
gtgagactgctccttcccggcgagctggccaag

SEQ ID NO: 55510 - RNA, 30 nt, synthetic construct
  misc_feature 1..30: note = Eukaryotic translation initiation factor 3 subunit B (340-349)
  source 1..30: mol_type = other RNA
gtgagatggagccccaagggcacctacctg

SEQ ID NO: 55511 - RNA, 27 nt, synthetic construct
  misc_feature 1..27: note = Ras-specific guanine nucleotide-releasing factor 1 (983-991)
  source 1..27: mol_type = other RNA
gccgctgcaaacatcattagaaccctg

SEQ ID NO: 55512 - RNA, 27 nt, synthetic construct
  misc_feature 1..27: note = Cytoskeleton-associated protein 4 (73-81)
  source 1..27: mol_type = other RNA
gccgctgacaccgagagactggcactc

SEQ ID NO: 55513 - RNA, 42 nt, synthetic construct
  misc_feature 1..42: note = Voltage-dependent anion-selective channel protein 2 (222-235)
  source 1..42: mol_type = other RNA
gccgctaagtaccagctggaccccaccgcaagcatctccgcc

SEQ ID NO: 55514 - RNA, 27 nt, synthetic construct
  misc_feature 1..27: note = RNA polymerase II subunit A C-terminal domain phosphatase (41-49)
  source 1..27: mol_type = other RNA
gccgctgtgagaatcggcagcgtcctg

SEQ ID NO: 55515 - RNA, 36 nt, synthetic construct
  misc_feature 1..36: note = Protein unc-13 homolog D (1011-1022)
  source 1..36: mol_type = other RNA
gccgacgatctggagggcgaagctttcctccccctt

SEQ ID NO: 55516 - RNA, 39 nt, synthetic construct
  misc_feature 1..39: note = Protein unc-13 homolog D (1011-1023)
  source 1..39: mol_type = other RNA
gccgacgatctggagggcgaagctttcctcccccttaga

SEQ ID NO: 55517 - RNA, 42 nt, synthetic construct
  misc_feature 1..42: note = Protein unc-13 homolog D (1011-1024)
  source 1..42: mol_type = other RNA
gccgacgatctggagggcgaagctttcctcccccttagagag

SEQ ID NO: 55518 - RNA, 45 nt, synthetic construct
  misc_feature 1..45: note = SLAM family member 6 (47-61)
  source 1..45: mol_type = other RNA
gccgacgataacgtgagcttcagatgggaggctctgggcaatacc

SEQ ID NO: 55519 - RNA, 48 nt, synthetic construct
  misc_feature 1..48: note = SLAM family member 6 (47-62)
  source 1..48: mol_type = other RNA
gccgacgataacgtgagcttcagatgggaggctctgggcaataccctc

SEQ ID NO: 55520 - RNA, 36 nt, synthetic construct
  misc_feature 1..36: note = Golgi apparatus protein 1 (724-735)
  source 1..36: mol_type = other RNA
gccgacatcttcgtggatcccgtcctgcacaccgct

SEQ ID NO: 55521 - RNA, 42 nt, synthetic construct
  misc_feature 1..42: note = Golgi apparatus protein 1 (1059-1072)
  source 1..42: mol_type = other RNA
gccgacatcttcgtggatcccgtcctgcacaccgcttgcgca

SEQ ID NO: 55522 - RNA, 36 nt, synthetic construct
  misc_feature 1..36: note = Low affinity immunoglobulin epsilon Fc receptor (40-51)
  source 1..36: mol_type = other RNA
gccgacctgagctccttcaagtctcaggagctcaac

SEQ ID NO: 55523 - RNA, 42 nt, synthetic construct
  misc_feature 1..42: note = Low affinity immunoglobulin epsilon Fc receptor (40-53)
  source 1..42: mol_type = other RNA
gccgacctgagctccttcaagtctcaggagctcaacgaaaga

SEQ ID NO: 55524 - RNA, 45 nt, synthetic construct
  misc_feature 1..45: note = Low affinity immunoglobulin epsilon Fc receptor (40-54)
  source 1..45: mol_type = other RNA
gccgacctgagctccttcaagtctcaggagctcaacgaaagaaat

SEQ ID NO: 55525 - RNA, 48 nt, synthetic construct
  misc_feature 1..48: note = Low affinity immunoglobulin epsilon Fc receptor (40-55)
  source 1..48: mol_type = other RNA
gccgacctgagctccttcaagtctcaggagctcaacgaaagaaatgag

SEQ ID NO: 55526 - RNA, 51 nt, synthetic construct
  misc_feature 1..51: note = Low affinity immunoglobulin epsilon Fc receptor (40-56)
  source 1..51: mol_type = other RNA
gccgacctgagctccttcaagtctcaggagctcaacgaaagaaatgaggct

SEQ ID NO: 55527 - RNA, 48 nt, synthetic construct
  misc_feature 1..48: note = T-complex protein 1 subunit beta (163-178)
  source 1..48: mol_type = other RNA
gccgacagctacctggatgagggcttcctccttgacaagaaaatcggg

SEQ ID NO: 55528 - RNA, 27 nt, synthetic construct
  misc_feature 1..27: note = Eukaryotic translation initiation factor 6 (130-138)
  source 1..27: mol_type = other RNA
gccgacgtgctgaaggtcgaggttttc

SEQ ID NO: 55529 - RNA, 27 nt, synthetic construct
  misc_feature 1..27: note = Proline-rich protein 12 (390-398)
  source 1..27: mol_type = other RNA
gccgaggaagctggcgggaccagactg

SEQ ID NO: 55530 - RNA, 27 nt, synthetic construct
  misc_feature 1..27: note = Probable ribonuclease ZC3H12D (154-162)
  source 1..27: mol_type = other RNA
gccgagctggaaagacaggctgtgctc

SEQ ID NO: 55531 - RNA, 30 nt, synthetic construct
  misc_feature 1..30: note = A-kinase anchor protein 2 (688-697)
  source 1..30: mol_type = other RNA
gccgagctgagaagcaccgcttccctcctt

SEQ ID NO: 55532 - RNA, 48 nt, synthetic construct
  misc_feature 1..48: note = Ragulator complex protein LAMTOR1 (36-51)
  source 1..48: mol_type = other RNA
gccgagcccaactaccacagcctgccttccgctagaaccgacgaacag

SEQ ID NO: 55533 - RNA, 57 nt, synthetic construct
  misc_feature 1..57: note = Low affinity immunoglobulin epsilon Fc receptor (19-37)
  source 1..57: mol_type = other RNA
gccgagcagcaaagactgaagagccaggacctcgaactttcctggaacctgaatggc

SEQ ID NO: 55534 - RNA, 30 nt, synthetic construct
  misc_feature 1..30: note = Ribonucleoside-diphosphate reductase subunit M2 B (284-293)
  source 1..30: mol_type = other RNA
gccgagaccacagacaacgtgttcactctg

SEQ ID NO: 55535 - RNA, 27 nt, synthetic construct
  misc_feature 1..27: note = Zinc finger protein 638 (1263-1271)
  source 1..27: mol_type = other RNA
gccgaggtggaaaagaacgagaccgtc

SEQ ID NO: 55536 - RNA, 45 nt, synthetic construct
  misc_feature 1..45: note = Peroxisomal multifunctional enzyme type 2 (19-33)
  source 1..45: mol_type = other RNA
gccggcctggggagagcttacgcactcgccttcgcggagagggga

SEQ ID NO: 55537 - RNA, 45 nt, synthetic construct
  misc_feature 1..45: note = B- and T-lymphocyte attenuator (191-205)
  source 1..45: mol_type = other RNA
gccggcagagagatcaacctggtggacgctcacctcaagagcgaa

SEQ ID NO: 55538 - RNA, 51 nt, synthetic construct
  misc_feature 1..51: note = B- and T-lymphocyte attenuator (191-207)
  source 1..51: mol_type = other RNA
gccggcagagagatcaacctggtggacgctcacctcaagagcgaacagacc

SEQ ID NO: 55539 - RNA, 36 nt, synthetic construct
  misc_feature 1..36: note = CD44 antigen (8-19)
  source 1..36: mol_type = other RNA
gccggcgtgttccacgtcgagaagaacgggagatac

SEQ ID NO: 55540 - RNA, 30 nt, synthetic construct
  misc_feature 1..30: note = Cordon-bleu protein-like 1 (1088-1097)
  source 1..30: mol_type = other RNA
gccatcagaagcggcgaggctgcagccaag

SEQ ID NO: 55541 - RNA, 36 nt, synthetic construct
  misc_feature 1..36: note = C-C chemokine receptor type 7 (94-105)
  source 1..36: mol_type = other RNA
gccatcgtgcaggctgtcagcgcacacagacatagg

SEQ ID NO: 55542 - RNA, 42 nt, synthetic construct
  misc_feature 1..42: note = Ragulator complex protein LAMTOR3 (21-34)
  source 1..42: mol_type = other RNA
gccatcgtggtcagcgacagagatggcgttcccgtgattaag

SEQ ID NO: 55543 - RNA, 45 nt, synthetic construct
  misc_feature 1..45: note = IgG receptor FcRn large subunit p51 (131-145)
  source 1..45: mol_type = other RNA
gccaagttcgctctgaacggcgaggaatttatgaatttcgacctc

SEQ ID NO: 55544 - RNA, 48 nt, synthetic construct
  misc_feature 1..48: note = IgG receptor FcRn large subunit p51 (131-146)
  source 1..48: mol_type = other RNA
gccaagttcgctctgaacggcgaggaatttatgaatttcgacctcaaa

SEQ ID NO: 55545 - RNA, 42 nt, synthetic construct
  misc_feature 1..42: note = Glutathione peroxidase 1 (84-97)
  source 1..42: mol_type = other RNA
gccctgatgaccgaccccaagctcatcacatggagccctgtg

SEQ ID NO: 55546 - RNA, 39 nt, synthetic construct
  misc_feature 1..39: note = IgG receptor FcRn large subunit p51 (134-146)
  source 1..39: mol_type = other RNA
gccctgaacggcgaggaattcatgaattttgacctcaag

SEQ ID NO: 55547 - RNA, 27 nt, synthetic construct
  misc_feature 1..27: note = Serine/threonine-protein kinase LATS1 (729-737)
  source 1..27: mol_type = other RNA
gccctgtacgctaccaagacactcaga

SEQ ID NO: 55548 - RNA, 42 nt, synthetic construct
  misc_feature 1..42: note = E3 ubiquitin-protein ligase CHIP (43-56)
  source 1..42: mol_type = other RNA
gccaacctgcagagagcttacagcctcgcaaaggagcaaagg

SEQ ID NO: 55549 - RNA, 33 nt, synthetic construct
  misc_feature 1..33: note = A-kinase anchor protein 2 (298-308)
  source 1..33: mol_type = other RNA
gcccccgctagctcccacgagagagcatctatg

SEQ ID NO: 55550 - RNA, 30 nt, synthetic construct
  misc_feature 1..30: note = Interferon regulatory factor 9 (199-208)
  source 1..30: mol_type = other RNA
gcccccttccagggcgaccaaagaagcctg

SEQ ID NO: 55551 - RNA, 30 nt, synthetic construct
  misc_feature 1..30: note = T-cell activation Rho GTPase-activating protein (268-277)
  source 1..30: mol_type = other RNA
gcccccggcagcgtgctgcctagagctctc

SEQ ID NO: 55552 - RNA, 45 nt, synthetic construct
  misc_feature 1..45: note = Platelet endothelial cell adhesion molecule (159-173)
  source 1..45: mol_type = other RNA
gcccccatccacttcaccattgagaagctggaactcaacgagaaa

SEQ ID NO: 55553 - RNA, 42 nt, synthetic construct
  misc_feature 1..42: note = Alpha-1B-glycoprotein (205-218)
  source 1..42: mol_type = other RNA
gcccccctggagggcgctagattcgcactcgtgagggaagac

SEQ ID NO: 55554 - RNA, 27 nt, synthetic construct
  misc_feature 1..27: note = TBC1 domain family member 22A (113-121)
  source 1..27: mol_type = other RNA
gcccccctgcagagaagccaatccctc

SEQ ID NO: 55555 - RNA, 27 nt, synthetic construct
  misc_feature 1..27: note = Cordon-bleu protein-like 1 (891-899)
  source 1..27: mol_type = other RNA
gcccccaaccctgctccaaaggagctg

SEQ ID NO: 55556 - RNA, 24 nt, synthetic construct
  misc_feature 1..24: note = Negative elongation factor E (257-264)
  source 1..24: mol_type = other RNA
gcccccagaaagggcaacaccctg

SEQ ID NO: 55557 - RNA, 27 nt, synthetic construct
  misc_feature 1..27: note = Cyclin-dependent kinase inhibitor 1C (105-113)
  source 1..27: mol_type = other RNA
gcccccagacctgtggctgtcgcagtt

SEQ ID NO: 55558 - RNA, 27 nt, synthetic construct
  misc_feature 1..27: note = Endoplasmic reticulum resident protein 44 (391-399)
  source 1..27: mol_type = other RNA
gcccccagcgagtacagatataccctg

SEQ ID NO: 55559 - RNA, 30 nt, synthetic construct
  misc_feature 1..30: note = Endoplasmic reticulum resident protein 44 (391-400)
  source 1..30: mol_type = other RNA
gcccccagcgagtacagatataccctgctc

SEQ ID NO: 55560 - RNA, 48 nt, synthetic construct
  misc_feature 1..48: note = Lipolysis-stimulated lipoprotein receptor (216-231)
  source 1..48: mol_type = other RNA
gcccccagcacctacgctcacctgtcccctgcaaagacaccaccgccc

SEQ ID NO: 55561 - RNA, 51 nt, synthetic construct
  misc_feature 1..51: note = Lipolysis-stimulated lipoprotein receptor (216-232)
  source 1..51: mol_type = other RNA
gcccccagcacctacgctcacctgtcccctgcaaagacaccaccgccccct

SEQ ID NO: 55562 - RNA, 54 nt, synthetic construct
  misc_feature 1..54: note = Lipolysis-stimulated lipoprotein receptor (216-233)
  source 1..54: mol_type = other RNA
gcccccagcacctacgctcacctgtcccctgcaaagacaccaccgccccctgcc

SEQ ID NO: 55563 - RNA, 39 nt, synthetic construct
  misc_feature 1..39: note = C-C chemokine receptor type 7 (190-202)
  source 1..39: mol_type = other RNA
gccagaaacttcgagaggaataaggctatcaaagtgatt

SEQ ID NO: 55564 - RNA, 45 nt, synthetic construct
  misc_feature 1..45: note = C-C chemokine receptor type 7 (190-204)
  source 1..45: mol_type = other RNA
gccagaaacttcgagaggaataaggctatcaaagtgattatagca

SEQ ID NO: 55565 - RNA, 48 nt, synthetic construct
  misc_feature 1..48: note = Glucose-6-phosphate isomerase (181-196)
  source 1..48: mol_type = other RNA
gccagcaagaccttcacaactcaggagacgatcaccaacgctgaaaca

SEQ ID NO: 55566 - RNA, 45 nt, synthetic construct
  misc_feature 1..45: note = Cystatin-C (63-77)
  source 1..45: mol_type = other RNA
gccagcaacgacatgtaccactccagagctctgcaggtggtcagg

SEQ ID NO: 55567 - RNA, 48 nt, synthetic construct
  misc_feature 1..48: note = Cystatin-C (63-78)
  source 1..48: mol_type = other RNA
gccagcaacgacatgtaccactccagagctctgcaggtggtcagggca

SEQ ID NO: 55568 - RNA, 27 nt, synthetic construct
  misc_feature 1..27: note = A-kinase anchor protein 2 (107-115)
  source 1..27: mol_type = other RNA
gccagcagacaggctccccctcacatc

SEQ ID NO: 55569 - RNA, 30 nt, synthetic construct; identical to SEQ ID NO: 31342
  misc_feature 1..30: note = Exostosin-2 (691-700)
  source 1..30: mol_type = other RNA

SEQ ID NO: 55570 - RNA, 30 nt, synthetic construct
  misc_feature 1..30: note = Fatty acyl-CoA reductase 2 (227-236)
  source 1..30: mol_type = other RNA
gccaccttcgagaagatcccctttgaaaga

SEQ ID NO: 55571 - RNA, 45 nt, synthetic construct
  misc_feature 1..45: note = Ras-related protein Rab-11A (49-63)
  source 1..45: mol_type = other RNA
gccaccagaagcatccaggtggacggcaagacaattaaagctcaa

SEQ ID NO: 55572 - RNA, 48 nt, synthetic construct
  misc_feature 1..48: note = Ras-related protein Rab-11A (49-64)
  source 1..48: mol_type = other RNA
gccaccagaagcatccaggtggacggcaagacaattaaagctcaaata

SEQ ID NO: 55573 - RNA, 27 nt, synthetic construct
  misc_feature 1..27: note = Cadherin EGF LAG seven-pass G-type receptor 1 (1076-1084)
  source 1..27: mol_type = other RNA
gccaccagcgctcccctggtgtccaga

SEQ ID NO: 55574 - RNA, 33 nt, synthetic construct
  misc_feature 1..33: note = Tumor protein p53-inducible protein 11 (90-100)
  source 1..33: mol_type = other RNA
gccgtgttcgacggcgctcaggtcaccagcaag

SEQ ID NO: 55575 - RNA, 27 nt, synthetic construct
  misc_feature 1..27: note = Short-chain dehydrogenase/reductase 3 (9-17)
  source 1..27: mol_type = other RNA
gccgtgggcctggtcctccccgctaag

SEQ ID NO: 55576 - RNA, 30 nt, synthetic construct
  misc_feature 1..30: note = A-kinase anchor protein 2 (230-239)
  source 1..30: mol_type = other RNA
gccgtgaagaaaaaccccggcatcgctgca

SEQ ID NO: 55577 - RNA, 51 nt, synthetic construct
  misc_feature 1..51: note = SLAM family member 6 (46-62)
  source 1..51: mol_type = other RNA
gacgccgatgacaacgtgagcttcagatgggaggctctgggcaataccctc

SEQ ID NO: 55578 - RNA, 42 nt, synthetic construct
  misc_feature 1..42: note = Peroxisomal multifunctional enzyme type 2 (88-101)
  source 1..42: mol_type = other RNA
gacgccttcggcagaatcgatgtggtcgttaacaatgctggg

SEQ ID NO: 55579 - RNA, 45 nt, synthetic construct
  misc_feature 1..45: note = Lymphocyte antigen 9 (125-139)
  source 1..45: mol_type = other RNA
gacgccggcagctacaaggctcagatcaaccaaagaaatttcgag

SEQ ID NO: 55580 - RNA, 51 nt, synthetic construct
  misc_feature 1..51: note = Lymphocyte antigen 9 (125-141)
  source 1..51: mol_type = other RNA
gacgccggcagctacaaggctcagatcaaccaaagaaatttcgaggtgacc

SEQ ID NO: 55581 - RNA, 24 nt, synthetic construct
  misc_feature 1..24: note = Cell division cycle-associated 7-like protein (200-207)
  source 1..24: mol_type = other RNA
gacgccctgctcaagagaaccatg

SEQ ID NO: 55582 - RNA, 27 nt, synthetic construct
  misc_feature 1..27: note = Probable ribosome biogenesis protein RLP24 (91-99)
  source 1..27: mol_type = other RNA
gacgccatgaagagagtggaggaaatc

SEQ ID NO: 55583 - RNA, 39 nt, synthetic construct
  misc_feature 1..39: note = Platelet endothelial cell adhesion molecule (416-428)
  source 1..39: mol_type = other RNA
gacgcccagttcgaggtgatcaagggccaaaccattgaa

SEQ ID NO: 55584 - RNA, 45 nt, synthetic construct
  misc_feature 1..45: note = Platelet endothelial cell adhesion molecule (416-430)
  source 1..45: mol_type = other RNA
gacgcccagttcgaggtgatcaagggccaaaccattgaagtcaga

SEQ ID NO: 55585 - RNA, 36 nt, synthetic construct
  misc_feature 1..36: note = Ceruloplasmin (715-726)
  source 1..36: mol_type = other RNA
gacgataacatcaagacctacagcgaccaccccgag

SEQ ID NO: 55586 - RNA, 39 nt, synthetic construct
  misc_feature 1..39: note = Ceruloplasmin (715-727)
  source 1..39: mol_type = other RNA
gacgataacatcaagacctacagcgaccaccccgagaaa

SEQ ID NO: 55587 - RNA, 42 nt, synthetic construct
  misc_feature 1..42: note = SLAM family member 6 (48-61)
  source 1..42: mol_type = other RNA
gacgataacgtgagcttcagatgggaggccctgggcaatacc

SEQ ID NO: 55588 - RNA, 45 nt, synthetic construct
  misc_feature 1..45: note = SLAM family member 6 (48-62)
  source 1..45: mol_type = other RNA
gacgataacgtgagcttcagatgggaggccctgggcaataccctc

SEQ ID NO: 55589 - RNA, 51 nt, synthetic construct
  misc_feature 1..51: note = Ceramide glucosyltransferase (91-107)
  source 1..51: mol_type = other RNA
gacgatcccgccatcgacgtgtgcaagaaactgctcggcaagtaccctaac

SEQ ID NO: 55590 - RNA, 27 nt, synthetic construct
  misc_feature 1..27: note = Dystrophin (386-394)
  source 1..27: mol_type = other RNA
gacgagcacctgctcatccagcattac

SEQ ID NO: 55591 - RNA, 27 nt, synthetic construct
  misc_feature 1..27: note = E3 ubiquitin-protein ligase Mdm2 (68-76)
  source 1..27: mol_type = other RNA
gacgagaagcagcaacacatcgtgtac

SEQ ID NO: 55592 - RNA, 27 nt, synthetic construct
  misc_feature 1..27: note = Dynamin-binding protein (858-866)
  source 1..27: mol_type = other RNA
gacgagctgcccaagttccaccagtac

SEQ ID NO: 55593 - RNA, 27 nt, synthetic construct
  misc_feature 1..27: note = Transmembrane emp24 domain-containing protein 4 (48-56)
  source 1..27: mol_type = other RNA
gacgagaccatggtgatcggcaactac

SEQ ID NO: 55594 - RNA, 27 nt, synthetic construct
  misc_feature 1..27: note = Uncharacterized protein CXorf21 (47-55)
  source 1..27: mol_type = other RNA
gacgagacccaggtgagaagcctgtac

SEQ ID NO: 55595 - RNA, 24 nt, synthetic construct
  misc_feature 1..24: note = TBC1 domain family member 22A (223-230)
  source 1..24: mol_type = other RNA
gacgaggtgcaccaggatacctac

SEQ ID NO: 55596 - RNA, 27 nt, synthetic construct
  misc_feature 1..27: note = E3 ubiquitin-protein ligase Mdm2 (273-281)
  source 1..27: mol_type = other RNA
gacgaggtgtaccaggtcaccgtttat

SEQ ID NO: 55597 - RNA, 42 nt, synthetic construct
  misc_feature 1..42: note = MyoD family inhibitor domain-containing protein (67-80)
  source 1..42: mol_type = other RNA
gacggcgagctgatcagaacccagccccaaaggctccctcag

SEQ ID NO: 55598 - RNA, 24 nt, synthetic construct
  misc_feature 1..24: note = Obscurin-like protein 1 (299-306)
  source 1..24: mol_type = other RNA
gacggcgggttcgtgctgaaggtc

SEQ ID NO: 55599 - RNA, 54 nt, synthetic construct
  misc_feature 1..54: note = Beta-1,4-galactosyltransferase 1 (110-127)
  source 1..54: mol_type = other RNA
gacggcctgaacagcctcacctaccaggtgcttgatgtccaaagatatcccctg

SEQ ID NO: 55600 - RNA, 39 nt, synthetic construct
  misc_feature 1..39: note = Plasma membrane calcium-transporting ATPase 1 (257-269)
  source 1..39: mol_type = other RNA
gacggcagctacagaatcttctccaagggggcctctgag

SEQ ID NO: 55601 - RNA, 24 nt, synthetic construct
  misc_feature 1..24: note = T-cell activation Rho GTPase-activating protein (29-36)
  source 1..24: mol_type = other RNA
gacatcaaggagcaccccctgctc

SEQ ID NO: 55602 - RNA, 27 nt, synthetic construct
  misc_feature 1..27: note = Probable ribosome biogenesis protein RLP24 (123-131)
  source 1..27: mol_type = other RNA
gacatcaaggaggtgaaacagaacatt

SEQ ID NO: 55603 - RNA, 48 nt, synthetic construct
  misc_feature 1..48: note = Vesicle-associated membrane protein 3 (27-42)
  source 1..48: mol_type = other RNA
gacatcatgagagtgaacgtcgataaggttctggagagggaccagaaa

SEQ ID NO: 55604 - RNA, 51 nt, synthetic construct
  misc_feature 1..51: note = Vesicle-associated membrane protein 3 (27-43)
  source 1..51: mol_type = other RNA
gacatcatgagagtgaacgtcgataaggttctggagagggaccagaaactc

SEQ ID NO: 55605 - RNA, 39 nt, synthetic construct
  misc_feature 1..39: note = Endoplasmin (536-548)
  source 1..39: mol_type = other RNA
gacaagatctacttcatggccggcagctccagaaaagag

SEQ ID NO: 55606 - RNA, 48 nt, synthetic construct
  misc_feature 1..48: note = Ceramide glucosyltransferase (43-58)
  source 1..48: mol_type = other RNA
gacaagcagccctacagcaaactgcctggcgtgtccctccttaagcca

SEQ ID NO: 55607 - RNA, 51 nt, synthetic construct
  misc_feature 1..51: note = Ceramide glucosyltransferase (43-59)
  source 1..51: mol_type = other RNA
gacaagcagccctacagcaaactgcctggcgtgtccctccttaagccactg

SEQ ID NO: 55608 - RNA, 27 nt, synthetic construct
  misc_feature 1..27: note = Poly (ADP-ribose) polymerase 3 (217-225)
  source 1..27: mol_type = other RNA
gacctggatgtgaagaaaatgcccctc

SEQ ID NO: 55609 - RNA, 45 nt, synthetic construct
  misc_feature 1..45: note = Perilipin-3 (369-383)
  source 1..45: mol_type = other RNA
gacctgagctcctctatcctcgcccagtcaagagagagggtggct

SEQ ID NO: 55610 - RNA, 27 nt, synthetic construct
  misc_feature 1..27: note = Cytoskeleton-associated protein 4 (188-196)
  source 1..27: mol_type = other RNA
gacatgaaggccaaagtggctagcctg

SEQ ID NO: 55611 - RNA, 48 nt, synthetic construct
  misc_feature 1..48: note = Phosphoinositide-3-kinase-interacting protein 1 (28-43)
  source 1..48: mol_type = other RNA
gacaacggccacctgtacagagaggatcagaccagccccgcccctggg

SEQ ID NO: 55612 - RNA, 54 nt, synthetic construct
  misc_feature 1..54: note = Phosphoinositide-3-kinase-interacting protein 1 (28-45)
  source 1..54: mol_type = other RNA
gacaacggccacctgtacagagaggatcagaccagccccgcccctgggctcagg

SEQ ID NO: 55613 - RNA, 42 nt, synthetic construct
  misc_feature 1..42: note = Protein CDV3 homolog (139-152)
  source 1..42: mol_type = other RNA
gacaaccagtacgccgtgctggagaatcaaaagagctcccac

SEQ ID NO: 55614 - RNA, 39 nt, synthetic construct
  misc_feature 1..39: note = SLAM family member 6 (49-61)
  source 1..39: mol_type = other RNA
gacaacgtgagcttcagatgggaggccctgggcaatacc

SEQ ID NO: 55615 - RNA, 42 nt, synthetic construct
  misc_feature 1..42: note = SLAM family member 6 (49-62)
  source 1..42: mol_type = other RNA
gacaacgtgagcttcagatgggaggccctgggcaataccctc

SEQ ID NO: 55616 - RNA, 45 nt, synthetic construct
  misc_feature 1..45: note = SLAM family member 6 (49-63)
  source 1..45: mol_type = other RNA
gacaacgtgagcttcagatgggaggccctgggcaataccctctcc

SEQ ID NO: 55617 - RNA, 45 nt, synthetic construct
  misc_feature 1..45: note = Golgi apparatus protein 1 (492-506)
  source 1..45: mol_type = other RNA
gaccccggcgccgattacagaatcgacagggctctgaacgaggca

SEQ ID NO: 55618 - RNA, 51 nt, synthetic construct
  misc_feature 1..51: note = Peroxiredoxin-1 (107-123)
  source 1..51: mol_type = other RNA
gaccccaagagaaccatcgcccaggattacggcgtgctgaaagctgacgag

SEQ ID NO: 55619 - RNA, 54 nt, synthetic construct
  misc_feature 1..54: note = Peroxiredoxin-1 (107-124)
  source 1..54: mol_type = other RNA
gaccccaagagaaccatcgcccaggattacggcgtgctgaaagctgacgagggg

SEQ ID NO: 55620 - RNA, 27 nt, synthetic construct
  misc_feature 1..27: note = Methyltransferase-like protein 7A (98-106)
  source 1..27: mol_type = other RNA
gaccccaaccctaatttcgagaagttt

SEQ ID NO: 55621 - RNA, 45 nt, synthetic construct
  misc_feature 1..45: note = Glucose-6-phosphate isomerase (276-290)
  source 1..45: mol_type = other RNA
gaccagcacttcagaaccacacccctggagaagaacgcccctgtg

SEQ ID NO: 55622 - RNA, 27 nt, synthetic construct
  misc_feature 1..27: note = Perilipin-2 (38-46)
  source 1..27: mol_type = other RNA
gaccagtacccctatctgaagagcgtg

SEQ ID NO: 55623 - RNA, 27 nt, synthetic construct
  misc_feature 1..27: note = T-cell activation Rho GTPase-activating protein (165-173)
  source 1..27: mol_type = other RNA
gacagcgccggcccccaggatgctaga

SEQ ID NO: 55624 - RNA, 42 nt, synthetic construct
  misc_feature 1..42: note = Ceruloplasmin (187-200)
  source 1..42: mol_type = other RNA
gacagcgccgtgttctttgagcagggcaccacaagaatcggg

SEQ ID NO: 55625 - RNA, 39 nt, synthetic construct
  misc_feature 1..39: note = T-complex protein 1 subunit beta (164-176)
  source 1..39: mol_type = other RNA
gacagctacctggatgagggcttcctccttgacaagaaa

SEQ ID NO: 55626 - RNA, 45 nt, synthetic construct
  misc_feature 1..45: note = T-complex protein 1 subunit beta (164-178)
  source 1..45: mol_type = other RNA
gacagctacctggatgagggcttcctccttgacaagaaaatcggg

SEQ ID NO: 55627 - RNA, 48 nt, synthetic construct
  misc_feature 1..48: note = SLAM family member 6 (103-118)
  source 1..48: mol_type = other RNA
gacaccggcagctacagagcccagatctccacaaagacttctgctaaa

SEQ ID NO: 55628 - RNA, 39 nt, synthetic construct
  misc_feature 1..39: note = SLAM family member 6 (193-205)
  source 1..39: mol_type = other RNA
gacaccatcacaatttacagcactataaaccactccaag

SEQ ID NO: 55629 - RNA, 27 nt, synthetic construct
  misc_feature 1..27: note = Interferon regulatory factor 9 (104-112)
  source 1..27: mol_type = other RNA
gacgtggccgagccctacaaggtctat

SEQ ID NO: 55630 - RNA, 45 nt, synthetic construct
  misc_feature 1..45: note = HLA class II histocompatibility antigen, DO beta chain (69-83)
  source 1..45: mol_type = other RNA
gacgtgggcatgttcgtcgccctgaccaagctcgggcagcccgat

SEQ ID NO: 55631 - RNA, 60 nt, synthetic construct
  misc_feature 1..60: note = Endoplasmin (783-802)
  source 1..60: mol_type = other RNA
gacgtgggcaccgatgaggaagaggaaacagccaaggagagcactgctgaaaaagacgag

SEQ ID NO: 55632 - RNA, 30 nt, synthetic construct
  misc_feature 1..30: note = Dynamin-binding protein (46-55)
  source 1..30: mol_type = other RNA
gacgtgaccggccagttccccagctccttt

SEQ ID NO: 55633 - RNA, 48 nt, synthetic construct
  misc_feature 1..48: note = Testican-2 (66-81)
  source 1..48: mol_type = other RNA
gaggacgattacatcaagagctgggaagacaaccagcaaggcgatgag

SEQ ID NO: 55634 - RNA, 27 nt, synthetic construct
  misc_feature 1..27: note = Elongator complex protein 3 (321-329)
  source 1..27: mol_type = other RNA
gaggaccccgatcaggacatcctgatt

SEQ ID NO: 55635 - RNA, 51 nt, synthetic construct
  misc_feature 1..51: note = SLAM family member 6 (102-118)
  source 1..51: mol_type = other RNA
gaggacaccggcagctacagagcccagatctccacaaagacttctgctaaa

SEQ ID NO: 55636 - RNA, 45 nt, synthetic construct
  misc_feature 1..45: note = Receptor-type tyrosine-protein phosphatase alpha (384-398)
  source 1..45: mol_type = other RNA
gaggaattcaagaaactgaccagcatcaagattcagaacgacaaa

SEQ ID NO: 55637 - RNA, 27 nt, synthetic construct
  misc_feature 1..27: note = ATP-binding cassette sub-family A member 6 (1600-1608)
  source 1..27: mol_type = other RNA
gaggaaatcgacaccacaatgagatgg

SEQ ID NO: 55638 - RNA, 51 nt, synthetic construct
  misc_feature 1..51: note = 14-3-3 protein beta/alpha (41-57)
  source 1..51: mol_type = other RNA
gaggaaagaaacctgctcagcgtggcctacaagaatgtcgttggcgctagg

SEQ ID NO: 55639 - RNA, 42 nt, synthetic construct
  misc_feature 1..42: note = Ras GTPase-activating-like protein IQGAP1 (61-74)
  source 1..42: mol_type = other RNA
gaggaagtgatcaccctgattagaagcaaccagcaactcgag

SEQ ID NO: 55640 - RNA, 45 nt, synthetic construct
  misc_feature 1..45: note = Ras GTPase-activating-like protein IQGAP1 (61-75)
  source 1..45: mol_type = other RNA
gaggaagtgatcaccctgattagaagcaaccagcaactcgagaat

SEQ ID NO: 55641 - RNA, 39 nt, synthetic construct
  misc_feature 1..39: note = Glycosyltransferase 8 domain-containing protein 1 (272-284)
  source 1..39: mol_type = other RNA
gagggcctgtacagcagaaccctcgccgggtccatcaca

SEQ ID NO: 55642 - RNA, 48 nt, synthetic construct
  misc_feature 1..48: note = Glycosyltransferase 8 domain-containing protein 1 (272-287)
  source 1..48: mol_type = other RNA
gagggcctgtacagcagaaccctcgccgggtccatcacaactccccct

SEQ ID NO: 55643 - RNA, 39 nt, synthetic construct
  misc_feature 1..39: note = Serine incorporator 3 (399-411)
  source 1..39: mol_type = other RNA
gagggcgtgcagtacagctattccctgttccacctcatg

SEQ ID NO: 55644 - RNA, 42 nt, synthetic construct
  misc_feature 1..42: note = Serine incorporator 3 (399-412)
  source 1..42: mol_type = other RNA
gagggcgtgcagtacagctattccctgttccacctcatgctt

SEQ ID NO: 55645 - RNA, 45 nt, synthetic construct
  misc_feature 1..45: note = Cystatin-C (47-61)
  source 1..45: mol_type = other RNA
gagggcgtgagaagggccctggacttcgctgtcggggaatacaac

SEQ ID NO: 55646 - RNA, 48 nt, synthetic construct
  misc_feature 1..48: note = Cystatin-C (47-62)
  source 1..48: mol_type = other RNA
gagggcgtgagaagggccctggacttcgctgtcggggaatacaacaag

SEQ ID NO: 55647 - RNA, 27 nt, synthetic construct
  misc_feature 1..27: note = Lysine-specific demethylase 2B (554-562)
  source 1..27: mol_type = other RNA
gagcacgccgacgatgaccccagcctg

SEQ ID NO: 55648 - RNA, 27 nt, synthetic construct
  misc_feature 1..27: note = Dynamin-binding protein (916-924)
  source 1..27: mol_type = other RNA
gagcacagcagagtgctgcagcaactc

SEQ ID NO: 55649 - RNA, 27 nt, synthetic construct
  misc_feature 1..27: note = Endoplasmic reticulum resident protein 44 (277-285)
  source 1..27: mol_type = other RNA
gagatcttccagaacgaagtggccaga

SEQ ID NO: 55650 - RNA, 45 nt, synthetic construct
  misc_feature 1..45: note = Calsyntenin-1 (203-217)
  source 1..45: mol_type = other RNA
gagatcattacccccgacgtgcctttcacagtcgataaggacggc

SEQ ID NO: 55651 - RNA, 48 nt, synthetic construct
  misc_feature 1..48: note = Perilipin-3 (64-79)
  source 1..48: mol_type = other RNA
gagaagggcgtgagaaccctgacagccgctgcagtcagcggggcccag

SEQ ID NO: 55652 - RNA, 51 nt, synthetic construct
  misc_feature 1..51: note = Perilipin-3 (64-80)
  source 1..51: mol_type = other RNA
gagaagggcgtgagaaccctgacagccgctgcagtcagcggggcccagccc

SEQ ID NO: 55653 - RNA, 54 nt, synthetic construct
  misc_feature 1..54: note = Perilipin-3 (64-81)
  source 1..54: mol_type = other RNA
gagaagggcgtgagaaccctgacagccgctgcagtcagcggggcccagcccatc

SEQ ID NO: 55654 - RNA, 39 nt, synthetic construct
  misc_feature 1..39: note = Glycosyltransferase 8 domain-containing protein 1 (347-359)
  source 1..39: mol_type = other RNA
gagaagtggtacatccccgaccctaccggcaaattcaac

SEQ ID NO: 55655 - RNA, 48 nt, synthetic construct
  misc_feature 1..48: note = Testican-2 (316-331)
  source 1..48: mol_type = other RNA
gagctggaaagaatccagattcaagaggccgctaagaaaaagcccggc

SEQ ID NO: 55656 - RNA, 42 nt, synthetic construct
  misc_feature 1..42: note = ATP synthase subunit alpha, mitochondrial (295-308)
  source 1..42: mol_type = other RNA
gagctgttctacaagggcatcagacccgccattaacgtgggg

SEQ ID NO: 55657 - RNA, 39 nt, synthetic construct
  misc_feature 1..39: note = Alpha-1B-glycoprotein (176-188)
  source 1..39: mol_type = other RNA
gagctgatcctcagcgacgaaacccttcccgcccctgag

SEQ ID NO: 55658 - RNA, 27 nt, synthetic construct
  misc_feature 1..27: note = NACHT, LRR and PYD domains-containing protein 2 (1026-1034)
  source 1..27: mol_type = other RNA
gagctgaacaagctccttgaagagatc

SEQ ID NO: 55659 - RNA, 27 nt, synthetic construct
  misc_feature 1..27: note = Baculoviral IAP repeat-containing protein 5 (95-103)
  source 1..27: mol_type = other RNA
gagctgaccctcggcgaattccttaag

SEQ ID NO: 55660 - RNA, 45 nt, synthetic construct
  misc_feature 1..45: note = SLAM family member 6 (191-205)
  source 1..45: mol_type = other RNA
gagaacgacaccatcacaatttacagcactataaatcactccaag

SEQ ID NO: 55661 - RNA, 60 nt, synthetic construct
  misc_feature 1..60: note = SLAM family member 6 (191-210)
  source 1..60: mol_type = other RNA
gagaacgacaccatcacaatttacagcactataaatcactccaaggaatctaaacccacg

SEQ ID NO: 55662 - RNA, 45 nt, synthetic construct
  misc_feature 1..45: note = Alpha-mannosidase 2 (64-78)
  source 1..45: mol_type = other RNA
gagaacaatgaaatcattagcaacataagagactccgtgatcaat

SEQ ID NO: 55663 - RNA, 24 nt, synthetic construct
  misc_feature 1..24: note = Proline-rich protein 12 (830-837)
  source 1..24: mol_type = other RNA
gagaacgtgaataagaaagactac

SEQ ID NO: 55664 - RNA, 45 nt, synthetic construct
  misc_feature 1..45: note = Low affinity immunoglobulin epsilon Fc receptor (20-34)
  source 1..45: mol_type = other RNA
gagcagcaaagactgaagagccaggacctcgaactttcctggaac

SEQ ID NO: 55665 - RNA, 27 nt, synthetic construct
  misc_feature 1..27: note = RNA polymerase II subunit A C-terminal domain phosphatase (86-94)
  source 1..27: mol_type = other RNA
gagagagccggcgtggtcagggaactg

SEQ ID NO: 55666 - RNA, 39 nt, synthetic construct
  misc_feature 1..39: note = Testican-2 (318-330)
  source 1..39: mol_type = other RNA
gagagaatccagattcaagaagccgctaagaaaaagccc

SEQ ID NO: 55667 - RNA, 42 nt, synthetic construct
  misc_feature 1..42: note = Testican-2 (318-331)
  source 1..42: mol_type = other RNA
gagagaatccagattcaagaagccgctaagaaaaagcccggc

SEQ ID NO: 55668 - RNA, 45 nt, synthetic construct
  misc_feature 1..45: note = Testican-2 (318-332)
  source 1..45: mol_type = other RNA
gagagaatccagattcaagaagccgctaagaaaaagcccggcata

SEQ ID NO: 55669 - RNA, 48 nt, synthetic construct
  misc_feature 1..48: note = 14-3-3 protein beta/alpha (42-57)
  source 1..48: mol_type = other RNA
gagagaaacctgctcagcgtggcctacaagaatgtcgttggcgctagg

SEQ ID NO: 55670 - RNA, 45 nt, synthetic construct
  misc_feature 1..45: note = Platelet endothelial cell adhesion molecule (92-106)
  source 1..45: mol_type = other RNA
gagagctacttcatccccgaagtgagaatttatgactccggcacc

SEQ ID NO: 55671 - RNA, 51 nt, synthetic construct
  misc_feature 1..51: note = DnaJ homolog subfamily C member 5 (180-196)
  source 1..51: mol_type = other RNA
gagaccacacagctgactgccgacagccacccctcctaccatacggatggc

SEQ ID NO: 55672 - RNA, 27 nt, synthetic construct
  misc_feature 1..27: note = DNA dC-dU-editing enzyme APOBEC-3D (299-307)
  source 1..27: mol_type = other RNA
gaggtggccgaattcctggctagacac

SEQ ID NO: 55673 - RNA, 27 nt, synthetic construct
  misc_feature 1..27: note = Zinc finger protein 638 (1173-1181)
  source 1..27: mol_type = other RNA
gaggtgaaggaagagatccccctggtc

SEQ ID NO: 55674 - RNA, 48 nt, synthetic construct
  misc_feature 1..48: note = Phosphoinositide-3-kinase-interacting protein 1 (127-142)
  source 1..48: mol_type = other RNA
gaggtgcaggtcttcgcccccgctaacgcactgcctgccagaagcgaa

SEQ ID NO: 55675 - RNA, 45 nt, synthetic construct
  misc_feature 1..45: note = Endoplasmin (359-373)
  source 1..45: mol_type = other RNA
gaggtgaccttcaagagcatcctgtttgtccccacatccgcccct

SEQ ID NO: 55676 - RNA, 36 nt, synthetic construct
  misc_feature 1..36: note = Fas apoptotic inhibitory molecule 3 (253-264)
  source 1..36: mol_type = other RNA
gagtacgtgagcctgtatcaccagcccgccgctatg

SEQ ID NO: 55677 - RNA, 42 nt, synthetic construct
  misc_feature 1..42: note = CD44 antigen (7-20)
  source 1..42: mol_type = other RNA
ttcgccggcgtgtttcacgtcgagaagaacgggagatacagc

SEQ ID NO: 55678 - RNA, 42 nt, synthetic construct
  misc_feature 1..42: note = HLA class II histocompatibility antigen, DM alpha chain (67-80)
  source 1..42: mol_type = other RNA
ttcgactttagccagaacaccagagtgcccaggctgcctgag

SEQ ID NO: 55679 - RNA, 69 nt, synthetic construct
  misc_feature 1..69: note = Heterogeneous nuclear ribonucleoprotein A1-like 2 (110-132)
  source 1..69: mol_type = other RNA
ttcggcaactacaataaccagagctccaattttgggcccatgaagggaggtaacttcggcgggagatct

SEQ ID NO: 55680 - RNA, 69 nt, synthetic construct
  misc_feature 1..69: note = Heterogeneous nuclear ribonucleoprotein A1-like 2 (120-142)
  source 1..69: mol_type = other RNA
ttcggccccatgaaggggggaaactttggtggcagaagctccgggccttacggaggcggtgggcagtat

SEQ ID NO: 55681 - RNA, 27 nt, synthetic construct
  misc_feature 1..27: note = T-cell activation Rho GTPase-activating protein (545-553)
  source 1..27: mol_type = other RNA
ttccagtacgccaaggagagctatatc

SEQ ID NO: 55682 - RNA, 27 nt, synthetic construct
  misc_feature 1..27: note = Transcription regulator protein BACH2 (345-353)
  source 1..27: mol_type = other RNA
ttcagcatcaccaagtccgtggagctg

SEQ ID NO: 55683 - RNA, 27 nt, synthetic construct
  misc_feature 1..27: note = Poly (ADP-ribose) polymerase 3 (264-272)
  source 1..27: mol_type = other RNA
ttctacaccgtgatcccccacaacttt

SEQ ID NO: 55684 - RNA, 30 nt, synthetic construct
  misc_feature 1..30: note = RNA polymerase II subunit A C-terminal domain phosphatase (40-49)
  source 1..30: mol_type = other RNA
ggcgccgctgtgagaatcgggagcgtcctg

SEQ ID NO: 55685 - RNA, 42 nt, synthetic construct
  misc_feature 1..42: note = Protein unc-13 homolog D (1010-1023)
  source 1..42: mol_type = other RNA
ggcgccgacgatctggagggggaagctttcctcccccttaga

SEQ ID NO: 55686 - RNA, 42 nt, synthetic construct
  misc_feature 1..42: note = Glycosyltransferase 8 domain-containing protein 1 (79-92)
  source 1..42: mol_type = other RNA
ggcgccatcgctgcaattaacagcatacagcacaataccaga

SEQ ID NO: 55687 - RNA, 36 nt, synthetic construct
  misc_feature 1..36: note = HLA class II histocompatibility antigen, DM alpha chain (89-100)
  source 1..36: mol_type = other RNA
ggcgacgcccccgctatcctgttcgataaggagttt

SEQ ID NO: 55688 - RNA, 48 nt, synthetic construct
  misc_feature 1..48: note = Ceruloplasmin (102-117)
  source 1..48: mol_type = other RNA
ggcgacaaggtgtacgtccacctgaaaaacctcgccagcagaccctat

SEQ ID NO: 55689 - RNA, 51 nt, synthetic construct
  misc_feature 1..51: note = Ceruloplasmin (102-118)
  source 1..51: mol_type = other RNA
ggcgacaaggtgtacgtccacctgaaaaacctcgccagcagaccctatacc

SEQ ID NO: 55690 - RNA, 27 nt, synthetic construct
  misc_feature 1..27: note = Zinc finger protein 107 (751-759)
  source 1..27: mol_type = other RNA
ggcgactacgggagagccttcaacctg

SEQ ID NO: 55691 - RNA, 27 nt, synthetic construct
  misc_feature 1..27: note = Cell division cycle-associated 7-like protein (377-385)
  source 1..27: mol_type = other RNA
ggcgaggacgtgagaagcgccctgctc

SEQ ID NO: 55692 - RNA, 27 nt, synthetic construct
  misc_feature 1..27: note = A-kinase anchor protein 2 (435-443)
  source 1..27: mol_type = other RNA
ggcgagttcaccagcgccagagctgtg

SEQ ID NO: 55693 - RNA, 27 nt, synthetic construct
  misc_feature 1..27: note = E3 ubiquitin-protein ligase Mdm2 (339-347)
  source 1..27: mol_type = other RNA
ggcgagatcagcgaaaaggccaaactg

SEQ ID NO: 55694 - RNA, 39 nt, synthetic construct
  misc_feature 1..39: note = MyoD family inhibitor domain-containing protein (68-80)
  source 1..39: mol_type = other RNA
ggcgagctgatcagaacccagccccaaaggctccctcag

SEQ ID NO: 55695 - RNA, 51 nt, synthetic construct
  misc_feature 1..51: note = Transferrin receptor protein 1 (15-31)
  source 1..51: mol_type = other RNA
ggcgagcccctgagctacaccagattctccctcgccaggcaggtggacggg

SEQ ID NO: 55696 - RNA, 54 nt, synthetic construct
  misc_feature 1..54: note = Heterogeneous nuclear ribonucleoprotein A3 (172-189)
  source 1..54: mol_type = other RNA
ggcgggggatacggtagcggcgggggatccggcggttatgggtctagaaggttc

SEQ ID NO: 55697 - RNA, 36 nt, synthetic construct
  misc_feature 1..36: note = Heterogeneous nuclear ribonucleoprotein A3 (159-170)
  source 1..36: mol_type = other RNA
ggcgggagcttcggaggtagatcctctggctcaccc

SEQ ID NO: 55698 - RNA, 27 nt, synthetic construct
  misc_feature 1..27: note = Probable ATP-dependent RNA helicase DDX46 (366-374)
  source 1..27: mol_type = other RNA
ggcatcgccaagaccgggagcggaaaa

SEQ ID NO: 55699 - RNA, 36 nt, synthetic construct
  misc_feature 1..36: note = Kynureninase (432-443)
  source 1..36: mol_type = other RNA
ggcatcagagtggcccccgtccctctgtacaacagc

SEQ ID NO: 55700 - RNA, 42 nt, synthetic construct
  misc_feature 1..42: note = Kynureninase (432-445)
  source 1..42: mol_type = other RNA
ggcatcagagtggcccccgtccctctgtacaacagcttccac

SEQ ID NO: 55701 - RNA, 39 nt, synthetic construct
  misc_feature 1..39: note = Peroxiredoxin-1 (129-141)
  source 1..39: mol_type = other RNA
ggcctgttcatcattgacgataaggggatactcagacag

SEQ ID NO: 55702 - RNA, 45 nt, synthetic construct
  misc_feature 1..45: note = Peroxiredoxin-1 (129-143)
  source 1..45: mol_type = other RNA
ggcctgttcatcattgacgataaggggatactcagacagatcacc

SEQ ID NO: 55703 - RNA, 39 nt, synthetic construct
  misc_feature 1..39: note = Peroxisomal multifunctional enzyme type 2 (20-32)
  source 1..39: mol_type = other RNA
ggcctggggagagcctacgctctcgcattcgccgagagg

SEQ ID NO: 55704 - RNA, 42 nt, synthetic construct
  misc_feature 1..42: note = Peroxisomal multifunctional enzyme type 2 (20-33)
  source 1..42: mol_type = other RNA
ggcctggggagagcctacgctctcgcattcgccgagagggga

SEQ ID NO: 55705 - RNA, 45 nt, synthetic construct
  misc_feature 1..45: note = Ragulator complex protein LAMTOR3 (18-32)
  source 1..45: mol_type = other RNA
ggcctgcacgccatcgtggtcagcgacagagatggggttcccgtg

SEQ ID NO: 55706 - RNA, 51 nt, synthetic construct
  misc_feature 1..51: note = Ragulator complex protein LAMTOR3 (18-34)
  source 1..51: mol_type = other RNA
ggcctgcacgccatcgtggtcagcgacagagatggggttcccgtgattaag

SEQ ID NO: 55707 - RNA, 42 nt, synthetic construct
  misc_feature 1..42: note = Interleukin-4 receptor subunit alpha (192-205)
  source 1..42: mol_type = other RNA
ggcaaccccgcctacagaagcttctccaattctctgtcacag

SEQ ID NO: 55708 - RNA, 51 nt, synthetic construct
  misc_feature 1..51: note = Polypeptide N-acetylgalactosaminyltransferase 1 (404-420)
  source 1..51: mol_type = other RNA
ggcaaccaggtgttcagctacaccgccaataaggagatcagaacagacgat

SEQ ID NO: 55709 - RNA, 36 nt, synthetic construct
  misc_feature 1..36: note = Fibromodulin (4-15)
  source 1..36: mol_type = other RNA
ggcaacagaatcaatgagttcagcatttcctctttt

SEQ ID NO: 55710 - RNA, 45 nt, synthetic construct
  misc_feature 1..45: note = Pericentriolar material 1 protein (1456-1470)
  source 1..45: mol_type = other RNA
ggcaacaccgtgatccacctggaccaggccctcgctagaatgagg

SEQ ID NO: 55711 - RNA, 42 nt, synthetic construct
  misc_feature 1..42: note = CD44 antigen (141-154)
  source 1..42: mol_type = other RNA
ggccccatcaccattacaatagtgaacagagacgggactagg

SEQ ID NO: 55712 - RNA, 27 nt, synthetic construct
  misc_feature 1..27: note = Probable ribosome biogenesis protein RLP24 (11-19)
  source 1..27: mol_type = other RNA
ggccccatctaccctgggcacggaatg

SEQ ID NO: 55713 - RNA, 45 nt, synthetic construct
  misc_feature 1..45: note = Cation-independent mannose-6-phosphate receptor (972-986)
  source 1..45: mol_type = other RNA
ggccccctgaagttcctccaccaggacatcgatagcgggcaagga

SEQ ID NO: 55714 - RNA, 51 nt, synthetic construct
  misc_feature 1..51: note = Cation-independent mannose-6-phosphate receptor (972-988)
  source 1..51: mol_type = other RNA
ggccccctgaagttcctccaccaggacatcgatagcgggcaaggaattaga

SEQ ID NO: 55715 - RNA, 45 nt, synthetic construct
  misc_feature 1..45: note = Heterogeneous nuclear ribonucleoprotein A1-like 2 (121-135)
  source 1..45: mol_type = other RNA
ggccccatgaaggggggaaacttcggtggcagaagctccgggcct

SEQ ID NO: 55716 - RNA, 39 nt, synthetic construct
  misc_feature 1..39: note = Protein CDV3 homolog (83-95)
  source 1..39: mol_type = other RNA
ggcccccctgagatctacagcgacacccagttcccatcc

SEQ ID NO: 55717 - RNA, 45 nt, synthetic construct
  misc_feature 1..45: note = Protein CDV3 homolog (83-97)
  source 1..45: mol_type = other RNA
ggcccccctgagatctacagcgacacccagttcccatccctgcaa

SEQ ID NO: 55718 - RNA, 48 nt, synthetic construct
  misc_feature 1..48: note = Interleukin-4 receptor subunit alpha (295-310)
  source 1..48: mol_type = other RNA
ggcccccctggggaggccggatacaaggctttcagctccctgctcgca

SEQ ID NO: 55719 - RNA, 54 nt, synthetic construct
  misc_feature 1..54: note = Interleukin-4 receptor subunit alpha (295-312)
  source 1..54: mol_type = other RNA
ggcccccctggggaggccggatacaaggctttcagctccctgctcgcatcttca

SEQ ID NO: 55720 - RNA, 57 nt, synthetic construct
  misc_feature 1..57: note = Interleukin-4 receptor subunit alpha (295-313)
  source 1..57: mol_type = other RNA
ggcccccctggggaggccggatacaaggctttcagctccctgctcgcatcttcagcc

SEQ ID NO: 55721 - RNA, 69 nt, synthetic construct
  misc_feature 1..69: note = Interleukin-4 receptor subunit alpha (295-317)
  source 1..69: mol_type = other RNA
ggcccccctggggaggccggatacaaggctttcagctccctgctcgcatcttcagccgtgagtccagaa

SEQ ID NO: 55722 - RNA, 72 nt, synthetic construct
  misc_feature 1..72: note = Interleukin-4 receptor subunit alpha (295-318)
  source 1..72: mol_type = other RNA
ggcccccctggggaggccggatacaaggctttcagctccctgctcgcatcttcagccgtgagtccagaaaaa

SEQ ID NO: 55723 - RNA, 30 nt, synthetic construct
  misc_feature 1..30: note = Ubiquitin-like protein 7 (263-272)
  source 1..30: mol_type = other RNA
ggccccagacctatcacccagagcgagctg

SEQ ID NO: 55724 - RNA, 39 nt, synthetic construct
  misc_feature 1..39: note = Heterogeneous nuclear ribonucleoprotein A1-like 2 (134-146)
  source 1..39: mol_type = other RNA
ggcccctacgggggaggtggccagtatttcgccaagcct

SEQ ID NO: 55725 - RNA, 48 nt, synthetic construct
  misc_feature 1..48: note = 60S ribosomal protein L3 (136-151)
  source 1..48: mol_type = other RNA
ggccaggggtacctgatcaaggacggaaaactcattaagaacaatgcc

SEQ ID NO: 55726 - RNA, 27 nt, synthetic construct
  misc_feature 1..27: note = Glycosylphosphatidylinositol anchor attachment 1 protein (448-456)
  source 1..27: mol_type = other RNA
ggccagcacgtggccacccaacatttc

SEQ ID NO: 55727 - RNA, 27 nt, synthetic construct
  misc_feature 1..27: note = AT-rich interactive domain-containing protein 5B (138-146)
  source 1..27: mol_type = other RNA
ggccagaaggaggccctgctcaaatac

SEQ ID NO: 55728 - RNA, 39 nt, synthetic construct
  misc_feature 1..39: note = ATP synthase subunit alpha, mitochondrial (147-159)
  source 1..39: mol_type = other RNA
ggccagaagagaagcaccgtggcccaactggtcaaaagg

SEQ ID NO: 55729 - RNA, 30 nt, synthetic construct
  misc_feature 1..30: note = A-kinase anchor protein 2 (343-352)
  source 1..30: mol_type = other RNA
ggccagagcacccccagactgttctccatc

SEQ ID NO: 55730 - RNA, 27 nt, synthetic construct
  misc_feature 1..27: note = Transcription regulator protein BACH2 (68-76)
  source 1..27: mol_type = other RNA
ggccagaccaagaacgacctggtggtc

SEQ ID NO: 55731 - RNA, 42 nt, synthetic construct
  misc_feature 1..42: note = B- and T-lymphocyte attenuator (193-206)
  source 1..42: mol_type = other RNA
ggcagagagatcaacctggtggacgcccacctcaagagcgaa

SEQ ID NO: 55732 - RNA, 30 nt, synthetic construct
  misc_feature 1..30: note = Ras-specific guanine nucleotide-releasing factor 1 (386-395)
  source 1..30: mol_type = other RNA
ggcagattcaagaacctgagggaggccctc

SEQ ID NO: 55733 - RNA, 27 nt, synthetic construct
  misc_feature 1..27: note = Protein asunder homolog (674-682)
  source 1..27: mol_type = other RNA
ggcagactgaacagcgtgaataacagg

SEQ ID NO: 55734 - RNA, 27 nt, synthetic construct
  misc_feature 1..27: note = Probable ribonuclease ZC3H12D (383-391)
  source 1..27: mol_type = other RNA
ggcagagtgcccgggcctctgagcctc

SEQ ID NO: 55735 - RNA, 42 nt, synthetic construct
  misc_feature 1..42: note = Carbohydrate sulfotransferase 2 (176-189)
  source 1..42: mol_type = other RNA
ggcagctccttctttggggagctgttcaaccagaatcccgaa

SEQ ID NO: 55736 - RNA, 42 nt, synthetic construct
  misc_feature 1..42: note = SLAM family member 6 (105-118)
  source 1..42: mol_type = other RNA
ggcagctacagagcccagatctccaccaagacatctgctaaa

SEQ ID NO: 55737 - RNA, 36 nt, synthetic construct
  misc_feature 1..36: note = Plasma membrane calcium-transporting ATPase 1 (258-269)
  source 1..36: mol_type = other RNA
ggcagctacagaatcttctccaagggggcctctgag

SEQ ID NO: 55738 - RNA, 30 nt, synthetic construct
  misc_feature 1..30: note = Kelch-like ECH-associated protein 1 (419-428)
  source 1..30: mol_type = other RNA
ggcgtgatcgacgggcacatttacgccgtc

SEQ ID NO: 55739 - RNA, 36 nt, synthetic construct
  misc_feature 1..36: note = Serine incorporator 3 (400-411)
  source 1..36: mol_type = other RNA
ggcgtgcagtacagctattccctgttccacctcatg

SEQ ID NO: 55740 - RNA, 39 nt, synthetic construct
  misc_feature 1..39: note = Serine incorporator 3 (400-412)
  source 1..39: mol_type = other RNA
ggcgtgcagtacagctattccctgttccacctcatgctt

SEQ ID NO: 55741 - RNA, 48 nt, synthetic construct
  misc_feature 1..48: note = Interleukin-4 receptor subunit alpha (301-316)
  source 1..48: mol_type = other RNA
ggctacaaggccttcagctccctgctcgcttcttcagcagtgagtccc

SEQ ID NO: 55742 - RNA, 51 nt, synthetic construct
  misc_feature 1..51: note = Interleukin-4 receptor subunit alpha (301-317)
  source 1..51: mol_type = other RNA
ggctacaaggccttcagctccctgctcgcttcttcagcagtgagtcccgag

SEQ ID NO: 55743 - RNA, 27 nt, synthetic construct
  misc_feature 1..27: note = Dystrophin (325-333)
  source 1..27: mol_type = other RNA
ggctacctgcccgtgcagaccgtcctc

SEQ ID NO: 55744 - RNA, 39 nt, synthetic construct
  misc_feature 1..39: note = Ragulator complex protein LAMTOR3 (20-32)
  source 1..39: mol_type = other RNA
cacgccatcgtggtcagcgacagagatggcgttcccgtg

SEQ ID NO: 55745 - RNA, 27 nt, synthetic construct
  misc_feature 1..27: note = HLA class II histocompatibility antigen, DM alpha chain (87-95)
  source 1..27: mol_type = other RNA
cacgagatcgacagatacaccgccatt

SEQ ID NO: 55746 - RNA, 27 nt, synthetic construct
  misc_feature 1..27: note = Elongator complex protein 3 (261-269)
  source 1..27: mol_type = other RNA
cacggcaacctgagagagctcgccctt

SEQ ID NO: 55747 - RNA, 42 nt, synthetic construct
  misc_feature 1..42: note = Fibromodulin (137-150)
  source 1..42: mol_type = other RNA
cacggcaaccagatcaccagcgacaaggtggggagaaaagtc

SEQ ID NO: 55748 - RNA, 30 nt, synthetic construct
  misc_feature 1..30: note = Poly (ADP-ribose) polymerase 3 (457-466)
  source 1..30: mol_type = other RNA
caccatatcaacaccgacaatcccagcctg

SEQ ID NO: 55749 - RNA, 27 nt, synthetic construct
  misc_feature 1..27: note = DmX-like protein 1 (888-896)
  source 1..27: mol_type = other RNA
cacctgaagagcatccccgtgtccctc

SEQ ID NO: 55750 - RNA, 27 nt, synthetic construct
  misc_feature 1..27: note = Cyclin-dependent kinase 14 (229-237)
  source 1..27: mol_type = other RNA
caccccgacaacgtgaagctgttcctc

SEQ ID NO: 55751 - RNA, 42 nt, synthetic construct
  misc_feature 1..42: note = Ceramide glucosyltransferase (193-206)
  source 1..42: mol_type = other RNA
caccccagatactatatcagcgccaacgtgaccggcttcaag

SEQ ID NO: 55752 - RNA, 42 nt, synthetic construct
  misc_feature 1..42: note = Beta-1,4-galactosyltransferase 1 (199-212)
  source 1..42: mol_type = other RNA
caccccgtgctgcagagacaacagctcgactacggcatctat

SEQ ID NO: 55753 - RNA, 27 nt, synthetic construct
  misc_feature 1..27: note = Hematopoietic SH2 domain-containing protein (64-72)
  source 1..27: mol_type = other RNA
cacgtgggctacaccctgagctataag

SEQ ID NO: 55754 - RNA, 27 nt, synthetic construct
  misc_feature 1..27: note = Cytoskeleton-associated protein 4 (129-137)
  source 1..27: mol_type = other RNA
cacgtgctggaggaagtccagcaagtt

SEQ ID NO: 55755 - RNA, 45 nt, synthetic construct
  misc_feature 1..45: note = Voltage-dependent anion-selective channel protein 2 (221-235)
  source 1..45: mol_type = other RNA
atcgccgctaagtaccagctggaccccaccgcaagcatttccgcc

SEQ ID NO: 55756 - RNA, 48 nt, synthetic construct
  misc_feature 1..48: note = Voltage-dependent anion-selective channel protein 2 (221-236)
  source 1..48: mol_type = other RNA
atcgccgctaagtaccagctggaccccaccgcaagcatttccgccaaa

SEQ ID NO: 55757 - RNA, 42 nt, synthetic construct
  misc_feature 1..42: note = 14-3-3 protein zeta/delta (61-74)
  source 1..42: mol_type = other RNA
atcgccgagctggacaccctcagcgaagagtcctacaaggat

SEQ ID NO: 55758 - RNA, 45 nt, synthetic construct
  misc_feature 1..45: note = 14-3-3 protein zeta/delta (61-75)
  source 1..45: mol_type = other RNA
atcgccgagctggacaccctcagcgaagagtcctacaaggattct

SEQ ID NO: 55759 - RNA, 36 nt, synthetic construct
  misc_feature 1..36: note = Golgi apparatus protein 1 (362-373)
  source 1..36: mol_type = other RNA
atcgcccaggactacaaggtgagctattccctggct

SEQ ID NO: 55760 - RNA, 39 nt, synthetic construct
  misc_feature 1..39: note = Golgi apparatus protein 1 (362-374)
  source 1..39: mol_type = other RNA
atcgcccaggactacaaggtgagctattccctggctaaa

SEQ ID NO: 55761 - RNA, 27 nt, synthetic construct
  misc_feature 1..27: note = Perilipin-2 (313-321)
  source 1..27: mol_type = other RNA
atcgccagaaacctgacccagcaactc

SEQ ID NO: 55762 - RNA, 45 nt, synthetic construct
  misc_feature 1..45: note = 60S ribosomal protein L3 (216-230)
  source 1..45: mol_type = other RNA
atcgacaccacaagcaagttcggccacgggagatttcagactatg

SEQ ID NO: 55763 - RNA, 57 nt, synthetic construct
  misc_feature 1..57: note = 60S ribosomal protein L3 (65-83)
  source 1..57: mol_type = other RNA
atcgacgtgattggcgtcaccaaggggaaaggatacaagggtgttacaagcagatgg

SEQ ID NO: 55764 - RNA, 30 nt, synthetic construct
  misc_feature 1..30: note = Plexin-B3 (1741-1750)
  source 1..30: mol_type = other RNA
atcgaggaccccggcaccctgcacatttgg

SEQ ID NO: 55765 - RNA, 42 nt, synthetic construct
  misc_feature 1..42: note = Polypeptide N-acetylgalactosaminyltransferase 1 (88-101)
  source 1..42: mol_type = other RNA
atcgaggaaattgtgctggtcgacgatgccagcgagagagac

SEQ ID NO: 55766 - RNA, 45 nt, synthetic construct
  misc_feature 1..45: note = Polypeptide N-acetylgalactosaminyltransferase 1 (88-102)
  source 1..45: mol_type = other RNA
atcgaggaaattgtgctggtcgacgatgccagcgagagagacttc

SEQ ID NO: 55767 - RNA, 27 nt, synthetic construct
  misc_feature 1..27: note = Perilipin-2 (306-314)
  source 1..27: mol_type = other RNA
atcgagagcagaaccctggccattgct

SEQ ID NO: 55768 - RNA, 45 nt, synthetic construct
  misc_feature 1..45: note = Ras-related protein Rab-11A (44-58)
  source 1..45: mol_type = other RNA
atcggcgtggagttcgccaccagaagcattcaggtcgacgggaag

SEQ ID NO: 55769 - RNA, 27 nt, synthetic construct
  misc_feature 1..27: note = Elongation factor Tu, mitochondrial (171-179)
  source 1..27: mol_type = other RNA
atcggcgtggagcacgtcgttgtgtac

SEQ ID NO: 55770 - RNA, 42 nt, synthetic construct
  misc_feature 1..42: note = Calsyntenin-1 (204-217)
  source 1..42: mol_type = other RNA
atcattacccccgacgtgcctttcacagtcgataaggacggc

SEQ ID NO: 55771 - RNA, 48 nt, synthetic construct
  misc_feature 1..48: note = Fas apoptotic inhibitory molecule 3 (68-83)
  source 1..48: mol_type = other RNA
atcaaggccgagtacaaaggcagagtgaccctgaagcagtatcccagg

SEQ ID NO: 55772 - RNA, 24 nt, synthetic construct
  misc_feature 1..24: note = Dynamin-binding protein (527-534)
  source 1..24: mol_type = other RNA
atcaaggtgagcaaacagctgctc

SEQ ID NO: 55773 - RNA, 27 nt, synthetic construct
  misc_feature 1..27: note = ATP-binding cassette sub-family A member 6 (1270-1278)
  source 1..27: mol_type = other RNA
atcctggacgagaagcccgtgattata
